(19) United States
(12) Patent Application Publication
(10) Pub. No.: US 2005/0153317 A1
(43) Pub. Date: Jul. 14, 2005

(54) Methods and systems for inferring traits to breed and manage non-beef livestock

(75) Inventors: Sue DeNise, Davis, CA (US); David Rosenfeld, Sacramento, CA (US); Richard Kerr, Davis, CA (US); Stephen Bates, Davis, CA (US); Tom Holm, Salt Lake City, UT (US)

Correspondence Address: DLA PIPER RUDNICK GRAY CARY US, LLP, 4365 EXECUTIVE DRIVE, SUITE 1100, SAN DIEGO, CA, 92121-2133, US

(73) Assignee: Metamorphix, Inc., Savage, MD (US)

(21) Appl. No.: 10/972,079

(22) Filed: Oct. 22, 2004

Related U.S. Application Data
(60) Provisional application No. 60/514,333, filed on Oct. 24, 2003.

(51) Int. Cl. C12Q 1/68

(52) U.S. Cl. 435/6

(57) ABSTRACT

Methods and systems are provided for managing non-beef livestock subjects in order to maximize their individual potential performance and the value of a product from the non-beef livestock subjects, and to maximize profits obtained in marketing the non-beef livestock subjects. The methods and systems draw an inference of a trait of a non-beef livestock subject by determining the nucleotide occurrence of at least one non-beef livestock SNP that is determined to be associated with the trait. The inference is used in methods of the present invention to establish the economic value of a non-beef livestock subject, to improve profits related to selling beef from a non-beef livestock subject; to manage non-beef livestock subjects, to sort non-beef livestock subjects; to improve the genetics of a non-beef livestock population by selecting and breeding of non-beef livestock subjects, to clone a non-beef livestock subject with a specific trait, to track meat or another commercial product of a non-beef livestock subject; and to diagnose a health condition of a non-beef livestock subject. Certain embodiments of the present invention provide methods, systems, and kits are directed to inferences of a trait related to milk or a dairy product in a livestock subject.

### CROSS REFERENCE TO RELATED APPLICATIONS

[0001] This application claims the benefit of priority under 35 U.S.C. § 119(e) of U.S. Ser. No. 60/514,333, filed Oct. 24, 2003, the entire content of which is incorporated herein by reference.

### BACKGROUND OF THE INVENTION

[0002] 1. Field of the Invention

[0003] The invention relates generally to genomic association analyses and more specifically to the use of single nucleotide polymorphisms as a determinant of trait identification for management, selection and mating system of non-beef livestock.

[0004] 2. Background Information

[0005] Currently there are no cost effective methods for identifying non-beef livestock that give accurate prediction of the genetic potential to produce products such as meat or dairy products. Such information could be used for example for chicken or swine breeders to identify desirable animals for breeding. The information could also be used by chicken or swine processors to select or value animals. Thus, it is desirable to have a method that can be used to assess the potential of live non-beef livestock, particularly young non-beef livestock well in advance of the arrival of the animal at the packing house.

[0006] Therefore, there remains a need for cost effective methods for identifying non-beef livestock that are based on genetic information to draw accurate inferences regarding traits the non-beef livestock.

### SUMMARY OF THE INVENTION

[0007] In order to solve the previous problems, the present invention provides methods and systems for managing, selecting and mating non-beef livestock. These methods for identification and monitoring of key characteristics of individual animals and management of individual animals maximize their individual potential performance and product value. The methods of invention provide systems to collect, record and store such data by individual animal identification so that it is usable to improve future animals bred by the breeder. The methods and systems of the present invention utilize information regarding genetic diversity among non-beef livestock, particularly single nucleotide polymorphisms (SNPs), and the effect of nucleotide occurrences of SNPs on important traits.

[0008] The present invention further provides methods for selecting a given animal for shipment at the optimum time, considering the animal's condition, performance and market factors, the ability to grow the animal to its optimum individual potential of physical and economic performance, and the ability to record and preserve each animal's performance history in during processing for use in cultivating and managing current and future animals for production of various products including meat and dairy products. These methods allow management of the current diversity of chickens and swine, for example, to improve the chicken and pork product quality and uniformity, thus improving revenue generated from sales of these products.

[0009] This invention identifies animals that have superior traits, predicted very accurately, that can be used to identify parents of the next generation through selection. These methods for example, can be used to create pure lines of chickens or pigs which could be used to produce meat chickens or pigs, respectively. Therefore, the improved traits would, through time, flow to the entire population of animals. This invention provides a method for determining the optimum male and female parent to maximize the genetic components of dominance and epistasis thus maximizing heterosis and hybrid vigor in the market animals.

[0010] The present invention in certain embodiments provides a method for inferring a trait of a non-beef livestock subject from a nucleic acid sample of the subject. The method includes identifying in the nucleic acid sample, at least one nucleotide occurrence of a single nucleotide polymorphism (SNP). The nucleotide occurrence is associated with the trait, thereby inferring the trait. The nucleotide occurrence of at least 2 SNPs can be determined.

[0011] The SNPs can make up a haplotype and the method can identify a haplotype allele that is associated with the trait. Furthermore, the method can include identifying a diploid pair of haplotype alleles.

[0012] The non-beef livestock subject can be an alpaca, a buffalo, a cow, a goat, a horse, a llama, a sheep, a pig, an ostrich, a chicken, a turkey, an elk, an emu, a deer, a lamb, or a duck. In certain embodiments, the non-beef livestock subject is a pig. In these embodiments, the trait can be age at puberty, reproductive potential, number of pigs farrowed alive, birth weight of pigs farrowed, longevity, weight of subject at a target timepoint, number of pigs weaned, percent of pigs weaned, pigs marketed/sow/year, average weaning weight of pigs, rate of gain, days to a target weight, meat quality, fiber quality, fiber yield, feed efficiency, manure characteristic, muscle content, fat content (leanness), disease resistance, disease susceptibility, feed intake, protein content, bone content, maintenance energy requirement, mature size, amino acid profile, fatty acid profile, stress susceptibility and response, digestive capacity, production of calpain, calpastatin activity and myostatin activity, pattern of fat deposition, fertility, ovulation rate, optimal diet, or conception rate. Manure characteristics include quantity, organic matter, plant nutrients, or salts.

[0013] In certain embodiments, the non-beef livestock subject is a bird or avian species. For example, the bird or avian species can be a chicken or a turkey. In these embodiments, the trait can be egg production, feed efficiency, livability, meat yield, longevity, white meat yield, dark meat yield, disease resistance, disease susceptibility, optimal diet time to maturity, time to a target weight, weight at a target timepoint, average daily weight gain, meat quality, muscle content, fat content, feed intake, protein content, bone content, maintenance energy requirement, mature size, amino acid profile, fatty acid profile, stress susceptibility and response, digestive capacity, production of calpain, calpastatin activity and myostatin activity, pattern of fat deposition, fertility, ovulation rate, or conception rate. In one embodiment, the trait is resistance to Salmonella infection, ascites, and listeria infection.

[0014] In certain embodiments, the non-beef livestock subject is a bird or avian species that produces eggs for mammalian consumption. In certain embodiments, the bird or avian species is a chicken and the trait can be a characteristic of an egg of the bird or a characteristic of a product of the egg.

[0015] The egg characteristic can be quality, size, shape, shelf-life, freshness, cholesterol content, color, biotin content, calcium content, shell quality, yolk color, lecithin content, number of yolks, yolk content, white content, vitamin content, vitamin D content, nutrient density, protein content, albumen content, protein quality, avidin content, fat content, saturated fat content, unsaturated fat content, interior egg quality, number of blood spots, air cell size, grade, a bloom characteristic, chalaza prevalence or appearance, ease of peeling, likelihood of being a restricted egg, Salmonella content.

[0016] The inferences discussed above, can be used for the following aspects of the invention: to establish the economic value of a non-beef livestock subject; to improve profits related to selling a product from a non-beef livestock subject; to manage non-beef livestock subjects; to sort non-beef livestock subjects; to improve the genetics of a non-beef livestock population by selecting and breeding of non-beef livestock subjects; to clone a non-beef livestock subject with a specific trait, a combination of traits, or a combination of SNP markers that predict a trait; to track meat or another commercial product of a non-beef livestock subject; to certify a specific product based on known characteristics; to diagnose a health condition of a non-beef livestock subject; and to select a pig or other non-beef species for use in xenotransplantation.

[0017] In another aspect, the present invention provides a method for identifying a non-beef livestock genetic marker that influences a trait. The method includes analyzing non-beef livestock genetic markers for association with the trait. The method can also involve determining nucleotide occurrences of at least two SNPs that influence the trait or a group of traits.

[0018] In another aspect, the present invention provides a high-throughput system for determining the nucleotide occurrences at a series of non-beef livestock single nucleotide polymorphisms (SNPs). The system includes one of the following: solid support to which a series of oligonucleotides can be directly or indirectly attached, homogeneous assay medium and a microfluidic device. The system is used to determine the nucleotide occurrence of non-beef livestock SNPs that are associated with a trait.

[0019] In another aspect, the present invention provides a computer system that includes a database having records containing information regarding a series of non-beef livestock single nucleotide polymorphisms (SNPs), and a user interface allowing a user to input nucleotide occurrences of the series of SNPs for a non-beef livestock subject. The user interface can be used to query the database and display results of the query. The database can include records representing some or all of the SNPs of a non-beef livestock SNP map, which can be a high-density non-beef SNP map. The database can also include information regarding haplotypes and haplotype alleles from the SNPs. Furthermore, the database can include information regarding traits and/or traits that are associated with some or all of the SNPs and/or haplotypes. In these embodiments the computer system can be used, for example, for any of the aspects of the invention that infer a trait of a non-beef livestock subject.

[0020] Certain embodiments of the present invention provide methods, systems, and kits identical to those discussed above, and herein, except that the trait is milk production, a trait affecting milk production, a characteristic of milk, a characteristic of a dairy product, milk component composition, or mastitis resistance. In these embodiments, the methods, systems, and kits relate to all livestock (i.e. they include beef subjects).

[0021] Accordingly, in certain embodiments, the present invention provides a method for inferring from a nucleic acid sample of a livestock, a trait of milk production, a trait affecting milk production, a characteristic of milk, a characteristic of a dairy product, milk component composition including fat, protein, and bioreactive molecules, or mastitis resistance, for the livestock. The method includes identifying in the nucleic acid sample, at least one nucleotide occurrence of a single nucleotide polymorphism (SNP), wherein the nucleotide occurrence is associated with the trait and wherein the trait is thereby inferred.

[0022] The livestock subject can be, for example, a cow, a goat, a sheep, a buffalo, a camel, a horse, or a deer. The trait can be, for example, milk protein content, milk fat content, milk amino acid profile, milk fatty acid profile, bioreactive molecule content, milk taste appeal, or taste appeal of a dairy product. Furthermore, the trait can be taste appeal of milk, cheese, yogurt, cream, butter, or ice cream. Alternatively, the trait can be milk or dairy product solids content, calcium content, riboflavin content, nitrogen potassium content, protein content, casein content, fat content, whey content, vitamin A content, vitamin D content, or phosphorus content. The trait can also be lactation period or production in milk of a transgenic protein or transgenically-produced pharmaceutical product.

[0023] In one aspect, the methods of the invention can be utilized in combination with various hypermutable sequences, such as microsatellite nucleic acid sequences to infer traits of non-beef livestock. As used herein, the term “hypermutable” refers to a nucleic acid sequence that is susceptible to instability, thus resulting in nucleic acid alterations. Such alterations include the deletion and addition of nucleotides. The hypermutable sequences of the invention are most often microsatellite DNA sequences which, by definition, are small tandem repeat DNA sequences. Thus, a combination of SNP analysis and microsatellite analysis may be used to infer a trait(s) of a non-beef livestock subject.

[0024] In another embodiment, a method for identifying the parentage of a non-beef test subject is provided. The method includes obtaining a nucleic acid sample from the test subject and identifying in the nucleic acid sample at least one single nucleotide polymorphism (SNP) corresponding to the nucleotide at position 600 of any one of SEQ ID NOs:1-96,631, or the complement thereof. The method optionally includes repeating the identification for additional subjects. The method further includes determining the alleles corresponding to each SNP identified and comparing the alleles to putative parents of the test subject. Generally parents not possessing at least one allele in common with the test subject are excluded. The non-beef livestock subject can be derived from an avian species, including chickens or turkeys.

[0025] In another embodiment, a method for determining the identity of a non-beef test subject is provided. The method includes obtaining a nucleic acid sample from the test subject by a method comprising identifying in the nucleic acid sample at least one single nucleotide polymorphism (SNP) corresponding to the nucleotide at position 600 of any one of SEQ ID NOs:1-96,631, or the complement thereof. The method optionally includes repeating the identification for additional subjects. The method further includes determining the two alleles corresponding to each SNP identified and comparing the alleles to the alleles identified in a known sample previously obtained from the test subject.

[0026] In another embodiment a method to infer breed or line of a non-beef test subject from a nucleic acid sample obtained from the subject is provided. The method includes identifying in the nucleic acid sample, at least one nucleotide occurrence of at least one single nucleotide polymorphism (SNP) corresponding to the nucleotide at position 600 of any one of SEQ ID NOS:1-96,631.

[0027] In another embodiment, a method of generating a genome discovery map is provided. The method includes selecting a plurality of single nucleotide polymorphism (SNP) markers selected from at least two of the SNP markers at position 600 of any of SEQ ID NOs:1-96,631. Generally, each marker in the series will be separated by approximately 150,000 bp. The method further includes generating the genome discovery map based upon the selected markers. In an exemplary aspect, the genome discovery map is a whole genome discovery map. The plurality of single nucleotide polymorphism (SNP) markers can includes about 10, 100, 1000, 8000 or 10000 markers. The plurality of single nucleotide polymorphism (SNP) markers, or the number of markers indicated by the amount of linkage disequilibrium in each non-beef species, are can further be selected based upon dispersion across the entire genome.

[0028] In another embodiment, a kit for determining nucleotide occurrences of non-beef SNPs is provided. In general, the kit can contain an oligonucleotide probe, primer, or primer pair, or combinations thereof, for identifying the nucleotide occurrence of at least one non-beef single nucleotide polymorphism (SNP) corresponding to position 600 of any one SE Q ID NOs:1-96,631, or complement thereof. The kit can further include one or more detectable labels.

[0029] In another embodiment, a database comprising a plurality of single nucleotide polymorphisms (SNP) selected from at least two of the SNP markers at position 600 of any of SEQ ID NOs:1-96,631, or complement thereof, is provided. Also provided is a database that includes allele frequencies generated by analyzing the SNP database.

[0030] In another embodiment, an isolated single nucleotide polymorphism (SNP) corresponding to a nucleotide at position 600 of any one of SEQ ID NOs:1-96,631, or the complement thereof, is provided. Also provided is an isolated oligonucleotide comprising a nucleotide corresponding to a nucleotide at position 600 of any one of SEQ ID NOs:1-96,631, or the complement thereof. Also provided is an isolated oligonucleotide comprising any one of SEQ ID NOs:1-96,631 and an isolated oligonucleotide selected from the group consisting of SEQ ID NOs:1-96,631. The invention further encompasses the complement of the aforementioned oligonucleotides.

[0031] In another embodiment, a panel comprising at least one single nucleotide polymorphism (SNP) corresponding to a nucleotide at position 600 of any one of SEQ ID NOs:1-96,631, or the complement thereof, is provided.

[0032] In yet another embodiment, a computer-based method for identifying or inferring a trait of a non-beef test subject is provided. The method includes obtaining a nucleic acid sample from the non-beef subject and identifying in the nucleic acid sample at least one nucleotide occurrence of at least one single nucleotide polymorphism (SNP) corresponding to position 600 of any one of SEQ ID NOs:1-96,631, or complement thereof. The method further includes searching a database that includes a plurality of single nucleotide polymorphism (SNP) markers selected from at least two of the SNP markers at position 600 of any of SEQ ID NOs:1-96,631, wherein the database is generated from a nucleic acid sample obtained from a non-beef non-test subject. The method further includes retrieving the information from the database and optionally storing the information in a memory location associated with a user such that the information may be subsequently accessed and viewed by the user.

### DETAILED DESCRIPTION OF THE INVENTION

[0033] The specification hereby incorporates by reference in their entirety, the files contained on the two compact discs filed herewith. The first compact disc includes a file entitled “MMI1110-2 Chicken SNP Table 1.txt,” created Oct. 12, 2004, which is 6,736 kilobytes in size. The second disc includes a sequence listing which is included in a file entitled “MMI110-2 Sequence Listing.txt,” created Oct. 12, 2004, which is 79,891 kilobytes in size. Duplicates of the aforementioned discs contain the appropriately labeled file.

[0034] The methods of the invention are particularly well suited for managing, selecting or mating non-beef livestock subjects. The methods allow for the ability to identify and monitor key characteristics of individual animals and manage those individual animals to maximize their individual potential performance or the value of products derived from the animals. Furthermore, the methods of the inventions provide systems to collect, record and store such data by individual animal identification so that it is usable to improve future animals bred by a breeder and processed by a processor. Specific embodiments of the invention are exemplified in Exhibit A and Exhibit B, as provided in U.S. Ser. No. 60/514,333, filed Oct. 24, 2003, and incorporated herein by reference.

[0035] The methods and systems allow for the ability to identify and monitor key characteristics of individual animals and manage those individual animals to maximize their individual potential performance and product value. Furthermore, the methods of the inventions provide systems to collect, record and store such data by individual animal identification so that it is usable to improve future animals bred by the producer and managed by the feedlot. These methods can utilize computer models to utilize information regarding nucleotide occurrences of SNPs and their association with traits, to predict an economic value for a non-beef livestock subject.

[0036] Accordingly, a method according to this aspect of the invention includes inferring a trait of the non-beef livestock subject from a nucleic acid sample of the non-beef livestock subject. The inference is drawn by a method that includes identifying in the sample, a nucleotide occurrence for at least one single nucleotide polymorphism (SNP), wherein the nucleotide occurrence is associated with the trait; and wherein the trait affects the physical characteristic. Furthermore, the method includes managing at least one of food intake, diet composition, administration of feed additives or pharmacological treatments such as vaccines, antibiotics, hormones and other metabolic modifiers, age and weight at which diet changes or pharmacological treatments are imposed, days fed specific diets, castration, feeding methods and management, imposition of internal or external measurements and environment of the non-beef livestock subject based on the inferred trait. This management results in a maximization of physical characteristic of a non-beef livestock subject, for example to obtain a maximum amount of high grade pork from a pig, and/or to increase the chances of obtaining high grade pork with excellent tenderness and high yield from the pig, taking into account the inputs required to reach those endpoints.

[0037] The method can be used to discriminate among those animals where growth implants, vitamins, and other interventions could provide the greatest value. For example, animals that do not have the traits to reach high quality pork may be given growth implants until the end of a feeding period, thus maximizing feed efficiency.

[0038] The method also allows a processor to predict the quality and yield grades of non-beef livestock in the system to optimize marketing of the fed animal or the product to meet target market specification. The method also provides information to the processor for purchase decisions based on the predicted economic returns from a specific supplier. Furthermore, The method allows the creation of integrated programs spanning breeders, processors, packers, and retailers.

[0039] The present invention further provides methods for selecting a given animal for shipment at the optimum time, considering the animal's condition, performance and market factors, the ability to grow the animal to its optimum individual potential of physical and economic performance, and the ability to record and preserve each animal's performance history in the feedlot and carcass data from the packing plant for use in cultivating and managing current and future animals for production of various products such as pork and eggs. These methods allow management of the current diversity of non-beef livestock to improve the quality and uniformity of products from the non-beef livestock, thus improving revenue generated from sales of the products.

[0040] The methods can use a bioeconomic valuation method that establishes the economic value of a non-beef livestock subject, or a group of non-beef livestock subjects, to optimize profits from production of products from the subjects. Accordingly, in another aspect, the present invention provides a method for establishing the economic value of a non-beef livestock subject. According to the method, an inference is drawn regarding a trait of the non-beef livestock subject from a nucleic acid sample of the non-beef livestock subject. The inference is drawn by a method that includes identifying nucleotide occurrences for at least one single nucleotide polymorphism (SNP), wherein the nucleotide occurrence is associated with the trait, and wherein the trait affects the value of the non-beef livestock subject.

[0041] The method includes identification of the causative mutation influencing the trait directly or the determination of 1 or more SNPs that are in linkage disequilibrium with the associated trait.

[0042] The method can include a determination of the nucleotide occurrence of at least 2 SNPs. At least 2 SNPs can form all or a portion of a haplotype, wherein the method identifies a haplotype allele that is in linkage disequilibrium and thus associated with the trait. Furthermore, the method can include identifying a diploid pair of haplotype alleles.

[0043] A method according to this aspect of the invention can further include using traditional factors affecting the economic value of the non-beef livestock subject in combination with the inference based on nucleotide occurrence data to determine the economic value of the non-beef livestock subject.

[0044] As used herein, the term “at least one”, when used in reference to a gene, SNP, haplotype, or the like, means 1, 2, 3, 4, 5, 6, 7, 8, 9, 10, etc., up to and including all of the haplotype alleles, genes, and/or SNPs of the non-beef livestock genome. Reference to “at least a second” gene, SNP, or the like, means two or more, i.e., 2, 3, 4, 5, 6, 7, 8, 9, 10, etc., non-beef livestock genes, SNPs, or the like.

[0045] Polymorphisms are allelic variants that occur in a population that can be a single nucleotide difference present at a locus, or can be an insertion or deletion of one, a few or many consecutive nucleotides. As such, a single nucleotide polymorphism (SNP) is characterized by the presence in a population of one or two, three or four nucleotides (i.e., adenosine, cytosine, guanosine or thymidine), typically less than all four nucleotides, at a particular locus in a genome such as a non-beef livestock genome. It will be recognized that, while the methods of the invention are exemplified primarily by the detection of SNPs, the disclosed methods or others known in the art similarly can be used to identify other types of non-beef livestock polymorphisms, which typically involve more than one nucleotide.

[0046] The term “haplotypes” as used herein refers to groupings of two or more SNPs that are physically present on the same chromosome which tend to be inherited together except when recombination occurs. The haplotype provides information regarding an allele of the gene, regulatory regions or other genetic sequences affecting a trait The linkage disequilibrium and, thus, association of a SNP or a haplotype allele(s) and a non-beef livestock trait can be strong enough to be detected using simple genetic approaches, or can require more sophisticated statistical approaches to be identified.

[0047] Numerous methods for identifying haplotype alleles in nucleic acid samples are known in the art. In general, nucleic acid occurrences for the individual SNPs are determined, and then combined to identify haplotype alleles. The Stephens and Donnelly algorithm (Am. J. Hum. Genet. 68: 978-989, 2001, which is incorporated herein by reference) can be applied to the data generated regarding individual nucleotide occurrences in SNP markers of the subject, in order to determine alleles for each haplotype in a subject's genotype. Other methods can be used to determine alleles for each haplotype in the subject's genotype, for example Clarks algorithm, and an EM algorithm described by Raymond and Rousset (Raymond et al. 1994. GenePop. Ver 3.0. Institut des Siences de l'Evolution. Universite de Montpellier, France. 1994).

[0048] As used herein, the term “infer” or “inferring”, when used in reference to a trait, means drawing a conclusion about a trait using a process of analyzing individually or in combination, nucleotide occurrence(s) of one or more SNP(s), which can be part of one or more haplotypes, in a nucleic acid sample of the subject, and comparing the individual or combination of nucleotide occurrence(s) of the SNP(s) to known relationships of nucleotide occurrence(s) of the SNP(s) and the trait. As disclosed herein, the nucleotide occurrence(s) can be identified directly by examining nucleic acid molecules, or indirectly by examining a polypeptide encoded by a particular genomic where the polymorphism is associated with an amino acid change in the encoded polypeptide.

[0049] Relationships between nucleotide occurrences of one or more SNPs or haplotypes and a trait can be identified using known statistical methods. A statistical analysis result which shows an association of one or more SNPs or haplotypes with a trait with at least 80%, 85%, 90%, 95%, or 99%, or 95% confidence, or alternatively a probability of insignificance less than 0.05, can be used to identify SNPs and haplotypes. These statistical tools may test for significance related to a null hypothesis that an on-test SNP allele or haplotype allele is not significantly different between groups with different traits. If the significance of this difference is low, it suggests the allele is not related to a trait.

[0050] As another example, associations between nucleotide occurrences of one or more SNPs or haplotypes and a trait (i.e. selection of significant markers) can be identified using a two part analysis. In the first part, DNA from animals at the extremes of a trait are pooled, and the allele frequency of one or more SNPs or haplotypes for each tail of the distribution is estimated. Alleles of SNPs and/or haplotypes that are apparently associated with extremes of a trait are identified and are used to construct a candidate SNP and/or haplotype set. Statistical cut-offs are set relatively low to assure that significant SNPs and/or haplotypes are not overlooked during the first part of the method.

[0051] During the second stage, individual animals are genotyped for the candidate SNP and/or haplotype set. The second stage is set up to account for as much of the genetic variation as possible in a specific trait without introducing substantial error. This is a balancing act of the prediction process. Some animals are predicted with high accuracy and others with low accuracy.

[0052] In diploid organisms such as non-beef livestock, somatic cells, which are diploid, include two alleles for each single-locus haplotype. As such, in some cases, the two alleles of a haplotype are referred to herein as a genotype or as a diploid pair, and the analysis of somatic cells, typically identifies the alleles for each copy of the haplotype. Methods of the present invention can include identifying a diploid pair of haplotype alleles. These alleles can be identical (homozygous) or can be different (heterozygous). Haplotypes that extend over multiple loci on the same chromosome include up to 2 the Nth power alleles where N is the number of loci. It is beneficial to express polymorphisms in terms of multi-locus (i.e. multi SNP) haplotypes because haplotypes offer enhanced statistical power for genetic association studies. Multi-locus haplotypes can be precisely determined from diploid pairs when the diploid pairs include 0 or 1 heterozygous pairs, and N or N−1 homozygous pairs. When multi-locus haplotypes cannot be precisely determined, they can sometimes be inferred by statistical methods. Methods of the invention can include identifying multi-locus haplotypes, either precisely determined, or inferred.

[0053] A sample useful for practicing a method of the invention can be any biological sample of a subject, typically a non-beef livestock subject, that contains nucleic acid molecules, including portions of the genomic sequences to be examined, or corresponding encoded polypeptides, depending on the particular method. As such, the sample can be a cell, tissue or organ sample, or can be a sample of a biological material such as blood, milk, semen, saliva, hair, tissue, and the like. A nucleic acid sample useful for practicing a method of the invention can be deoxyribonucleic (DNA) acid or ribonucleic acids (RNA). The nucleic acid sample generally is a deoxyribonucleic acid sample, particularly genomic DNA or an amplification product thereof. However, where heteronuclear ribonucleic acid which includes unspliced mRNA precursor RNA molecules and non-coding regulatory molecules such as RNA is available, a cDNA or amplification product thereof can be used.

[0054] Where each of the SNPs of the haplotype is present in a coding region of a gene(s), the nucleic acid sample can be DNA or RNA, or products derived therefrom, for example, amplification products. Furthermore, while the methods of the invention generally are exemplified with respect to a nucleic acid sample, it will be recognized that particular haplotype alleles can be in coding regions of a genomic and can result in polypeptides containing different amino acids at the positions corresponding to the SNPs due to non-degenerate codon changes. As such, in another aspect, the methods of the invention can be practiced using a sample containing polypeptides of the subject.

[0055] In one embodiment, DNA samples are collected and stored in a retrievable barcode system, either automated or manual, that ties to a database. Collection practices include systems for collecting tissue, hair, mouth cells or blood samples from individual animals at the same time that ear tags, electronic identification or other devices are attached or implanted into the animal. Tissue collection devices can be integrated into the tool used for placing the ear tag. Body fluid samples are collected and can be stored on a membrane bound system. All methods could be automatically uploaded into a primary database.

[0056] The sample is then analyzed on the premises or sent to a laboratory where a high-throughput genotyping system is used to analyze the sample. Traits are predicted in the field in real-time or in the laboratory and forwarded to the field. Processors then uses this information to sort and manage animals to maximize profitability and marketing potential.

[0057] The present invention can also be used to provide information to breeders to make breeding, mating, and or cloning decisions. This invention can also be combined with traditional genetic evaluation methods to improve selection, mating, or cloning strategies.

[0058] The subject of the present invention can be any non-beef livestock subject. The non-beef livestock subject can be, for example, an alpacas, a buffalo, a cow, a goat, a horse, a llama, a sheep, a pig, an ostrich, a chicken, a turkey, an elk, an emu, a deer, a lamb, or a duck. As discussed below, in embodiments where the trait is related to milk or a dairy product, the subject can be any livestock subject including a beef subject.

[0059] For methods of the invention directed at sorting non-beef livestock subjects, managing non-beef livestock subjects, improving profits related to selling meat from a non-beef livestock subject, the animal can be a young non-beef livestock subject ranging in ages from conception to the time the animal is harvested and meat and other commercial products obtained.

[0060] A “trait” is a characteristic of an organism that manifests itself in a phenotype. Many traits are the result of the expression of a single gene, but some are polygenic (i.e., result from simultaneous expression of more than one gene). A “phenotype” is an outward appearance or other visible characteristic of an organism. Many different non-beef livestock traits can be inferred by methods of the present invention.

[0061] In certain embodiments, the non-beef livestock subject is a pig. In these embodiments, the trait can be age at puberty, reproductive potential, number of pigs farrowed alive, birth weight of pigs farrowed, longevity, weight of subject at a target timepoint, number of pigs weaned, percent of pigs weaned, pigs marketed/sow/year, average weaning weight of pigs, rate of gain, days to a target weight, meat quality, feed efficiency, manure characteristic, muscle content, fat content (leanness), disease resistance, disease susceptibility, feed intake, protein content, bone content, maintenance energy requirement, mature size, amino acid profile, fatty acid profile, stress susceptibility and response, digestive capacity, production of calpain, calpastatin activity and myostatin activity, pattern of fat deposition, fertility, ovulation rate, optimal diet, or conception rate. Manure characteristics include quantity, organic matter, plant nutrients, or salts.

[0062] In certain embodiments, the non-beef livestock subject is a bird or avian species. For example, the bird or avian species can be a chicken or a turkey. In these embodiments, the trait can be egg production, feed efficiency, livability, meat yield, longevity, white meat yield, dark meat yield, disease resistance, disease susceptibility, optimal diet time to maturity, time to a target weight, weight at a target timepoint, average daily weight gain, meat quality, muscle content, fat content, feed intake, protein content, bone content, maintenance energy requirement, mature size, amino acid profile, fatty acid profile, stress susceptibility and response, digestive capacity, production of calpain, calpastatin activity and myostatin activity, pattern of fat deposition, fertility, ovulation rate, or conception rate. In one embodiment, the trait is resistance to Salmonella infection, ascites, and listeria infection.

[0063] In certain embodiments, the non-beef livestock subject is a bird or avian species that produces eggs for mammalian consumption. In certain embodiments, the bird or avian species is a chicken and the trait can be a characteristic of an egg of the bird or a characteristic of a product of the egg.

[0064] The egg characteristic can be quality, size, shape, shelf-life, freshness, cholesterol content, color, biotin content, calcium content, shell quality, yolk color, lecithin content, number of yolks, yolk content, white content, vitamin content, vitamin D content, nutrient density, protein content, albumen content, protein quality, avidin content, fat content, saturated fat content, unsaturated fat content, interior egg quality, number of blood spots, air cell size, grade, a bloom characteristic, chalaza prevalence or appearance, ease of peeling, likelihood of being a restricted egg, Salmonella content.

[0065] Methods of the present invention can be used to infer more than one trait. For example a method of the present invention can be used to infer a series of traits. As used herein, a phenotype and a trait may be used interchangeably in some instances. Accordingly, a method of the present invention can infer, for example, quality grade, muscle content, and feed efficiency. This inference can be made using one SNP or a series of SNPs. Thus, a single SNP can be used to infer multiple traits; multiple SNPs can be used to infer multiple traits; or a single SNP can be used to infer a single trait.

[0066] In another aspect, the present invention provides a method for improving profits related to selling meat from a non-beef livestock subject. The method includes drawing an inference regarding a trait of the non-beef livestock subject from a nucleic acid sample of the non-beef livestock subject. The method is typically performed by a method that includes identifying a nucleotide occurrence for at least one single nucleotide polymorphism (SNP), wherein the nucleotide occurrence is associated with the trait, and wherein the trait affects the value of the animal or its products. Furthermore, the method includes managing at least one of food intake, diet composition, administration of feed additives or pharmacological treatments such as vaccines, antibiotics, hormones and other metabolic modifiers, age and weight at which diet changes or pharmacological treatments are imposed, days fed specific diets, castration, feeding methods and management, imposition of internal or external measurements and environment of the non-beef livestock subject based on the inferred trait. Then at least one non-beef livestock commercial product, typically meat or milk, is obtained from the non-beef livestock subject.

[0067] Methods according to this aspect of the present invention can utilize a bioeconomic model, such as a model that estimates the net value of one or more non-beef livestock subjects based on one or more traits. By this method, traits of one, or a series of traits are inferred, for example, an inference regarding several characteristics of meat that will be obtained from the non-beef livestock subject. The inferred trait information then can be entered into a model that uses the information to estimate a value for the non-beef livestock subject, or a product from the non-beef livestock subject, based on the traits. The model is typically a computer model. Values for the non-beef livestock subjects can be used to segregate the animals. Furthermore, various parameters that can be controlled during maintenance and growth of the non-beef livestock subjects can be input into the model in order to affect the way the animals are raised in order to obtain maximum value for the non-beef livestock subject when it is harvested.

[0068] In certain embodiments, meat or milk can be obtained at a time point that is affected by the inferred trait and one or more of the food intake, diet composition, and management of the non-beef livestock subject. For example, where the inferred trait of a non-beef livestock subject is high feed efficiency, which can be identified in quantitative or qualitative terms, meat or milk can be obtained at a time point that is sooner than a time point for a non-beef livestock subject with low feed efficiency. As another example, non-beef livestock subjects with different feed efficiencies can be separated, and those with lower feed efficiencies can be implanted with growth promotants or fed metabolic partitioning agents in order to maximize the profitability of a single non-beef livestock subject.

[0069] In another aspect, the present invention provides methods that allow effective measurement and sorting of animals individually, accurate and complete record keeping of genotypes and traits or characteristics for each animal, and production of an economic end point determination for each animal using growth performance data. Accordingly, the present invention provides a method for sorting non-beef livestock subjects. The method includes inferring a trait for both a first non-beef livestock subject and a second non-beef livestock subject from a nucleic acid sample of the first non-beef livestock subject and the second non-beef livestock subject. The inference is made by a method that includes identifying the nucleotide occurrence of at least one single nucleotide polymorphism (SNP), wherein the nucleotide occurrence is associated with the trait. The method further includes sorting the first non-beef livestock subject and the second non-beef livestock subject based on the inferred trait.

[0070] The method can further include measuring a physical characteristic of the first non-beef livestock subject and the second non-beef livestock subject, and sorting the first non-beef livestock subject and the second non-beef livestock subject based on both the inferred trait and the measured physical characteristic. The physical characteristic can be, for example, weight, breed, type or frame size, and can be measured using many methods known in the art.

[0071] In another aspect, the present invention provides methods that use analysis of non-beef livestock genetic variation to improve the genetics of the population to produce animals with consistent desirable characteristics, such as animals that yield a high percentage of lean meat and a low percentage of fat efficiently. Accordingly, in one aspect the present invention provides a method for selection and breeding of non-beef livestock subjects for a trait. The method includes inferring the genetic potential for a trait or a series of traits in a group of non-beef livestock candidates for use in breeding programs from a nucleic acid sample of the non-beef livestock candidates. The inference is made by a method that includes identifying the nucleotide occurrence of at least one single nucleotide polymorphism (SNP), wherein the nucleotide occurrence is associated with the trait or traits. Individuals are then selected from the group of candidates with a desired performance for the trait or traits for use in breeding programs. Progeny resulting from mating of selected parents would contain the optimum combination of traits, thus creating an enduring genetic pattern and line of animals with specific traits. These lines could be monitored for purity using the original SNP markers and could be identified from the entire population of non-beef livestock and protected from genetic theft.

[0072] In another aspect the present invention provides a method for cloning a non-beef livestock subject with a specific trait or series of traits. The method includes identifying nucleotide occurrences of at least one or at least two SNPs for the non-beef livestock subject, isolating a progenitor cell from the non-beef livestock subject, and generating a cloned non-beef livestock from the progenitor cell. The method can further include before identifying the nucleotide occurrences, identifying the trait of the non-beef livestock subject, wherein the non-beef livestock subject has a desired trait and wherein the at least one or at least two SNPs affect the trait.

[0073] Methods of cloning non-beef livestock are known in the art and can be used for the present invention. For example, methods of cloning pigs have been reported (See e.g., Carter D. B., et. al., “Phenotyping of transgenic cloned piglets,” Cloning Stem Cells 4: 131-45 (2002)).

[0074] For methods involving milk and dairy product traits, known methods for cloning cattle can be used (See e.g., Bondioli, “Commercial cloning of cattle by nuclear transfer”, In: Symposium on Cloning Mammals by Nuclear Transplantation, Seidel (ed), pp. 35-38, (1994); Willadsen, “Cloning of sheep and cow embryos,” Genome, 31: 956, (1989); Wilson et al., “Comparison of birth weight and growth characteristics of bovine calves produced by nuclear transfer (cloning), embryo transfer and natural mating”, Animal Reprod. Sci., 38: 73-83, (1995); and Barnes et al., “Embryo cloning in cattle: The use of in vitro matured oocytes”, J. Reprod. Fert., 97: 317-323, (1993)). These methods include somatic cell cloning (See e.g., Enright B. P. et al., “Reproductive characteristics of cloned heifers derived from adult somatic cells,” Biol. Reprod., 66: 291-6 (2002); Bruggerhoff K., et al., “Bovine somatic cell nuclear transfer using recipient oocytes recovered by ovum pick-up: effect of maternal lineage of oocyte donors,” Biol. Reprod., 66: 367-73 (2002); Wilmut, I., et al., “Somatic cell nuclear transfer,” Nature, 419: 583 (2002); Galli, C., et al., “Bovine embryo technologies,” Theriogenology, 59: 599 (2003); Heyman, Y., et al., “Novel approaches and hurdles to somatic cloning in cattle,” Cloning Stem Cells, 4: 47 (2002)).

[0075] This invention identifies animals that have superior traits, predicted very accurately, that can be used to identify parents of the next generation through selection. This invention provides a method for determining the optimum male and female parent to maximize the genetic components of dominance and epistasis thus maximizing heterosis and hybrid vigor in the market animals.

[0076] In another aspect, the present invention provides a non-beef livestock subject resulting from the selection and breeding aspect or the cloning aspect of the invention, discussed above.

[0077] In another aspect, the present invention provides a method of tracking a product of a non-beef livestock subject. The method includes identifying nucleotide occurrences for a series of genetic markers of the non-beef livestock subject, identifying the nucleotide occurrences for the series of genetic markers for a product sample, and determining whether the nucleotide occurrences of the non-beef livestock subject are the same as the nucleotide occurrences of the product sample. In this method identical nucleotide occurrences indicate that the product sample is from the non-beef livestock subject. The tracking method provides, for example, a method for historical and epidemiological tracking the location of an animal from embryo to birth through its growth period, to harvest and finally the retail product after the it has reached the consumer.

[0078] The series of genetic markers can be a series of single nucleotide polymorphisms (SNPs). The method can further include comparing the results of the above determination with a determination of whether the meat is from the non-beef livestock subject made using another tracking method. In this embodiment, the present invention provides quality control information that improves the accuracy of tracking the source of meat by a single method alone.

[0079] The nucleotide occurrence data for the non-beef livestock subject can be stored in a computer readable form, such as a database. Therefore, in one example, an initial nucleotide occurrence determination can be made for the series of genetic markers for a young non-beef livestock subject and stored in a database along with information identifying the non-beef livestock subject. Then, after meat from the non-beef livestock subject is obtained, possibly months or years after the initial nucleotide occurrence determination, and before and/or after the meat is shipped to a customer such as, for example, a wholesale distributor, a sample can be obtained from the product, meat, and nucleotide occurrence information determined using methods discussed herein. The database can then be queried using a user interface as discussed herein, with the nucleotide occurrence data from the meat sample to identify the non-beef livestock subject.

[0080] A series of markers or a series of SNPs as used herein, can include a series of at least 2, 3, 4, 5, 6, 7, 8, 9, 10, 15, 20, 25, 30, 35, 40, 45, 50, 75, 100, 150, 200, 250, 500, 1000, 2000, 2500, 5000, or 6000 markers, for example.

[0081] In another aspect, the present invention provides a method for diagnosing a health condition of a non-beef livestock subject. The method includes drawing an inference regarding a trait of the non-beef livestock subject for the health condition, from a nucleic acid sample of the subject. The inference is drawn by identifying, in the nucleic acid sample, at least one nucleotide occurrence of a single nucleotide polymorphism (SNP), wherein the nucleotide occurrence is associated with the trait.

[0082] The nucleotide occurrence of at least 2 SNPs can be determined. At least 2 SNPs can form a haploytpe, wherein the method identifies a haplotype allele that is associated with the trait. The method can include identifying a diploid pair of haplotype alleles for one or more haplotypes.

[0083] The health condition for this aspect of the invention, is resistance to disease or infection, susceptibility to infection with and shedding of pathogens such as E. Coli, Salmonella, Listeria, prion diseases and other organisms potentially pathogenic to humans, regulation of immune status and response to antigens, susceptibility to bloat, Johnes Disease, or liver abscess, previous exposure to infection or parasites, or health of respiratory and digestive tissues.

[0084] The present invention in another aspect provides a method for inferring a trait of a non-beef livestock subject from a nucleic acid sample of the subject, that includes identifying, in the nucleic acid sample, at least one nucleotide occurrence of a single nucleotide polymorphism (SNP). The nucleotide occurrence is associated with the trait, thereby allowing an inference of the trait.

[0085] These embodiments of the invention are based, in part, on a determination that single nucleotide polymorphisms (SNPs), including haploid or diploid SNPs, and haplotype alleles, including haploid or diploid haplotype alleles, allow an inference to be drawn as to the trait of a subject, particularly a non-beef livestock subject.

[0086] Accordingly, methods of the invention can involve determining the nucleotide occurrence of at least 2, 3, 4, 5, 10, 20, 30, 40, 50, etc. SNPs. The SNPs can form all or part of a haploytpe, wherein the method can identify a haplotype allele that is associated with the trait. Furthermore, the method can include identifying a diploid pair of haplotype alleles.

[0087] In another aspect, the present invention provides a method for identifying a non-beef livestock genetic marker that influences a trait. The method includes analyzing non-beef livestock genetic markers for association with the trait. The genetic marker can be a single nucleotide polymorphism (SNP), or can be at least two SNPs that influence the trait. Because the method can identify at least two SNPs, and in some embodiments, many SNPs, the method can identify not only additive genetic components, but non-additive genetic components such as dominance (i.e. dominating trait of an allele of one genomic over an allele of a another gene) and epistasis (i.e. interaction between genes at different loci). Furthermore, the method can uncover pleiotropic effects of SNP alleles (i.e. SNP alleles or haplotypes effects on many different traits), because many traits can be analyzed for their association with many SNPs using methods disclosed herein.

[0088] Nucleotide occurrences can be determined for essentially all, or all of the SNPs of a high-density, whole genome SNP map. This approach has the advantage over traditional approaches in that since it encompasses the whole genome, it identifies potential interactions of genomic products expressed from genes located anywhere on the genome without requiring preexisting knowledge regarding a possible interaction between the genomic products. An example of a high-density, whole genome SNP map is a map of at least about 1 SNP per 10,000 kb, at least 1 SNP per 500 kb or about 10 SNPs per 500 kb, or at least about 25 SNPs or more per 500 kb. Definitions of densities of markers may change across the genome and are determined by the degree of linkage disequilibrium within a genome region.

[0089] The invention includes methods for creating a high density map. The SNP markers and their surrounding sequence are compared to model organisms, for example human and mouse genomes, where the complete genomic sequence is known and syntenic regions identified or to a finished map of a species. The model organism map may serve as a template for ensuring complete coverage of the animal genome. The finished map has markers spaced in such a way to maximize the amount of linkage disequilibrium in a specific genetic region.

[0090] This map is used to mark all regions of the chromosomes in a single experiment utilizing thousands of experimental animals in an association study, to correlate genomic regions with complex and simple traits. These associations can be further analyzed to unravel complex interactions among genomic regions that contribute to the targeted trait or other traits, epistatic genetic interactions and pleiotropy. The invention of regional high density maps can also be used to identify targeted regions of chromosomes that influence traits.

[0091] Accordingly, in embodiments where SNPs that affect the same trait are identified that are located in different genes, the method can further include analyzing expression products of genes near the identified SNPs, to determine whether the expression products interact. As such, the present invention provides methods to detect epistatic genetic interactions. Laboratory methods are well known in the art for determining whether genomic products interact.

[0092] Where the trait is overall quality, the method can infer an overall average quality grade for a product obtained from the non-beef livestock subject. Alternatively, the method can infer the best or the worst quality grade expected for a product obtained from the non-beef livestock subject. Additionally, as indicated above, the trait can be a characteristic used to classify the product.

[0093] The methods of the present invention that infer a trait can be used in place of present methods used to determine the trait, or can be used to further substantiate a classification of meat or another product using present methods.

[0094] In aspects of the present invention directed at identifying a non-beef livestock genetic marker that influences a trait, present methods for determining a trait, such as a characteristic of pork, can be used in the methods to identify an association between a genetic marker, typically at least one SNP or haplotype, with a trait. For example, DNA samples from non-beef livestock subjects can be obtained, and nucleotide occurrences for at least one SNP in the DNA samples can be determined. Traditional methods can be used to determine the trait. As will be understood, statistical methods can then be used to identify associations between the nucleotide occurrences and the trait. Accordingly, methods of the present invention enables a correlation between carcass value and genetic variation, so as to help identify superior genetic types for future breeding or cloning and management purposes, and to identify management practices that will maximize the value of the arrival in the market.

[0095] Where the trait is pork tenderness, for example, methods of the present invention can infer from a sample of a non-beef livestock subject, such as a live non-beef livestock subject, whether pork if cooked properly, would be tender. The method can be used in place of current post-methods.

[0096] In another aspect, the present invention provides a method for identifying a non-beef livestock genomic associated with a trait. The method includes identifying a non-beef livestock single nucleotide polymorphism (SNP) that influences a trait by analyzing a genome-wide non-beef livestock SNP map for association with the trait, wherein the SNP is found on a target region of a non-beef livestock chromosome. Genes present on the target region are then identified. The presence of a genomic on the target region of the non-beef livestock chromosome indicates that the genomic is a candidate genomic for association with the trait. The candidate genomic can then be analyzed using methods known in the art to determine whether it is associated with the trait.

[0097] In another aspect, the present invention provides a method for identifying a breed of a non-beef livestock subject. The method includes identifying a nucleotide occurrence of a non-beef livestock single nucleotide polymorphism (SNP) from a nucleic acid sample of the subject, wherein the nucleotide occurrence is associated with the breed of the subject. The method typically includes identifying nucleotide occurrences of at least two SNPs from the nucleic acid sample, wherein the nucleotide occurrences are associated with the breed of the subject.

[0098] SNP that identifies a breed, by analyzing a genome-wide non-beef livestock SNP map for association with the trait, wherein the SNP is found on a target region of a non-beef livestock chromosome. Genes present on the target region are then identified. The presence of a genomic on the target region of the non-beef livestock chromosome indicates that the genomic is a candidate genomic for association with the trait. The candidate genomic can then be analyzed using methods known in the art to determine whether it is associated with the trait.

[0099] In another aspect, the present invention provides a high-throughput system for determining the nucleotide occurrences at a series of non-beef livestock single nucleotide polymorphisms (SNPs). The system typically includes a hybridization medium comprising a series of oligonucleotides, which is typically one of the following: a solid support to which a series of oligonucleotides can be directly or indirectly attached, a homogeneous assay or a microfluidic device. Each of these hybridization mediums is used to determine the nucleotide occurrence of non-beef livestock SNPs that are associated with a trait.

[0100] Accordingly, the oligonucleotides are used to determine the nucleotide occurrence of non-beef livestock SNPs that are associated with a trait. The determination can be made by selecting oligonucleotides that bind at or near a genomic location of each SNP of the series of non-beef livestock SNPs. For example, such oligonucleotides include forward and reverse oligonucleotides that can support amplification of the sequences provided in Table 1 (SEQ ID NOs:1-96,631). Additional oligonucleotides would include extension primers that hybridize in proximity to an SNP provided in SEQ ID NOs:96,631 and support extension to the SNP for purposes of identification. The high-throughput system of the present invention typically includes a reagent handling mechanism that can be used to apply a reagent, typically a liquid, to the solid support. The binding of an oligonucleotide of the series of oligonucleotides to a polynucleotide isolated from a genome can be affected by the nucleotide occurrence of the SNP. The high-throughput system can include a mechanism effective for moving a solid support and a detection mechanism. The detection method detects binding or tagging of the oligonucleotides.

[0101] High-throughput systems for analyzing SNPs, known in the art such as the UHT SNP-IT platform (Orchid Biosciences, Princeton, N.J.) MassArray™ system (Sequenom, San Diego, Calif.) and the integrated SNP genotyping system available from Illumina (San Diego, Calif.), TaqMan™ (ABI, Foster City, Calif.) can be used with the present invention. However, the present invention provides a high-throughput system that is designed to detect nucleotide occurrences of non-beef livestock SNPs, or a series of non-beef livestock SNPs that can make up a series of haplotypes. Therefore, as indicated above the system includes a solid support or other method to which a series of oligonucleotides can be associated that are used to determine a nucleotide occurrence of a SNP for a series of non-beef livestock SNPs that are associated with a trait. The system can further include a detection mechanism for detecting binding the series of oligonucleotides to the series of SNPs. Such detection mechanisms are known in the art.

[0102] The high-throughput system can be a microfluidics device. Numerous microfluidic devices are known that include solid supports with microchannels (See e.g., U.S. Pat. Nos. 5,304,487, 5,110,745, 5,681,484, and 5,593,838).

[0103] The high-throughput systems of the present invention are designed to determine nucleotide occurrences of one SNP or a series of SNPs. The systems can determine nucleotide occurrences of an entire genome-wide high-density SNP map.

[0104] Numerous methods are known in the art for determining the nucleotide occurrence for a particular SNP in a sample. Such methods can utilize one or more oligonucleotide probes or primers, including, for example, an amplification primer pair, that selectively hybridize to a target polynucleotide, which corresponds to one or more non-beef livestock SNP positions, such as those provided in Table 1 (SEQ ID NOs:1-96,631). Oligonucleotide probes useful in practicing a method of the invention can include, for example, an oligonucleotide that is complementary to and spans a portion of the target polynucleotide, including the position of the SNP, wherein the presence of a specific nucleotide at the position (i.e., the SNP) is detected by the presence or absence of selective hybridization of the probe. Such a method can further include contacting the target polynucleotide and hybridized oligonucleotide with an endonuclease, and detecting the presence or absence of a cleavage product of the probe, depending on whether the nucleotide occurrence at the SNP site is complementary to the corresponding nucleotide of the probe.

[0105] An oligonucleotide ligation assay also can be used to identify a nucleotide occurrence at a polymorphic position, wherein a pair of probes that selectively hybridize upstream and adjacent to and downstream and adjacent to the site of the SNP, and wherein one of the probes includes a terminal nucleotide complementary to a nucleotide occurrence of the SNP. Where the terminal nucleotide of the probe is complementary to the nucleotide occurrence, selective hybridization includes the terminal nucleotide such that, in the presence of a ligase, the upstream and downstream oligonucleotides are ligated. As such, the presence or absence of a ligation product is indicative of the nucleotide occurrence at the SNP site.

[0106] An oligonucleotide also can be useful as a primer, for example, for a primer extension reaction, wherein the product (or absence of a product) of the extension reaction is indicative of the nucleotide occurrence. In addition, a primer pair useful for amplifying a portion of the target polynucleotide including the SNP site can be useful, wherein the amplification product is examined to determine the nucleotide occurrence at the SNP site. Particularly useful methods include those that are readily adaptable to a high throughput format, to a multiplex format, or to both. The primer extension or amplification product can be detected directly or indirectly and/or can be sequenced using various methods known in the art. Amplification products which span a SNP loci can be sequenced using traditional sequence methodologies (e.g., the “dideoxy-mediated chain termination method,” also known as the “Sanger Method” (Sanger, F., et al., J. Molec. Biol. 94: 441 (1975); Prober et al. Science 238: 336-340 (1987)) and the “chemical degradation method,” “also known as the “Maxam-Gilbert method” (Maxam, A. M., et al., Proc. Natl. Acad. Sci. (U.S.A.) 74: 560 (1977)), both references herein incorporated by reference) to determine the nucleotide occurrence at the SNP loci.

[0107] Methods of the invention can identify nucleotide occurrences at SNPs using genome-wide sequencing or “microsequencing” methods. Whole-genome sequencing of individuals identifies all SNP genotypes in a single analysis. Microsequencing methods determine the identity of only a single nucleotide at a “predetermined” site. Such methods have particular utility in determining the presence and identity of polymorphisms in a target polynucleotide. Such microsequencing methods, as well as other methods for determining the nucleotide occurrence at a SNP loci are discussed in Boyce-Jacino, et al., U.S. Pat. No. 6,294,336, incorporated herein by reference, and summarized herein.

[0108] Microsequencing methods include the Genetic Bit Analysis method disclosed by Goelet, P. et al. (WO 92/15712, herein incorporated by reference). Additional, primer-guided, nucleotide incorporation procedures for assaying polymorphic sites in DNA have also been described (Komher, J. S. et al, Nucl. Acids. Res. 17: 7779-7784 (1989); Sokolov, B. P., Nucl. Acids Res. 18: 3671 (1990); Syvanen, A.-C., et al., Genomics 8: 684-692 (1990); Kuppuswamy, M. N. et al., Proc. Natl. Acad. Sci. (U.S.A.) 88: 1143-1147 (1991); Prezant, T. R. et al, Hum. Mutat. 1: 159-164 (1992); Ugozzoli, L. et al., GATA 9: 107-112 (1992); Nyren, P. et al., Anal. Biochem. 208: 171-175 (1993); and Wallace, WO89/10414). These methods differ from Genetic Bit™. Analysis in that they all rely on the incorporation of labeled deoxynucleotides to discriminate between bases at a polymorphic site. In such a format, since the signal is proportional to the number of deoxynucleotides incorporated, polymorphisms that occur in runs of the same nucleotide can result in signals that are proportional to the length of the run (Syvanen, A.-C., et al. Amer. J. Hum. Genet. 52: 46-59 (1993)).

[0109] Alternative microsequencing methods have been provided by Mundy, C. R. (U.S. Pat. No. 4,656,127) and Cohen, D. et al (French Patent 2,650,840; PCT Appln. No. WO91/02087) which discusses a solution-based method for determining the identity of the nucleotide of a polymorphic site. As in the Mundy method of U.S. Pat. No. 4,656,127, a primer is employed that is complementary to allelic sequences immediately 3′-to a polymorphic site.

[0110] In response to the difficulties encountered in employing gel electrophoresis to analyze sequences, alternative methods for microsequencing have been developed. Macevicz (U.S. Pat. No. 5,002,867), for example, describes a method for determining nucleic acid sequence via hybridization with multiple mixtures of oligonucleotide probes. In accordance with such method, the sequence of a target polynucleotide is determined by permitting the target to sequentially hybridize with sets of probes having an invariant nucleotide at one position, and variant nucleotides at other positions. The Macevicz method determines the nucleotide sequence of the target by hybridizing the target with a set of probes, and then determining the number of sites that at least one member of the set is capable of hybridizing to the target (i.e., the number of “matches”). This procedure is repeated until each member of a sets of probes has been tested.

[0111] Boyce-Jacino, et al., U.S. Pat. No. 6,294,336 provides a solid phase sequencing method for determining the sequence of nucleic acid molecules (either DNA or RNA) by utilizing a primer that selectively binds a polynucleotide target at a site wherein the SNP is the most 3′ nucleotide selectively bound to the target.

[0112] Oliphant et al. report a method that utilizes BeadArray™ Technology that can be used in the methods of the present invention to determine the nucleotide occurrence of a SNP. (supplement to Biotechniques, June 2002). Additionally, nucleotide occurrences for SNPs can be determined using a DNAMassARRAY system (SEQUENOM, San Diego, Calif.). This system combines proprietary SpectroChips™, microfluidics, nanodispensing, biochemistry, and MALDI-TOF MS (matrix-assisted laser desorption ionization time of flight mass spectrometry).

[0113] As another example, the nucleotide occurrences of non-beef livestock SNPs in a sample can be determined using the SNP-IT™ method (Orchid BioSciences, Inc., Princeton, N.J.). In general, SNP-IT™ is a 3-step primer extension reaction. In the first step a target polynucleotide is isolated from a sample by hybridization to a capture primer, which provides a first level of specificity. In a second step the capture primer is extended from a terminating nucleotide trisphosphate at the target SNP site, which provides a second level of specificity. In a third step, the extended nucleotide trisphosphate can be detected using a variety of known formats, including: direct fluorescence, indirect fluorescence, an indirect colorimetric assay, mass spectrometry, fluorescence polarization, etc. Reactions can be processed in 384 well format in an automated format using a SNPstream™ instrument ((Orchid BioSciences, Inc., Princeton, N.J.). Other formats include TaqMan™, Rolling circle, Fluorescent polarization, etc.

[0114] Accordingly, using the methods described above, the non-beef livestock haplotype allele or the nucleotide occurrence of a non-beef livestock SNP can be identified using an amplification reaction, a primer extension reaction, or an immunoassay. The non-beef livestock haplotype allele or non-beef livestock SNP can also be identified by contacting polynucleotides in the sample or polynucleotides derived from the sample, with a specific binding pair member that selectively hybridizes to a polynucleotide region comprising the non-beef livestock SNP, under conditions wherein the binding pair member specifically binds at or near the non-beef livestock SNP. The specific binding pair member can be an antibody or a polynucleotide.

[0115] The nucleotide occurrence of a SNP can be identified by other methodologies as well as those discussed above. For example, the identification can use microarray technology, which can be performed with or without PCR, or sequencing methods such as mass spectrometry, scanning electron microscopy, or methods in which a polynucleotide flows past a sorting device that can detect the sequence of the polynucleotide.

[0116] The high-throughput systems of the present invention typically utilize selective hybridization. As used herein, the term “selective hybridization” or “selectively hybridize,” refers to hybridization under moderately stringent or highly stringent conditions such that a nucleotide sequence preferentially associates with a selected nucleotide sequence over unrelated nucleotide sequences to a large enough extent to be useful in identifying a nucleotide occurrence of a SNP. It will be recognized that some amount of non-specific hybridization is unavoidable, but is acceptable provide that hybridization to a target nucleotide sequence is sufficiently selective such that it can be distinguished over the non-specific cross-hybridization, for example, at least about 2-fold more selective, generally at least about 3-fold more selective, usually at least about 5-fold more selective, and particularly at least about 10-fold more selective, as determined, for example, by an amount of labeled oligonucleotide that binds to target nucleic acid molecule as compared to a nucleic acid molecule other than the target molecule, particularly a substantially similar (i.e., homologous) nucleic acid molecule other than the target nucleic acid molecule. Conditions that allow for selective hybridization can be determined empirically, or can be estimated based, for example, on the relative GC:AT content of the hybridizing oligonucleotide and the sequence to which it is to hybridize, the length of the hybridizing oligonucleotide, and the number, if any, of mismatches between the oligonucleotide and sequence to which it is to hybridize (see, for example, Sambrook et al., “Molecular Cloning: A laboratory manual (Cold Spring Harbor Laboratory Press 1989)).

[0117] An example of progressively higher stringency conditions is as follows: 2×SSC/0.1% SDS at about room temperature (hybridization conditions); 0.2×SSC/0.1% SDS at about room temperature (low stringency conditions); 0.2×SSC/0.1% SDS at about 42° C. (moderate stringency conditions); and 0.1×SSC at about 68° C. (high stringency conditions). Washing can be carried out using only one of these conditions, e.g., high stringency conditions, or each of the conditions can be used, e.g., for 10-15 minutes each, in the order listed above, repeating any or all of the steps listed. However, as mentioned above, optimal conditions will vary, depending on the particular hybridization reaction involved, and can be determined empirically.

[0118] The term “polynucleotide” is used broadly herein to mean a sequence of deoxyribonucleotides or ribonucleotides that are linked together by a phosphodiester bond. For convenience, the term “oligonucleotide” is used herein to refer to a polynucleotide that is used as a primer or a probe. Generally, an oligonucleotide useful as a probe or primer that selectively hybridizes to a selected nucleotide sequence is at least about 15 nucleotides in length, usually at least about 18 nucleotides, and particularly about 21 nucleotides or more in length.

[0119] A polynucleotide can be RNA or can be DNA, which can be a genomic or a portion thereof, a cDNA, a synthetic polydeoxyribonucleic acid sequence, or the like, and can be single stranded or double stranded, as well as a DNA/RNA hybrid. In various embodiments, a polynucleotide, including an oligonucleotide (e.g., a probe or a primer) can contain nucleoside or nucleotide analogs, or a backbone bond other than a phosphodiester bond. In general, the nucleotides comprising a polynucleotide are naturally occurring deoxyribonucleotides, such as adenine, cytosine, guanine or thymine linked to 2′-deoxyribose, or ribonucleotides such as adenine, cytosine, guanine or uracil linked to ribose. However, a polynucleotide or oligonucleotide also can contain nucleotide analogs, including non-naturally occurring synthetic nucleotides or modified naturally occurring nucleotides. Such nucleotide analogs are well known in the art and commercially available, as are polynucleotides containing such nucleotide analogs (Lin et al., Nucl. Acids Res. 22: 5220-5234 (1994); Jellinek et al., Biochemistry 34: 11363-11372 (1995); Pagratis et al., Nature Biotechnol. 15: 68-73 (1997), each of which is incorporated herein by reference).

[0120] The covalent bond linking the nucleotides of a polynucleotide generally is a phosphodiester bond. However, the covalent bond also can be any of numerous other bonds, including a thiodiester bond, a phosphorothioate bond, a peptide-like bond or any other bond known to those in the art as useful for linking nucleotides to produce synthetic polynucleotides (see, for example, Tam et al., Nucl. Acids Res. 22: 977-986 (1994); Ecker and Crooke, BioTechnology 13: 351360 (1995), each of which is incorporated herein by reference). The incorporation of non-naturally occurring nucleotide analogs or bonds linking the nucleotides or analogs can be particularly useful where the polynucleotide is to be exposed to an environment that can contain a nucleolytic activity, including, for example, a tissue culture medium or upon administration to a living subject, since the modified polynucleotides can be less susceptible to degradation.

[0121] A polynucleotide or oligonucleotide comprising naturally occurring nucleotides and phosphodiester bonds can be chemically synthesized or can be produced using recombinant DNA methods, using an appropriate polynucleotide as a template. In comparison, a polynucleotide or oligonucleotide comprising nucleotide analogs or covalent bonds other than phosphodiester bonds generally are chemically synthesized, although an enzyme such as T7 polymerase can incorporate certain types of nucleotide analogs into a polynucleotide and, therefore, can be used to produce such a polynucleotide recombinantly from an appropriate template (Jellinek et al., supra, 1995). Thus, the term polynucleotide as used herein includes naturally occurring nucleic acid molecules, which can be isolated from a cell, as well as synthetic molecules, which can be prepared, for example, by methods of chemical synthesis or by enzymatic methods such as by the polymerase chain reaction (PCR).

[0122] In various embodiments for identifying nucleotide occurrences of SNPs, it can be useful to detectably label a polynucleotide or oligonucleotide. Detectable labeling of a polynucleotide or oligonucleotide is well known in the art. Particular non-limiting examples of detectable labels include chemiluminescent labels, fluorescent labels, radiolabels, enzymes, haptens, or even unique oligonucleotide sequences.

[0123] A method of the identifying a SNP also can be performed using a specific binding pair member. As used herein, the term “specific binding pair member” refers to a molecule that specifically binds or selectively hybridizes to another member of a specific binding pair. Specific binding pair member include, for example, probes, primers, polynucleotides, antibodies, etc. For example, a specific binding pair member includes a primer or a probe that selectively hybridizes to a target polynucleotide that includes a SNP loci, or that hybridizes to an amplification product generated using the target polynucleotide as a template. Generally binding pair members include forward and reverse primers that can amplify a target sequence that includes, for example, any one of SEQ ID NOs:1-96,631.

[0124] As used herein, the term “specific interaction,” or “specifically binds” or the like means that two molecules form a complex that is relatively stable under physiologic conditions. The term is used herein in reference to various interactions, including, for example, the interaction of an antibody that binds a polynucleotide that includes a SNP site; or the interaction of an antibody that binds a polypeptide that includes an amino acid that is encoded by a codon that includes a SNP site. According to methods of the invention, an antibody can selectively bind to a polypeptide that includes a particular amino acid encoded by a codon that includes a SNP site. Alternatively, an antibody may preferentially bind a particular modified nucleotide that is incorporated into a SNP site for only certain nucleotide occurrences at the SNP site, for example using a primer extension assay.

[0125] A specific interaction can be characterized by a dissociation constant of at least about 1×10⁻⁶ M, generally at least about 1×10⁻⁷ M, usually at least about 1×10⁻⁸ M, and particularly at least about 1×10⁻⁹ M or 1×10⁻¹⁰ M or greater. A specific interaction generally is stable under physiological conditions, including, for example, conditions that occur in a living individual such as a human or other vertebrate or invertebrate, as well as conditions that occur in a cell culture such as used for maintaining mammalian cells or cells from another vertebrate organism or an invertebrate organism. Methods for determining whether two molecules interact specifically are well known and include, for example, equilibrium dialysis, surface plasmon resonance, and the like.

[0126] The present invention also provides a method for selecting a pig for use in xenotransplation. The method includes inferring a trait of a non-beef livestock subject from a nucleic acid sample of the subject, by identifying in the nucleic acid sample, at least one nucleotide occurrence of a single nucleotide polymorphism (SNP). The nucleotide occurrence is associated with the trait. For these embodiments, the trait is the suitability of organs of the pig for transplantation into human transplantation. Organs that can be used for transplantation include, but are not limited to, whole organs such as hearts, kidney, liver, and pancreas.

[0127] The invention also relates to kits, which can be used, for example, to perform a method of the invention. Thus, in one embodiment, the invention provides a kit for identifying nucleotide occurrences or haplotype alleles of non-beef livestock SNPs. Such a kit can contain, for example, an oligonucleotide probe, primer, or primer pair, or combinations thereof. Such oligonucleotides being useful, for example, to identify a SNP or haplotype allele as disclosed herein; or can contain one or more polynucleotides corresponding to a portion of a non-beef livestock genomic containing one or more nucleotide occurrences associated with a non-beef livestock trait, such polynucleotide being useful, for example, as a standard (control) that can be examined in parallel with a test sample. In addition, a kit of the invention can contain, for example, reagents for performing a method of the invention, including, for example, one or more detectable labels, which can be used to label a probe or primer or can be incorporated into a product generated using the probe or primer (e.g., an amplification product); one or more polymerases, which can be useful for a method that includes a primer extension or amplification procedure, or other enzyme or enzymes (e.g., a ligase or an endonuclease), which can be useful for performing an oligonucleotide ligation assay or a mismatch cleavage assay; and/or one or more buffers or other reagents that are necessary to or can facilitate performing a method of the invention. The primers or probes can be included in a kit in a labeled form, for example with a label such as biotin or an antibody.

[0128] In one embodiment, a kit of the invention provides a plurality of oligonucleotides of the invention, including one or more oligonucleotide probes or one or more primers, including forward and/or reverse primers, or a combination of such probes and primers or primer pairs. Such a kit also can contain probes and/or primers that conveniently allow a method of the invention to be performed in a multiplex format.

[0129] The kit can also include instructions for using the probes or primers to determine a nucleotide occurrence of at least one non-beef livestock SNPs.

[0130] In another aspect, the present invention provides a computer system that includes a database having records containing information regarding a series of non-beef livestock single nucleotide polymorphisms (SNPs), and a user interface allowing a user to input nucleotide occurrences of the series of non-beef livestock SNPs for a non-beef livestock subject. The user interface can be used to query the database and display results of the query. The database can include records representing some or all of the SNP of a non-beef livestock SNP map, such as a high-density non-beef livestock SNP map. The database can also include information regarding haplotypes and haplotype alleles from the SNPs. Furthermore, the database can include information regarding traits and/or traits that are associated with some or all of the SNPs and/or haplotypes. In these embodiments the computer system can be used, for example, for any of the aspects of the invention that infer a trait of a non-beef livestock subject.

[0131] The computer system of the present invention can be a stand-alone computer, a conventional network system including a client/server environment and one or more database servers, and/or a handheld device. A number of conventional network systems, including a local area network (LAN) or a wide area network (WAN), are known in the art. Additionally, client/server environments, database servers, and networks are well documented in the technical, trade, and patent literature. For example, the database server can run on an operating system such as UNIX, running a relational database management system, a World Wide Web application, and a World Wide Web Server. When the computer system is a handheld device it can be a personal digital assistant (PDA) or another type of handheld device, of which many are known.

[0132] Typically, the database of the computer system of the present invention includes information regarding the location and nucleotide occurrences of non-beef livestock SNPs. Information regarding genomic location of the SNP can be provided for example by including sequence information of consecutive sequences surrounding the SNP, that only 1 part of the genome provides 100% match, or by providing a position number of the SNP with respect to an available sequence entry, such as a Genbank sequence entry, or a sequence entry for a private database, or a commercially licensed database of DNA sequences. The database can also include information regarding nucleotide occurrences of SNPs, since as discussed herein typically nucleotide occurrences of less than all four nucleotides occur for a SNP.

[0133] The database can include other information regarding SNPs or haplotypes such as information regarding frequency of occurrence in a non-beef livestock population. Furthermore, the database can be divided into multiple parts, one for storing sequences and the others for storing information regarding the sequences. The database may contain records representing additional information about a SNP, for example information identifying the genomic in which a SNP is found, or nucleotide occurrence frequency information, or characteristics of the library or clone which generated the DNA sequence, or the relationship of the sequence surrounding the SNP to similar DNA sequences in other species.

[0134] The parts of the database of the present invention can be flat file databases or relational databases or object-oriented databases. The parts of the database can be internal databases, or external databases that are accessible to users. An internal database is a database maintained as a private database, typically maintained behind a firewall, by an enterprise. An external database is located outside an internal database, and is typically maintained by a different entity than an internal database. A number of external public biological sequence databases, particularly SNP databases, are available and can be used with the current invention. For example, the dbSNP database available from the National Center for Biological Information (NCBI), part of the National Library of Medicine, can be used with the current invention to provide comparative genomic information to assist in identifying non-beef livestock SNPs.

[0135] In another aspect, the current invention provides a population of information regarding non-beef livestock SNPs and haplotypes. The population of information can include an identification of traits associated with the SNPs and haplotyopes. The population of information is typically included within a database, and can be identified using the methods of the current invention. The population of sequences can be a subpopulation of a larger database, that contains only SNPs and haplotypes related to a particular trait. For example, the subpopulation can be identified in a table of a relational database. A population of information can include all of the SNPs and/or haplotypes of a genome-wide SNP map.

[0136] In addition to the database discussed above, the computer system of the present invention includes a user interface capable of receiving entry of nucleotide occurrence information regarding at least one SNP. The interface can be a graphic user interface where entries and selections are made using a series of menus, dialog boxes, and/or selectable buttons, for example. The interface typically takes a user through a series of screens beginning with a main screen. The user interface can include links that a user may select to access additional information relating a non-beef livestock SNP map.

[0137] The function of the computer system of the present invention that carries out the trait inference methods typically includes a processing unit that executes a computer program product, itself representing another aspect of the invention, that includes a computer-readable program code embodied on a computer-usable medium and present in a memory function connected to the processing unit. The memory function can be ROM or RAM.

[0138] The computer program product, itself another aspect of the invention, is read and executed by the processing unit of the computer system of the present invention, and includes a computer-readable program code embodied on a computer-usable medium. The computer-readable program code relates to a plurality of sequence records stored in a database. The sequence records can contain information regarding the relationship between nucleotide occurrences of a series of non-beef livestock single nucleotide polymorphisms (SNPs) and a trait of one or more traits. The computer program product can include computer-readable program code for providing a user interface capable of allowing a user to input nucleotide occurrences of the series of non-beef livestock SNPs for a non-beef livestock subject, locating data corresponding to the entered query information, and displaying the data corresponding to the entered query. Data corresponding to the entered query information is typically located by querying a database as described above.

[0139] In another embodiment of the present invention, the computer system and computer program products are used to perform bioeconomic valuations used to perform methods described herein, such as methods for estimating the value of a non-beef livestock subject or a product obtained therefrom.

[0140] Certain embodiments of the present invention provide methods, systems, and kits identical to those discussed above, and herein, except that the trait is milk production, a trait affecting milk production, a characteristic of milk, a characteristic of a dairy product, milk component composition, or mastitis resistance. In these embodiments, the methods, systems, and kits relate to all livestock (i.e. they include beef livestock).

[0141] Accordingly, in certain embodiments, the present invention provides a method for inferring from a nucleic acid sample of a livestock, a trait of milk production, a trait affecting milk production, a characteristic of milk, a characteristic of a dairy product, a milk component composition including fat, protein, and bioreactive molecules, or mastitis resistance, for the livestock. The method includes identifying in the nucleic acid sample, at least one nucleotide occurrence of a single nucleotide polymorphism (SNP), wherein the nucleotide occurrence is associated with the trait and wherein the trait is thereby inferred.

[0142] The livestock subject can be, for example, a cow, a goat, a sheep, a buffalo, a camel, a horse, or a deer. The trait can be, for example, milk protein content, milk fat content, milk amino acid profile, milk fatty acid profile, bioreactive molecule content, milk taste appeal, or taste appeal of a dairy product. Furthermore, the trait can be taste appeal of milk, cheese, yogurt, cream, butter, or ice cream. Alternatively, the trait can be milk or dairy product solids content, calcium content, riboflavin content, nitrogen potassium content, protein content, casein content, fat content, whey content, vitamin A content, vitamin D content, or phosphorus content. The trait can also be lactation period or production in milk of a transgenic protein or transgenically-produced pharmaceutical product.

### EXAMPLE

[0143] Approximately 1×coverage of the chicken genome was sequenced (MMIC) to identify SNP markers. Genomic DNA libraries from four (4) lines of chickens comprising a dam-line broiler, a sire-line broiler, a commercial layer, and Red Jungle Fowl were created using strategies developed by Celera Genomics (Venter et al. 2001. Science 291: 1145-1434). The constructed libraries were size selected to create 3 distinct categories for whole-genome shotgun sequencing: two point five (2.5), ten (10) and fifty (50) kilobase insert libraries.

[0144] The two point five (2.5) kb libraries were sequenced producing fragments of over 600 bp. The number of fragments of each source of sequence was: dam-line broiler—418,299, sire-line broiler—436,522, layer—444,423, and Red Jungle Fowl—464,224, for a total of 1,095,014,051 bp of sequence.

[0145] The fragments were aligned using proprietary assembly programs developed by Celera Genomics and single nucleotide polymorphisms (SNPs) identified by mismatches of the genomic sequence at a single base. There were 96,631 fragments (see SEQ ID NOs:1-96,631 included in Table 1 on a compact disc as filed herewith) identified with single nucleotide differences or SNPs, or a putative SNP marker was identified approximately every 11,000 bases. The frequency of each base transition or substitution follows the distribution of human and cattle SNP data: G to A—35.5%, T to C—35.7%, G to T—7.1%, G to C—6.9%, A to C—7.3%, and A to T—7.6%.

[0146] To map MMIC sequence and develop an evenly dispersed informative map for discovery of chicken traits, public working draft chicken sequences (e.g., the world wide web at http://genome.wustl.edu/projects/chicken/ and http://www.genome.gov/11510730) were downloaded from Washington University Medical School Genome Center Website (e.g., world wide web at http://genome.wustl.edu/projects/chicken/index.php?softmask=1). All fragments from MMIC were repeat-masked then blasted to the public chicken genome working draft. The present study has determined that 95.6% of MMIC fragments have homology with e values less than 10⁻⁵.

[0147] A Whole-Genome Chicken Discovery Map (WGCDM) is developed by selecting 8,000 SNP markers from the 96,631 putative markers (SEQ ID NOs:1-96,631). Each marker will be separated by approximately 150,000 bp, approximating a 0.5 cM discovery map. An exemplary model for developing such a map is provided in PCT Application No. PCT/US2003/04176, filed Dec. 31, 2003, incorporated herein by reference. Approximately 12 putative SNP markers are available for selection for WGCDM within each 150,000 bp bin of chicken sequence. Other factors such as location to coding regions, homology to other species, actual nucleotide distribution, and assay development potential will be considered when selecting SNP markers to undergo validation to create the discovery map.

[0148] With regard to selecting an experimental population, birds or avian species from a commercial production or breeding facility are selected for study. Each bird or avian species must have any or all of the following production phenotypic traits recorded: egg production, feed efficiency, livability, meat yield, longevity, white meat yield, dark meat yield, disease resistance, disease susceptibility, optimal diet time to maturity, time to a target weight, weight at a target time point, average daily weight gain, meat quality, muscle content, fat content, feed intake, protein content, bone content, maintenance energy requirement, mature size, amino acid profile, fatty acid profile, stress susceptibility and response, digestive capacity, production of calpain, calpastatin activity and myostatin activity, pattern of fat deposition, fertility, ovulation rate, or conception rate. Birds may also have the following health information: general robust health and/or specific resistance to any infectious or genetic disease, including, but not limited to Exotic New Castle Disease, Salmonella infection, ascites, and Listeria infection.

[0149] The population structure can be of several types. For a linkage-disequilibrium (LD) study, known as a population-based design, one possible experimental design would utilize 3000 unrelated commercial birds or avian species will be phenotypically characterized for the traits described above. For a study that relies on linkage-disequilibrium and linkage analysis, known as a family-based design, one possible experimental design would contain 2000 progeny from 40 sires, mated to 2000 dams, with half-sib groups of 50 progeny per sire. Other designs are possible depending upon the use of the results.

[0150] The present disclosure provides 96,631 putative markers (SEQ ID NOs:1-96,631) identified from whole-genome shotgun sequencing and assembly. Using in silico techniques, approximately 8,000 of these markers are selected to undergo a marker validation test. Each of the putative discovery markers are tested in a small validation group of 24 to 40 animals, depending upon the experimental population. Markers failing assay development, Mendelian inheritance checks, Hardy-Weinberg equilibrium, monomorphic tests or paralog tests are replaced with other markers within the 150,000 bp bins of genomic sequence until a complete map of at least 8,000 evenly dispersed markers are identified to create the WGCDM.

[0151] A whole-genome association study can be undertaken in a number of ways depending on the number of animals, number of traits under study and utility of the product. The most likely, but not only, design comprises genotyping individual animals with the WGCDM markers. The results are platform independent and would result in a genotype such as XX, XY or YY for each animal at each SNP locus.

[0152] Another exemplary strategy includes pooling nucleic acids from about the top 10% and about the bottom 10% of animals based on the value of their trait. These pooled nucleic acid samples can be genotyped using quantitative PCR methods to determine the relative distribution of each nucleotide in the sample. Differences in the estimates of allele frequency of the high and low groups can be used to triage the markers and identify those that are associated with the traits of interest. When the target markers are identified, all animals can be genotyped with the markers.

[0153] The analysis of whole-genome data is also included in the present study. Exemplary analysis techniques can be divided generally into those techniques relating to 1) population-based designs and 2) family-based designs.

[0154] With regard to population-based designs, the simplest and most conservative approach is to perform least-squares regression for every SNP. The input to the analysis is whether there are zero, one or two occurrences of a certain allele. The null hypothesis of no association is tested using a test statistic such as the regression variance (F) ratio. Two parameters are estimated, the significance of a marker on phenotype and the size of the effect. When testing hundreds of SNPs in a single experiment, the probability of falsely identifying significant markers (false positives) is very high and results must be adjusted for the effect. Adjustments to the significance thresholds include: the Bonferroni correction, the Lander and Botstein (Nature Genetics. 1995. 11(3): 241-247.) genome-wide significance thresholds, or permutation tests (Churchill and Doerge. 1994. Genetics 138: 963-971). However, the overestimation of the size of the allelic effects is a serious problem when performing regressions at individual SNP. This occurs because of the co-linearity of the SNP genotype data. Simultaneous estimation of all allelic effects using least-squares regression is not possible. Because data sets are of limited size, there will be insufficient degrees of freedom to fit all effects in the one regression model.

[0155] Xu (Genetics 163: 789-801, 2003) describes a Bayesian regression model that can be used to simultaneously estimate allelic effects of all SNP in a genetic association study. This method utilizes shrinkage parameters that can be estimated from the data. However, the method has no formal means to set significance thresholds, it only highlights which SNP have negligible effect. To overcome this problem, the Bayesian regression model described previously could be used in conjunction with a variable selection procedure (George and McCulloch, Journal of the American Statistical Association 88: 881-889, 1993) or Bayesian model averaging could be utilized as reviewed in a paper by Hoeting et. al. (Statistical Science 14, 382-401, 1999).

[0156] However, least-squares and Bayesian regression still treat each SNP as independent, whether SNP are tested individually, or simultaneously in one analysis. If SNP markers are correlated due to proximity of the chromosome, these strategies can be inefficient. Several methods have emerged which analyze an ordered set of genetic markers known as a haplotype block or a chromosome segment. For each block an individual will carry a maternal and paternal haplotype. One approach to analyzing haplotype blocks is to fit the maternal and paternal haplotypes of each animal using either a standard linear model framework or using Bayesian analysis. The Bayesian analysis will be able to handle the situation of analyzing many blocks simultaneously. Meuwissen et al. (Genetics 157: 1819-1829) simulated the effects of 50,000 marker haplotypes. In a Bayesian analysis they were able to estimate all haplotype effects using only 2,200 observations. Shrinkage parameters, similar to that used by Xu (see above) were used to estimate the approximate significance of each segment.

[0157] Methods are also emerging which identify the minimal set of SNPs, called tagSNPs, which are able to resolve all possible haplotypes for a given region (Stram et. al. 2003 Human Heredity 55: 27-36) by selecting a maximally informative set of single-nucleotide polymorphisms for association analyses using linkage disequilibrium (Carlson et. al. 2004. American Journal of Human Genetics 74: 106-120).

[0158] When a causal mutation affecting a quantitative trait occurs on a chromosome, the mutation is initially in complete linkage disequilibrium with all other alleles on the chromosome, but not necessarily across all individuals in the population. The disequilibrium among distant alleles erodes quickly due to recombination, but erosion is slower for alleles that are close. If individuals in a population share the same causal mutation they will also likely share the same alleles proximate to it. The assumption here is that they share a distant unknown common ancestor. Haplotype block analysis methods can be further improved by accounting for the degree of haplotype sharing among individuals. Sharing can be more accurately defined as the degree to which haplotypes are identical by descent (IBD). Meuwissen and Goddard (2000. Genetics 155: 421-30) have proposed using a variance covariance matrix of haplotype effects in the model. The covariances between haplotype effects are the probabilities that the QTL position embedded in the haplotype is IBD, conditional on the marker information. They were able to compute these probabilities using a genomic drop simulation. A later paper describes a deterministic method, based on coalescent theory, to arrive at these probabilities (Meuwissen and Goddard. 2001. Genetics Selection Evolution 33: 605-634). Both methods to compute IBD probabilities assume that the number of generations to a common ancestor and the effective population size of the founder generation are known. They also assume one single population that has grown in isolation since it was founded. Present day livestock populations are most likely the result of more complex evolutionary processes, such as bottlenecks, admixture and inbreeding. Coalescent theory (Kingman, Stochastic Processes and Their Applications 13: 235-248, 1982) could be further utilized to better understand the evolutionary dynamics of studied populations.

[0159] In general, traditional linkage studies provide an opportunity to trace inheritance within families. Differences between the phenotypic means of offspring groups inheriting alternative marker alleles indicate which marker alleles are linked to QTL alleles. Many statistical techniques based on either linear regression or maximum likelihood are used to analyze the data. Recombination between marker alleles and QTL alleles can be taken account of by factoring recombination into the likelihood or regression coefficients.

[0160] A family based design in a genetic association study is likely to be more complex. The families are likely to have complex genealogies for which traditional linkage calculations are not computationally feasible. One option is to ignore family structure and operate on the same premise as population based designs. The potential problem with this strategy is similar to the problem of confounding due to stratification caused by breed type. Shared background genes and shared environmental effects may cause individuals within families to display similar phenotypic variation. Any SNPs that are in high frequency in that family are potentially associated with the trait.

[0161] Human geneticists devised the transmission disequilibrium test (TDT) to avoid spurious population associations caused by ethnic stratification of a sample of people affected by a disease (Terwilliger and Ott. 1992. Human Heredity 42: 337-346; Spielman et. al. 1993. American Journal of Human Genetics 52, 506-516; Rabinowitz. 1997. Human Heredity 47: 342-350). In families, certain phase combinations of marker and QTL alleles exist on parental chromosomes. Because the loci are linked, these combinations will be preferentially transmitted from parent to child. In contrast, marker alleles associated with the trait due to stratification, but unlinked to the QTL, are not preferentially transmitted to children.

[0162] The same principle can be used in association studies in livestock where family based designs are used. That is, associations between SNPs and a quantitative trait should be conditioned on parental genotypes. Separate transmission disequilibrium tests could be performed at each SNP. This approach will encounter multiple testing problems and likely result in overestimation of allelic effects. The TDT is also restricted to within family information, which will affect the power of the test. A more powerful approach would be to analyze chromosomal segments and condition the variance covariance matrix of haplotype effects on parental information. Recently Meuwissen et al. (2002. Genetics 161: 373-379) outlined such a method. Essentially if two haplotypes occur in animals with a known common ancestor, then the calculation of IBD probability is modified to account for this. However this method is restricted to analyzing one segment at a time, as in interval mapping.

[0163] A further refinement to this procedure would be to analyze all segments simultaneously. This would involve computing many hundreds of variance-covariance matrices, each of which can be of considerable order. Blott et al. (2003. Genetics 163: 253-266) propose reducing the number of observed haplotypes into clusters using distance matrix methods such as UPGMA. Such an approach would aid in reducing the computational burden when analyzing all segments simultaneously.

[0164] Gianola et al. (2003 Genetics 163: 347-365) suggest extending the modeling of phenotypic-marker associations by including chromosomal effects, spatial covariance of marked effects within chromosomes and family heterogeneity. The techniques suggested have merit and should be examined.

[0165] Prior to phenotypic analysis the following are completed: a) the resource population is scrutinized for population stratification using appropriate software (e.g. Pritchard et al. Genetics 155: 945-959); b) Hardy Weinberg disequilibrium (HWD) are measured for each SNP; c) two-locus linkage disequilibrium (LD) metrics (D prime and R2) are computed for all pair-wise SNP combinations and LD correlated with physical distance; and d) two-locus sample probabilities are computed under various evolutionary models (Hudson 2001 Genetics 159: 1805-1817; McVean et al. 2002 Genetics 160: 1231-1241) in order to determine whether the observed level of linkage disequilibrium is unusually large or small, and to estimate recombination rate variation across the genome.

[0166] Phenotypic analysis can involve both classical and Bayesian approaches. The classical approach consists of performing least squares regressions on all SNP separately and on small sets of SNP. A hierarchy of models are then tested. The standard model is one that does not assume heterogeneity of variance due to chromosomal structure. The hierarchy begins by partitioning the variance of marker effects between chromosomes; then by introducing a covariance structure which accounts for the possibility that adjacent within-chromosome effects are more strongly correlated that those further apart. In the case of family-based designs a full relationship matrix under additive inheritance will be introduced in order to account for polygenic effects. In addition the model can be extended to include chromosome and within-chromosome effects that are family specific. Permutation tests will be used to derive significance thresholds.

[0167] The Bayesian approach can be completed using a Markov Chain Monte Carlo approach. The same hierarchy of models that were tested in the classical setting can be used, except that all SNP can be now included in the one analysis. A suitable variable selection procedure can be included in the Bayesian regression set up in order to identify models with the highest posterior probability. The model which fits the effects of haplotype could also be used and once the best model has been identified molecular genetic values (MGVs) can be computed for individuals. MGVs combine the individual marked effects into one total molecular score. Each MGV includes an associated accuracy.

[0168] Current methods for selection of grandparents and parents of commercial birds or avian species are based on the birds own performance for traits and the performance of their progeny and other relatives. The information is compiled to estimate the genetic merit of an individual bird or avian species. In order to get an accurate prediction of the genetic merit, the animal's phenotype and progeny must be measured. These methods are costly and time consuming. In one embodiment, MGV's birds or avian species could be selected at birth based on their SNP marker genotype. Only those birds with the best genotype would be selected to be parents of the next generation. Subsequently, birds with the best MGV's for specific markets and customers are identified and utilized to create market specific animals. Parents are selected to optimize hybrid vigor in the commercial birds or avian species. Progeny resulting from mating of selected parents would contain the optimum combination of traits, thus creating an enduring genetic pattern and line of animals with specific traits. These lines are monitored for purity using the original SNP markers and identified from the entire population of non-beef livestock and protected from genetic theft.

[0169] In another embodiment, commercial birds or avian species are cloned based on their genetic potential for a specific trait or series of traits. Birds or avian species are tracked for historical and epidemiological reasons, and the location of an animal from embryo to birth through its growth period, to harvest and finally the retail product after it has reached the consumer could be monitored.

[0170] The results of the present whole-genome association study can be used to select parents of commercial birds, make decisions concerning the animals to mate to produce commercial birds and produce branded products for growers or processors. These tools could be used to assess health condition for resistance to disease or infection, susceptibility to infection with and shedding of pathogens such as E. coli, Salmonella, Listeria, and other organisms potentially pathogenic to humans, or regulation of immune status and response to antigens.

[0171] Provided herein are methods for inferring a trait of a non-beef livestock subject from a nucleic acid sample obtained from the subject. Although many of the descriptions recite nucleic acids isolated from a chicken subject, these descriptions are made for convenience and to avoid redundancies. Therefore, the method is not to be construed as limited to inferring traits of chicken livestock but rather to be read on the identification of certain traits in any non-beef livestock subject according to the present methods.

[0172] Although the invention has been described with reference to the above example, it will be understood that modifications and variations are encompassed within the spirit and scope of the invention. Accordingly, the invention is limited only by the following claims.

The application's sequence listing, which the Patent Office published only in electronic form, follows.

SEQUENCE LISTING (96631 sequences)

SEQ ID NO: 1 - DNA, 600 bp, Chicken  19866894083704_1
atttcccttcttgaattgttatcattctccttctcacattcgtattatttattccatggactggaaagaacttgtgccccagaaaaagatgaaagaattgtatgcatgctgtaatattattcatccttctaatattataataacatttggagaaactcccataacagtggattacttctgcatatgactatgttatctttcttagtaagagcttttcataaaccattgttcagccattaacaaaaactgagtatctgtgcaccccgtgattctggtctgctacaaaatgtaagctttcaytgacttactggatatgtggtttaaaaatgtaatgctttgccataagaaaacatattctttgagttgaagcaggaaatcttatggcaattctccgtagttttgattttagctatacactctgtagagcaggctttgaggcaagtttttgaaaaggaactttcaaacactgcttcaagaagtggctgatccattgagcttcattaacaatgtaattggtctctggtttagatgggagaattgcaagtattctatgccacatggtagagatgacgtttaaattgggttttttaaatatgcaca

SEQ ID NO: 2 - DNA, 600 bp, Chicken  19866894083704_2
atgtaatgctttgccataagaaaacatattctttgagttgaagcaggaaatcttatggcaattctccgtagttttgattttagctatacactctgtagagcaggctttgaggcaagtttttgaaaaggaactttcaaacactgcttcaagaagtggctgatccattgagcttcattaacaatgtaattggtctctggtttagatgggagaattgcaagtattctatgccacatggtagagatgacgtttaaattgggttttttaaatatgcacacttagtgtacttaattgactgtaaartaattattctatgctgtataattatgttgtggcagggagcaaggcttctaaacatctccgaggcaaatgataacagcctcagaattaagacattattctctcctaaaatatacagtaaaataacaaaagtgttttatctccacagtgaggtctttgcatgagtcttgaggctatatttaagaagatcctcctaatgctttcttcccatcattttctacccttttctcatactatttcaatttataagtagagaaggaaatgcacatcaaaccatgggcaagaatgaggattaaaatcccc

SEQ ID NO: 3 - DNA, 600 bp, Chicken  19866894083711_1
gaaggaacaacaaagaaaaaaaaaaaccaaaagtgttatgtctgcagagcaccgaagtatttcccaatctgctgatcagctctcatgcttataagttagaaatgctttagcactggctgagagtctgcagtatgctaaatagcacaagattcagcttgaagagtgtaagaatctcatcctactgcaaattgctgggaaaagaagggagggggggaaaaaccaacacaagaaagaaaaaaaaaaacagacccaaacattagaaagggctttgagtgctgccagttattacaaggcttatawataggatactttgtcatttaaattaagatttttgagatctcagtttatagctcatgtcagcgtttaaaatgaagatcaataagttgttgaaaagcttcacaaacaatttagtcttagcccttattctaatgtgcagtccaagcaatgaaatgctgatctctacaagtccagcaatttctccagtgctttttgtaaaagaattccattctgaatattaatcacttgtgttgctttggaagtatcctttctgacactggaaaaaaagagtgatgctgtccgtgtattttctggaccaaagaa

SEQ ID NO: 4 - DNA, 600 bp, Chicken  19866894083712_1
tttcttttgttacaagaatagcaatgcagctttcggctgagagtttgctgccttgtacaaaactctatcaaacatgacaaaaatggaatattgtgttggtgtagccaaggttgctgcaaccacttcagtcttcagagtcgattcggcggtctactagcaaggcagacgacccaaaatgtatttggtgcattttcagtcacaaacagcccacgaaatatgtattttcaatacagcagccacttcactttgattgaatcaggcattcattcttgagcagttctctctgatgcagcaaagggytttgccactgttgtggtttaggtgtgtttaccagccactggcatgaaggtgggtcacaaagcagaggacatatccatgtcatccagctttgctttgttttactggcaaatgagtggtcactaattgctccttccagaggtaagatgccgggaaagcagggaaacccctctccatttactgcttgcaaagagtcagcctgatctcaattcatctgttattgtcaaattcaatggactggttttaggtagtgatttgtttctgttggacccactcctgagcataggcacaaagtacacaagg

SEQ ID NO: 5 - DNA, 592 bp, Chicken  19866894083712_2
agcagggaaacccctctccatttactgcttgcaaagagtcagcctgatctcaattcatctgttattgtcaaattcaatggactggttttaggtagtgatttgtttctgttggacccactcctgagcataggcacaaagtacacaaggtaagggaaggatgcacggctgggtaatgtactgccttgctcaagctgttggggttggtatacactgtacctgtcaccataaggttgagccattccaggctccagagtttcctctcctgatgtctattatcaccaagagggaggcttcaaaacrtttgtgtcttcatgtgcaagtgagaaatagagttgctgaattgtttcctcctgggaaatattgtggagtatgaataaactctgrgttgagctaactgtgtctgtctgcatctaggcaaaggtcatcgtggcctctttagggccaggctctaaaggaaggsactgtctygctgagctgcctgaatctgcctcaagacctctcccactgtacrccagcaatatgggggcatttgggatgtcccaaatacagcagagaaactgtgaccacagccaccatttcaacaaagtgctag

SEQ ID NO: 6 - DNA, 508 bp, Chicken  19866894083712_3
gttttaggtagtgatttgtttctgttggacccactcctgagcataggcacaaagtacacaaggtaagggaaggatgcacggctgggtaatgtactgccttgctcaagctgttggggttggtatacactgtacctgtcaccataaggttgagccattccaggctccagagtttcctctcctgatgtctattatcaccaagagggaggcttcaaaacrtttgtgtcttcatgtgcaagtgagaaatagagttgctgaattgtttcctcctgggaaatattgtggagtatgaataaactctgrgttgagctaactgtgtctgtctgcatctaggcaaaggtcatcgtggcctctttagggccaggctctaaaggaaggsactgtctygctgagctgcctgaatctgcctcaagacctctcccactgtacrccagcaatatgggggcatttgggatgtcccaaatacagcagagaaactgtgaccacagccaccatttcaacaaagtgctag

SEQ ID NO: 7 - DNA, 432 bp, Chicken  19866894083712_4
cacggctgggtaatgtactgccttgctcaagctgttggggttggtatacactgtacctgtcaccataaggttgagccattccaggctccagagtttcctctcctgatgtctattatcaccaagagggaggcttcaaaacrtttgtgtcttcatgtgcaagtgagaaatagagttgctgaattgtttcctcctgggaaatattgtggagtatgaataaactctgrgttgagctaactgtgtctgtctgcatctaggcaaaggtcatcgtggcctctttagggccaggctctaaaggaaggsactgtctygctgagctgcctgaatctgcctcaagacctctcccactgtacrccagcaatatgggggcatttgggatgtcccaaatacagcagagaaactgtgaccacagccaccatttcaacaaagtgctag

SEQ ID NO: 8 - DNA, 424 bp, Chicken  19866894083712_5
ggtaatgtactgccttgctcaagctgttggggttggtatacactgtacctgtcaccataaggttgagccattccaggctccagagtttcctctcctgatgtctattatcaccaagagggaggcttcaaaacrtttgtgtcttcatgtgcaagtgagaaatagagttgctgaattgtttcctcctgggaaatattgtggagtatgaataaactctgrgttgagctaactgtgtctgtctgcatctaggcaaaggtcatcgtggcctctttagggccaggctctaaaggaaggsactgtctygctgagctgcctgaatctgcctcaagacctctcccactgtacrccagcaatatgggggcatttgggatgtcccaaatacagcagagaaactgtgaccacagccaccatttcaacaaagtgctag

SEQ ID NO: 9 - DNA, 381 bp, Chicken  19866894083712_6
tgtacctgtcaccataaggttgagccattccaggctccagagtttcctctcctgatgtctattatcaccaagagggaggcttcaaaacrtttgtgtcttcatgtgcaagtgagaaatagagttgctgaattgtttcctcctgggaaatattgtggagtatgaataaactctgrgttgagctaactgtgtctgtctgcatctaggcaaaggtcatcgtggcctctttagggccaggctctaaaggaaggsactgtctygctgagctgcctgaatctgcctcaagacctctcccactgtacrccagcaatatgggggcatttgggatgtcccaaatacagcagagaaactgtgaccacagccaccatttcaacaaagtgctag

SEQ ID NO: 10 - DNA, 600 bp, Chicken  19866894083714_1
ttgccacttcagcccacgtatttcaatgtcgcaccctctcctctcacctgaggcagcatttaaggttgtaggcagcgtctcatggtatgcatcttggtatgcatctgcatttccttctgcaccttgccaggcctgcagtcacatcatgagctgccttttggagttcagcagccctcctttgttagaggacaagttcaccaattggccccgctgcctgctctcactggagtgcttcaagctgcctaactactgcacccctgtaccaagggtttgcctaaagcttccccacatccctctcayatgcacaaatcagaaaaacccataagggcagcccagactgtgctttctctggtgttttgtccagcttacttggaaatgacagggaagtgcttccagtagctgcagaatagcctgatttctagcttcagaaaccttaatgctttgcttggtttccttttatctgcctctttatctgtttaaatttagcctggtttctatatgctgtttcccaagtctgagccaatatcagttacccagcacccaagggggtgccacgttccttcttccttcagctttactcattctctctcaggaactgag

SEQ ID NO: 11 - DNA, 600 bp, Chicken  19866894083714_2
ccttaggggagcagaccagtctaaatcttacccgcatccatttcagtttacagcaaaccctgtcactactctgctgcttggtggagtcttttgcacaacgtgctccacagatcaccatccctgttggttttaatccctcagcaggtctgccaggagaaaggattttccatcctagatgaggatctatttccatggttctccagcaattggatctgagatagccaggccgtaggggcaagacaaagagctgaatctttacaactggacgtgcaggaagctggttaaaaatcctcttattckcttttcccttctgccaacagaatagcgttctgttaccatcctttcaaaataatagagttttaccttgtgtgaaagccttcaaggccagctatgactgtggaattgcagtaggaaaaagaactgcagtgatgtggctctttcatgacttgctgtgggtaagctgaagcttcccatgccacatgacaaacctgggcattaattttgtaaggactcayggtggcagagacctgaaggttcttacagagctttagcagcaaacagaacattctcccttatcctcaaagcctccagttacacaga

SEQ ID NO: 12 - DNA, 600 bp, Chicken  19866894083714_3
agatagccaggccgtaggggcaagacaaagagctgaatctttacaactggacgtgcaggaagctggttaaaaatcctcttattckcttttcccttctgccaacagaatagcgttctgttaccatcctttcaaaataatagagttttaccttgtgtgaaagccttcaaggccagctatgactgtggaattgcagtaggaaaaagaactgcagtgatgtggctctttcatgacttgctgtgggtaagctgaagcttcccatgccacatgacaaacctgggcattaattttgtaaggactcayggtggcagagacctgaaggttcttacagagctttagcagcaaacagaacattctcccttatcctcaaagcctccagttacacagacaggtgaatctttgaaaaaattgctttaactactccagcacaaaagtccattggcccattctttccccatgtttttttttttttcccctgcacttctatcaactcatgcttcctttactcttcctcttaactccaaacacattgctgtttttgccttttcacactgcctgatattgaccactgtgtcctcaccactaaatcccctctgctacaga

SEQ ID NO: 13 - DNA, 600 bp, Chicken  19866894083720_1
cctgagttcatttataaactgtgagttggagctatgcctgctgaccaacaaagaccaacttcagaaaagttatgctggacactacaaaactttctgtatatttctcacctcattctttcactgaacgaactgtaaaatgaccaagaactaaaaatcaaaacccaacagttattcctgacctcgcagctgctggcattacttgtttgagttgttttccagccaaaataattccctactctgagcacaactgtgaaagttacatgaattcagtatatgcagccattgttatctaaagacctyatcagtgtttactgtgatctttacttctaattaatactatttttattaatgactgccagttggccacagttgtgatcaaagccccaagtattttgtgcagtataaatatataatccatttacactttggctgtaaagagtttacaacttagatagaccaaaacattattcttttacagacatggaaaagagagattaagtcacatttttgaagccatgcagaaagactgaagaggaaccatgacttaaatccagttcagtggggtaggtatctctccccgtctaatatcaccaagactgc

SEQ ID NO: 14 - DNA, 600 bp, Chicken  19866894083721_1
cacagagggtggtgacgcactggaacaggttgctcaaggaggttgtggatgccccatccctggaggcattcaaggccaggctggatgtggctctgggcagcctggtctagtggttggtgacactgcacatagcaggaaggttgaaacttgatgatcattgtggtccttttcaatccagaccattctatgattctatatattatggttagttatggttacgcaaaaccatattttactcctatggcattcattctatcatcactataggcaaacaaaaattcttcattgtctattctgtarttttcatttatgccagcagtttctccttttgatccatatggatcaaatttgtattttgtacagtgactcccaagggctgaagactgatgtattgaaacaggagcagttttcaacacaagcaagagaaatagatgaggyaactcatgataacagagttcttaagcctggaaatacgagtagattgaactcaaaatttcattggtaagaatgcttataatctacagcttcgtagaaaataagccgtctcacttactcacagagtaatgagaccatttattattaactgcttaccagatgcgg

SEQ ID NO: 15 - DNA, 600 bp, Chicken  19866894083721_2
ggttgaaacttgatgatcattgtggtccttttcaatccagaccattctatgattctatatattatggttagttatggttacgcaaaaccatattttactcctatggcattcattctatcatcactataggcaaacaaaaattcttcattgtctattctgtarttttcatttatgccagcagtttctccttttgatccatatggatcaaatttgtattttgtacagtgactcccaagggctgaagactgatgtattgaaacaggagcagttttcaacacaagcaagagaaatagatgaggyaactcatgataacagagttcttaagcctggaaatacgagtagattgaactcaaaatttcattggtaagaatgcttataatctacagcttcgtagaaaataagccgtctcacttactcacagagtaatgagaccatttattattaactgcttaccagatgcggttttgttggccttccattaagcttttagtctataatgtaaacttacataagtaccatgattttgttttctgaaaaggaactaggaactctaataaaaaatagtttcattaacagtctatatagtcccataatgagaga

SEQ ID NO: 16 - DNA, 457 bp, Chicken  19866894083722_1
gtggcctataaagggatcaattctgtctcttctgtcacgtatgaatgtgaacgcacatgcaaacatacacaaaacctgaagaaacgtggccaggcccatggagggaagaaaagctgagaaggacccattagaaaccgtgctgtaaacagaaacagagcccataaagctcctccagcactgttcccagccacgtaattctccactttccttatacctctcaggtggccaatgcagaccacctacaaattcgcctttgcttacagcatcgtatacaaagcatgggcattagtccattatatkwgtttaagaagccagctcatgccagtagaattgcagcagtaatgatgtgagacttaacacttacagctccacaccccgcatggaaatcccatgatggcttcattacgctgggaacttcccagagcccataaaatggtgaataaactttacctgagga

SEQ ID NO: 17 - DNA, 456 bp, Chicken  19866894083722_2
tggcctataaagggatcaattctgtctcttctgtcacgtatgaatgtgaacgcacatgcaaacatacacaaaacctgaagaaacgtggccaggcccatggagggaagaaaagctgagaaggacccattagaaaccgtgctgtaaacagaaacagagcccataaagctcctccagcactgttcccagccacgtaattctccactttccttatacctctcaggtggccaatgcagaccacctacaaattcgcctttgcttacagcatcgtatacaaagcatgggcattagtccattatatkwgtttaagaagccagctcatgccagtagaattgcagcagtaatgatgtgagacttaacacttacagctccacaccccgcatggaaatcccatgatggcttcattacgctgggaacttcccagagcccataaaatggtgaataaactttacctgagga

SEQ ID NO: 18 - DNA, 600 bp, Chicken  19866894083723_1
aaaagatagaaaatattagtattcagctgtcatctctaaactaagatccactgatttatatccctttttcagtcttcttttttttcctgtttaaactgtcctctctctgattcttcatgggaatatcccttatactgggatgggaatatacccttagctcatattcagtacagttaaaggtaggccttactgtccttacctgaagttcccttcaaatttttctctcttgcatactccattgatctgtgtggacagtgttgagatccaaatgatcactccaggtacatcacttgcagaacmatttcacttgtttccttcctcatattttgtctcaaacttgccaattccttcctcatagcatctgaggaaaagttcaggrtaaaggaaatccatctggcctttcatatcttctatcttgctgtgaagccttttcctttggggattaacaggttccaacttatccagtagtaccagttcagatttctgctgttaatggtttttctctagcctgttctgtttcctccttccactggctaaactgactcattaagtgcaagtcatggtacttcatgacctgttcctattccatctatattttct

SEQ ID NO: 19 - DNA, 600 bp, Chicken  19866894083723_2
ttttttcctgtttaaactgtcctctctctgattcttcatgggaatatcccttatactgggatgggaatatacccttagctcatattcagtacagttaaaggtaggccttactgtccttacctgaagttcccttcaaatttttctctcttgcatactccattgatctgtgtggacagtgttgagatccaaatgatcactccaggtacatcacttgcagaacmatttcacttgtttccttcctcatattttgtctcaaacttgccaattccttcctcatagcatctgaggaaaagttcaggrtaaaggaaatccatctggcctttcatatcttctatcttgctgtgaagccttttcctttggggattaacaggttccaacttatccagtagtaccagttcagatttctgctgttaatggtttttctctagcctgttctgtttcctccttccactggctaaactgactcattaagtgcaagtcatggtacttcatgacctgttcctattccatctatattttcttagccatttgaatgagctctcttgcctgcttccttcaacaactatgattaatcatcaaagcaatcttctctactttctt

SEQ ID NO: 20 - DNA, 600 bp, Chicken  19866894083723_3
agctctcttgcctgcttccttcaacaactatgattaatcatcaaagcaatcttctctactttcttctgttactcaagcacttttctaacttcattcttaggagtttattttactgcctataacactgagtcttcatctgtaaaacacttatgtcaagacactacataacagctctctggtggctggtatgtcataatcactgccaatccttcagttatttttccattctttctcttctccctcactactacttatttgctttgtctttattaagatttgaaagtctgtgagctatctatktgtcctttatccatacagcattcagcatggtgggcttctatctcaggacggcattcctggagccatacagatggaaagaaaaagagcattttcagatggtaagctactatttaattttcagtgatttccaaaaggaaattgtggaattttaattgatagtattgaataagtttaatagggttgtagacccctgaaaattaaagtggaaaactaagtgagtcaacagatgacaatatcaagaaatcatttttaaaatgatgatacacctgttttgaaagtctcatatatacagctgatttc

SEQ ID NO: 21 - DNA, 600 bp, Chicken  19866894083724_1
ctgtctcagtttaaaaccactccctcttgtcctatcactatccaccctcataaacagctcttccccctcctgtttctatgctcccttcaagtactggaaggccacaatgacgtctcaatacaccacatctctttttattttatgcagtatttacatggaattgtgctaatccatttacattattagacagttattaccttcggtgtttctgtaaaagtgcccactgttttgttcctacaaacagctccttggatttccctatagatctgaagctgtctccctgaggaaccacctccaacygaaaaaatgcaattgctttctcatacatggagccaatcttttggagcgcagcaaccccacaggtttgtttttaagcactgcacttcctcatctcagcagtgttaggagcaattccagttttgagtttgggtatttcagagctgattgctgttgcagaagctgctggaaaagagtagtccagccataatttgtgagcctgggtctgactctgcctcctctgaacctgagcagggcagcggtgctcttcccccgtcccaaaggcccctccagttcctcattacattttaattccactctgcc

SEQ ID NO: 22 - DNA, 600 bp, Chicken  19866894083728_1
atttctttccccgtccctgcttggcagcagtgtcagaatggctcctcggagagccgctaacaaagcatgcatgtgcagctgtgatttggtgctttacagggacgttttttggctaccagtactgtgctggtgggtagtttaagcatgggtttgtctagagaattaagagttaaaaagcaggctgtgaaaggcttggcaacctagagggagctagcaagctccagccgtgactcattctgcctgtgtcagtcagataagcatcagcatctgtcacgaatgcaggcaggtagggttaaactygagcatgcagagagtgaggagcagggagcctgcactgcaggggttgtaatgtttgttcctggttcttcaattctcatcagcccctcagctacaggagatctatactggctccatggtaacggttttagcacactacacttccatcagcttgtgacaatgggctgtgttctagttacggactgaagagctgtctccttcatagagcaaaaaagagattagtaaatttgctgtgagtgaggatccaagtgatgaaggaggaaaaaaaaaaaggtagaaaatgtgctttagtgaggtaggaat

SEQ ID NO: 23 - DNA, 600 bp, Chicken  19866894083733_1
agcctggtcctgcactcacgaccctgagggaggccagcccttatcaggtagcacacatcagccggtctgtgcagaggggccctggcggctccagtttcaggctgcggatccaggcaggcggtggtgctgcaccaaggcttctgcaggggatgaggaagaaactctattcctccctttttttttccccctttgttcaatgcctgcttagattcggtggctgcagagcagaggcccctgaggagagccaagcagtgaggcatacagcagcctccagtcccctgcatgctcagcacttcgtgkcatgcyctggtgtgtgtatgcacrataggtttcttggtggctgcatgcctggcagcaagaacaggggtgtcccgggagtttctgtgcgagtgtgtaagagaaaattgtgcctgtgggtgccccctttgcagtcccgctctagtgcatctttgcagtgggatgtgctcaagcttttgtccgcagccatacccgcacacagtggaggctccgagrgcctgaccattgttcgcagttaagaaatgtgtctgtgggttgtcatgggggcccctgcgccccgctcagtcaccgtggtcctgctgt

SEQ ID NO: 24 - DNA, 600 bp, Chicken  19866894083733_10
ccaacctatgcgaccgctgcatatggctctgccatccccacaaatcagactcagggttttgcagggaaacctgggaggtcccccagcccagacacaagctccctgggcgggctgccagcacacctccacaggttttagcagaaagagggattcggatgcataggaagcatcaggatccmcagccccgagtcatgcgtgtgacaggatggcatttggggcaccacctgccatgggacacgaggcaccgtctgccctgcagaggccacgagtgctgatgtggcayggcagccrtcgtgcacrcacttttgcagagcagcagtccctggctgcagggtgccggcagaggaggagggcagacgactgttggcattggtgcgttcaagcgrgaggtgtgtgcaaagcaggtctgggtttcagcatacaggtggggtcccaggagaggaggccggggcgtccccagtgtgcactcgcacccgactgtggctgtgctgggtgacgctgctcacatccccctacaacacgaatactgaagaaaaaaacatatcaccacaccacagagaaccacaatgccgatcaggctttagactggggcagagttac

SEQ ID NO: 25 - DNA, 600 bp, Chicken  19866894083733_11
cccagacacaagctccctgggcgggctgccagcacacctccacaggttttagcagaaagagggattcggatgcataggaagcatcaggatccmcagccccgagtcatgcgtgtgacaggatggcatttggggcaccacctgccatgggacacgaggcaccgtctgccctgcagaggccacgagtgctgatgtggcayggcagccrtcgtgcacrcacttttgcagagcagcagtccctggctgcagggtgccggcagaggaggagggcagacgactgttggcattggtgcgttcaagcgrgaggtgtgtgcaaagcaggtctgggtttcagcatacaggtggggtcccaggagaggaggccggggcgtccccagtgtgcactcgcacccgactgtggctgtgctgggtgacgctgctcacatccccctacaacacgaatactgaagaaaaaaacatatcaccacaccacagagaaccacaatgccgatcaggctttagactggggcagagttacctttgaggctgtggggcagctggaccagagcagcgcacgaggctggtgccggggctcagtgattaataccatcccagcagcaccag

SEQ ID NO: 26 - DNA, 600 bp, Chicken  19866894083733_2
gtcctgcactcacgaccctgagggaggccagcccttatcaggtagcacacatcagccggtctgtgcagaggggccctggcggctccagtttcaggctgcggatccaggcaggcggtggtgctgcaccaaggcttctgcaggggatgaggaagaaactctattcctccctttttttttccccctttgttcaatgcctgcttagattcggtggctgcagagcagaggcccctgaggagagccaagcagtgaggcatacagcagcctccagtcccctgcatgctcagcacttcgtgkcatgcyctggtgtgtgtatgcacrataggtttcttggtggctgcatgcctggcagcaagaacaggggtgtcccgggagtttctgtgcgagtgtgtaagagaaaattgtgcctgtgggtgccccctttgcagtcccgctctagtgcatctttgcagtgggatgtgctcaagcttttgtccgcagccatacccgcacacagtggaggctccgagrgcctgaccattgttcgcagttaagaaatgtgtctgtgggttgtcatgggggcccctgcgccccgctcagtcaccgtggtcctgctgtgtgccg

SEQ ID NO: 27 - DNA, 600 bp, Chicken  19866894083733_3
tgagggaggccagcccttatcaggtagcacacatcagccggtctgtgcagaggggccctggcggctccagtttcaggctgcggatccaggcaggcggtggtgctgcaccaaggcttctgcaggggatgaggaagaaactctattcctccctttttttttccccctttgttcaatgcctgcttagattcggtggctgcagagcagaggcccctgaggagagccaagcagtgaggcatacagcagcctccagtcccctgcatgctcagcacttcgtgkcatgcyctggtgtgtgtatgcacrataggtttcttggtggctgcatgcctggcagcaagaacaggggtgtcccgggagtttctgtgcgagtgtgtaagagaaaattgtgcctgtgggtgccccctttgcagtcccgctctagtgcatctttgcagtgggatgtgctcaagcttttgtccgcagccatacccgcacacagtggaggctccgagrgcctgaccattgttcgcagttaagaaatgtgtctgtgggttgtcatgggggcccctgcgccccgctcagtcaccgtggtcctgctgtgtgccgtgagatgagctgggcagc

SEQ ID NO: 28 - DNA, 600 bp, Chicken  19866894083733_4
gtggctgcagagcagaggcccctgaggagagccaagcagtgaggcatacagcagcctccagtcccctgcatgctcagcacttcgtgkcatgcyctggtgtgtgtatgcacrataggtttcttggtggctgcatgcctggcagcaagaacaggggtgtcccgggagtttctgtgcgagtgtgtaagagaaaattgtgcctgtgggtgccccctttgcagtcccgctctagtgcatctttgcagtgggatgtgctcaagcttttgtccgcagccatacccgcacacagtggaggctccgagrgcctgaccattgttcgcagttaagaaatgtgtctgtgggttgtcatgggggcccctgcgccccgctcagtcaccgtggtcctgctgtgtgccgtgagatgagctgggcagcagcgcttcccttcgggggccgcttttcaatggcagcggcagagtgccaggtttccgtggcctttctcagcagagggtttgttcggcactgtggagcccaagcattaatgagaaggagcgaggggcaggcagagggagggggagaggagacgtagcggcgagctgttaacagatttgctttttatggagt

SEQ ID NO: 29 - DNA, 600 bp, Chicken  19866894083733_5
cgaggggcaggcagagggagggggagaggagacgtagcggcgagctgttaacagatttgctttttatggagtgcgggagttcattagtggacacagtccagatggctgcaataagctggtgaaatgcgatcctcctgcgggagcaggagcgctggtgaggctgcaagagggaaggggggttggtattcccgggcattccccagacatacccctcattcctcaccctctccctcctgcctcgacagtgccgggaaagagcgtgtcatggggagcagcctttgtctcctccgatgctcagcrygctgacgtgttgccttccctctgcagggagacacccctaagcatagggctgagaaagccaacgaccccgacctggctgcctacctcgagaaccgacagcactaccagatgatccagcgggaggaccaggagacagctgtgtagcgctcagcgtgccttagcccagccagcttgggcaggacgagaagaggacggcacctggcagagctgtgagtctggcccagccctccctacgcgtcagcccagtccctggaggagatggagacagcagggctgtgacccaggctgggctgggactct

SEQ ID NO: 30 - DNA, 600 bp, Chicken  19866894083733_6
gaggggcaggcagagggagggggagaggagacgtagcggcgagctgttaacagatttgctttttatggagtgcgggagttcattagtggacacagtccagatggctgcaataagctggtgaaatgcgatcctcctgcgggagcaggagcgctggtgaggctgcaagagggaaggggggttggtattcccgggcattccccagacatacccctcattcctcaccctctccctcctgcctcgacagtgccgggaaagagcgtgtcatggggagcagcctttgtctcctccgatgctcagcrygctgacgtgttgccttccctctgcagggagacacccctaagcatagggctgagaaagccaacgaccccgacctggctgcctacctcgagaaccgacagcactaccagatgatccagcgggaggaccaggagacagctgtgtagcgctcagcgtgccttagcccagccagcttgggcaggacgagaagaggacggcacctggcagagctgtgagtctggcccagccctccctacgcgtcagcccagtccctggaggagatggagacagcagggctgtgacccaggctgggctgggactctt

SEQ ID NO: 31 - DNA, 600 bp, Chicken  19866894083733_7
ccttgtgttagggaacgtgcacccaccccttcctcagagcatctgggactggcacagctggatgcggggcagctgcattcagtgctgggtctgtgctgctctcaggaatctccctgtgctcccaacctatgcgaccgctgcatatggctctgccatccccacaaatcagactcagggttttgcagggaaacctgggaggtcccccagcccagacacaagctccctgggcgggctgccagcacacctccacaggttttagcagaaagagggattcggatgcataggaagcatcaggatccmcagccccgagtcatgcgtgtgacaggatggcatttggggcaccacctgccatgggacacgaggcaccgtctgccctgcagaggccacgagtgctgatgtggcayggcagccrtcgtgcacrcacttttgcagagcagcagtccctggctgcagggtgccggcagaggaggagggcagacgactgttggcattggtgcgttcaagcgrgaggtgtgtgcaaagcaggtctgggtttcagcatacaggtggggtcccaggagaggaggccggggcgtccccagtgtgcactcgcacccgact

SEQ ID NO: 32 - DNA, 600 bp, Chicken  19866894083733_8
ggaatctccctgtgctcccaacctatgcgaccgctgcatatggctctgccatccccacaaatcagactcagggttttgcagggaaacctgggaggtcccccagcccagacacaagctccctgggcgggctgccagcacacctccacaggttttagcagaaagagggattcggatgcataggaagcatcaggatccmcagccccgagtcatgcgtgtgacaggatggcatttggggcaccacctgccatgggacacgaggcaccgtctgccctgcagaggccacgagtgctgatgtggcayggcagccrtcgtgcacrcacttttgcagagcagcagtccctggctgcagggtgccggcagaggaggagggcagacgactgttggcattggtgcgttcaagcgrgaggtgtgtgcaaagcaggtctgggtttcagcatacaggtggggtcccaggagaggaggccggggcgtccccagtgtgcactcgcacccgactgtggctgtgctgggtgacgctgctcacatccccctacaacacgaatactgaagaaaaaaacatatcaccacaccacagagaaccacaatgccgatcaggcttta

SEQ ID NO: 33 - DNA, 600 bp, Chicken  19866894083733_9
cctgtgctcccaacctatgcgaccgctgcatatggctctgccatccccacaaatcagactcagggttttgcagggaaacctgggaggtcccccagcccagacacaagctccctgggcgggctgccagcacacctccacaggttttagcagaaagagggattcggatgcataggaagcatcaggatccmcagccccgagtcatgcgtgtgacaggatggcatttggggcaccacctgccatgggacacgaggcaccgtctgccctgcagaggccacgagtgctgatgtggcayggcagccrtcgtgcacrcacttttgcagagcagcagtccctggctgcagggtgccggcagaggaggagggcagacgactgttggcattggtgcgttcaagcgrgaggtgtgtgcaaagcaggtctgggtttcagcatacaggtggggtcccaggagaggaggccggggcgtccccagtgtgcactcgcacccgactgtggctgtgctgggtgacgctgctcacatccccctacaacacgaatactgaagaaaaaaacatatcaccacaccacagagaaccacaatgccgatcaggctttagactgggg

SEQ ID NO: 34 - DNA, 600 bp, Chicken  19866894083734_1
aaatgccattaatatctaaaaacaaaatgcatttttaaagcaagaatatccccttaaaatatagagtttccagtgtgcctgggttaaaaaggcagagcttcctatattgattcagaaggagatgttaaaaatgcatgagaggtatttcagtgaggcagggtcaccgtatcttgtacatttctctctttttttctcaaatgctgtttaactcttgtgctcctttatcagtggaagtgctccatcccaggttcatacgattttgtattgaccagagagtctttaagatccacttggtttggytggctagggattacaccagcatctgtttacatagctttaggctcaygctaccaagcaggcttggaaacctgtaatgatcccataatctctgggctattagggcagttaggttagaagcaattctccagcacagcgaatagagaacacatgcttctaaaggacaaacggcttyggtataatagcgtatttttggactcatctattttgcaggcagttaacaaaataggatgttacatttttgcatctctctccctctcctgaaatagagtcactaaccacttgttaaccacactgattttt

SEQ ID NO: 35 - DNA, 600 bp, Chicken  19866894083734_2
tatccccttaaaatatagagtttccagtgtgcctgggttaaaaaggcagagcttcctatattgattcagaaggagatgttaaaaatgcatgagaggtatttcagtgaggcagggtcaccgtatcttgtacatttctctctttttttctcaaatgctgtttaactcttgtgctcctttatcagtggaagtgctccatcccaggttcatacgattttgtattgaccagagagtctttaagatccacttggtttggytggctagggattacaccagcatctgtttacatagctttaggctcaygctaccaagcaggcttggaaacctgtaatgatcccataatctctgggctattagggcagttaggttagaagcaattctccagcacagcgaatagagaacacatgcttctaaaggacaaacggcttyggtataatagcgtatttttggactcatctattttgcaggcagttaacaaaataggatgttacatttttgcatctctctccctctcctgaaatagagtcactaaccacttgttaaccacactgattttttaatcgtcgaagtggttgctctcagtttccccaccagaaatgttca

SEQ ID NO: 36 - DNA, 600 bp, Chicken  19866894083734_3
gtacatttctctctttttttctcaaatgctgtttaactcttgtgctcctttatcagtggaagtgctccatcccaggttcatacgattttgtattgaccagagagtctttaagatccacttggtttggytggctagggattacaccagcatctgtttacatagctttaggctcaygctaccaagcaggcttggaaacctgtaatgatcccataatctctgggctattagggcagttaggttagaagcaattctccagcacagcgaatagagaacacatgcttctaaaggacaaacggcttyggtataatagcgtatttttggactcatctattttgcaggcagttaacaaaataggatgttacatttttgcatctctctccctctcctgaaatagagtcactaaccacttgttaaccacactgattttttaatcgtcgaagtggttgctctcagtttccccaccagaaatgttcagattaagcacactattagattgcagccagaatagtctacaaaacaggaagaaagcctcgcctccctccctgccttcttctcttgtttaagttgacatgataattcattacagattttctctttctt

SEQ ID NO: 37 - DNA, 600 bp, Chicken  19866894083737_1
cagacaaggcaaggccaggcaaggcaaggcagggcagggcaaggcaagaaaactcccgtcaaggccaggccaggcgaggcaatcccaggcaaagccatgtcaggccaggcacggtcaggcatggccaaacaactcaaggcaagggaaggacaggcaaggccaggcagtgcaagtaagggcaaggcaaggcaaggcaaggccaggtcaggcagagcaaggcaaggcaaggccaggcaaggccaggcgaggtctttcacagcaaggtaaggctgggccagttacggccagcccaggccaggmctggccaggccaggctatgctaaacaaggaaaggccaggcccggccaggccaggcaatgcaaggtcaggccaggccaggcaggccaggaaagcataggccttgtgaggccaggttaggtacgcaaggccaggcagagcaaagcaaacccaggcaaggcaaggaaaggaaagagaatgaaaggcaaggtagggccaggccaggcaatgcaagggaaggcaaggagttgcaaaggaaagccaggacaggccaggcaaggttaggccaagcaatgcctggccaggcaagcaaggccaggccag

SEQ ID NO: 38 - DNA, 600 bp, Chicken  19866894083737_2
ggccaggcaatgcaaggtcaggccaggccaggcaggccaggaaagcataggccttgtgaggccaggttaggtacgcaaggccaggcagagcaaagcaaacccaggcaaggcaaggaaaggaaagagaatgaaaggcaaggtagggccaggccaggcaatgcaagggaaggcaaggagttgcaaaggaaagccaggacaggccaggcaaggttaggccaagcaatgcctggccaggcaagcaaggccaggccagaccagtccaggctaggcaaggcaaagcaagcgaaggccagtcaaggsaaggcmaggcaaggcatggtaaggcgaggcaaggctagtccaggccaggcagggtctggccaaacaatctccagcaaggcaaggcaaggcaaggtcaggccaggtaaggccaggcaaggccaggccaggcaatgccaggccaggccaaacaatgcaaggcaaggacaggccaggcaaggccaggcagtgcaaaaaaaggcaagacaaggcaaggcaaggcaaggccaggccaggccaggccaggaagagcaaggaaaggccaagcaaggcaaggcaaggccaggcaaggccaggtaaggc

SEQ ID NO: 39 - DNA, 600 bp, Chicken  19866894083737_3
gcaatgcaaggtcaggccaggccaggcaggccaggaaagcataggccttgtgaggccaggttaggtacgcaaggccaggcagagcaaagcaaacccaggcaaggcaaggaaaggaaagagaatgaaaggcaaggtagggccaggccaggcaatgcaagggaaggcaaggagttgcaaaggaaagccaggacaggccaggcaaggttaggccaagcaatgcctggccaggcaagcaaggccaggccagaccagtccaggctaggcaaggcaaagcaagcgaaggccagtcaaggsaaggcmaggcaaggcatggtaaggcgaggcaaggctagtccaggccaggcagggtctggccaaacaatctccagcaaggcaaggcaaggcaaggtcaggccaggtaaggccaggcaaggccaggccaggcaatgccaggccaggccaaacaatgcaaggcaaggacaggccaggcaaggccaggcagtgcaaaaaaaggcaagacaaggcaaggcaaggcaaggccaggccaggccaggccaggaagagcaaggaaaggccaagcaaggcaaggcaaggccaggcaaggccaggtaaggcaaggca

SEQ ID NO: 40 - DNA, 517 bp, Chicken  19866894083742_1
gcaaggcaaggcaaggcaaggctaggtcaggcgaagaacaggccagaccaggcaaggccaggccaagcaatgtcaggcaaggccaggccaggcaaggcaaggccaggcaagacaaggcgaggccagaaaaggcaaggcaaaacaagggatggcaaggcaagggaaggcaaggcaaggcaaggcaaggatagcccaggcaaggccaggcaagtaaaggaaaggccaggccagtcagggcaagacaaagcaagcccaagctagacaaggccaggcaaggcaaataaggcaaggtaaggcaarcaagtccaggccaggcaaggccaaagaacgtgagacaaggaaaggacaggcaaggacatgcagtgcaatggatggcaaggcaaggcaaggcaaggccaggccaggcaaggcaaggcaggtcaaagccaggcaaggtaagaccaggcaaggtcaggccaggcaaggcaaggccaggcaaggccatgataggtcagccaaggcaaggcaggccaaggca

SEQ ID NO: 41 - DNA, 600 bp, Chicken  19866894083744_1
agtaaaggaaaggccaggccagtcagggcaagacaaagcaagcccaagctagacaaggccaggcaaggcaaataaggcaaggtaaggcaaggtaaggccaggctaggcaaggacaggcaaggaaatggcaggtaaggaaactgcaggctaggaagggcacggtaaatccagacaagtccaggccaggcaaggccaaagaacgtgagacaaggaaaggacaggcaaggacatgcagtgcaatggatggcaaggcaaggcaaggcaaggtcaggccaggcaaggcaaggcaggtcaaagccwggcaaggtaagaccaggcaaggtcaggccaggcaaggcaaggccaggcaaggccatgataggtcagccaaggcaaggcaggccaaggcatggccaggaaaggcaattctaggccaggcaagtcaaggaaaggcaagtcagagcaaggcatggccaggaaaggcaattctaggccaggcaagtcaaggaaaggagaggcaagtcagggcaaggccaggccaggccaggaaaggcatggcaaggcaaaataatgcaaggcaaagccaggcaaggaaaggccaggaaaaaccaggaaaggcca

SEQ ID NO: 42 - DNA, 599 bp, Chicken  19866894083746_1
  misc_feature (1)..(8): n is any nucleotide
nnnnnnnnagcagttgacctcatacttgtgcaattttgtgttaagcagataggctctttgactaaaaagcttatgaggtatagcaataatatgataattcctgaaacactgtatgtgatctaaaaggatttttacgaaaaatattatttaaaagtaattttgcagtgttatgaggctgtaaaatgctggaaccatcctgtttggtgctcagggggagtttcatatctttatggtatagaaaagtgagacgtgtatttgttaaatgagaataaaagtgctttacctgtctcctgtgaagawagataactgtttttaaatacttgtagtaaggcatctggaaacttstgaaatctgtggcattaagcagggggccccagctgtgtcctgtcttgagcctgcttcttgtcaggcaggacaaataggtattgtgatctgagatactttgttgagaagttgaagacaaccagttgtgtcaccaggtagaattttaggggaactgggaatttaagacttcccacgtgatacctgtggtattaacattcaagtactgttacagtagctctcttgccacaacagcagtgctgcagaagtcagcttgc

SEQ ID NO: 43 - DNA, 600 bp, Chicken  19866894083746_2
cagataggctctttgactaaaaagcttatgaggtatagcaataatatgataattcctgaaacactgtatgtgatctaaaaggatttttacgaaaaatattatttaaaagtaattttgcagtgttatgaggctgtaaaatgctggaaccatcctgtttggtgctcagggggagtttcatatctttatggtatagaaaagtgagacgtgtatttgttaaatgagaataaaagtgctttacctgtctcctgtgaagawagataactgtttttaaatacttgtagtaaggcatctggaaacttstgaaatctgtggcattaagcagggggccccagctgtgtcctgtcttgagcctgcttcttgtcaggcaggacaaataggtattgtgatctgagatactttgttgagaagttgaagacaaccagttgtgtcaccaggtagaattttaggggaactgggaatttaagacttcccacgtgatacctgtggtattaacattcaagtactgttacagtagctctcttgccacaacagcagtgctgcagaagtcagcttgcccagggttgtgcactgacttcagagatgcatctagcagttcctttg

SEQ ID NO: 44 - DNA, 600 bp, Chicken  19866894083750_1
ttgtgcagctgtgaatctcaggagctaagaagggattttatatttaccaaaggcagagacagatataaagagcacattctttcctggagggggggggggaggaaggaagaaaacttgcaaatcaattttcttttctcctacaaaaaaatcaagcttaaattgtttcatgaagccagacaaagtttatctctgtgagaagattcttaaaaagcttgataaacttctagctgaagtaaaaatagaccatcaaacagacatacttaagaaaatacatttactagaaacaaacttaaaataatkagcaggcttccttcttccctccccactgcctacataggaaytgtgaaaccactcagccatttttcccttctcaaggaggaayaactttactaggcctacaaactgctttggagcttttgtagacttcacacttttaakcagttatctcaaaggaacaaattaaataacaatttaaaaaaattcagtttctgtactttaatacttctcagaagtatcaccactaagattcagatttaccttcatatattgcttgaaaatgtctgcagcagtattcatttccaccacagtatatacaatgag

SEQ ID NO: 45 - DNA, 600 bp, Chicken  19866894083750_2
atttaccaaaggcagagacagatataaagagcacattctttcctggagggggggggggaggaaggaagaaaacttgcaaatcaattttcttttctcctacaaaaaaatcaagcttaaattgtttcatgaagccagacaaagtttatctctgtgagaagattcttaaaaagcttgataaacttctagctgaagtaaaaatagaccatcaaacagacatacttaagaaaatacatttactagaaacaaacttaaaataatkagcaggcttccttcttccctccccactgcctacataggaaytgtgaaaccactcagccatttttcccttctcaaggaggaayaactttactaggcctacaaactgctttggagcttttgtagacttcacacttttaakcagttatctcaaaggaacaaattaaataacaatttaaaaaaattcagtttctgtactttaatacttctcagaagtatcaccactaagattcagatttaccttcatatattgcttgaaaatgtctgcagcagtattcatttccaccacagtatatacaatgagtttacagaaagctgcaagtagatttcttcttttgtgcaatg

SEQ ID NO: 46 - DNA, 600 bp, Chicken  19866894083750_3
cctggagggggggggggaggaaggaagaaaacttgcaaatcaattttcttttctcctacaaaaaaatcaagcttaaattgtttcatgaagccagacaaagtttatctctgtgagaagattcttaaaaagcttgataaacttctagctgaagtaaaaatagaccatcaaacagacatacttaagaaaatacatttactagaaacaaacttaaaataatkagcaggcttccttcttccctccccactgcctacataggaaytgtgaaaccactcagccatttttcccttctcaaggaggaayaactttactaggcctacaaactgctttggagcttttgtagacttcacacttttaakcagttatctcaaaggaacaaattaaataacaatttaaaaaaattcagtttctgtactttaatacttctcagaagtatcaccactaagattcagatttaccttcatatattgcttgaaaatgtctgcagcagtattcatttccaccacagtatatacaatgagtttacagaaagctgcaagtagatttcttcttttgtgcaatgcttcaattttactagcttcatcatcctgctgtccatctgga

SEQ ID NO: 47 - DNA, 600 bp, Chicken  19866894083750_4
tacaaaaaaatcaagcttaaattgtttcatgaagccagacaaagtttatctctgtgagaagattcttaaaaagcttgataaacttctagctgaagtaaaaatagaccatcaaacagacatacttaagaaaatacatttactagaaacaaacttaaaataatkagcaggcttccttcttccctccccactgcctacataggaaytgtgaaaccactcagccatttttcccttctcaaggaggaayaactttactaggcctacaaactgctttggagcttttgtagacttcacacttttaakcagttatctcaaaggaacaaattaaataacaatttaaaaaaattcagtttctgtactttaatacttctcagaagtatcaccactaagattcagatttaccttcatatattgcttgaaaatgtctgcagcagtattcatttccaccacagtatatacaatgagtttacagaaagctgcaagtagatttcttcttttgtgcaatgcttcaattttactagcttcatcatcctgctgtccatctggaaagagtttgaaacatgaaaattgttgggtttaaatacttctcatttaagtataaca

SEQ ID NO: 48 - DNA, 600 bp, Chicken  19866894083750_5
aaattcagtttctgtactttaatacttctcagaagtatcaccactaagattcagatttaccttcatatattgcttgaaaatgtctgcagcagtattcatttccaccacagtatatacaatgagtttacagaaagctgcaagtagatttcttcttttgtgcaatgcttcaattttactagcttcatcatcctgctgtccatctggaaagagtttgaaacatgaaaattgttgggtttaaatacttctcatttaagtataacacagaacaacgtgggccagtggtcacgatttaggaaaatkcacatctcagttctgactgccatgcgttttagtgcctattgacaagtctctcttcttgagacgcataatattggtgcctatgaaactaaatttttatcgctattatcttacacatccccaaaacataaaatgctttaacagtctgttgacatttagaagtcaaacctatcttcatgctcatacacagtaaccagtaacaaattagcactgacaaacaaatgtattagttaattaattaattaattagaaggcaaatcacatgaaggaaacgtaagttttataccaacctgcactattatt

SEQ ID NO: 49 - DNA, 600 bp, Chicken  19866894083752_1
cagaagaataaaacctagcagtaccagaaaagaagcttgggaataagtagttggcccacttacactaaaaggaccacagttattaatttttccttctttgcagctaccaaatgttcttttatatagtcaaaggaaaagagagaagaggcaggaacagctatgtctcggtagaacaaaccatggagttattggaaagaacgtattgacacattcttatttatgaaattcacatttacttaaccgtttcatttaaggaacagattcatgttctgtgaatgtcatatttgattatgtactccrctctgagtttatttctaatttccctctgcattaaattaagtagtgcacaaggttgttactttgatttctcggtttcaagaaaattatccaaacagcatctggcctcctgaacaaataaggacatatcagtggttgattacacattaatgatatattcttcacaagtgtggcaatttctattaaaatttggtccagtaaaaatgtttgatatttcattacaaatacwagaatatttaatgtattctttcaaatactcttagcacacattgtacttttcagtacttcttattaaacttccta

SEQ ID NO: 50 - DNA, 600 bp, Chicken  19866894083752_2
tcacatttacttaaccgtttcatttaaggaacagattcatgttctgtgaatgtcatatttgattatgtactccrctctgagtttatttctaatttccctctgcattaaattaagtagtgcacaaggttgttactttgatttctcggtttcaagaaaattatccaaacagcatctggcctcctgaacaaataaggacatatcagtggttgattacacattaatgatatattcttcacaagtgtggcaatttctattaaaatttggtccagtaaaaatgtttgatatttcattacaaatacwagaatatttaatgtattctttcaaatactcttagcacacattgtacttttcagtacttcttattaaacttcctaggaatacttaaaacttagcaacaacaacaaacacacctctattttgggttacagaattgcttgttgttacgtgtgggctgatctttctagtgcagcatgaagtgatgatgaatcaaatgtcccacaaggcagtagacactaaaatattaaagctggcttatttggggttactaaattttttaatttaactttggcttgtactgaatcaaaatgcttttaaaagtgt

SEQ ID NO: 51 - DNA, 600 bp, Chicken  19866894083752_3
aacttcctaggaatacttaaaacttagcaacaacaacaaacacacctctattttgggttacagaattgcttgttgttacgtgtgggctgatctttctagtgcagcatgaagtgatgatgaatcaaatgtcccacaaggcagtagacactaaaatattaaagctggcttatttggggttactaaattttttaatttaactttggcttgtactgaatcaaaatgcttttaaaagtgttgtttgtttgttttaagaaggcaaaagcattaacaaagcatccattataaatccattatgaattwaaaaaaagaataactgattgaattaatctgcatgttaaaagtagaagcagtaaagacatacatgtcctctctgtctctggcatgctgctatagttttgcaggtcttggtccataattactagataacatttttaggcaacaaactaatctttgtgattcttgaagtgcatgacagaccttcaaattctactctgtagttcctccattaaattttagctgcaaattctttccaaaacagatactcctttctttgggttctttctaccccatcactgcttcaaataaactcatcagttgaag

SEQ ID NO: 52 - DNA, 599 bp, Chicken  19866894083760_1
  misc_feature (1)..(273): n is any nucleotide
nnnnnnnnnnnnnnnnnnnnnnnnnnnnnnnnnnnnnnnnnnnnnnnnnnnnnnnnnnnnnnnnnnnnnnnnnnnnnnnnnnnnnnnnnnnnnnnnnnnnnnnnnnnnnnnnnnnnnnnnnnnnnnnnnnnnnnnnnnnnnnnnnnnnnnnnnnnnnnnnnnnnnnnnnnnnnnnnnnnnnnnnnnnnnnnnnnnnnnnnnnnnnnnnnnnnnnnnnnnnnnnnnnnnnnnnnnnnnnnnnnnnnnnnnnnnnnnnnnnnnnnnnnnnnnnnntatgcaattccaaccccttcccccccmcacacttagaaagtgctcacagatctgtaaaccacgcatgaaatttaagatgcgatacctgctttatagaaaatccttccaatgtctccccccaaaaccaggacaacattgcttagcattatctgtttatttaagttcagttaaaacaaacatacaatgtttcattgaaactgtgttgcactctgccaacagctgtagctcctctgctggcctctaacaatacagtggctacttacatatgtacaaggatgtactgtaggatgcctgaagctgacggcctaacwcatctgttagagcct

SEQ ID NO: 53 - DNA, 600 bp, Chicken  19866894083760_2
aaccccttcccccccmcacacttagaaagtgctcacagatctgtaaaccacgcatgaaatttaagatgcgatacctgctttatagaaaatccttccaatgtctccccccaaaaccaggacaacattgcttagcattatctgtttatttaagttcagttaaaacaaacatacaatgtttcattgaaactgtgttgcactctgccaacagctgtagctcctctgctggcctctaacaatacagtggctacttacatatgtacaaggatgtactgtaggatgcctgaagctgacggcctaacwcatctgttagagcctaagagttgttaagttgctgcattcaggaaatcgtaacatccacggtaaatttcagaagcaaaacatccacaaacctgaattatgctttttatggacccaagtgacatttgtgtttattgcaacatatacatttgtaataaatacaatcttagcattttcttacacctgttggtgtaacacattacttccattttggtaagcattacattttgttgtaaaaggacccttcctttgacagctgttatacagatgtacaacatgaacaactcattgaaatggtgtaat

SEQ ID NO: 54 - DNA, 600 bp, Chicken  19866894083761_1
agagaattaatatttgcaggactaatggaaccatcctgggcatcaaggaagagagagaaaaaaaaaaagatgaagaagagggaagagagagacccccctgcattcttagtgttgtgttcggcagctttttctattaatttggcaagtgtgttgggccggtgactaaacacagcttatctttagaattagatgatcccttcagagttacttaaaaagaataaaacactcagggaaattaaaatatataaaaacccccattaaactgtcacaccctcttctttctgcagctcctctggcacwatctgagcctgctagcgcaacaagagacattagatctcagctgtgggccttgcttcccctgtctgggctatgctcagcctttgtaccatttggacccaataggatacatagacaggattttgaatgggagcatattcatagctttttactatacttgtttatggtaactattgagtcacggcctgaaccactgattgagcacctggggaaaggacctggtcagccctgggagcacaggtgaaggcaattctgtgtgatcagaagggatggagcctggctgcacctctcttagaccccatt

SEQ ID NO: 55 - DNA, 600 bp, Chicken  19866894083761_2
attgctatttcaccacaatgatctttctgatgtctacaacttgacagtagctgattccagccctctgtcatctgcagtattttcctcaagtctatgtgattctgcatagaaagtcatttgcttgggtactaaggtcaagttctgcctcatcaagtaaataaaacacactcaggaaagaataccaaatctagctgatggagaatagccaatatatttgggagtaagttgatttatcctccagtgaagtgggagttggctgcgtgctgcccacaggaccggaccccagctatgctgtgcccraggaccatacagggagagaaggagatgaagtgggccaagttcatgccagggagcagctaagcagttcactgtataaacagttttgttccagtcctgggaatgcttccagatatgtttgaatttactaacttaaatgcagccttgaaatccctgcatctggaatgccactccaacatttcctttgcaagcgaagagagaggtcacatggacataaccacatcaatttaataaagtagtctgtaaaaagcaagcaattataaaaaggcaaaactgacttaacatgatggtaactggaaccct

SEQ ID NO: 56 - DNA, 600 bp, Chicken  19866894083765_1
aggccacctttttatcttgccactagaatgaaaatggatcacatgaaaattaaattgcagcttctcattctactttcacttttaagcttgaacatatccaacctgaacaatatttttgtcaatggtatttgattcagtaaatatatctggtttaacaattgaactagttgaaaaaaaagttagaagttgattggctctgcttctggcaaaatatttcaagctatcataacaagttagactccttgaatttccaaaggaaagcaatcaagcatttgtcttgtaaagaaaaaaaaaaaaaartaatataatggatttagaacaacaaatgtttttaccagaacaaaaatgtttttaccagacakcacatggatattacagcatatatgctttcatctgtaattgtaccctgctgaacacatgtatcataaaattgcaagaagtagatgactcagcttttaaaatagctattgaagtatggatttgaaagtycaaaacatcaaaaagcaaatttgagaagtgatacccaccttgaggtctgtatgctttcacagttccaatataggtaaccagtcaatctttttgttgaattttgatttaagc

SEQ ID NO: 57 - DNA, 600 bp, Chicken  19866894083765_2
tctcattctactttcacttttaagcttgaacatatccaacctgaacaatatttttgtcaatggtatttgattcagtaaatatatctggtttaacaattgaactagttgaaaaaaaagttagaagttgattggctctgcttctggcaaaatatttcaagctatcataacaagttagactccttgaatttccaaaggaaagcaatcaagcatttgtcttgtaaagaaaaaaaaaaaaaaataatataatggatttagaacaacaaatgtttttaccagaacaaaaatgtttttaccagacakcacatggatattacagcatatatgctttcatctgtaattgtaccctgctgaacacatgtatcataaaattgcaagaagtagatgactcagcttttaaaatagctattgaagtatggatttgaaagtycaaaacatcaaaaagcaaatttgagaagtgatacccaccttgaggtctgtatgctttcacagttccaatataggtaaccagtcaatctttttgttgaattttgatttaagcagaaatgcatttcagtttcataatttgagatcttttatcctyccattaacagcttgcaacaa

SEQ ID NO: 58 - DNA, 587 bp, Chicken  19866894083765_3
attggctctgcttctggcaaaatatttcaagctatcataacaagttagactccttgaatttccaaaggaaagcaatcaagcatttgtcttgtaaagaaaaaaaaaaaaaaataatataatggatttagaacaacaaatgtttttaccagaacaaaaatgtttttaccagacakcacatggatattacagcatatatgctttcatctgtaattgtaccctgctgaacacatgtatcataaaattgcaagaagtagatgactcagcttttaaaatagctattgaagtatggatttgaaagtycaaaacatcaaaaagcaaatttgagaagtgatacccaccttgaggtctgtatgctttcacagttccaatataggtaaccagtcaatctttttgttgaattttgatttaagcagaaatgcatttcagtttcataatttgagatcttttatcctyccattaacagcttgcaacaaaaagcaagaattataaggctttattagctttgatagagaagcaacagttggtttgatgtgggctgtttgtctctacagtttccttttttgcaacagtaataataaaaagaaatt

SEQ ID NO: 59 - DNA, 434 bp, Chicken  19866894083765_4
aaaatgtttttaccagacakcacatggatattacagcatatatgctttcatctgtaattgtaccctgctgaacacatgtatcataaaattgcaagaagtagatgactcagcttttaaaatagctattgaagtatggatttgaaagtycaaaacatcaaaaagcaaatttgagaagtgatacccaccttgaggtctgtatgctttcacagttccaatataggtaaccagtcaatctttttgttgaattttgatttaagcagaaatgcatttcagtttcataatttgagatcttttatcctyccattaacagcttgcaacaaaaagcaagaattataaggctttattagctttgatagagaagcaacagttggtttgatgtgggctgtttgtctctacagtttccttttttgcaacagtaataataaaaagaaatt

SEQ ID NO: 60 - DNA, 600 bp, Chicken  19866894083766_1
ctgtcccttctttgctatacagtccttcttccacacggtcctggagaacagccacgcctgcgagacgctggtcgataacaacctccgagtgaccaactggaaccggaagctgggctgtaagtgccaatataaacacatagtcgactggtgcgggtgctccccaaatgacttcaaaccccaggacttcctccggctacaggtgaaaaagatcctcctttctgcccctgctctttcccctcctccctgtctctgtgcccggctctcctctgagctgccctgcagatacacccctgggtgcastgccagctgctctgcatgagcctcaccccggcccaggagggacaggagcaggattggctctccagccccwrtggggctcagcacagatgcgtctaagcgctctgctggcggggtgatgctgactgtcctgcccagcagccaggcttctgctcgcaatgctgctccttttcccagacatcctttcctatttccctgctctttctttgtagacctattacttggggcaaatatctgttctttaaaacctgtgaaaaaagtgctgtcgtctttggcaggacaaaatgccttgtgtcatcctcc

SEQ ID NO: 61 - DNA, 600 bp, Chicken  19866894083766_2
gtcgataacaacctccgagtgaccaactggaaccggaagctgggctgtaagtgccaatataaacacatagtcgactggtgcgggtgctccccaaatgacttcaaaccccaggacttcctccggctacaggtgaaaaagatcctcctttctgcccctgctctttcccctcctccctgtctctgtgcccggctctcctctgagctgccctgcagatacacccctgggtgcastgccagctgctctgcatgagcctcaccccggcccaggagggacaggagcaggattggctctccagccccwrtggggctcagcacagatgcgtctaagcgctctgctggcggggtgatgctgactgtcctgcccagcagccaggcttctgctcgcaatgctgctccttttcccagacatcctttcctatttccctgctctttctttgtagacctattacttggggcaaatatctgttctttaaaacctgtgaaaaaagtgctgtcgtctttggcaggacaaaatgccttgtgtcatcctcctgtgctctcagtaagctgagatgtaaactgaacagtggaggtctggggagatccctgtccctcggcagga

SEQ ID NO: 62 - DNA, 600 bp, Chicken  19866894083766_3
tcgataacaacctccgagtgaccaactggaaccggaagctgggctgtaagtgccaatataaacacatagtcgactggtgcgggtgctccccaaatgacttcaaaccccaggacttcctccggctacaggtgaaaaagatcctcctttctgcccctgctctttcccctcctccctgtctctgtgcccggctctcctctgagctgccctgcagatacacccctgggtgcastgccagctgctctgcatgagcctcaccccggcccaggagggacaggagcaggattggctctccagccccwrtggggctcagcacagatgcgtctaagcgctctgctggcggggtgatgctgactgtcctgcccagcagccaggcttctgctcgcaatgctgctccttttcccagacatcctttcctatttccctgctctttctttgtagacctattacttggggcaaatatctgttctttaaaacctgtgaaaaaagtgctgtcgtctttggcaggacaaaatgccttgtgtcatcctcctgtgctctcagtaagctgagatgtaaactgaacagtggaggtctggggagatccctgtccctcggcaggat

SEQ ID NO: 63 - DNA, 599 bp, Chicken  19866894083769_1
gctcagtgctgtagctatgcagattttagaaaatctcttagcccccaagcagtttttcaactaagaaatgccttggattcttcatatatttgtagagatctgaaattgcagtttggtaaatagcaatgtttgtcttgctttgccatgaaactgcagctgggttctctgccaaaaacctgtcagcaaaaaaaaaacccttcacatcctgctggacctgactgagcagaggcccctgtgcagggcctgagggtcacatttcagctcttcagaaaaggagcaggagctgcccagtatctgcaragagctgaaggtgatggagtaattttgcccattagtgcttgtgctttaacaatgagactgaacacctgacacaggagttacactgagtgatgaggtgtttacagaatacagccatttgctgccaatttttattccacagactctgaagcaaaggtggcttttatgtacataggtaattattctgtttctctttcaattctgtctttctccctctcagttatgaaggagctggtggtttctgctggagacagtgtagaagtgaccctgccaaagaatgaagttcagctgaatgcatttgt

SEQ ID NO: 64 - DNA, 600 bp, Chicken  19866894083772_1
cagaggatattttccttttgagcccagtgacagcagcactgtgttagaagaaagcaaaacgcttgcagatgctggaactgcatttttaagtaagtgacttaaagtcatcagaaaatccatcaagtcaatcagcattggcatttcctgtttgttttcccttccaggagaagaagatttttcagattccctggatgcatgctgcaagacatgggtgggatgttgaaaaagatgctcccttatttagaaactgggcaattcacacaggtattggaactctctttttgcaggacagatttttcmcttggttttctcttttacatttatagtttccttctttcgtgtctttgtttttactaacacagagagtgaattgaagtttccagatctgtgggaggttaaatgcttttytcaaggtctgcagtaatctccagctttactgaatggccgtaactcatttgcatccagaagcacagtaaaacttaattgatttaaatgttaacaagatcgggttcaaaatcacttggagtagagcatgctcagcactttgtagacttagtcccttaggcttttcatgtgcttcgatggagttgagccagactt

SEQ ID NO: 65 - DNA, 600 bp, Chicken  19866894083772_2
cagaaaatccatcaagtcaatcagcattggcatttcctgtttgttttcccttccaggagaagaagatttttcagattccctggatgcatgctgcaagacatgggtgggatgttgaaaaagatgctcccttatttagaaactgggcaattcacacaggtattggaactctctttttgcaggacagatttttcmcttggttttctcttttacatttatagtttccttctttcgtgtctttgtttttactaacacagagagtgaattgaagtttccagatctgtgggaggttaaatgcttttytcaaggtctgcagtaatctccagctttactgaatggccgtaactcatttgcatccagaagcacagtaaaacttaattgatttaaatgttaacaagatcgggttcaaaatcacttggagtagagcatgctcagcactttgtagacttagtcccttaggcttttcatgtgcttcgatggagttgagccagacttaataaaggtaaatgctgcgcaagcttttccatgttgctgaaaagttgcatctgatctgcagtgccataggtctttcttgggcagaaactgttaatcgtgttctggaaa

SEQ ID NO: 66 - DNA, 553 bp, Chicken  19866894083773_1
gccctggtcattggctctctgctagctctgattcctgatagaaagctcctataaaacgtttagttatgtgaatccatagagcactttgataaaggcaaatctctcattaaaaatctaacagaatggtaatcccagcacaccagcatgccatcctttaccagttcttgaggggtcatctttgacctgcactaatataaacctactaaaatcatctggtgtgtctgaggcacaactacctttggcagcataccagtgttgaatatttatctattaagataagatgaaaagataatttccagkcttttaacttcagttgtggcaaaaggagagataaactttaaaatgttacaagtaacagataaatggcttagaatattgtgacagaatatgaagtgtatggagatggccgaagctcatgttttttaaagccaatggaaagatttctgtctctcagtgctgaatcrgtctgcaagagactggatgcgattcaattgaggcccacagtttccagaagttgctaccaaccaatggctattctgtgagtcatatcaag

SEQ ID NO: 67 - DNA, 389 bp, Chicken  19866894083773_2
ttgaggggtcatctttgacctgcactaatataaacctactaaaatcatctggtgtgtctgaggcacaactacctttggcagcataccagtgttgaatatttatctattaagataagatgaaaagataatttccagkcttttaacttcagttgtggcaaaaggagagataaactttaaaatgttacaagtaacagataaatggcttagaatattgtgacagaatatgaagtgtatggagatggccgaagctcatgttttttaaagccaatggaaagatttctgtctctcagtgctgaatcrgtctgcaagagactggatgcgattcaattgaggcccacagtttccagaagttgctaccaaccaatggctattctgtgagtcatatcaag

SEQ ID NO: 68 - DNA, 600 bp, Chicken  19866894083776_1
cctaccttcattattgacatcttgtctgcaaatcaaatttcagcaaataagaatcagatgaggaaaaggaaagtcactgctagcaagagagagggggtggatgtgttgggcttatgtattcagcctaacagagattacttgcttttaagagtgcgtgaaagagtctaaattaacaatgtgaaatggaagcagggaattttgactgccttcccataaagccactagtgtgagtgctctggagattagattaacttgttttactagagtaacttcaccatcctcacatttctaatcattttrtgtaagtttgtcttttatctaaggtgtttgcattgtctctttctacttttattacygatttctctgagtgcgtgatggctgaaaagcaacctgacacagtggctgcataaatttggaaaacactttttgaaatctgtagtacagtccatgtactattgagtgtacaaatgaatttagtgtatcataacactcctagaaaaacaagaggacaaagaagatgggattgctaagggagacattagatttcatttcacactgataatagtttagagatagtgctgagcaaaatgggattcaatt

SEQ ID NO: 69 - DNA, 600 bp, Chicken  19866894083776_2
gatgaggaaaaggaaagtcactgctagcaagagagagggggtggatgtgttgggcttatgtattcagcctaacagagattacttgcttttaagagtgcgtgaaagagtctaaattaacaatgtgaaatggaagcagggaattttgactgccttcccataaagccactagtgtgagtgctctggagattagattaacttgttttactagagtaacttcaccatcctcacatttctaatcattttrtgtaagtttgtcttttatctaaggtgtttgcattgtctctttctacttttattacygatttctctgagtgcgtgatggctgaaaagcaacctgacacagtggctgcataaatttggaaaacactttttgaaatctgtagtacagtccatgtactattgagtgtacaaatgaatttagtgtatcataacactcctagaaaaacaagaggacaaagaagatgggattgctaagggagacattagatttcatttcacactgataatagtttagagatagtgctgagcaaaatgggattcaattctgcagcactcctttattgcagctaagtgatttcaatatccagtctaaagtgatac

SEQ ID NO: 70 - DNA, 600 bp, Chicken  19866894083783_1
tcagtctgctcaactggggcctgtgattcaggtaaaagccatcctgatatagccaacccacacaaagccaaaaaaaaaaaaaaaatcactttaaagtgtgatcatactacagaaacacttgaaataggttgttcatgacactaagcaggttagctgtccaaactaagtcacaattacttaaaacattataactgtgccttacataactgcatgaagacccctttatagcacttctgtaacgccaagagaccaaaaacataagtgacaagtgacagttaatggacaatgaagctcatattwaaaaagtacatggcctttaaaagaactactactcctcaccccgcacaactgagaaggaacgcaaatatgtaaacatgttccatcagtctatgagtataacatgaaattaaattcagaggtgaatctactggtaacactttccatgactcccacttgcaaaagttttgctctttgcaatatacctgtctatgaattacagaaataaaaatccaagctatcctatcttttcaaagggaagttttagtattactgcttcacgatgtggttgttcagtcttcacatgaatctatgccctttcct

SEQ ID NO: 71 - DNA, 600 bp, Chicken  19866894083786_1
ctatatcaggatggcttttacctgaatcacaggccccagttgagcagactgactgggggagactttgggctataacatcccgtggtttgtgagctgatgagctggcacaaagtcagttgacagtaacccaaggaagtggtgagctcctactgactgtctgggtgcactcatagggaataatattcattcacaaaaatacatatttttgtcattgtatgaacaaacataaacaaaaaaatgatgcgaagtcacacagctttctgaatggtgaaaataacagcaagatgccattttactaaygatgcrattgtaatgactaaaatgggtggagctctcaggcattacaggtatcaatgctatttttttaaggagcacagcataaatatttttttcaagtcaactccttcagaccacgtgtttaaggtttctgatgttttaaaaaaactttactgtgtttgaaactagcagggatatgaatcatttgttttctgtcagggaatttgaaatgaaaagtgtcaggcatggaataaatatgtacatttacagtacttgttcttgaaagtttaaaatatatggcatgtcacactaatattttcaagc

SEQ ID NO: 72 - DNA, 600 bp, Chicken  19866894083786_2
caggatggcttttacctgaatcacaggccccagttgagcagactgactgggggagactttgggctataacatcccgtggtttgtgagctgatgagctggcacaaagtcagttgacagtaacccaaggaagtggtgagctcctactgactgtctgggtgcactcatagggaataatattcattcacaaaaatacatatttttgtcattgtatgaacaaacataaacaaaaaaatgatgcgaagtcacacagctttctgaatggtgaaaataacagcaagatgccattttactaaygatgcrattgtaatgactaaaatgggtggagctctcaggcattacaggtatcaatgctatttttttaaggagcacagcataaatatttttttcaagtcaactccttcagaccacgtgtttaaggtttctgatgttttaaaaaaactttactgtgtttgaaactagcagggatatgaatcatttgttttctgtcagggaatttgaaatgaaaagtgtcaggcatggaataaatatgtacatttacagtacttgttcttgaaagtttaaaatatatggcatgtcacactaatattttcaagctaggaa

SEQ ID NO: 73 - DNA, 600 bp, Chicken  19866894083789_1
gatcaaagttactatttctttgactgtgaagacagtttcagaatgttgtcacaaaagtaacttcctcatattaaaaggtacaaaatcagactagagtaactgtgatgtatatctgaataatatttgacaaccagtttgccagatttcttctccttataaccatgctccacctcacaagcaggatcactcagacattttgttttgctgaacaggaatttggatttaaacaaatgtcaagactagttcttcagctgcctaacagcatgtctgtgcacatatataaagagaaaaaacagtccmaattcacccagtgcattgttgcagttctcaacaattatcacttaaaagcaatttaatgcctctaatatgtttgtcaaatgcatagtttttggtgtctcttccgtaggcatgctccaaaaccatgcagccactgaccaaggaaataacatctccctgcgctaatgctaatatttcttactctaatttcaagtagagaaacatctattgtctttgcattcccaacagttaaaaaattttctattcacccatttaaaatttccccrggggtacatattaagacatattagtcagaaatgtgtc

SEQ ID NO: 74 - DNA, 600 bp, Chicken  19866894083789_2
atgtctgtgcacatatataaagagaaaaaacagtccmaattcacccagtgcattgttgcagttctcaacaattatcacttaaaagcaatttaatgcctctaatatgtttgtcaaatgcatagtttttggtgtctcttccgtaggcatgctccaaaaccatgcagccactgaccaaggaaataacatctccctgcgctaatgctaatatttcttactctaatttcaagtagagaaacatctattgtctttgcattcccaacagttaaaaaattttctattcacccatttaaaatttccccrggggtacatattaagacatattagtcagaaatgtgtcctgtttgttcactgtcttttcgtttatttatttttattatctgataatatgctaatacagatagcagtcattcttgttcagtcaacttatctgcagcctttttagcaactgtcatttcatgaattaatttacagaagtcttaaggaaacacagtcctttctatggctttaaactgtacagataagacaggcacaaattttcagtctatttttatggcattataagagaaacagattaagataatggctcatacagaaagcact

SEQ ID NO: 75 - DNA, 599 bp, Chicken  19866894083795_1
  misc_feature (1)..(215): n is any nucleotide
nnnnnnnnnnnnnnnnnnnnnnnnnnnnnnnnnnnnnnnnnnnnnnnnnnnnnnnnnnnnnnnnnnnnnnnnnnnnnnnnnnnnnnnnnnnnnnnnnnnnnnnnnnnnnnnnnnnnnnnnnnnnnnnnnnnnnnnnnnnnnnnnnnnnnnnnnnnnnnnnnnnnnnnnnnnnnnnnnnnnnnnnnnnnnnnnnnnnnnnnnnnnnnnnnnnnnnntgccctctctctgctgctgttcaaatagaattcctggagggcagccaatgtatgggatgaaagctggggaatgtcatcatcatcrtcatccattttcctagacattgcccagagggaaaaaaaaatacattaacccttttcatggtggaagctttccataacagcctgctttcccaagggaaaaaaacaacattcctgacaccacgggctcagtgtgacggctaactaggaaaacctcctgcagggcacagcacgctccctctgcttaacagctttaaaccagtcagaggcagaatggaaagagcgtgtctccagagagaatacaggagctgtttcctttctgcacagcacaggagtagcttgtattttcatagggatgttgtc

SEQ ID NO: 76 - DNA, 600 bp, Chicken  19866894083795_2
gaatggaaagagcgtgtctccagagagaatacaggagctgtttcctttctgcacagcacaggagtagcttgtattttcatagggatgttgtcatgacactttgtatattgtgcatccaaacgccacttctgtatcagcttgctaaaaaaaaaacccaaaaactttcattgattttgcaaatcctttggaatatttacccttccctcccagacatagcgatagctgccaatcatttcttgccatgctgtaaagtcaccattttgactccaaatgaataaaccagtgttcaaggatcacccrgcttcacctcccacactgtaacaagactcctctgtacgctacaaatctgaagcagaagagatgctcaagaggatgcttttatgagctaacactacatgactgtcttgtgtgcccaagaacacagacasagctcgtgtcagaaggacgaggtacaaacgggccaagcagagccactgccggacgtttgttagccgggtgccaccgccgcgccgcccagcacaccacgggcagcagctgagcactgctgccttctgtccttcccagcaggggcaccgccacctcgtggagcaaggctgacaa

SEQ ID NO: 77 - DNA, 600 bp, Chicken  19866894083795_3
ctgtatcagcttgctaaaaaaaaaacccaaaaactttcattgattttgcaaatcctttggaatatttacccttccctcccagacatagcgatagctgccaatcatttcttgccatgctgtaaagtcaccattttgactccaaatgaataaaccagtgttcaaggatcacccrgcttcacctcccacactgtaacaagactcctctgtacgctacaaatctgaagcagaagagatgctcaagaggatgcttttatgagctaacactacatgactgtcttgtgtgcccaagaacacagacasagctcgtgtcagaaggacgaggtacaaacgggccaagcagagccactgccggacgtttgttagccgggtgccaccgccgcgccgcccagcacaccacgggcagcagctgagcactgctgccttctgtccttcccagcaggggcaccgccacctcgtggagcaaggctgacaagcagaaaycaattgggccggtgaaactcgaatttattctcttaagaaactaatttcctctgtactcattccatgaactcatacacgtgcagtgacttcaagagagctcaaagcaggtatgccccttcc

SEQ ID NO: 78 - DNA, 600 bp, Chicken  19866894083795_4
tcccacactgtaacaagactcctctgtacgctacaaatctgaagcagaagagatgctcaagaggatgcttttatgagctaacactacatgactgtcttgtgtgcccaagaacacagacasagctcgtgtcagaaggacgaggtacaaacgggccaagcagagccactgccggacgtttgttagccgggtgccaccgccgcgccgcccagcacaccacgggcagcagctgagcactgctgccttctgtccttcccagcaggggcaccgccacctcgtggagcaaggctgacaagcagaaaycaattgggccggtgaaactcgaatttattctcttaagaaactaatttcctctgtactcattccatgaactcatacacgtgcagtgacttcaagagagctcaaagcaggtatgccccttcctttgggcagaagcagtgcgtgccggaggtcccacagcaacacgtgccacctgaaccacagctaacttccaaggcaaagtacgcttcacctgaactagggctgcttaacatttcttccacccttggctgcaatgaagactgcggtgcgcacagccttcttgctttgctctttcctccgtgc

SEQ ID NO: 79 - DNA, 600 bp, Chicken  19866894083801_1
aaacacagcaaatgaaagattcaatgactgatagtacttgtgttgcaagccatctacagggtcagttgtctttgtcacaacagctaagactgatatgaataaaaagtattcttcactcagcactcatttgcttgcatttgagagtcaggattatagctccataaatttattgaatctctcctttagaaaggactgcataaactgcacttaacatggccttgctgtttttgagagattgctcaataacttatttgtcttccacttctgttctgacctctacttttgtgttgatttgggagmattctattgaaaaattcacagtgactctttctacaacagcatatgctgtatctgaacttgataaagagagtgtaygatgtataggtccaggtctgatattcttgctctatttcagatcatattattatgccttgaaatagtcttaaaatccttaccataatttcttggaggccttgatcaggatcatccttgtttatgggaaatatcaatggtcaggcaaaaaaagtttcctagaayatattatcttcacaggaatgttatttgctttatctctcctttttgagtcaccaaaaaaggttc

SEQ ID NO: 80 - DNA, 600 bp, Chicken  19866894083801_2
cacaacagctaagactgatatgaataaaaagtattcttcactcagcactcatttgcttgcatttgagagtcaggattatagctccataaatttattgaatctctcctttagaaaggactgcataaactgcacttaacatggccttgctgtttttgagagattgctcaataacttatttgtcttccacttctgttctgacctctacttttgtgttgatttgggagmattctattgaaaaattcacagtgactctttctacaacagcatatgctgtatctgaacttgataaagagagtgtaygatgtataggtccaggtctgatattcttgctctatttcagatcatattattatgccttgaaatagtcttaaaatccttaccataatttcttggaggccttgatcaggatcatccttgtttatgggaaatatcaatggtcaggcaaaaaaagtttcctagaayatattatcttcacaggaatgttatttgctttatctctcctttttgagtcaccaaaaaaggttcaattgaaacaagagacattgcagccttgggtacaacacagaggaagtccatgtcgatacttattttatagttaca

SEQ ID NO: 81 - DNA, 600 bp, Chicken  19866894083801_3
gctcaataacttatttgtcttccacttctgttctgacctctacttttgtgttgatttgggagmattctattgaaaaattcacagtgactctttctacaacagcatatgctgtatctgaacttgataaagagagtgtaygatgtataggtccaggtctgatattcttgctctatttcagatcatattattatgccttgaaatagtcttaaaatccttaccataatttcttggaggccttgatcaggatcatccttgtttatgggaaatatcaatggtcaggcaaaaaaagtttcctagaayatattatcttcacaggaatgttatttgctttatctctcctttttgagtcaccaaaaaaggttcaattgaaacaagagacattgcagccttgggtacaacacagaggaagtccatgtcgatacttattttatagttacattttgatagttaattttatagtttgtgatattcttctggcttgtgatgtcttggtttgggaaccaaacaggcttttcttttggaaagttttattaaagaaaagttattggaaatcagatctgaagaagcctgactatcttttcaccacatcctcaaaatcaa

SEQ ID NO: 82 - DNA, 600 bp, Chicken  19866894083804_1
agtgaaaacattcacattgtttgagctgctgctgagtgcagaagggagggttgggttctctgtggctggactggttactgagggctttttctttaaattgcacaaaaaagaaaaggctggcaagtgtcttctctactggaatcaacagtcttttaatgctctgaggctgaactcagctattcagatgcggctctgtgcaaagctattgtgtgcttatctctgcctgagaccgttttaggctaacagggctcattgtatgtaacatctcttaacggtatcctttttcccacgatcttcccygcatagaaagcgaagagctgaaaaacatcwttttccatattgtaatctgcaactgcctgtggctgcatctcagctatcctgctgtgccagtgcatgctgtgccctataatgatgagatgtgtcagttctcaggtatatgcaggaaggtgaggtggtacagggggaatttccctgctggttcccagtccatggtcacctgctgctatgaggctcrgagagcaatggtagaggtgtgctgttgttaatgagctatggtgtgctttgacaagctctgtggagatgtccttttaattgctacag

SEQ ID NO: 83 - DNA, 600 bp, Chicken  19866894083804_2
gctgagtgcagaagggagggttgggttctctgtggctggactggttactgagggctttttctttaaattgcacaaaaaagaaaaggctggcaagtgtcttctctactggaatcaacagtcttttaatgctctgaggctgaactcagctattcagatgcggctctgtgcaaagctattgtgtgcttatctctgcctgagaccgttttaggctaacagggctcattgtatgtaacatctcttaacggtatcctttttcccacgatcttcccygcatagaaagcgaagagctgaaaaacatcwttttccatattgtaatctgcaactgcctgtggctgcatctcagctatcctgctgtgccagtgcatgctgtgccctataatgatgagatgtgtcagttctcaggtatatgcaggaaggtgaggtggtacagggggaatttccctgctggttcccagtccatggtcacctgctgctatgaggctcrgagagcaatggtagaggtgtgctgttgttaatgagctatggtgtgctttgacaagctctgtggagatgtccttttaattgctacagtgagctaaaactggcattcaggtgttgaag

SEQ ID NO: 84 - DNA, 600 bp, Chicken  19866894083804_3
tatctctgcctgagaccgttttaggctaacagggctcattgtatgtaacatctcttaacggtatcctttttcccacgatcttcccygcatagaaagcgaagagctgaaaaacatcwttttccatattgtaatctgcaactgcctgtggctgcatctcagctatcctgctgtgccagtgcatgctgtgccctataatgatgagatgtgtcagttctcaggtatatgcaggaaggtgaggtggtacagggggaatttccctgctggttcccagtccatggtcacctgctgctatgaggctcrgagagcaatggtagaggtgtgctgttgttaatgagctatggtgtgctttgacaagctctgtggagatgtccttttaattgctacagtgagctaaaactggcattcaggtgttgaagtggacggctggagcttcacttactggtaggagctggatctcagtgccacrctcctttagcagcactgttctctggattagccatttattgcttccaaytytggctccagtcctctcaagtaggatgtcctcaggtgcyggaggacagaccataagctgtaggggcatgaaattcggcaagttca

SEQ ID NO: 85 - DNA, 600 bp, Chicken  19866894083804_4
gctgtgccagtgcatgctgtgccctataatgatgagatgtgtcagttctcaggtatatgcaggaaggtgaggtggtacagggggaatttccctgctggttcccagtccatggtcacctgctgctatgaggctcrgagagcaatggtagaggtgtgctgttgttaatgagctatggtgtgctttgacaagctctgtggagatgtccttttaattgctacagtgagctaaaactggcattcaggtgttgaagtggacggctggagcttcacttactggtaggagctggatctcagtgccacrctcctttagcagcactgttctctggattagccatttattgcttccaaytytggctccagtcctctcaagtaggatgtcctcaggtgcyggaggacagaccataagctgtaggggcatgaaattcggcaagttcacatgctgttgctcctctttgagctgctctgctcacaccttcctttgccatattgagtcttcctgtctgttgctctcctgccttcctataagagatggaaagacttaaaatggttgaatctccaaggtcatcttgtccaactgtgtgcccaccactaaaccacgtct

SEQ ID NO: 86 - DNA, 600 bp, Chicken  19866894083804_5
tcaggtatatgcaggaaggtgaggtggtacagggggaatttccctgctggttcccagtccatggtcacctgctgctatgaggctcrgagagcaatggtagaggtgtgctgttgttaatgagctatggtgtgctttgacaagctctgtggagatgtccttttaattgctacagtgagctaaaactggcattcaggtgttgaagtggacggctggagcttcacttactggtaggagctggatctcagtgccacrctcctttagcagcactgttctctggattagccatttattgcttccaaytytggctccagtcctctcaagtaggatgtcctcaggtgcyggaggacagaccataagctgtaggggcatgaaattcggcaagttcacatgctgttgctcctctttgagctgctctgctcacaccttcctttgccatattgagtcttcctgtctgttgctctcctgccttcctataagagatggaaagacttaaaatggttgaatctccaaggtcatcttgtccaactgtgtgcccaccactaaaccacgtcttgagatggtgtttggtgtgtggtaagactccaaggtgtgggttaggct

SEQ ID NO: 87 - DNA, 600 bp, Chicken  19866894083804_6
aggtatatgcaggaaggtgaggtggtacagggggaatttccctgctggttcccagtccatggtcacctgctgctatgaggctcrgagagcaatggtagaggtgtgctgttgttaatgagctatggtgtgctttgacaagctctgtggagatgtccttttaattgctacagtgagctaaaactggcattcaggtgttgaagtggacggctggagcttcacttactggtaggagctggatctcagtgccacrctcctttagcagcactgttctctggattagccatttattgcttccaaytytggctccagtcctctcaagtaggatgtcctcaggtgcyggaggacagaccataagctgtaggggcatgaaattcggcaagttcacatgctgttgctcctctttgagctgctctgctcacaccttcctttgccatattgagtcttcctgtctgttgctctcctgccttcctataagagatggaaagacttaaaatggttgaatctccaaggtcatcttgtccaactgtgtgcccaccactaaaccacgtcttgagatggtgtttggtgtgtggtaagactccaaggtgtgggttaggctta

SEQ ID NO: 88 - DNA, 600 bp, Chicken  19866894083804_7
tccctgctggttcccagtccatggtcacctgctgctatgaggctcrgagagcaatggtagaggtgtgctgttgttaatgagctatggtgtgctttgacaagctctgtggagatgtccttttaattgctacagtgagctaaaactggcattcaggtgttgaagtggacggctggagcttcacttactggtaggagctggatctcagtgccacrctcctttagcagcactgttctctggattagccatttattgcttccaaytytggctccagtcctctcaagtaggatgtcctcaggtgcyggaggacagaccataagctgtaggggcatgaaattcggcaagttcacatgctgttgctcctctttgagctgctctgctcacaccttcctttgccatattgagtcttcctgtctgttgctctcctgccttcctataagagatggaaagacttaaaatggttgaatctccaaggtcatcttgtccaactgtgtgcccaccactaaaccacgtcttgagatggtgtttggtgtgtggtaagactccaaggtgtgggttaggcttaggttaggctttagaatcatagggtagggtctttcttga

SEQ ID NO: 89 - DNA, 599 bp, Chicken  19866894083805_1
  misc_feature (1)..(118): n is any nucleotide
nnnnnnnnnnnnnnnnnnnnnnnnnnnnnnnnnnnnnnnnnnnnnnnnnnnnnnnnnnnnnnnnnnnnnnnnnnnnnnnnnnnnnnnnnnnnnnnnnnnnnnnnnnnnnnnnnnnnnnttttttgggacatgaaaataattccagtacttaacgtattcaatatgggaaaaagaaacaacaacaacaagaactaacaaagtggtattcaagggcagttaggatatggttttgagcagtctgatcctgtggaagctgtccctgactgtggtatggcagcagatttggaactagatgatctytacagtcctttccaacgcaaaccatgttaggattctacagttctattatattgctaataaggaaaaagcagagctcacaaaaagtgatcaagctggagatttgcctctcaagggtataatagaaagcactttgttccatcttcaactcactattatttgtcaaataattctttgtaggcatcatagttaatgaaaatgggcatttcagaaagccctgaaagcatactgtgggttaggtgtccttctaagtatctacagactatgaaattgaggccttaagggaaaacagctttcccaag

SEQ ID NO: 90 - DNA, 600 bp, Chicken  19866894083813_1
agtggttcacagtggacagcctcagggataaggtgggttccagcctccagagcaccgtgtacatgtatggtgttctctgcaaagtgaggtgtgttgctgcttctcttctgcaggatgatttcccatttaattttaagatttaaatgcctgtctctctgaaatcctaatttatttcttttttatcagcaactcggggaaattttgttcatgatttcttggatataccaccttcgttctcacagcagctttgtgttcaccttccataatctttccttgtagagtttttcagtgttctgaacwtatcttattagagcagcttactgtgaagtcaaagtaaactgtgctgctgataataactcttctgtgaatagaaccatgtttagctctgtgtaactgtatgcacgtatgtatggaaaattcacgtggcttgaaacttgtatccatatccagtttgttgaaaatggtggcagtaaaattcttggccatcagttttataagttcgagatggagccgaaggaaactcaactatgaaagcagtgcaggtttttgtggaagaagttggctgtgctccttcactatggttactgctgctcccttttt

SEQ ID NO: 91 - DNA, 599 bp, Chicken  19866894083815_1
  misc_feature (1)..(236): n is any nucleotide
nnnnnnnnnnnnnnnnnnnnnnnnnnnnnnnnnnnnnnnnnnnnnnnnnnnnnnnnnnnnnnnnnnnnnnnnnnnnnnnnnnnnnnnnnnnnnnnnnnnnnnnnnnnnnnnnnnnnnnnnnnnnnnnnnnnnnnnnnnnnnnnnnnnnnnnnnnnnnnnnnnnnnnnnnnnnnnnnnnnnnnnnnnnnnnnnnnnnnnnnnnnnnnnnnnnnnnnnnnnnnnnnnnnnnnnnnnnnaaggaaagagaaagaataaaagaaatagcagacagacatgagaacctacttgactaaattgaawctgaatctttgacacaacatgaaagctgaagaactatggctttatatttttttgttttgttttgttttagcagctttatatttttctgcaaataatcgtttcaggcaaatatatttttagtagtaaaattaaatcaacagcaaaattaaatttcttcttagtacaaaacctgccttgctcactctctatacacttttatgagatataaaagacaccttatctagaagttttcaaaaaagtttattacaaactcggaccaaggcagaaaagttgcctctctaccttttgtgctttctgtg

SEQ ID NO: 92 - DNA, 600 bp, Chicken  19866894083815_2
ataaaagacaccttatctagaagttttcaaaaaagtttattacaaactcggaccaaggcagaaaagttgcctctctaccttttgtgctttctgtggcctcaaacacacaggcattgacaaagtccttcatgaccctagccagtttggcgatgggtaaaggacatatttgggcctgttgaaatatggaataccttcagaagaataaaaggtggagagtgagccagaggaagcagtgagtttccattagtgttttacgtttatatccaaacaagtttagtggaaatttcagccaagcttaaktctctttgggccaaagcatagattcaaactctacttggatgttaaaaatggtgctggcagataacatctgacattagatagcttcagtatccaagatcttataagtacatcagtacatcattgcactgccctattcttccaatatagaacagagctgctatctcaagagaacttaatgccctgttggtgtccttggaacagcaaaaagtttataggaatagtgcaaagaattaagaattcaatgatttaatttaaaagcatgtttagcatttaaacctgcctctcaaagtttcagaaact

SEQ ID NO: 93 - DNA, 600 bp, Chicken  19866894083822_1
attctgcaataagaatttctgtttagagctactgttcatatatgctactagtgtacgatttttgctgaggcatgtctcctaggatgttatttgaaggagttatttctaaaattaaggtggacttgatgagttcaaaagtgacggaagcagggcttaaaaaggtgactgcttgacttgggttcccaactgacgcacagataagctcaggtagtcggttaatcagattaaaagatcaagacagccaaaactgaattttctcatatcacaattaaactcagtttttaaaacagataacgttcrtgaggctcaccagaaatgaaagagcaagatgtagtgctgctgatgttttgttccttgttatagcaccagcagatatgtgtactacattcccaaaaggcaaaggactccaacttttattataatgcagcttcattttgaagctgtcagatctcaaaagtgagaaaaagcagaagacagtctgtcacctcgacatttctgtttccacctttttcttatcaccaagcaaagaatgtattttttcatttacacctacctgtaatttcatgtagcacaaccaaccttttttgcattaaagaggag

SEQ ID NO: 94 - DNA, 600 bp, Chicken  19866894083837_1
ttgaagagccaggaggtagcagctgggtggccatgtccccatgaagtcccccacccaagtgctgcactttggagcagggagtgtaggcactgtgatgcaactgcccaggtacatcccttgttgctgcttggcaatgggcatgtcccattttccctttcctgcctacacccaacaaagtccccatgagccaggccaccacttttcctcccctttcccaagccaaaggttttcgtgggatcagacccatgtgctcagcaacgtctgagcttttacacgtgccagaaggacattaaattgaaygtattcagtgctaagaattatggtatctttagaacctagagtgtataattaaattatagcatctgagattggaattgctttttcacttgtagggagaagaaaaaataagacattttaataacatgtcataagttttacagttattggattttcagattgtttacaaaagcaatattgttaaattgcataggggttgttttttttctttaagtcttttgataaaaagaataaactaacactaatgttcccaggaggtaaaacaaaattgcatttcacttttgttatttgtttaattatcca

SEQ ID NO: 95 - DNA, 600 bp, Chicken  19866894083841_1
ctgaccctggcatggaggccctgcttgctgtataccagaccagaaaaagcagagcagagctggtaccaaggctaagtgcctctcagccttgctttagcaaggagaatgcagtgctgtatctgcttcctacagtcatcattggctctgtatcctgtcctcacatccactgcagagagtttagcttggttactgtcaagaaacactgcaatggctggtttgaggttagtgccagcaggctgccttggagggactggcaggggaaatgaggatctggattttatattgctcctgagccagtcrcagcacatctccagtcttgtccagctccagcttcacctgtgtgggcatgtgagaaggaccrgcttcagggctcaggccctgaatgccctacaaggaaggggccatatgctttcccatcagcaaacagtaaagcagaagtgcacattggaatggggaaggagctttgctgtctgtgtccgtaccagaaaggacggctccataagtggggagaggagaccccacagatcatcaggaggaaggtacagaacgtgtttgtaacgccaagtctgatggcaagaggagggagcatcacacagggca

SEQ ID NO: 96 - DNA, 600 bp, Chicken  19866894083841_2
ggtaccaaggctaagtgcctctcagccttgctttagcaaggagaatgcagtgctgtatctgcttcctacagtcatcattggctctgtatcctgtcctcacatccactgcagagagtttagcttggttactgtcaagaaacactgcaatggctggtttgaggttagtgccagcaggctgccttggagggactggcaggggaaatgaggatctggattttatattgctcctgagccagtcrcagcacatctccagtcttgtccagctccagcttcacctgtgtgggcatgtgagaaggaccrgcttcagggctcaggccctgaatgccctacaaggaaggggccatatgctttcccatcagcaaacagtaaagcagaagtgcacattggaatggggaaggagctttgctgtctgtgtccgtaccagaaaggacggctccataagtggggagaggagaccccacagatcatcaggaggaaggtacagaacgtgtttgtaacgccaagtctgatggcaagaggagggagcatcacacagggcagaaaaagggcaggagaccctaaatgatctccacagtctttccaaactggctcacagggcca

SEQ ID NO: 97 - DNA, 600 bp, Chicken  19866894083844_1
tctggcatttatgcggtgaatacgtttatttatgctgtgaagcgtttgtttatcttaaagcatgtacattatcttgttgatttttctgcaacttctcatctgtttcaagtataatcttgtgctaatttagagtgtatgactgtaggaacatgtatgtagaggtattgatgcgcatcaaagatttagccagaaacttagaagcaatcggctttccaaattatatgtgtgaaaaagtaaaatattaatatttcaaagacagtgaaagtgtgctatgctttgttattatgatgatagagcagrtgtggcagattaaaaatagcatgtattagcactcctctgaacttgcagctgaaaggcacttagaaaggtatgaaaccatcttataccttagaaaatgccaaatcaacaatgtatgagaaatacatttgttgccataaataaagtaattattttgcttcagagcactgaatgcttactacaaggtgtgatatgtaaatactaacttttgatgattttgaatgactatttatctatctgaagaacagctttcatacgtattacattttccataatgttatcatgttttattttttcttgtta

SEQ ID NO: 98 - DNA, 600 bp, Chicken  19866894083844_2
atctgaagaacagctttcatacgtattacattttccataatgttatcatgttttattttttcttgttatagctatatctatttagtgttagaagataagtttgttagttgaaatagaagttaattcagactgcaaccagtattcaacacagcatatttttcctctatcacatatttacagtaatttgctacatcatttaaatatatgtgccttacagttgtcttttaaaattcagaaattgaaaattttattgtcttgtactgttgctttctctcttaacactaagctcatgcatctgcrtgaggttctatatatgtttttaagatacaaatctttcattcttttccagtatttgtttcctgtccttaggggtcttcatgtaaagtatgacagttgctggatagcttcaagcagatgctgatgaaatgaaagtaaaatgtttttaaaaattccgacgtgtgcagtgttttgttgtgttgtatttaatttctaaaataacttgaagtttttaatttctcattccttgtctgtttgtaaactatggccacaaacctctagctcatgattcttttgcaggtggaagctcggaccatggaagct

SEQ ID NO: 99 - DNA, 571 bp, Chicken  19866894083845_1
tctggcatttatgcggtgaatacgtttatttatgctgtgaagcgtttgtttatcttaaagcatgtacattatcttgttgatttttctgcaacttctcatctgtttcaagtataatcttgtgctaatttagagtgtatgactgtaggaacatgtatgtagaggtattgatgcacatcaaagatttagccagaaacttagaagcaatcggctttccaaattatatgtgtgaaaaagtaaaatattaatatttcaaagacagtgaaagtgtgctatgctttgttattatgatgatagagcagrtgtggcagattaaaaatagcatgtattagcactcctctgaacttgcagctgaaaggcacttagaaaggtatgaaaccatcttataccttagaaaatgccaaatcaacaatgtatgagaaatacatttgttgccataaataaagtaattattttgcttcagagcactgaatgcttactacaaggtgtgatatgtaaatactaacttttgatgattttgaatgactatttatctatctgaagaacagctttcatacgtattacattttccata

SEQ ID NO: 100 - DNA, 600 bp, Chicken  19866894083848_1
tcttggagtaacacaataactcaatgtttagtcacacaaaatcagagcaaccttccaagggtttttgcttcagtttgttgaccatttggttgagtatgcgttaggttaggaattctcttactatttttgagcagcatttctgctgtggatcagtggattagaagtggacctctccacactagttctatgcaaacaccaacagcacacaccaagaggaagatttggcctaattttacatttggcagaagggttatggatattcaagatagccctagtataagggcttagtgagatgtgcartgcattaagaggcagcactggcagaagtgtctggttctggtagcaatatagacaccagtgcaaaaggttttttgggtgaagcatctaaatgtagcaaaacaagcacaaattctgacagaggttataactttgcattcatttcttctgcctttattgyatttttctgacctgttgctaaaaggacatgactatgcagtaggagcaagattgcttccgtgcactgtcccatgtgctgctgggtatggaatcaggtggattgttttgagattttctggggatccgaaggaggctgcgtagata

SEQ ID NO: 101 - DNA, 600 bp, Chicken  19866894083848_2
ttagaagtggacctctccacactagttctatgcaaacaccaacagcacacaccaagaggaagatttggcctaattttacatttggcagaagggttatggatattcaagatagccctagtataagggcttagtgagatgtgcartgcattaagaggcagcactggcagaagtgtctggttctggtagcaatatagacaccagtgcaaaaggttttttgggtgaagcatctaaatgtagcaaaacaagcacaaattctgacagaggttataactttgcattcatttcttctgcctttattgyatttttctgacctgttgctaaaaggacatgactatgcagtaggagcaagattgcttccgtgcactgtcccatgtgctgctgggtatggaatcaggtggattgttttgagattttctggggatccgaaggaggctgcgtagatacagtttgctgtaattctgggaaacttgttagattgagagcaagggaagaagaaaggctgtgccatgcacagacataatgagaagggaggagattcgtttgcaattttcatgtctcacccagcagcgtcaagttttcttgatcctgctgcagttcagt

SEQ ID NO: 102 - DNA, 600 bp, Chicken  19866894083848_3
ggtatggaatcaggtggattgttttgagattttctggggatccgaaggaggctgcgtagatacagtttgctgtaattctgggaaacttgttagattgagagcaagggaagaagaaaggctgtgccatgcacagacataatgagaagggaggagattcgtttgcaattttcatgtctcacccagcagcgtcaagttttcttgatcctgctgcagttcagtaactctgcctttgaagatcaaaggggctgttggtgtttttggagtgcttgctttaagtaaaaggtaaaagcagctccatcscactcctctgtgtacctgaaggtcttgtcacgaggacatccagatacagatgtaactgaagggcttagaaaggcacagctttttattttgttttaaccaccaaagctttgttttttgcagagtaatgttgaatttgattttaattccaaactgggaaatttggggttacattttacctgagactttggtgcacttttgaatcagcagcaatcttgccaatgtcaagaaggttacataygctatgcaattaaataaaacaatttaaacatgaagttttacaggcaatctgatattaaaacc

SEQ ID NO: 103 - DNA, 600 bp, Chicken  19866894083848_4
aaaggggctgttggtgtttttggagtgcttgctttaagtaaaaggtaaaagcagctccatcscactcctctgtgtacctgaaggtcttgtcacgaggacatccagatacagatgtaactgaagggcttagaaaggcacagctttttattttgttttaaccaccaaagctttgttttttgcagagtaatgttgaatttgattttaattccaaactgggaaatttggggttacattttacctgagactttggtgcacttttgaatcagcagcaatcttgccaatgtcaagaaggttacataygctatgcaattaaataaaacaatttaaacatgaagttttacaggcaatctgatattaaaaccctgccaggtaccgttttatatccttgaccataggtaggaaatgtaaccgtatttcaccctttcaaacttaagactacctgagagcaccccrgtcactygacaggaatgtttttccagaaataatatttaattttgaaaatcctgccaaaggctatttctgtttccacaggggcccttgttacaagtggaggtcccagtgcagcatttgtgcacatgtaatactcggacttcaggagtc

SEQ ID NO: 104 - DNA, 600 bp, Chicken  19866894083848_5
tttaaccaccaaagctttgttttttgcagagtaatgttgaatttgattttaattccaaactgggaaatttggggttacattttacctgagactttggtgcacttttgaatcagcagcaatcttgccaatgtcaagaaggttacataygctatgcaattaaataaaacaatttaaacatgaagttttacaggcaatctgatattaaaaccctgccaggtaccgttttatatccttgaccataggtaggaaatgtaaccgtatttcaccctttcaaacttaagactacctgagagcaccccrgtcactygacaggaatgtttttccagaaataatatttaattttgaaaatcctgccaaaggctatttctgtttccacaggggcccttgttacaagtggaggtcccagtgcagcatttgtgcacatgtaatactcggacttcaggagtctgcccagggatcccattcagagagttctgaggtgtatataggagacattaagaatggaagtagtacctccaattttttaattagcggtgaactgacactaattacattacaattctactgataaggggagggttctctttcattgcctacgag

SEQ ID NO: 105 - DNA, 600 bp, Chicken  19866894083848_6
accaaagctttgttttttgcagagtaatgttgaatttgattttaattccaaactgggaaatttggggttacattttacctgagactttggtgcacttttgaatcagcagcaatcttgccaatgtcaagaaggttacataygctatgcaattaaataaaacaatttaaacatgaagttttacaggcaatctgatattaaaaccctgccaggtaccgttttatatccttgaccataggtaggaaatgtaaccgtatttcaccctttcaaacttaagactacctgagagcaccccrgtcactygacaggaatgtttttccagaaataatatttaattttgaaaatcctgccaaaggctatttctgtttccacaggggcccttgttacaagtggaggtcccagtgcagcatttgtgcacatgtaatactcggacttcaggagtctgcccagggatcccattcagagagttctgaggtgtatataggagacattaagaatggaagtagtacctccaattttttaattagcggtgaactgacactaattacattacaattctactgataaggggagggttctctttcattgcctacgagcctataa

SEQ ID NO: 106 - DNA, 600 bp, Chicken  19866894083854_1
cttcattcaggcctccagctcaagcagcctgccctgagggtatccagtggttaggtcctgtggaatggccctgtggactctgatctgatttaggaaaccacttccaaaatttagagatttccttgctgacatcagatatgctatgcttttcagtacttgacactgtgtaccattttcttacacaatgctgaagatacatagtttgcttagcagatcctgccgcccatttgtaagcagtacatttatggagaaaagttgtattagccccacattcagagccagttaagagcacagagacayaagacattccgaaatcttccaattcttttctaaattctgggctttttgtatctgccatctttgagtcctcagttcccacagccttatccttttacctgattgtctaacaccttgaattcctccatgagtgttccttgtctgtcctctgtctgtcctccctctgtgtgatggaaaaacaatgtagaattccaacagtccttacaccttctcccatcatcactcttcaaggtcttgtgtggcttttctgagttaatatcacagctgaaatgactgagatcactgagacaaacaagtatttct

SEQ ID NO: 107 - DNA, 599 bp, Chicken  19866894083856_1
  misc_feature (1)..(90): n is any nucleotide
nnnnnnnnnnnnnnnnnnnnnnnnnnnnnnnnnnnnnnnnnnnnnnnnnnnnnnnnnnnnnnnnnnnnnnnnnnnnnnnnnnnnnnnnnnttttatctgtgaacaacagcaggtttgggccaaatgcacgtaacatttttcactgtacttggtgtgttgccattctattttgctcttcatgagataacatggaaacagacactatggaagatgtgacagccatttaaacaataatagatgaatagcggtagccagtctgttgtctgtgttcctaaatgcaagtagggtaagttcagactrgtcaccaatcaaaatggaaaatgttgatattgccaggatttgaaagcaagagataatgtctggctcaaaaaatagtctgcagattaatgtctttctgtaattttaatggctctttgtaatgtgtactgatgcttttttgctctctgtaaaatacttcaaatatayctgttcctaaaacaactcactcatatcrtttaatgtaagcacaaagacaaacgtattgtgggttgaaattgagatgtggaggtttggaaactggtatgacttgaaaaggagatagggactaatgaagaattgag

SEQ ID NO: 108 - DNA, 580 bp, Chicken  19866894083856_2
tattttgctcttcatgagataacatggaaacagacactatggaagatgtgacagccatttaaacaataatagatgaatagcggtagccagtctgttgtctgtgttcctaaatgcaagtagggtaagttcagactrgtcaccaatcaaaatggaaaatgttgatattgccaggatttgaaagcaagagataatgtctggctcaaaaaatagtctgcagattaatgtctttctgtaattttaatggctctttgtaatgtgtactgatgcttttttgctctctgtaaaatacttcaaatatayctgttcctaaaacaactcactcatatcrtttaatgtaagcacaaagacaaacgtattgtgggttgaaattgagatgtggaggtttggaaactggtatgacttgaaaaggagatagggactaatgaagaattgagtgaaagctaaactgagagaattgtatagaaagacacaaggtggacaaatagtttggggaaggatagtaaaactgagatgaaataatggagaaaagaagtgcccaaggagtaagaaattttattgactcagcaagaaataaacaaaa

SEQ ID NO: 109 - DNA, 552 bp, Chicken  19866894083856_3
aacagacactatggaagatgtgacagccatttaaacaataatagatgaatagcggtagccagtctgttgtctgtgttcctaaatgcaagtagggtaagttcagactrgtcaccaatcaaaatggaaaatgttgatattgccaggatttgaaagcaagagataatgtctggctcaaaaaatagtctgcagattaatgtctttctgtaattttaatggctctttgtaatgtgtactgatgcttttttgctctctgtaaaatacttcaaatatayctgttcctaaaacaactcactcatatcrtttaatgtaagcacaaagacaaacgtattgtgggttgaaattgagatgtggaggtttggaaactggtatgacttgaaaaggagatagggactaatgaagaattgagtgaaagctaaactgagagaattgtatagaaagacacaaggtggacaaatagtttggggaaggatagtaaaactgagatgaaataatggagaaaagaagtgcccaaggagtaagaaattttattgactcagcaagaaataaacaaaa

SEQ ID NO: 110 - DNA, 600 bp, Chicken  19866894083858_1
agagacacaaccagtgcgttcttgtgcataacaaaaatgtgccatggttcactggaaatagaagtcatctttgggatcctatttcttcacaaagttcagaaatagttgattagtcttcattaagagctgcttctctcttccttgcatctacatcaaaaagaccagaaaagtcagagagttaagtcagagagttccagtagcattcatccaaaaacacaaacagaataaggatggtttgttttcaatggatagcccttccacttgagactcttgatatgaaatcatcgtgtagacttaaaygctacacgaatccacaacatgttaacaggagagtcctactaaggttttgtatcgttaccctgctgatgctgaatataagtcatgcagcacttaagtggcccaataatctttcagagactycagatttgttgtaatgtttccccaactcttggccccttgctcgtgatcccatctaggatggaagtctctatttgttctgcctgccagctacagaaatgacagcaatctattctgaaaaccatttgactaattatgactttgatggactccagctgaatagcacacatttgaaaaagaata

SEQ ID NO: 111 - DNA, 600 bp, Chicken  19866894083858_2
taagagctgcttctctcttccttgcatctacatcaaaaagaccagaaaagtcagagagttaagtcagagagttccagtagcattcatccaaaaacacaaacagaataaggatggtttgttttcaatggatagcccttccacttgagactcttgatatgaaatcatcgtgtagacttaaaygctacacgaatccacaacatgttaacaggagagtcctactaaggttttgtatcgttaccctgctgatgctgaatataagtcatgcagcacttaagtggcccaataatctttcagagactycagatttgttgtaatgtttccccaactcttggccccttgctcgtgatcccatctaggatggaagtctctatttgttctgcctgccagctacagaaatgacagcaatctattctgaaaaccatttgactaattatgactttgatggactccagctgaatagcacacatttgaaaaagaatactctcaataccacattctgaggaactgcctaaggcaggccctaaagaccagaaatgaaactgatccaaagagcaatgctttgagcatgagcacagggcacgagagcacatctggatactc

SEQ ID NO: 112 - DNA, 599 bp, Chicken  19866894083859_1
  misc_feature (1)..(147): n is any nucleotide
nnnnnnnnnnnnnnnnnnnnnnnnnnnnnnnnnnnnnnnnnnnnnnnnnnnnnnnnnnnnnnnnnnnnnnnnnnnnnnnnnnnnnnnnnnnnnnnnnnnnnnnnnnnnnnnnnnnnnnnnnnnnnnnnnnnnnnnnnnnnnnnnnnnaccttctaaatcagacaaaaatacatctttttgtctttgctagtaaactactgcaaacatggtatttgaacaacataaagaggaagttataaatttaaataaaggctaaaaaataatgtcctagatttgcatctggattttgttaccagtctyragatgctacccagagcaacagcatgcagcatgggaagtctgataatgttgtgcatctttcaacatcatgcattctaaattgagcatgatttcctgtagtattgctgatatgccagataaaacaatcttgggtccaaaatcaacctctgttataaatggatgctctttgttatctgtatttgtgctgtgttgtgtgattaactgttccttatcagaagaggaagaacatttttgtttttggtattgtgtgtagacttgcttttaagtgataagcaattgcaacttatatgattgtttag

SEQ ID NO: 113 - DNA, 599 bp, Chicken  19866894083859_2
  misc_feature (1)..(146): n is any nucleotide
nnnnnnnnnnnnnnnnnnnnnnnnnnnnnnnnnnnnnnnnnnnnnnnnnnnnnnnnnnnnnnnnnnnnnnnnnnnnnnnnnnnnnnnnnnnnnnnnnnnnnnnnnnnnnnnnnnnnnnnnnnnnnnnnnnnnnnnnnnnnnnnnnnaccttctaaatcagacaaaaatacatctttttgtctttgctagtaaactactgcaaacatggtatttgaacaacataaagaggaagttataaatttaaataaaggctaaaaaataatgtcctagatttgcatctggattttgttaccagtctyragatgctacccagagcaacagcatgcagcatgggaagtctgataatgttgtgcatctttcaacatcatgcattctaaattgagcatgatttcctgtagtattgctgatatgccagataaaacaatcttgggtccaaaatcaacctctgttataaatggatgctctttgttatctgtatttgtgctgtgttgtgtgattaactgttccttatcagaagaggaagaacatttttgtttttggtattgtgtgtagacttgcttttaagtgataagcaattgcaacttatatgattgtttagt

SEQ ID NO: 114 - DNA, 600 bp, Chicken  19866894083859_3
ttgtatattaaatatgaatatgtgtgtatatatatatatttaattgatcctggaaaagttagaggtctttaagatatcttctcgagactccagttttgtttttggtagtatggttagaagcctgtatttagaagtttgaaaagtctgtgttactaatcctgtaatttttggaatcttgaattgtgattcagttggttattccacatccatttaaataaacatccttaaaagtctggaggctgcttcccattatccaaagccaaggcagtttgatctaagttcttgttctcatgagcaacrtgaggcttataatggatgagatcattcattagacaaactagtacacttagggaaaaatgcgtgagctttttgggtgtgaagtcctccttcagatataaagaaagtatcttaataatgcctttatctccatgaaagacataaaacaacatgcgtctctgaaccttgtaacattcgaaattgtttgaaacctcagtaagtacttgtgaggtgacatttgtgatttactaaaagccaccttcccttactaaagaaaaacaaggaaaaatgtgagaaacgtcttgtaagttgggaaagtggcct

SEQ ID NO: 115 - DNA, 600 bp, Chicken  19866894083865_1
tcactggcactaagagcatgaatattgtgagaatctgcacagcgggtctgccagcaaagccaaaatttgtcctcatttctctgcaggtatgctaaaggtgaggaaacttgatcgggacacccacagtagcagaggggacattttgaactatgtttatttacttatatgaaaaggtatttggggaaggtgctactcatttctcaggttttttgcatcattcatacaccagaggttcatcactaaggctcctaagctctattgtgatacaaacaacagaagaactctgccatgcttttgctrccactacatcttcatccaatttttgcctcagtgataaaattaatttaatatttgcacaaaccacagctctagtgttctgcttcccttaattacagagggatcctattccagcagtgaggtgtcagccctcagaaataaaacatcagcactttgaaaaccaggatcaaagttactgttctgctcctgwrtttaacagaatttcatcacttgatgaattcctggtgaaaaagagagggaccatcaaggaactgctgaatgttgtctctaattgaaatcacaaaggcgtctgcaatggtgctt

SEQ ID NO: 116 - DNA, 600 bp, Chicken  19866894083865_2
tgctactcatttctcaggttttttgcatcattcatacaccagaggttcatcactaaggctcctaagctctattgtgatacaaacaacagaagaactctgccatgcttttgctrccactacatcttcatccaatttttgcctcagtgataaaattaatttaatatttgcacaaaccacagctctagtgttctgcttcccttaattacagagggatcctattccagcagtgaggtgtcagccctcagaaataaaacatcagcactttgaaaaccaggatcaaagttactgttctgctcctgwrtttaacagaatttcatcacttgatgaattcctggtgaaaaagagagggaccatcaaggaactgctgaatgttgtctctaattgaaatcacaaaggcgtctgcaatggtgcttgaacattcatgcttagggagaacatgggtgatataatctgcttggagacactgtaagtcaaacaaatcttggagtaatgcaaaagatttaaatgacagagttttaaaatgggaataaataaacatcagcttatttcaaaattaaatgccgatgtcatcagctctgattttgtgggggcttagcccca

SEQ ID NO: 117 - DNA, 600 bp, Chicken  19866894083865_3
gctactcatttctcaggttttttgcatcattcatacaccagaggttcatcactaaggctcctaagctctattgtgatacaaacaacagaagaactctgccatgcttttgctrccactacatcttcatccaatttttgcctcagtgataaaattaatttaatatttgcacaaaccacagctctagtgttctgcttcccttaattacagagggatcctattccagcagtgaggtgtcagccctcagaaataaaacatcagcactttgaaaaccaggatcaaagttactgttctgctcctgwrtttaacagaatttcatcacttgatgaattcctggtgaaaaagagagggaccatcaaggaactgctgaatgttgtctctaattgaaatcacaaaggcgtctgcaatggtgcttgaacattcatgcttagggagaacatgggtgatataatctgcttggagacactgtaagtcaaacaaatcttggagtaatgcaaaagatttaaatgacagagttttaaaatgggaataaataaacatcagcttatttcaaaattaaatgccgatgtcatcagctctgattttgtgggggcttagccccaa

SEQ ID NO: 118 - DNA, 600 bp, Chicken  19866894083866_1
aaggaaaggttaaatctggcaaatgccaaagcattttgtctgggcatgttcttaaagggaaagattttcaaagcataacaagcatgtttttttttttttcttcccagtggaaggaagttaattaatacaagagatcccatgcattccccaggctatgtgcacctgcaatcagatcttctgctcttcagacaagcctcaacagcgcgcaagggctgctgctgggaggtctctggtgaggttgtatttgagggatgatggcagggctggatttggacagtgttgcatgtgatgctgttccarccataacactcttcagcacagtgtcttgcytggcccagttgttcccatgatggcaggatgcacaggttccctgtgccttgcctttystgctgttttccacttagaatcctgcagtcacaccttcagccaggccactcccgtgtcctctttttgataaaaacaatcacagtatcctcagctcatcttgtcatctgcraaatgcaggcaatgagggaatcatagcatatccygaggtagaacatgaaaacagacaaagtcagtgactccattatctttctccacacaggcataaggaaatac

SEQ ID NO: 119 - DNA, 600 bp, Chicken  19866894083866_2
gcattttgtctgggcatgttcttaaagggaaagattttcaaagcataacaagcatgtttttttttttttcttcccagtggaaggaagttaattaatacaagagatcccatgcattccccaggctatgtgcacctgcaatcagatcttctgctcttcagacaagcctcaacagcgcgcaagggctgctgctgggaggtctctggtgaggttgtatttgagggatgatggcagggctggatttggacagtgttgcatgtgatgctgttccarccataacactcttcagcacagtgtcttgcytggcccagttgttcccatgatggcaggatgcacaggttccctgtgccttgcctttystgctgttttccacttagaatcctgcagtcacaccttcagccaggccactcccgtgtcctctttttgataaaaacaatcacagtatcctcagctcatcttgtcatctgcraaatgcaggcaatgagggaatcatagcatatccygaggtagaacatgaaaacagacaaagtcagtgactccattatctttctccacacaggcataaggaaatactgaaccacagtactcttgagttctgtctca

SEQ ID NO: 120 - DNA, 600 bp, Chicken  19866894083866_3
tttttttttttttcttcccagtggaaggaagttaattaatacaagagatcccatgcattccccaggctatgtgcacctgcaatcagatcttctgctcttcagacaagcctcaacagcgcgcaagggctgctgctgggaggtctctggtgaggttgtatttgagggatgatggcagggctggatttggacagtgttgcatgtgatgctgttccarccataacactcttcagcacagtgtcttgcytggcccagttgttcccatgatggcaggatgcacaggttccctgtgccttgcctttystgctgttttccacttagaatcctgcagtcacaccttcagccaggccactcccgtgtcctctttttgataaaaacaatcacagtatcctcagctcatcttgtcatctgcraaatgcaggcaatgagggaatcatagcatatccygaggtagaacatgaaaacagacaaagtcagtgactccattatctttctccacacaggcataaggaaatactgaaccacagtactcttgagttctgtctcaattgcaacacattgttttgtatctatttcaagaaatctaaaaaagaagtgggaacc

SEQ ID NO: 121 - DNA, 600 bp, Chicken  19866894083866_4
ttttttttttttcttcccagtggaaggaagttaattaatacaagagatcccatgcattccccaggctatgtgcacctgcaatcagatcttctgctcttcagacaagcctcaacagcgcgcaagggctgctgctgggaggtctctggtgaggttgtatttgagggatgatggcagggctggatttggacagtgttgcatgtgatgctgttccarccataacactcttcagcacagtgtcttgcytggcccagttgttcccatgatggcaggatgcacaggttccctgtgccttgcctttystgctgttttccacttagaatcctgcagtcacaccttcagccaggccactcccgtgtcctctttttgataaaaacaatcacagtatcctcagctcatcttgtcatctgcraaatgcaggcaatgagggaatcatagcatatccygaggtagaacatgaaaacagacaaagtcagtgactccattatctttctccacacaggcataaggaaatactgaaccacagtactcttgagttctgtctcaattgcaacacattgttttgtatctatttcaagaaatctaaaaaagaagtgggaacca

SEQ ID NO: 122 - DNA, 600 bp, Chicken  19866894083866_5
caacagcgcgcaagggctgctgctgggaggtctctggtgaggttgtatttgagggatgatggcagggctggatttggacagtgttgcatgtgatgctgttccarccataacactcttcagcacagtgtcttgcytggcccagttgttcccatgatggcaggatgcacaggttccctgtgccttgcctttystgctgttttccacttagaatcctgcagtcacaccttcagccaggccactcccgtgtcctctttttgataaaaacaatcacagtatcctcagctcatcttgtcatctgcraaatgcaggcaatgagggaatcatagcatatccygaggtagaacatgaaaacagacaaagtcagtgactccattatctttctccacacaggcataaggaaatactgaaccacagtactcttgagttctgtctcaattgcaacacattgttttgtatctatttcaagaaatctaaaaaagaagtgggaaccatgatgtgatggaagcacaagtggagaacgccttctggagaaagaaagtagagggggcagsgagaactgtgaagatgatgccgatgtcagaacctataatgaaaagcagg

SEQ ID NO: 123 - DNA, 600 bp, Chicken  19866894083866_6
tggtgaggttgtatttgagggatgatggcagggctggatttggacagtgttgcatgtgatgctgttccarccataacactcttcagcacagtgtcttgcytggcccagttgttcccatgatggcaggatgcacaggttccctgtgccttgcctttystgctgttttccacttagaatcctgcagtcacaccttcagccaggccactcccgtgtcctctttttgataaaaacaatcacagtatcctcagctcatcttgtcatctgcraaatgcaggcaatgagggaatcatagcatatccygaggtagaacatgaaaacagacaaagtcagtgactccattatctttctccacacaggcataaggaaatactgaaccacagtactcttgagttctgtctcaattgcaacacattgttttgtatctatttcaagaaatctaaaaaagaagtgggaaccatgatgtgatggaagcacaagtggagaacgccttctggagaaagaaagtagagggggcagsgagaactgtgaagatgatgccgatgtcagaacctataatgaaaagcagggcattatggaaaatgaggatcagaactatccagt

SEQ ID NO: 124 - DNA, 600 bp, Chicken  19866894083866_7
tttttgataaaaacaatcacagtatcctcagctcatcttgtcatctgcraaatgcaggcaatgagggaatcatagcatatccygaggtagaacatgaaaacagacaaagtcagtgactccattatctttctccacacaggcataaggaaatactgaaccacagtactcttgagttctgtctcaattgcaacacattgttttgtatctatttcaagaaatctaaaaaagaagtgggaaccatgatgtgatggaagcacaagtggagaacgccttctggagaaagaaagtagagggggcagsgagaactgtgaagatgatgccgatgtcagaacctataatgaaaagcagggcattatggaaaatgaggatcagaactatccagtttttgtcccaacgcccatgctctgaagagacccagcaccacaggagaaatggacagtgctacttctggcatcatgcattatagagtacatgtaaatcgacgagcaacactgagaagactagrcattcacagattcccagatgactgccttccccctggaaacactagtacttctcctgatgacacagaaattctccagttttgggaacaatggtagc

SEQ ID NO: 125 - DNA, 469 bp, Chicken  19866894083866_8
ctatttcaagaaatctaaaaaagaagtgggaaccatgatgtgatggaagcacaagtggagaacgccttctggagaaagaaagtagagggggcagsgagaactgtgaagatgatgccgatgtcagaacctataatgaaaagcagggcattatggaaaatgaggatcagaactatccagtttttgtcccaacgcccatgctctgaagagacccagcaccacaggagaaatggacagtgctacttctggcatcatgcattatagagtacatgtaaatcgacgagcaacactgagaagactagrcattcacagattcccagatgactgccttccccctggaaacactagtacttctcctgatgacacagaaattctccagttttgggaacaatggtagctctccacgaagatggacttgctaaggaagatatagactgggatccttgcgtgcatttcacttcccacactgaca

SEQ ID NO: 126 - DNA, 600 bp, Chicken  19866894083874_1
agaaggcttaggatgcaagtagttatgagaaattatatctgagattgtttttcagtgtctgcatttgcttgtgctttctagtttaaaacagaacatttgtctttttcgttagcagaactagtatttattcccattgcagtatataacagcaaacagtgtttgctttataaaaaatgaagaaatttgctgaaattgtagcatctttcatatgacatgggcatgtaaatgcacaataattgcatgtgaataacagaaaatgcattatctgaaaggctgagtattgaataaatgtgaaacaarttaaaattgagtataagaatctgctgaggtacttgtcttctttacattaatgttcatttgagtggccaacacagatttaactgaattaactgttaagtgtttgggattgctaccttaatatttctcacggaaaatctaagatattttgactatgaaaaaaatacattgttttgctatattggcagccagtcctgctcacttaacacatgatagaaatgatttgtcctactsttactcaaatatcttcctaatctgaaaattatgagtaaaccgtgtgactttatagtttcttacaaaatt

SEQ ID NO: 127 - DNA, 600 bp, Chicken  19866894083874_2
aataattgcatgtgaataacagaaaatgcattatctgaaaggctgagtattgaataaatgtgaaacaarttaaaattgagtataagaatctgctgaggtacttgtcttctttacattaatgttcatttgagtggccaacacagatttaactgaattaactgttaagtgtttgggattgctaccttaatatttctcacggaaaatctaagatattttgactatgaaaaaaatacattgttttgctatattggcagccagtcctgctcacttaacacatgatagaaatgatttgtcctactsttactcaaatatcttcctaatctgaaaattatgagtaaaccgtgtgactttatagtttcttacaaaattttctcatttgagattttagacacagtaggtagaatattttatctgttctatattagtatgtattctgtgatgccattagtcagatctttgactttcttcatatcatcatgccctatcttggaggatgcagagactgattattaacaatacaaatggacaggaaatgttattctaaagaataaggaggacatgtttaggtgtgaaactttataagtatcatataatcaatat

SEQ ID NO: 128 - DNA, 551 bp, Chicken  19866894083877_1
gatcgggattttggattaagtgattgcaatatgaaatcactgcagtggaactcagctgaaatttagcatacttgtgtccttaattccaattcagagttaatcgtaagactggtctaaacagaattcacaaacaaatcctaaggaatctagcatgcacaatttttgttcttcaaaactatctgcactttgagaaaaatgtatttggttacaacacgtttcgcaattgttccctatgttataaacaatctggacatcatttgcaaggatcttattaagactatatcttgaaattcaagagcsaaaaaaaaagcataaaggacatcttatgaagccttgtttcataaagaatcatagaatcgtagaatggcctgggttgaaaaggaccataatgatcatggagtttcaacacctctgctatgtgcagggtcgccaaccactagaccaggctgcccagagccacatccagtctggccttgaatgattaacattatggcccttagtggcccttatattaacatttaactagcaaggctttttttacatcttttttt

SEQ ID NO: 129 - DNA, 599 bp, Chicken  19866894083880_1
  misc_feature (1)..(156): n is any nucleotide
nnnnnnnnnnnnnnnnnnnnnnnnnnnnnnnnnnnnnnnnnnnnnnnnnnnnnnnnnnnnnnnnnnnnnnnnnnnnnnnnnnnnnnnnnnnnnnnnnnnnnnnnnnnnnnnnnnnnnnnnnnnnnnnnnnnnnnnnnnnnnnnnnnnnnnnnnnnnttggcccttcctgatatgccaatatgtactgacccatttaacattagattatgaaaatgttaataaactgaacttaccataaaaataagctctcaggtaaaaagatccgagggctgctccaaaagtagtgcctccttgtttatracgttgacctgtggcatcagaggtggatgttggtggtgtggcagtaggggttgaaccttcctgccaatgtcccactgtattttgttgctgtgacagctggcagcagtggggcagtctgacagagtggtgtctgatatgggagtgtgtatggagcgaaggggagggggggattgaattcctccgtgtggaaataatggcacccattgacattggtcagtgtttgctgaacacttacagagaccaacctgtggatgctggcacagtgaggctgtggtgctgcgtttcagcagtggtggcag

SEQ ID NO: 130 - DNA, 600 bp, Chicken  19866894083884_1
aactgtattagaagacacatatctcacagaactttccttacacccaataatctgcattttttaaaaacactgattaacgacgcaaagattctagccctgtccataaaattctcttattctacagctcccaaacttgagttcagtgtaggacacttgctttccagatctaggagtctgctcttttacaagaacaactcagaatacttccagagctcatctgtttatccctctgcacaaaataaaagagcctaatcctttactctcttgtttgcgtaatgtcagccatgcaatcaatctacygggaaagacaaaaacatggtggcagtgyactgatactgtctatagttgtrtgtctgagtcttcacaaagaggctgtgtccaaatattctctgacaaatattcagaaacttttcaaaaggcagatgagagcataattttatttcttcacagtaarcatgcagcagttcatgctcaaatgatgatagagtcatacgcagttgcaaacatcgacagagatgggtgcagtcrtttgtgtttttgctccaggactgcagaacagacgtaagccagatgtagcttggaagctgaacagttacagaa

SEQ ID NO: 131 - DNA, 600 bp, Chicken  19866894083884_2
gaactttccttacacccaataatctgcattttttaaaaacactgattaacgacgcaaagattctagccctgtccataaaattctcttattctacagctcccaaacttgagttcagtgtaggacacttgctttccagatctaggagtctgctcttttacaagaacaactcagaatacttccagagctcatctgtttatccctctgcacaaaataaaagagcctaatcctttactctcttgtttgcgtaatgtcagccatgcaatcaatctacygggaaagacaaaaacatggtggcagtgyactgatactgtctatagttgtrtgtctgagtcttcacaaagaggctgtgtccaaatattctctgacaaatattcagaaacttttcaaaaggcagatgagagcataattttatttcttcacagtaarcatgcagcagttcatgctcaaatgatgatagagtcatacgcagttgcaaacatcgacagagatgggtgcagtcrtttgtgtttttgctccaggactgcagaacagacgtaagccagatgtagcttggaagctgaacagttacagaagcaaagcactaaactcaaacccacatat

SEQ ID NO: 132 - DNA, 600 bp, Chicken  19866894083884_3
tctgcattttttaaaaacactgattaacgacgcaaagattctagccctgtccataaaattctcttattctacagctcccaaacttgagttcagtgtaggacacttgctttccagatctaggagtctgctcttttacaagaacaactcagaatacttccagagctcatctgtttatccctctgcacaaaataaaagagcctaatcctttactctcttgtttgcgtaatgtcagccatgcaatcaatctacygggaaagacaaaaacatggtggcagtgyactgatactgtctatagttgtrtgtctgagtcttcacaaagaggctgtgtccaaatattctctgacaaatattcagaaacttttcaaaaggcagatgagagcataattttatttcttcacagtaarcatgcagcagttcatgctcaaatgatgatagagtcatacgcagttgcaaacatcgacagagatgggtgcagtcrtttgtgtttttgctccaggactgcagaacagacgtaagccagatgtagcttggaagctgaacagttacagaagcaaagcactaaactcaaacccacatatctgttgctcagcaaagttaatc

SEQ ID NO: 133 - DNA, 600 bp, Chicken  19866894083884_4
tgctttccagatctaggagtctgctcttttacaagaacaactcagaatacttccagagctcatctgtttatccctctgcacaaaataaaagagcctaatcctttactctcttgtttgcgtaatgtcagccatgcaatcaatctacygggaaagacaaaaacatggtggcagtgyactgatactgtctatagttgtrtgtctgagtcttcacaaagaggctgtgtccaaatattctctgacaaatattcagaaacttttcaaaaggcagatgagagcataattttatttcttcacagtaarcatgcagcagttcatgctcaaatgatgatagagtcatacgcagttgcaaacatcgacagagatgggtgcagtcrtttgtgtttttgctccaggactgcagaacagacgtaagccagatgtagcttggaagctgaacagttacagaagcaaagcactaaactcaaacccacatatctgttgctcagcaaagttaatcaactttgactcagcactgtattaatgtattcaaagcctcatgaaggcttgctagctcagctggaattccccctctacataccagagttctctttatagtactca

SEQ ID NO: 134 - DNA, 600 bp, Chicken  19866894083884_5
tctgcacaaaataaaagagcctaatcctttactctcttgtttgcgtaatgtcagccatgcaatcaatctacygggaaagacaaaaacatggtggcagtgyactgatactgtctatagttgtrtgtctgagtcttcacaaagaggctgtgtccaaatattctctgacaaatattcagaaacttttcaaaaggcagatgagagcataattttatttcttcacagtaarcatgcagcagttcatgctcaaatgatgatagagtcatacgcagttgcaaacatcgacagagatgggtgcagtcrtttgtgtttttgctccaggactgcagaacagacgtaagccagatgtagcttggaagctgaacagttacagaagcaaagcactaaactcaaacccacatatctgttgctcagcaaagttaatcaactttgactcagcactgtattaatgtattcaaagcctcatgaaggcttgctagctcagctggaattccccctctacataccagagttctctttatagtactcagatagtacagagagtcttactgtgagtttacctgtagtttacaaaaattttaaggcctcttagattatcaaagc

SEQ ID NO: 135 - DNA, 600 bp, Chicken  19866894083887_1
aaaaaaaaaagtctgtaaatatctgtaaaaatttcatggaaataaaaccatttctgtggataagtacagacctaacctgagggagaaagctaacagtgaatatgactttctcttgaaaaaaatcttgacaacagaagactttttgtgctggcaaggtaatgctttcagtgacctcacaagtcttttccacacgtagcatctgtgcttttgtaaacttccacaataatcagtacttcaaataggcacaggagccaagagaaagtggagtattatcttaggcaattttctgtgacttttttkkggggacgaggggatagaataagcaagatgtctcattccttgctaatgtttctattttttcatcaatttaattttttatacacagagaacagttttaaagtctattgacaatgttaagccaaacttaatatgtgatgtatttcactgcacatcccttaacactaaagtatgtgaacaacagtgctttaggtttcactcccttcattgtctctgttctgcctgcaaaatggaagcaggtttgtgatattagagctaccataatgaaatatgacagcataggggcaggaatgtcattgtagt

SEQ ID NO: 136 - DNA, 600 bp, Chicken  19866894083887_2
aaaaaaaaagtctgtaaatatctgtaaaaatttcatggaaataaaaccatttctgtggataagtacagacctaacctgagggagaaagctaacagtgaatatgactttctcttgaaaaaaatcttgacaacagaagactttttgtgctggcaaggtaatgctttcagtgacctcacaagtcttttccacacgtagcatctgtgcttttgtaaacttccacaataatcagtacttcaaataggcacaggagccaagagaaagtggagtattatcttaggcaattttctgtgacttttttkkggggacgaggggatagaataagcaagatgtctcattccttgctaatgtttctattttttcatcaatttaattttttatacacagagaacagttttaaagtctattgacaatgttaagccaaacttaatatgtgatgtatttcactgcacatcccttaacactaaagtatgtgaacaacagtgctttaggtttcactcccttcattgtctctgttctgcctgcaaaatggaagcaggtttgtgatattagagctaccataatgaaatatgacagcataggggcaggaatgtcattgtagta

SEQ ID NO: 137 - DNA, 600 bp, Chicken  19866894083892_1
tttttccttgtataataccaaccagaggagtttgctgtaagggcactactgaattttctgtttttgactctgaggcactcagctgtgagcaaatatttcacacgtctcgaagcaatcagaatgtccgagtgcggcacactgggtgcctcgccatggtacagtgctttagtactaagaggttttctttcctcttcactaaagtaaatttgttgtgtagatgaagtagattgtgcagcttgaatatgagcctctattgaaaacctgggtatatgttcgaggtgtcctttgtagagagaaaaraagtattgaaagtgcttctggctgaaataaatrtggaaaatatggaagaggcaggattttatacttcagaggagggctgttatcttgcattgcatttcatcttttgccaaagatactctaaattctgcctggcccattaataggaatgtttcttcagaagcattttgctataatggagtttctgtgattgcttaagatggaagttgtaaatacaatctctgtaaatgcctgtgtaaacaaagacattttaattggtgcaggatcatctttggtagcttattaaaagcattgcagagctgt

SEQ ID NO: 138 - DNA, 600 bp, Chicken  19866894083892_2
gctgtaagggcactactgaattttctgtttttgactctgaggcactcagctgtgagcaaatatttcacacgtctcgaagcaatcagaatgtccgagtgcggcacactgggtgcctcgccatggtacagtgctttagtactaagaggttttctttcctcttcactaaagtaaatttgttgtgtagatgaagtagattgtgcagcttgaatatgagcctctattgaaaacctgggtatatgttcgaggtgtcctttgtagagagaaaaraagtattgaaagtgcttctggctgaaataaatrtggaaaatatggaagaggcaggattttatacttcagaggagggctgttatcttgcattgcatttcatcttttgccaaagatactctaaattctgcctggcccattaataggaatgtttcttcagaagcattttgctataatggagtttctgtgattgcttaagatggaagttgtaaatacaatctctgtaaatgcctgtgtaaacaaagacattttaattggtgcaggatcatctttggtagcttattaaaagcattgcagagctgtaaatgtatcattccttacacttgaagacaaagt

SEQ ID NO: 139 - DNA, 600 bp, Chicken  19866894083893_1
catgctatcttccccctgcattgaaagataacaggagcatgttctcacagaaataacaggctgcaagtggctgccattcttgcagttaaaacacttaagccaagccacaaggagtgtcagacaaaggtttgataccattctgcctgcttttttatggatccttcatatcactctgatagtggagaggtgccatcaagttgggagatctatccacaggcgattgttcccatttgtgagcaagatttttttgtatgggtttggttttgtgttcatttttaaatataatgcagtcataggaawcaccttgaagtcttgcagcagtgaagcacagagaaaggggacagactgaagaagcaagtaaacggtcaatgagcccttgctagtgtaagtccttcacacatattgcctgcaactgagagtagccaaatatttctgaaaagctgaaagttttttcagaggtttaagtggctgggaaaaaaaatcatcaacacttacttttaaaagaaataataccttaagattaaaacaatgataatgttcattttatcatagttattgattccaagaagaaaattgcgtatacttttaagcacaagaaca

SEQ ID NO: 140 - DNA, 600 bp, Chicken  19866894083895_1
ccaggtatgcaaatgtaaccctctattcaagtattcaagtcttttttgtgagcacactaagtcctttgcagtttgaaattaataatccattaaaacatctgcaatttgtatcacttaaaagaggaaaagtaaaatggctcagtgttatcagatgccaaactgcagagaaacacaacacttgtctcatcactgtggctcatcaaaggtcaaactaaggccatttgtgacactcgtttatatttctgacatcactgaattttaccaacatctaggaagcttctgtgatactcagaacacatwcacagatagactaaaagctgcttcttgttaacttgctgacataacttattccaccctgtgcatacaaaatcggaacactttgcatscaacctttcagtcaccttgatcacatatacaataagttaaaggacaacatagactcactttctactataagtgatggaaattgggataaatagatgtattagtgggagaagcagatacaatatttcaaaaagcrggtataattgggcttgtcttttaaaaatgttctcatttgatacaagacacgtaatcaaccacatatttcccaactttgtg

SEQ ID NO: 141 - DNA, 548 bp, Chicken  19866894083895_2
ccattaaaacatctgcaatttgtatcacttaaaagaggaaaagtaaaatggctcagtgttatcagatgccaaactgcagagaaacacaacacttgtctcatcactgtggctcatcaaaggtcaaactaaggccatttgtgacactcgtttatatttctgacatcactgaattttaccaacatctaggaagcttctgtgatactcagaacacatwcacagatagactaaaagctgcttcttgttaacttgctgacataacttattccaccctgtgcatacaaaatcggaacactttgcatscaacctttcagtcaccttgatcacatatacaataagttaaaggacaacatagactcactttctactataagtgatggaaattgggataaatagatgtattagtgggagaagcagatacaatatttcaaaaagcrggtataattgggcttgtcttttaaaaatgttctcatttgatacaagacacgtaatcaaccacatatttcccaactttgtgtcttttatcctttttctctacaattaaaaattag

SEQ ID NO: 142 - DNA, 414 bp, Chicken  19866894083895_3
tttgtgacactcgtttatatttctgacatcactgaattttaccaacatctaggaagcttctgtgatactcagaacacatwcacagatagactaaaagctgcttcttgttaacttgctgacataacttattccaccctgtgcatacaaaatcggaacactttgcatscaacctttcagtcaccttgatcacatatacaataagttaaaggacaacatagactcactttctactataagtgatggaaattgggataaatagatgtattagtgggagaagcagatacaatatttcaaaaagcrggtataattgggcttgtcttttaaaaatgttctcatttgatacaagacacgtaatcaaccacatatttcccaactttgtgtcttttatcctttttctctacaattaaaaattag

SEQ ID NO: 143 - DNA, 600 bp, Chicken  19866894083899_1
ctctgccattgtgttcagcactgcctgtcaactggtctgggaacacaactctactccccagggcaaagcagctgaagagagaaggaagagctctaatcccctccagatgcagcaagcataactgcaagccccaagagcacaagaatagaacaaaaacgttgagaaaatccagggacaacatggaagcgagatttagagaccacggcctggagggcctgtgctttccattatagttgcagaatcaatgctgagggcatgggggatgaacagcactcagataggagcatcccagagcatggrgccttttccaaacccctctctgcaaacatgagaaccttctcaatgccatggtcaaggctggtctcatgccagcttccagcagccgaactgaggttaatgtggatttaagtgagtgcaaaggaaaagcaaatcaagtctcattgactttcacatgacctcatgacacacctcacaaggttttatattcctatagcttcagcttttggcaaccgagttttcagttagaaaaacattctggtctttgtcattctggaagtaagaggaaagctaccaaaaactcagtgtaacccaaatgcatcc

SEQ ID NO: 144 - DNA, 600 bp, Chicken  19866894083900_1
gaattaaagataactccgtgaggatgtttggttgacagccatggtggtattcatctcacaggggctgtgagcacccagaagccctccggtcgctctcagtgcagccctgccctgcgaagcctggcagccaccccagcagacaattaccagtttggggatgccagagcactgaagtcctgtttggctgcctctgcccaggcaacatccttatgggactggattgtatcagcaaatgatgagcaggcacatggattggtgttaattctttttcagtggtacgtggcttagtgaaagatcttyaaaattsagtgtgagaaactccactgctcctcttgggcaactgtagggatgtgggattgagttcccttaaaatcccttttctgtataatctacttttctttttattttctagtgctgttcctcctgctgccaagagctcaattgttgcacagatactggagatctattgcctattcagaaggcagagtgaattattctttggtatttgcagaactatggcaacagccaaaaatgtaagaggtgtattcgggatgagatgaccaagagagtgaacaaagcaagcaagctgttacaagtaat

SEQ ID NO: 145 - DNA, 600 bp, Chicken  19866894083900_2
agataactccgtgaggatgtttggttgacagccatggtggtattcatctcacaggggctgtgagcacccagaagccctccggtcgctctcagtgcagccctgccctgcgaagcctggcagccaccccagcagacaattaccagtttggggatgccagagcactgaagtcctgtttggctgcctctgcccaggcaacatccttatgggactggattgtatcagcaaatgatgagcaggcacatggattggtgttaattctttttcagtggtacgtggcttagtgaaagatcttyaaaattsagtgtgagaaactccactgctcctcttgggcaactgtagggatgtgggattgagttcccttaaaatcccttttctgtataatctacttttctttttattttctagtgctgttcctcctgctgccaagagctcaattgttgcacagatactggagatctattgcctattcagaaggcagagtgaattattctttggtatttgcagaactatggcaacagccaaaaatgtaagaggtgtattcgggatgagatgaccaagagagtgaacaaagcaagcaagctgttacaagtaatctctgaa

SEQ ID NO: 146 - DNA, 534 bp, Chicken  19866894083900_3
taatctacttttctttttattttctagtgctgttcctcctgctgccaagagctcaattgttgcacagatactggagatctattgcctattcagaaggcagagtgaattattctttggtatttgcagaactatggcaacagccaaaaatgtaagaggtgtattcgggatgagatgaccaagagagtgaacaaagcaagcaagctgttacaagtaatctctgaaactgcgtgggacatcgcaacgtctgggatgtctgctggcactgcagaaaaggaccggattgcgatgggagcttcccartacagagagctgagctcctgtgtgctgtgtctggtcctgctttgccacgctggacccagatgaaagctgctcccatcacacagcagatgaataccaacttgcrggcatagcgaggacacgaccaggacaaagcacagagctcctgggcagcatcccagctctgagcagtgtgcagcaggcaggtggctgctgagaagtgggattccttaggtgtggtgcagccgcatccacgtg

SEQ ID NO: 147 - DNA, 431 bp, Chicken  19866894083900_4
gaattattctttggtatttgcagaactatggcaacagccaaaaatgtaagaggtgtattcgggatgagatgaccaagagagtgaacaaagcaagcaagctgttacaagtaatctctgaaactgcgtgggacatcgcaacgtctgggatgtctgctggcactgcagaaaaggaccggattgcgatgggagcttcccartacagagagctgagctcctgtgtgctgtgtctggtcctgctttgccacgctggacccagatgaaagctgctcccatcacacagcagatgaataccaacttgcrggcatagcgaggacacgaccaggacaaagcacagagctcctgggcagcatcccagctctgagcagtgtgcagcaggcaggtggctgctgagaagtgggattccttaggtgtggtgcagccgcatccacgtg

SEQ ID NO: 148 - DNA, 600 bp, Chicken  19866894083902_1
ctatctgcctacatccaaagaaccccagctttcctcttggctcgggtttggtgcttgttgctcttaattttcctttccagatgttctgataatgcaggactttcaattagcagcctcttctctcctcttgaatttgcaagtgtttactgagctgtttggttaagagaccagacagaggcgtacaccaacaggaggggatatggtatgtttgtggataaagcaccatgttccaagtcaggaaatgatcagaattgacttcaagagtccaacccgcaaagctcagttctgcatcttcctctrcaccaagttccagttgcccagcttgtctcttgccttggtggcaacccccaaagtgatggcattccccttctgtgagctgmcatgtgcattgagccacagctatctgcaaggagagcaataacaaattccatccccgctgaacagcaccacaaacgatgtgcaatatctgattcccagatggcaatgttaaaaacagaaggcaacatgtctgggaaagtacctggggcatacctgaacaataggaataatagagatgtaagaagaagatagatcctttcttttcttctgatgtatgcgtgc

SEQ ID NO: 149 - DNA, 600 bp, Chicken  19866894083902_2
atgttctgataatgcaggactttcaattagcagcctcttctctcctcttgaatttgcaagtgtttactgagctgtttggttaagagaccagacagaggcgtacaccaacaggaggggatatggtatgtttgtggataaagcaccatgttccaagtcaggaaatgatcagaattgacttcaagagtccaacccgcaaagctcagttctgcatcttcctctrcaccaagttccagttgcccagcttgtctcttgccttggtggcaacccccaaagtgatggcattccccttctgtgagctgmcatgtgcattgagccacagctatctgcaaggagagcaataacaaattccatccccgctgaacagcaccacaaacgatgtgcaatatctgattcccagatggcaatgttaaaaacagaaggcaacatgtctgggaaagtacctggggcatacctgaacaataggaataatagagatgtaagaagaagatagatcctttcttttcttctgatgtatgcgtgctttgtgatcactcaggaaacaaacaaacacctttttttttgttgtttgtttgtcgagcaggaaacagcctgactgaatag

SEQ ID NO: 150 - DNA, 600 bp, Chicken  19866894083905_1
agaatcaccttgaagtgcttcaaagttatccagagtcatcaaaacagtaactgaaagtaccatcaaagcagtaagcatcatagcctccatatagcaatatgtaaataattagaggagagccatctgtaatgcattatgaacaagactgttctggatattgatctattaacgcatacatatattaatgtattaaatgtgctgagatatgcaatgatgtgctttctgccaaagtaaaacaaaaataatttttaaagcatttttagttatgttattttctgtgtgttttcaagcatttatgcrttttttmttgattacttttactaaatttatcctttattgattatatttatgtgaaatatctttcgttagagcacttgatatagataaaaaaaggttttttctggtcattcaacatattctagtccaatgtacatgcatactatgaatccaattaatgtatttcaatgtaaagtaaaaaaatttggaaaagttttataattgctgaggttgctagaagaaagaatgtatatattcatgaaatgaaccctgtagttttgatgttttgcataatataagccctagaacatcaccaaaaggcag

SEQ ID NO: 151 - DNA, 600 bp, Chicken  19866894083905_2
ccttgaagtgcttcaaagttatccagagtcatcaaaacagtaactgaaagtaccatcaaagcagtaagcatcatagcctccatatagcaatatgtaaataattagaggagagccatctgtaatgcattatgaacaagactgttctggatattgatctattaacgcatacatatattaatgtattaaatgtgctgagatatgcaatgatgtgctttctgccaaagtaaaacaaaaataatttttaaagcatttttagttatgttattttctgtgtgttttcaagcatttatgcrttttttmttgattacttttactaaatttatcctttattgattatatttatgtgaaatatctttcgttagagcacttgatatagataaaaaaaggttttttctggtcattcaacatattctagtccaatgtacatgcatactatgaatccaattaatgtatttcaatgtaaagtaaaaaaatttggaaaagttttataattgctgaggttgctagaagaaagaatgtatatattcatgaaatgaaccctgtagttttgatgttttgcataatataagccctagaacatcaccaaaaggcagctctgct

SEQ ID NO: 152 - DNA, 565 bp, Chicken  19866894083906_1
ggttttctaacttggacttgagtctcagtgcagaaaactgttttatttatggtcagcattaacttgtgcagctgaatagcacgcatgctgcagctgctcaggagtttgctctgaagatcaggcttggagagctgttttttattaagtggtacttgatttagtcctaactaaaaccatttgtatttaacttgatctgcaaagctgccataagtgttaacatacttcagtagtaaacgtttcactcttgggcatcatcacacacaaagggtttgtgaaagagcccctttctgaacgtgcagyasttatccattagacaagtgcttgtgttttcaaaggaattcagactgcrtttataacatcgtgctttccacagggtgatgtggaaggatatcctttagggatgtgcagagaaatctggcttttaacggagaaatcactggaatttggggcagaaaggtattggtctgccctctgtgagctgttctgggtggcagccaggtgcagtaagttccttgctgctaagctgcagggcagagcagctagcagaaatctcctgatcccaaat

SEQ ID NO: 153 - DNA, 563 bp, Chicken  19866894083906_2
ttttctaacttggacttgagtctcagtgcagaaaactgttttatttatggtcagcattaacttgtgcagctgaatagcacgcatgctgcagctgctcaggagtttgctctgaagatcaggcttggagagctgttttttattaagtggtacttgatttagtcctaactaaaaccatttgtatttaacttgatctgcaaagctgccataagtgttaacatacttcagtagtaaacgtttcactcttgggcatcatcacacacaaagggtttgtgaaagagcccctttctgaacgtgcagyasttatccattagacaagtgcttgtgttttcaaaggaattcagactgcrtttataacatcgtgctttccacagggtgatgtggaaggatatcctttagggatgtgcagagaaatctggcttttaacggagaaatcactggaatttggggcagaaaggtattggtctgccctctgtgagctgttctgggtggcagccaggtgcagtaagttccttgctgctaagctgcagggcagagcagctagcagaaatctcctgatcccaaat

SEQ ID NO: 154 - DNA, 516 bp, Chicken  19866894083906_3
tggtcagcattaacttgtgcagctgaatagcacgcatgctgcagctgctcaggagtttgctctgaagatcaggcttggagagctgttttttattaagtggtacttgatttagtcctaactaaaaccatttgtatttaacttgatctgcaaagctgccataagtgttaacatacttcagtagtaaacgtttcactcttgggcatcatcacacacaaagggtttgtgaaagagcccctttctgaacgtgcagyasttatccattagacaagtgcttgtgttttcaaaggaattcagactgcrtttataacatcgtgctttccacagggtgatgtggaaggatatcctttagggatgtgcagagaaatctggcttttaacggagaaatcactggaatttggggcagaaaggtattggtctgccctctgtgagctgttctgggtggcagccaggtgcagtaagttccttgctgctaagctgcagggcagagcagctagcagaaatctcctgatcccaaat

SEQ ID NO: 155 - DNA, 600 bp, Chicken  19866894083914_1
cggccaacaattttagaatcccataaaagaggcagaaagccagctaggcagccctcagagagaggcctccaaaagacagatgcagaaacaggagataaagtaccgccaggcctggagcactggggtggggttgtgctggtcatggccggggatggggggaaaactgagctgcccccccgcagcgttgcaggatgctgggtcctgcttccagctggactgcagcgtggggcagagactgagctgcagcagctggcaaacggctcttgtgagaacagtaacagccagtgttaaaataaaaamataaaaaataaaaaagcaacagatacatctaaatcccagggaggtgggttagtaggaaatgcctgtggagacactgtagcttcgggctgacacagcacccattgtgcccactgctaattaattaccatggcccccagctctttcctcagccccagggacccaccctggctcctctgcccaccccatcccaccaagcyccttacacctgagggccccagcactgggcactcaccgcaccacctcagcgtcagatttattattaattaccattgccattcttacacagcacctacaagtcct

SEQ ID NO: 156 - DNA, 600 bp, Chicken  19866894083914_2
ggtcctgcttccagctggactgcagcgtggggcagagactgagctgcagcagctggcaaacggctcttgtgagaacagtaacagccagtgttaaaataaaaamataaaaaataaaaaagcaacagatacatctaaatcccagggaggtgggttagtaggaaatgcctgtggagacactgtagcttcgggctgacacagcacccattgtgcccactgctaattaattaccatggcccccagctctttcctcagccccagggacccaccctggctcctctgcccaccccatcccaccaagcyccttacacctgagggccccagcactgggcactcaccgcaccacctcagcgtcagatttattattaattaccattgccattcttacacagcacctacaagtcctggctgccccatgcagaatattacattgctaatttccttccaagatgaggctgtgctgctgctgctctgctcatttgcttgcggatgctgttttgctgttagggccgtgctctcagcaggcgcagcaccaaaacacccgcacaaacaacctctgttcaaggagctgtgtatcttgtgttatggccaccctgaaaccac

SEQ ID NO: 157 - DNA, 600 bp, Chicken  19866894083914_3
gctgagcagagctgcagccccttttcccagcactgagcttgcccagagagctgcaatgccaggtgcccatgtcctgggcacagtctgagtatcctcttcacctcttactggtatgtgggctcaccaagctgctgatacgcagctgagggagttcaacaccagggttgatgggttcccggtcagtctgatctagtgggtggcaaccctgcccatggcatggggtttggaactaaatgatctttgaggtccctttcaccccaagccattctatgattctatggttctgtgttactcagtggwttcaacaggcagtgtatcagggcgtatcttgaaggtaaacaaaccagagttcagtcatacagcaggaggaccagaacaatttggcaccaacaaacacacacaacagttcaggttaaacaaacaagaaatgaaaccagcacttgaaaaccacatttacaaaacctgttgcagtctcctgaaggcttgtcaagcagaaaacagcaattgctaggtgcaaatactatgtcatcaagcctcaagaagaggtttgcaaaagcaagtccaactgcagcagcgttgctctgaaacctcccccatcca

SEQ ID NO: 158 - DNA, 600 bp, Chicken  19866894083914_4
aaacaaaccagagttcagtcatacagcaggaggaccagaacaatttggcaccaacaaacacacacaacagttcaggttaaacaaacaagaaatgaaaccagcacttgaaaaccacatttacaaaacctgttgcagtctcctgaaggcttgtcaagcagaaaacagcaattgctaggtgcaaatactatgtcatcaagcctcaagaagaggtttgcaaaagcaagtccaactgcagcagcgttgctctgaaacctcccccatccagtcagcacagcctgctctgaaatgctctggtaaagygattggctccractcatgctaaaactgcttgtggtttatgtgacagagagctttcagccaaactcctgtcaagaagcatgaatttcaacatctccatggagttctctttcaagaaggaaaagcccacaaaacaaacctctaactgataaacagcactgacttcctaaagagccaccccatgctggcaggactgcaaagctctgtgggagggacaggtctcactccayggccatgtcagggtgctggtgggcagcattgcttcactgctcttccttgtgcttcagcttgcacatgctgctg

SEQ ID NO: 159 - DNA, 600 bp, Chicken  19866894083914_5
agttcagtcatacagcaggaggaccagaacaatttggcaccaacaaacacacacaacagttcaggttaaacaaacaagaaatgaaaccagcacttgaaaaccacatttacaaaacctgttgcagtctcctgaaggcttgtcaagcagaaaacagcaattgctaggtgcaaatactatgtcatcaagcctcaagaagaggtttgcaaaagcaagtccaactgcagcagcgttgctctgaaacctcccccatccagtcagcacagcctgctctgaaatgctctggtaaagygattggctccractcatgctaaaactgcttgtggtttatgtgacagagagctttcagccaaactcctgtcaagaagcatgaatttcaacatctccatggagttctctttcaagaaggaaaagcccacaaaacaaacctctaactgataaacagcactgacttcctaaagagccaccccatgctggcaggactgcaaagctctgtgggagggacaggtctcactccayggccatgtcagggtgctggtgggcagcattgcttcactgctcttccttgtgcttcagcttgcacatgctgctgccagctgctgg

SEQ ID NO: 160 - DNA, 600 bp, Chicken  19866894083914_6
aactgcagcagcgttgctctgaaacctcccccatccagtcagcacagcctgctctgaaatgctctggtaaagygattggctccractcatgctaaaactgcttgtggtttatgtgacagagagctttcagccaaactcctgtcaagaagcatgaatttcaacatctccatggagttctctttcaagaaggaaaagcccacaaaacaaacctctaactgataaacagcactgacttcctaaagagccaccccatgctggcaggactgcaaagctctgtgggagggacaggtctcactccayggccatgtcagggtgctggtgggcagcattgcttcactgctcttccttgtgcttcagcttgcacatgctgctgccagctgctggaaggtgacagaggcagcccataggtttattttagacagatcagaaccaactgatagatacaaagaatcatagcatatcccgagtgggaagggacccacagggactaccgagtccagctcctggctcctcacaggaccaatactcaaggcctatgtctgagagcgttgtctgactactctttgaactccagcagcctggggtcatgcccactgccct

SEQ ID NO: 161 - DNA, 600 bp, Chicken  19866894083923_1
ctacggtcagctttcagaaaacagagggagaatgcaaccagctaacctaactcatggcagtttcttgagttaccaggcctcggttgtatcacacagagctcctataaagcattctccttatttaaaaagctcgtgcccatgacaaagaggcatcacttaccatctcaggttagagactggagcatgcatcttgcataatatgtgggaacaagctcttcttcccacagtcttaccctcagcttccgtcttattctcctcttgatgctcagaagcaatgctgcacagcatggcaaggtgagytggagtggggtgactgctggcccaggacagggttgggcagcatgagcttgcagctccaaccagcccgagatgagagcagctggggctcacagtgctagctcagttgggcaggtaccacrgcacttacaccrcctagcttggtgagccatgsggatgctcaatttctggagtcaaacagctaagccaagccctacacacctgagaactaaagttctgaccaggttacctgagcagctacaaaaacattcagggaaaatcaaatgttaatcagaagtattttgccacctccaatgatcccca

SEQ ID NO: 162 - DNA, 600 bp, Chicken  19866894083923_2
atttaaaaagctcgtgcccatgacaaagaggcatcacttaccatctcaggttagagactggagcatgcatcttgcataatatgtgggaacaagctcttcttcccacagtcttaccctcagcttccgtcttattctcctcttgatgctcagaagcaatgctgcacagcatggcaaggtgagytggagtggggtgactgctggcccaggacagggttgggcagcatgagcttgcagctccaaccagcccgagatgagagcagctggggctcacagtgctagctcagttgggcaggtaccacrgcacttacaccrcctagcttggtgagccatgsggatgctcaatttctggagtcaaacagctaagccaagccctacacacctgagaactaaagttctgaccaggttacctgagcagctacaaaaacattcagggaaaatcaaatgttaatcagaagtattttgccacctccaatgatccccatcctttatttagcacgaagaactgccgtcctcccttatggcacactaactcagtgtgcacacagcaccctggagaagctcagctcgagaggaggttacccagtgctccaggacagggac

SEQ ID NO: 163 - DNA, 600 bp, Chicken  19866894083923_3
cgtgcccatgacaaagaggcatcacttaccatctcaggttagagactggagcatgcatcttgcataatatgtgggaacaagctcttcttcccacagtcttaccctcagcttccgtcttattctcctcttgatgctcagaagcaatgctgcacagcatggcaaggtgagytggagtggggtgactgctggcccaggacagggttgggcagcatgagcttgcagctccaaccagcccgagatgagagcagctggggctcacagtgctagctcagttgggcaggtaccacrgcacttacaccrcctagcttggtgagccatgsggatgctcaatttctggagtcaaacagctaagccaagccctacacacctgagaactaaagttctgaccaggttacctgagcagctacaaaaacattcagggaaaatcaaatgttaatcagaagtattttgccacctccaatgatccccatcctttatttagcacgaagaactgccgtcctcccttatggcacactaactcagtgtgcacacagcaccctggagaagctcagctcgagaggaggttacccagtgctccaggacagggacacccatggcgtg

SEQ ID NO: 164 - DNA, 600 bp, Chicken  19866894083923_4
atcacttaccatctcaggttagagactggagcatgcatcttgcataatatgtgggaacaagctcttcttcccacagtcttaccctcagcttccgtcttattctcctcttgatgctcagaagcaatgctgcacagcatggcaaggtgagytggagtggggtgactgctggcccaggacagggttgggcagcatgagcttgcagctccaaccagcccgagatgagagcagctggggctcacagtgctagctcagttgggcaggtaccacrgcacttacaccrcctagcttggtgagccatgsggatgctcaatttctggagtcaaacagctaagccaagccctacacacctgagaactaaagttctgaccaggttacctgagcagctacaaaaacattcagggaaaatcaaatgttaatcagaagtattttgccacctccaatgatccccatcctttatttagcacgaagaactgccgtcctcccttatggcacactaactcagtgtgcacacagcaccctggagaagctcagctcgagaggaggttacccagtgctccaggacagggacacccatggcgtgaggagcagtgctctgcaatg

SEQ ID NO: 165 - DNA, 559 bp, Chicken  19866894083935_1
gggaccatggcgggtgctggggaggtaccatggtacatagacagccccatccctgagcacccacgtctcccccaggatgctgaccttctccaacaacgtggagccagccaacggcttcctggtgcgctacctgcggcggaagctgctggagtcggacacagacgtcaacgccaacaaggaggagctgctgcgcgtgctggactgggtgcccaagctctggtaccatttgcacaccttcctggagaaacacagcacctccgacttcctcatcggtacggccaggaacgccttttccttctmtgtcttctttgggtgcagctttgctgtgttttccttggggctctgctggcatggggggaggtggctggagccagggagcccagctcccatccgtactctgcctcctcctgcaggtccctgcttcttcctgtcctgccccatcggaattgaggatttccggacctggttcatcgacctgtggaataactccatcatcccttacctgcaggagggggcaaaaagatgggctcaaggtacccagtgcatgctggcacgtggg

SEQ ID NO: 166 - DNA, 600 bp, Chicken  19866894083936_1
atagatatataaaacataaaattttatatggaagcagttaaatggaataaaccacgtatcatatgttcaaatgaaaattattctgtaataaaatgtgaggaaaaaaaaaagtgttttggccatttgttttattttcaggaactcaacctatttgtgcatcccccaaacggtatcctagcaacttatgttgagggatgcagcttgacaagaacttcttctggtggcaatttcagcttaggaggcccaagtaaagtactggcagcctaaatctttcttttttaatcttgacgccatttcccyttgttctatcaccacagaccctgctaaagtctctgtccycttcttttctgtagctcccctttagatactgaaaggccgctatcaggtcaccttggagtcttctcttctccaggctgaaaagccccatctctctcagcctgtccttgtacaagaggtgttccatcctgtggatcatttttatggccctcctctggatgccctccaatgggtctatgtctctcctgtactgagggctccacatttggatgcagtactccagatgaggcctcaccagtgcaaagcagaaaggcaggattacct

SEQ ID NO: 167 - DNA, 600 bp, Chicken  19866894083936_2
aaatggaataaaccacgtatcatatgttcaaatgaaaattattctgtaataaaatgtgaggaaaaaaaaaagtgttttggccatttgttttattttcaggaactcaacctatttgtgcatcccccaaacggtatcctagcaacttatgttgagggatgcagcttgacaagaacttcttctggtggcaatttcagcttaggaggcccaagtaaagtactggcagcctaaatctttcttttttaatcttgacgccatttcccyttgttctatcaccacagaccctgctaaagtctctgtccycttcttttctgtagctcccctttagatactgaaaggccgctatcaggtcaccttggagtcttctcttctccaggctgaaaagccccatctctctcagcctgtccttgtacaagaggtgttccatcctgtggatcatttttatggccctcctctggatgccctccaatgggtctatgtctctcctgtactgagggctccacatttggatgcagtactccagatgaggcctcaccagtgcaaagcagaaaggcaggattacctctctcaccctgctggccacactactttggctgcagccta

SEQ ID NO: 168 - DNA, 600 bp, Chicken  19866894083937_1
cgtgctattggttgttttgcaccagtccgggtgatgcaaagcagctgtaactctgtgttatgcagctgagtgcaagagttttacagctgctttgcattgctggggatcatgaagcagtcagaagcacgctgaatccaacctgcagccttgccagaagttccgctgagtattgagacatcggtccttgtttttcctttcaaccaagcatgaagatgctgctgaccacagaagaatgtctgagcttccagaagagccggcgcaaagcggtaattctttttcagggaggacctgccactggarccctaaatcacggcagggccaaaatgctcatccgttccatttttggtttacgaggaggcttgtcacacttttctttgtatttttggatggcggcttcaaaaatatcctgtggtttgttttacagttgcctagtagggagccagcttccctctgtgggtatttatagcattcgttgggtgacttcataggctctaccaaccaccttgccttaacagtaagcgggctgctctaattcttccttttattcgtactctctgcctttgctttagaaagtaacaacgtgcccgcgggtctcgctct

SEQ ID NO: 169 - DNA, 600 bp, Chicken  19866894083939_1
gaagttgataatatcatatttattttacaaaaatccaggtacatttcaagcaattattttagaagcaagcataggaaactttcggttatgtatgaagcatatactgctgtagattcctttttaaaagaaataattgaacattactggtgtcacatgactgtcttttcatttgtctttcatcactgtgcctttcaataccattcatctatggactaatgcaatgcccactgaagtcaatagaagtcattctgttgacatcaatgaacaatgaatcaggccctttaaaaagaagaaactagrgtktacaagggttaaacagagccctgggtgaatactttgcagcaggagcagtgccttcacctgtgtccatagcacacgtagcgctctgcttctgtgcagaatgacaccaaaatggctcatctccactgggagctccgataagggaagccagttttgccagtcaacatctgaattgtttttctacgcaaagccttagtaggtattaataattgtaatacacggtaaaaatctgttcagataggtgtcatgaatgcagatgttgagaatcctttattttgtttgccttctgtccggtgtttt

SEQ ID NO: 170 - DNA, 600 bp, Chicken  19866894083939_2
gttgataatatcatatttattttacaaaaatccaggtacatttcaagcaattattttagaagcaagcataggaaactttcggttatgtatgaagcatatactgctgtagattcctttttaaaagaaataattgaacattactggtgtcacatgactgtcttttcatttgtctttcatcactgtgcctttcaataccattcatctatggactaatgcaatgcccactgaagtcaatagaagtcattctgttgacatcaatgaacaatgaatcaggccctttaaaaagaagaaactagrgtktacaagggttaaacagagccctgggtgaatactttgcagcaggagcagtgccttcacctgtgtccatagcacacgtagcgctctgcttctgtgcagaatgacaccaaaatggctcatctccactgggagctccgataagggaagccagttttgccagtcaacatctgaattgtttttctacgcaaagccttagtaggtattaataattgtaatacacggtaaaaatctgttcagataggtgtcatgaatgcagatgttgagaatcctttattttgtttgccttctgtccggtgttttcaa

SEQ ID NO: 171 - DNA, 599 bp, Chicken  19866894083948_1
  misc_feature (1)..(85): n is any nucleotide
nnnnnnnnnnnnnnnnnnnnnnnnnnnnnnnnnnnnnnnnnnnnnnnnnnnnnnnnnnnnnnnnnnnnnnnnnnnnnnnnnnnnntaggaaaaaaaacctaagttgaagtccgagtacaaaggatcttttacccaaatgaaaaagctaattcccaaaaaacccttaagactaagaaccatagaattgcttgggttggagaagaccttaaagatcatcgagtccaactgcaacctgaccgtattaccctaattaacaaccctccattaaatcatgtccctgagcaccacatccaaacagtytttatacacatccagggatrgtgacacaatcacctccccgagaagtctattccagtgcttaataacccctacagtaaagaagtttttcctgatatccaacctaagcaagtgaggatattcagtattagacaytgagaaaacactgagaagtcacaggagctgttatattccaggctgagyatctatgtgctttactgcaaaaagggaaaagtggaggttaataaaaggcayacaaagtattgaagcaagtcccrtgtctaacagtcaattacacaaacaattgaactgctatttctggt

SEQ ID NO: 172 - DNA, 599 bp, Chicken  19866894083948_2
  misc_feature (1)..(65): n is any nucleotide
nnnnnnnnnnnnnnnnnnnnnnnnnnnnnnnnnnnnnnnnnnnnnnnnnnnnnnnnnnnnnnnnntaggaaaaaaaacctaagttgaagtccgagtacaaaggatcttttacccaaatgaaaaagctaattcccaaaaaacccttaagactaagaaccatagaattgcttgggttggagaagaccttaaagatcatcgagtccaactgcaacctgaccgtattaccctaattaacaaccctccattaaatcatgtccctgagcaccacatccaaacagtytttatacacatccagggatrgtgacacaatcacctccccgagaagtctattccagtgcttaataacccctacagtaaagaagtttttcctgatatccaacctaagcaagtgaggatattcagtattagacaytgagaaaacactgagaagtcacaggagctgttatattccaggctgagyatctatgtgctttactgcaaaaagggaaaagtggaggttaataaaaggcayacaaagtattgaagcaagtcccrtgtctaacagtcaattacacaaacaattgaactgctatttctggtggacattatgccctgtatct

SEQ ID NO: 173 - DNA, 600 bp, Chicken  19866894083948_3
ccaaatgaaaaagctaattcccaaaaaacccttaagactaagaaccatagaattgcttgggttggagaagaccttaaagatcatcgagtccaactgcaacctgaccgtattaccctaattaacaaccctccattaaatcatgtccctgagcaccacatccaaacagtytttatacacatccagggatrgtgacacaatcacctccccgagaagtctattccagtgcttaataacccctacagtaaagaagtttttcctgatatccaacctaagcaagtgaggatattcagtattagacaytgagaaaacactgagaagtcacaggagctgttatattccaggctgagyatctatgtgctttactgcaaaaagggaaaagtggaggttaataaaaggcayacaaagtattgaagcaagtcccrtgtctaacagtcaattacacaaacaattgaactgctatttctggtggacattatgccctgtatctctttaaaacttccataagtttaaatcctgaagagttttagtaccacgtactacacacaagcagaattttgaagagatatctagcatttgtgttttccctccccaaaaagtatt

SEQ ID NO: 174 - DNA, 600 bp, Chicken  19866894083948_4
agaattgcttgggttggagaagaccttaaagatcatcgagtccaactgcaacctgaccgtattaccctaattaacaaccctccattaaatcatgtccctgagcaccacatccaaacagtytttatacacatccagggatrgtgacacaatcacctccccgagaagtctattccagtgcttaataacccctacagtaaagaagtttttcctgatatccaacctaagcaagtgaggatattcagtattagacaytgagaaaacactgagaagtcacaggagctgttatattccaggctgagyatctatgtgctttactgcaaaaagggaaaagtggaggttaataaaaggcayacaaagtattgaagcaagtcccrtgtctaacagtcaattacacaaacaattgaactgctatttctggtggacattatgccctgtatctctttaaaacttccataagtttaaatcctgaagagttttagtaccacgtactacacacaagcagaattttgaagagatatctagcatttgtgttttccctccccaaaaagtattcaaggcattcaggatcttyatacattaactgatgttgctgttcgctat

SEQ ID NO: 175 - DNA, 600 bp, Chicken  19866894083948_5
cctgaccgtattaccctaattaacaaccctccattaaatcatgtccctgagcaccacatccaaacagtytttatacacatccagggatrgtgacacaatcacctccccgagaagtctattccagtgcttaataacccctacagtaaagaagtttttcctgatatccaacctaagcaagtgaggatattcagtattagacaytgagaaaacactgagaagtcacaggagctgttatattccaggctgagyatctatgtgctttactgcaaaaagggaaaagtggaggttaataaaaggcayacaaagtattgaagcaagtcccrtgtctaacagtcaattacacaaacaattgaactgctatttctggtggacattatgccctgtatctctttaaaacttccataagtttaaatcctgaagagttttagtaccacgtactacacacaagcagaattttgaagagatatctagcatttgtgttttccctccccaaaaagtattcaaggcattcaggatcttyatacattaactgatgttgctgttcgctatctattgcgcatctaacttccctatagctacttaacgttgctatttttcagc

SEQ ID NO: 176 - DNA, 600 bp, Chicken  19866894083948_6
caaccctccattaaatcatgtccctgagcaccacatccaaacagtytttatacacatccagggatrgtgacacaatcacctccccgagaagtctattccagtgcttaataacccctacagtaaagaagtttttcctgatatccaacctaagcaagtgaggatattcagtattagacaytgagaaaacactgagaagtcacaggagctgttatattccaggctgagyatctatgtgctttactgcaaaaagggaaaagtggaggttaataaaaggcayacaaagtattgaagcaagtcccrtgtctaacagtcaattacacaaacaattgaactgctatttctggtggacattatgccctgtatctctttaaaacttccataagtttaaatcctgaagagttttagtaccacgtactacacacaagcagaattttgaagagatatctagcatttgtgttttccctccccaaaaagtattcaaggcattcaggatcttyatacattaactgatgttgctgttcgctatctattgcgcatctaacttccctatagctacttaacgttgctatttttcagcaattaatgcttcctttgaagtta

SEQ ID NO: 177 - DNA, 524 bp, Chicken  19866894083948_7
cacaggagctgttatattccaggctgagyatctatgtgctttactgcaaaaagggaaaagtggaggttaataaaaggcayacaaagtattgaagcaagtcccrtgtctaacagtcaattacacaaacaattgaactgctatttctggtggacattatgccctgtatctctttaaaacttccataagtttaaatcctgaagagttttagtaccacgtactacacacaagcagaattttgaagagatatctagcatttgtgttttccctccccaaaaagtattcaaggcattcaggatcttyatacattaactgatgttgctgttcgctatctattgcgcatctaacttccctatagctacttaacgttgctatttttcagcaattaatgcttcctttgaagttataccgttaacacccatttgtgaagtgttcctgaataccagccaagtgattcaacagttctctatgtgagccatacaaatgatgcagggtttttggttcttttaaatatgacagtttaagag

SEQ ID NO: 178 - DNA, 600 bp, Chicken  19866894083949_1
gcttgcttgcttttttttttttttttttttttttttgttcgtttgttttgttttctgccactataccatgctatgaagtttgagcttccattctcatctacagtggaagagtcaggagatataacaggacatctagaaatatgatctttacctacatataaatatatgtatacaaagcagatttaaggtatattccccttaccaatgcagaattgatattaaaatctcagtataaaaaacagttttgttttgatctcctcagaactgcctttgtgacttacacttaatatgttgctaaasctgtccaaggaatgaaggagatgaaatacatgacattgcttcctttttaatatgttgattcttcacagtaaatatttgcactttaagggcctagtcgggcaattaaatctgataataatcctcacctcctcctgaaaactcctgaaacactatcctgttatcacggatgacttgaatctgtcattctgtaagggtaacatcaactcctaactttggagtgagacaagaaagatttcattagttcagcccatttttttcatgttctcaaaaatagctaaaagaaactcaggaaatttactg

SEQ ID NO: 179 - DNA, 487 bp, Chicken  19866894083951_1
agaggcagattacaagttcttgcttttgacaggactttttttttcctccttccctctaatcaccttgcttttggaaagatgcataataaaaatctccaggtacctcatcaaatagaggttttttgaccctctgcccttttactatagaaatttccatagaaaatgacagcttggtccatgttcactgcgcaataacagcaactatttaataaaaatatgagcaaactggtaattagggcaagatttctcatatatcctctccctttctctgtgcaaattgcctatagccattaaaaataytcttttttgttaaatctgagtagcaaacacccactgaagaaaaggaatctctttaataaatgttacttctttcttaaatgaggtaacctttcaggtttttttttcagaggcatcagaagatgtttaccaagcaagtgcaaggaataaggctgcttttattcatatgtacaaatatttcatgtgaaat

SEQ ID NO: 180 - DNA, 600 bp, Chicken  19866894083955_1
ttagatgatcctaaaattgtcttttctcttatagcattctagtttcattctagtttgttaagtgttcatacagttcaaattagagcctaggtttggaattctgcctgttaaatggatcttttccactgcagcctgcttctggccagctctttggcccatctgagtgcagctcctgtcaattaagccctccatgtaggatccctggtcttgtctcaatcgtgaaagcaggacgctttgctggtggctgaaaatggctaattcacagccaatttatgaagtatatctgctggtggtaattcrtggtgtgttctaaaagcatgcattacttgagaaaaagatcagacttgtccttcttaagacaagaatagtgtaaatgaacacatatgcaagaatttgtaaggatttcaaaccrcatggctgcagtgctggtgcagtaccagaggaactgctgtgcccacagctgggatgcagctaggctgtctggtgagtgcagtatgtgctgctgaaattcagcatttgggaaaatattttctctttcttttttggatattaatgcagcacacacacgttttgcacgggaattgaatcatttagaaatga

SEQ ID NO: 181 - DNA, 600 bp, Chicken  19866894083955_2
tggatcttttccactgcagcctgcttctggccagctctttggcccatctgagtgcagctcctgtcaattaagccctccatgtaggatccctggtcttgtctcaatcgtgaaagcaggacgctttgctggtggctgaaaatggctaattcacagccaatttatgaagtatatctgctggtggtaattcrtggtgtgttctaaaagcatgcattacttgagaaaaagatcagacttgtccttcttaagacaagaatagtgtaaatgaacacatatgcaagaatttgtaaggatttcaaaccrcatggctgcagtgctggtgcagtaccagaggaactgctgtgcccacagctgggatgcagctaggctgtctggtgagtgcagtatgtgctgctgaaattcagcatttgggaaaatattttctctttcttttttggatattaatgcagcacacacacgttttgcacgggaattgaatcatttagaaatgaaggctgaatgaaggagtttctactaaaagaattaatgttatctccagaagtagatcactttttttttttttttaatagtttgtagtcctaaaacagaaaattgcattttctg

SEQ ID NO: 182 - DNA, 600 bp, Chicken  19866894083955_3
gttatctccagaagtagatcactttttttttttttttaatagtttgtagtcctaaaacagaaaattgcattttctgtttaaaaaaaaaacaaagcaaaaaccacatagaataaaacttcaaggcattaatttctaaggagaccaaatagcaacttaaattataaggaggggattttcaaaggcacttgcagaattttgttagctggcttctttatctgttagcttgccagcattaactcctgattcactgttaaatttctgattgaaattcactgaatttctaatgtataaaatctaacrtataaattctaatgtataaattcttatctgtattactgtagttatgaatctcagctgsaacagaaatccagcaggtggcagtgttggatttccaatgtccaggtccctgttcctttgcaaacctggtgctattctcatggacatcaaggctgaagaycccacttaataaaatagtgcagggctgggcacaaagctaacaaaaagaatagggatgagctgatttatagttacctctggccccagagcatatgcaaaatttatttttggggacaaccttttgatcttcacagagaagaaact

SEQ ID NO: 183 - DNA, 600 bp, Chicken  19866894083955_4
agaaaattgcattttctgtttaaaaaaaaaacaaagcaaaaaccacatagaataaaacttcaaggcattaatttctaaggagaccaaatagcaacttaaattataaggaggggattttcaaaggcacttgcagaattttgttagctggcttctttatctgttagcttgccagcattaactcctgattcactgttaaatttctgattgaaattcactgaatttctaatgtataaaatctaacrtataaattctaatgtataaattcttatctgtattactgtagttatgaatctcagctgsaacagaaatccagcaggtggcagtgttggatttccaatgtccaggtccctgttcctttgcaaacctggtgctattctcatggacatcaaggctgaagaycccacttaataaaatagtgcagggctgggcacaaagctaacaaaaagaatagggatgagctgatttatagttacctctggccccagagcatatgcaaaatttatttttggggacaaccttttgatcttcacagagaagaaactaaaccttaacaaatcaaacacagagaaaataattacaactttctggaggtcatagaga

SEQ ID NO: 184 - DNA, 600 bp, Chicken  19866894083955_5
attataaggaggggattttcaaaggcacttgcagaattttgttagctggcttctttatctgttagcttgccagcattaactcctgattcactgttaaatttctgattgaaattcactgaatttctaatgtataaaatctaacrtataaattctaatgtataaattcttatctgtattactgtagttatgaatctcagctgsaacagaaatccagcaggtggcagtgttggatttccaatgtccaggtccctgttcctttgcaaacctggtgctattctcatggacatcaaggctgaagaycccacttaataaaatagtgcagggctgggcacaaagctaacaaaaagaatagggatgagctgatttatagttacctctggccccagagcatatgcaaaatttatttttggggacaaccttttgatcttcacagagaagaaactaaaccttaacaaatcaaacacagagaaaataattacaactttctggaggtcatagagagtttgagttctctgctagaattaaacatttccccacaggtctcagtggaatcaacttattgtgcttcccaaagaacatattaaagaaaattttggaaca

SEQ ID NO: 185 - DNA, 600 bp, Chicken  19866894083957_1
ttggccttgttgaattccaggagcttggcatgggcccacctctccagcctacccaggtccctttggatggcatcccttcccccagcacgttgactgcatcactcagcttggtgtcatctgcaaacttgctgagggtgcactcaatcccactgtccatgtcacccacaaagatgttaaataacactggtctcagcaccgatcttgaggaatgtcacttgtcaccagtctccacctggacattgagctgttgaccacaactctctgagttccagcatccagccaatgccatatccagcgagygctccatctgtcaaatcctttttagtccaatttagcaaccaggatgtcgtgtggaacagtgtcaaatgctttgcacaagtccaggtagatgacgtcagttgctcttcctttatccactgatgctgtaactccatcataaaaggccaactggtctgccaggcatgacttacccttggtgaagccatgttggttaccaccaatcacctcttcattttccatgtgccttagtagtgcctccaggaggatctgctccatgatcttgccaggcacagaggtgagactgactggcctgtagttccc

SEQ ID NO: 186 - DNA, 600 bp, Chicken  19866894083963_1
agcgctggtggaaagcacatggggcgggagatggtgtgaaggggtggtgttgctgtgatatcccttgggagatctccagttgtcaagatgtgctaagatatttcataggtccacttctctatctaatatggcttgtgacaatttttcgaggaaagcactcaattctgaatgtttgctggagctacctacagtatcttgcaacagtggcagctgtttgagatatctcctgctgagctgtgatagaaaattctaagtatgttttatactggagctcaagtgtggtgagagccattggtctcrtaccagtagctcaatcttctcactgaaagaatgatctctcttccwtttctaccaacctcagcagtagcttggcttctgctctggaagtattttctcctgtttgagcaacattcatactgagtcaacctgtgtggtaaatatttggatagttagcacatgctcaccatgctgctagacacccagttacttcttttggaggtacccagctacagcttatatgggtctgtctaaagaagctgtgataaaagcaggagctgagggtattcctccatggtttgtagaggaaaatttactaagtaa

SEQ ID NO: 187 - DNA, 600 bp, Chicken  19866894083963_2
ggtgttgctgtgatatcccttgggagatctccagttgtcaagatgtgctaagatatttcataggtccacttctctatctaatatggcttgtgacaatttttcgaggaaagcactcaattctgaatgtttgctggagctacctacagtatcttgcaacagtggcagctgtttgagatatctcctgctgagctgtgatagaaaattctaagtatgttttatactggagctcaagtgtggtgagagccattggtctcrtaccagtagctcaatcttctcactgaaagaatgatctctcttccwtttctaccaacctcagcagtagcttggcttctgctctggaagtattttctcctgtttgagcaacattcatactgagtcaacctgtgtggtaaatatttggatagttagcacatgctcaccatgctgctagacacccagttacttcttttggaggtacccagctacagcttatatgggtctgtctaaagaagctgtgataaaagcaggagctgagggtattcctccatggtttgtagaggaaaatttactaagtaagcatacgcagatcttcctagcccaaatatggtggttttgctatac

SEQ ID NO: 188 - DNA, 600 bp, Chicken  19866894083965_1
tacctcttgatgcacttagaactaaattcacagtaactatgccctagctcagctccagcatccccaagaccatggttcaagcacatttattcttcccaactctctacaatttattcttcccaactccagagggagctgagggaacttggaaagtcatgaagacacaggggctggggaaggattgggactgtgcgccgagcattgtgttaccaccacaaaacccactgagtgccctgagggaaaacctagttgcagagattactttcaaagtttttgctttgcccttgttcctctgacgtkatttatgccatgaaactctgatctgactatgcttgaagaactgcatggtaagtaaactaatcgtattgtgactaaaattgcagagcagactcacagcctctctcttcaccggtagttttcaagtttcgattgatctttcaccactccttttgtatctgttcctttgttgagctgcacattagcacttttgcggcaggacaaagtacacatcagcactgcacaatgcaggtgtcagggtgtaggagaggggagcaggacctcctcattagcatccacaacccctaagatgtgcccagctca

SEQ ID NO: 189 - DNA, 600 bp, Chicken  19866894083967_1
tcagcacacaccaggctgctgcctgccattcagcagggagaaataaaatgcatcttagtactggaggaagaagagaggtttctcattttctttttccataggtgtgaacgaagaggaacaaaaatgacagtaattacccttgaactgtagctgaatgtctgacagtgatctgctttatctgtcaatctcatcgcagtgcagagcagagaggaaccacaaagtgtagaaggtgcacggccaggttctgcccatctcattccccacagacagcagcagttccccaggtctaggtgtgcttcycctttccacccttacctcaggtgcaggctcacaataaaaagtagttcgggtggtgctttttcatcaaagagagggccaccagaagtgcaccattcacgaggcgcaggccrtttccatcaggctaagcagctaaacttccctgccatgcaccaaaatttacagtctagtgaaggcccactggatatttcctagtgattttctgtgaaacccattgggatctcatcaagatttcaaagtatagttaaatgtgtacttccaagtagaaaggttacagatagtaccagaactcaagaatattca

SEQ ID NO: 190 - DNA, 600 bp, Chicken  19866894083967_2
aagaggaacaaaaatgacagtaattacccttgaactgtagctgaatgtctgacagtgatctgctttatctgtcaatctcatcgcagtgcagagcagagaggaaccacaaagtgtagaaggtgcacggccaggttctgcccatctcattccccacagacagcagcagttccccaggtctaggtgtgcttcycctttccacccttacctcaggtgcaggctcacaataaaaagtagttcgggtggtgctttttcatcaaagagagggccaccagaagtgcaccattcacgaggcgcaggccrtttccatcaggctaagcagctaaacttccctgccatgcaccaaaatttacagtctagtgaaggcccactggatatttcctagtgattttctgtgaaacccattgggatctcatcaagatttcaaagtatagttaaatgtgtacttccaagtagaaaggttacagatagtaccagaactcaagaatattcagtagggaagatctccatacatttcagtgttttactgagatgcatccacaattctcaacttttctcagtccacaggacctttgccaacaaatacgcagataagattaaaag

SEQ ID NO: 191 - DNA, 600 bp, Chicken  19866894083970_1
ttggtactgtgggctgtccctttccggcattctagttcttcattacttctgcgcatttgaggattgacattatctaagcttatttgctacagaaatgaagtaacttctgaaagcttttgtaatggcaaagctttctactttttgttaagaatccctttattaaaagtggcaggtggagcagactgttctaagcaatgtgtgctttcttcccctttagatgatggagagaaacagcaaaaacattccaagctttcctcaaaaacctctccgaaagagagttctcaggcacctgccgtgccrtggttagaccaagaatgtccatctgacaaagaaagatttattcctcccgagcttagtatttgggattatttcattgcgaaggtacttgtttgctatttttgaaagtcttatattgcttccgtaatagtattttctgcttagtctttaccccaggtaccaatttagatgtgtgataaaagccacctattgttactgcttgtgactttctctaatactactgttctgacattagtttttttctcatactgtgttatgaagaaaactaacattggtatagagtacaaatgtgtaagtaaatat

SEQ ID NO: 192 - DNA, 600 bp, Chicken  19866894083972_1
ctggtttggctgtgagtttgcaacctattcagcagctcccaaaacaacagaacttgtctctgcaaggcaggcagatgggtcagcagcacagacacataggctttgtttcctttggaaggcactctagaagcagcatatccaacgcttcatttggttcatgtaccttcataagcacagcgtagtcagaggtatttataacacaggtatttttcagtgcaggggttcagaaaagcacaaagctagttgttaaattacactaaagctgtcttccgccaaagcacgcatttaacacttaggttygcattagtaagtgttttacagcacacttcatagataaaagtcttccctgaagcatcatgttccaaactcagaacagggaacaattctgtagtcaggaagggaaatttgacaattagtggaacctactacgagaaaaaattaaggtactstgtatataaaaccacagccacagcatttcaagatcccactaaggcagagtaacaccaccaagagaatcccacaacagccataaacaatctccagagttaccctcccagaagcactttcttattgactgcgttaaaaggagctgctgggact

SEQ ID NO: 193 - DNA, 547 bp, Chicken  19866894083972_2
tttggttcatgtaccttcataagcacagcgtagtcagaggtatttataacacaggtatttttcagtgcaggggttcagaaaagcacaaagctagttgttaaattacactaaagctgtcttccgccaaagcacgcatttaacacttaggttygcattagtaagtgttttacagcacacttcatagataaaagtcttccctgaagcatcatgttccaaactcagaacagggaacaattctgtagtcaggaagggaaatttgacaattagtggaacctactacgagaaaaaattaaggtactstgtatataaaaccacagccacagcatttcaagatcccactaaggcagagtaacaccaccaagagaatcccacaacagccataaacaatctccagagttaccctcccagaagcactttcttattgactgcgttaaaaggagctgctgggacttgtaagcactgcagctttttgtcacttctgactccacacagagcccacgggagctgtcaggcaaaggatactgcatcaagcaagcagcaaacacag

SEQ ID NO: 194 - DNA, 599 bp, Chicken  19866894083977_1
  misc_feature (1)..(9): n is any nucleotide
nnnnnnnnncatcagtagacagcactaggaaatatttacaaggttcacattatacaaagataaaaaggaatctatcagcgtgatttagaacaacagggaacagtgctctaggcacgcagaacaataaataatgaacattcatcactaagtaacccggtgagatgatttgatttctatagacaccaagattcatgacaccagttaaacattataccctccacatttcaatagctagaagccaggcatgcagaggcaatcatgcgctgaaccatgcgcaaacacgttagccaatgctgacasatgcatggtcagaatcccgaacgtgtacgtgcacagcaaaggccacttatctgaaaacactgtgttctgttcctctgaaaagttctgagctctgcaaataaaagcttaccaaggaagaaagtgctgcagtacgcacacaacagcttggaaatacacacacagttggttttcttctcacactgctgtgattattttttgcacttcttttttttatgaccagtgtgaaagtgcacaccttcgtgacatatcttcagtaacacttcactaagctctgcaacagactccactgacagtaagct

SEQ ID NO: 195 - DNA, 600 bp, Chicken  19866894083986_1
actttctgaaaaccttgttcatctaacctcatgcatctcatcctgctttgtgcccttaaagggagattttcttatggttgtcagtaagtcaaggctaaaatatgtaatggtgtgaatgaaattgcacatcaaaaggtgaaaagcaaaattcatattcctgcataagcatactggggtttcatttgtgctcagagctgtttttatgctgaatactacacctaaacaccttagggataggagaatcagcctcttaaactttaaataaaacaaacagtgcattaagtgaaatgtttttcttayttctactggaaatacaggcaggttcgtaaaggcaaagatcctgtctctgyagaatttaaaagagaggttattgaaagtcgagagagggaagaagagcawtataaggttagtctttgttgtttttctataaattcaaaattaaacttgtactttcagactacattcagtgtgctaatgaattgtattatgctctctacatcttcagtttttcttaatacattgatacaaacctgtgctagttgaatttcctcatgcatttgtgtctttttctttgtatcagtgttactgagatagtggtgt

SEQ ID NO: 196 - DNA, 592 bp, Chicken  19866894083986_2
tgcccttaaagggagattttcttatggttgtcagtaagtcaaggctaaaatatgtaatggtgtgaatgaaattgcacatcaaaaggtgaaaagcaaaattcatattcctgcataagcatactggggtttcatttgtgctcagagctgtttttatgctgaatactacacctaaacaccttagggataggagaatcagcctcttaaactttaaataaaacaaacagtgcattaagtgaaatgtttttcttayttctactggaaatacaggcaggttcgtaaaggcaaagatcctgtctctgyagaatttaaaagagaggttattgaaagtcgagagagggaagaagagcawtataaggttagtctttgttgtttttctataaattcaaaattaaacttgtactttcagactacattcagtgtgctaatgaattgtattatgctctctacatcttcagtttttcttaatacattgatacaaacctgtgctagttgaatttcctcatgcatttgtgtctttttctttgtatcagtgttactgagatagtggtgtttttttcttgggggggacagagagaaggataagttactaagt

SEQ ID NO: 197 - DNA, 543 bp, Chicken  19866894083986_3
atatgtaatggtgtgaatgaaattgcacatcaaaaggtgaaaagcaaaattcatattcctgcataagcatactggggtttcatttgtgctcagagctgtttttatgctgaatactacacctaaacaccttagggataggagaatcagcctcttaaactttaaataaaacaaacagtgcattaagtgaaatgtttttcttayttctactggaaatacaggcaggttcgtaaaggcaaagatcctgtctctgyagaatttaaaagagaggttattgaaagtcgagagagggaagaagagcawtataaggttagtctttgttgtttttctataaattcaaaattaaacttgtactttcagactacattcagtgtgctaatgaattgtattatgctctctacatcttcagtttttcttaatacattgatacaaacctgtgctagttgaatttcctcatgcatttgtgtctttttctttgtatcagtgttactgagatagtggtgtttttttcttgggggggacagagagaaggataagttactaagt

SEQ ID NO: 198 - DNA, 600 bp, Chicken  19866894083989_1
tttattgatcatatactcctctaatggaatagcaaaaataaataaataaaaaataataataatattttcagagacaaacccagaaaaccaaaaattttccgttaatgcaaggctgaagaactgtgttgtagaaatgcttggatatttatattaaatgttgagaatattcaataactgtaaaatagatgctaatgaaaaactgctcaggcttttgaaatgaatcacactacatggaagttagctcacaaaaatgcagtcatcaaacaatttacgttggaaaggggtctgtgaagctcagtytgtaaaatctaaaggccaaagtggatctgactcagtcttttttgcatactgtgtctgtggcagtcagctcttcattgcccctatctttctagcgggttctgttctgtggattcccagctctgcagaaaggcagggcttgaggactgaagcttagagagatcactgatgggaactagacagggaccaggaaggttggcagctgtcatccactgcagtcctgagcaccacagcctttttctcaagatccaaataaacctgtcttggtgctggagtagtagcatagctgtggataccctatgg

SEQ ID NO: 199 - DNA, 600 bp, Chicken  19866894083990_1
aagtggaaatgtttgtgtatatatgtctttaaatgtatgatgaagaagtttttaacaacaaggacctcacatcatgtacagaatattttgtgtgtgtgagtgagtttagacaaatgtctgcatgcatttctcattgtgatatgataatagctctgaaataacaccaccacaaccgcctggtgctagatagtaggaatgtgttggactgtctgtgttgtgagtgcacaaatgtcctcttgcattatgccaaaatacttttaacaaggaacctcattgcacttctatgagtatctgaaaaarattatgagaagtatgaagtacaattcatggagtacataagagaaatgcctacagagcatggcagatctcaaggaaatgcggatgtttttagtactgtcatccatcaccataatgagtgccaaaactcctttgaaaattagctgtctgtgattaggcaggtttcagagagcaggttgtttctgtatctgattctgaaatacattaatatgaatgttatgctaatttgtctacttttgacctagagcttatctcaaagattcaagaggatattgcctcattaactaattcacttacaaagta

SEQ ID NO: 200 - DNA, 541 bp, Chicken  19866894083991_1
taggaaagcagactgcaaaaaaaaaaaaaaagcaaagcgagagcaagtatttttgtaccaaacttctgaacaggacaatctcacactgggctggatgacagtttttgtgctcaacctcccagcagcatgcccttagcagcctgccccccccatccacgggccacacaccaaaggccaggacatacgctgcctcagcagagtctgtggtgctcacagtgctctggcgacatcagcatcgcctctgcaccccaatgcactgccagcattggggttcccttcctggctgcagcacgcggcgcyagccacgacaggcagctttcttaccttggcacgatgttaacggcttgctgcacagctccggcaaggtgtgatgctcacatcagggatgggcagagacagcccacacatgtagcaaggtgagaattcaccttctcctgccacggctgctccaagatgttaagggcggcaacgcagactgctgtgcaaggagctggactttctgatccctgccaactccgggccgtgggactgggatacccac

SEQ ID NO: 201 - DNA, 600 bp, Chicken  19866894083994_1
tttcttaaagacctacaaagccattttttgtatgatggtgggtgaaacattattgaggtcttaatctaataaaggcttaatgagacagcagaaagttactgacactctgcattagcagtgattaaaaactgtgaaattgcatttaatagtttatagtttaaattttaactataagatcaggaaaaataattatttttgattaatttttccaatttaacattactattcttcaaggaccggggaagtataactctaatgatttttctttctatttctgagaatattaacatggtgttttcmgaaaaagtcctgagtgaatataacactytgtcacacattttaagcgctgtactttgtaccccaagctgatctacaagatcaacggtaagtttctgttctgctgtaagaaatgggaagtttctgttctgctttttggtgttatgttgtcaaggacagtgctaataataatatgtaagttccattttatcctaagtacttattggcaatttatagggtacttcaagttcaatcatcagtataggagtttgatcatagcatggatagtagtgtataatactactgggaaatcagcatgcattc

SEQ ID NO: 202 - DNA, 600 bp, Chicken  19866894083994_2
tgtatgatggtgggtgaaacattattgaggtcttaatctaataaaggcttaatgagacagcagaaagttactgacactctgcattagcagtgattaaaaactgtgaaattgcatttaatagtttatagtttaaattttaactataagatcaggaaaaataattatttttgattaatttttccaatttaacattactattcttcaaggaccggggaagtataactctaatgatttttctttctatttctgagaatattaacatggtgttttcmgaaaaagtcctgagtgaatataacactytgtcacacattttaagcgctgtactttgtaccccaagctgatctacaagatcaacggtaagtttctgttctgctgtaagaaatgggaagtttctgttctgctttttggtgttatgttgtcaaggacagtgctaataataatatgtaagttccattttatcctaagtacttattggcaatttatagggtacttcaagttcaatcatcagtataggagtttgatcatagcatggatagtagtgtataatactactgggaaatcagcatgcattctttctaaatcagtaccccataccttagc

SEQ ID NO: 203 - DNA, 600 bp, Chicken  19866894084000_1
ctgaaccttcaataaagccctcttctgttggaaattgcattgcagacagaagagatgggagatttgcagattattctgtctctgacttcacgtaaatgaagatacagggacgaggaccaggaaataatttcatctgcttatcccacttccatttgaacttgctcagaatataattcagcaaactctttacaagtaaactgtgcagcagaagtggatgtagctctgataaatctcatagttcataatcagttttggtcacattcaaaggagatctatatttaattgccactactcagtaayggatattgatcatcaaaaagaagggcctcatttgaatttgcttttctgtgaagttactagaaaaaagtgtgtgtagacctttgaaggaatgccaggtacagtgcctaacttgacacagtgcttaatgaatcatggtagaggagccgaaaatgcttacccgtaacaattgtattgtaccacggtggtgcttcattctggctgggttgaccttacctctcaaatactacacttgtttgtaggataatgatgaactatgaaaaattaaaatcacgcctgggtgagatccatgacagtaaaatg

SEQ ID NO: 204 - DNA, 600 bp, Chicken  19866894084000_2
acttgtttgtaggataatgatgaactatgaaaaattaaaatcacgcctgggtgagatccatgacagtaaaatgcgtctggaacaagatttgaagaaacaagctctggacaacagggagactgataagaaaatgaatagtatcaagcctgacctaattcaactccgcaaaatcagagatcagtatctcgtgtaagtaaggctgacctgttcctcaaagcagtgtctctgatgaacctgattaatgactgttttcatcagggtaatgtgaattatattttcttttcttaactgaagttccaygagtgctaaagtactttacttgtaccagaaaagagggcatcgcagaagattatgcaaggaagcagaagcacacttatgaaatctatggtccttctgtgtcttttgctaayggagagcaaactaagcttcacagcattcatttgtgggattttgtgtctgaacttaagcttgctcagtgtgaaaacccccatgcatactctraagtaacatactaatgtcctcttcttctggcagatggctcaatcacaaaggggtgaggcagaagcgaataaacgactggctggggatcaaaaatgaaaa

SEQ ID NO: 205 - DNA, 600 bp, Chicken  19866894084000_3
acagggagactgataagaaaatgaatagtatcaagcctgacctaattcaactccgcaaaatcagagatcagtatctcgtgtaagtaaggctgacctgttcctcaaagcagtgtctctgatgaacctgattaatgactgttttcatcagggtaatgtgaattatattttcttttcttaactgaagttccaygagtgctaaagtactttacttgtaccagaaaagagggcatcgcagaagattatgcaaggaagcagaagcacacttatgaaatctatggtccttctgtgtcttttgctaayggagagcaaactaagcttcacagcattcatttgtgggattttgtgtctgaacttaagcttgctcagtgtgaaaacccccatgcatactctraagtaacatactaatgtcctcttcttctggcagatggctcaatcacaaaggggtgaggcagaagcgaataaacgactggctggggatcaaaaatgaaaatattgatgagtaagtgtcatgcataaggatttactgagaagtgttccactgataaatgatgccttttgtggagggtggtaatacaaagcaccaattcctaagtagaggag

SEQ ID NO: 206 - DNA, 600 bp, Chicken  19866894084000_4
gacctgttcctcaaagcagtgtctctgatgaacctgattaatgactgttttcatcagggtaatgtgaattatattttcttttcttaactgaagttccaygagtgctaaagtactttacttgtaccagaaaagagggcatcgcagaagattatgcaaggaagcagaagcacacttatgaaatctatggtccttctgtgtcttttgctaayggagagcaaactaagcttcacagcattcatttgtgggattttgtgtctgaacttaagcttgctcagtgtgaaaacccccatgcatactctraagtaacatactaatgtcctcttcttctggcagatggctcaatcacaaaggggtgaggcagaagcgaataaacgactggctggggatcaaaaatgaaaatattgatgagtaagtgtcatgcataaggatttactgagaagtgttccactgataaatgatgccttttgtggagggtggtaatacaaagcaccaattcctaagtagaggagtacaaacaaaggaaggaattctgtagggggctgcatgtcactcgaggcagcaagtctgctgaaacgcttaggattacatctaaattggaac

SEQ ID NO: 207 - DNA, 600 bp, Chicken  19866894084003_1
gaaatggtcagaagaccatattaggtaactaccttttttgacctcatctttataaaagcctgaaatgagcatgttaattgtaaaactccattaaaaagttagctcggaggtggcatagctgcatataaactttttatttttggaattgattccctttcgtagcagggtagaagcttgagtatctccacttgaaactgaaatgtaaatcaagatcttagaaatcacttatcactgccaaaaaatcaagattcagaaagacgccagtcaagagtgatgaatcttactcattttcattacggyattgaaaggtgcctcttttatttccgtgctcttgggatgtaaatataagaacacatctgaagaagagtggatagtcagaagaaagagtaggagtgtgctgctttctaagcaggagtttaaagattccagagattccaggattgggaagcacaggcaaggatacatcagtgaagtggaactgggagcatgtaagtctggaagagtctgatgaagagaacaagaaacttgcacttaagcttgatagacaaccgaaagagagatgtcatagtagggatcagccaggactctctgcaggttgta

SEQ ID NO: 208 - DNA, 599 bp, Chicken  19866894084007_1
  misc_feature (1)..(16): n is any nucleotide
nnnnnnnnnnnnnnnngcaattctagctacacctcattatatttgaacaaaacaaaggaacctgtagatgcgatttatcccaggcaatgtactatccactcctgaaatgtaaccacttgctacattatgaagtagacactgcacaaatcaccatcatctattaaaaatacatatttctgctgaccaggtttttctgccttaagtcttcaaaggggagttttaaacattattttatggttatcttgttggttggcaccaaagaagtgactgagaaacagattacttcccccagacatagcrtgttaatgacttatctaagaaaaaggggtactagtgtgctatcctttctacaggagcatcatgctatgtaagctctcatttatgacaggaaaaaatgcttctgactccaggtttgattctttaactgtcaagagggacaaaggcagcttagctactagaagtttccttcctctttagcacarttttagtacagatctttttggagaactacatactgcagtactacagggcaaaactgtttaaaaacattagaaaaaaaaacttgtggaacaagagggagaaacaacacaaataaatga

SEQ ID NO: 209 - DNA, 600 bp, Chicken  19866894084007_2
accaggtttttctgccttaagtcttcaaaggggagttttaaacattattttatggttatcttgttggttggcaccaaagaagtgactgagaaacagattacttcccccagacatagcrtgttaatgacttatctaagaaaaaggggtactagtgtgctatcctttctacaggagcatcatgctatgtaagctctcatttatgacaggaaaaaatgcttctgactccaggtttgattctttaactgtcaagagggacaaaggcagcttagctactagaagtttccttcctctttagcacarttttagtacagatctttttggagaactacatactgcagtactacagggcaaaactgtttaaaaacattagaaaaaaaaacttgtggaacaagagggagaaacaacacaaataaatgattgtcctttcttaaatcgtaagtatgaaatactactaaatactagtttgaattgtaattgtaatgaaataaaagtagaaaatagataattaraagttgctggtaacaaaaaarccccatcctttgatggattttttttcccccacagcataagacacatttccatttttaagctttttgaatt

SEQ ID NO: 210 - DNA, 600 bp, Chicken  19866894084007_3
aaaatgcttctgactccaggtttgattctttaactgtcaagagggacaaaggcagcttagctactagaagtttccttcctctttagcacarttttagtacagatctttttggagaactacatactgcagtactacagggcaaaactgtttaaaaacattagaaaaaaaaacttgtggaacaagagggagaaacaacacaaataaatgattgtcctttcttaaatcgtaagtatgaaatactactaaatactagtttgaattgtaattgtaatgaaataaaagtagaaaatagataattaraagttgctggtaacaaaaaarccccatcctttgatggattttttttcccccacagcataagacacatttccatttttaagctttttgaatttgtagaaagaagaaacaatgatctgtacaataaaagagtgtaacaattttccagatttggaaaaattaacagcaatttgggcctggcctcctgcacaggattatttatttgagcattttctaagaacagctgcagttgtacgcacgacatcataaaggattcattcttaccccagtaatttgttataaataaccttcatttcctgtagg

SEQ ID NO: 211 - DNA, 600 bp, Chicken  19866894084007_4
ttgattctttaactgtcaagagggacaaaggcagcttagctactagaagtttccttcctctttagcacarttttagtacagatctttttggagaactacatactgcagtactacagggcaaaactgtttaaaaacattagaaaaaaaaacttgtggaacaagagggagaaacaacacaaataaatgattgtcctttcttaaatcgtaagtatgaaatactactaaatactagtttgaattgtaattgtaatgaaataaaagtagaaaatagataattaraagttgctggtaacaaaaaarccccatcctttgatggattttttttcccccacagcataagacacatttccatttttaagctttttgaatttgtagaaagaagaaacaatgatctgtacaataaaagagtgtaacaattttccagatttggaaaaattaacagcaatttgggcctggcctcctgcacaggattatttatttgagcattttctaagaacagctgcagttgtacgcacgacatcataaaggattcattcttaccccagtaatttgttataaataaccttcatttcctgtaggtcccatccagtattatttcca

SEQ ID NO: 212 - DNA, 600 bp, Chicken  19866894084007_5
gatttggaaaaattaacagcaatttgggcctggcctcctgcacaggattatttatttgagcattttctaagaacagctgcagttgtacgcacgacatcataaaggattcattcttaccccagtaatttgttataaataaccttcatttcctgtaggtcccatccagtattatttccagagtgctaaggagctcaaccatcagaaacctctgttaaatggtctgcacagaaatacagcagaaaaactccagtttacatagatccttttactcttctcctttccacagtatttgaacctctyagaatagcatttagttacaataaaaactacatcttaaaagcaagatgcagatttacaagaaggaaatcacggttgagaaactttcatgaggaaaaaagtgactgagataggaacagtctgtttccagggctaccaatgaaccatatattatgttttagatggtttcctaggaaaataattctaacaatcacatcatctatgcgtgtcttttatagatacattcctcctaactttagaacttatttcttgacttctagtagatcagataatagagtagatagttagaaaaaataatagata

SEQ ID NO: 213 - DNA, 600 bp, Chicken  19866894084008_1
accaacatccacctctaacattgttggccaacatcgtaacaggagacaatacttttggagcggccctcataaatttatatagatatatttttaggtgctcacctgaagatatcactgttgtcacatacctgtgttttcctgtctttttgccctacttttatacagcgtggaaagtgaatattctttatttcccagacttataaataaatcatacacttttgttctgtctgcttttcttctgattgcacatcagcaagtgattgcaattgcttcatcatagatacatttttgtatggtagrtatcatagttaaataagcaacttttgcatttcttttgttaagaaaatcttctgtacaattttattcatgttttaagtttctagaaatcctttctccaacttctgaaaagcatcagggtctttagttagagctggcagcatcagctttctcactgtggcaattaagctgctctgtgattagcagcaggttatgcaatagactagaagacattacatcttcccctctgctttttctccaagggccagtaaagtaacacttcatgtcatcaaggacaggagcaccctgagaacaaatagagat

SEQ ID NO: 214 - DNA, 599 bp, Chicken  19866894084014_1
  misc_feature (1)..(188): n is any nucleotide
nnnnnnnnnnnnnnnnnnnnnnnnnnnnnnnnnnnnnnnnnnnnnnnnnnnnnnnnnnnnnnnnnnnnnnnnnnnnnnnnnnnnnnnnnnnnnnnnnnnnnnnnnnnnnnnnnnnnnnnnnnnnnnnnnnnnnnnnnnnnnnnnnnnnnnnnnnnnnnnnnnnnnnnnnnnnnnnnnnnnnnnnnnnntattagcattcatagctctcccatagttttccagttcctgtaataagccagggctttgagttagtaatatggcagctgacaaacaggacggagaaaatgaccttcttgctgraattctgtagtgatctgtggattgagcagtgtgcaagtgaaaactctgaaggccagcacagcttttagccccagcacactatctcctgtcttctaggaaagctcgttgttcattttcaatcatttaatggattgttctgtgtgcttggtagaatccagctcataatgaattgcactgcagagatctaaagcatccaacctcaattctgaaagagtggatttttgcccactaactatagcaataaaagccctttcattttctcatgcacttttcctaatacaccagaaaatgtcatatct

SEQ ID NO: 215 - DNA, 599 bp, Chicken  19866894084016_1
  misc_feature (1)..(110): n is any nucleotide
nnnnnnnnnnnnnnnnnnnnnnnnnnnnnnnnnnnnnnnnnnnnnnnnnnnnnnnnnnnnnnnnnnnnnnnnnnnnnnnnnnnnnnnnnnnnnnnnnnnnnnnnnnnnnncagcttccactgctttctttggtgcccagatatccctctttccctttcccatcagggagtggtgcggtgtttggggccacgtgtggcctttgggaatacagtgctgaccttgctgtgattctgcttccccaaatgcaggctgggagagcagctctggtgctgcctctggagatgggaatgctgagatccrtgcactgcaggaactagagacctctgygaccattagggctataatatgaacttctcctgggggttagaaagcactttggactatcccatttatgttttataaacacagtgccgtgctgtgttttcccatttactttggatttcctcattgctctgaggctcattaaaaatctgagtcaagtgtgggaagaactactctggctggctgtgctgaaactgagcgcgtctgctgggttagagctgcataactggagaagtctccgtttggaaacctcctcatttgctgctggaatgagaaat

SEQ ID NO: 216 - DNA, 599 bp, Chicken  19866894084016_2
  misc_feature (1)..(83): n is any nucleotide
nnnnnnnnnnnnnnnnnnnnnnnnnnnnnnnnnnnnnnnnnnnnnnnnnnnnnnnnnnnnnnnnnnnnnnnnnnnnnnnnnnncagcttccactgctttctttggtgcccagatatccctctttccctttcccatcagggagtggtgcggtgtttggggccacgtgtggcctttgggaatacagtgctgaccttgctgtgattctgcttccccaaatgcaggctgggagagcagctctggtgctgcctctggagatgggaatgctgagatccrtgcactgcaggaactagagacctctgygaccattagggctataatatgaacttctcctgggggttagaaagcactttggactatcccatttatgttttataaacacagtgccgtgctgtgttttcccatttactttggatttcctcattgctctgaggctcattaaaaatctgagtcaagtgtgggaagaactactctggctggctgtgctgaaactgagcgcgtctgctgggttagagctgcataactggagaagtctccgtttggaaacctcctcatttgctgctggaatgagaaatatttcatttccataccaagttggaggt

SEQ ID NO: 217 - DNA, 600 bp, Chicken  19866894084019_1
ttgctctagcactggtgatggatgtatttcagcagcaagaaatttgctgctcctttttcagctatgttttattcaaacctctaatctgaagggaaccaattaaggcaacatccctttcattatgccaaaagggaaaaatcttctcataaccacataaattaagaggtgggaaaccaacagctcaagtcagggatattgatgggctggagcaaggccagcacggggccaccaagctggctgtggcataaaggagaggaggagagagctggtcccattcagaggagaaggcaaaggggagaygtgttgctttctgtagccacctgatcagagcgtacagagaagatgaagccatcttcagctgtgcaggtaacatctggggctccttcaacctcggttacactgcacatctcactgctcttcagaaagacttgctccaaagggaggggaaggagggatcatatgcatccgaagacaattccttaaagcactgtaactctggatcctgatgtgaccaaattcactgaatctgagcacagaagaaaaagttgctatctttgtttcagtgaaagcaatttagcagtcagaattaaagactgcttt

SEQ ID NO: 218 - DNA, 535 bp, Chicken  19866894084019_2
ttgctttctgtagccacctgatcagagcgtacagagaagatgaagccatcttcagctgtgcaggtaacatctggggctccttcaacctcggttacactgcacatctcactgctcttcagaaagacttgctccaaagggaggggaaggagggatcatatgcatccgaagacaattccttaaagcactgtaactctggatcctgatgtgaccaaattcactgaatctgagcacagaagaaaaagttgctatctttgtttcagtgaaagcaatttagcagtcagaattaaagactgctttgartatttaccgccgtgtacggcagcactgctaaaaatcccgtgagtgaaacctgacatgaaacaaaagaggaacagaaggcagtaatctgttttctataaacaaaacctgactgcatttcagtgacagtaagcaaacaccatccctcgtttaaaaattaaataaaatttaaaacctacaacttttgaaatgtctttagtattgagtctgatcaacatacagatataaagatattcaa

SEQ ID NO: 219 - DNA, 599 bp, Chicken  19866894084020_1
  misc_feature (1)..(134): n is any nucleotide
nnnnnnnnnnnnnnnnnnnnnnnnnnnnnnnnnnnnnnnnnnnnnnnnnnnnnnnnnnnnnnnnnnnnnnnnnnnnnnnnnnnnnnnnnnnnnnnnnnnnnnnnnnnnnnnnnnnnnnnnnnnnnnnnnnnnnntagagttgaaatattcaacctagatattcttcatgagaggttcattatgtaactgctcttgaatctaaatacacatttccatccctgaagtcctgaaatcctttacggttgtgtcaccgatgtctttttccagcagagagtgatagcatgtctttgtgaagagaakgaatctttgagtatcagctaatgcatrctgctagacactgatattaaaatgcagtgcttgagtcttaggtagcaataagcacactacaatacaagaatgattattaataataatccttggaccctagcgaagatttgtcctctatatttttttcagaaaatatctgttgaccaaacttcatttttcattttgatgggtatagacaaaaaaagaagtgacaaaaaacctaacaaatccacaatacaacataygatccagacaaatctttgtaaaatcatctgatgatcacagcattgcac

SEQ ID NO: 220 - DNA, 599 bp, Chicken  19866894084020_2
  misc_feature (1)..(107): n is any nucleotide
nnnnnnnnnnnnnnnnnnnnnnnnnnnnnnnnnnnnnnnnnnnnnnnnnnnnnnnnnnnnnnnnnnnnnnnnnnnnnnnnnnnnnnnnnnnnnnnnnnnnnnnnnnntagagttgaaatattcaacctagatattcttcatgagaggttcattatgtaactgctcttgaatctaaatacacatttccatccctgaagtcctgaaatcctttacggttgtgtcaccgatgtctttttccagcagagagtgatagcatgtctttgtgaagagaakgaatctttgagtatcagctaatgcatrctgctagacactgatattaaaatgcagtgcttgagtcttaggtagcaataagcacactacaatacaagaatgattattaataataatccttggaccctagcgaagatttgtcctctatatttttttcagaaaatatctgttgaccaaacttcatttttcattttgatgggtatagacaaaaaaagaagtgacaaaaaacctaacaaatccacaatacaacataygatccagacaaatctttgtaaaatcatctgatgatcacagcattgcacttcactgagcagttttccctttgtgta

SEQ ID NO: 221 - DNA, 600 bp, Chicken  19866894084020_3
cgatgtctttttccagcagagagtgatagcatgtctttgtgaagagaakgaatctttgagtatcagctaatgcatrctgctagacactgatattaaaatgcagtgcttgagtcttaggtagcaataagcacactacaatacaagaatgattattaataataatccttggaccctagcgaagatttgtcctctatatttttttcagaaaatatctgttgaccaaacttcatttttcattttgatgggtatagacaaaaaaagaagtgacaaaaaacctaacaaatccacaatacaacataygatccagacaaatctttgtaaaatcatctgatgatcacagcattgcacttcactgagcagttttccctttgtgtaggggattatgaatatcttaccaaaatgagttctgcaaatcttagttttcattacagtccatttcgatattatgctgttctataatcaatactgtgtaacagtgtgtatacatacgtatatattgagctctgcagaatatttaaattcatgctggagtgactatcaagtaaataatatttgtcatctccttttataagtcttctataaagtgatctcatgagagca

SEQ ID NO: 222 - DNA, 599 bp, Chicken  19866894084027_1
  misc_feature (1)..(228): n is any nucleotide
nnnnnnnnnnnnnnnnnnnnnnnnnnnnnnnnnnnnnnnnnnnnnnnnnnnnnnnnnnnnnnnnnnnnnnnnnnnnnnnnnnnnnnnnnnnnnnnnnnnnnnnnnnnnnnnnnnnnnnnnnnnnnnnnnnnnnnnnnnnnnnnnnnnnnnnnnnnnnnnnnnnnnnnnnnnnnnnnnnnnnnnnnnnnnnnnnnnnnnnnnnnnnnnnnnnnnnnnnnnnnnnnnnnnaaggagggcacgtggtcataaaagaaaactagaaatttccccacaaatgcaacattaatatgagagacgtgkcaccatgcaaaataacaactccacaactgatttcctaacatgtcacatcaaaatttacaaacttgcagttttctaactcttctgaaatcagcaggttaagagaccagataccaaagcatatcttagagtagcatatcttaattcacggatattgactgaaacaattaaaaacttcattaagccataggcacacagctaatcctgcaaatttgagactactaatttagaacacttgcagatgtctggcaaatcataaggtctgattagctcatctgtcacaacctgatgatctttagaaa

SEQ ID NO: 223 - DNA, 600 bp, Chicken  19866894084027_2
aatttacaaacttgcagttttctaactcttctgaaatcagcaggttaagagaccagataccaaagcatatcttagagtagcatatcttaattcacggatattgactgaaacaattaaaaacttcattaagccataggcacacagctaatcctgcaaatttgagactactaatttagaacacttgcagatgtctggcaaatcataaggtctgattagctcatctgtcacaacctgatgatctttagaaaggcagatgcgcaccactcaatgactttgctttgaatgtactagctagaaacsattcgtcccatgcaaattatttaatgtaaaataaaatatacttttattcctctgttcatacagtagactagacaattttaagtagtcccctaacagaagcagcaccatcaggaaagggggagaggaaaaagggaagaaaaagctaaaaaaaattcccttttctttttaaaagcatgatggcagcggtatgagtattccaaacaatgaatttttctgcaaaacagaatgaaaaacaaaaacaaagctataaacactaaaacagagtgtatagcattaatgggttcctctgtccttttaaag

SEQ ID NO: 224 - DNA, 600 bp, Chicken  19866894084028_1
aatttgttactagtgccttgaaaatcccgtgtctatgtgacaaacactgaataagaactggcattaaatggattgtaccacctcccaactcctcactctcgatgtctgagctgaagttgcattcttttagcaaaagctcatgaagtggttgaactcagtgatgttggaccagcttgtactagcagagcccgtgtgggtacgttgccactgcagagtgtaatgtgatttcccccagaggaaaattcctgttgcaatgcacaggcatataaggaagcacaattaacttctctggaggagccyaaagcctgctttccttgagtgttgtgtaattaaaacctcrgtcttgttaatacattagtgagatgtttgcatataattcatcaaatgtttatgaaaatgcgtaacaaataatcttgacaaacaagttgcttaattgagataagggatgggaagccttgtgaatttttaataaaaagggggaaagaaagcatgctacgttaatcagatgaagttatctcattcaatattttcaagtgacttctccagtgcacattttatttaatatattatacaaaaggaataacttgatcccccaatgag

SEQ ID NO: 225 - DNA, 600 bp, Chicken  19866894084028_2
caaacactgaataagaactggcattaaatggattgtaccacctcccaactcctcactctcgatgtctgagctgaagttgcattcttttagcaaaagctcatgaagtggttgaactcagtgatgttggaccagcttgtactagcagagcccgtgtgggtacgttgccactgcagagtgtaatgtgatttcccccagaggaaaattcctgttgcaatgcacaggcatataaggaagcacaattaacttctctggaggagccyaaagcctgctttccttgagtgttgtgtaattaaaacctcrgtcttgttaatacattagtgagatgtttgcatataattcatcaaatgtttatgaaaatgcgtaacaaataatcttgacaaacaagttgcttaattgagataagggatgggaagccttgtgaatttttaataaaaagggggaaagaaagcatgctacgttaatcagatgaagttatctcattcaatattttcaagtgacttctccagtgcacattttatttaatatattatacaaaaggaataacttgatcccccaatgagatctgtgtagaaaatcctctcttgcaacaaacacagcatt

SEQ ID NO: 226 - DNA, 600 bp, Chicken  19866894084031_1
aaatcttttcatcaaacatagattgaagccagtgataatgtaactctggcttactaaataataacagtgcagggctttctaaatagcctacttcaaataatgacttatattatcctaaattcaaaagcaaacaactggggagaaggaaatcgctaaacgaagagcaatattaaattccagagggtgaatgtgttctgctaaaggtgtggtcttaatggaatttgacccatatccataattctgctgtcactcggcacagctctcagagcataaagacggtggaggagcaggctgtgcacraagcagggagctgcctcaagcagcaggtcttctggggggcacggaggkgtgaccccactgcctactcctttacctccagccctggcacccaggctggctgyggcagtcatttaggaaaaggatgaagmgtactggatggtggctactgcccagcatgtgttaacctctcccagcaagagcaatcagttcctccarcaacagcagcagcaagccgatgtgctcagacagcaatccacagctcagggcatagaaccacaaaggaggtggtggctacttacaaggtccatagcctttgtgaga

SEQ ID NO: 227 - DNA, 600 bp, Chicken  19866894084031_2
gcttactaaataataacagtgcagggctttctaaatagcctacttcaaataatgacttatattatcctaaattcaaaagcaaacaactggggagaaggaaatcgctaaacgaagagcaatattaaattccagagggtgaatgtgttctgctaaaggtgtggtcttaatggaatttgacccatatccataattctgctgtcactcggcacagctctcagagcataaagacggtggaggagcaggctgtgcacraagcagggagctgcctcaagcagcaggtcttctggggggcacggaggkgtgaccccactgcctactcctttacctccagccctggcacccaggctggctgyggcagtcatttaggaaaaggatgaagmgtactggatggtggctactgcccagcatgtgttaacctctcccagcaagagcaatcagttcctccarcaacagcagcagcaagccgatgtgctcagacagcaatccacagctcagggcatagaaccacaaaggaggtggtggctacttacaaggtccatagcctttgtgagagagaagagattgggttagtgagctgcctttatcccggctgaactgttg

SEQ ID NO: 228 - DNA, 600 bp, Chicken  19866894084031_3
gacttatattatcctaaattcaaaagcaaacaactggggagaaggaaatcgctaaacgaagagcaatattaaattccagagggtgaatgtgttctgctaaaggtgtggtcttaatggaatttgacccatatccataattctgctgtcactcggcacagctctcagagcataaagacggtggaggagcaggctgtgcacraagcagggagctgcctcaagcagcaggtcttctggggggcacggaggkgtgaccccactgcctactcctttacctccagccctggcacccaggctggctgyggcagtcatttaggaaaaggatgaagmgtactggatggtggctactgcccagcatgtgttaacctctcccagcaagagcaatcagttcctccarcaacagcagcagcaagccgatgtgctcagacagcaatccacagctcagggcatagaaccacaaaggaggtggtggctacttacaaggtccatagcctttgtgagagagaagagattgggttagtgagctgcctttatcccggctgaactgttggatgaacttccaaaaatatccttgaattggcattctgcatacagctgtgttta

SEQ ID NO: 229 - DNA, 600 bp, Chicken  19866894084031_4
aaacaactggggagaaggaaatcgctaaacgaagagcaatattaaattccagagggtgaatgtgttctgctaaaggtgtggtcttaatggaatttgacccatatccataattctgctgtcactcggcacagctctcagagcataaagacggtggaggagcaggctgtgcacraagcagggagctgcctcaagcagcaggtcttctggggggcacggaggkgtgaccccactgcctactcctttacctccagccctggcacccaggctggctgyggcagtcatttaggaaaaggatgaagmgtactggatggtggctactgcccagcatgtgttaacctctcccagcaagagcaatcagttcctccarcaacagcagcagcaagccgatgtgctcagacagcaatccacagctcagggcatagaaccacaaaggaggtggtggctacttacaaggtccatagcctttgtgagagagaagagattgggttagtgagctgcctttatcccggctgaactgttggatgaacttccaaaaatatccttgaattggcattctgcatacagctgtgtttatgaaaggcagtatcatgtatgtaaata

SEQ ID NO: 230 - DNA, 600 bp, Chicken  19866894084031_5
tgctaaaggtgtggtcttaatggaatttgacccatatccataattctgctgtcactcggcacagctctcagagcataaagacggtggaggagcaggctgtgcacraagcagggagctgcctcaagcagcaggtcttctggggggcacggaggkgtgaccccactgcctactcctttacctccagccctggcacccaggctggctgyggcagtcatttaggaaaaggatgaagmgtactggatggtggctactgcccagcatgtgttaacctctcccagcaagagcaatcagttcctccarcaacagcagcagcaagccgatgtgctcagacagcaatccacagctcagggcatagaaccacaaaggaggtggtggctacttacaaggtccatagcctttgtgagagagaagagattgggttagtgagctgcctttatcccggctgaactgttggatgaacttccaaaaatatccttgaattggcattctgcatacagctgtgtttatgaaaggcagtatcatgtatgtaaataaattcagatgctgcttgagttattttaaaacaatcagtagaacactaatcactttataggcacaatc

SEQ ID NO: 231 - DNA, 599 bp, Chicken  19866894084040_1
  misc_feature (1)..(152): n is any nucleotide
nnnnnnnnnnnnnnnnnnnnnnnnnnnnnnnnnnnnnnnnnnnnnnnnnnnnnnnnnnnnnnnnnnnnnnnnnnnnnnnnnnnnnnnnnnnnnnnnnnnnnnnnnnnnnnnnnnnnnnnnnnnnnnnnnnnnnnnnnnnnnnnnnnnnnnnnggggatctgtgtctctctgcatgtctcaatctgccgctccagctgggtctctttatccttccgaccatgcctgtggcaaaccaggtgcttctggaaggctgcgtgccctgcttcaccccgatgcgctcctcagctgctgtgggaacayaaagacaggcccccgaatgagcaccagaagggctgctgggcttcagatctgcctcctacggctctctgtgctgtttggtgtctgcatctgaaagaaggcaccaaagcaccgggacagcgtgtacggtaggagaggggtggctcagccccaagtcttcccttctaacttcccctgcctgtctggcctttaggaagtagaagggaactcagccattaataacccttgcagttttttggcctccacgctgagcctgtccatgagagaccaattataattgtgctgcagccagaaatctcagc

SEQ ID NO: 232 - DNA, 565 bp, Chicken  19866894084041_1
aaaacaaatgtacatttgtgactgctgtagcagccctcatgggcagtgcttagtctgaccgtggagcaacagtgcctcccaatggcaacaggtataattccttcaagtttgagtaagttgagtaaatgtgtgtgaatattttgtttttcttatttacctatgcaggcacaacatcaagagatctctctaccaaaaagccttaacactgacctactgacaagcaaaagctttgctagtgaaggctaacaacgccctggcctaggtatccccccacctcagtgacagcaagacccaaaacayagttaacacttaaacacatgggtactgcgtttcttacctgatggtacaaatgactcaccaagtaaaattaacattttccttcttttctgctatcctgaaacaggtcccgattgtttcagttccaagaatcttgcactgcaagcccagaaaaagatcctgagtaaaatggcaaccaaaaccatggctaacatgctcatcgatgacacgagcagcgaaatctttgatgagctgtacaaggtgacaaaggaacacaccagaaacaaaa

SEQ ID NO: 233 - DNA, 600 bp, Chicken  19866894084042_1
aagagagcagaggctgattggctgcaggaggcacttcaggctgtttccctttgaggcaccatgcatctcaatataagaattgattcttttgagttcaaaagctcaagttatgagtttacaatctagctactgtgagttcctgcaacaagaatagattctgctgctgtttgaccttttgctctatgaaaaggagtttccatctttctttagcagagcaatgaaatgcttatcattggtaaaatgatcctcgctgaggtcttgctaaggctgggcactgacgttccaggcctcttggtgtcrtgcatttgtaatggaatgacttcaggtgctgtagttattttaacataggtgttattcagtgttctatgttagaatcwgctctgccttccttaatttacatctagaagaaattgtctgagaaggggactgtttccccaccggtatttttgtagtctgagartgaagacagcctcatttcaaaagatgctcagtgcttttatgtaagcatcaaattcagaccaaaatgcctttgctcatgttatgcaattacgtattttgcagaaaaatattgtgcacagagacttgaaactaggaaacatg

SEQ ID NO: 234 - DNA, 600 bp, Chicken  19866894084042_2
aattgattcttttgagttcaaaagctcaagttatgagtttacaatctagctactgtgagttcctgcaacaagaatagattctgctgctgtttgaccttttgctctatgaaaaggagtttccatctttctttagcagagcaatgaaatgcttatcattggtaaaatgatcctcgctgaggtcttgctaaggctgggcactgacgttccaggcctcttggtgtcrtgcatttgtaatggaatgacttcaggtgctgtagttattttaacataggtgttattcagtgttctatgttagaatcwgctctgccttccttaatttacatctagaagaaattgtctgagaaggggactgtttccccaccggtatttttgtagtctgagartgaagacagcctcatttcaaaagatgctcagtgcttttatgtaagcatcaaattcagaccaaaatgcctttgctcatgttatgcaattacgtattttgcagaaaaatattgtgcacagagacttgaaactaggaaacatggtgctaaacaaaaggtaagtgtgctggagagtccctttgtggttcttaccctgaagcagatgtttctgtaggagcaa

SEQ ID NO: 235 - DNA, 600 bp, Chicken  19866894084042_3
ctgctgtttgaccttttgctctatgaaaaggagtttccatctttctttagcagagcaatgaaatgcttatcattggtaaaatgatcctcgctgaggtcttgctaaggctgggcactgacgttccaggcctcttggtgtcrtgcatttgtaatggaatgacttcaggtgctgtagttattttaacataggtgttattcagtgttctatgttagaatcwgctctgccttccttaatttacatctagaagaaattgtctgagaaggggactgtttccccaccggtatttttgtagtctgagartgaagacagcctcatttcaaaagatgctcagtgcttttatgtaagcatcaaattcagaccaaaatgcctttgctcatgttatgcaattacgtattttgcagaaaaatattgtgcacagagacttgaaactaggaaacatggtgctaaacaaaaggtaagtgtgctggagagtccctttgtggttcttaccctgaagcagatgtttctgtaggagcaaagctgcagacagtgctgattgagagcactctgagagggctgagggacatggaaatgagctgcatgaaaagacacatccagttc

SEQ ID NO: 236 - DNA, 600 bp, Chicken  19866894084044_1
tagaaaataccctctcaggagcttttccttcttcacctctccatatggcatgtgcagagtttaaaagtcaccatgtccttgatgctccatttcacaagtatcctgagagaaactgctgcatcgtgtgtggcagcctgagcaggcagacaaggagcaaactgaggatgctgggtttccttggtctgcgtgaggaaggagcccatcctgcagggtgttgtgcacagcatgctgcttgtgcacagctctgttgtacctggccttggttccaaagcaacaatgtgttccactgaaatggccacrtgctgctttgtagcaatgtcagtaacgtgacttctctgcaaggtactgttctagattatsaagggggtttcacttaaatcagaactgagaactaacgggaattcagagggaaatgtgtctatgacagtagttaagttagaaaccatctggggtttacatatgctgcctgcaaaagtttacagcatytcagggcacacccaggcaggctgtactccaggcacctcacaacaatggagcgatgggcaagaattatggaaagagcagtcaggatttgctgttcttggagcttgtactagctag

SEQ ID NO: 237 - DNA, 600 bp, Chicken  19866894084044_2
ttaaaagtcaccatgtccttgatgctccatttcacaagtatcctgagagaaactgctgcatcgtgtgtggcagcctgagcaggcagacaaggagcaaactgaggatgctgggtttccttggtctgcgtgaggaaggagcccatcctgcagggtgttgtgcacagcatgctgcttgtgcacagctctgttgtacctggccttggttccaaagcaacaatgtgttccactgaaatggccacrtgctgctttgtagcaatgtcagtaacgtgacttctctgcaaggtactgttctagattatsaagggggtttcacttaaatcagaactgagaactaacgggaattcagagggaaatgtgtctatgacagtagttaagttagaaaccatctggggtttacatatgctgcctgcaaaagtttacagcatytcagggcacacccaggcaggctgtactccaggcacctcacaacaatggagcgatgggcaagaattatggaaagagcagtcaggatttgctgttcttggagcttgtactagctagagaaaagtgtgcctatattctgacttaagcactgtcgttattctgagctggtactattgg

SEQ ID NO: 238 - DNA, 600 bp, Chicken  19866894084044_3
gtgaggaaggagcccatcctgcagggtgttgtgcacagcatgctgcttgtgcacagctctgttgtacctggccttggttccaaagcaacaatgtgttccactgaaatggccacrtgctgctttgtagcaatgtcagtaacgtgacttctctgcaaggtactgttctagattatsaagggggtttcacttaaatcagaactgagaactaacgggaattcagagggaaatgtgtctatgacagtagttaagttagaaaccatctggggtttacatatgctgcctgcaaaagtttacagcatytcagggcacacccaggcaggctgtactccaggcacctcacaacaatggagcgatgggcaagaattatggaaagagcagtcaggatttgctgttcttggagcttgtactagctagagaaaagtgtgcctatattctgacttaagcactgtcgttattctgagctggtactattggttttcatgccttagctttcccccagaataagwtacaggctatagctatagtcggtactgtgtgaagaattctgagattgagctgtgttggtgtttttcctaaataagtaatgtcaatataataagt

SEQ ID NO: 239 - DNA, 600 bp, Chicken  19866894084044_4
taacgggaattcagagggaaatgtgtctatgacagtagttaagttagaaaccatctggggtttacatatgctgcctgcaaaagtttacagcatytcagggcacacccaggcaggctgtactccaggcacctcacaacaatggagcgatgggcaagaattatggaaagagcagtcaggatttgctgttcttggagcttgtactagctagagaaaagtgtgcctatattctgacttaagcactgtcgttattctgagctggtactattggttttcatgccttagctttcccccagaataagwtacaggctatagctatagtcggtactgtgtgaagaattctgagattgagctgtgttggtgtttttcctaaataagtaatgtcaatataataagtcttattttattttattcaaagctcttattgagatatctgtaatatcagtaatcctaccattctgtgcaacagaacagtttttcaagtaattagcattagactgacaagtgggttgcagaatacatttaggctagaataagatgtattccagcctgtttccatgagcctccatccttcttccagaattcatgtcttttattatcatt

SEQ ID NO: 240 - DNA, 600 bp, Chicken  19866894084045_1
aactgcagcctcctgtctacagcttacatgtacagatatgataagtgggtggcagctgttgaaaagtatcataaagccagatatttcattacagatgctgagactttcctgcctttatttgccatagaattccagagcagtcctggcaagtctcaaccacctcatactttataatatcattttgctgggtaagaatttatgtctcaacccagtagcatttatttattggatggcagcttcctctgaaagcacagaatggtccagcaggtgcagggaagacagagtagtggctgtacggcygtatgggagcaaccccatcatgcaatagaggagtgtgtatcgcacaaggtagagcttacaggaaggcaggatgtggctacagctccctttaacctgttgataaacctctgcttatattactacttttgctaagaacaggcatttatctgtccctccagctgatcttcaatttcctttttgtggaatacaaattccaagaatgagaaatgtttgttggcttacacaaagrattcactagctgttttctttgcccaatagttttactgcttattctaggtgatgataatactgtttctcccc

SEQ ID NO: 241 - DNA, 600 bp, Chicken  19866894084045_2
atggcagcttcctctgaaagcacagaatggtccagcaggtgcagggaagacagagtagtggctgtacggcygtatgggagcaaccccatcatgcaatagaggagtgtgtatcgcacaaggtagagcttacaggaaggcaggatgtggctacagctccctttaacctgttgataaacctctgcttatattactacttttgctaagaacaggcatttatctgtccctccagctgatcttcaatttcctttttgtggaatacaaattccaagaatgagaaatgtttgttggcttacacaaagrattcactagctgttttctttgcccaatagttttactgcttattctaggtgatgataatactgtttctccccaaggtcagcactgcctttgctgaagtgactgctcaaaccatacaatctcatttcctactgacacttagagtgagatgccagccaaatacccatttgcacaaaaaccagaatgatcatgtttggaaattttctcagtattgccagtaagagtaagattacccacattaaaatagtcctccagtgcagcaaagggatgtgaaaatagtaatgtaaatcttggttagaatgt

SEQ ID NO: 242 - DNA, 600 bp, Chicken  19866894084047_1
tctcccagggatgatgtgcagagtgtctcctcaccctgaagcaatttactgacacagtaatgggaactccgtgggctttcttttgtttactatcgtgctactgaagtgtttgtttgtctgtgccagtgctttgcagaataaacttccaatttatcacgcttctgttgacgtttcttcatctgcagcctaaatacaagcagagattgcacagaaatcttgcggatggtttaataccttatctagaacagcaatgagagccagctggaaaaataaccaatctggagtgagtttctctccaayttaccaccagattaggattagtttggttgtatgacatagggtgttcttgttcttacagcctggtgaagagtacaaagaacagtggaaaaggaacagatccagatcaccagagcaatttccatggaaagtcagttcccttttacaaaggcagattattcaataaacctaactgcagtaggcttgagctcattgggaaatttaccactgtataggagaagaaggcaatgtactgatgaacagaagtgctgctgctatccagagaaataaagtgaaaaggaataggaaaaagaaatcaatctc

SEQ ID NO: 243 - DNA, 599 bp, Chicken  19866894084061_1
  misc_feature (1)..(188): n is any nucleotide
nnnnnnnnnnnnnnnnnnnnnnnnnnnnnnnnnnnnnnnnnnnnnnnnnnnnnnnnnnnnnnnnnnnnnnnnnnnnnnnnnnnnnnnnnnnnnnnnnnnnnnnnnnnnnnnnnnnnnnnnnnnnnnnnnnnnnnnnnnnnnnnnnnnnnnnnnnnnnnnnnnnnnnnnnnnnnnnnnnnnnnnnnnnnggcagcgctgcggagacacagctgtgcacagcacagcaggggctataggcatgatctgcaggtgacatgaagatagaagagaaaagagaaagagattacagggtgtgtacaktgtgagtaggatgtgagctcactggaggagcactgctcacagcgcttgacagggtaagtctcttgcagtaggcaatgaagctgtttttccaggagggatcactgaatcagggatatcccatagcagatctggctgaaggtacttcatattttctwactctggaaaaagacttctaactccagctgagggctttggtgcttcattgtcagagcacagccctgagggctgcgtgtcccaggacggatgcaggctgtgccgtttgggtgcagccgggtgcccactttccaaagtgaaggaaa

SEQ ID NO: 244 - DNA, 599 bp, Chicken  19866894084061_2
  misc_feature (1)..(33): n is any nucleotide
nnnnnnnnnnnnnnnnnnnnnnnnnnnnnnnnnggcagcgctgcggagacacagctgtgcacagcacagcaggggctataggcatgatctgcaggtgacatgaagatagaagagaaaagagaaagagattacagggtgtgtacaktgtgagtaggatgtgagctcactggaggagcactgctcacagcgcttgacagggtaagtctcttgcagtaggcaatgaagctgtttttccaggagggatcactgaatcagggatatcccatagcagatctggctgaaggtacttcatattttctwactctggaaaaagacttctaactccagctgagggctttggtgcttcattgtcagagcacagccctgagggctgcgtgtcccaggacggatgcaggctgtgccgtttgggtgcagccgggtgcccactttccaaagtgaaggaaaaaaatttatagcatgacgggaggagtttctctgagaatagtcttgacttgtcattatcttctgcactctgaacaggactccatgcccagggactgcagatgcccaacagcagctccatcagcgagttcctcctcctggcgttggcagacacgcgg

SEQ ID NO: 245 - DNA, 600 bp, Chicken  19866894084061_3
gcaggctgtgccgtttgggtgcagccgggtgcccactttccaaagtgaaggaaaaaaatttatagcatgacgggaggagtttctctgagaatagtcttgacttgtcattatcttctgcactctgaacaggactccatgcccagggactgcagatgcccaacagcagctccatcagcgagttcctcctcctggcgttggcagacacgcggcagctgcagctcctgcacttctggctcttgctgggcatctacctggctgccctcctgggcaacggcctcatcagcacagccgtagcctgcraccaccgcctgcacacccccatgtacttyttcctcctcaacctcgccctcctcgacctgggctgcatctccaccactctccccaaagccatggccaacgccctctggcacaccagggccatctcctacgcaggatgtgctgcacaggtctttttctttctcttcttcatcactgcggaatactcccttctcaccatcatgtcctatgaccgctacgttgccatctgcaagcccctgcactacgggaccctkctgggcagcagagcttgtgccaccatkgcagcagctgcctggagtactg

SEQ ID NO: 246 - DNA, 600 bp, Chicken  19866894084061_4
tgcccactttccaaagtgaaggaaaaaaatttatagcatgacgggaggagtttctctgagaatagtcttgacttgtcattatcttctgcactctgaacaggactccatgcccagggactgcagatgcccaacagcagctccatcagcgagttcctcctcctggcgttggcagacacgcggcagctgcagctcctgcacttctggctcttgctgggcatctacctggctgccctcctgggcaacggcctcatcagcacagccgtagcctgcraccaccgcctgcacacccccatgtacttyttcctcctcaacctcgccctcctcgacctgggctgcatctccaccactctccccaaagccatggccaacgccctctggcacaccagggccatctcctacgcaggatgtgctgcacaggtctttttctttctcttcttcatcactgcggaatactcccttctcaccatcatgtcctatgaccgctacgttgccatctgcaagcccctgcactacgggaccctkctgggcagcagagcttgtgccaccatkgcagcagctgcctggagtactggagtccttaattccctgctgcacactgcc

SEQ ID NO: 247 - DNA, 600 bp, Chicken  19866894084061_5
ctggctgccctcctgggcaacggcctcatcagcacagccgtagcctgcraccaccgcctgcacacccccatgtacttyttcctcctcaacctcgccctcctcgacctgggctgcatctccaccactctccccaaagccatggccaacgccctctggcacaccagggccatctcctacgcaggatgtgctgcacaggtctttttctttctcttcttcatcactgcggaatactcccttctcaccatcatgtcctatgaccgctacgttgccatctgcaagcccctgcactacgggaccctkctgggcagcagagcttgtgccaccatkgcagcagctgcctggagtactggagtccttaattccctgctgcacactgccaatacgttttccctgcctmtgtgccaaagcaatgccatcaatcagttcttctgtgaaatcccccagatcctcaagctctcctgctcagaatcttatctcagggaagttgggctactcctttttagtgtctgtttagcctgtgggtgttttgttttcattgttgtgtcctatgtgcagatcttcagggcygtgctgaggatgccctctgagcagggacggcac

SEQ ID NO: 248 - DNA, 600 bp, Chicken  19866894084061_6
atcagcacagccgtagcctgcraccaccgcctgcacacccccatgtacttyttcctcctcaacctcgccctcctcgacctgggctgcatctccaccactctccccaaagccatggccaacgccctctggcacaccagggccatctcctacgcaggatgtgctgcacaggtctttttctttctcttcttcatcactgcggaatactcccttctcaccatcatgtcctatgaccgctacgttgccatctgcaagcccctgcactacgggaccctkctgggcagcagagcttgtgccaccatkgcagcagctgcctggagtactggagtccttaattccctgctgcacactgccaatacgttttccctgcctmtgtgccaaagcaatgccatcaatcagttcttctgtgaaatcccccagatcctcaagctctcctgctcagaatcttatctcagggaagttgggctactcctttttagtgtctgtttagcctgtgggtgttttgttttcattgttgtgtcctatgtgcagatcttcagggcygtgctgaggatgccctctgagcagggacggcacaaagccttctccacgtgcctccctcac

SEQ ID NO: 249 - DNA, 600 bp, Chicken  19866894084061_7
tcctcgacctgggctgcatctccaccactctccccaaagccatggccaacgccctctggcacaccagggccatctcctacgcaggatgtgctgcacaggtctttttctttctcttcttcatcactgcggaatactcccttctcaccatcatgtcctatgaccgctacgttgccatctgcaagcccctgcactacgggaccctkctgggcagcagagcttgtgccaccatkgcagcagctgcctggagtactggagtccttaattccctgctgcacactgccaatacgttttccctgcctmtgtgccaaagcaatgccatcaatcagttcttctgtgaaatcccccagatcctcaagctctcctgctcagaatcttatctcagggaagttgggctactcctttttagtgtctgtttagcctgtgggtgttttgttttcattgttgtgtcctatgtgcagatcttcagggcygtgctgaggatgccctctgagcagggacggcacaaagccttctccacgtgcctccctcacctggccgtggtctccctgtttctcagcactggcttttttgccaatctaaggcccccctctctttcctccc

SEQ ID NO: 250 - DNA, 600 bp, Chicken  19866894084061_8
gccatctgcaagcccctgcactacgggaccctkctgggcagcagagcttgtgccaccatkgcagcagctgcctggagtactggagtccttaattccctgctgcacactgccaatacgttttccctgcctmtgtgccaaagcaatgccatcaatcagttcttctgtgaaatcccccagatcctcaagctctcctgctcagaatcttatctcagggaagttgggctactcctttttagtgtctgtttagcctgtgggtgttttgttttcattgttgtgtcctatgtgcagatcttcagggcygtgctgaggatgccctctgagcagggacggcacaaagccttctccacgtgcctccctcacctggccgtggtctccctgtttctcagcactggcttttttgccaatctaaggcccccctctctttcctccccatccttggatctgatgatggcttttctgtactcagtggttcctccaacactgaatccgctcatctacagcatgaggaaccaggagctcagggatgcagtgaggaaaatgatgccctggtcacatttcagcrgggataaacttctcatctgtctctgcaaatgactcaca

SEQ ID NO: 251 - DNA, 388 bp, Chicken  19866894084061_9
ttttcattgttgtgtcctatgtgcagatcttcagggcygtgctgaggatgccctctgagcagggacggcacaaagccttctccacgtgcctccctcacctggccgtggtctccctgtttctcagcactggcttttttgccaatctaaggcccccctctctttcctccccatccttggatctgatgatggcttttctgtactcagtggttcctccaacactgaatccgctcatctacagcatgaggaaccaggagctcagggatgcagtgaggaaaatgatgccctggtcacatttcagcrgggataaacttctcatctgtctctgcaaatgactcacagtctgtcccataacagccctgtattgcgttttttactcttaataattttt

SEQ ID NO: 252 - DNA, 599 bp, Chicken  19866894084065_1
  misc_feature (1)..(206): n is any nucleotide
nnnnnnnnnnnnnnnnnnnnnnnnnnnnnnnnnnnnnnnnnnnnnnnnnnnnnnnnnnnnnnnnnnnnnnnnnnnnnnnnnnnnnnnnnnnnnnnnnnnnnnnnnnnnnnnnnnnnnnnnnnnnnnnnnnnnnnnnnnnnnnnnnnnnnnnnnnnnnnnnnnnnnnnnnnnnnnnnnnnnnnnnnnnnnnnnnnnnnnnnnnnnnncaacccctctgtgggccatagctccgtgcccacagcccccatccatggccttgtcacctccagggatgggcacccacagctctgggcagcagcrccgtgcctcaccacctctgggaaagaattccctcctcacawctaagctaaatttcccttctttcagtttaaagccattcccccttgtcctatcactcagtacacgtgccaaaaatcactctctctcctgttcatcagctgtctttaagtactggaaggctgcaatgaggtcctgcaggccagcagccccagctcccttagcctttcttcacagcagaggtgctccatcctctgagcatcttcatgatccttggcacaacctttactgaatgcagagcaatgatccaacagcaacaggtg

SEQ ID NO: 253 - DNA, 599 bp, Chicken  19866894084065_2
  misc_feature (1)..(165): n is any nucleotide
nnnnnnnnnnnnnnnnnnnnnnnnnnnnnnnnnnnnnnnnnnnnnnnnnnnnnnnnnnnnnnnnnnnnnnnnnnnnnnnnnnnnnnnnnnnnnnnnnnnnnnnnnnnnnnnnnnnnnnnnnnnnnnnnnnnnnnnnnnnnnnnnnnnnnnnnnnnnnnnnnnnnncaacccctctgtgggccatagctccgtgcccacagcccccatccatggccttgtcacctccagggatgggcacccacagctctgggcagcagcrccgtgcctcaccacctctgggaaagaattccctcctcacawctaagctaaatttcccttctttcagtttaaagccattcccccttgtcctatcactcagtacacgtgccaaaaatcactctctctcctgttcatcagctgtctttaagtactggaaggctgcaatgaggtcctgcaggccagcagccccagctcccttagcctttcttcacagcagaggtgctccatcctctgagcatcttcatgatccttggcacaacctttactgaatgcagagcaatgatccaacagcaacaggtgagttcaggagagccacaattgcttctgcacccactgccttc

SEQ ID NO: 254 - DNA, 591 bp, Chicken  19866894084066_1
  misc_feature (1)..(32): n is any nucleotide
nnnnnnnnnnnnnnnnnnnnnnnnnnnnnnnnaattaatataaagtgggaaaaatatcatatttggtacacaagggaaaggttctaaatctgtgattgcaacaaagctgagttacatacatttacacacatgcatacataaaatgatcaagttaaactaaaagaaaatcattacatacagcaacatttgtatttttccactccattaccacatacagtaaggttcacacaaaatgagagaaagccatttgtattaatctagtcacagcttcagcagcaccactgtagcattttccagtayatgacaccttgcaacaaagcatctgtcaagtgcagctggaaggtcagttagcatctatgtgcagggcaagaacctctgggagagcaacaggcaagccagagcagaggaaccatggacaggaggaaatcacaatacgtattgcatgagaacacagactaaaaactcattcttctctctttcaaaaaaaaaaaaacccacacatttaaagttggactttaattctaagaaaaaagcaattccaaaattacaaactgaacatcagagtcaattcaaccataataataaaatgaa

SEQ ID NO: 255 - DNA, 600 bp, Chicken  19866894084070_1
ctgagaccaagaataatactgtagatttcagcatccttcatccaaggatctcaaagcactttgttatcattaaattttgcctgcagatggcagatgggaaaaccgaggaggggtagcacagggatataattctaatataagcttttcttttttcacaggaggtgtttttctagtggttgcaatggaaaatggattgggtaccatagaactgtttcacagagaacatctttcacagggaatactgatgcccacccacacagaaagctttttgttttggtggtaaggactcacaatggaccygacgattgtctgtggtgatttaactgctgcatcacacatgcaaattcagctggttgctactgaaaattattttcatttggtggctgactgataaattaagtaatactctatactgctaatagtgtctagtactgtacattgccggtgaaggtgagttcaagacatataattccaaaatcactagatcataggtgtctgaaaatcctgcacaaatcggggaaaaacaaccactgtattttaatgcagatcatactgccctgggaaataacctgctggatgttctgacagtgtttccacaga

SEQ ID NO: 256 - DNA, 600 bp, Chicken  19866894084073_1
aatttttcagaaggtcatctgataaccctgtcaggcataatgtgccgtgatcagatctccccaggttggggtggggtgaatcaattgtgagcaaacacctctgacagaccttgctgacatgaaaggtgcaaactcaccagtaatttattggaaatgtgcataatggaaaggattacacttaatttcccatcaaaaaataggttttctcagcatgcaagtgagcaaacaagagcatgagtgaaggcattagggctcagtgaatcacagcaggagtggggtgggatgcagcaggaggagcaktgctgtccccactgccccagcaccatggggcaatcaggacatggggagccctcaccttactttccaataaagtaagatccttcccccttggaatccttagagaaataacacaaacatgcaggttttaagtcacagagatgttgagttctgtatcacttaaagaaaaccaggaaaaaggctcaagggagacattattactccctacaactctgcaagaaggttggagtgaggtggggggtcggcctctgctcccaggtaacagtgttaggatgggatgtgatggtatcatgttgcaccaga

SEQ ID NO: 257 - DNA, 599 bp, Chicken  19866894084082_1
  misc_feature (1)..(22): n is any nucleotide
nnnnnnnnnnnnnnnnnnnnnntctttggaaataaggtggctgtcaacagcgtgtctgtatagctaaaattgttcacaaacagttaatgcgtggatctttgactatgaaatggttcttatatatgtgttttaaaaagcttttagattttcttgagagagaaattcaagagaacttctataaaagttagattcctgtgcaaaagtgaacgggtcgcttaacttccagtgtaatggtaaggtggaatgtaaagaaagcactttttcagatgtgtctaccatagcatttaatgtatcgtgagygtttaaagcaatcactggctgttttgcactggtactrtatttgcttttttgcctgtaagtctatgaattcactgacgagtactgacttgtttgtactccaaataccagtgcttatgctttattaattttctgaagttcttatctagtgactgacagtaacgacaggaagtgattaattaatgggatcttgctaggaacgtgtcacgttctcatatttgtctgtgttggtgacatactacgctgctggctttcatatgtctgatactactgcctaactattgaagcatgtaaatttcttg

SEQ ID NO: 258 - DNA, 600 bp, Chicken  19866894084082_2
tggctgtcaacagcgtgtctgtatagctaaaattgttcacaaacagttaatgcgtggatctttgactatgaaatggttcttatatatgtgttttaaaaagcttttagattttcttgagagagaaattcaagagaacttctataaaagttagattcctgtgcaaaagtgaacgggtcgcttaacttccagtgtaatggtaaggtggaatgtaaagaaagcactttttcagatgtgtctaccatagcatttaatgtatcgtgagygtttaaagcaatcactggctgttttgcactggtactrtatttgcttttttgcctgtaagtctatgaattcactgacgagtactgacttgtttgtactccaaataccagtgcttatgctttattaattttctgaagttcttatctagtgactgacagtaacgacaggaagtgattaattaatgggatcttgctaggaacgtgtcacgttctcatatttgtctgtgttggtgacatactacgctgctggctttcatatgtctgatactactgcctaactattgaagcatgtaaatttcttgtctcatgcttcagcttaataaaagcctgtgtgtgagtc

SEQ ID NO: 259 - DNA, 600 bp, Chicken  19866894084089_1
tcttgaggacatcaacccatgtaaaatttcataactttcagtgaagtcagtacagcttttcagtattctgagaattaagctttgtttagcttgatgactaagaacaaatttgagaatgtggcttttaaaatactcaacttgaacattacagtctaaatacatttatttcaagttttaaacaagcactaataataaactgtaagcatttttaaaggcttaaaacacacaaaatagatttgaaaaacctaatttagtaggtaacatattaatgccataaactaaataaagccatcatgccartgctgggttagcaktagcatgatggtcaataacacttcaatcaagtcacaggtcactaacacgtatgtcctcaactcaatgccaagggataaatagttccctgctcagtgattttaaaaatgactcagtctttggaactaaaggccactacttccacaatttatcatatgaaatatcagctatagatcttaatgaccatacacgatgggtcatgaatcaacaagattatagtgcgtgacttcaaaatgaattactttctcctattatctcagcctccctctctaagttgtgagtcayata

SEQ ID NO: 260 - DNA, 600 bp, Chicken  19866894084089_2
acccatgtaaaatttcataactttcagtgaagtcagtacagcttttcagtattctgagaattaagctttgtttagcttgatgactaagaacaaatttgagaatgtggcttttaaaatactcaacttgaacattacagtctaaatacatttatttcaagttttaaacaagcactaataataaactgtaagcatttttaaaggcttaaaacacacaaaatagatttgaaaaacctaatttagtaggtaacatattaatgccataaactaaataaagccatcatgccartgctgggttagcaktagcatgatggtcaataacacttcaatcaagtcacaggtcactaacacgtatgtcctcaactcaatgccaagggataaatagttccctgctcagtgattttaaaaatgactcagtctttggaactaaaggccactacttccacaatttatcatatgaaatatcagctatagatcttaatgaccatacacgatgggtcatgaatcaacaagattatagtgcgtgacttcaaaatgaattactttctcctattatctcagcctccctctctaagttgtgagtcayataggagacaagacttt

SEQ ID NO: 261 - DNA, 600 bp, Chicken  19866894084089_3
cartgctgggttagcaktagcatgatggtcaataacacttcaatcaagtcacaggtcactaacacgtatgtcctcaactcaatgccaagggataaatagttccctgctcagtgattttaaaaatgactcagtctttggaactaaaggccactacttccacaatttatcatatgaaatatcagctatagatcttaatgaccatacacgatgggtcatgaatcaacaagattatagtgcgtgacttcaaaatgaattactttctcctattatctcagcctccctctctaagttgtgagtcayataggagacaagactttggagctacgcaatacaataaaaatagtagacagattggctttaaactggaagacaggcttccattcattccagacaaatgaatgcataggtctcattctggtacctgaaaatgaatgaggagtaacttgcgtgtcctgttctttacgatacttaaaacaaatctaaactatggccaaggttagacccctcaggttaccaatttctagtgcatgagccaaatttctactctcaacctgcttctaatcctgtgcaatacaaaacccacctctgttctcaggagag

SEQ ID NO: 262 - DNA, 600 bp, Chicken  19866894084089_4
aagactttggagctacgcaatacaataaaaatagtagacagattggctttaaactggaagacaggcttccattcattccagacaaatgaatgcataggtctcattctggtacctgaaaatgaatgaggagtaacttgcgtgtcctgttctttacgatacttaaaacaaatctaaactatggccaaggttagacccctcaggttaccaatttctagtgcatgagccaaatttctactctcaacctgcttctaatcctgtgcaatacaaaacccacctctgttctcaggagagccttcctasacttactttgataaagatattctaggacttgaaataatttgcytcagattggtgtaattttagcatttgtatctccccattgaaaagacagacagaacatggtcatgtgaaactaatcttgaagagatttagtttccattctgtacacaacatacacayacagactatattttagacattactgtagtttaaggaggaaaatagcatctgccaagtctgtttcagagatgaggcagaactagaagattacttggttggtaaaagctcatttacaacatcatcggtgamawtttgtgaaat

SEQ ID NO: 263 - DNA, 600 bp, Chicken  19866894084089_5
tggctttaaactggaagacaggcttccattcattccagacaaatgaatgcataggtctcattctggtacctgaaaatgaatgaggagtaacttgcgtgtcctgttctttacgatacttaaaacaaatctaaactatggccaaggttagacccctcaggttaccaatttctagtgcatgagccaaatttctactctcaacctgcttctaatcctgtgcaatacaaaacccacctctgttctcaggagagccttcctasacttactttgataaagatattctaggacttgaaataatttgcytcagattggtgtaattttagcatttgtatctccccattgaaaagacagacagaacatggtcatgtgaaactaatcttgaagagatttagtttccattctgtacacaacatacacayacagactatattttagacattactgtagtttaaggaggaaaatagcatctgccaagtctgtttcagagatgaggcagaactagaagattacttggttggtaaaagctcatttacaacatcatcggtgamawtttgtgaaattaatagcatatgaaggcaatcagaggcctaacgcttcaataac

SEQ ID NO: 264 - DNA, 600 bp, Chicken  19866894084089_6
ttaaaacaaatctaaactatggccaaggttagacccctcaggttaccaatttctagtgcatgagccaaatttctactctcaacctgcttctaatcctgtgcaatacaaaacccacctctgttctcaggagagccttcctasacttactttgataaagatattctaggacttgaaataatttgcytcagattggtgtaattttagcatttgtatctccccattgaaaagacagacagaacatggtcatgtgaaactaatcttgaagagatttagtttccattctgtacacaacatacacayacagactatattttagacattactgtagtttaaggaggaaaatagcatctgccaagtctgtttcagagatgaggcagaactagaagattacttggttggtaaaagctcatttacaacatcatcggtgamawtttgtgaaattaatagcatatgaaggcaatcagaggcctaacgcttcaataacccatgtttctgtctccttttaagatcttgtgacagctataactcaaaaagtaggcagatggtctttgttgctaaacttcaaacatcacaaggcttctgaagaatcccaaaatttag

SEQ ID NO: 265 - DNA, 600 bp, Chicken  19866894084089_7
gagccttcctasacttactttgataaagatattctaggacttgaaataatttgcytcagattggtgtaattttagcatttgtatctccccattgaaaagacagacagaacatggtcatgtgaaactaatcttgaagagatttagtttccattctgtacacaacatacacayacagactatattttagacattactgtagtttaaggaggaaaatagcatctgccaagtctgtttcagagatgaggcagaactagaagattacttggttggtaaaagctcatttacaacatcatcggtgamawtttgtgaaattaatagcatatgaaggcaatcagaggcctaacgcttcaataacccatgtttctgtctccttttaagatcttgtgacagctataactcaaaaagtaggcagatggtctttgttgctaaacttcaaacatcacaaggcttctgaagaatcccaaaatttagagcagcaaaaaggagcaaagaacttgcagagcatcacacacttgaacattatttactgctggaaagaatgggaatgctccctttgtccttttcccagctgtgttagtctagcacatgattgtttcaatc

SEQ ID NO: 266 - DNA, 600 bp, Chicken  19866894084089_8
gccttcctasacttactttgataaagatattctaggacttgaaataatttgcytcagattggtgtaattttagcatttgtatctccccattgaaaagacagacagaacatggtcatgtgaaactaatcttgaagagatttagtttccattctgtacacaacatacacayacagactatattttagacattactgtagtttaaggaggaaaatagcatctgccaagtctgtttcagagatgaggcagaactagaagattacttggttggtaaaagctcatttacaacatcatcggtgamawtttgtgaaattaatagcatatgaaggcaatcagaggcctaacgcttcaataacccatgtttctgtctccttttaagatcttgtgacagctataactcaaaaagtaggcagatggtctttgttgctaaacttcaaacatcacaaggcttctgaagaatcccaaaatttagagcagcaaaaaggagcaaagaacttgcagagcatcacacacttgaacattatttactgctggaaagaatgggaatgctccctttgtccttttcccagctgtgttagtctagcacatgattgtttcaatcag

SEQ ID NO: 267 - DNA, 599 bp, Chicken  19866894084091_1
  misc_feature (1)..(121): n is any nucleotide
nnnnnnnnnnnnnnnnnnnnnnnnnnnnnnnnnnnnnnnnnnnnnnnnnnnnnnnnnnnnnnnnnnnnnnnnnnnnnnnnnnnnnnnnnnnnnnnnnnnnnnnnnnnnnnnnnnnnnnnnnatattacatatgaaatactggaatcaatccattgtttaggttctggataatcgctaaaaaaaaaaatctagagacttcattaaattattatgtgtgttcattaagtgtgaacaaagcttatttcagcattttttcttccctgtttataggcttattcatgcccaggccagcaacgcctmtgaaatgataccaaaatagcttcattattgccaaacgccccattctaagattaaaaaaacctcacaaaatgtcagaagaatccagtcctctcagcactatgtgctactattgctattttcctcccatctgtgttcatattattttaatctatctgaaattttagtgagtaagaaccgacttctgtgtcaactgtttcacatgaaaagttaaatggacaaaataaatattgacagtcttcattcaattttctgtttaactttagagatccatgttttgtctatagagtactgcatatcta

SEQ ID NO: 268 - DNA, 599 bp, Chicken  19866894084095_1
  misc_feature (1)..(105): n is any nucleotide
nnnnnnnnnnnnnnnnnnnnnnnnnnnnnnnnnnnnnnnnnnnnnnnnnnnnnnnnnnnnnnnnnnnnnnnnnnnnnnnnnnnnnnnnnnnnnnnnnnnnnnnnnttttgtctatagagtactgcatatctatcaaacacaccaacacagtcactgataccatgaagtaacagttaccttctatagcacatcattctcaaaacactgaaataaagtagaaaaaacctaatacctcacttaacaaatgaaaaaccaggataatggatgtttacagatgaatgttttatctttcactagcaytgcttaaatccgttcagttagccactaaaaacwccagggcaaaaattaaatttattcaactggcacaagcatatcttctttaatttatctctaatcagaaataatagtgttgagagatctcttacagtataataatacgtattcaaatatacattgttttayattggtaaatctttcccattgggcaacatacaaatcacttacacaggatctctgtttctggtaggccatgtatttgacatcaggcatctacattaatgtaacagtgcaagtgaagttgtttcttccaattcatatac

SEQ ID NO: 269 - DNA, 599 bp, Chicken  19866894084095_2
  misc_feature (1)..(72): n is any nucleotide
nnnnnnnnnnnnnnnnnnnnnnnnnnnnnnnnnnnnnnnnnnnnnnnnnnnnnnnnnnnnnnnnnnnnnnnnttttgtctatagagtactgcatatctatcaaacacaccaacacagtcactgataccatgaagtaacagttaccttctatagcacatcattctcaaaacactgaaataaagtagaaaaaacctaatacctcacttaacaaatgaaaaaccaggataatggatgtttacagatgaatgttttatctttcactagcaytgcttaaatccgttcagttagccactaaaaacwccagggcaaaaattaaatttattcaactggcacaagcatatcttctttaatttatctctaatcagaaataatagtgttgagagatctcttacagtataataatacgtattcaaatatacattgttttayattggtaaatctttcccattgggcaacatacaaatcacttacacaggatctctgtttctggtaggccatgtatttgacatcaggcatctacattaatgtaacagtgcaagtgaagttgtttcttccaattcatatacttcatgatgaattatgagtgaaaagacagtttt

SEQ ID NO: 270 - DNA, 600 bp, Chicken  19866894084095_3
tgaagtaacagttaccttctatagcacatcattctcaaaacactgaaataaagtagaaaaaacctaatacctcacttaacaaatgaaaaaccaggataatggatgtttacagatgaatgttttatctttcactagcaytgcttaaatccgttcagttagccactaaaaacwccagggcaaaaattaaatttattcaactggcacaagcatatcttctttaatttatctctaatcagaaataatagtgttgagagatctcttacagtataataatacgtattcaaatatacattgttttayattggtaaatctttcccattgggcaacatacaaatcacttacacaggatctctgtttctggtaggccatgtatttgacatcaggcatctacattaatgtaacagtgcaagtgaagttgtttcttccaattcatatacttcatgatgaattatgagtgaaaagacagtttttttagtttacctattatatgaatggacaccaaaaatatttttcaaacactgcatacaaatgattagaaaaaaatatttcctcatagatatttgtctcttctaaaagagaacttcaaggccaggctggatg

SEQ ID NO: 271 - DNA, 600 bp, Chicken  19866894084101_1
cagaaaataactcatactcttctaaggaatttttccagcaagccattcttgaacaactggacaatttaaagctgtggccaagggctgaacactttgttttggtaagcgggtggcttttctctgtgtaaggactcttacagttagtctctgtgataagaagaacctgaagaaaaccagagtcagcgtttgactcagcttgatgagacaaatacactcttattcatagtaaaactatatttcatttaatatgttagatcttgcaccctgaatctgggctttcagcattattccaggataacrtttctagcctcacaaagcatcttcacaagaatgtgtgtgggctttgttttgactttttcttttttgagaggttttcacggttatttgtgcagattcttgttcatgcttagtgatttggaagggacacaagaaataggctctgggcatgttactaagcttttgttcactgtatcacctatcctgcatgcagtaaaagcagtatatcagagttgagagcaaaactctgtgaggagagaggaggttcaccccttttccttcgtcccagcaggagcctggagcactgacattgcactcttgaag

SEQ ID NO: 272 - DNA, 600 bp, Chicken  19866894084113_1
gagtcagggcagagcataattctaattacaggaagcagaagcaagaggggggaacttttggagtgttttattgtaatttaagtaggtttctaagatgtgagaagccagcaatgttgtcagaggttacaaggagttttcatgcaatcacaaattcatatttctctgtcctaacacacaatctgggagaagggcagccagaggtaagtgacagaaccaggaggaggaagcgagctgttagccggctctggtttgtctctccttcttatcagatcataacttcacagtagcacttccactgcraactccttgtagcccttccagattaactttcaagcctgcctccctaaccttgggaaattttagacatgcaagatcagctaacaaggcagggggaagttcttttgtctgcagtgggatctttccatgctgcagctcggcttcctttacatacaggccctactgattccccagagagatggagtaaactaattgctcatctgctattaggatcatcccaaaaaagattaagactgtgaatgtttgatgggcacatctctgtcttttctagttggctaagatttcctctgctggatatgtatg

SEQ ID NO: 273 - DNA, 569 bp, Chicken  19866894084116_1
gctgcagtggctggggcagctcctgtatgcgtgccagtgatgttacatgaggggaatgtgtgccatgagttccctgcatgtcaagtgcagggctatgggagctgctcacagcattgccagaagcgcattcctggatccgtgggtacaggggtcctggcagcacagcgtgccttcagtgtcagcctgtgaactgtgcagtgccctccagcactgtgtcccagggtgggagcagagccccatggggttactggtgatggtttgaggggttttagaggtgctgcccttgattcaggctgctcygagccctccctgtgyggtgtttcttgcctcagccaggggaaggggactgagtctgctcagcctcagcagagtcacccacaccccaggagggcaaagcaggtctgcccggctctgccggcttgctgggcgtgctctgagtcacccgcagccctgctcttcccagccgggtcgatgctcgcaggcatcccaggtgctgctgccaggtcgtttctgtcaccagcagcagtcaggggtgcagagcattgccttatgtgggacttgcttccatc

SEQ ID NO: 274 - DNA, 554 bp, Chicken  19866894084116_2
gcagctcctgtatgcgtgccagtgatgttacatgaggggaatgtgtgccatgagttccctgcatgtcaagtgcagggctatgggagctgctcacagcattgccagaagcgcattcctggatccgtgggtacaggggtcctggcagcacagcgtgccttcagtgtcagcctgtgaactgtgcagtgccctccagcactgtgtcccagggtgggagcagagccccatggggttactggtgatggtttgaggggttttagaggtgctgcccttgattcaggctgctcygagccctccctgtgyggtgtttcttgcctcagccaggggaaggggactgagtctgctcagcctcagcagagtcacccacaccccaggagggcaaagcaggtctgcccggctctgccggcttgctgggcgtgctctgagtcacccgcagccctgctcttcccagccgggtcgatgctcgcaggcatcccaggtgctgctgccaggtcgtttctgtcaccagcagcagtcaggggtgcagagcattgccttatgtgggacttgcttccatc

SEQ ID NO: 275 - DNA, 555 bp, Chicken  19866894084123_1
gctctttctcaaacagctcttggggctgccctgttgtatgggttcagagtgttgttgacataatctgtgatacctgaactgagtgaggtgacgctgttatttgatcttttatgctaaatcttgttgtcctaaccttgcttgctcaatgcagtctggtttgcttccaggcctgcctggaagggaggaggtctagggagtgatgatctggaaagaaaaggcagtcttgcaggttctcttgcagaagctcactgagtttcagcacatagcttgtcttcaggtatagattaaacttgtctttgkgtgtagattgattgaaatatcctaggcttattcctctggattatcaaaaactaaagaaaaaaaattgactacctgagtgcccaccgttacttgaaagtgtactgaatgaggtaaatcgctgttatttttaaaagcaacttttcctgcagtatgaactaaagaagtttgccccaatgccagtgctgtgaactggcaccacattccaaggcttgcatgacttaagtccgcacagctcagattggtctttccatttag

SEQ ID NO: 276 - DNA, 600 bp, Chicken  19866894084130_1
ctaaggaaaaggggaaagagagaaagagaatgaaaatgattttaatttttttttggcgtagaaatgaagctgatattgaaagtgagtaaattttaatgaaacggtgcaaaaatgacatcatttactcagaaatcattaatttgtcagcattaatatttcagctacaacattgcctgtcattctgtgccagcaatgactgataaatctataaaagtgtgctgctaatttactgaatatttatgtgcagtgtcatttgcagagtaggatttgaatttatttcgctcagtattcagctggagwacatttctagcaaactgaaaatgagcagcaccaggctgtgcaaagtaaagccagccaaacttcctaaacagctcgctgccaggcaaagcatgggcacagtgggatggcatggcatggggtgggatgggatgggatgggatggaggagatgagatggggtgggctgggatgggatgggatggaggagatgagatggggtgggatggggcagaagaggttgatgagatgggatgggatggagcgtggcaccactcagccctggggctgccctgccaatatctgttgcatcaacagcactgtt

SEQ ID NO: 277 - DNA, 600 bp, Chicken  19866894084135_1
tatggttaagttgtgattggacttgatgatctttaaggccttttccgacctgaggaattctgtgattctattattctacgtttcagaggatttttaatattaaaccttccattagaatctggcactttagacatatacctgtactctatgtgttaagaggcaggaactttggcttctcagttgtaccattttacagtaagcaggactcgcacctacctttcttaacagcgtggtcacaacagatgaaaatcagtggagagttttgtgatgacactgcacagaaggaaaaagtgagctggrctgactgcctcttcatctgcttcaggtcattctggtcattcccttctaaaggtaattgatttccaaaggtcacggactctcctaaaaaaaaagtacaatgtacttcaaaatctatgggtttttttcctactctcaacttaaacaagctcttttcttgctattcccttctcacataaaacacagattactcgtggatcagaaaagtagaagggctaagaaaagtgagccaactagaccatgacattgtgagagacttgctgaagtctttctaactgatcagggagctcactattgccaatg

SEQ ID NO: 278 - DNA, 600 bp, Chicken  19866894084137_1
ctggaggaggtaattttagcagaagggaatactgaagccagcatcaggctttctaatgagaaaaacctatcctgttactccctatttaaaccattgcgactgagaaagattgcttttcctaggtaaaaaaaagaaatggtcttggcagaaaagaaaaaaaaaaaaagttttaatagcacctgcaagtgcagattaaatcatttgtaacgattcattaaacttgatgtctcagatactccaccagtgaaaacaagctccactgatttcaccagatcacgaggacttaactaagaggcgatrgtaatttaccccaggtgacccaaggtgtccggtcaygtaataaccctttcatccctcggagcttctctttgggtcagtgttaatagaaaaacctgtaagaaagcagatattgatgtgaagtaccagaaccgtcactgatgctggagactgtttctccttctcttctttcacctcaccacactcatcccaccccacccagaagcgggtaaaacagaaactgcacatcctgaaacttgcagatgcactcatctttctgcagagacatccagcttagggagaacaactaagagaaaagctgca

SEQ ID NO: 279 - DNA, 600 bp, Chicken  19866894084137_2
gccagcatcaggctttctaatgagaaaaacctatcctgttactccctatttaaaccattgcgactgagaaagattgcttttcctaggtaaaaaaaagaaatggtcttggcagaaaagaaaaaaaaaaaaagttttaatagcacctgcaagtgcagattaaatcatttgtaacgattcattaaacttgatgtctcagatactccaccagtgaaaacaagctccactgatttcaccagatcacgaggacttaactaagaggcgatrgtaatttaccccaggtgacccaaggtgtccggtcaygtaataaccctttcatccctcggagcttctctttgggtcagtgttaatagaaaaacctgtaagaaagcagatattgatgtgaagtaccagaaccgtcactgatgctggagactgtttctccttctcttctttcacctcaccacactcatcccaccccacccagaagcgggtaaaacagaaactgcacatcctgaaacttgcagatgcactcatctttctgcagagacatccagcttagggagaacaactaagagaaaagctgcaggttcagaaaaatcccactattcacaaaatcacatg

SEQ ID NO: 280 - DNA, 600 bp, Chicken  19866894084139_1
gcacacagtgcgagacagatgtagtcactactgaatgtggtaggcaaagcccacaagccagcatttaaagagcaaaaaaatcacagtgttttataaaggagaatttaaaatcgatacaaatcaaattcccgtaattaatcagaccgtggaagcgaatacatagcagacagatggcctgaaggagcacaacccatagcacaagggcctgagacaggtctggagatccccactccaccactctgaccaagagccaccccagtgatgagaacaagctcaagctccatgggtctctgtcagttygagrgctgacccaagggttcttccatctcagggcccggaacagttctggagagctgaggcaccctgggaaggtggaatactcaccctggccctgcaggatggagaaatgtaatagtaattcccagaatcccccagcatgatgcggtgtttgcaggtcctggggaggccacttagagcacacttcctgcaggaagagagaaagaaaggaaaacagatcaggccataaagcgacctcgtggcacggcagggtacatccccaggagatgggaggcggagctcagaagtcagacctgtgtcagt

SEQ ID NO: 281 - DNA, 600 bp, Chicken  19866894084139_10
cctcactgctgtagagatytcagacaaagcgatgaaraaagtactctttccaagacagcatggctcccagaaagatcacagaaagatgtgaccagcaagggtgcagcagccctctattttcttgccatttccttccattattctgaagatgaatggatcccagtcccagccagtaggctgcccttcaccatcgcttagcagtaaagcacatttggctgctgcacyrtcattaccacggctcctcagagatccaatgcctgcacggctggaagagagacatcattcctctgctgcaaaagytactctgggagccgtgaaagatgacaacacacaaaggagatgtttcacaaagcttctgagaacaccttggtgcttgctttgcactgccatcaagctcagctgctgcctgtctagactccygaaagcattgcactgaagtcggtaccatagggtgaaaggggcccaggctttcttctttctgcttcacagcacaaacaaaggmgccacaaaaccttgcatttttcatccagggaacaaatcaaatccatttataaccaagagcaagattccttaacaagtctgccacacggtccggtctgg

SEQ ID NO: 282 - DNA, 600 bp, Chicken  19866894084139_11
cttgccatttccttccattattctgaagatgaatggatcccagtcccagccagtaggctgcccttcaccatcgcttagcagtaaagcacatttggctgctgcacyrtcattaccacggctcctcagagatccaatgcctgcacggctggaagagagacatcattcctctgctgcaaaagytactctgggagccgtgaaagatgacaacacacaaaggagatgtttcacaaagcttctgagaacaccttggtgcttgctttgcactgccatcaagctcagctgctgcctgtctagactccygaaagcattgcactgaagtcggtaccatagggtgaaaggggcccaggctttcttctttctgcttcacagcacaaacaaaggmgccacaaaaccttgcatttttcatccagggaacaaatcaaatccatttataaccaagagcaagattccttaacaagtctgccacacggtccggtctgggtggaaattaaacagagttgaagagtttggttagttcagctctagcctcaaagctgctaaatcacactaaactagtaacttgttaacggattagccaaccttaatcacctactaataaaa

SEQ ID NO: 283 - DNA, 600 bp, Chicken  19866894084139_12
aaagcacatttggctgctgcacyrtcattaccacggctcctcagagatccaatgcctgcacggctggaagagagacatcattcctctgctgcaaaagytactctgggagccgtgaaagatgacaacacacaaaggagatgtttcacaaagcttctgagaacaccttggtgcttgctttgcactgccatcaagctcagctgctgcctgtctagactccygaaagcattgcactgaagtcggtaccatagggtgaaaggggcccaggctttcttctttctgcttcacagcacaaacaaaggmgccacaaaaccttgcatttttcatccagggaacaaatcaaatccatttataaccaagagcaagattccttaacaagtctgccacacggtccggtctgggtggaaattaaacagagttgaagagtttggttagttcagctctagcctcaaagctgctaaatcacactaaactagtaacttgttaacggattagccaaccttaatcacctactaataaaatacttcactttacaatttgtgattggaatacactgtggagagggggaaaaaaaatcaaaaggaaacttgcaaggataaacac

SEQ ID NO: 284 - DNA, 600 bp, Chicken  19866894084139_2
acagtgcgagacagatgtagtcactactgaatgtggtaggcaaagcccacaagccagcatttaaagagcaaaaaaatcacagtgttttataaaggagaatttaaaatcgatacaaatcaaattcccgtaattaatcagaccgtggaagcgaatacatagcagacagatggcctgaaggagcacaacccatagcacaagggcctgagacaggtctggagatccccactccaccactctgaccaagagccaccccagtgatgagaacaagctcaagctccatgggtctctgtcagttygagrgctgacccaagggttcttccatctcagggcccggaacagttctggagagctgaggcaccctgggaaggtggaatactcaccctggccctgcaggatggagaaatgtaatagtaattcccagaatcccccagcatgatgcggtgtttgcaggtcctggggaggccacttagagcacacttcctgcaggaagagagaaagaaaggaaaacagatcaggccataaagcgacctcgtggcacggcagggtacatccccaggagatgggaggcggagctcagaagtcagacctgtgtcagtgagc

SEQ ID NO: 285 - DNA, 600 bp, Chicken  19866894084139_3
atgccagctggggaccaaatctggtttcaaaacaggtaatcaagtgtttgagcataatcatccccccctgctggcaagacactgaacctcatgcagacttgtcaccttcaataccctccaacgctgcacacaaagtgttcctcgaggtgtccctgcatggacttcacacagcacaccactgggaaatgtataagtctgccacatcacaggaaaacacacccaggggaagccactgacctggcaagtgtgacatctaaaatgaaatgaaatctcctgagctacaagaggaagctatcagcyattccatagggcctaaagcttttgtgtcacactttctcaccaccwgctagcacaaaccccactgtctcattctgagaactgaaaacaggctgcaatacagtatttatgctaggctcctcttccttatttcagacgtaaaagccaagtggagwaactctgtgctgacttcagggggttttggatatagtttcaggtccctaagaacaagcccagtcccttcctgtgctagcatggagaagttcagcctcactgctgtagagatytcagacaaagcgatgaaraaagtactctttccaagac

SEQ ID NO: 286 - DNA, 600 bp, Chicken  19866894084139_4
gtttgagcataatcatccccccctgctggcaagacactgaacctcatgcagacttgtcaccttcaataccctccaacgctgcacacaaagtgttcctcgaggtgtccctgcatggacttcacacagcacaccactgggaaatgtataagtctgccacatcacaggaaaacacacccaggggaagccactgacctggcaagtgtgacatctaaaatgaaatgaaatctcctgagctacaagaggaagctatcagcyattccatagggcctaaagcttttgtgtcacactttctcaccaccwgctagcacaaaccccactgtctcattctgagaactgaaaacaggctgcaatacagtatttatgctaggctcctcttccttatttcagacgtaaaagccaagtggagwaactctgtgctgacttcagggggttttggatatagtttcaggtccctaagaacaagcccagtcccttcctgtgctagcatggagaagttcagcctcactgctgtagagatytcagacaaagcgatgaaraaagtactctttccaagacagcatggctcccagaaagatcacagaaagatgtgaccagcaaggg

SEQ ID NO: 287 - DNA, 600 bp, Chicken  19866894084139_5
ctgcatggacttcacacagcacaccactgggaaatgtataagtctgccacatcacaggaaaacacacccaggggaagccactgacctggcaagtgtgacatctaaaatgaaatgaaatctcctgagctacaagaggaagctatcagcyattccatagggcctaaagcttttgtgtcacactttctcaccaccwgctagcacaaaccccactgtctcattctgagaactgaaaacaggctgcaatacagtatttatgctaggctcctcttccttatttcagacgtaaaagccaagtggagwaactctgtgctgacttcagggggttttggatatagtttcaggtccctaagaacaagcccagtcccttcctgtgctagcatggagaagttcagcctcactgctgtagagatytcagacaaagcgatgaaraaagtactctttccaagacagcatggctcccagaaagatcacagaaagatgtgaccagcaagggtgcagcagccctctattttcttgccatttccttccattattctgaagatgaatggatcccagtcccagccagtaggctgcccttcaccatcgcttagcagtaaagca

SEQ ID NO: 288 - DNA, 600 bp, Chicken  19866894084139_6
atgaaatctcctgagctacaagaggaagctatcagcyattccatagggcctaaagcttttgtgtcacactttctcaccaccwgctagcacaaaccccactgtctcattctgagaactgaaaacaggctgcaatacagtatttatgctaggctcctcttccttatttcagacgtaaaagccaagtggagwaactctgtgctgacttcagggggttttggatatagtttcaggtccctaagaacaagcccagtcccttcctgtgctagcatggagaagttcagcctcactgctgtagagatytcagacaaagcgatgaaraaagtactctttccaagacagcatggctcccagaaagatcacagaaagatgtgaccagcaagggtgcagcagccctctattttcttgccatttccttccattattctgaagatgaatggatcccagtcccagccagtaggctgcccttcaccatcgcttagcagtaaagcacatttggctgctgcacyrtcattaccacggctcctcagagatccaatgcctgcacggctggaagagagacatcattcctctgctgcaaaagytactctgggagccgtgaaa

SEQ ID NO: 289 - DNA, 600 bp, Chicken  19866894084139_7
caagaggaagctatcagcyattccatagggcctaaagcttttgtgtcacactttctcaccaccwgctagcacaaaccccactgtctcattctgagaactgaaaacaggctgcaatacagtatttatgctaggctcctcttccttatttcagacgtaaaagccaagtggagwaactctgtgctgacttcagggggttttggatatagtttcaggtccctaagaacaagcccagtcccttcctgtgctagcatggagaagttcagcctcactgctgtagagatytcagacaaagcgatgaaraaagtactctttccaagacagcatggctcccagaaagatcacagaaagatgtgaccagcaagggtgcagcagccctctattttcttgccatttccttccattattctgaagatgaatggatcccagtcccagccagtaggctgcccttcaccatcgcttagcagtaaagcacatttggctgctgcacyrtcattaccacggctcctcagagatccaatgcctgcacggctggaagagagacatcattcctctgctgcaaaagytactctgggagccgtgaaagatgacaacacacaaagg

SEQ ID NO: 290 - DNA, 600 bp, Chicken  19866894084139_8
agggggttttggatatagtttcaggtccctaagaacaagcccagtcccttcctgtgctagcatggagaagttcagcctcactgctgtagagatytcagacaaagcgatgaaraaagtactctttccaagacagcatggctcccagaaagatcacagaaagatgtgaccagcaagggtgcagcagccctctattttcttgccatttccttccattattctgaagatgaatggatcccagtcccagccagtaggctgcccttcaccatcgcttagcagtaaagcacatttggctgctgcacyrtcattaccacggctcctcagagatccaatgcctgcacggctggaagagagacatcattcctctgctgcaaaagytactctgggagccgtgaaagatgacaacacacaaaggagatgtttcacaaagcttctgagaacaccttggtgcttgctttgcactgccatcaagctcagctgctgcctgtctagactccygaaagcattgcactgaagtcggtaccatagggtgaaaggggcccaggctttcttctttctgcttcacagcacaaacaaaggmgccacaaaaccttgcatttttca

SEQ ID NO: 291 - DNA, 600 bp, Chicken  19866894084139_9
gggggttttggatatagtttcaggtccctaagaacaagcccagtcccttcctgtgctagcatggagaagttcagcctcactgctgtagagatytcagacaaagcgatgaaraaagtactctttccaagacagcatggctcccagaaagatcacagaaagatgtgaccagcaagggtgcagcagccctctattttcttgccatttccttccattattctgaagatgaatggatcccagtcccagccagtaggctgcccttcaccatcgcttagcagtaaagcacatttggctgctgcacyrtcattaccacggctcctcagagatccaatgcctgcacggctggaagagagacatcattcctctgctgcaaaagytactctgggagccgtgaaagatgacaacacacaaaggagatgtttcacaaagcttctgagaacaccttggtgcttgctttgcactgccatcaagctcagctgctgcctgtctagactccygaaagcattgcactgaagtcggtaccatagggtgaaaggggcccaggctttcttctttctgcttcacagcacaaacaaaggmgccacaaaaccttgcatttttcat

SEQ ID NO: 292 - DNA, 600 bp, Chicken  19866894084141_1
tttcttactacattgcaccagttcacacctggtttacactggatgggatttctattcattgatcactctggtcggtatttgctaaaaaaatgaagaaagagaggaaattctttactgtaacagaaggaaggtaacaaatacagacatgccaacactgtcacagaaaaggtttatgtctttttattctttctgccaaaatcattccagaggttgtgctgtagctcatgtagccagcttggaagtagcaaatgttgcataagtgctatctagaatctcctaaaactgagggattagcagcgrtgtttgggctcactcttgcccagtgttgaaaagagcactttatcattgctcaggaggttttatcagagaagatcacaatgaaacctacagaaaatcagtgacaagtggaggaaaaagagaaatgtcctagcagtgaggtctcttggaatgatgcytaatgagaggtcatcagatttatcatttggtaaactgtgaaaaagattacatccttggragcatcccagagcaagatggatgttatttctatcctgtcctccctaagagaaaggaracaccacaaatatctaagccatattctgc

SEQ ID NO: 293 - DNA, 600 bp, Chicken  19866894084141_2
tgtcacagaaaaggtttatgtctttttattctttctgccaaaatcattccagaggttgtgctgtagctcatgtagccagcttggaagtagcaaatgttgcataagtgctatctagaatctcctaaaactgagggattagcagcgrtgtttgggctcactcttgcccagtgttgaaaagagcactttatcattgctcaggaggttttatcagagaagatcacaatgaaacctacagaaaatcagtgacaagtggaggaaaaagagaaatgtcctagcagtgaggtctcttggaatgatgcytaatgagaggtcatcagatttatcatttggtaaactgtgaaaaagattacatccttggragcatcccagagcaagatggatgttatttctatcctgtcctccctaagagaaaggaracaccacaaatatctaagccatattctgccaggaagcattatgaggaaggctggagggacatactgaggatgtgctgaaagaaagcatgccccagcagcctgactgtgggttcttgtctgtcactaatccacattccctattcctgccatttttttaggagactccttggtgrggtgaaggtga

SEQ ID NO: 294 - DNA, 600 bp, Chicken  19866894084141_3
gctgtagctcatgtagccagcttggaagtagcaaatgttgcataagtgctatctagaatctcctaaaactgagggattagcagcgrtgtttgggctcactcttgcccagtgttgaaaagagcactttatcattgctcaggaggttttatcagagaagatcacaatgaaacctacagaaaatcagtgacaagtggaggaaaaagagaaatgtcctagcagtgaggtctcttggaatgatgcytaatgagaggtcatcagatttatcatttggtaaactgtgaaaaagattacatccttggragcatcccagagcaagatggatgttatttctatcctgtcctccctaagagaaaggaracaccacaaatatctaagccatattctgccaggaagcattatgaggaaggctggagggacatactgaggatgtgctgaaagaaagcatgccccagcagcctgactgtgggttcttgtctgtcactaatccacattccctattcctgccatttttttaggagactccttggtgrggtgaaggtgatccttcccttccttcatactaagcctttcacaaggactttctactgtttgctgtactcc

SEQ ID NO: 295 - DNA, 600 bp, Chicken  19866894084141_4
atctcctaaaactgagggattagcagcgrtgtttgggctcactcttgcccagtgttgaaaagagcactttatcattgctcaggaggttttatcagagaagatcacaatgaaacctacagaaaatcagtgacaagtggaggaaaaagagaaatgtcctagcagtgaggtctcttggaatgatgcytaatgagaggtcatcagatttatcatttggtaaactgtgaaaaagattacatccttggragcatcccagagcaagatggatgttatttctatcctgtcctccctaagagaaaggaracaccacaaatatctaagccatattctgccaggaagcattatgaggaaggctggagggacatactgaggatgtgctgaaagaaagcatgccccagcagcctgactgtgggttcttgtctgtcactaatccacattccctattcctgccatttttttaggagactccttggtgrggtgaaggtgatccttcccttccttcatactaagcctttcacaaggactttctactgtttgctgtactccctaaagtgtcaatattacatttataacatatgctgttgatatgtcagacttggtata

SEQ ID NO: 296 - DNA, 600 bp, Chicken  19866894084141_5
ggaatgatgcytaatgagaggtcatcagatttatcatttggtaaactgtgaaaaagattacatccttggragcatcccagagcaagatggatgttatttctatcctgtcctccctaagagaaaggaracaccacaaatatctaagccatattctgccaggaagcattatgaggaaggctggagggacatactgaggatgtgctgaaagaaagcatgccccagcagcctgactgtgggttcttgtctgtcactaatccacattccctattcctgccatttttttaggagactccttggtgrggtgaaggtgatccttcccttccttcatactaagcctttcacaaggactttctactgtttgctgtactccctaaagtgtcaatattacatttataacatatgctgttgatatgtcagacttggtatatgtaactacaactacatgaagagtttcatgttytttgaatgcaggtccaacctagacctgcacatttcaggtcagatgcacgttgtgctgctaatatttgtctccaatattaagagcaaggaactgaaggctcatttttacaggaagctgaagagttttgtaaaaggcttgca

SEQ ID NO: 297 - DNA, 492 bp, Chicken  19866894084141_6
aagcattatgaggaaggctggagggacatactgaggatgtgctgaaagaaagcatgccccagcagcctgactgtgggttcttgtctgtcactaatccacattccctattcctgccatttttttaggagactccttggtgrggtgaaggtgatccttcccttccttcatactaagcctttcacaaggactttctactgtttgctgtactccctaaagtgtcaatattacatttataacatatgctgttgatatgtcagacttggtatatgtaactacaactacatgaagagtttcatgttytttgaatgcaggtccaacctagacctgcacatttcaggtcagatgcacgttgtgctgctaatatttgtctccaatattaagagcaaggaactgaaggctcatttttacaggaagctgaagagttttgtaaaaggcttgcatttcaaattcgtttagaattccaggctaaagagatgcttcagctagcagagt

SEQ ID NO: 298 - DNA, 592 bp, Chicken  19866894084145_1
ggatggaggggggaccactccgacagggccctgtgcccggtggcatgggtttataggcggagggattgggagctgcctctgcaccctgagtgtcagcaccaacgaggcgtgaaatcccgcagggactttttccaatgctttgtaggcctctaaatgtcaagtgggatgcttggtggtgccagcagccaggctgtgggggagaggcacctcggcaccctaccaggcagtgagtcatccatctggtcccagcttaatgtgactggagaagcgagagcgctaatgagtaaggtgtaagtaaargggatggcctaccaatttgccttccatatcggagccaacttggggtcctctgaggctacggggacctggggggtgcaataagtctccgttgggttcttgttttggtcagggacgtggtcagtgggcatggtgggcaagtgtggatggttggactaaatgatcttagtggtcttttccaaccttaatgattctgtgaatcctttgattagactgcagcattcattttttgatggtgaattcagctgttcttattagtgagactgctggcaaatggttgcattggaagccccat

SEQ ID NO: 299 - DNA, 524 bp, Chicken  19866894084150_1
gagaaggcacacacgtcctcctccgcgcttcgttaccagctgctgtcctccgcgctgcacggcggctctacctgcctctcctccatcatcataattacagcctgtgtctgcatcacgctgcacaggagcagctttccatcgcgatgagtaatggctgtgggagggacggagccagctcatcaggcagatgtgagaggggagggagggacttccccgctcccgagatgaaaggaacccccgcggaggagcgggctctccccacgcttcccggggagatggggtttttctcacacatgcccragaacacttaacaccagcacggcacgctcaaacacattcgccacgcatttgtaaaatacacggaaccaaagcacgtgcagggggaaataatctattattctttaactgtctccctaatgttaaattcatttcgtcaaatcacaacgcggaggataccctcctcttttcaatacctcaaatttcctcttcacagttcattctacacgctcccttaatcaaatatg

SEQ ID NO: 300 - DNA, 600 bp, Chicken  19866894084154_1
ctaaaaggaattaaaggcaccaatcaaaaaatgacctcaatggcaaaaatgaaaagcaaggttaaataacatgtaattaccaataaaagcactgaagctgtcattactaagcagaaaaaaatgacatcaccatatacagggaggatgaggcaataatgcctgccagaccaagcagatacctgttattacactgcacgccagcctcatatagaccgtagaacttgagagtgaaagccctgagagaaaaaaaataatggactaaaggcatggtgttccctgagctatgcaacacttgctcaygtgtgttctaggagacagtgacatttgccctggctctcaattggaaactggaaacacacggtcctttgttccttaccatctcacgtggaagccacgcagactaargttttgctaagcaaatacattcgtttttttctagtctgagagttttatctctgttggagatccccctcttttaacagcacatctgataaaaacactgtagctgttagttgttagaatatttcacccttgccttgttggaggataaaatcacagctccctaggtctgagatacgtgccctaatccagatgcaaata

SEQ ID NO: 301 - DNA, 600 bp, Chicken  19866894084154_2
actaagcagaaaaaaatgacatcaccatatacagggaggatgaggcaataatgcctgccagaccaagcagatacctgttattacactgcacgccagcctcatatagaccgtagaacttgagagtgaaagccctgagagaaaaaaaataatggactaaaggcatggtgttccctgagctatgcaacacttgctcaygtgtgttctaggagacagtgacatttgccctggctctcaattggaaactggaaacacacggtcctttgttccttaccatctcacgtggaagccacgcagactaargttttgctaagcaaatacattcgtttttttctagtctgagagttttatctctgttggagatccccctcttttaacagcacatctgataaaaacactgtagctgttagttgttagaatatttcacccttgccttgttggaggataaaatcacagctccctaggtctgagatacgtgccctaatccagatgcaaatacrtcctcattaccctcttggctgtatgatgctgtaggcatttgtttgggaggtaaaagggcataggaatttaaaaaagaaaagtctcagcaccagacttcttgct

SEQ ID NO: 302 - DNA, 600 bp, Chicken  19866894084154_3
gtgttctaggagacagtgacatttgccctggctctcaattggaaactggaaacacacggtcctttgttccttaccatctcacgtggaagccacgcagactaargttttgctaagcaaatacattcgtttttttctagtctgagagttttatctctgttggagatccccctcttttaacagcacatctgataaaaacactgtagctgttagttgttagaatatttcacccttgccttgttggaggataaaatcacagctccctaggtctgagatacgtgccctaatccagatgcaaatacrtcctcattaccctcttggctgtatgatgctgtaggcatttgtttgggaggtaaaagggcataggaatttaaaaaagaaaagtctcagcaccagacttcttgctgtcattttatggaagcaaattcctgtccacagggtgcattaagagctggttctgggtgcctctcctcactgggagcatttgggaagggcacagactgcggggcaggttgcctccttgcagaattcatgcctcatacagtcagtggctctctggcttctcaccacaaagctgacacatcccgttctatttgtctaatg

SEQ ID NO: 303 - DNA, 600 bp, Chicken  19866894084155_1
caacacagtatgtggagctttttaagcatgggctgtcaaaagtgccttctgttttagatggtactgccttacatgtagagttcccaatatctctctttctgtgctgaaagtagtgcagtttttctgagagctcacagtgaaggattgcctttcactctattttgatatataggaagagacacctgatttttataatgtagaaccgatggctgatttgaatgcagttttgaaagctattagtaagtaatggaatgagaccctgggaaactagaaacataaactaactctaagaaggacaarataactacatctggaataagagaaagaaatagatttcagtattgatgaaaggtttgwtttcaagctgttgacaccagcagaaataatttgttgttaatagagttttgaatcaaacttgctttcataagtttcctgcttgcaggcattgtgaaatacctggggaacagcattactaaaagtgtcctgagggctgatacttttttttatagtgtgctgttgctataggaaatgttttatgagccttctctagaatgctcctttttgaggctgggatagacagactgggtgcagagtgtttgc

SEQ ID NO: 304 - DNA, 600 bp, Chicken  19866894084155_2
atggtactgccttacatgtagagttcccaatatctctctttctgtgctgaaagtagtgcagtttttctgagagctcacagtgaaggattgcctttcactctattttgatatataggaagagacacctgatttttataatgtagaaccgatggctgatttgaatgcagttttgaaagctattagtaagtaatggaatgagaccctgggaaactagaaacataaactaactctaagaaggacaarataactacatctggaataagagaaagaaatagatttcagtattgatgaaaggtttgwtttcaagctgttgacaccagcagaaataatttgttgttaatagagttttgaatcaaacttgctttcataagtttcctgcttgcaggcattgtgaaatacctggggaacagcattactaaaagtgtcctgagggctgatacttttttttatagtgtgctgttgctataggaaatgttttatgagccttctctagaatgctcctttttgaggctgggatagacagactgggtgcagagtgtttgcttgcaagttctgatactggcagtgggggagagataatcagcttattatgtaagaagg

SEQ ID NO: 305 - DNA, 600 bp, Chicken  19866894084169_1
tcctaggattaagcagtccctgagctctgtcacaaaaacatttaatggcttcagatggatcttggcatttccagaagccactttttaaagcctgcatccatgcaaaaaatattagaaatatgttagctaatacactctaagagcctagagtaattaaccacatttgaaggaaagtaagagagctttggcagtgcaaaaagacaatgctcttatgtctatgaaatctgtggcagtgctgccttctcccagtccatccttttaagataaaatatttattgggcattgtgtcagcaacctcarttatgtttggaaattccaaatttcytttacaaatgcagttctttatactatagcaaggaatgttttattttaaacagattacagtatgcattatacacttctgcaagttagcagcttaaacgttaacatattgttggcaaatacatgaagaaggcagcatagtctctaagagttttgtattaggattgaacacattttaaagcaagtagtcactcccacattatctttctgtgattacactgtagttgcttttatagtacgtatgggtgggacgggctagcttagctctcatattaaaag

SEQ ID NO: 306 - DNA, 600 bp, Chicken  19866894084169_2
tctgtcacaaaaacatttaatggcttcagatggatcttggcatttccagaagccactttttaaagcctgcatccatgcaaaaaatattagaaatatgttagctaatacactctaagagcctagagtaattaaccacatttgaaggaaagtaagagagctttggcagtgcaaaaagacaatgctcttatgtctatgaaatctgtggcagtgctgccttctcccagtccatccttttaagataaaatatttattgggcattgtgtcagcaacctcarttatgtttggaaattccaaatttcytttacaaatgcagttctttatactatagcaaggaatgttttattttaaacagattacagtatgcattatacacttctgcaagttagcagcttaaacgttaacatattgttggcaaatacatgaagaaggcagcatagtctctaagagttttgtattaggattgaacacattttaaagcaagtagtcactcccacattatctttctgtgattacactgtagttgcttttatagtacgtatgggtgggacgggctagcttagctctcatattaaaagcagcctggtggcactcactcatttg

SEQ ID NO: 307 - DNA, 600 bp, Chicken  19866894084175_1
gcagcagatggacatcccaccccatcctcgcagtgtgaggagcagcactgagtccctacagccacccatcgccgcagggcatggagctgccacgcagcccacgggcacgatccgtcccgccccgatggccgtggggacggcagcactcagcgccgtggggcacggccacaaaccccaaaagccacagcccaggagcggccctgcgccatctgtccctgtcgctgctgcagcacagcagctgccctgaaacccaacgctggggcattccagaggggatcagctcccagccccaaacactgygccccacagcccccagccctgctgtcctgcagaggggacatcgctgtgcgcagagcggtgcgaccgcggtgggatgctgggatgggagggatgacagcgatggggtgagctgctgtgcctggagctggccccsctggaagagagcwgcrgtgccggagcccacctggttcctctcgtgggtccctgtgccaccagcacacccatgtgccaccgagtgccaccggcacctcccgcccggcacgcggccggcgctgctcagccaggcggaggcaattcccrgtgctgtgaagcgagagcaca

SEQ ID NO: 308 - DNA, 600 bp, Chicken  19866894084175_2
gggacggcagcactcagcgccgtggggcacggccacaaaccccaaaagccacagcccaggagcggccctgcgccatctgtccctgtcgctgctgcagcacagcagctgccctgaaacccaacgctggggcattccagaggggatcagctcccagccccaaacactgygccccacagcccccagccctgctgtcctgcagaggggacatcgctgtgcgcagagcggtgcgaccgcggtgggatgctgggatgggagggatgacagcgatggggtgagctgctgtgcctggagctggccccsctggaagagagcwgcrgtgccggagcccacctggttcctctcgtgggtccctgtgccaccagcacacccatgtgccaccgagtgccaccggcacctcccgcccggcacgcggccggcgctgctcagccaggcggaggcaattcccrgtgctgtgaagcgagagcacatcgcaaccccgggggggttggagaaggcgagcagcccgagcccagcactgcagcggggccctggggggcttcccaccagggagggcaggggggggcagcgcggcgccttcacctcggctccccctgatgtatc

SEQ ID NO: 309 - DNA, 600 bp, Chicken  19866894084175_3
tcagcgccgtggggcacggccacaaaccccaaaagccacagcccaggagcggccctgcgccatctgtccctgtcgctgctgcagcacagcagctgccctgaaacccaacgctggggcattccagaggggatcagctcccagccccaaacactgygccccacagcccccagccctgctgtcctgcagaggggacatcgctgtgcgcagagcggtgcgaccgcggtgggatgctgggatgggagggatgacagcgatggggtgagctgctgtgcctggagctggccccsctggaagagagcwgcrgtgccggagcccacctggttcctctcgtgggtccctgtgccaccagcacacccatgtgccaccgagtgccaccggcacctcccgcccggcacgcggccggcgctgctcagccaggcggaggcaattcccrgtgctgtgaagcgagagcacatcgcaaccccgggggggttggagaaggcgagcagcccgagcccagcactgcagcggggccctggggggcttcccaccagggagggcaggggggggcagcgcggcgccttcacctcggctccccctgatgtatcctcacatacccgc

SEQ ID NO: 310 - DNA, 600 bp, Chicken  19866894084175_4
gcgccgtggggcacggccacaaaccccaaaagccacagcccaggagcggccctgcgccatctgtccctgtcgctgctgcagcacagcagctgccctgaaacccaacgctggggcattccagaggggatcagctcccagccccaaacactgygccccacagcccccagccctgctgtcctgcagaggggacatcgctgtgcgcagagcggtgcgaccgcggtgggatgctgggatgggagggatgacagcgatggggtgagctgctgtgcctggagctggccccsctggaagagagcwgcrgtgccggagcccacctggttcctctcgtgggtccctgtgccaccagcacacccatgtgccaccgagtgccaccggcacctcccgcccggcacgcggccggcgctgctcagccaggcggaggcaattcccrgtgctgtgaagcgagagcacatcgcaaccccgggggggttggagaaggcgagcagcccgagcccagcactgcagcggggccctggggggcttcccaccagggagggcaggggggggcagcgcggcgccttcacctcggctccccctgatgtatcctcacatacccgctga

SEQ ID NO: 311 - DNA, 513 bp, Chicken  19866894084175_5
gctcccagccccaaacactgygccccacagcccccagccctgctgtcctgcagaggggacatcgctgtgcgcagagcggtgcgaccgcggtgggatgctgggatgggagggatgacagcgatggggtgagctgctgtgcctggagctggccccsctggaagagagcwgcrgtgccggagcccacctggttcctctcgtgggtccctgtgccaccagcacacccatgtgccaccgagtgccaccggcacctcccgcccggcacgcggccggcgctgctcagccaggcggaggcaattcccrgtgctgtgaagcgagagcacatcgcaaccccgggggggttggagaaggcgagcagcccgagcccagcactgcagcggggccctggggggcttcccaccagggagggcaggggggggcagcgcggcgccttcacctcggctccccctgatgtatcctcacatacccgctgagcagcacggccagccccaccacagcatccccgggttgtccagt

SEQ ID NO: 312 - DNA, 600 bp, Chicken  19866894084180_1
agtaaattcaattagtaagataggattttggtctaaaatccgaaatacttcatctgtcatgcttcagtacttaggttgtgacctactaaagggcaggagtcccagatccatgcagggattcaagcatcctattaccattgcaaactgatgatttttatatgaatcaaacagggtcccctgtggatttgagaccaagtaccttcagggttactttcagcagtgcctggttagcagggttggaatctcagactcatgaagatgtgtcagcttgctgtgaaatggtctcttgagggaagagarytgcaatgcaattttgtaagagtaggcctagatgtttgtgttaaaacatgttatcagtccaccactttattccatagttccctggtgtttagtgatcttatccagcaagtgacacaacaaatcaataccctcctgaccaaaccttcagaaagtgtgctgacatttaagagctgttctgaacagggatgttctactgtgctgggtggagtactctgcaggaactataggatttgcagttccagaacagccaagggtcacttatatgggaaaaagcaatcttggacacgtgcctctgctcac

SEQ ID NO: 313 - DNA, 600 bp, Chicken  19866894084180_2
gtaaattcaattagtaagataggattttggtctaaaatccgaaatacttcatctgtcatgcttcagtacttaggttgtgacctactaaagggcaggagtcccagatccatgcagggattcaagcatcctattaccattgcaaactgatgatttttatatgaatcaaacagggtcccctgtggatttgagaccaagtaccttcagggttactttcagcagtgcctggttagcagggttggaatctcagactcatgaagatgtgtcagcttgctgtgaaatggtctcttgagggaagagarytgcaatgcaattttgtaagagtaggcctagatgtttgtgttaaaacatgttatcagtccaccactttattccatagttccctggtgtttagtgatcttatccagcaagtgacacaacaaatcaataccctcctgaccaaaccttcagaaagtgtgctgacatttaagagctgttctgaacagggatgttctactgtgctgggtggagtactctgcaggaactataggatttgcagttccagaacagccaagggtcacttatatgggaaaaagcaatcttggacacgtgcctctgctcaca

SEQ ID NO: 314 - DNA, 600 bp, Chicken  19866894084181_1
acattacaaaggggttagaagggagagggaacataactatggctgacacaggaaccaagcacaacctttgagtcaacactactgactgctgctcttcctgctttctcagcctcacttcaaagttttaagtagatttaagacacaggcatagatttgtctccctcaacagcaccacagaacaccaaagggctcttcacagctggacccaatgtgcagcactgaggtcctcccagtgcccaggggaagcatcccaccaggctctgaggctgcatgtcattctgcccctaagcgggctgctcytcatggccccagacctgaaggtaaaccgtgtttgacttttaaaagtcacatcttacaattcacaccattgcattttttcatattttgtgctattcaaatagcagcatctttcacctaagtgaaattggaaaggacagttaaaaaaaaaaaaaaagaaaaatctacccataaagcaactcctggaacccaaagcattccaaacttcccagaggctctgctctattgtgcagcagcccagcattcttcctctgctataaatgaaatttcttctttctgccctttctggctgccaagataacc

SEQ ID NO: 315 - DNA, 589 bp, Chicken  19866894084183_1
cctcagcgtttttttgcagcttgtgagggctctggggaagcttttgctgtaaaacgagctgtcgagggaaaaggaatgggatacgccgcggttcctcggctttctcatttcttcagcagcgccaggggcagtttctttgctcatgtaggctggagaaaagagtggattgtggtccctttggttttacgtaagtgctttcccgggatggaaaaccgggtgacgggacgcgggattgtccggaggggtacgggacagacagggtctcgaggaggcttcgggctggccccgctcccactgacyctgccgcccctcagagcgacttgacacggggagaaattgaaggcgaaagggagaggaggagaaaactttccactaacttacttttttggccaagagctcctatgttcgtagacaccgaagttccttcccccaaccctccccctccccgttagccctccccgcctttactagcgtacaattaacatcattaggaatcagccctccagctaacagaggaactgcgacgaacaacggtaggtgtgagaaaggaaaggcggcgaggatcctaaactgggctttggggcttgat

SEQ ID NO: 316 - DNA, 600 bp, Chicken  19866894084185_1
tccttggtttccctgggacgttgggctgctggctccagccgtatttctcacagaacaggaaagaatttgttgagctgaatttactaattatgggccaaatattgacattttaattctgtgcttacctagcctaagacaatgtaaaaacggagccaagaccttcacagttccattcttgttttattgacggtacgccagagcaaaagtggcattacgttggaaagtatagcgaacattttgcctacaacagcttgggtatgtttatctgtttctttaaacattatctgagacgttaaaagraaccttttctgtcactgagatctaagcgttagtctccagacatttcttactgcaattaagaattgcgaaacaatctgattgttatgagtcaaagtaataaatragtacggatgaatatttggctggaaaaaggggagagtgagactcttgtctttctgtgggttgtgtggagaaaaagctcttgcatggaggcgagagcttgtggaagaggagggactgaaactgatgatttaatataccttcayagaacaaatattttgactaataccttgctcaggacattatggaaatggcaaagca

SEQ ID NO: 317 - DNA, 600 bp, Chicken  19866894084185_2
gacattttaattctgtgcttacctagcctaagacaatgtaaaaacggagccaagaccttcacagttccattcttgttttattgacggtacgccagagcaaaagtggcattacgttggaaagtatagcgaacattttgcctacaacagcttgggtatgtttatctgtttctttaaacattatctgagacgttaaaagraaccttttctgtcactgagatctaagcgttagtctccagacatttcttactgcaattaagaattgcgaaacaatctgattgttatgagtcaaagtaataaatragtacggatgaatatttggctggaaaaaggggagagtgagactcttgtctttctgtgggttgtgtggagaaaaagctcttgcatggaggcgagagcttgtggaagaggagggactgaaactgatgatttaatataccttcayagaacaaatattttgactaataccttgctcaggacattatggaaatggcaaagcagagcatttctcagctaaatgccattctatttgcgtgatgatcttccctgtatgaattcggctggccaatgctgcgaagtactgacttacaggggcagactggg

SEQ ID NO: 318 - DNA, 600 bp, Chicken  19866894084185_3
aacagcttgggtatgtttatctgtttctttaaacattatctgagacgttaaaagraaccttttctgtcactgagatctaagcgttagtctccagacatttcttactgcaattaagaattgcgaaacaatctgattgttatgagtcaaagtaataaatragtacggatgaatatttggctggaaaaaggggagagtgagactcttgtctttctgtgggttgtgtggagaaaaagctcttgcatggaggcgagagcttgtggaagaggagggactgaaactgatgatttaatataccttcayagaacaaatattttgactaataccttgctcaggacattatggaaatggcaaagcagagcatttctcagctaaatgccattctatttgcgtgatgatcttccctgtatgaattcggctggccaatgctgcgaagtactgacttacaggggcagactgggaagagagctttgtaaatagagcacttgtacctgctgttggtctccctccatcccctctgctctttaaaggcttctgtagtaagaaagctgcagtacgtatgttctggtttcctcttcctgaaagaaaccaaacatcctagtt

SEQ ID NO: 319 - DNA, 600 bp, Chicken  19866894084192_1
atcattgccttggcaatgagcctgcatctggattttgggggtgtccagctcctatggctgagttacaccacccagacggggagtgagagtagatgatttctgtatttctttctatatttttctctattttgctttggaaatgaagaaaatttgctaagtgcggaagggaaatggttttatttcagctctaacagcagagatctgtatccctgtttatccccagtatgactgctgctttcctggtatcaccttccaggagcagtttctcatttgtatgtttctctccggagaggaaggtcrtatccttcacaaacaggaaaactaattagagaagtaattcagcagttgtctgataggtcagatattgggaataaatacacagcttagtgcatggctatggtgatgctcgcaggcaggagcaggagcagcatcctatgggtgggaagcgatcacggctctcatctgcagcctcagagctggagagatgtggtgcggccagcggagcagcagtcaaacttgtagctatttgctgcttgcaaacgaaatacagcctaagaattgctcacaggaacggctccaagtagcaaactcgtttgagaa

SEQ ID NO: 320 - DNA, 600 bp, Chicken  19866894084193_1
tcctttaagacatgctggagtaggaacgcttgaaagtgtagttgtgcttcaagatgaagtgctgcttagggagatgtgcaggctgttggtgaaatgcagtctgcatcaagatctgagtgatgctattcagtacctttaccagaagagctgtaagtcggaggtcctgatgcccccaggttgcactgggatgctcatcatgcattgtgccgtgatggtaatgaaggagtcttgatctggatgtgtaagtgagcaactctaagacctgatggatgaaatgaagccagtgctaggcctgagcakgagtgtctgtgatctgtgtagccagacagtgaaatccatggggatggaaactgtatttcatgctgtgaattggcgtggtgcattgtgcaatggttctgattgaattgttatccctcagtgccaccataacataggaaataacaaatactggatttacaaagcaggaacagccatgggaaactggatactgtgtgagtcttaattgtctgaaactaataatccgagctggagattaatcrcatcctttaataaccttgtctgcagatgtttagtaagaaatcaratggaaattaaatgatc

SEQ ID NO: 321 - DNA, 600 bp, Chicken  19866894084193_2
gtgtaagtgagcaactctaagacctgatggatgaaatgaagccagtgctaggcctgagcakgagtgtctgtgatctgtgtagccagacagtgaaatccatggggatggaaactgtatttcatgctgtgaattggcgtggtgcattgtgcaatggttctgattgaattgttatccctcagtgccaccataacataggaaataacaaatactggatttacaaagcaggaacagccatgggaaactggatactgtgtgagtcttaattgtctgaaactaataatccgagctggagattaatcrcatcctttaataaccttgtctgcagatgtttagtaagaaatcaratggaaattaaatgatcagatggtgttycttctcttgttatttggactcctgttatgtcttcataagmtgctgctttgttgtttgtttttaacttgggctttaccttctctagtgcattctaagccaggaatctcaaagggctgacaaacaaactgcatggatgctgtattggtgtatctggatcaggactgggtttgtatttgagccctctgcagacaccttccctgcaggagggcaaagcaagtggtggcggaa

SEQ ID NO: 322 - DNA, 600 bp, Chicken  19866894084193_3
gtgctaggcctgagcakgagtgtctgtgatctgtgtagccagacagtgaaatccatggggatggaaactgtatttcatgctgtgaattggcgtggtgcattgtgcaatggttctgattgaattgttatccctcagtgccaccataacataggaaataacaaatactggatttacaaagcaggaacagccatgggaaactggatactgtgtgagtcttaattgtctgaaactaataatccgagctggagattaatcrcatcctttaataaccttgtctgcagatgtttagtaagaaatcaratggaaattaaatgatcagatggtgttycttctcttgttatttggactcctgttatgtcttcataagmtgctgctttgttgtttgtttttaacttgggctttaccttctctagtgcattctaagccaggaatctcaaagggctgacaaacaaactgcatggatgctgtattggtgtatctggatcaggactgggtttgtatttgagccctctgcagacaccttccctgcaggagggcaaagcaagtggtggcggaagcattgggtcccccttccacgtaaaggaaagcacagtaatatgg

SEQ ID NO: 323 - DNA, 600 bp, Chicken  19866894084193_4
atctgtgtagccagacagtgaaatccatggggatggaaactgtatttcatgctgtgaattggcgtggtgcattgtgcaatggttctgattgaattgttatccctcagtgccaccataacataggaaataacaaatactggatttacaaagcaggaacagccatgggaaactggatactgtgtgagtcttaattgtctgaaactaataatccgagctggagattaatcrcatcctttaataaccttgtctgcagatgtttagtaagaaatcaratggaaattaaatgatcagatggtgttycttctcttgttatttggactcctgttatgtcttcataagmtgctgctttgttgtttgtttttaacttgggctttaccttctctagtgcattctaagccaggaatctcaaagggctgacaaacaaactgcatggatgctgtattggtgtatctggatcaggactgggtttgtatttgagccctctgcagacaccttccctgcaggagggcaaagcaagtggtggcggaagcattgggtcccccttccacgtaaaggaaagcacagtaatatggacttgcttcctttattgactaccagtga

SEQ ID NO: 324 - DNA, 600 bp, Chicken  19866894084193_5
tgtatttcatgctgtgaattggcgtggtgcattgtgcaatggttctgattgaattgttatccctcagtgccaccataacataggaaataacaaatactggatttacaaagcaggaacagccatgggaaactggatactgtgtgagtcttaattgtctgaaactaataatccgagctggagattaatcrcatcctttaataaccttgtctgcagatgtttagtaagaaatcaratggaaattaaatgatcagatggtgttycttctcttgttatttggactcctgttatgtcttcataagmtgctgctttgttgtttgtttttaacttgggctttaccttctctagtgcattctaagccaggaatctcaaagggctgacaaacaaactgcatggatgctgtattggtgtatctggatcaggactgggtttgtatttgagccctctgcagacaccttccctgcaggagggcaaagcaagtggtggcggaagcattgggtcccccttccacgtaaaggaaagcacagtaatatggacttgcttcctttattgactaccagtgacttctgttgctcccacctgttatctatcatttatcagttc

SEQ ID NO: 325 - DNA, 600 bp, Chicken  19866894084203_1
tttgatggtttcctgcagtactgcattttgacttatattttcctttcagtagataggtgtacctgttgatgaaggaaaaaaaaacccctcaaactctcaaaacaggatttacctcctggtacttgttttgaacagttatttgttctaagattacttggggactgatggctgtagataactgtgccacagcacttgaaagtgaaacagaaaagtaaagtagatccattggaatgtagagataacaggagggacaagaggtttctaaatcctcagatatagacaaggaataagtgacatggsattctgaaggcctggggcttctctaaaaataaattatcagagaaaggatagcatcccatggggtatgccttcaactaactctgttttactatctatgttatcaatgatacagtcagaacaagagagtttcagttattcctttaaaagttatmgtactctttctaaatgtaaatgtatttttttgcttgttactagtcttatcccataaatgaagacaggcttttggcaatgaaagaaaaatttctcttacctgttaatttttatttttgraaaggaaccactaaatccagctgatctgaa

SEQ ID NO: 326 - DNA, 600 bp, Chicken  19866894084203_2
acttggggactgatggctgtagataactgtgccacagcacttgaaagtgaaacagaaaagtaaagtagatccattggaatgtagagataacaggagggacaagaggtttctaaatcctcagatatagacaaggaataagtgacatggsattctgaaggcctggggcttctctaaaaataaattatcagagaaaggatagcatcccatggggtatgccttcaactaactctgttttactatctatgttatcaatgatacagtcagaacaagagagtttcagttattcctttaaaagttatmgtactctttctaaatgtaaatgtatttttttgcttgttactagtcttatcccataaatgaagacaggcttttggcaatgaaagaaaaatttctcttacctgttaatttttatttttgraaaggaaccactaaatccagctgatctgaactggtgatcatgttcaccagtaatttttttttcracatacagtatttttgtgctgcttttctctccagcagcaagcccagatacttgcagctgaccctatagttttctctttcttcttagcctttaacatctgaggttatgaatcaacctga

SEQ ID NO: 327 - DNA, 600 bp, Chicken  19866894084203_3
cagatatagacaaggaataagtgacatggsattctgaaggcctggggcttctctaaaaataaattatcagagaaaggatagcatcccatggggtatgccttcaactaactctgttttactatctatgttatcaatgatacagtcagaacaagagagtttcagttattcctttaaaagttatmgtactctttctaaatgtaaatgtatttttttgcttgttactagtcttatcccataaatgaagacaggcttttggcaatgaaagaaaaatttctcttacctgttaatttttatttttgraaaggaaccactaaatccagctgatctgaactggtgatcatgttcaccagtaatttttttttcracatacagtatttttgtgctgcttttctctccagcagcaagcccagatacttgcagctgaccctatagttttctctttcttcttagcctttaacatctgaggttatgaatcaacctgatatttttattttccatgagtctgatagagtaataccattttgggattgatctgcagctttgcagagtggagcattgccatgatgtcatagatgcatttttttttgtaatggcctcaga

SEQ ID NO: 328 - DNA, 600 bp, Chicken  19866894084203_4
tatcagagaaaggatagcatcccatggggtatgccttcaactaactctgttttactatctatgttatcaatgatacagtcagaacaagagagtttcagttattcctttaaaagttatmgtactctttctaaatgtaaatgtatttttttgcttgttactagtcttatcccataaatgaagacaggcttttggcaatgaaagaaaaatttctcttacctgttaatttttatttttgraaaggaaccactaaatccagctgatctgaactggtgatcatgttcaccagtaatttttttttcracatacagtatttttgtgctgcttttctctccagcagcaagcccagatacttgcagctgaccctatagttttctctttcttcttagcctttaacatctgaggttatgaatcaacctgatatttttattttccatgagtctgatagagtaataccattttgggattgatctgcagctttgcagagtggagcattgccatgatgtcatagatgcatttttttttgtaatggcctcagagtgttctcctcggtggtgcagccctgaaaaaaaaaaaaacaacaaacatccctttttactattc

SEQ ID NO: 329 - DNA, 600 bp, Chicken  19866894084204_1
atttccgagagatgagtaaacattctgcagtgctgaaaataaggggttcttctggtgggtgtctgaaggcaggattcaggctgcagacacacagcagtgaatcagcgggcagaggggcagcagcagtgcagggcacccgtagctgctcagcacaaagataggcgtgcgggatgcgaaaacaagcaaaagggcattttgatcctttatgtgaacaaaacaatgcaaattggtgagactaataagccccgaaacattacaaggtgaatgcctttcatgtttgtgaaaatcttctgtgtttcyccgtctaatacaatggaaataaagcttcaaaggccctttgatttaaaagtgcattattgaagtcagcctgcaaaataataaccattagaccgaattgttgcattatgaccctaacagcagcgctgccggagcaaggaacgcctgcacagcctcttgcatgagttgttgctgatataaaatcagagattaagctaaaggaagaaagaatgttagacatgagaagaaaaaataaaatgacaaaaaaggtcacaaatgggtccatgtataaaatgaggctgtcatactcgcagtgcaacaaga

SEQ ID NO: 330 - DNA, 600 bp, Chicken  19866894084207_1
gtacaacttacatgatgaatccttttgcctggctagcatgtaaaaacaggagagggagagttcccaagacctcatctgacccaatgctgtcctaaaagagacaagacaccaacacccagcgcctctaagttttcttctgttgttgatagaaattgcccactcctgagctactcctgggtggacctatacatacatggaagaaattcctttctgtctaatctttatttcctctgctactgcccgaggaccccgaagacatagattgccctttgcatagctcaaggcttagatcttccctakkctactgtctgaatttagaagtcccagttctctcagtccttctcttagggtcacatttctcagaccaccggtcattttctgtgcctgggactctcctcaactttttctggattttatgaatatctccaggatgacgtcggcctcattcattgcagaagcctgacattgtgagctcagatttggctgctggttcatgatggcctcagtcactcccctcccgcttggatttgtgcttaggactcttcttgcacaagcacttgtctttaaaatgtcctgcttcctctcagcctatttctcagc

SEQ ID NO: 331 - DNA, 600 bp, Chicken  19866894084207_2
tacaacttacatgatgaatccttttgcctggctagcatgtaaaaacaggagagggagagttcccaagacctcatctgacccaatgctgtcctaaaagagacaagacaccaacacccagcgcctctaagttttcttctgttgttgatagaaattgcccactcctgagctactcctgggtggacctatacatacatggaagaaattcctttctgtctaatctttatttcctctgctactgcccgaggaccccgaagacatagattgccctttgcatagctcaaggcttagatcttccctakkctactgtctgaatttagaagtcccagttctctcagtccttctcttagggtcacatttctcagaccaccggtcattttctgtgcctgggactctcctcaactttttctggattttatgaatatctccaggatgacgtcggcctcattcattgcagaagcctgacattgtgagctcagatttggctgctggttcatgatggcctcagtcactcccctcccgcttggatttgtgcttaggactcttcttgcacaagcacttgtctttaaaatgtcctgcttcctctcagcctatttctcagcc

SEQ ID NO: 332 - DNA, 600 bp, Chicken  19866894084207_3
tgtgcctgggactctcctcaactttttctggattttatgaatatctccaggatgacgtcggcctcattcattgcagaagcctgacattgtgagctcagatttggctgctggttcatgatggcctcagtcactcccctcccgcttggatttgtgcttaggactcttcttgcacaagcacttgtctttaaaatgtcctgcttcctctcagcctatttctcagcccatctctctaaatctccatcctagctacagtaatgcttccaatgtatccactctatctggtgtgtttaacagcaaacyttcctgctcccaacaggcttcagttcaggatgacacctgctgaacacctctttgtccttgtccactgctatgtttctcttttcacacaggtgtgaccccatcaccccagtggcctatttagccagcacctctttacagagacactgaactaggtaacattaaaagcccttctgaagctgagttatgtgacaagcactgtttctcttatacccaaaagcctggcataaaaggaaattatggttggcttgataagatttgttcttgacaaatctgtgctggctgttactcatctccttgtta

SEQ ID NO: 333 - DNA, 600 bp, Chicken  19866894084209_1
tggtgaggaagtgagccaagtcacagtgcagaggctgctcaagccagcacttggtcaccagacggaaaatgaaagcaatggcaaaaagcagaaatggctgtcaggaccactgctgggtcaggtgacaagagggaagtggtacttcgtaatgctgtgctttgaatgaaacagagaaggcagggagcatgcttccccctagcttttttttacagctgaatattgaggggtagcggtggttctggtgtctggttcggtgccagctcttctcagtgcggaaatgaaggtgagatgcactcgtcrcaaggagaatgartgcaatttcctttcagcagcccaaccacagagcmttctagcccttggctttctgtctgggaagacatcagacgagagccatgggaacttcccctgactttctggtcatatagatctaagcagcatttataacattagaytcacccgctgttaagcatacaggagattttcttgaagacatgaactttctcaagcaggttaaagtttggtcaagggactaatgttttgaaggtatttgccycaggtttttaagggaaatgaggtgtctgcatattaaacagtcccttc

SEQ ID NO: 334 - DNA, 600 bp, Chicken  19866894084209_2
agccaagtcacagtgcagaggctgctcaagccagcacttggtcaccagacggaaaatgaaagcaatggcaaaaagcagaaatggctgtcaggaccactgctgggtcaggtgacaagagggaagtggtacttcgtaatgctgtgctttgaatgaaacagagaaggcagggagcatgcttccccctagcttttttttacagctgaatattgaggggtagcggtggttctggtgtctggttcggtgccagctcttctcagtgcggaaatgaaggtgagatgcactcgtcrcaaggagaatgartgcaatttcctttcagcagcccaaccacagagcmttctagcccttggctttctgtctgggaagacatcagacgagagccatgggaacttcccctgactttctggtcatatagatctaagcagcatttataacattagaytcacccgctgttaagcatacaggagattttcttgaagacatgaactttctcaagcaggttaaagtttggtcaagggactaatgttttgaaggtatttgccycaggtttttaagggaaatgaggtgtctgcatattaaacagtcccttctgagcactgctat

SEQ ID NO: 335 - DNA, 600 bp, Chicken  19866894084209_3
cacttggtcaccagacggaaaatgaaagcaatggcaaaaagcagaaatggctgtcaggaccactgctgggtcaggtgacaagagggaagtggtacttcgtaatgctgtgctttgaatgaaacagagaaggcagggagcatgcttccccctagcttttttttacagctgaatattgaggggtagcggtggttctggtgtctggttcggtgccagctcttctcagtgcggaaatgaaggtgagatgcactcgtcrcaaggagaatgartgcaatttcctttcagcagcccaaccacagagcmttctagcccttggctttctgtctgggaagacatcagacgagagccatgggaacttcccctgactttctggtcatatagatctaagcagcatttataacattagaytcacccgctgttaagcatacaggagattttcttgaagacatgaactttctcaagcaggttaaagtttggtcaagggactaatgttttgaaggtatttgccycaggtttttaagggaaatgaggtgtctgcatattaaacagtcccttctgagcactgctatgcatacatgacctgcatgctggagattgctatgt

SEQ ID NO: 336 - DNA, 595 bp, Chicken  19866894084209_4
tgtgctttgaatgaaacagagaaggcagggagcatgcttccccctagcttttttttacagctgaatattgaggggtagcggtggttctggtgtctggttcggtgccagctcttctcagtgcggaaatgaaggtgagatgcactcgtcrcaaggagaatgartgcaatttcctttcagcagcccaaccacagagcmttctagcccttggctttctgtctgggaagacatcagacgagagccatgggaacttcccctgactttctggtcatatagatctaagcagcatttataacattagaytcacccgctgttaagcatacaggagattttcttgaagacatgaactttctcaagcaggttaaagtttggtcaagggactaatgttttgaaggtatttgccycaggtttttaagggaaatgaggtgtctgcatattaaacagtcccttctgagcactgctatgcatacatgacctgcatgctggagattgctatgtaacagctgatgctggtcaggaaatagatgctctttcagtaacaaaacacgggaaatattttctgtcatgtctttccactgaaaatagcacccttctggaa

SEQ ID NO: 337 - DNA, 494 bp, Chicken  19866894084209_5
gtgccagctcttctcagtgcggaaatgaaggtgagatgcactcgtcrcaaggagaatgartgcaatttcctttcagcagcccaaccacagagcmttctagcccttggctttctgtctgggaagacatcagacgagagccatgggaacttcccctgactttctggtcatatagatctaagcagcatttataacattagaytcacccgctgttaagcatacaggagattttcttgaagacatgaactttctcaagcaggttaaagtttggtcaagggactaatgttttgaaggtatttgccycaggtttttaagggaaatgaggtgtctgcatattaaacagtcccttctgagcactgctatgcatacatgacctgcatgctggagattgctatgtaacagctgatgctggtcaggaaatagatgctctttcagtaacaaaacacgggaaatattttctgtcatgtctttccactgaaaatagcacccttctggaa

SEQ ID NO: 338 - DNA, 599 bp, Chicken  19866894084214_1
  misc_feature (1)..(225): n is any nucleotide
nnnnnnnnnnnnnnnnnnnnnnnnnnnnnnnnnnnnnnnnnnnnnnnnnnnnnnnnnnnnnnnnnnnnnnnnnnnnnnnnnnnnnnnnnnnnnnnnnnnnnnnnnnnnnnnnnnnnnnnnnnnnnnnnnnnnnnnnnnnnnnnnnnnnnnnnnnnnnnnnnnnnnnnnnnnnnnnnnnnnnnnnnnnnnnnnnnnnnnnnnnnnnnnnnnnnnnnnnnnnnnnnntcaaacgccaagtcttgttatagcttctcagaatgggctctgagagtttgcttttagaatgagagactccatgcrtcatatagggaagaaagaaaaacattcagaactgctgttgttggcatatgagcaactaatgaggattgctctggtgatctactaggaaatgaagtgaactgctagtgcatgaaaatattcaaattcatgtccatctcctaggcataagtagcatgggaaggactttgctaactggaaatctgtaatctgagggatggaattcagacttttctctccccaaaacttcttgaagtttactacttagctatctgatgcttctgattttccattttgacaccttcaaacatctcagtccaggg

SEQ ID NO: 339 - DNA, 599 bp, Chicken  19866894084217_1
  misc_feature (1)..(77): n is any nucleotide
nnnnnnnnnnnnnnnnnnnnnnnnnnnnnnnnnnnnnnnnnnnnnnnnnnnnnnnnnnnnnnnnnnnnnnnnnnnnntgccctgctaagacaggaagacaggttcagaaaataggtatgagaattagatacgaatgtctgtttgaattgtgcagttcaagagagaatcagcatgccaaaatgaaatcttcccctccttgtacctgtacttcacacaccaaaaaaaaaaaaaaaaaaaaaaaggagagaagctgtaaataatgggataatggggataatcccaggtggcaagctgaggcaygttaaaggaaatgggaaaatgaacagtctgcgtccacatttttagctcctatgtatcactgctttcagcaccacaaatatcaaaaaaagcagacacagactacttgtttattcttctagttcctgttcacggagctatacgtatttcacattaaagaatcactgattacacacaaaggagtcctggctgctgaagatttctactyccatatgtgtgcactaacctcctgggaaagagaggcacatgctccttttctcaccttgccacagtaaatattaagttttgttctgcataatctg

SEQ ID NO: 340 - DNA, 600 bp, Chicken  19866894084217_2
tacttcacacaccaaaaaaaaaaaaaaaaaaaaaaaggagagaagctgtaaataatgggataatggggataatcccaggtggcaagctgaggcaygttaaaggaaatgggaaaatgaacagtctgcgtccacatttttagctcctatgtatcactgctttcagcaccacaaatatcaaaaaaagcagacacagactacttgtttattcttctagttcctgttcacggagctatacgtatttcacattaaagaatcactgattacacacaaaggagtcctggctgctgaagatttctactyccatatgtgtgcactaacctcctgggaaagagaggcacatgctccttttctcaccttgccacagtaaatattaagttttgttctgcataatctgctatttgtgctattcggaagagagaacttttcactctttctctctctctytttttttttttcttttcctactgcccacagggtaacttaatgctgctctttcatctgtcattatttgctatgtgtatattatctgatttggattcctcacagactgacagggaagactgcatccattgccacagtaacattcatgcttgcttgcaa

SEQ ID NO: 341 - DNA, 573 bp, Chicken  19866894084217_3
ctatgtatcactgctttcagcaccacaaatatcaaaaaaagcagacacagactacttgtttattcttctagttcctgttcacggagctatacgtatttcacattaaagaatcactgattacacacaaaggagtcctggctgctgaagatttctactyccatatgtgtgcactaacctcctgggaaagagaggcacatgctccttttctcaccttgccacagtaaatattaagttttgttctgcataatctgctatttgtgctattcggaagagagaacttttcactctttctctctctcyytttttttttttcttttcctactgcccacagggtaacttaatgctgctctttcatctgtcattatttgctatgtgtatattatctgatttggattcctcacagactgacagggaagactgcatccattgccacagtaacattcatgcttgcttgcaaagtctgtttccgtggagttgtcagctatatacatgcagctttgacctttggtccttcactgctctgcttcatattataaagttaatatctggagtcattcctcagaatgggtttga

SEQ ID NO: 342 - DNA, 572 bp, Chicken  19866894084217_4
tatgtatcactgctttcagcaccacaaatatcaaaaaaagcagacacagactacttgtttattcttctagttcctgttcacggagctatacgtatttcacattaaagaatcactgattacacacaaaggagtcctggctgctgaagatttctactyccatatgtgtgcactaacctcctgggaaagagaggcacatgctccttttctcaccttgccacagtaaatattaagttttgttctgcataatctgctatttgtgctattcggaagagagaacttttcactctttctctctctctytttttttttttcttttcctactgcccacagggtaacttaatgctgctctttcatctgtcattatttgctatgtgtatattatctgatttggattcctcacagactgacagggaagactgcatccattgccacagtaacattcatgcttgcttgcaaagtctgtttccgtggagttgtcagctatatacatgcagctttgacctttggtccttcactgctctgcttcatattataaagttaatatctggagtcattcctcagaatgggtttga

SEQ ID NO: 343 - DNA, 600 bp, Chicken  19866894084221_1
tgagaagatctgtatcagcttatgttgagagatggcatttatcctcataaatttaagggatgatggataggtatattatgcattaacagtacagtctgagcatgttatgacaagtaatcttcttgccagcaaagaataatgccttatctagtgccagaatcttacaccaaatgagctggatagacaacagaattattgaaaaggacaaaaagtctgtcagtgcaaacactggccacgtacaaatccctgcgctgtgcccaaattgctgagactgcacctaatactgaaagacatcatgcrtctgacagtgttgtggtttaacccagcaggtggctgagcaccacacagtcattcactcactcccccatttccacatcagatggggaagagaatcaagaagaagaaagcagaacttgtgggttgagataagacaatttactaatatagagaaaagggaaaggataataattaagacaaatgcatatgtatatacatatgtataaaaatgtatatataataagtgatgcacaagcaattgcttaccaccccctgactgacagccagctaggcccagagcagcacaagagaacaagatgaact

SEQ ID NO: 344 - DNA, 600 bp, Chicken  19866894084226_1
cccggctttgagcaacctcctctagagggaggtgtccctgcctatagcagggggctggaactaaatgaccttaaagatctctcctagcacaaaccattctatgattctatgactccagaggtcagcctcaccacagagccagaagcaagccaagagagcacactaataataataagacttagaactgggtaaatttaagcaatagagaccacctttaatctttccctgttagatgtaactcacccaaatgtatctaacctcattacaaataaatctaaattcctacatcataaaactacrtttgcacagtttctattatgacagcttcttccacaatttgaccctttcccagtgtctaaaaactgacaaaaccgtgcatgcagcctgtctggcatctaacttggtctactgatagatggctgtcttaagacaggatttagctttcttgactacaagcaaaaacagttccaaactgtgttaaaatttcctaaggagcagtcatgaaggcagtgctgccttggtggaaaaaatcctttcagaattactgtactatgaatccagaaggttttctgcttcacttccaatattcacagtatttcc

SEQ ID NO: 345 - DNA, 599 bp, Chicken  19866894084228_1
  misc_feature (1)..(78): n is any nucleotide
nnnnnnnnnnnnnnnnnnnnnnnnnnnnnnnnnnnnnnnnnnnnnnnnnnnnnnnnnnnnnnnnnnnnnnnnnnnnnntggggctctttattacatgagctgtaataataatgagttggaaagattggtagatcttagcagtacccgctcactgtgggtgcagtaaagcctcttccaagccaatgcaaggagcacttgagaagccctgtgtaccacatgcgagggggaatttaccagcattcagcagagccagagaatgcaatgcacatctgagcccaccatgatctattttaatctgckgtctgtgcatccccagatttggggtattcacctatcaagactgatttagatatacctgatcatgcctcggggcaggggagctgcctrggttatctcttcatatcccttccagcccccctttttttcttattttttgtgacactattagatctgacaacaacagaatcatatactttgttctgaaggattcttccattaattagtactttgtggtgcatagctccttcccttgaggagctctaagaggttgacaagtgctaattaagtcctacaagaactggtgtgttgggtaattatta

SEQ ID NO: 346 - DNA, 600 bp, Chicken  19866894084228_2
ttattacatgagctgtaataataatgagttggaaagattggtagatcttagcagtacccgctcactgtgggtgcagtaaagcctcttccaagccaatgcaaggagcacttgagaagccctgtgtaccacatgcgagggggaatttaccagcattcagcagagccagagaatgcaatgcacatctgagcccaccatgatctattttaatctgckgtctgtgcatccccagatttggggtattcacctatcaagactgatttagatatacctgatcatgcctcggggcaggggagctgcctrggttatctcttcatatcccttccagcccccctttttttcttattttttgtgacactattagatctgacaacaacagaatcatatactttgttctgaaggattcttccattaattagtactttgtggtgcatagctccttcccttgaggagctctaagaggttgacaagtgctaattaagtcctacaagaactggtgtgttgggtaattattattttacaggtagaaaaactgaggtgcaagtgtaacccacaggaagttttctgggacagtttcactctgatgcttagtgtttcagctcc

SEQ ID NO: 347 - DNA, 600 bp, Chicken  19866894084228_3
gatctgacaacaacagaatcatatactttgttctgaaggattcttccattaattagtactttgtggtgcatagctccttcccttgaggagctctaagaggttgacaagtgctaattaagtcctacaagaactggtgtgttgggtaattattattttacaggtagaaaaactgaggtgcaagtgtaacccacaggaagttttctgggacagtttcactctgatgcttagtgtttcagctccttaaaattctcgtgtgcctcagagatgttgttgccaatggagaatactgctggcgttccyctcctcctgcccacatctgagctggtcgaggttgaatcaggctcatcagccacatttgggctgcatcagcagcagagagggactgtgagcaaaatgaatctggcctgcatgccaaaaataagtttattttactctcttgccatgctttytgtacttgcagagttacactgactttaaaggggagctgattcaggccttttggattggcagggaggtcaactcttgcagtctgtcattggagagtaattctccatcaaatgtttacctgtgtaattaatctgcttcagagttctctggcat

SEQ ID NO: 348 - DNA, 600 bp, Chicken  19866894084228_4
ttattttacaggtagaaaaactgaggtgcaagtgtaacccacaggaagttttctgggacagtttcactctgatgcttagtgtttcagctccttaaaattctcgtgtgcctcagagatgttgttgccaatggagaatactgctggcgttccyctcctcctgcccacatctgagctggtcgaggttgaatcaggctcatcagccacatttgggctgcatcagcagcagagagggactgtgagcaaaatgaatctggcctgcatgccaaaaataagtttattttactctcttgccatgctttytgtacttgcagagttacactgactttaaaggggagctgattcaggccttttggattggcagggaggtcaactcttgcagtctgtcattggagagtaattctccatcaaatgtttacctgtgtaattaatctgcttcagagttctctggcatggagtgggatggccaagtggcatttgagaacactttaaaaggaaatgagataatcagtttagctttgggtcagtggcgcatcaggatctactgagcctggttggcctctacctggatgatgtagtagtgctgggctgatggaggctgtc

SEQ ID NO: 349 - DNA, 600 bp, Chicken  19866894084228_5
gcttcagagttctctggcatggagtgggatggccaagtggcatttgagaacactttaaaaggaaatgagataatcagtttagctttgggtcagtggcgcatcaggatctactgagcctggttggcctctacctggatgatgtagtagtgctgggctgatggaggctgtctgctgtgaaaggcgagctgtggttccctttgtcctgcaggagggctgctatcagcatgtgtattgctggacattgcattggagccacatggcagagatcacaggacagctcatctatcctaactctgtccygcagcacctgtttgtaaggtcagtggaattccaagaaaagttgcctgaggatctgaatttgatctcctgtggattctgatggagcaaattgaaccccatcaygcaggttctcaagctgccatttgcaggctatccacattaactgcacacagaccaggaccagtttcatgagagcttttactgattccatctcagccactcagtacgtactgacagaccaggactgtagacctgagagcataaacctgggtggtgtaagatttgtgtgctcgatgtgatgtaaaggagctggttaagcaa

SEQ ID NO: 350 - DNA, 541 bp, Chicken  19866894084228_6
aggatctactgagcctggttggcctctacctggatgatgtagtagtgctgggctgatggaggctgtctgctgtgaaaggcgagctgtggttccctttgtcctgcaggagggctgctatcagcatgtgtattgctggacattgcattggagccacatggcagagatcacaggacagctcatctatcctaactctgtccygcagcacctgtttgtaaggtcagtggaattccaagaaaagttgcctgaggatctgaatttgatctcctgtggattctgatggagcaaattgaaccccatcaygcaggttctcaagctgccatttgcaggctatccacattaactgcacacagaccaggaccagtttcatgagagcttttactgattccatctcagccactcagtacgtactgacagaccaggactgtagacctgagagcataaacctgggtggtgtaagatttgtgtgctcgatgtgatgtaaaggagctggttaagcaagttctactctgatttgtagctttcatgtgatagaaacccttgc

SEQ ID NO: 351 - DNA, 402 bp, Chicken  19866894084234_1
agttccagcagtgttctcctttccagacaaaattgccttacagttcacttctgcatctagactatgtgatgagcttaagtatttaataccatttctgatctgggagtatggagaatataatgctcaagtagctgagcttagttaaggcagctagcttccttgaatttcagtacactgtggaggggcaaaatgttcagtgtggtaagaacttaactttgaacatttcttctattgtgtttcattactaacggtgcagaaactccacaggttttttaagcttatttacatgatgatgtcagyttagaggatctttttttaataatttgataataggattacatagagatattcagacactgtggatcattgaagtgtttgtacttcaagacttttgtaccgatg

SEQ ID NO: 352 - DNA, 599 bp, Chicken  19866894084236_1
  misc_feature (1)..(95): n is any nucleotide
nnnnnnnnnnnnnnnnnnnnnnnnnnnnnnnnnnnnnnnnnnnnnnnnnnnnnnnnnnnnnnnnnnnnnnnnnnnnnnnnnnnnnnnnnnnnnnnccccctgagccctgccatgggctgcttgcccccccacctgatcaggctgctgcttctttcagaattccccattgcatcctgaaaaaggattctggaggcttgttgggtgtgatggtgtacaaatgagcacattaattagcaatgcaaggcaatcagtaattggtccatggagtccctggctcagctcagcctgagctgggagggrtgatccccagcccctcaacagagggcctcagtgattcctgtcctctttttttcctttcttcagaattacaacggcgtctcagacgtggagctccgggtagcgttaccagacataacaacagtgacagtcagagtcaaaaagaacagcactacagaccaggtgtaccaggtgggctgctttattttctttcttttggacgtgaaaggtgaatgcgatccatgcgttccctgaggccctggaggtgcccactggctcctctgccccttctgagcgtcagcgttgtagcagggagggtggga

SEQ ID NO: 353 - DNA, 488 bp, Chicken  19866894084236_2
aaaagaacagcactacagaccaggtgtaccaggtgggctgctttattttctttcttttggacgtgaaaggtgaatgcgatccatgcgttccctgaggccctggaggtgcccactggctcctctgccccttctgagcgtcagcgttgtagcagggagggtgggaactggcaagccccgacctcacactgcgctgagacagcatttccttggcttggctgcaaggacagagcaagggatgaattaattgtccctgataacatcttaaagctggcggatggctgcgagtgctgcggctgtcaygcagtgtgcctggcgcaggagttgtgtgcatccagcacccattctccttggtgtgagcagctcggggtgggcagtgctcaggggcagcccccgcagagctggcccaaccctcctgctgcgctcaccccaccttcccttttggttgctctccaggccgtggctgctaaagttggaatggacagtgttac

SEQ ID NO: 354 - DNA, 600 bp, Chicken  19866894084240_1
ttagttaaggaatttcctatttcagccacattttttctactcacgagctctgccagacaatcctttattgttacactgtttttaatataaataataatagaaatgatctgtatttgctgttttaaaatagcaccctttatggaatatgcagtctacaaaaactcaagagtcgagaacactcctcaacagcaagcaaccccatctaagaaaagatttttttattattctatttctaaaacatctgccattcttgcctaagaatttaactcctcacctttaacaacaaggagacagaaatargactacctacaaaaagaaaatctcccatttttccacargctttgcagaagaacattaattttgcttttgtattgttagttttctaggaaatttaccacgaaagcagcatttggattactttttaattactgcatagatactgctggagtgaaaatatactaattttagagagtggtacaattaagtaaatttaattgaatgtgacaatgaaaaaatagggaaaaaaatcttgtattgaaacagacaagcattataacctcatgcaaagaacattcaacttgctggcagcacgctgtccaa

SEQ ID NO: 355 - DNA, 600 bp, Chicken  19866894084240_2
actcacgagctctgccagacaatcctttattgttacactgtttttaatataaataataatagaaatgatctgtatttgctgttttaaaatagcaccctttatggaatatgcagtctacaaaaactcaagagtcgagaacactcctcaacagcaagcaaccccatctaagaaaagatttttttattattctatttctaaaacatctgccattcttgcctaagaatttaactcctcacctttaacaacaaggagacagaaatargactacctacaaaaagaaaatctcccatttttccacargctttgcagaagaacattaattttgcttttgtattgttagttttctaggaaatttaccacgaaagcagcatttggattactttttaattactgcatagatactgctggagtgaaaatatactaattttagagagtggtacaattaagtaaatttaattgaatgtgacaatgaaaaaatagggaaaaaaatcttgtattgaaacagacaagcattataacctcatgcaaagaacattcaacttgctggcagcacgctgtccaaatgatttatatagaagactgattagatcagtcctatta

SEQ ID NO: 356 - DNA, 599 bp, Chicken  19866894084244_1
  misc_feature (1)..(136): n is any nucleotide
nnnnnnnnnnnnnnnnnnnnnnnnnnnnnnnnnnnnnnnnnnnnnnnnnnnnnnnnnnnnnnnnnnnnnnnnnnnnnnnnnnnnnnnnnnnnnnnnnnnnnnnnnnnnnnnnnnnnnnnnnnnnnnnnnnnnnnnnaacttttcatatggaacaacatatagtgctcagctgcattataaatgcagcggtcattatatttatgttaaagctctagttctttcacttcagaatatgcctttaagatatgcctaatctgaacattttcaattgacacataaaaggtgatctaaaaaaggccmgtgctaataaatgacgggctaaggacacttcactgaaatgtaattattcgtaccaattacagaccctagatttgcaccacaaatattgcagccacagtgggtattatgaggggcttggccaagtgccagggatgcctataataaactgggtcatctcttataagaatgttgttattacacttgagaggtcaggggataagcagggtttaaccctgagccwggcagaactgctgattcaatttgctcacaaggattgcctttcattgtgagttgatgggctattttctgctggaagaagc

SEQ ID NO: 357 - DNA, 600 bp, Chicken  19866894084244_2
tcacttcagaatatgcctttaagatatgcctaatctgaacattttcaattgacacataaaaggtgatctaaaaaaggccmgtgctaataaatgacgggctaaggacacttcactgaaatgtaattattcgtaccaattacagaccctagatttgcaccacaaatattgcagccacagtgggtattatgaggggcttggccaagtgccagggatgcctataataaactgggtcatctcttataagaatgttgttattacacttgagaggtcaggggataagcagggtttaaccctgagccwggcagaactgctgattcaatttgctcacaaggattgcctttcattgtgagttgatgggctattttctgctggaagaagcttctctctgcttttcaaagtatggacaacagaactgataaatgtgaagtattccacagacagttaatgctctcaaggataaagtcgggcctcaaatcggcaagcagtgagtctgaagaaaggacatgagagctgtattcacaatgtttgtaataatgaagtaaaaaataggaactgaatttactgtcttgtcttcagttagaagcagtgttatccttaaga

SEQ ID NO: 358 - DNA, 599 bp, Chicken  19866894084246_1
  misc_feature (1)..(96): n is any nucleotide
nnnnnnnnnnnnnnnnnnnnnnnnnnnnnnnnnnnnnnnnnnnnnnnnnnnnnnnnnnnnnnnnnnnnnnnnnnnnnnnnnnnnnnnnnnnnnnnnttacttcagctgttttttgctgtagagctttcacaaaggaaatctgtaatcttcccccagtgttctgagtttcaggcaaatcatttgggggcagtaattggtttaatcctgcgctctttctcaagagcgtgtgtgacttctggaggtgatatctcctcccccctcctctctaacgtgctcccttatgaactatctcactgaggygctgtttgctgtacaggtagggcaggtttgtctccctgggtgaggctgcctcgtcccctctgttgtgagcagctttgcagggctggaggagtgcagccckctttggctccctggcagtgcaccagaggagcagtgcactgtgtggaaatctgtaccgtgtctctgaagcccacagcaggctttgtatgtttggcaagctttgctgcccaagccttctgcgtccagagcactgagcacagcagagcttagcagtgtgctttgcagagctgcacaacagctttgcagtagcaaagcgtagc

SEQ ID NO: 359 - DNA, 600 bp, Chicken  19866894084246_2
ttcagctgttttttgctgtagagctttcacaaaggaaatctgtaatcttcccccagtgttctgagtttcaggcaaatcatttgggggcagtaattggtttaatcctgcgctctttctcaagagcgtgtgtgacttctggaggtgatatctcctcccccctcctctctaacgtgctcccttatgaactatctcactgaggygctgtttgctgtacaggtagggcaggtttgtctccctgggtgaggctgcctcgtcccctctgttgtgagcagctttgcagggctggaggagtgcagccckctttggctccctggcagtgcaccagaggagcagtgcactgtgtggaaatctgtaccgtgtctctgaagcccacagcaggctttgtatgtttggcaagctttgctgcccaagccttctgcgtccagagcactgagcacagcagagcttagcagtgtgctttgcagagctgcacaacagctttgcagtagcaaagcgtagcaattactgggataatgcgattatttctccttctgatcttaaagtaacgttttaactgagcagcatttttgtggatggatggatggctttcatcttggaagc

SEQ ID NO: 360 - DNA, 393 bp, Chicken  19866894084246_3
tttggctccctggcagtgcaccagaggagcagtgcactgtgtggaaatctgtaccgtgtctctgaagcccacagcaggctttgtatgtttggcaagctttgctgcccaagccttctgcgtccagagcactgagcacagcagagcttagcagtgtgctttgcagagctgcacaacagctttgcagtagcaaagcgtagcaattactgggataatgcgattatttctccttctgatcttaaagtaacgttttaactgagcagcatttttgtggatggatggatggctttcatcttggaagcytccaaacatccaggcttccaaataacgaccatccatgagcagccacgtatgttttaacccttcctgttagctgaattccacctgtgaaagatt

SEQ ID NO: 361 - DNA, 600 bp, Chicken  19866894084247_1
atttattcattttctgtacggtattaaagcatgccaaaatcagattatttatgagcccttcataacaataggcatttttattggttgcaaatgacaaaagggtttctcagagggatttttttcctttaaattttttgaatgccttttcagaaacatttatttttttggccgctgtgatctcaaagaaaaatatttaatcattgatacagtaaaaataatttatatttagatgccgagaaacacaccaggctttcagacataaatacacacagctaatccagcccaaaggctctgcgcacygtgggccacagtgaagagctgtgattgagacccactttcctcaattcccccttttctggatggggatctcctgtaagtccttcacaaactgtcggagggacgcagggttgggttgttttcctgttagaggtgagcagggtgtgttccagagcacgtcaaattctcagtgctgtgactgcatcccatgagctctcctacctgctcaggtggagcagctgtgctggtgaatggggaaagcacaacttggcctctgcctctccaccacttcaggtgccttttatccactctctggtacaggag

SEQ ID NO: 362 - DNA, 600 bp, Chicken  19866894084252_1
agagctgttccaaacacaaactctgctgtagagctgaccttgtttgggtgtcctcagtgcggaaatgtgattttcatacatttatttgtgtattttatctctatacaaaccatagacctgaaaatcaagcagaggcactggaggagccatggtctaagcagaaggaaagaggcccagggctgtagtggtgacaaatagcgtctgattaattcattgaaaatccatcattaaaactgctgagttcaagagacagcaaacagatttatccttctaagagtcacagtgcagctggtttccagragttaaaaatgagcacagagatcccattcaccctgattcttaractcagaacaggttgggactgcttccacagagatgaagattgtacctgaaccctctgtttcagctctctctgaagtctcagaaagctcagtgtctactgcagtctattttagcagtagacttctagttgctcaaaactgtacagctcttgccagctgcagaaagagcatatcacttgaagttaattagcttgactcctttcctcaaaaaggagtgtgcagagctgtaagatcatgtgcagcagtgattctgtccccc

SEQ ID NO: 363 - DNA, 600 bp, Chicken  19866894084252_2
ttgggtgtcctcagtgcggaaatgtgattttcatacatttatttgtgtattttatctctatacaaaccatagacctgaaaatcaagcagaggcactggaggagccatggtctaagcagaaggaaagaggcccagggctgtagtggtgacaaatagcgtctgattaattcattgaaaatccatcattaaaactgctgagttcaagagacagcaaacagatttatccttctaagagtcacagtgcagctggtttccagragttaaaaatgagcacagagatcccattcaccctgattcttaractcagaacaggttgggactgcttccacagagatgaagattgtacctgaaccctctgtttcagctctctctgaagtctcagaaagctcagtgtctactgcagtctattttagcagtagacttctagttgctcaaaactgtacagctcttgccagctgcagaaagagcatatcacttgaagttaattagcttgactcctttcctcaaaaaggagtgtgcagagctgtaagatcatgtgcagcagtgattctgtccccctccccaaatctcttatgctttcctttaatgactagcaagagga

SEQ ID NO: 364 - DNA, 599 bp, Chicken  19866894084258_1
  misc_feature (1)..(141): n is any nucleotide
nnnnnnnnnnnnnnnnnnnnnnnnnnnnnnnnnnnnnnnnnnnnnnnnnnnnnnnnnnnnnnnnnnnnnnnnnnnnnnnnnnnnnnnnnnnnnnnnnnnnnnnnnnnnnnnnnnnnnnnnnnnnnnnnnnnnnnnnnnnnnatatttcaaactcagtttaaaagagcagtctggaattgttctgcagctgcatctgttactctcatcaatgagtttcctgctctgtctttcccaagcacctctgtagcacatctgcagagcagagcagggtcagtgctgggatacctgagtcaatttctrtaccatccttcttggtgggacccaacgctcagtttgcacttgccacacagtgacttaagccagtgatgtygcacaagagcaaagcatggacttgagctcatatctaccccacctcttccctcccttctrccactgtcctgctccaagttgcctttctggaaggcaattcagcgtgtgaacagagcctggagagwaaacttctgaagccacacacatgtgaagacattcccatggagacccccagccattggtgcttagccacttcaccacacatgaggagaggctgctaaggactttta

SEQ ID NO: 365 - DNA, 599 bp, Chicken  19866894084258_2
  misc_feature (1)..(71): n is any nucleotide
nnnnnnnnnnnnnnnnnnnnnnnnnnnnnnnnnnnnnnnnnnnnnnnnnnnnnnnnnnnnnnnnnnnnnnnatatttcaaactcagtttaaaagagcagtctggaattgttctgcagctgcatctgttactctcatcaatgagtttcctgctctgtctttcccaagcacctctgtagcacatctgcagagcagagcagggtcagtgctgggatacctgagtcaatttctrtaccatccttcttggtgggacccaacgctcagtttgcacttgccacacagtgacttaagccagtgatgtygcacaagagcaaagcatggacttgagctcatatctaccccacctcttccctcccttctrccactgtcctgctccaagttgcctttctggaaggcaattcagcgtgtgaacagagcctggagagwaaacttctgaagccacacacatgtgaagacattcccatggagacccccagccattggtgcttagccacttcaccacacatgaggagaggctgctaaggacttttaggatctgtggcaarwtgaggatatggttgtcccttacatggctgttgttgggaaataaatcttctattgg

SEQ ID NO: 366 - DNA, 599 bp, Chicken  19866894084258_3
  misc_feature (1)..(12): n is any nucleotide
nnnnnnnnnnnnatatttcaaactcagtttaaaagagcagtctggaattgttctgcagctgcatctgttactctcatcaatgagtttcctgctctgtctttcccaagcacctctgtagcacatctgcagagcagagcagggtcagtgctgggatacctgagtcaatttctrtaccatccttcttggtgggacccaacgctcagtttgcacttgccacacagtgacttaagccagtgatgtygcacaagagcaaagcatggacttgagctcatatctaccccacctcttccctcccttctrccactgtcctgctccaagttgcctttctggaaggcaattcagcgtgtgaacagagcctggagagwaaacttctgaagccacacacatgtgaagacattcccatggagacccccagccattggtgcttagccacttcaccacacatgaggagaggctgctaaggacttttaggatctgtggcaarwtgaggatatggttgtcccttacatggctgttgttgggaaataaatcttctattggtacatagtctggatcttcaacccaaaggactacttcaaagggaagtagtcctactgcca

SEQ ID NO: 367 - DNA, 600 bp, Chicken  19866894084258_4
tgttactctcatcaatgagtttcctgctctgtctttcccaagcacctctgtagcacatctgcagagcagagcagggtcagtgctgggatacctgagtcaatttctrtaccatccttcttggtgggacccaacgctcagtttgcacttgccacacagtgacttaagccagtgatgtygcacaagagcaaagcatggacttgagctcatatctaccccacctcttccctcccttctrccactgtcctgctccaagttgcctttctggaaggcaattcagcgtgtgaacagagcctggagagwaaacttctgaagccacacacatgtgaagacattcccatggagacccccagccattggtgcttagccacttcaccacacatgaggagaggctgctaaggacttttaggatctgtggcaarwtgaggatatggttgtcccttacatggctgttgttgggaaataaatcttctattggtacatagtctggatcttcaacccaaaggactacttcaaagggaagtagtcctactgccacggggataattaaataatgcttcacaacacaaaacagctgtgaatctaaagctgctaccaaaggac

SEQ ID NO: 368 - DNA, 600 bp, Chicken  19866894084258_5
ggtgggacccaacgctcagtttgcacttgccacacagtgacttaagccagtgatgtygcacaagagcaaagcatggacttgagctcatatctaccccacctcttccctcccttctrccactgtcctgctccaagttgcctttctggaaggcaattcagcgtgtgaacagagcctggagagwaaacttctgaagccacacacatgtgaagacattcccatggagacccccagccattggtgcttagccacttcaccacacatgaggagaggctgctaaggacttttaggatctgtggcaarwtgaggatatggttgtcccttacatggctgttgttgggaaataaatcttctattggtacatagtctggatcttcaacccaaaggactacttcaaagggaagtagtcctactgccacggggataattaaataatgcttcacaacacaaaacagctgtgaatctaaagctgctaccaaaggacacacagcagttgtttctagctttggaagacctcaacaccacagtgcttcaatgacgcagccctgtgcgttttgcaccctgtggctgcagaattgcagctagccttgtgatgcatctggt

SEQ ID NO: 369 - DNA, 600 bp, Chicken  19866894084258_6
gtgggacccaacgctcagtttgcacttgccacacagtgacttaagccagtgatgtygcacaagagcaaagcatggacttgagctcatatctaccccacctcttccctcccttctrccactgtcctgctccaagttgcctttctggaaggcaattcagcgtgtgaacagagcctggagagwaaacttctgaagccacacacatgtgaagacattcccatggagacccccagccattggtgcttagccacttcaccacacatgaggagaggctgctaaggacttttaggatctgtggcaarwtgaggatatggttgtcccttacatggctgttgttgggaaataaatcttctattggtacatagtctggatcttcaacccaaaggactacttcaaagggaagtagtcctactgccacggggataattaaataatgcttcacaacacaaaacagctgtgaatctaaagctgctaccaaaggacacacagcagttgtttctagctttggaagacctcaacaccacagtgcttcaatgacgcagccctgtgcgttttgcaccctgtggctgcagaattgcagctagccttgtgatgcatctggtc

SEQ ID NO: 370 - DNA, 600 bp, Chicken  19866894084260_1
gtgttaaatgggacttgattcatttacgcattttatacatacaatgaaatggatgcccagaagagcaaggcataggattagatgacctagggaacactttccagattcagatttctgttctttttaaaccatgtgcatgaaaaacgctgtgctcatttctgaaagtgaaatgagtttttctgtagctctgacatgcatacaggactcttttttttacccatctgcagcagtacagcgagctatttaatgtgttaatgctactaaactatgtcacctatggcatttttctgcttctgttcraaaagaaaactgcaacatgtgctgcatgaaatgccagctgggggtggaagaagaaaacacagtgatggcaggtacttgatttagctttgcatcaataaaacatccagatttataagagcgaatgtgatgaaaaatgtcttaatggaactacatttctaagagtgcattggtccattcacctgtaattacttcagggttgctctgcttgtattccttgcaataccagccagttttatgtggcattctcacacttccttatttagccactaggraaagggacagcaggctcaaatgcataca

SEQ ID NO: 371 - DNA, 600 bp, Chicken  19866894084260_2
acctatggcatttttctgcttctgttcraaaagaaaactgcaacatgtgctgcatgaaatgccagctgggggtggaagaagaaaacacagtgatggcaggtacttgatttagctttgcatcaataaaacatccagatttataagagcgaatgtgatgaaaaatgtcttaatggaactacatttctaagagtgcattggtccattcacctgtaattacttcagggttgctctgcttgtattccttgcaataccagccagttttatgtggcattctcacacttccttatttagccactaggraaagggacagcaggctcaaatgcatacaggtcatacaccagctcttcaacatactcaaacattcaacaattccttgaagatacacattgtgaagcaccacagtctcaatgcatgagctctgtgaatgcrgatgtttctaaattttcatctttaagaaagaaaaaaaaaaaaaaggcatttttcatttacaagaaaggactgatgtttatagtgctggataggatatattcttacaaacaaggaattaagggccaagtcttgaattcggacttagatctcgcccattcaaagctgtcactg

SEQ ID NO: 372 - DNA, 600 bp, Chicken  19866894084260_3
atccagatttataagagcgaatgtgatgaaaaatgtcttaatggaactacatttctaagagtgcattggtccattcacctgtaattacttcagggttgctctgcttgtattccttgcaataccagccagttttatgtggcattctcacacttccttatttagccactaggraaagggacagcaggctcaaatgcatacaggtcatacaccagctcttcaacatactcaaacattcaacaattccttgaagatacacattgtgaagcaccacagtctcaatgcatgagctctgtgaatgcrgatgtttctaaattttcatctttaagaaagaaaaaaaaaaaaaaggcatttttcatttacaagaaaggactgatgtttatagtgctggataggatatattcttacaaacaaggaattaagggccaagtcttgaattcggacttagatctcgcccattcaaagctgtcactgaaattggtgtgccaaataatgaatttaatggttttcaggcagacttccattggcttcaattaggagattctggataagactcatgtttggcacagagaccgttttatacagcaaaagcctgtcaagatc

SEQ ID NO: 373 - DNA, 600 bp, Chicken  19866894084260_4
aatgtcttaatggaactacatttctaagagtgcattggtccattcacctgtaattacttcagggttgctctgcttgtattccttgcaataccagccagttttatgtggcattctcacacttccttatttagccactaggraaagggacagcaggctcaaatgcatacaggtcatacaccagctcttcaacatactcaaacattcaacaattccttgaagatacacattgtgaagcaccacagtctcaatgcatgagctctgtgaatgcrgatgtttctaaattttcatctttaagaaagraaaaaaaaaaaaaggcatttttcatttacaagaaaggactgatgtttatagtgctggataggatatattcttacaaacaaggaattaagggccaagtcttgaattcggacttagatctcgcccattcaaagctgtcactgaaattggtgtgccaaataatgaatttaatggttttcaggcagacttccattggcttcaattaggagattctggataagactcatgtttggcacagagaccgttttatacagcaaaagcctgtcaagatctaagtgaggactccggtatctggccctatca

SEQ ID NO: 374 - DNA, 600 bp, Chicken  19866894084266_1
ttggcactgcggcttaaagatgtatcaacagattttgctgtagcaacccagagctccaggaagcttgcagtacctggacatacgtgttgtctgatgataacacattttaccaacaatttctgtgttcctgaagtagatatagcataggagtcatgcacaactacaaagctgaagttactgaagaagttattatgatgtgatataaatgtgttaaacaagctttagttctacgtgcttacaaagtatggattgtagttttattttttgttgtgttttattgaattaaaatttgttttgatktatgccctctaraatgttcccctaatgaaagtcatcgtttctgtcttcctatactatcagccagaaaattgatcttgctcttgttggattttaaagagtaggtggaagttcctctgactactagtcccccaagcctagaatttttagcattcgataactttgaaatacagggtacagttgacctgtgaagagaggtgtaccggaattgtacaattacatacagataccatgatgttggggaaaagcacacaaatctgattctctgcagtcatcattttgttgaaagtcaatcaaagaaac

SEQ ID NO: 375 - DNA, 600 bp, Chicken  19866894084266_2
cttaaagatgtatcaacagattttgctgtagcaacccagagctccaggaagcttgcagtacctggacatacgtgttgtctgatgataacacattttaccaacaatttctgtgttcctgaagtagatatagcataggagtcatgcacaactacaaagctgaagttactgaagaagttattatgatgtgatataaatgtgttaaacaagctttagttctacgtgcttacaaagtatggattgtagttttattttttgttgtgttttattgaattaaaatttgttttgatktatgccctctaraatgttcccctaatgaaagtcatcgtttctgtcttcctatactatcagccagaaaattgatcttgctcttgttggattttaaagagtaggtggaagttcctctgactactagtcccccaagcctagaatttttagcattcgataactttgaaatacagggtacagttgacctgtgaagagaggtgtaccggaattgtacaattacatacagataccatgatgttggggaaaagcacacaaatctgattctctgcagtcatcattttgttgaaagtcaatcaaagaaacagttccaaatta

SEQ ID NO: 376 - DNA, 600 bp, Chicken  19866894084266_3
tgttggattttaaagagtaggtggaagttcctctgactactagtcccccaagcctagaatttttagcattcgataactttgaaatacagggtacagttgacctgtgaagagaggtgtaccggaattgtacaattacatacagataccatgatgttggggaaaagcacacaaatctgattctctgcagtcatcattttgttgaaagtcaatcaaagaaacagttccaaattaccgtctatctttgtcactgcctctgcatcagaagaagaccaagtactccctgctggggaaaatataaastgaaaggtttaattctaataatagcaccactaataatagataatttatgctactgtaataaaaaatgaaaggggctgaaactagagcagcaagtggcaatcaagttacttgaagtttgatttgttcatgcagtcacgagagcagaacagagagtggaaagctgaactacccagatatttggaccactccaggcaacgaaatctaatgctgagcatcctcatctattgcttcttttagctgttagcatgttcctagtaaggtgcaagaggtgagatcattttatctgctcagaatagtctt

SEQ ID NO: 377 - DNA, 600 bp, Chicken  19866894084272_1
aagtgcttttaagtaatcattacccaagcgctgatgtgaaaatatttggtgccactgaaattcttgataccctggaggtgagtgtattgctggaaaatattaatcattgttggaaagcattttgaactgttacatgcaactttctaactctgccacatctgaagattatttttagatgatttggaaatgttcatctctaacgtattgctccccagttttcacgtctacttcaaggtagaagtatgttagcctcatctttatgctagctgggacacgttaactagcacagactggggagtrgaaaatctgcttgatccctagtgacaggagtaggtatttgcccaccattcacatggcccaatagaagatgcttttatgtgttcagctgatacccacagaaatagcagttactagggcaaccttaaaaaacaggagtgaagtgatgcaagtatgaatgtaatattacaatcaagtctagctcctgctgagagacgaattgccctaggattgtggaaaaacatttttctgaagcatggcctgggagttggatgtgttgctgtgttttctcaagtggtctttttcaggttgttttwttttttt

SEQ ID NO: 378 - DNA, 600 bp, Chicken  19866894084272_2
gggagtrgaaaatctgcttgatccctagtgacaggagtaggtatttgcccaccattcacatggcccaatagaagatgcttttatgtgttcagctgatacccacagaaatagcagttactagggcaaccttaaaaaacaggagtgaagtgatgcaagtatgaatgtaatattacaatcaagtctagctcctgctgagagacgaattgccctaggattgtggaaaaacatttttctgaagcatggcctgggagttggatgtgttgctgtgttttctcaagtggtctttttcaggttgttttwtttttttccttggcaggtgaaatgtggatcaccaacggtgaaggcatttgagaaggagaaatcctatgggctgcctagttacatagtctacactgttagtctgtctgatccaagagtttcaagccagggatccttatcaactgctctaactatctctagtcctatgactgaccagactatcattattccagtgacagtaatttatttgactgacagaaccagtgcaccagtgagacgtaagtttatctctagacttcatgtgccagaataaaagtataaattacattagcgtttgagatg

SEQ ID NO: 379 - DNA, 588 bp, Chicken  19866894084276_1
aacagggcaggagttgggctcatgccacagatgggaatgggcactgtgaggggaagggcagggcacagaaacccaggcagagactcactcctgtggctcatttacttcccaacgaatccagcaatcccctttcttccccaccccctttcatcctacactcaggcccaattcccagaggaggggaggctcagatctgagcagtacagcctgatcatgaaaagccagctgagcaaaactaatttactgaccatggcaaaacacaatgaggagggctggaagcacactgatggctactgcctytcctttcacccctctgctcagcgacactgctggcaccatmggtttgaaggaaacacaaatctatgatgcgaggtaaattttgggctgacagtcgagcgaagacttttggtgttctccagcattggcagcactatggaaaatgtgtctctgccacagtggctgccagcttagccccttgcttctcccgtcctcttgtcagccactgataggagggctgctcattgcactgtccacagggagacctgttggccatctgaggagtggcataggcacagacaacagaggcag

SEQ ID NO: 380 - DNA, 548 bp, Chicken  19866894084276_2
gcactgtgaggggaagggcagggcacagaaacccaggcagagactcactcctgtggctcatttacttcccaacgaatccagcaatcccctttcttccccaccccctttcatcctacactcaggcccaattcccagaggaggggaggctcagatctgagcagtacagcctgatcatgaaaagccagctgagcaaaactaatttactgaccatggcaaaacacaatgaggagggctggaagcacactgatggctactgcctytcctttcacccctctgctcagcgacactgctggcaccatmggtttgaaggaaacacaaatctatgatgcgaggtaaattttgggctgacagtcgagcgaagacttttggtgttctccagcattggcagcactatggaaaatgtgtctctgccacagtggctgccagcttagccccttgcttctcccgtcctcttgtcagccactgataggagggctgctcattgcactgtccacagggagacctgttggccatctgaggagtggcataggcacagacaacagaggcag

SEQ ID NO: 381 - DNA, 600 bp, Chicken  19866894084277_1
aaatatgatgtggtccagccctggccgcgtgtgcccacgctccccctgcccttgcctggaggaggtgacgccaccacggcaccgtggggaaaccaagaaggatccatgctctgggcttctgctaaaagctcgtatcaaccagtaaatctgcaagtgaaaaggatgcaactgctgcagctgcttatctgcggggtgtgaaacaaatctctgtctctttgtcacgtcagggttttccttcatgctctgcctgcagcagtctttgcacgagaatgacagctttttgctcgagaagggggcagragggaaggcacatttcccagcagtcagcatcagacccatttcgtcatcaccaaaggaaggaactgccagtttggggcatgacccctcctatagggccagcagatgggcagtatcccaaaaccggcacccctcctccctccaaacaaaggcagccctggctctgggcagcgtccttctgagccctcccatcccagctggtggaggggcaatgagccgctgtttaatggggaataacgacatctggagtcaagtccagtagagtccagtggagtagtgtaaagtccaatggactcaatggga

SEQ ID NO: 382 - DNA, 600 bp, Chicken  19866894084278_1
tagcctatgacgtgataaatagtgatttattttcctgatttgtatagtgctagtttgtagcttgtacagaacctaatatattccatacatttgaattgccttttttagttttttttcttcctgtatcctgtgttttcaagttgctttatatgcattttgagactggaggcacaagaactgcacataatgggaatgaaaacccacacagtggcataatgatggcttctgttttctcccacccccttacagctgtgaatgatgaccaaggtattaatggcaattacctcttagtatagttaragctgatgtgtttctttgaaaccwactctagtgggggacattttagttggtgatggatacaggacctggcatggactcccagtgcaattcctacttctttgttccatgtaatatttgtcaaaacagtggcgatgaatgacttttctttttttgcagcatgaaggatggctgcattcagcatgcacgtacacagataaaagaagttgaatggcttcaaaagctaagtgagtcagtctgacaaaatcacattggcaaacctggagcgttgtatgcacaggtgggagttgagagatctatctg

SEQ ID NO: 383 - DNA, 600 bp, Chicken  19866894084278_2
atttattttcctgatttgtatagtgctagtttgtagcttgtacagaacctaatatattccatacatttgaattgccttttttagttttttttcttcctgtatcctgtgttttcaagttgctttatatgcattttgagactggaggcacaagaactgcacataatgggaatgaaaacccacacagtggcataatgatggcttctgttttctcccacccccttacagctgtgaatgatgaccaaggtattaatggcaattacctcttagtatagttaragctgatgtgtttctttgaaaccwactctagtgggggacattttagttggtgatggatacaggacctggcatggactcccagtgcaattcctacttctttgttccatgtaatatttgtcaaaacagtggcgatgaatgacttttctttttttgcagcatgaaggatggctgcattcagcatgcacgtacacagataaaagaagttgaatggcttcaaaagctaagtgagtcagtctgacaaaatcacattggcaaacctggagcgttgtatgcacaggtgggagttgagagatctatctgttcatgggagaaaaggagtttggt

SEQ ID NO: 384 - DNA, 600 bp, Chicken  19866894084282_1
ttcagtttgaccaaggacagtctcagcagctgttgcccactttgcagtgactccggagtatttataggctccttttgcaaagcctctctccaaaattctggtgctgccagcctacatcagcaggaggagcatctcctgcacactgaacctgcaacagcccatggaaggaatgagttatgttttccaaagcagcacttgtcacacacgggtgcagaatggatgctaatgtttcagtacacagagatcaaagaagatcaggaatcactgctgagagacaaagtatttttatgaatcaagaayagtggagaagagaaaaagcaaagtgtagagtgaaatggtgagactttttcctagaaaacagcgcagtgccggcatgscccacgtccctgctctgccttggtggtgccattttatttatcaacgctttagaggggatctgagcactgaggcagcaacatttgtacctgtaaggttgttcaggttarccrgacgcctatcgaactgyagggaattcatagacccaacctaggactgctaaaacccagccaagttttctctccccacaacagtgatggtgtgggaccccggctcctgtcctcg

SEQ ID NO: 385 - DNA, 600 bp, Chicken  19866894084282_2
caaagcctctctccaaaattctggtgctgccagcctacatcagcaggaggagcatctcctgcacactgaacctgcaacagcccatggaaggaatgagttatgttttccaaagcagcacttgtcacacacgggtgcagaatggatgctaatgtttcagtacacagagatcaaagaagatcaggaatcactgctgagagacaaagtatttttatgaatcaagaayagtggagaagagaaaaagcaaagtgtagagtgaaatggtgagactttttcctagaaaacagcgcagtgccggcatgscccacgtccctgctctgccttggtggtgccattttatttatcaacgctttagaggggatctgagcactgaggcagcaacatttgtacctgtaaggttgttcaggttarccrgacgcctatcgaactgyagggaattcatagacccaacctaggactgctaaaacccagccaagttttctctccccacaacagtgatggtgtgggaccccggctcctgtcctcgtcctttctctcttttgctgaaatggaggaagaagaagaagagcgtggctgagtttggctctgagccatgcatgtttc

SEQ ID NO: 386 - DNA, 600 bp, Chicken  19866894084282_3
aaagcagcacttgtcacacacgggtgcagaatggatgctaatgtttcagtacacagagatcaaagaagatcaggaatcactgctgagagacaaagtatttttatgaatcaagaayagtggagaagagaaaaagcaaagtgtagagtgaaatggtgagactttttcctagaaaacagcgcagtgccggcatgscccacgtccctgctctgccttggtggtgccattttatttatcaacgctttagaggggatctgagcactgaggcagcaacatttgtacctgtaaggttgttcaggttarccrgacgcctatcgaactgyagggaattcatagacccaacctaggactgctaaaacccagccaagttttctctccccacaacagtgatggtgtgggaccccggctcctgtcctcgtcctttctctcttttgctgaaatggaggaagaagaagaagagcgtggctgagtttggctctgagccatgcatgtttccagcgctcttcaattaccaactaactagtgccagttgtaagcattaggagatgaaaatcttcggttttttctgtcattggtatgactcactgcgacgaggctggagga

SEQ ID NO: 387 - DNA, 600 bp, Chicken  19866894084282_4
gcagcacttgtcacacacgggtgcagaatggatgctaatgtttcagtacacagagatcaaagaagatcaggaatcactgctgagagacaaagtatttttatgaatcaagaayagtggagaagagaaaaagcaaagtgtagagtgaaatggtgagactttttcctagaaaacagcgcagtgccggcatgscccacgtccctgctctgccttggtggtgccattttatttatcaacgctttagaggggatctgagcactgaggcagcaacatttgtacctgtaaggttgttcaggttarccrgacgcctatcgaactgyagggaattcatagacccaacctaggactgctaaaacccagccaagttttctctccccacaacagtgatggtgtgggaccccggctcctgtcctcgtcctttctctcttttgctgaaatggaggaagaagaagaagagcgtggctgagtttggctctgagccatgcatgtttccagcgctcttcaattaccaactaactagtgccagttgtaagcattaggagatgaaaatcttcggttttttctgtcattggtatgactcactgcgacgaggctggaggatgc

SEQ ID NO: 388 - DNA, 600 bp, Chicken  19866894084282_5
cgggtgcagaatggatgctaatgtttcagtacacagagatcaaagaagatcaggaatcactgctgagagacaaagtatttttatgaatcaagaayagtggagaagagaaaaagcaaagtgtagagtgaaatggtgagactttttcctagaaaacagcgcagtgccggcatgscccacgtccctgctctgccttggtggtgccattttatttatcaacgctttagaggggatctgagcactgaggcagcaacatttgtacctgtaaggttgttcaggttarccrgacgcctatcgaactgyagggaattcatagacccaacctaggactgctaaaacccagccaagttttctctccccacaacagtgatggtgtgggaccccggctcctgtcctcgtcctttctctcttttgctgaaatggaggaagaagaagaagagcgtggctgagtttggctctgagccatgcatgtttccagcgctcttcaattaccaactaactagtgccagttgtaagcattaggagatgaaaatcttcggttttttctgtcattggtatgactcactgcgacgaggctggaggatgctgagtaagaagggcttc

SEQ ID NO: 389 - DNA, 600 bp, Chicken  19866894084296_1
tacatttttatgagtgcaacacacaggctctaattcattgctggcaaaaatgcataatcaatggtagtggctatactgaaaaacaatgttttgtagctgagaatttgctctattaaatagtggcattgtatgctttgtatctgttgtagtttctattgaaataaataagaggcattacttctggagcaacctatgtgcatattagatacatacaatctgcttattagactatctaagcacctttttaaaaaagacagtatttgagattttcttctaaatcttaacagtagtaaggtctaygaaaataccttaggttagcatggaatctctcttcattctgatgctttgcttactagatccttcaggctttagatactacagactagccagtactcctgatgctctgcagacactcccaaaagactgaaaaaatccaaaccatttttatgcctcaaaattggtttgtatcagggaggaagtatagacaactgcagtttgaaaggacatttttaataaaaaagaagttcccaggacacaaaggttttgacatgattctgacagcaaacaacatgtaccagccagtcactacttctagatatc

SEQ ID NO: 390 - DNA, 522 bp, Chicken  19866894084296_2
ataccttaggttagcatggaatctctcttcattctgatgctttgcttactagatccttcaggctttagatactacagactagccagtactcctgatgctctgcagacactcccaaaagactgaaaaaatccaaaccatttttatgcctcaaaattggtttgtatcagggaggaagtatagacaactgcagtttgaaaggacatttttaataaaaaagaagttcccaggacacaaaggttttgacatgattctgacagcaaacaacatgtaccagccagtcactacttctagatatccttwaaaatcacttatttggagaaaagaggaatgcttcagaattctcccttttgaggactattacgagttaaagaataacagctgtgaaaataacagcattccattccattccattccattccattccattccattccattccattccattccattccattccattccctttttctgtatagctttcccatcccaaatttgcaattgatttcaaaattcaacacat

SEQ ID NO: 391 - DNA, 600 bp, Chicken  19866894084301_1
tgttcctcagtgtggggttgtttcccctgcaacagctgatggctgcaccgatgcgccggcactgctctgggagggttctgccctcagccctgccaggttaggggaacaagcagggattgtaccaggagatgcagtttgcttgtttttctaattattattattttgcaaacagcaaccgttccttttatttgtgtgtatgtgtgcgtgtgtattaaatagaatgaatgttagtcctggcagaagacgctctaaaaactaaaagctgttgcctgtcgcagccctggcgaggatgtacccatmagctgcaggcagtggctcctggggggactccggggctttgccaggggatggggctcattagagccatctctggcacatgggggaggaccggagtcacatctcatgtggattactgaaggcttgggaataaattgggggtgtcagacagagagctgcagctggagagctcagggcatcctgctgaggagggcagaggggctgcagggggatgcaccggcccccagtgctgcagatcactgagcactgcagggtttgcctgcagccccacaactaaccctgtccagggtgatgcctgttccc

SEQ ID NO: 392 - DNA, 600 bp, Chicken  19866894084302_1
ctgtgttgattacagttgagagaaataaaaccgggccctgacatttataaaacactatgagactaaaggaaaacaacatgaaaggagccacaaccctgtggttaagaagctgatcttggacttgggaaatacagtttctactcagaggtttgccactagtttcacatatgagaaaaagaagaaaaaggaaagaacaaagagaggagtagaccttaatcttaggtctggcttgcaagaggatgctgaaaagtatgaatttgctccaattgcatgcagctagtgcaaatgcctcttaatttycattgaaaccccaacacaaaatgggcyaaactgtatcagagggaaktgtgctcactaaatggttaataactctaattcagaaaaaaaaaagatttaaaaggctgtgacagctccagctttagaaatcacacctggcttgggattccccttcccttaaggaaggcagctgccggttgagtgggtacagtgggagcagcctggctcaggtcttagctgcacaaaaccaggcagtgaggaagggggatacatccccttgtgccagctccactgctccgtggtggaggtgagacaatccacacc

SEQ ID NO: 393 - DNA, 600 bp, Chicken  19866894084302_2
aaaccgggccctgacatttataaaacactatgagactaaaggaaaacaacatgaaaggagccacaaccctgtggttaagaagctgatcttggacttgggaaatacagtttctactcagaggtttgccactagtttcacatatgagaaaaagaagaaaaaggaaagaacaaagagaggagtagaccttaatcttaggtctggcttgcaagaggatgctgaaaagtatgaatttgctccaattgcatgcagctagtgcaaatgcctcttaatttycattgaaaccccaacacaaaatgggcyaaactgtatcagagggaaktgtgctcactaaatggttaataactctaattcagaaaaaaaaaagatttaaaaggctgtgacagctccagctttagaaatcacacctggcttgggattccccttcccttaaggaaggcagctgccggttgagtgggtacagtgggagcagcctggctcaggtcttagctgcacaaaaccaggcagtgaggaagggggatacatccccttgtgccagctccactgctccgtggtggaggtgagacaatccacacccctggaaaaaggttcgtatggaccaat

SEQ ID NO: 394 - DNA, 600 bp, Chicken  19866894084302_3
ataaaacactatgagactaaaggaaaacaacatgaaaggagccacaaccctgtggttaagaagctgatcttggacttgggaaatacagtttctactcagaggtttgccactagtttcacatatgagaaaaagaagaaaaaggaaagaacaaagagaggagtagaccttaatcttaggtctggcttgcaagaggatgctgaaaagtatgaatttgctccaattgcatgcagctagtgcaaatgcctcttaatttycattgaaaccccaacacaaaatgggcyaaactgtatcagagggaaktgtgctcactaaatggttaataactctaattcagaaaaaaaaaagatttaaaaggctgtgacagctccagctttagaaatcacacctggcttgggattccccttcccttaaggaaggcagctgccggttgagtgggtacagtgggagcagcctggctcaggtcttagctgcacaaaaccaggcagtgaggaagggggatacatccccttgtgccagctccactgctccgtggtggaggtgagacaatccacacccctggaaaaaggttcgtatggaccaatacaccagaaactaaagaaa

SEQ ID NO: 395 - DNA, 600 bp, Chicken  19866894084302_4
gctccagctttagaaatcacacctggcttgggattccccttcccttaaggaaggcagctgccggttgagtgggtacagtgggagcagcctggctcaggtcttagctgcacaaaaccaggcagtgaggaagggggatacatccccttgtgccagctccactgctccgtggtggaggtgagacaatccacacccctggaaaaaggttcgtatggaccaatacaccagaaactaaagaaatgcatgtgttgtttccacacagaaactgcacttcaattatccatgtgtaaaaacacagacagkgcttcaaaggagtgttttattgctaagcaaacactagtcaggttttcagctgctactgacaccaggccaaacacatccctcagcaaatatatgcttacatccccacgtgtatgttagacctatacttaacagggaggaaaagcctgatagctgttccctgccacacacactgcacattgtcatggcaagccacactgcagcactacagtccacatctgaagaagcatcataacatttagccataagcatgtgggaagacagttgcagcagaagcrtccgtcatgctgaatgcaccagagg

SEQ ID NO: 396 - DNA, 600 bp, Chicken  19866894084302_5
atccatgtgtaaaaacacagacagkgcttcaaaggagtgttttattgctaagcaaacactagtcaggttttcagctgctactgacaccaggccaaacacatccctcagcaaatatatgcttacatccccacgtgtatgttagacctatacttaacagggaggaaaagcctgatagctgttccctgccacacacactgcacattgtcatggcaagccacactgcagcactacagtccacatctgaagaagcatcataacatttagccataagcatgtgggaagacagttgcagcagaagcrtccgtcatgctgaatgcaccagaggacattaaacctgcatgaattttgtgtgttacttacaaatactgaacgctcyttttacagactttgaccctgacaactgaatctatgatgaatgttttaaataayatcccatttaatgctctcacagacatrggactccatcatttctcattcatataatgaacactgaagagatgtgcttatattaagaggtgttcagaagcctcagcattgcctaagaatactactttgctccttagaagtaacatgaaccagccataacaggtggccaggtac

SEQ ID NO: 397 - DNA, 600 bp, Chicken  19866894084302_6
gctactgacaccaggccaaacacatccctcagcaaatatatgcttacatccccacgtgtatgttagacctatacttaacagggaggaaaagcctgatagctgttccctgccacacacactgcacattgtcatggcaagccacactgcagcactacagtccacatctgaagaagcatcataacatttagccataagcatgtgggaagacagttgcagcagaagcrtccgtcatgctgaatgcaccagaggacattaaacctgcatgaattttgtgtgttacttacaaatactgaacgctcyttttacagactttgaccctgacaactgaatctatgatgaatgttttaaataayatcccatttaatgctctcacagacatrggactccatcatttctcattcatataatgaacactgaagagatgtgcttatattaagaggtgttcagaagcctcagcattgcctaagaatactactttgctccttagaagtaacatgaaccagccataacaggtggccaggtactgtactcaccaagcctgaagaccacaatggagccctgaatttgttgcatccttctttcctttacgttccttcatga

SEQ ID NO: 398 - DNA, 600 bp, Chicken  19866894084302_7
acgtgtatgttagacctatacttaacagggaggaaaagcctgatagctgttccctgccacacacactgcacattgtcatggcaagccacactgcagcactacagtccacatctgaagaagcatcataacatttagccataagcatgtgggaagacagttgcagcagaagcrtccgtcatgctgaatgcaccagaggacattaaacctgcatgaattttgtgtgttacttacaaatactgaacgctcyttttacagactttgaccctgacaactgaatctatgatgaatgttttaaataayatcccatttaatgctctcacagacatrggactccatcatttctcattcatataatgaacactgaagagatgtgcttatattaagaggtgttcagaagcctcagcattgcctaagaatactactttgctccttagaagtaacatgaaccagccataacaggtggccaggtactgtactcaccaagcctgaagaccacaatggagccctgaatttgttgcatccttctttcctttacgttccttcatgaacttctcatttgccacgggataataaataacatactgtcatggaccaacagtt

SEQ ID NO: 399 - DNA, 600 bp, Chicken  19866894084302_8
gggaggaaaagcctgatagctgttccctgccacacacactgcacattgtcatggcaagccacactgcagcactacagtccacatctgaagaagcatcataacatttagccataagcatgtgggaagacagttgcagcagaagcrtccgtcatgctgaatgcaccagaggacattaaacctgcatgaattttgtgtgttacttacaaatactgaacgctcyttttacagactttgaccctgacaactgaatctatgatgaatgttttaaataayatcccatttaatgctctcacagacatrggactccatcatttctcattcatataatgaacactgaagagatgtgcttatattaagaggtgttcagaagcctcagcattgcctaagaatactactttgctccttagaagtaacatgaaccagccataacaggtggccaggtactgtactcaccaagcctgaagaccacaatggagccctgaatttgttgcatccttctttcctttacgttccttcatgaacttctcatttgccacgggataataaataacatactgtcatggaccaacagttcagtgcctggatgctttaaagaactgt

SEQ ID NO: 400 - DNA, 600 bp, Chicken  19866894084304_1
agagcatttgcttggggttttttttgggttgtttccacctaaagggtcctttagccttgaaaattatcgtggtgttcaaacagtagagctcaagttgttaaaaaaagccaaaaactaaacaccctgaaattcagcctcttctgaggcatcagtcagaatgaagatgcacagagtcctgaggatgcaatggcactgtgcacctaagccaaggggaacttgcagcagtctggggagtgtgctcctgtccttagcatgccaggagcaagctgtgtccttgtctgcctctacctgggcaccacrcgtatccaatgccccatcagacacactactctatacagatggcaaaccatgtaagcattttggggggagaaaggccagagcaaacatttcacatctgtcctgcgacttttaacacctctcagattacatttaacaaattccattcctactgatcggcatattaaattgcctcaaaacagattaaaattatatttcaaaagagctgagtaaactaaaccaggaagctctaaagtgggcactacagccaggtccaagagaaacattcccaaacacatgggaaaagcatccaaaacagaggga

SEQ ID NO: 401 - DNA, 599 bp, Chicken  19866894084309_1
  misc_feature (1)..(38): n is any nucleotide
nnnnnnnnnnnnnnnnnnnnnnnnnnnnnnnnnnnnnngcaggcagctggatttccttggctgccgctggggcctagcaggtcttttcccagcctaggcaagcgtggttgagctgtggagcagggggcacacgaggagcggtgcaggtgctgggggtcgattcggcctcctcacatccccctgtggtgctgtggtgctgggaagtggttagggccgtgtttctgccagcctagtcagtgcagcgcagcccaggctgggccacccccttgtagttcatctcccctcagggcacaccgctgkgctctgagcggctgctcccttacatgggctctctgcgggaggatcttgaactgcactgagccacgctcccacagacccctcacaaacgctctgaggcacagtctgattttaagtgtctcgaaacgctgctgctgccggatcccttgggcaggaaatgagccgtgctcgctgcgcacagctggcctgcagggagcctgagcgtgcgacccaccttccgctgcttgtctgtgcgatcgtgtcgrgctggaatgcagaggctgcagcaaccctgcagagactgcactgtgcgaagtgctgta

SEQ ID NO: 402 - DNA, 600 bp, Chicken  19866894084309_2
cgcagcccaggctgggccacccccttgtagttcatctcccctcagggcacaccgctgkgctctgagcggctgctcccttacatgggctctctgcgggaggatcttgaactgcactgagccacgctcccacagacccctcacaaacgctctgaggcacagtctgattttaagtgtctcgaaacgctgctgctgccggatcccttgggcaggaaatgagccgtgctcgctgcgcacagctggcctgcagggagcctgagcgtgcgacccaccttccgctgcttgtctgtgcgatcgtgtcgrgctggaatgcagaggctgcagcaaccctgcagagactgcactgtgcgaagtgctgtacacatgccctgcatccacaggcagctggcgctgagggggatgcagatcagatggatttgggccgacgtgaaagtcaaggacagcaaggctgcactgcatatgagagctttctgctttaaaaagggggatcagccattgcggttcttcttccagtgtaaacaggccttttatttttctctcatgaggaaatggaaactaaaaaggaaacaaaagctgtatcttctttcagctaatgtgaggatg

SEQ ID NO: 403 - DNA, 599 bp, Chicken  19866894084314_1
  misc_feature (1)..(196): n is any nucleotide
nnnnnnnnnnnnnnnnnnnnnnnnnnnnnnnnnnnnnnnnnnnnnnnnnnnnnnnnnnnnnnnnnnnnnnnnnnnnnnnnnnnnnnnnnnnnnnnnnnnnnnnnnnnnnnnnnnnnnnnnnnnnnnnnnnnnnnnnnnnnnnnnnnnnnnnnnnnnnnnnnnnnnnnnnnnnnnnnnnnnnnnnnnnnnnnnnnnnaagatacagtttcccggctatctattcaaatatgttgcaaaactaataatggctttgcctgcccatagaaattgtgactccagcatggagtcaatcgctgtgtraaagggatcagaaatagataaaatgcagtaagttccttgaatcagggccataccaatgttcacaaaggcaaatgttaccaagttcctgttgatacacgtgtcttcgtaggaagaatttccagtcttctcatacattattaaggaaaagacttctggttttacaagcttggtttctacacttgtgtcagctttgtatacattgcagtaagtttcaactgtttgaggtgcactctcctctaaaatrccaacattttagaaaccagattcttaacctgacttgtaaacacctaaaaggaagc

SEQ ID NO: 404 - DNA, 600 bp, Chicken  19866894084314_2
atggctttgcctgcccatagaaattgtgactccagcatggagtcaatcgctgtgtraaagggatcagaaatagataaaatgcagtaagttccttgaatcagggccataccaatgttcacaaaggcaaatgttaccaagttcctgttgatacacgtgtcttcgtaggaagaatttccagtcttctcatacattattaaggaaaagacttctggttttacaagcttggtttctacacttgtgtcagctttgtatacattgcagtaagtttcaactgtttgaggtgcactctcctctaaaatrccaacattttagaaaccagattcttaacctgacttgtaaacacctaaaaggaagctcctcataacatacagtaagcactgagcaatgcaggaagctgcctgcaagatttgcatcttgacacatgcakttggagcaagtttcaggggtgacttgtaggggctttttggacaaacttcatcttaggttatttacaggttctaagtaatcttgaatttggctaatttaccatgcccttccacctcagagtgtttgtattctaacttcttcactaccttttacaataaattgtgagaaaaagag

SEQ ID NO: 405 - DNA, 600 bp, Chicken  19866894084314_3
atgttaccaagttcctgttgatacacgtgtcttcgtaggaagaatttccagtcttctcatacattattaaggaaaagacttctggttttacaagcttggtttctacacttgtgtcagctttgtatacattgcagtaagtttcaactgtttgaggtgcactctcctctaaaatrccaacattttagaaaccagattcttaacctgacttgtaaacacctaaaaggaagctcctcataacatacagtaagcactgagcaatgcaggaagctgcctgcaagatttgcatcttgacacatgcakttggagcaagtttcaggggtgacttgtaggggctttttggacaaacttcatcttaggttatttacaggttctaagtaatcttgaatttggctaatttaccatgcccttccacctcagagtgtttgtattctaacttcttcactaccttttacaataaattgtgagaaaaagagggaattacatcagtgagcactgtggcttcacactccagatacactgttttgttgtttcatgtttgttttaacagcacagtattaaaagattgccaaggcatacaagacaaggcacttagaatgtgaa

SEQ ID NO: 406 - DNA, 600 bp, Chicken  19866894084320_1
gaaacactggcctttcttattagttttggttaggcagttccctcctccacatgctggattttaagacttttcattcctggatgctgaacaactcgttttaattgctttaattttcttgagaaactaaacttctgcatggaccccaagcacctagtgtggggtaatagactcctgcaggcagcaggatgcttaactgtcaggcacggcaaatactcacctcccaagcctctttcagagatcccagccaaacctttcttccttttttgtgttatacctactccaattaccccgccatctcaytgaaaggattgtttgactataagctccgtttctctactttaagcagcagtgtttgactccagcacaggcagacgccatgaaaaatcatttctgtcagatgcagagatgtggcgacgagagatctccttagcagctggcaccagcgtgggagccgctgggatgaaaggccctgccgccctcctgcagccagtggctgtggtcctgtcctctccgtgggaagctcctcttcagggcttcttgagggagcaggtagggctctgcagctttgtttagtcagccccaggacaaaaaccagcgtac

SEQ ID NO: 407 - DNA, 600 bp, Chicken  19866894084320_2
ctcctcttcagggcttcttgagggagcaggtagggctctgcagctttgtttagtcagccccaggacaaaaaccagcgtacttcgttctgccctgatgacagctcagtctgcttccgccgaagtcagtggtggaattccaacttctttttcaagcgagatgcatgtttagctctttgaatattttacttatatgccaaagacattccctagaaacttcaagctcctttttgatcttcttatttcaatggggagtaagaaagccagagggtaggcatttaagtcagcattacattagtcagycttcatgctgggtgctaaagttatcatgaccaactctggggagtcatcacccttctgaccgtcagagttcacactgttttttctctctcatcacagttacgagctttcctttttcccctaccagcaggatagcacatacctctcaaggcagccatatgccaggtgataagcacagaggctgtcagtgggacctgtgcaggaagcagtgcaggagcatttgctggccacagtttaccccgctgcttgccctggtgctctctgcagcagtcgtgtggcctctggcaggccaggctccagaaa

SEQ ID NO: 408 - DNA, 600 bp, Chicken  19866894084324_1
tggggctgactgtggggacgtcaccgcggctggggtccctgcggagaggagcgcagccccgtgttacacaggggtctttaggggggaatttcacccatttgctgtacggcacagcagctttggagaggcggagatctgatcaaaccaaatgtcacaccacagcatgggtgtgcacgggggcaacgtgtatgcacacgggtgctggcacacgtgggacacgtccgctgtcagtgcccagggggccatccagatggcggcgcctccttgggagcactttagccccattagcagccctgaccycccccagcaggcagcagggacacctgagccccccagtaacccccctctatgttcttcctgggggctgggggggagggccaggggggccgtgctgggtgctcaggcacagctgctcccccccctgcccgcagcccccccagcagccccaggcacagcatgcccccgctgcccgcctgattgcagctcacccactggtaacagcagccgccatcaggtttattttcagcagggaagtgtgagtcatttcaggattgggaaaaaagaaaacagatatgtttgtttgtttgcttttttccctta

SEQ ID NO: 409 - DNA, 600 bp, Chicken  19866894084329_1
ccactccataccacttacatctgagaaacacattccactaggtcaggacaaaagaaagaggaaaaaggcaaaacaagctcaaaagataccggtagttccaagatacatgctattgttcttcctaattattcttctagttgcaaacatagttacttgcaaatgttccattccctggagtacaaaaataagcaagtctgtttcaaataaaagcaaaaaaaaaaaagaacagctatatatgaattacactttcctcttgtattccatctgcacttactggcagcatttccataagcacctttrttttaacttctctaattttccattgggagaacaatacgactgaatgggcctgaatacattagtgggattggagagaattcttcctgagcagccacatagctcctctgaaagtgaagcagacagggagagatgctgaggaagagataagtacagtgctgctctacaggttgagacaatagtagcgtgatcgaattttaatacatttcaagtttctgtgcaggctcaactctgtcatgctgagggaacgggaatatccacatgtctctcagaagtgtctcaagctctttgtttttcacrttg

SEQ ID NO: 410 - DNA, 600 bp, Chicken  19866894084329_2
ttrttttaacttctctaattttccattgggagaacaatacgactgaatgggcctgaatacattagtgggattggagagaattcttcctgagcagccacatagctcctctgaaagtgaagcagacagggagagatgctgaggaagagataagtacagtgctgctctacaggttgagacaatagtagcgtgatcgaattttaatacatttcaagtttctgtgcaggctcaactctgtcatgctgagggaacgggaatatccacatgtctctcagaagtgtctcaagctctttgtttttcacrttgtccttattttctacagcttgccagaaggacagaaaagacatttcaycaagaagcaaattgcaattygggccaagaatggcagttttggaaatgaaaagattagcctacgagagacaacatccattcagcctggaaacatatcagtagacagtttgaggtacacttgggttttgaatggataggctgcatgcagtggtctgagtttccataatcctttcttgaaatcacttatgctgtcgaaatccggatgtaagagatttgagggcttctgtcactggtcatgcacttatagaaaaa

SEQ ID NO: 411 - DNA, 600 bp, Chicken  19866894084329_3
ggcctgaatacattagtgggattggagagaattcttcctgagcagccacatagctcctctgaaagtgaagcagacagggagagatgctgaggaagagataagtacagtgctgctctacaggttgagacaatagtagcgtgatcgaattttaatacatttcaagtttctgtgcaggctcaactctgtcatgctgagggaacgggaatatccacatgtctctcagaagtgtctcaagctctttgtttttcacrttgtccttattttctacagcttgccagaaggacagaaaagacatttcaycaagaagcaaattgcaattygggccaagaatggcagttttggaaatgaaaagattagcctacgagagacaacatccattcagcctggaaacatatcagtagacagtttgaggtacacttgggttttgaatggataggctgcatgcagtggtctgagtttccataatcctttcttgaaatcacttatgctgtcgaaatccggatgtaagagatttgagggcttctgtcactggtcatgcacttatagaaaaataaggtgctttcccttgttacttaaagaaaagcatcattaagttgctct

SEQ ID NO: 412 - DNA, 600 bp, Chicken  19866894084329_4
attggagagaattcttcctgagcagccacatagctcctctgaaagtgaagcagacagggagagatgctgaggaagagataagtacagtgctgctctacaggttgagacaatagtagcgtgatcgaattttaatacatttcaagtttctgtgcaggctcaactctgtcatgctgagggaacgggaatatccacatgtctctcagaagtgtctcaagctctttgtttttcacrttgtccttattttctacagcttgccagaaggacagaaaagacatttcaycaagaagcaaattgcaattygggccaagaatggcagttttggaaatgaaaagattagcctacgagagacaacatccattcagcctggaaacatatcagtagacagtttgaggtacacttgggttttgaatggataggctgcatgcagtggtctgagtttccataatcctttcttgaaatcacttatgctgtcgaaatccggatgtaagagatttgagggcttctgtcactggtcatgcacttatagaaaaataaggtgctttcccttgttacttaaagaaaagcatcattaagttgctctaacatcttgaagaccatact

SEQ ID NO: 413 - DNA, 600 bp, Chicken  19866894084329_5
ctctaacatcttgaagaccatactgcagttcttgtgctctctgaattaatggccagatgaacaagggcaattttcagaagaaacgaggatcatgcaccataagatgcactttatttctttgacaagcatagtttatttttaattattccttttgctttacagtacattaataaatgctctggagtatacttagtgtaagtaatgaaatcttcgtaatacaaggcttcactacaagcttctgatgcttactgacaaaaaggcagagaccttgggggagattttgttcatgaaagatacttycacagaaattagcaacccataaattaatgaggctctcccagaaggggaggtgctgctcagctagtatgaactctctgaatctgggaactctttccaagctaggacacagattgattttaatgaccgaagcaaaatccccacacctttcctacagggactgcagcacagcaaacgtactgcagacaaggagaggctccagagctgcccagctccaggataggggttatcagaacaccatggtggcttctaggacagaaagccctgaaagcaggacaccagacccccacagccccttgtgag

SEQ ID NO: 414 - DNA, 600 bp, Chicken  19866894084329_6
tttgatgcacctccatgggagtaggattcccctgcagctcagggagcacctttttgcaacagcctgcttccagcttcacacaagaactaacctatgtaagctgagtcaggcttgtatttcaggctgctctgaaagtaatgctttctattttgttgtatcacaactgccacaacttttgtctgataacgacatcagagtcagacactgttgggaaggtagtagaggttgaaccttcccactaatattccatcacatcttgttgctgtgtaacacagcagcaaaggggcagtctgacagaayggtgtctgatacagaagtgttgatgaagcaaagaagtgtcactgagttcctacttgtggaaaaaaaaattgcatcctttgacattctttgatgcttgctcaacatttacagaaaccaaagagtagatgcgagcacagtgaggcagtgggagatgaatgaggcagattcaacagcagcaacagcaatgtgaaagtgcatggccattcagaacatggcttgtcagctgtcacatcagaaattgaagagcatctcaatctgctcatctgcacaagtcagctcatggtggtgactacactgaaa

SEQ ID NO: 415 - DNA, 600 bp, Chicken  19866894084338_1
tcagcaacttctccaattctataaacacaagggatacaaatatgggaatactgaagaaatgcagttccatagtttcataagatgagcaaatggtttggtcttcccgtctggtatattctaatctccttcatgctgctctttttttgtttgtttttgatagtatgaacatgagttcgtgctaatacattcttttcaaatatatttcacaccattgtgtctgacatccttttgattatggccttctgtgcaatctctgtgggcaagaatgggaaggaccatctggagagtattctcattccyatcatgtgcttgggagaacgaaaatagaggcaggctgtgacttcctttgcatcatgtgtgtaaaaactcagaatcgaaccttcttacccccactatttgcctacagctttacatcaagaaagatcagaaaagtttttggtggctaaaaaatcggcaaagtggtgtttatacagaacagaatgagttttgaagaagggtggaaaatatttttgctcatagcatttaaaattctggtttgtaacatttgtatttgattaacttcaccctcaattatagctctggtgaagcttgcaatccata

SEQ ID NO: 416 - DNA, 600 bp, Chicken  19866894084341_1
ccgtaggcactgggtgctatcagaatctgagcaggctcttttgttgctgggtatcttctgtgatcatcatttcttattaagagctgaatgctaaatacattaatggagaacctatacctgaggacatccaatctcccagaatctacaaatcaaacttctctccatgcctccccggcaccaaagctgccattctctttttgcaaagagacttggggaatattcacaaagacatatagaatcacagaatggcttgggttggaagggaccccaaagatcaacaagttccaacccccttgtcayagatagggccaccagcctccagatctggtactaggccccagtctgcccagggctcccaaacctgcctccatgggagctggacactggaaaagatggagccctctattttcaggaatcctacctcatagtttctagcttcaagacttactggatgtctttcacctgaggggccagtggtgtgagagctctgctaggaaggtgagacaaaaggcaggatccaaaacaaggtgactggaacaataataacaataaaaaactggaacaacaacaagacttacacacctcgagtttatcatcctt

SEQ ID NO: 417 - DNA, 600 bp, Chicken  19866894084343_1
aattcctcatgagtctgaatgtgtacaaggctgttggaccatgtgatatacatcccagagtcctgaagaaactgggtgatgaagaaaggccgagggagtagagttggtttagcttggagaagaaaaggctgcagtgagacctcattgcaccttccagtgtactaagagagcttataatcaggaagactgactttttctgtgatctgatagtgacaggacaaggaagaatgaattgcttgaaactaatagagtggaaatttagattagacattaataagaatttttttctcagggggtggygaggcagtggcgcaggactcccagagaagttgtggatttcccatccctggaggcactcaagaccaggttggatggagactggggcaatctgatctggtgggtggcaaccccgcacattggagctcaatgaccttaaggtctccttcaacccaagccattttatgaatctatgattatttaatactacaattattttctccagctaaggggatttttgcaagatatgtgaaacatcatacatatttgagtagttggactttcaataaaaaatgaaagtttttagactttaagataattctt

SEQ ID NO: 418 - DNA, 599 bp, Chicken  19866894084344_1
  misc_feature (1)..(254): n is any nucleotide
nnnnnnnnnnnnnnnnnnnnnnnnnnnnnnnnnnnnnnnnnnnnnnnnnnnnnnnnnnnnnnnnnnnnnnnnnnnnnnnnnnnnnnnnnnnnnnnnnnnnnnnnnnnnnnnnnnnnnnnnnnnnnnnnnnnnnnnnnnnnnnnnnnnnnnnnnnnnnnnnnnnnnnnnnnnnnnnnnnnnnnnnnnnnnnnnnnnnnnnnnnnnnnnnnnnnnnnnnnnnnnnnnnnnnnnnnnnnnnnnnnnnnnnnnnnnnntgccccgtgtcccactgcagtgctgccagctgcaccctgtatgcargaagcacgcagtgcagatggcagcagcgctgcaaaccttcccacgccatccttagcaaagtggtgggcagacgggagctgcactgagctgtgcggggggcaccagtggtgcattagcagtggggctgggccaacctgcacctgatgatggttttcctcagccaaatcacccaggacactgatccaaaagtgtcagactttcattatgcccggctggtcagtgtgggtcattgcaaggagtgcagaaccatagaatcattaaggttggaaaagacctctatgatatcccatccccggagg

SEQ ID NO: 419 - DNA, 600 bp, Chicken  19866894084344_2
aaacagaaggctcaaacaaatccactgagttctggctaccaaccactgaacttgggctaccaccaccacaccacagccccacaggcacaactgtgggaccctcccgggagccctgggctcaagcaagtgaccaaccacacagctctcccacagcctccactgctggcctggagaacagtgagggtccgtactgctgaacgaaactcatggggatggcacagcgctgatcagacgcgttctacattaaataggcacagcaaaaaacgcacagtcatgaagcaaagatggaaaagccctacragcccattgtgtgcagctcatcaggagtgcccaccggacctcgagccccgcgtggccgcagagcgctggcagctcagcctcctgcaacaagccccagtcggactcccttggcaaatcgtccaaaataaacagcatctgttttcacagatggagaaaattaagacatactagcaacttagtttgaagttataaggccagacataaacaaatgagaggcaatctttccataagatggtggcttgattactgaggatagagacagatgagtaaatcaccttggggtgagataggctgtaactt

SEQ ID NO: 420 - DNA, 600 bp, Chicken  19866894084344_3
cgcgtggccgcagagcgctggcagctcagcctcctgcaacaagccccagtcggactcccttggcaaatcgtccaaaataaacagcatctgttttcacagatggagaaaattaagacatactagcaacttagtttgaagttataaggccagacataaacaaatgagaggcaatctttccataagatggtggcttgattactgaggatagagacagatgagtaaatcaccttggggtgagataggctgtaacttgctacgcatccatgggactgcaggaactgctcgtgtgaatcctcttarcctgaaggaaatggagctgaacgatactgcggaagggacctgcagggcaggagcacacacatgggcacttcctgcaaattagctgacactttgcaagttcacaccctcatttgcctaatggtaacttcctaatctgcctccatgactgtctggcatcctgggatttacagaactgtaaaaaataaaataagaaaagaaatgatgcagcatgcttggagctctctttgagaaactatcctttcagaagtcaactgaagagcattgaaatccagcacttcaaaggcttcaagcctattttat

SEQ ID NO: 421 - DNA, 479 bp, Chicken  19866894084350_1
ttcactccataagaagcttatcctctgcttgaaagcccattggcttttgcctggcccccagggagtaactgggatagcaggcacttgctggtggatctttgtgcccagcttgcaccaaaggaagaacgaggatctattccagaggctgaatggaacagacaggctcctgaagggagtagcattaataggttgagggatgtattgcatggagagctaacatgaatggtaaattggagttgtgggtgtgagtagacacggctcagccttgaagtgggacttccaaatgaggtcctcccttcytagtgtcttttgacagggctggcccatctctttcctcatctataggcaatttctcagccccggggttgctctggcccgctgtaattctccatcccagcagcccggtgttgattgtgtgctgagctgtaccctcctatttgctgagcgtttgccctcatgcttttccctttgccccgcgt

SEQ ID NO: 422 - DNA, 599 bp, Chicken  19866894084364_1
  misc_feature (1)..(141): n is any nucleotide
nnnnnnnnnnnnnnnnnnnnnnnnnnnnnnnnnnnnnnnnnnnnnnnnnnnnnnnnnnnnnnnnnnnnnnnnnnnnnnnnnnnnnnnnnnnnnnnnnnnnnnnnnnnnnnnnnnnnnnnnnnnnnnnnnnnnnnnnnnnnncaaaagcaaagctggggagtatgtgtgcgcgatttcaccaagccacaaatatgttcatgccaaatatcactcggtgtctcgctgctctaagctggtcttcaggcctcatcctaattgcctgggaggcgatcggagtatttaatttacttaaaaagtagyagagaagaggcttttagaattttgtatgtgtaacaaccgtaggactgacgccataagatccagagcatgtgtgaaaatagatggcgtgccactragagctctctgcgagcccggccatatattgttgtgcatcatgtgcgcccgtgaagaatttggggatgcagttttatgggcagaattggckgtgtgcggaacaaagtggcattgtaccggcagaggcgcgtgggagctgccatgccacatgcatgccgtccgtgcacggggcagggctggcagtgggagttttaaggaaacagata

SEQ ID NO: 423 - DNA, 599 bp, Chicken  19866894084364_2
  misc_feature (1)..(47): n is any nucleotide
nnnnnnnnnnnnnnnnnnnnnnnnnnnnnnnnnnnnnnnnnnnnnnncaaaagcaaagctggggagtatgtgtgcgcgatttcaccaagccacaaatatgttcatgccaaatatcactcggtgtctcgctgctctaagctggtcttcaggcctcatcctaattgcctgggaggcgatcggagtatttaatttacttaaaaagtagyagagaagaggcttttagaattttgtatgtgtaacaaccgtaggactgacgccataagatccagagcatgtgtgaaaatagatggcgtgccactragagctctctgcgagcccggccatatattgttgtgcatcatgtgcgcccgtgaagaatttggggatgcagttttatgggcagaattggckgtgtgcggaacaaagtggcattgtaccggcagaggcgcgtgggagctgccatgccacatgcatgccgtccgtgcacggggcagggctggcagtgggagttttaaggaaacagataaacagcaaacagaaagtgcccgacggcarcgtaaaaacaaggctcccagccctgctgcatggacacatgtcgcgaattacgtgcaagagctgct

SEQ ID NO: 424 - DNA, 600 bp, Chicken  19866894084364_3
cacaaatatgttcatgccaaatatcactcggtgtctcgctgctctaagctggtcttcaggcctcatcctaattgcctgggaggcgatcggagtatttaatttacttaaaaagtagyagagaagaggcttttagaattttgtatgtgtaacaaccgtaggactgacgccataagatccagagcatgtgtgaaaatagatggcgtgccactragagctctctgcgagcccggccatatattgttgtgcatcatgtgcgcccgtgaagaatttggggatgcagttttatgggcagaattggckgtgtgcggaacaaagtggcattgtaccggcagaggcgcgtgggagctgccatgccacatgcatgccgtccgtgcacggggcagggctggcagtgggagttttaaggaaacagataaacagcaaacagaaagtgcccgacggcarcgtaaaaacaaggctcccagccctgctgcatggacacatgtcgcgaattacgtgcaagagctgctctggctcttgtgtttcaagtgaggggaagcattccaygagatgttgcatgggaaaagctcgtgttggagatgggagcaagctgcctctggc

SEQ ID NO: 425 - DNA, 600 bp, Chicken  19866894084364_4
tgtaacaaccgtaggactgacgccataagatccagagcatgtgtgaaaatagatggcgtgccactragagctctctgcgagcccggccatatattgttgtgcatcatgtgcgcccgtgaagaatttggggatgcagttttatgggcagaattggckgtgtgcggaacaaagtggcattgtaccggcagaggcgcgtgggagctgccatgccacatgcatgccgtccgtgcacggggcagggctggcagtgggagttttaaggaaacagataaacagcaaacagaaagtgcccgacggcarcgtaaaaacaaggctcccagccctgctgcatggacacatgtcgcgaattacgtgcaagagctgctctggctcttgtgtttcaagtgaggggaagcattccaygagatgttgcatgggaaaagctcgtgttggagatgggagcaagctgcctctggcttgcttctgctttattgggttttgctcggcacggcagttacacacaccttggctgcacacagctaaaggagtgtgatctattttaaacctgctgctgaggtggtaaagaagagataagttgaaacctagctgctatctcacttg

SEQ ID NO: 426 - DNA, 569 bp, Chicken  19866894084364_5
atcatgtgcgcccgtgaagaatttggggatgcagttttatgggcagaattggckgtgtgcggaacaaagtggcattgtaccggcagaggcgcgtgggagctgccatgccacatgcatgccgtccgtgcacggggcagggctggcagtgggagttttaaggaaacagataaacagcaaacagaaagtgcccgacggcarcgtaaaaacaaggctcccagccctgctgcatggacacatgtcgcgaattacgtgcaagagctgctctggctcttgtgtttcaagtgaggggaagcattccaygagatgttgcatgggaaaagctcgtgttggagatgggagcaagctgcctctggcttgcttctgctttattgggttttgctcggcacggcagttacacacaccttggctgcacacagctaaaggagtgtgatctattttaaacctgctgctgaggtggtaaagaagagataagttgaaacctagctgctatctcacttgtgtgtgtgacagatatgtccagaagtgggtaaaattaaaagctgttttcataggctagtaacaaccctgga

SEQ ID NO: 427 - DNA, 600 bp, Chicken  19866894084366_1
agtgcctttgttttcaccgattcgtgtgaaggtctcagccagcactgccgtggcaggactgtgctaagttgcagtgacccctctgctcataacttggcagaggaacacgcaaagcactgcagttgctccttgtacacccacatggttcttatttatcgtgaatgaacactgacagagattactacataatttctaccaggggttgcgggcactagtacagtagctttaaagcagccaaaaatgaggatattgcttgcagccacatgggagctgacattcagctcttggattcaactgccraggacttctctggaataggaacgtgcagtaaaatcaaaggacatatgtgcataatattgcattgtgccatcaaaacctttgcctatctgtaaaactagtggcttataatagtaactgatgactggtttttgatccatgtcctagtgcctataaaacacagccttattgcaaaataatccactaaaggcttccagcaaacaaaagagcaaattgctataggccacagaaaaggtttgggaactgaaaaactaataggatttaaaagtaaataaattatatgcatacatacatacagagtca

SEQ ID NO: 428 - DNA, 445 bp, Chicken  19866894084368_1
agagataattaccagacattattgcgtactgataaggttcttttgagtttgatgttttccctgcatctgatattgaaagcagaagcaccagtttggtgtgagacgtgagtttggctcttctaacgctgccttcatcctgcaggagtgggtaggtgagcgatgtctgaagtctctctgtgaagacagtaatgacttgcaggatcctgtcttgagcagcacacaggcccagaggctgatgcagctcatctgttatccacaccgactgctggacaatgaggaaggagaaaatcctcagcggcygaagggctctgacagttgttaccatgggagctgagggcatgggttggggatgtagcttgaactgtggtaaatactcatatgaagtgtgtgtatgttacagaatctggatcagtggaccatgaggcagtcctcgctggagctgcag

SEQ ID NO: 429 - DNA, 599 bp, Chicken  19866894084371_1
  misc_feature (1)..(151): n is any nucleotide
nnnnnnnnnnnnnnnnnnnnnnnnnnnnnnnnnnnnnnnnnnnnnnnnnnnnnnnnnnnnnnnnnnnnnnnnnnnnnnnnnnnnnnnnnnnnnnnnnnnnnnnnnnnnnnnnnnnnnnnnnnnnnnnnnnnnnnnnnnnnnnnnnnnnnnntctgagtgcctcatcaagctctgacttagcctgtcaggactgttgtctgcttgagacattctcagatgaagcaattagctcaatgtccttatttccagtatcatctcgattttttccagctatacctctatttctgcaggtgacacctyaaaagagagtcacaacaccattaaaccacagagccgattagatccctgctgtttgagaatattttgcatcatggccgggcacggcatgatttaaatgaaattatggcagctccagcatcacatcatgttgggttttcatacagcttttttttttgtcttcctgtgtaattgaaattccccagcaattgcaatatacgtttctaacatgataggcattcttatctctaggtttctcctgaaaactttgtcaaaaggtaataactcatgatcctttcatgctattctgcagtttccctctt

SEQ ID NO: 430 - DNA, 394 bp, Chicken  19866894084371_2
ttgggttttcatacagcttttttttttgtcttcctgtgtaattgaaattccccagcaattgcaatatacgtttctaacatgataggcattcttatctctaggtttctcctgaaaactttgtcaaaaggtaataactcatgatcctttcatgctattctgcagtttccctcttctcatctcaaatcacagtctgattcagcagtcttctgtgaggtactttattactttgataatattttccaactgcttgatgggaaacagtaactcatctggttactcatctgaagtatccaaattacstaatctcaatctcatgtcagacatgagctttttatgaaaactgtctagccacttaaaattgcatatgcatggcaatgccttctcttaagggtat

SEQ ID NO: 431 - DNA, 600 bp, Chicken  19866894084388_1
cagctccattaaatgcagactcagattcctgattacagtgttttctgtacaaagcttaagcacaaacaaccacgactctgattacttcagtcctttttcacatgttggccttacaatcttgtgaggctggaattctgagggaagtgaaactgttcaagtctatgcacaatggggcagtcacgcaacacttctgtctgagatcatttgtctaataacaatccctgaggataatttgctttcaggtagtgtttttccctcacagatctcaagatactttgtaatgctttttcctattcttasttactgcctggatgttctatgctttttattataacttttgacattattacactttctttttcctaagttattttactagtgctttttactatcactgttaccaataggctaattttaaggctacttgagaatatagtcctcctttaccacaaaaggaaaggcactgaagtcagcaatactgatccttgtgtcttttagcagagttattaaccttttgaaaccctgactcatgacaaatgaatasagccaagaaatctctctctctatccagcactgccatgcatcagatgttgattccag

SEQ ID NO: 432 - DNA, 600 bp, Chicken  19866894084388_2
agtgtttttccctcacagatctcaagatactttgtaatgctttttcctattcttasttactgcctggatgttctatgctttttattataacttttgacattattacactttctttttcctaagttattttactagtgctttttactatcactgttaccaataggctaattttaaggctacttgagaatatagtcctcctttaccacaaaaggaaaggcactgaagtcagcaatactgatccttgtgtcttttagcagagttattaaccttttgaaaccctgactcatgacaaatgaatasagccaagaaatctctctctctatccagcactgccatgcatcagatgttgattccagtgtggtcagaaagtttacccttgcataaaaatataacactggaagcatataaatgcttctctgtgtagaggaactgtgagagaactgcagaaatttgttaataatcccaaattgttataggactaaatggcatagtgaagaagtttactgttaaagtgagggaggaactagttatgcacacttcttgcacttccctctgctctgtagattttgaactacgtaatttttatttgggacattcttt

SEQ ID NO: 433 - DNA, 600 bp, Chicken  19866894084388_3
gacgaagcattgctaaatgtaaagctaatgaaaacttatactgtaagaagcttttcttcattatcctctggcaccatgaagctagagttgcacagataatagcattttactttacatgtaaccatctgatacttagattgcaaggcagttagttaaaaactacaaagtacctctattaaatcctcatttggctaataatttaacttctacacagctgtcatttacttcagatcttccgtgaaatggtcatgtgaagcacaaatttggctgtatttccacataaaaaggacagatgtcttyatgggtcatgtgaatttatgtgttgcattcctattctgcatatttttccttttcactttaatgaatgtaattcaactagtttatccaagtttgtaatacagttacatactaaaatacgtatacaacttcatcacagtcttgctgaataatcaaactagaactattgcttctatcttgtaggtttctttgaaggaactaccacctacgtgtatgaaaagaaaagagaattagaatggttctaaccaatgaaacaaacataagatggaaaatcctaccgacaagagtgttcaattttctgcc

SEQ ID NO: 434 - DNA, 600 bp, Chicken  19866894084389_1
aaatgtatgatctgaatgataggggagctgaactttgagattaactgcaaagcatttcttgctccgtggtttaggattgtgatcctagtgctatgatggctgcaaatcttaggcagcagatggggaaaaatggtagagatgacacatttaaaacaagtaacaatggaaaaaagggtgtggagcagattagaggatgggaaaaattacatcataacagacaaaataaccagaaagaaagctagagatcagaaaacttctgtcctggaagggaaagtgctgacatagtaaactggtttgacrcatcatcataagacactgggacaagattgtccatttccttctggaggtgatctcatcagtactgtctccttttatgtgcaaatgtatgtatctgactgaagcttgtgatggaagttgtgattgaatgtgtctacttgaataggagtaaaattctggtatcatggtcttgtttatcttttgttttagattgcagattcaattgtcacaaacgatgtgcatctaaagtacctaaagactgtcttggagaggtcgttttcaatggaggtaagatgagaaacatgcttgcaaatactgacaagt

SEQ ID NO: 435 - DNA, 600 bp, Chicken  19866894084390_1
gcctttctccttaaccttccaaacgctagcttatgtgacacacgaagatatctgcaagtgcttcacaggtgaggaaatggtgctgcgtcataaagatataatgctgcagtcctgtcagcctatcccagctgctttcctttctccaagaaagaggaggcagcacatcttggcttgggcctgagcatgggctgcctagtaagcatcgtggaaaacgtgcttcaagctctgctgccatcctttggtttgggaaccactgaactgtggctttgttgtcaccatcagaggtgagggagcaggagktgtccttgcactcgtgtttaaatgaacacatgagcaattcttaaggaagtactttgctgtgtgtcactctgcgggtgtgtatgttacgttgcaagccctttattttgacagctcaagcagacaatacaaatgtagtaatagaaagaaaagtttactgtacggtagaaatctgkgtgtaagcaggaaaatagcgtagcagtgttccctcagctgcatcatgccttttaacaagaggagagcaaagaggaggtagtgaagagcaggacagaagggaatgcgcttcytgccttggcttcactt

SEQ ID NO: 436 - DNA, 600 bp, Chicken  19866894084390_10
attgggtctctaagcttgagctttctttgggctttattacgcctttttaacgtcttttaacartgttttccttaagtacagatttgttaaaggactcccatcttatccacaaatcttgtggtatgtgtagtcttatccctgcgcttttgctgatctgacctttggttggctgcctgaaatagaaagatgtgctcttctgctgtctgctcttccattgctctgtggatagagaagattgtccatgaagcttcatgcaggacattggtgaagtgtggacacaaactacaccaaagtttaaaygttcaaactgaaagctgttaaccgctcggtctttctatggctaatgttcacagcactgctatttccccattcacatttcttgtgttaaatataaacctggatgcaggtttgctgctcatctgggattgctgtgttctgaaggagccgcaggacttggaagggcgatgatgctgtcagcctggctctttgtgtctctgtgcaggggccaccacagccagcaccagccaactcttgctgatagaggcaagggagcattggcttcaggtgttggtacacgtgaggctcctgtgctattagctg

SEQ ID NO: 437 - DNA, 600 bp, Chicken  19866894084390_2
gggcctgagcatgggctgcctagtaagcatcgtggaaaacgtgcttcaagctctgctgccatcctttggtttgggaaccactgaactgtggctttgttgtcaccatcagaggtgagggagcaggagktgtccttgcactcgtgtttaaatgaacacatgagcaattcttaaggaagtactttgctgtgtgtcactctgcgggtgtgtatgttacgttgcaagccctttattttgacagctcaagcagacaatacaaatgtagtaatagaaagaaaagtttactgtacggtagaaatctgkgtgtaagcaggaaaatagcgtagcagtgttccctcagctgcatcatgccttttaacaagaggagagcaaagaggaggtagtgaagagcaggacagaagggaatgcgcttcytgccttggcttcacttccctgtggggcaaaagtggcaagaaaactgtaggagtctytgtttcctctctgttggcagttgcagtgctagctgcagggccagaaatatcctgcrtgcagtgyrgcagccttctcagctgtagcagtgtggactcagagctgctttctgcttcagtgaatgcctgccccctc

SEQ ID NO: 438 - DNA, 600 bp, Chicken  19866894084390_3
gtgagggagcaggagktgtccttgcactcgtgtttaaatgaacacatgagcaattcttaaggaagtactttgctgtgtgtcactctgcgggtgtgtatgttacgttgcaagccctttattttgacagctcaagcagacaatacaaatgtagtaatagaaagaaaagtttactgtacggtagaaatctgkgtgtaagcaggaaaatagcgtagcagtgttccctcagctgcatcatgccttttaacaagaggagagcaaagaggaggtagtgaagagcaggacagaagggaatgcgcttcytgccttggcttcacttccctgtggggcaaaagtggcaagaaaactgtaggagtctytgtttcctctctgttggcagttgcagtgctagctgcagggccagaaatatcctgcrtgcagtgyrgcagccttctcagctgtagcagtgtggactcagagctgctttctgcttcagtgaatgcctgccccctcctgaccctctgcagcctacatctgcttgcttgcctcagattgctcaaggtggaagctgcttatcctgcccgccccagctgtgcataatctcacccttgtctgactgctcac

SEQ ID NO: 439 - DNA, 600 bp, Chicken  19866894084390_4
ttaaggaagtactttgctgtgtgtcactctgcgggtgtgtatgttacgttgcaagccctttattttgacagctcaagcagacaatacaaatgtagtaatagaaagaaaagtttactgtacggtagaaatctgkgtgtaagcaggaaaatagcgtagcagtgttccctcagctgcatcatgccttttaacaagaggagagcaaagaggaggtagtgaagagcaggacagaagggaatgcgcttcytgccttggcttcacttccctgtggggcaaaagtggcaagaaaactgtaggagtctytgtttcctctctgttggcagttgcagtgctagctgcagggccagaaatatcctgcrtgcagtgyrgcagccttctcagctgtagcagtgtggactcagagctgctttctgcttcagtgaatgcctgccccctcctgaccctctgcagcctacatctgcttgcttgcctcagattgctcaaggtggaagctgcttatcctgcccgccccagctgtgcataatctcacccttgtctgactgctcactcttccaagcagtctccttatgctgcactgcatcagttcttccattcatccatcat

SEQ ID NO: 440 - DNA, 600 bp, Chicken  19866894084390_5
cctttattttgacagctcaagcagacaatacaaatgtagtaatagaaagaaaagtttactgtacggtagaaatctgkgtgtaagcaggaaaatagcgtagcagtgttccctcagctgcatcatgccttttaacaagaggagagcaaagaggaggtagtgaagagcaggacagaagggaatgcgcttcytgccttggcttcacttccctgtggggcaaaagtggcaagaaaactgtaggagtctytgtttcctctctgttggcagttgcagtgctagctgcagggccagaaatatcctgcrtgcagtgyrgcagccttctcagctgtagcagtgtggactcagagctgctttctgcttcagtgaatgcctgccccctcctgaccctctgcagcctacatctgcttgcttgcctcagattgctcaaggtggaagctgcttatcctgcccgccccagctgtgcataatctcacccttgtctgactgctcactcttccaagcagtctccttatgctgcactgcatcagttcttccattcatccatcatcttttctctcttgctctgtcctccttgttcaccagagtttatcctgctcgagttcc

SEQ ID NO: 441 - DNA, 600 bp, Chicken  19866894084390_6
ttgacagctcaagcagacaatacaaatgtagtaatagaaagaaaagtttactgtacggtagaaatctgkgtgtaagcaggaaaatagcgtagcagtgttccctcagctgcatcatgccttttaacaagaggagagcaaagaggaggtagtgaagagcaggacagaagggaatgcgcttcytgccttggcttcacttccctgtggggcaaaagtggcaagaaaactgtaggagtctytgtttcctctctgttggcagttgcagtgctagctgcagggccagaaatatcctgcrtgcagtgyrgcagccttctcagctgtagcagtgtggactcagagctgctttctgcttcagtgaatgcctgccccctcctgaccctctgcagcctacatctgcttgcttgcctcagattgctcaaggtggaagctgcttatcctgcccgccccagctgtgcataatctcacccttgtctgactgctcactcttccaagcagtctccttatgctgcactgcatcagttcttccattcatccatcatcttttctctcttgctctgtcctccttgttcaccagagtttatcctgctcgagttcctgctgcta

SEQ ID NO: 442 - DNA, 600 bp, Chicken  19866894084390_7
tgacagctcaagcagacaatacaaatgtagtaatagaaagaaaagtttactgtacggtagaaatctgkgtgtaagcaggaaaatagcgtagcagtgttccctcagctgcatcatgccttttaacaagaggagagcaaagaggaggtagtgaagagcaggacagaagggaatgcgcttcytgccttggcttcacttccctgtggggcaaaagtggcaagaaaactgtaggagtctytgtttcctctctgttggcagttgcagtgctagctgcagggccagaaatatcctgcrtgcagtgyrgcagccttctcagctgtagcagtgtggactcagagctgctttctgcttcagtgaatgcctgccccctcctgaccctctgcagcctacatctgcttgcttgcctcagattgctcaaggtggaagctgcttatcctgcccgccccagctgtgcataatctcacccttgtctgactgctcactcttccaagcagtctccttatgctgcactgcatcagttcttccattcatccatcatcttttctctcttgctctgtcctccttgttcaccagagtttatcctgctcgagttcctgctgctaa

SEQ ID NO: 443 - DNA, 600 bp, Chicken  19866894084390_8
gaagatgagatcttagcgaggacaggtctgaaatcctttggaacagaagcctgagctgtgttttccctttgtttggtgtgtgctcagttttgctgcatgaatattctttacacagagtcagctcccccctcctgccgagtgtctgagccttgcagaggttctgtgtcagagctcttgtgttggaaggctgaattttagctccttttttattcttactgactgtgattaaagtcattttcttcaagtgagttaggacttagagatttgcgtgtttgtattcctgtcaaatatgaattcttyacctgaatttaaaataagtgagactatgttagttcttagtgactgggaaacagagttttgccttctattgtgacatgctttgtgcttgcagaatcaaaaaggaagtggaaacacaccgtgcactgattgctttgtgaaaatatttgggactcagctatcaagagagatagaaaggcagtgcctgcgctgtggaggctattgggtctctaagcttgagctttctttgggctttattacgcctttttaacgtcttttaacartgttttccttaagtacagatttgttaaaggactcccatct

SEQ ID NO: 444 - DNA, 600 bp, Chicken  19866894084390_9
agatttgcgtgtttgtattcctgtcaaatatgaattcttyacctgaatttaaaataagtgagactatgttagttcttagtgactgggaaacagagttttgccttctattgtgacatgctttgtgcttgcagaatcaaaaaggaagtggaaacacaccgtgcactgattgctttgtgaaaatatttgggactcagctatcaagagagatagaaaggcagtgcctgcgctgtggaggctattgggtctctaagcttgagctttctttgggctttattacgcctttttaacgtcttttaacartgttttccttaagtacagatttgttaaaggactcccatcttatccacaaatcttgtggtatgtgtagtcttatccctgcgcttttgctgatctgacctttggttggctgcctgaaatagaaagatgtgctcttctgctgtctgctcttccattgctctgtggatagagaagattgtccatgaagcttcatgcaggacattggtgaagtgtggacacaaactacaccaaagtttaaaygttcaaactgaaagctgttaaccgctcggtctttctatggctaatgttcacagcactgctatt

SEQ ID NO: 445 - DNA, 600 bp, Chicken  19866894084393_1
ggaggctaagaaaggcagggccaagagaatggtggccaggagcagctgagatggttgaggtgttgaacctgaaggcatgcttggttagcagctctgacgatttggtggcatttctattagtagggcaaaaacacacaatgcaactttgatgacgctggtactcagtagatgtgccattgtctttctttttagtggcccaaacctgaatttccaatatttcctgtggagatggattccttttcagtaggccaccacctgtccttttatgttacaacatgacagatgctagccttgtctgargagaaatggtagattaggtggactgaagtcactgaaaatcactagaagactgaacagaactatgtggatgtcactgaaatggagtttctggtgtgggagcttattttagtggacagtaatatcagtgagaatcccaatttgatagttaatctccaggggtgaacaaatataccttatcactccttatcaacagctctaccacagtcttcataccctatgctggaatatagtttagccttcttatttttcccagtggagtgtttcctgtacatgaagagaacagtcattcctcatctcaac

SEQ ID NO: 446 - DNA, 600 bp, Chicken  19866894084399_1
gtatgtaggctctgtggtgggaaaggaagttacggtcatggtaaggttgatccagccattaatacagaaattccagggcagatttccttccatctggggaatgtttctcagctgccctcagccaggaggggtgcagctctgcttagaggagtcaagcctgaaaaagaaaggaaaaaagcccaatgcttctttttcatgttctgaagctgtttttagcttcgtctttgagataagatctttctatgaaattagattgcatgcagtcttgagggtggaacttaagttttttaacttcatgtsgtattggtgctacaagtcacttgccatcctataaaatagcatacagatcacaaattggtcatttaaattactttcctatttgcaggtgcttcctgtccatggaggtgcagaaatgattttagtttcggggtgttcattatttgtttgttgagcaagtgtttatactgttggctggcagtctgttttcctcagagctcaactgctgctttatgctgccacgggtagtccagggcagttctccctgctgaggaggaacaatcgcaatctataaagtgctctctagataagagatcatctttg

SEQ ID NO: 447 - DNA, 600 bp, Chicken  19866894084415_1
tacacctaaaatttacctgacatataaatgctggtatagaagaatcaagtttctacgcatatcagaacacagtggtggcatttgctgttactgttttgttccaggaaagaagtttacttcaaaatcagagacttctctctctttttctttgacctgccaactacaattaacagcactcaacacacttatgtaaaagttaacacatactgtgacaaaagttaaaacccaaatatagaattagtatacagagggcagtatacacagtagatagtattaagaatcagtgttctgagttctacrtggtctgtacaaaaacagattattgtatttcaaaaaagaaagtgaagctgttgataggattaaattaaaaatataattaagaactaccaccttctttcaattaaaccaatttgtaaagacaaaagagagacactcatgaacacagttgtttgtagtttgggacagatttcagaacatgaggactaaataagtgttctttgttcagaaaaatggattttgtcatttaaaccatactaaaggaatcgcatgctatttcagctatttctatattttattagaagttctagtagttaaggagca

SEQ ID NO: 448 - DNA, 600 bp, Chicken  19866894084424_1
cctttgtgtctcctgcacggaagaggagaaagcagaaagttccaaaaaggtcttcactctttcctactgcatctcagtatcacgtgagtgggacaggctcaactcaatgaacctctctcatgaagcttcaaaattcacgggctcttggattttgtgatgtgcacgctttaaatttagagggaacaccatgattaccgtgtgtgcagttcctcccagctctgccagcggtgtgctgtgctgaacccagccctgccattaatgccatgggacagagtccaccacatctcaccagcgtgccarttttctgggctgagaatgcagggccggattgttggggggaaaaggaggagggaggaggtgaggacagcaccatcactctgccacaaccagcaccacagcactgcaggaccatgcagcaccgcagcaccgggaactcacctctcagaagttataggtccctcccagctcaggatattctctgattctgccatcccatgtgacatagtgggacttagaacatacaaactcactgcctcaccaagcaagctggtggagaggcaggcgtagtgaccttggcatgcatgtactccttgttttcca

SEQ ID NO: 449 - DNA, 600 bp, Chicken  19866894084424_2
gagggaggaggtgaggacagcaccatcactctgccacaaccagcaccacagcactgcaggaccatgcagcaccgcagcaccgggaactcacctctcagaagttataggtccctcccagctcaggatattctctgattctgccatcccatgtgacatagtgggacttagaacatacaaactcactgcctcaccaagcaagctggtggagaggcaggcgtagtgaccttggcatgcatgtactccttgttttccactctgagcgggttcatcagctggggaaaagcacgggggatttagggrgttctggagcctgcctcaaaacgctgtgatggcagagacagctcttgccagcagcactgggagagggcaggtccccaccttgggcaggatgctaatcggtgcatcacagtaggcaggctgcgaacacaaaaccctggaaggctgttgccactgataacacccatctcctgtggcatcatgtccgttgacataaccttaattaatgacattaccaagctaatgaagagataaagcaccgatcccaagtcctgttaagaaattgccttaaataccggtccctaatcattatggtgaaacaga

SEQ ID NO: 450 - DNA, 600 bp, Chicken  19866894084436_1
tagtgtgcccctttggccaagaagaccagtagtatctcggggtacattaaaaagagtgtggccagcaggtcgaaaaaggtgatcctctccctttactctgccctggtgaggccacatctggagtgttgtgtccagttctgggctcctcagttgaagaaaaacagtgaacttctggagagagccacagagatgatgaggggcctggagcatctcctgtatgaggaaaggctgagagacctggggctgttcagcctggagaacagaaggctgagagggggtctcataaccgtttgtaaatayctaaagggtgggagtcaactcgatgaggtggactctttttggtggtgagcagtgatagaaaaggatcaatgggcacaaactgcaacacaggaagttccatacttaaataaggaggaactttactgtgagggtgacagagccctaggacaggccgcccagagaggctgtggattcttcttctctggagatattcacaacctctctggatgtttaactgtgtgacctggtgcaggggcctrctttagcagaggactagatggacaagatgawtcccagggttcccttccaacccytacggtt

SEQ ID NO: 451 - DNA, 527 bp, Chicken  19866894084436_2
ggggctgttcagcctggagaacagaaggctgagagggggtctcataaccgtttgtaaatayctaaagggtgggagtcaactcgatgaggtggactctttttggtggtgagcagtgatagaaaaggatcaatgggcacaaactgcaacacaggaagttccatacttaaataaggaggaactttactgtgagggtgacagagccctaggacaggccgcccagagaggctgtggattcttcttctctggagatattcacaacctctctggatgtttaactgtgtgacctggtgcaggggcctrctttagcagaggactagatggacaagatgawtcccagggttcccttccaacccytacggttctatgaatctgtgaatgmagcctgtgcttcaccccccatctgatttatctctgctggcagagcagtcacagttgccacgtttgaggaacagatatgctgattaacagagtaggcaaaaagggacagtccccccgctgcccctccccatcccagatgcttttgatct

SEQ ID NO: 452 - DNA, 496 bp, Chicken  19866894084436_3
agagggggtctcataaccgtttgtaaatayctaaagggtgggagtcaactcgatgaggtggactctttttggtggtgagcagtgatagaaaaggatcaatgggcacaaactgcaacacaggaagttccatacttaaataaggaggaactttactgtgagggtgacagagccctaggacaggccgcccagagaggctgtggattcttcttctctggagatattcacaacctctctggatgtttaactgtgtgacctggtgcaggggcctrctttagcagaggactagatggacaagatgawtcccagggttcccttccaacccytacggttctatgaatctgtgaatgmagcctgtgcttcaccccccatctgatttatctctgctggcagagcagtcacagttgccacgtttgaggaacagatatgctgattaacagagtaggcaaaaagggacagtccccccgctgcccctccccatcccagatgcttttgatct

SEQ ID NO: 453 - DNA, 473 bp, Chicken  19866894084436_4
taaatayctaaagggtgggagtcaactcgatgaggtggactctttttggtggtgagcagtgatagaaaaggatcaatgggcacaaactgcaacacaggaagttccatacttaaataaggaggaactttactgtgagggtgacagagccctaggacaggccgcccagagaggctgtggattcttcttctctggagatattcacaacctctctggatgtttaactgtgtgacctggtgcaggggcctrctttagcagaggactagatggacaagatgawtcccagggttcccttccaacccytacggttctatgaatctgtgaatgmagcctgtgcttcaccccccatctgatttatctctgctggcagagcagtcacagttgccacgtttgaggaacagatatgctgattaacagagtaggcaaaaagggacagtccccccgctgcccctccccatcccagatgcttttgatct

SEQ ID NO: 454 - DNA, 448 bp, Chicken  19866894084436_5
ctcgatgaggtggactctttttggtggtgagcagtgatagaaaaggatcaatgggcacaaactgcaacacaggaagttccatacttaaataaggaggaactttactgtgagggtgacagagccctaggacaggccgcccagagaggctgtggattcttcttctctggagatattcacaacctctctggatgtttaactgtgtgacctggtgcaggggcctrctttagcagaggactagatggacaagatgawtcccagggttcccttccaacccytacggttctatgaatctgtgaatgmagcctgtgcttcaccccccatctgatttatctctgctggcagagcagtcacagttgccacgtttgaggaacagatatgctgattaacagagtaggcaaaaagggacagtccccccgctgcccctccccatcccagatgcttttgatct

SEQ ID NO: 455 - DNA, 600 bp, Chicken  19866894084441_1
aggtatctcccacttttgataatgaattcttggcttacaacaggcaacaaaccaaactaatcccaaccaacttctcctcacaccccagaaaacacaactgaaagctccttatcacttgttctgattcctcacaaattttatagcacataaactgccctagctgtggattgaattagtgtatctgtggtcctgaagctcatgggccaatttctaatggagtaaaggagagaagtctccctcttcaccttctctcacatactgcacacagatggttcatgtgtacctaggagtgtccttttkttagccctttcagtcttgtatcaragagtgcaagaaaatatctcctacccaaaagctgcatagtgcagtgctgtatccccctcttcatccctcagattgacagtggcatgtgcctgcagcaaaatcttcacaacatccagatgcccctgataggaggcgatctgtagtgcagttctgccctgattcttgttgtcgacctacagggaagacagagacataacaaacggtaaggaaagaccttgccttgagttcagtcttagcaggatgacagtcactggctgcagaacagtggtgtgctca

SEQ ID NO: 456 - DNA, 600 bp, Chicken  19866894084441_2
aattcttggcttacaacaggcaacaaaccaaactaatcccaaccaacttctcctcacaccccagaaaacacaactgaaagctccttatcacttgttctgattcctcacaaattttatagcacataaactgccctagctgtggattgaattagtgtatctgtggtcctgaagctcatgggccaatttctaatggagtaaaggagagaagtctccctcttcaccttctctcacatactgcacacagatggttcatgtgtacctaggagtgtccttttkttagccctttcagtcttgtatcaragagtgcaagaaaatatctcctacccaaaagctgcatagtgcagtgctgtatccccctcttcatccctcagattgacagtggcatgtgcctgcagcaaaatcttcacaacatccagatgcccctgataggaggcgatctgtagtgcagttctgccctgattcttgttgtcgacctacagggaagacagagacataacaaacggtaaggaaagaccttgccttgagttcagtcttagcaggatgacagtcactggctgcagaacagtggtgtgctcaggaatactaagcagaatctgtgcc

SEQ ID NO: 457 - DNA, 600 bp, Chicken  19866894084442_1
tcactttacccaggtggtggcagcgataccatcttcagaaggaggttatcagccctcccctcactgcaagctctgcagtctcttccatccagtgaagaatgtgctctgtgctcgtttaacacacacacacacacacaggtgactgaataggactcaacagatgttgcaaatcattgaagatggaaaagaaaaattcacctctagggctgatgaaattaggcacagacttcaaatgactgagaggaaaaaaaaactaattaaagacttttaactctcttcagttatttgacagcatattcwttttccatattgaatctgaaatcagtgaagtactcatttcccatcagtcacacattcatgtcactgtaacatctctgacctgaatgcacctaaaagtatgtcacagtggctcaaagggaattgagtagcaccaaataaagatcattttcaaactgcccaattcagccaaaattgctaggcatctttaatacatattttaagtgcttccttcagcttgagccaatggatgtggaaatcaaagcacttatcttaaggaaattgcacaacagctttcacaattgctgctcacgaggagctctg

SEQ ID NO: 458 - DNA, 600 bp, Chicken  19866894084442_2
ctttttccaattgtttatagcgtagatgaatacaggccccacactgagcaatttggaatggaaacatcagtctctttagacctccacgaggcagattctcacacaggaatttcacaagttaacacctgagacttgcatttttaatattcaattatatttcaagtccttctggaaacaaatggctgtttgctttctaacacgacctcacgttatctgctcagagcttggttacatccaaacattcctttgggactgcatattctatgaactccaaaggaactgagaaaaaccaaatgcacrcatatcagccctgagcacactcaggctacagtgccaatgaaccacagctggggctgacaacatcacagcccttaggaggacttttaaatcgataaaatgtgcagtttgaaggaaataagatcactgttctagctgctgtgtggacataagcagttcatagtcttaagagattcctacacagaggtgtcagacagaggaaaaagcatttgctgacaccattcctcccattccctctcccaaccacactgcagctcctgttcagacaccaaataaaaaggaaaagcttgcttaccatgctgc

SEQ ID NO: 459 - DNA, 599 bp, Chicken  19866894084445_1
  misc_feature (1)..(85): n is any nucleotide
nnnnnnnnnnnnnnnnnnnnnnnnnnnnnnnnnnnnnnnnnnnnnnnnnnnnnnnnnnnnnnnnnnnnnnnnnnnnnnnnnnnnncaattaactgctaataaaacaccttgcttctggttacagtaagtaattatgctgcagagtagaagctgctgagctcaaatacactgattcccataacgacagtagggtttttaaccctcagaagaggtttaagttctgctgcacttactgtgtttgtggggacatctgtggcttgggacttgctcaggacacttaaatgtgttaagttagtggawaaaataatcgatttaactttaattatcaaagagtttttaacrtaagattaaagaaatgttgttctccctttgggccttcagtttctcttgttactgtccaggtgatgacatgcccttaaaatagggttcagtggagcaaaggatttgagtaagtttccccaggaggtttcygtaggatgctcctactgattttttgtaaaggattccaaagaatgaaaagaaacttcataattgtctttatttcagtgctgaattccatctgcttgttaacatgttctgagaagtgtaaagtaatatca

SEQ ID NO: 460 - DNA, 599 bp, Chicken  19866894084445_2
  misc_feature (1)..(43): n is any nucleotide
nnnnnnnnnnnnnnnnnnnnnnnnnnnnnnnnnnnnnnnnnnncaattaactgctaataaaacaccttgcttctggttacagtaagtaattatgctgcagagtagaagctgctgagctcaaatacactgattcccataacgacagtagggtttttaaccctcagaagaggtttaagttctgctgcacttactgtgtttgtggggacatctgtggcttgggacttgctcaggacacttaaatgtgttaagttagtggawaaaataatcgatttaactttaattatcaaagagtttttaacrtaagattaaagaaatgttgttctccctttgggccttcagtttctcttgttactgtccaggtgatgacatgcccttaaaatagggttcagtggagcaaaggatttgagtaagtttccccaggaggtttcygtaggatgctcctactgattttttgtaaaggattccaaagaatgaaaagaaacttcataattgtctttatttcagtgctgaattccatctgcttgttaacatgttctgagaagtgtaaagtaatatcaattttttaattaattggacatttgagagagttgccttcatag

SEQ ID NO: 461 - DNA, 600 bp, Chicken  19866894084445_3
attcccataacgacagtagggtttttaaccctcagaagaggtttaagttctgctgcacttactgtgtttgtggggacatctgtggcttgggacttgctcaggacacttaaatgtgttaagttagtggawaaaataatcgatttaactttaattatcaaagagtttttaacrtaagattaaagaaatgttgttctccctttgggccttcagtttctcttgttactgtccaggtgatgacatgcccttaaaatagggttcagtggagcaaaggatttgagtaagtttccccaggaggtttcygtaggatgctcctactgattttttgtaaaggattccaaagaatgaaaagaaacttcataattgtctttatttcagtgctgaattccatctgcttgttaacatgttctgagaagtgtaaagtaatatcaattttttaattaattggacatttgagagagttgccttcatagatggcctttctttgacatgaaatgctttgtggcttagtgaacaaagaacagggcttaaggcccttaaaaactggaagagggaatgaagagtgaggatacacagatacttcacacagccatagcttagtgc

SEQ ID NO: 462 - DNA, 600 bp, Chicken  19866894084448_1
ccatctagcccatgtttgagaaactgttaattacgatccacacatgattcaactgcagtgtgtcatgcaaaaagccagccagtgctaatgagatttttctctttttttgtatccttaaacttttatgagtcattttgggctcaaaaaaataaaaaaataaaaaaataagtcacactgatgaaactagtttaagccagtgagtgagggagatgttgtgtaattcaccccttccacagctgtcagcataggtccaaactaatatattctggaagccactatttacacttatgatgctttgcwattttgtaatcttctctcaagaggattgagaactattctcaagtgctaaagattaaagctgaaaagtataacaaggaaacagaaaaatataagatatggcataaggcaaaggcagacacattacaatgttccatgcagtttggcatgcctccaaagcccttctgaaaatacaggctgaatcaatagcttagaagtgacaatttacacattcctaaaatcatgcaccacacacatcaatataacacgtgcttgctctgcctggttattttcttcctgggcagcagtgcttcctttagttta

SEQ ID NO: 463 - DNA, 600 bp, Chicken  19866894084450_1
catttgtcaagtacattagttaagaaaggtacgtgtggtgtggtttctattttggtaggcttgtgctcccttatatcattggaggactcttaaagacagcccagagaaggaccccgttggcacctgctatgtagcaattcagaacttcagtgcctatgctgaatactcaccttgtcgcaacagtaagtattaatagaaaccagcttgtgctggaggaattgatgctgcactcaatgttttcttgctttcagtttctgtgcagtcttgtttgaatgaaaattactgtgttattattgaatwggatgaggcttaaaaagaaatcagcattaaattgtgtgcctgaaattggaagctttattgtataattgaaagaggagaaattaagtaaattaagctcatgcagttatagtgatgcaatataattggttcaacttaaatggctttaaaatgtagcaaacagatctagataagaaccagacagcattttaaaccaattagtcatgctcatactgagtataaatctctcatcacaggatcaccatcagaagaccagaccccacacagaaacacacaggcctctatcaccatycataccagtat

SEQ ID NO: 464 - DNA, 557 bp, Chicken  19866894084450_2
attattgaatwggatgaggcttaaaaagaaatcagcattaaattgtgtgcctgaaattggaagctttattgtataattgaaagaggagaaattaagtaaattaagctcatgcagttatagtgatgcaatataattggttcaacttaaatggctttaaaatgtagcaaacagatctagataagaaccagacagcattttaaaccaattagtcatgctcatactgagtataaatctctcatcacaggatcaccatcagaagaccagaccccacacagaaacacacaggcctctatcaccatycataccagtatcacccacagtagttcatttatgaagagcttctagcttggaagaaatctactcacactgtcactgctgttccacttctttccctgtgctgttctgagtatgtgtgccyccactccactgtagtagcagtctatgggcctttcttcttgaggaacaggaaaaaatagtgcatgtatgtttagaatcaagctctgttacctagaagtctacagtaaattccacgcataagattatatcagttgttgttc

SEQ ID NO: 465 - DNA, 439 bp, Chicken  19866894084450_3
agtgatgcaatataattggttcaacttaaatggctttaaaatgtagcaaacagatctagataagaaccagacagcattttaaaccaattagtcatgctcatactgagtataaatctctcatcacaggatcaccatcagaagaccagaccccacacagaaacacacaggcctctatcaccatycataccagtatcacccacagtagttcatttatgaagagcttctagcttggaagaaatctactcacactgtcactgctgttccacttctttccctgtgctgttctgagtatgtgtgccyccactccactgtagtagcagtctatgggcctttcttcttgaggaacaggaaaaaatagtgcatgtatgtttagaatcaagctctgttacctagaagtctacagtaaattccacgcataagattatatcagttgttgttc

SEQ ID NO: 466 - DNA, 600 bp, Chicken  19866894084451_1
agatttaatatactgctagcaaacccaactgtgttacagaagtggcctcactttgatgcactgacatactttagcatcttttctcatgtttctcaaccttattgcctgagtctgcatgataacaatttttcagtaaaatatattagtcaatgccagctgaaattaaccctgctttttaatcacaagtattatagtagctccttggacgagaaactctaagttaagttttcttcgtcaaagtcttatctcaggaaccatacattggcatggaaggtatgtcattgaagtaaccaaaaaaarggcccagtcttcagctaaattctttgcttacatgatcattagctaagttttaatctgttgattcacacagctaattctgaactcgctgccaaacatatcttctttgttggaggaggatgaagcaatagcagcattggaaagaattttattttaatatcatgacagaaaatttagaagcaattcaaagctgccagagcctctcaactgattctcctttaatagttaaaggaacggatttggtttgagaactgaaccgagctgcattaaggcaccaaatttaataactcagagcaattaaat

SEQ ID NO: 467 - DNA, 599 bp, Chicken  19866894084454_1
  misc_feature (1)..(69): n is any nucleotide
nnnnnnnnnnnnnnnnnnnnnnnnnnnnnnnnnnnnnnnnnnnnnnnnnnnnnnnnnnnnnnnnnnnnntcaaaaagcagcatcagtaactaccaaaaagtaattccaatttttacaacgtaagttaaaaaacagtacctttggaagattattgtgtttgttttaattctcacatccatgttgtacaaccagtgttttcttttctgagtgcaaaaataaaagagaagatcacatgtttggccagcgttaatcaatgaaactctgttgatttgttgacatctggaaactatatcacaagawggataactgcatgcgtgtagagtcttcactgttcttcctgggcatcctggctgctattagaagaatctgtctgcatagaaattgcaggctggtttataccacatgcggcccytgttcatattttcctgcgatcttcatcrccaygatatgtgtacttgggaaatgaacagattgtgtgagttccaaacatctactggttcacattatgacaaggtgagtatgtgtgggctgaataggaaacaagcaatcaaatcgctaaatagataggagattctcaaaacgatgaccattcatcatga

SEQ ID NO: 468 - DNA, 600 bp, Chicken  19866894084454_2
ttacaacgtaagttaaaaaacagtacctttggaagattattgtgtttgttttaattctcacatccatgttgtacaaccagtgttttcttttctgagtgcaaaaataaaagagaagatcacatgtttggccagcgttaatcaatgaaactctgttgatttgttgacatctggaaactatatcacaagawggataactgcatgcgtgtagagtcttcactgttcttcctgggcatcctggctgctattagaagaatctgtctgcatagaaattgcaggctggtttataccacatgcggcccytgttcatattttcctgcgatcttcatcrccaygatatgtgtacttgggaaatgaacagattgtgtgagttccaaacatctactggttcacattatgacaaggtgagtatgtgtgggctgaataggaaacaagcaatcaaatcgctaaatagataggagattctcaaaacgatgaccattcatcatgagtggcaatgtcctctttgacttcaaagctttataatacccttagtaccggcacattatcagatgtgttacagccttcaggcatatagaagcagtcataaatgcatttcatgca

SEQ ID NO: 469 - DNA, 600 bp, Chicken  19866894084454_3
ttggaagattattgtgtttgttttaattctcacatccatgttgtacaaccagtgttttcttttctgagtgcaaaaataaaagagaagatcacatgtttggccagcgttaatcaatgaaactctgttgatttgttgacatctggaaactatatcacaagawggataactgcatgcgtgtagagtcttcactgttcttcctgggcatcctggctgctattagaagaatctgtctgcatagaaattgcaggctggtttataccacatgcggcccytgttcatattttcctgcgatcttcatcrccaygatatgtgtacttgggaaatgaacagattgtgtgagttccaaacatctactggttcacattatgacaaggtgagtatgtgtgggctgaataggaaacaagcaatcaaatcgctaaatagataggagattctcaaaacgatgaccattcatcatgagtggcaatgtcctctttgacttcaaagctttataatacccttagtaccggcacattatcagatgtgttacagccttcaggcatatagaagcagtcataaatgcatttcatgcacacatggtagtcacatccaaggacattt

SEQ ID NO: 470 - DNA, 600 bp, Chicken  19866894084454_4
aagattattgtgtttgttttaattctcacatccatgttgtacaaccagtgttttcttttctgagtgcaaaaataaaagagaagatcacatgtttggccagcgttaatcaatgaaactctgttgatttgttgacatctggaaactatatcacaagawggataactgcatgcgtgtagagtcttcactgttcttcctgggcatcctggctgctattagaagaatctgtctgcatagaaattgcaggctggtttataccacatgcggcccytgttcatattttcctgcgatcttcatcrccaygatatgtgtacttgggaaatgaacagattgtgtgagttccaaacatctactggttcacattatgacaaggtgagtatgtgtgggctgaataggaaacaagcaatcaaatcgctaaatagataggagattctcaaaacgatgaccattcatcatgagtggcaatgtcctctttgacttcaaagctttataatacccttagtaccggcacattatcagatgtgttacagccttcaggcatatagaagcagtcataaatgcatttcatgcacacatggtagtcacatccaaggacattttcta

SEQ ID NO: 471 - DNA, 600 bp, Chicken  19866894084456_1
ctgccctggtggtgattgatcagagtggcccagagccagcatgtggaattcctgccagctggaagaacggcaatggagagacgcaaggttgtggcaccccagcacaagtgacgacacagtgcacaagatgtatagaggagagggtgaaggatgcttggggtgtagataggcaatgattgccatgaccttctgatgtgctgtgtgtccagcctgcaggcagagcacaaaatgtacagccttttactgcaaatacccttctctctttacctttctaggtggccatttctaaaggcctccttytgggagatgcgaacrgcaaagcattaagaagataaacaacaaacaaacaaaaaccagcacagaaagagaaagctgggaggacaaaatcaacatgaaaagatctcccagccctttgcttcctttcctcttccccccagaaaaaaaaaaaaagaagaaaaaaacaaacaaaaacacctttctgtggtttagagtgagtgcaggctgcgttagttcagcccttataagaaaaattagcacaagtagtggcccctttgcgtgaagcagtggccgggccccccctccccctccaagaacaaggct

SEQ ID NO: 472 - DNA, 600 bp, Chicken  19866894084456_2
ttgatcagagtggcccagagccagcatgtggaattcctgccagctggaagaacggcaatggagagacgcaaggttgtggcaccccagcacaagtgacgacacagtgcacaagatgtatagaggagagggtgaaggatgcttggggtgtagataggcaatgattgccatgaccttctgatgtgctgtgtgtccagcctgcaggcagagcacaaaatgtacagccttttactgcaaatacccttctctctttacctttctaggtggccatttctaaaggcctccttytgggagatgcgaacrgcaaagcattaagaagataaacaacaaacaaacaaaaaccagcacagaaagagaaagctgggaggacaaaatcaacatgaaaagatctcccagccctttgcttcctttcctcttccccccagaaaaaaaaaaaaagaagaaaaaaacaaacaaaaacacctttctgtggtttagagtgagtgcaggctgcgttagttcagcccttataagaaaaattagcacaagtagtggcccctttgcgtgaagcagtggccgggccccccctccccctccaagaacaaggctgttctcagtatcgac

SEQ ID NO: 473 - DNA, 600 bp, Chicken  19866894084458_1
gcagtggaagcagcatgcaaaatatgtagaagatgtaatattacgatgagtgttgcacctcagcatatcagctggtagcatctgttgatgtagaaggggccgactgggaggactgtgctctttcttatgagctttgactcattgaactggagcgactaacatgcaagcactgcaggtctgttacttcactttctgaaatggtgtagtgcttaattctttatgtaagcattgtaaaatactgatgtgtcaaattcaatatgctgcttgtaactgaagtcaggttctaataattcctgtacytgtaatagctcaactgtttcctaattttgtgtgttaatctggtgtatggaaacatggtaacttaatgtttctttgagaagagtgcaaatatagaaattagtgaatcctaatctatgggtatttcatagtactacaaaggatatttaaatttgtttttagcatttctggtagacatttagaactttagtttgttccactcttcaatggctctattaaatattttgtttttctgggtggaatttaagtaaaatgcagtcttaaaaatttacaccttcattctcakcactcctattcagttga

SEQ ID NO: 474 - DNA, 600 bp, Chicken  19866894084458_2
ctaataattcctgtacytgtaatagctcaactgtttcctaattttgtgtgttaatctggtgtatggaaacatggtaacttaatgtttctttgagaagagtgcaaatatagaaattagtgaatcctaatctatgggtatttcatagtactacaaaggatatttaaatttgtttttagcatttctggtagacatttagaactttagtttgttccactcttcaatggctctattaaatattttgtttttctgggtggaatttaagtaaaatgcagtcttaaaaatttacaccttcattctcakcactcctattcagttgaaataataagccataatgcatgttggtactaaccatgagatgaacaaatccatgcatttgaagttattacaatagtattttacttaaatacaatgaaacaaaatccataattattcagtaagacaggctttttttgaggtttgcctttcttgatatgaagagaagatttgctgaaggtctgcaagtctactgcctaaaaaacctcaaatctgaactttatatcactcacaaaacggaaacactttagcccatttagaataatatattggtctgcaaaggaagtg

SEQ ID NO: 475 - DNA, 600 bp, Chicken  19866894084459_1
aatctgttctcatagatcatattgtttctaaacctcttcatgcttctgttgctttgctctgtgctgtgccatgcttccttccctccacgcacagtcagtgctccatggcctggtcgccatcgtatgaaatgaacctcttgctctttgccacccatctctattgaggcagtctgaaatgcccctttcctttttggcacatccatgatcctgttgacctacagtaagcagttatgcagtgtacctttaggttactctgtgtggcccagcagcctcgcttactgctctgcatcccctgccacrtgcccatccctattgacttccattgggctcttttggttcgactccatttgatctcaccgttcccatgctgttacatcttttgccttaccctgcggttgctttcatcaggatcccttaatagtttttcaagtatcttcccattgattgcagggggggctcaatctctaatttgctgtagaagcttttcagaactcctctctgtagccgtttcctctttgatcccaaaagcactttgaaagtttgcctctgaatataagtggatcatctatatgcaaattccttaatttttcctctgctaag

SEQ ID NO: 476 - DNA, 600 bp, Chicken  19866894084463_1
caccctctgagctgtgtcagctgtgatgccgtgtgtcacatgcacatggcatgcaggaaacccagtgccgagcgctgtgcccacctaacagccatgcagcactgcttggtggagatgtgaggtcccgcgctccacatctgctcccagttgtcaccgcagccacaaccgggagtcccaccgcgtccccatgcacacagccacgtatgcctcacgctccaccggtgacacgatgcatcccgacacggtgctatttgcagaggtgctgctgcccgacctcacgctctgcacgccacgcgtgaygctggcagtgctccagcagggatgtgccaagaaatcagcacaaagcagccaaaaaggctctgcagccatcccgtggggttgggggcgcgtggagcccaacgcacggccctgggagctgcggggtgcagggaatcccttattgggggtcgttgctggctcagtgcccctggtgcctgcagtgacagctgtggcagagccctccccgtgtcccagagccggtgctgccccctcctacctggcgaggcacagccatgggtcgctctgctggcagcatggcatggcgctgtggcacagcatggc

SEQ ID NO: 477 - DNA, 600 bp, Chicken  19866894084480_1
gatttgcatgtctttatttaaccgcctatttctctctttaaacctggccttttttgttctttctttgggtttttcctttgcctgtctgcaagttgcaaaattccttactgttctgtaatccaaaatcttgttactgtggcttgataaatcatcttgacatgtatttgagcagctgacgtgtcttctctgaagtttgactggcttttcaagttaacctttaaatatactgaagcttttccacagtttttcagactgcagcttcacaaacgaatacagcacatcttccactacaggagagayaagatgttttcaactgatsatgttctgcttttgcatttctcttagcgttagtaatcacttyataggtttcaaaaatagagtagtgacaggacaagaaatgtcaaccttgtttgcacctagttcttccctcagtgttcatggcagctggatcagtgcgtgtccttkcagatacttgtgttttttatatcattctgaatarccaaatctcatcctacttccttaagttgggtaaaagtctcactgaagtcagtgggagttttgttttgcctgactaatggagtgcttgagaaagaaagttac

SEQ ID NO: 478 - DNA, 600 bp, Chicken  19866894084480_2
aaccgcctatttctctctttaaacctggccttttttgttctttctttgggtttttcctttgcctgtctgcaagttgcaaaattccttactgttctgtaatccaaaatcttgttactgtggcttgataaatcatcttgacatgtatttgagcagctgacgtgtcttctctgaagtttgactggcttttcaagttaacctttaaatatactgaagcttttccacagtttttcagactgcagcttcacaaacgaatacagcacatcttccactacaggagagayaagatgttttcaactgatsatgttctgcttttgcatttctcttagcgttagtaatcacttyataggtttcaaaaatagagtagtgacaggacaagaaatgtcaaccttgtttgcacctagttcttccctcagtgttcatggcagctggatcagtgcgtgtccttkcagatacttgtgttttttatatcattctgaatarccaaatctcatcctacttccttaagttgggtaaaagtctcactgaagtcagtgggagttttgttttgcctgactaatggagtgcttgagaaagaaagttacgcttcagaaaaggagaggt

SEQ ID NO: 479 - DNA, 600 bp, Chicken  19866894084480_3
tctttgggtttttcctttgcctgtctgcaagttgcaaaattccttactgttctgtaatccaaaatcttgttactgtggcttgataaatcatcttgacatgtatttgagcagctgacgtgtcttctctgaagtttgactggcttttcaagttaacctttaaatatactgaagcttttccacagtttttcagactgcagcttcacaaacgaatacagcacatcttccactacaggagagayaagatgttttcaactgatsatgttctgcttttgcatttctcttagcgttagtaatcacttyataggtttcaaaaatagagtagtgacaggacaagaaatgtcaaccttgtttgcacctagttcttccctcagtgttcatggcagctggatcagtgcgtgtccttkcagatacttgtgttttttatatcattctgaatarccaaatctcatcctacttccttaagttgggtaaaagtctcactgaagtcagtgggagttttgttttgcctgactaatggagtgcttgagaaagaaagttacgcttcagaaaaggagaggttagttgaattgtctttgggcttgctgcacaggcaggcaatgt

SEQ ID NO: 480 - DNA, 600 bp, Chicken  19866894084480_4
tgagcagctgacgtgtcttctctgaagtttgactggcttttcaagttaacctttaaatatactgaagcttttccacagtttttcagactgcagcttcacaaacgaatacagcacatcttccactacaggagagayaagatgttttcaactgatsatgttctgcttttgcatttctcttagcgttagtaatcacttyataggtttcaaaaatagagtagtgacaggacaagaaatgtcaaccttgtttgcacctagttcttccctcagtgttcatggcagctggatcagtgcgtgtccttkcagatacttgtgttttttatatcattctgaatarccaaatctcatcctacttccttaagttgggtaaaagtctcactgaagtcagtgggagttttgttttgcctgactaatggagtgcttgagaaagaaagttacgcttcagaaaaggagaggttagttgaattgtctttgggcttgctgcacaggcaggcaatgtgtggcacattttttygtacattttttcgtgtttggtctgcatctgctagcagcctctgcagctcttccagcatgccaaratgtgtcaccattcacccaccagaa

SEQ ID NO: 481 - DNA, 600 bp, Chicken  19866894084480_5
ggcttttcaagttaacctttaaatatactgaagcttttccacagtttttcagactgcagcttcacaaacgaatacagcacatcttccactacaggagagayaagatgttttcaactgatsatgttctgcttttgcatttctcttagcgttagtaatcacttyataggtttcaaaaatagagtagtgacaggacaagaaatgtcaaccttgtttgcacctagttcttccctcagtgttcatggcagctggatcagtgcgtgtccttkcagatacttgtgttttttatatcattctgaatarccaaatctcatcctacttccttaagttgggtaaaagtctcactgaagtcagtgggagttttgttttgcctgactaatggagtgcttgagaaagaaagttacgcttcagaaaaggagaggttagttgaattgtctttgggcttgctgcacaggcaggcaatgtgtggcacattttttygtacattttttcgtgtttggtctgcatctgctagcagcctctgcagctcttccagcatgccaaratgtgtcaccattcacccaccagaagagaaaaatgaacaagaaaaaaacctgataagat

SEQ ID NO: 482 - DNA, 581 bp, Chicken  19866894084480_6
agagtagtgacaggacaagaaatgtcaaccttgtttgcacctagttcttccctcagtgttcatggcagctggatcagtgcgtgtccttkcagatacttgtgttttttatatcattctgaatarccaaatctcatcctacttccttaagttgggtaaaagtctcactgaagtcagtgggagttttgttttgcctgactaatggagtgcttgagaaagaaagttacgcttcagaaaaggagaggttagttgaattgtctttgggcttgctgcacaggcaggcaatgtgtggcacattttttygtacattttttcgtgtttggtctgcatctgctagcagcctctgcagctcttccagcatgccaaratgtgtcaccattcacccaccagaagagaaaaatgaacaagaaaaaaacctgataagatggaaggcaaaaaactgaacttgggattttccccctgaaactcaagctgtgggtcactagtctggtagaaggcttaagacctgcagaagaccatccaaaatggctgtgatgatgaggaagctactttcgttttaaggacctgctcttctgaagtgctga

SEQ ID NO: 483 - DNA, 517 bp, Chicken  19866894084480_7
gcagctggatcagtgcgtgtccttkcagatacttgtgttttttatatcattctgaatarccaaatctcatcctacttccttaagttgggtaaaagtctcactgaagtcagtgggagttttgttttgcctgactaatggagtgcttgagaaagaaagttacgcttcagaaaaggagaggttagttgaattgtctttgggcttgctgcacaggcaggcaatgtgtggcacattttttygtacattttttcgtgtttggtctgcatctgctagcagcctctgcagctcttccagcatgccaaratgtgtcaccattcacccaccagaagagaaaaatgaacaagaaaaaaacctgataagatggaaggcaaaaaactgaacttgggattttccccctgaaactcaagctgtgggtcactagtctggtagaaggcttaagacctgcagaagaccatccaaaatggctgtgatgatgaggaagctactttcgttttaaggacctgctcttctgaagtgctga

SEQ ID NO: 484 - DNA, 599 bp, Chicken  19866894084498_1
  misc_feature (1)..(35): n is any nucleotide
nnnnnnnnnnnnnnnnnnnnnnnnnnnnnnnnnnntgcactctcatcttctgttgtagatattctgttctgttctgtattcatgttctgtttctgaggtagaaattatttgggtagtattgttttacaacttatacatatctggttttgtttgtttgtttgttttttaaaccaattaatttaaataactttttaatatttgtgagtactgctgtaattggaaacataattattataagcaggaaaattaaatttgatttttatgtttatcctgttactatacagcagaaataaatcagtrtaaaagatgatagggaaaaaaataaagctcagggactccaatcttacttgttttctgtcactacttgtcacttctgtcactacttacagagtaactgaagtgcctgtagttgtgtttattagctaatagaatcttagcattgaaacctctagataaattttacctaacgtaacacatacggcaaatgtgtcctgatgtattttgacatatttttacttattaaagtgggtactgctacagacattaaagtaatattattaacattactcctgaaatctaaactctaaattaaatattga

SEQ ID NO: 485 - DNA, 600 bp, Chicken  19866894084498_2
gtaacacatacggcaaatgtgtcctgatgtattttgacatatttttacttattaaagtgggtactgctacagacattaaagtaatattattaacattactcctgaaatctaaactctaaattaaatattgactaattagatattattcttaaatgctgtaaaaaaatattcctatgctattttgaatagaaaatgaaatgtgtgtaattcaggggtagatctcagcattaatactttttgatcattgtcacattatgcaaggactgctaaatccagtagatctgtttctgtgcagaaaaycttcttggtcctggttttgtgctgggaaaaaaataatcttacacaattgaaaatatggacttgattcagcaaatagtcatttagagataactgttgagaggtttgataaatccaaatgctcctattttggcacatttgtctcattttctggcagctgccaattttcagtagaaaccattgcacaatttaaaaacggagtatttctgttactgttcatatcctcaatctggaagcacaagagtctttaaatacctaactttaaaatccactccaaactgaaactaattaggaaatttccac

SEQ ID NO: 486 - DNA, 600 bp, Chicken  19866894084499_1
taaatgactacaatttttacttatttttattgttttaaatgattgtgtagcacttccagcaggtgcactaggtaccttttattgctctaaaactacagacgaggacattaaaaaacaatcctctaacattgagaacttaaccactcaaatcagtcatttcagaggaacagaatgctactgtttgatagacttgactgtgacttaagatacatctctgctgtttgtctgcttcagatttcagctatattcctgaccatctctctttcttacaaatcagtttgcttcataatatcattattytctggatcacaaaattctacagaatacatatttgcatttgtaatygtttatcgttgagaactatatgcacctctatgctgataacacatttctgtgccaattcctccatgaaacaaaaggaacatcagagcryagagaaagcaggccacatttagaggcagcatgtatacagccagctggtcacatagatgggataaatgcttacagcataaacccctttgggtttcggatgcctttactcattttccagctggagaagacactaggatacaactgtttgctctctcagaggagtccatg

SEQ ID NO: 487 - DNA, 600 bp, Chicken  19866894084499_2
tgtagcacttccagcaggtgcactaggtaccttttattgctctaaaactacagacgaggacattaaaaaacaatcctctaacattgagaacttaaccactcaaatcagtcatttcagaggaacagaatgctactgtttgatagacttgactgtgacttaagatacatctctgctgtttgtctgcttcagatttcagctatattcctgaccatctctctttcttacaaatcagtttgcttcataatatcattattytctggatcacaaaattctacagaatacatatttgcatttgtaatygtttatcgttgagaactatatgcacctctatgctgataacacatttctgtgccaattcctccatgaaacaaaaggaacatcagagcryagagaaagcaggccacatttagaggcagcatgtatacagccagctggtcacatagatgggataaatgcttacagcataaacccctttgggtttcggatgcctttactcattttccagctggagaagacactaggatacaactgtttgctctctcagaggagtccatgccatgctgaagtagcagatggaagatgagagtcagctatgacttc

SEQ ID NO: 488 - DNA, 600 bp, Chicken  19866894084499_3
gaacttaaccactcaaatcagtcatttcagaggaacagaatgctactgtttgatagacttgactgtgacttaagatacatctctgctgtttgtctgcttcagatttcagctatattcctgaccatctctctttcttacaaatcagtttgcttcataatatcattattytctggatcacaaaattctacagaatacatatttgcatttgtaatygtttatcgttgagaactatatgcacctctatgctgataacacatttctgtgccaattcctccatgaaacaaaaggaacatcagagcryagagaaagcaggccacatttagaggcagcatgtatacagccagctggtcacatagatgggataaatgcttacagcataaacccctttgggtttcggatgcctttactcattttccagctggagaagacactaggatacaactgtttgctctctcagaggagtccatgccatgctgaagtagcagatggaagatgagagtcagctatgacttcgggattgctgcagatcagtcctacagctgatcaaaattatgcagcacacaaaaccaatcatgttaaaaccctactgagcactcaaga

SEQ ID NO: 489 - DNA, 600 bp, Chicken  19866894084499_4
aacttaaccactcaaatcagtcatttcagaggaacagaatgctactgtttgatagacttgactgtgacttaagatacatctctgctgtttgtctgcttcagatttcagctatattcctgaccatctctctttcttacaaatcagtttgcttcataatatcattattytctggatcacaaaattctacagaatacatatttgcatttgtaatygtttatcgttgagaactatatgcacctctatgctgataacacatttctgtgccaattcctccatgaaacaaaaggaacatcagagcryagagaaagcaggccacatttagaggcagcatgtatacagccagctggtcacatagatgggataaatgcttacagcataaacccctttgggtttcggatgcctttactcattttccagctggagaagacactaggatacaactgtttgctctctcagaggagtccatgccatgctgaagtagcagatggaagatgagagtcagctatgacttcgggattgctgcagatcagtcctacagctgatcaaaattatgcagcacacaaaaccaatcatgttaaaaccctactgagcactcaagat

SEQ ID NO: 490 - DNA, 600 bp, Chicken  19866894084504_1
taaggcgatttttgtttcttttgaactgatcttatgtgaaacaataggttaaactttgaatgtaagcattaggcagataattgcatgtgtagggggaatgtctgaaattgaactttcaggctcttaagcagaagccagctacttgctagctactattgctatgctctggttgtaagttttgataacatttagactgaaaaatagtgacatatcatagatcttccaattattgtcccaaatcctctgattaataaacaggcctgagacagagccaagaagtttggaggctgatcatgtgtygtgcttgtgcattagactatatagactgcaaaaatcagaggcttgggatgctagaagaaagaggaggccaatcagaaggcttcccagaaagaagtgttggaaaaaaagagacctgggaaaaagaagatgaagatcctggctggagaaaagatcctagcagtgggtgcagaacctggagatcataaagctgcatggaggcaaattcttgggtatgtgcagggactttggccgttcactcctgaggctggtggctgccaacagccacacagcaagagctgaaacttctgccctgctttccaa

SEQ ID NO: 491 - DNA, 599 bp, Chicken  19866894084509_1
  misc_feature (1)..(28): n is any nucleotide
nnnnnnnnnnnnnnnnnnnnnnnnnnnntttatataatcacagaatggtagagttggaaggcatctttgaaagtcacctggtccaaacatcctgctcaaacagggacatctagagcaggttgccagggaccacattttccagacagcttttaaaatcactcaggaaggacgttccacaacctcacaacctttctggccaatcaatattgtattccagtgctcagtcaccacaccacaattttcttatgaaaacttatagtataaaaaagattttgattctccagataatatgtgcatttkgggtcttgccagtgctgctgtaaattttatttctgtctgcaatacaaattatctttcaaagtttacatgatgtcttttaatttataaaagaagcacaacaaaaatcacgtatttgtacataacaaatatttttgtattctcctagtgatagctaagaacatacttgcagaatgtaattcatttatggagaatatgggaagaagttctactagataaagaaactttttgaatgtccaagcttactcagtgatttaacttctttagagatatattttgataaaattttctgaaataattac

SEQ ID NO: 492 - DNA, 600 bp, Chicken  19866894084514_1
ctgggctacccccagagtagtgatcaaagcccttataaaactatgatatccagtattatatcttaccaaagggttatcaacccctgaggcgctttaaaaatctcatcttgtggagccagacatcctcccatgcaatgacctttccaatgatcaggaaaagactttctgtccctaccatctccacacagccaccagtatgctggtcgcaatttgcaccaactacgaagctatggcacctatgcaattgggatcttcaccttcaaaaagagaactgaaaaagttccttgatcagaggatatwgttgcaggaaccctaaaccttggaattacttcgtgcagcaacaccttggttatttctttggctttgttggtcctgcaagggaatgcttctggcyaccctgaaaaggtattgattagtacatataatgaaaccccccttttcttggcatttccaaaaatcaatttgccactgttgccctggaaggttccctttcccaacaggccccatttgtaccccgtttctggtaccagaatcatacaattactttgtttaaatatttacgagagtctgtttccccagtatgtttattatgttccctta

SEQ ID NO: 493 - DNA, 600 bp, Chicken  19866894084514_2
taaaaatctcatcttgtggagccagacatcctcccatgcaatgacctttccaatgatcaggaaaagactttctgtccctaccatctccacacagccaccagtatgctggtcgcaatttgcaccaactacgaagctatggcacctatgcaattgggatcttcaccttcaaaaagagaactgaaaaagttccttgatcagaggatatwgttgcaggaaccctaaaccttggaattacttcgtgcagcaacaccttggttatttctttggctttgttggtcctgcaagggaatgcttctggcyaccctgaaaaggtattgattagtacatataatgaaaccccccttttcttggcatttccaaaaatcaatttgccactgttgccctggaaggttccctttcccaacaggccccatttgtaccccgtttctggtaccagaatcatacaattactttgtttaaatatttacgagagtctgtttccccagtatgtttattatgttcccttagaatcactaaagggtacaacaatgcgtctatcggggtatgcacacatctgtcagcttgctcccttcccttctaaatcattaattagatccctat

SEQ ID NO: 494 - DNA, 600 bp, Chicken  19866894084514_3
aggtaatggttttgtccttgtctcacaaaactgcttccatcgatgaacccaagtctcaggttcaggagctgactggttctcaaaaatcactgggcttttctcacaaccctgggtaaaactgtccaggttaaccgagtcttttctctccatattggggttttcctaatcaaaggtaaataactttagactttctttggcaaaaccaagtggaaaaaggcatccttcaagtccagagcagtaaaccctacctactcattccttaatttggttaataaaagtgtaaggatttgccaccactargtgtatatcctcaacaattctattaattgacctcaagtcttgtaccaaatcatagctcttgctgcccrattttcactggcaagactagggtgtcatatttggattcacattcaattaataatccaaagtccaaaaagtcttctattctttcttttatccttctacagtcttgtatcctccaaggggcactgctttaccctractgggctgacccttgcttttaacttaacttctattggggctgcatttttagctctgccaggtgtcccccatgtccacactcctgggtgtacctgattc

SEQ ID NO: 495 - DNA, 533 bp, Chicken  19866894084514_4
ctgactggttctcaaaaatcactgggcttttctcacaaccctgggtaaaactgtccaggttaaccgagtcttttctctccatattggggttttcctaatcaaaggtaaataactttagactttctttggcaaaaccaagtggaaaaaggcatccttcaagtccagagcagtaaaccctacctactcattccttaatttggttaataaaagtgtaaggatttgccaccactargtgtatatcctcaacaattctattaattgacctcaagtcttgtaccaaatcatagctcttgctgcccrattttcactggcaagactagggtgtcatatttggattcacattcaattaataatccaaagtccaaaaagtcttctattctttcttttatccttctacagtcttgtatcctccaaggggcactgctttaccctractgggctgacccttgcttttaacttaacttctattggggctgcatttttagctctgccaggtgtcccccatgtccacactcctgggtgtacctgattca

SEQ ID NO: 496 - DNA, 400 bp, Chicken  19866894084514_5
accaagtggaaaaaggcatccttcaagtccagagcagtaaaccctacctactcattccttaatttggttaataaaagtgtaaggatttgccaccactargtgtatatcctcaacaattctattaattgacctcaagtcttgtaccaaatcatagctcttgctgcccrattttcactggcaagactagggtgtcatatttggattcacattcaattaataatccaaagtccaaaaagtcttctattctttcttttatccttctacagtcttgtatcctccaaggggcactgctttaccctractgggctgacccttgcttttaacttaacttctattggggctgcatttttagctctgccaggtgtcccccatgtccacactcctgggtgtacctgattca

SEQ ID NO: 497 - DNA, 600 bp, Chicken  19866894084516_1
ataacactgtttacattttatattacaaggtcatttttttctgacagaagtgctccattctcagagcacacaagggcttctccaaggagatactgatacatggacgtaacttctaacagaactagactgatgacagtattagcaagagtacataccttgaaagacagtacaaaaaaatccctcatcttttcagggcagtccttgagctgtacagctaagttccaagctaacagagacacaaaaactgaagatgagaataaaaatctaagacatgttactggttatgcccatctaatctcyartaataggcagaacatattgtgcaattcaatttcttaatcaaaacatcaacaggtcatttwatggcaagagatacctgcattagtgatttgttaacataccttattcctgctttcaaaccttgttttaataattttatcacaaycaagtgttcattctaacacatacactccccacaagagtatgaattgcaagaagcrttttcttgttagtaaacaagatcagaatctgaataaaaatattgaccagtattcccaagagaagtaattaaacagacccacaatcacaccattcaccact

SEQ ID NO: 498 - DNA, 600 bp, Chicken  19866894084516_2
aacactgtttacattttatattacaaggtcatttttttctgacagaagtgctccattctcagagcacacaagggcttctccaaggagatactgatacatggacgtaacttctaacagaactagactgatgacagtattagcaagagtacataccttgaaagacagtacaaaaaaatccctcatcttttcagggcagtccttgagctgtacagctaagttccaagctaacagagacacaaaaactgaagatgagaataaaaatctaagacatgttactggttatgcccatctaatctcyartaataggcagaacatattgtgcaattcaatttcttaatcaaaacatcaacaggtcatttwatggcaagagatacctgcattagtgatttgttaacataccttattcctgctttcaaaccttgttttaataattttatcacaaycaagtgttcattctaacacatacactccccacaagagtatgaattgcaagaagcrttttcttgttagtaaacaagatcagaatctgaataaaaatattgaccagtattcccaagagaagtaattaaacagacccacaatcacaccattcaccactga

SEQ ID NO: 499 - DNA, 600 bp, Chicken  19866894084516_3
agagcacacaagggcttctccaaggagatactgatacatggacgtaacttctaacagaactagactgatgacagtattagcaagagtacataccttgaaagacagtacaaaaaaatccctcatcttttcagggcagtccttgagctgtacagctaagttccaagctaacagagacacaaaaactgaagatgagaataaaaatctaagacatgttactggttatgcccatctaatctcyartaataggcagaacatattgtgcaattcaatttcttaatcaaaacatcaacaggtcatttwatggcaagagatacctgcattagtgatttgttaacataccttattcctgctttcaaaccttgttttaataattttatcacaaycaagtgttcattctaacacatacactccccacaagagtatgaattgcaagaagcrttttcttgttagtaaacaagatcagaatctgaataaaaatattgaccagtattcccaagagaagtaattaaacagacccacaatcacaccattcaccactgatggcagcatattcatcggaactttctaatgctgatttaatctgcataagaacatgcatac

SEQ ID NO: 500 - DNA, 600 bp, Chicken  19866894084516_4
gagtacataccttgaaagacagtacaaaaaaatccctcatcttttcagggcagtccttgagctgtacagctaagttccaagctaacagagacacaaaaactgaagatgagaataaaaatctaagacatgttactggttatgcccatctaatctcyartaataggcagaacatattgtgcaattcaatttcttaatcaaaacatcaacaggtcatttwatggcaagagatacctgcattagtgatttgttaacataccttattcctgctttcaaaccttgttttaataattttatcacaaycaagtgttcattctaacacatacactccccacaagagtatgaattgcaagaagcrttttcttgttagtaaacaagatcagaatctgaataaaaatattgaccagtattcccaagagaagtaattaaacagacccacaatcacaccattcaccactgatggcagcatattcatcggaactttctaatgctgatttaatctgcataagaacatgcatactcagtatttgttgctatttttttattgcccttagcagtactttttttttccagacrctaaagaaaatcayggatattttctat

SEQ ID NO: 501 - DNA, 600 bp, Chicken  19866894084516_5
cttgagctgtacagctaagttccaagctaacagagacacaaaaactgaagatgagaataaaaatctaagacatgttactggttatgcccatctaatctcyartaataggcagaacatattgtgcaattcaatttcttaatcaaaacatcaacaggtcatttwatggcaagagatacctgcattagtgatttgttaacataccttattcctgctttcaaaccttgttttaataattttatcacaaycaagtgttcattctaacacatacactccccacaagagtatgaattgcaagaagcrttttcttgttagtaaacaagatcagaatctgaataaaaatattgaccagtattcccaagagaagtaattaaacagacccacaatcacaccattcaccactgatggcagcatattcatcggaactttctaatgctgatttaatctgcataagaacatgcatactcagtatttgttgctatttttttattgcccttagcagtactttttttttccagacrctaaagaaaatcayggatattttctatttgcttgatcttgtatttgacttcagtaatataatcttggtagcaaagggctaag

SEQ ID NO: 502 - DNA, 600 bp, Chicken  19866894084516_6
accttgttttaataattttatcacaaycaagtgttcattctaacacatacactccccacaagagtatgaattgcaagaagcrttttcttgttagtaaacaagatcagaatctgaataaaaatattgaccagtattcccaagagaagtaattaaacagacccacaatcacaccattcaccactgatggcagcatattcatcggaactttctaatgctgatttaatctgcataagaacatgcatactcagtatttgttgctatttttttattgcccttagcagtactttttttttccagacrctaaagaaaatcayggatattttctatttgcttgatcttgtatttgacttcagtaatataatcttggtagcaaagggctaagcaggaaaaaaaatacgatccctgcatagttgttatcatgggcacatacaactcctgtggtaaagagcagtactaacctccccatcagtcacatagacctcatgcaagtatttgagttaaaatatgagctgtaccaggcagtttcagaagacaaaaaatgcaaaagcaaattgcatttgcatttaaagcaaagactgccaaaggtgacacctttcataa

SEQ ID NO: 503 - DNA, 600 bp, Chicken  19866894084516_7
attttatcacaaycaagtgttcattctaacacatacactccccacaagagtatgaattgcaagaagcrttttcttgttagtaaacaagatcagaatctgaataaaaatattgaccagtattcccaagagaagtaattaaacagacccacaatcacaccattcaccactgatggcagcatattcatcggaactttctaatgctgatttaatctgcataagaacatgcatactcagtatttgttgctatttttttattgcccttagcagtactttttttttccagacrctaaagaaaatcayggatattttctatttgcttgatcttgtatttgacttcagtaatataatcttggtagcaaagggctaagcaggaaaaaaaatacgatccctgcatagttgttatcatgggcacatacaactcctgtggtaaagagcagtactaacctccccatcagtcacatagacctcatgcaagtatttgagttaaaatatgagctgtaccaggcagtttcagaagacaaaaaatgcaaaagcaaattgcatttgcatttaaagcaaagactgccaaaggtgacacctttcataatactgcatcttcaa

SEQ ID NO: 504 - DNA, 599 bp, Chicken  19866894084522_1
  misc_feature (1)..(107): n is any nucleotide
nnnnnnnnnnnnnnnnnnnnnnnnnnnnnnnnnnnnnnnnnnnnnnnnnnnnnnnnnnnnnnnnnnnnnnnnnnnnnnnnnnnnnnnnnnnnnnnnnnnnnnnnnnntcttgaaaaagccccaatttaacccaaaaatcacgccttttctttgcaaatatcccccacttaacacaaaaatcatgcctgttctctatgaaaatcccccatctaaaaagaaaatcatgcattttcgcttggaaaatcccccatttaagtgaaaatcacgcattttggctttgaaaacccccaatttaacccmaaatgaattattttctcttcgaaattcccccatttaacgcgaaaatcacacattttcccttcaaaaataccccctttaaacaaaactcacacattttctctatgagaatccctgatttaaactgaaaatcacgcacattctcttcaaaaatagctgtttaaccccgaaaatcacgcgttttctctgctagaatcaccccttaacccgaaaatcatgcactgtctcttcaacaatcccccatttaaccccaaaatcatgcattatctcttcaaaaataccccatttaaacaaaaatcaca

SEQ ID NO: 505 - DNA, 599 bp, Chicken  19866894084530_1
  misc_feature (1)..(207): n is any nucleotide
nnnnnnnnnnnnnnnnnnnnnnnnnnnnnnnnnnnnnnnnnnnnnnnnnnnnnnnnnnnnnnnnnnnnnnnnnnnnnnnnnnnnnnnnnnnnnnnnnnnnnnnnnnnnnnnnnnnnnnnnnnnnnnnnnnnnnnnnnnnnnnnnnnnnnnnnnnnnnnnnnnnnnnnnnnnnnnnnnnnnnnnnnnnnnnnnnnnnnnnnnnnnnnngtgtgagttttgtttaaagggggtatttttgaagggaaaatgtgtgattttcgcgttaaatgggggaatttcgaagagaaaataattcatttkgggttaaattgggggttttcaaagccaaaatgcgtgattttcacttaaatgggggattttccaagcgaaaatgcatgattttctttttagatgggggattttcatagagaacaggcatgatttttgtgttaagtgggggatatttgcaaagaaaaggcgtgatttttgggttaaattggggttttttcaagagaaaatgtgtgattttcagttaaattgcggaatctctaggagaaaatgcctgatgtttgcattaaacgtgtgattttcgtagagataatgcgtgacgttcaggttac

SEQ ID NO: 506 - DNA, 600 bp, Chicken  19866894084542_1
agttttgtttaaagggggtatttttgaagggaaaatgtgtgattttcgcgttaaatgggggaatttcgaagagaaaataattcattttgggttaaattgggggttttcaaagccaaaatgcgtgattttcacttaaatgggggattttccaagcgaaaatgcatgattttctttttagatgggggattttcatagagaacaggcatgatttttgtgttaagtgggggatatttgcaaagaaaaggcgtgatttttgggttaaattggggctttttcaagagaaaatgtgtgattttcagwtaaattgcggaatctctaagagaaaatgcctgatgtttgcattaaayrtgtgattttcgtagagataatgcgtgacgttcaggttacatgggagatttttgaagagaaaatgcgtgattttcgggataaatcagggattctcgaagagaaaatgcctcattttcgggttaaatgggggactttggaagagaaattgcattttcttctggtcaaatgggggattttcgaagagmaactgcatgattttcgtttacatgtgagatttttgtagaggaaatgcgtgatttttttggaaacatg

SEQ ID NO: 507 - DNA, 600 bp, Chicken  19866894084542_2
gcgttaaatgggggaatttcgaagagaaaataattcattttgggttaaattgggggttttcaaagccaaaatgcgtgattttcacttaaatgggggattttccaagcgaaaatgcatgattttctttttagatgggggattttcatagagaacaggcatgatttttgtgttaagtgggggatatttgcaaagaaaaggcgtgatttttgggttaaattggggctttttcaagagaaaatgtgtgattttcagwtaaattgcggaatctctaagagaaaatgcctgatgtttgcattaaayrtgtgattttcgtagagataatgcgtgacgttcaggttacatgggagatttttgaagagaaaatgcgtgattttcgggataaatcagggattctcgaagagaaaatgcctcattttcgggttaaatgggggactttggaagagaaattgcattttcttctggtcaaatgggggattttcgaagagmaactgcatgattttcgtttacatgtgagatttttgtagaggaaatgcgtgatttttttggaaacatgggggactcttgtagcaaaaaagtttgattttggggtcaaacggggga

SEQ ID NO: 508 - DNA, 600 bp, Chicken  19866894084542_3
cgttaaatgggggaatttcgaagagaaaataattcattttgggttaaattgggggttttcaaagccaaaatgcgtgattttcacttaaatgggggattttccaagcgaaaatgcatgattttctttttagatgggggattttcatagagaacaggcatgatttttgtgttaagtgggggatatttgcaaagaaaaggcgtgatttttgggttaaattggggctttttcaagagaaaatgtgtgattttcagwtaaattgcggaatctctaagagaaaatgcctgatgtttgcattaaayrtgtgattttcgtagagataatgcgtgacgttcaggttacatgggagatttttgaagagaaaatgcgtgattttcgggataaatcagggattctcgaagagaaaatgcctcattttcgggttaaatgggggactttggaagagaaattgcattttcttctggtcaaatgggggattttcgaagagmaactgcatgattttcgtttacatgtgagatttttgtagaggaaatgcgtgatttttttggaaacatgggggactcttgtagcaaaaaagtttgattttggggtcaaacgggggat

SEQ ID NO: 509 - DNA, 600 bp, Chicken  19866894084542_4
gcaaagaaaaggcgtgatttttgggttaaattggggctttttcaagagaaaatgtgtgattttcagwtaaattgcggaatctctaagagaaaatgcctgatgtttgcattaaayrtgtgattttcgtagagataatgcgtgacgttcaggttacatgggagatttttgaagagaaaatgcgtgattttcgggataaatcagggattctcgaagagaaaatgcctcattttcgggttaaatgggggactttggaagagaaattgcattttcttctggtcaaatgggggattttcgaagagmaactgcatgattttcgtttacatgtgagatttttgtagaggaaatgcgtgatttttttggaaacatgggggactcttgtagcaaaaaagtttgattttggggtcaaacgggggatttttgaagagaaaatgtgtgatttttgtttaaatgggctatttttgaagagataatgcatgatttggggttaaatgggggattgttgaagagacagtgcatgattttcgggttaaggggtgattctagcagagaaaacgcgtgattttcggggttaaacagctatttttgaagagaatgtgcgtg

SEQ ID NO: 510 - DNA, 599 bp, Chicken  19866894084551_1
  misc_feature (1)..(57): n is any nucleotide
nnnnnnnnnnnnnnnnnnnnnnnnnnnnnnnnnnnnnnnnnnnnnnnnnnnnnnnnnaatgcgtgattttcacttaaatgggggattttccaagcgaaaatgcatgattttctttttagatgggggattttcatagagaacaggcatgatttttgtgttaagtgggggatatttgcaaagaaaaggcgtgatttttgggttaaattggggttttttcaagagaaaatgtgtgattttcagttaaattgcgagaatctctaggagaaaatgcctgatgtttgcattaaacgtgtgattttygtagagataatgcgtgacgttcaggttacatgggagatttttgaagagaaaatgcgtgattttcgggataaatcagggattctcgaagagaaaatgcctcattttcgggttaaatgggggactttggaagagaaattgcattttcttctggtcaaatgggggattttcgaagagcaactgcatgattttcgtttacatgtgagatttttgtaaaggaaatgcgcgattttttggatacatgggggactcttgtagcaaaaaaagtttgatttwggggtcaaacgggggatttttgaaga

SEQ ID NO: 511 - DNA, 600 bp, Chicken  19866894084551_2
gatgtttgcattaaacgtgtgattttygtagagataatgcgtgacgttcaggttacatgggagatttttgaagagaaaatgcgtgattttcgggataaatcagggattctcgaagagaaaatgcctcattttcgggttaaatgggggactttggaagagaaattgcattttcttctggtcaaatgggggattttcgaagagcaactgcatgattttcgtttacatgtgagatttttgtaaaggaaatgcgcgattttttggatacatgggggactcttgtagcaaaaaaagtttgatttwggggtcaaacgggggatttttgaagagcagaagtgtgattttcacgttaaatgggggattttccacgagaaaatgtgtgaatttgtggataatggggtatttttgaagagataatgcatgatttkggggtaaatgtgggattttccaagacaaaaggcaagattttcgggtagaatgggggactttgcaagagacgttgtgtgattttkgggataaaagggggatttttgaagagaaaatgtgtgatttttgtttaaatggggtatttttgaagagataatgcgtgattttggggttaaa

SEQ ID NO: 512 - DNA, 600 bp, Chicken  19866894084551_3
tcattttcgggttaaatgggggactttggaagagaaattgcattttcttctggtcaaatgggggattttcgaagagcaactgcatgattttcgtttacatgtgagatttttgtaaaggaaatgcgcgattttttggatacatgggggactcttgtagcaaaaaaagtttgatttwggggtcaaacgggggatttttgaagagcagaagtgtgattttcacgttaaatgggggattttccacgagaaaatgtgtgaatttgtggataatggggtatttttgaagagataatgcatgatttkggggtaaatgtgggattttccaagacaaaaggcaagattttcgggtagaatgggggactttgcaagagacgttgtgtgattttkgggataaaagggggatttttgaagagaaaatgtgtgatttttgtttaaatggggtatttttgaagagataatgcgtgattttggggttaaatgggggattgttgaagagacagtgcatgattttcgggttaaggggtgattctagcagagaaaacgcgtgattttcggggttaaacagctatttttgaagagaatgtgcgtgattttcagtttaaa

SEQ ID NO: 513 - DNA, 565 bp, Chicken  19866894084551_4
tgattttcgtttacatgtgagatttttgtaaaggaaatgcgcgattttttggatacatgggggactcttgtagcaaaaaaagtttgatttwggggtcaaacgggggatttttgaagagcagaagtgtgattttcacgttaaatgggggattttccacgagaaaatgtgtgaatttgtggataatggggtatttttgaagagataatgcatgatttkggggtaaatgtgggattttccaagacaaaaggcaagattttcgggtagaatgggggactttgcaagagacgttgtgtgattttkgggataaaagggggatttttgaagagaaaatgtgtgatttttgtttaaatggggtatttttgaagagataatgcgtgattttggggttaaatgggggattgttgaagagacagtgcatgattttcgggttaaggggtgattctagcagagaaaacgcgtgattttcggggttaaacagctatttttgaagagaatgtgcgtgattttcagtttaaatcagggattctcatagagaaaatgtgtgagttttgtttaaagggggtat

SEQ ID NO: 514 - DNA, 600 bp, Chicken  19866894084552_1
attttcgggatatatcagggattctcaaagagaaaatgcctcatttttgggttaaatgggggactttggaagagaaattgcattttcttctggtcaaatgggggattttcgaagagaaactgcatgattttcgtttacatgtgagatttttgtagaggaaatgcgtgattttttggaaacatgggggactcttgtagcaaaaaagtttgattttggggtcaaacgggggatttttgaagagcagaagtgtgattttcacgttaaatgggggattttccacgagaaaatgtgtgaatttgkggataatggggtatttttgaagagataatgcatgcttttggggtaaatgcaggattttccaagagaaatggcgagattttcgggtagaatgggggactttgcaagagacgttgtgtgattttgggataaaagggggatttttgaagagaaaatgtgtgatttttgtttaaatggggtatttttgaagagataattcatgcttttggggtaactgcaggattttccaagagaaatggcgagattttggggttgaatgggggactttgcaagagacgttgtgtgattttggggataaaaggg

SEQ ID NO: 515 - DNA, 599 bp, Chicken  19866894084606_1
  misc_feature (1)..(100): n is any nucleotide
nnnnnnnnnnnnnnnnnnnnnnnnnnnnnnnnnnnnnnnnnnnnnnnnnnnnnnnnnnnnnnnnnnnnnnnnnnnnnnnnnnnnnnnnnnnnnnnnnnnnatttttgaagagaaaatgtgtgttttttgggatgaatcagggattctcgaagagaaaatgcctcattttcgggttaaatgggggactttggaagagaaattgcattttcttctggtcaaatgggggattttcgaagagcaactgcatgattttcgtttacatgtgagatttttgtagaggaaatgcgtgattttttggawacatgggggactcttgtagcaaaaaaagtttgattttggggtcaaacgggggatttttgaagagcagaagtgtgattttcacgttaaatgggggattttccacaagaaaatgtgtgaatttgggggatgatggggtaattttgaagagataatgcatgattttggggtaaatgtgggattttccaagagaaaaggcaagattttggggtwgaatgggggactttgcaggagaagttgtgtgattttkgggataaaagggggatatttgaagagcaaatgtgtgttttttgggatgaatc

SEQ ID NO: 516 - DNA, 600 bp, Chicken  19866894084606_2
tctggtcaaatgggggattttcgaagagcaactgcatgattttcgtttacatgtgagatttttgtagaggaaatgcgtgattttttggawacatgggggactcttgtagcaaaaaaagtttgattttggggtcaaacgggggatttttgaagagcagaagtgtgattttcacgttaaatgggggattttccacaagaaaatgtgtgaatttgggggatgatggggtaattttgaagagataatgcatgattttggggtaaatgtgggattttccaagagaaaaggcaagattttggggtwgaatgggggactttgcaggagaagttgtgtgattttkgggataaaagggggatatttgaagagcaaatgtgtgttttttgggatgaatcagggattctcgaagagaaaatgcctcattttcgggttaaatgggggactttggaagagaaattgcattttcttctggtcaaatgggggattttcgaagagcaactgcatgattttcgtttacatgtgagacttttgtagaggaaatgcgtgattttttggaaacatgggggactcttgtagcaaaaaagtttgattttggggtcaaacggg

SEQ ID NO: 517 - DNA, 600 bp, Chicken  19866894084606_3
gattttcgtttacatgtgagatttttgtagaggaaatgcgtgattttttggawacatgggggactcttgtagcaaaaaaagtttgattttggggtcaaacgggggatttttgaagagcagaagtgtgattttcacgttaaatgggggattttccacaagaaaatgtgtgaatttgggggatgatggggtaattttgaagagataatgcatgattttggggtaaatgtgggattttccaagagaaaaggcaagattttggggtwgaatgggggactttgcaggagaagttgtgtgattttkgggataaaagggggatatttgaagagcaaatgtgtgttttttgggatgaatcagggattctcgaagagaaaatgcctcattttcgggttaaatgggggactttggaagagaaattgcattttcttctggtcaaatgggggattttcgaagagcaactgcatgattttcgtttacatgtgagacttttgtagaggaaatgcgtgattttttggaaacatgggggactcttgtagcaaaaaagtttgattttggggtcaaacgggggatttttgaagagcagaagtgtgattttcacgttaa

SEQ ID NO: 518 - DNA, 600 bp, Chicken  19866894084627_1
taacgtgaaaatcacacttctgctcttcaaaaatcccccgtttgaccccaaaatcaaacttttttgctacaagagtcccccatgtttccaaaaaatcacgcatttcctctacaaaaatctcacatgtaaacgaaaatcatgcagttgctcttcgaaaatcccccatttgaccagaagaaaatgcaatttctcttccaaagtcccccatttaacccgaaaatgaggcattttctcttcgagaatccctgattcatcccaaaaaacacacattttctcttcaaaaatcccccttttatcccmaaaatcacacaacttctcttgcaaagtcccccattcaacccgaacatcttgccttttctcttstaaaatcccgcatttaccccaaaatcatgcattatctcttcaaaaataccccattatcccccaaattcacacattttcttgtggaaaatcccccatttaacgtgaaaatcacacttctgctcttcaaaaatcccccgtttgaccccaaaatcaaacttttttgctacaagagtcccccatgtatccaaaaaatcacgcatttcctctacaaaaatctcacatgtaaacgaaaatcat

SEQ ID NO: 519 - DNA, 600 bp, Chicken  19866894084627_2
ttgctacaagagtcccccatgtttccaaaaaatcacgcatttcctctacaaaaatctcacatgtaaacgaaaatcatgcagttgctcttcgaaaatcccccatttgaccagaagaaaatgcaatttctcttccaaagtcccccatttaacccgaaaatgaggcattttctcttcgagaatccctgattcatcccaaaaaacacacattttctcttcaaaaatcccccttttatcccmaaaatcacacaacttctcttgcaaagtcccccattcaacccgaacatcttgccttttctcttstaaaatcccgcatttaccccaaaatcatgcattatctcttcaaaaataccccattatcccccaaattcacacattttcttgtggaaaatcccccatttaacgtgaaaatcacacttctgctcttcaaaaatcccccgtttgaccccaaaatcaaacttttttgctacaagagtcccccatgtatccaaaaaatcacgcatttcctctacaaaaatctcacatgtaaacgaaaatcatgcagttgctcttcgaaaatcccccatttgaccagaagaaaatgcaatttctcttccaaagtcc

SEQ ID NO: 520 - DNA, 600 bp, Chicken  19866894084645_1
acattttcttgtggaaaatcccccatttaacgtgaaaatcacacttctgctcttcaaaaatcccccgtttgaccccaaaatcaaacttttttgctacaagagtcccccatgtatccaaaaaatcacgcatttcctctacaaaaatctcacatgtaaacgaaaatcatgcagttgctcttcgaaaatcccccatttgaccagaagaaaatgcaatttctctttcaaagtcccccatttaacccgaaaatgaggcattttctcttcgagaatccctgattcatcccaaaaaacacacatttkctcttcaaaaatcccccttttmtcccmaaaatcacacaacttctcttgcaaagtcccccattctacccgaaaatcttgccttttctcttctaaaatcccgcatttacccccaaatcatgcattatctcttcaaaaataccccattatccacaaattcacacattttctcgtggaaaatcccccatttaacgtgaaaatcacacttctgctcttcaaaaatcccccgtttgaccccaaaatcaaacttttttgctacaagagtcccccatgtwtccaaaaaatcacgcatttcctctacaa

SEQ ID NO: 521 - DNA, 600 bp, Chicken  19866894084645_2
ccatttaacgtgaaaatcacacttctgctcttcaaaaatcccccgtttgaccccaaaatcaaacttttttgctacaagagtcccccatgtatccaaaaaatcacgcatttcctctacaaaaatctcacatgtaaacgaaaatcatgcagttgctcttcgaaaatcccccatttgaccagaagaaaatgcaatttctctttcaaagtcccccatttaacccgaaaatgaggcattttctcttcgagaatccctgattcatcccaaaaaacacacatttkctcttcaaaaatcccccttttmtcccmaaaatcacacaacttctcttgcaaagtcccccattctacccgaaaatcttgccttttctcttctaaaatcccgcatttacccccaaatcatgcattatctcttcaaaaataccccattatccacaaattcacacattttctcgtggaaaatcccccatttaacgtgaaaatcacacttctgctcttcaaaaatcccccgtttgaccccaaaatcaaacttttttgctacaagagtcccccatgtwtccaaaaaatcacgcatttcctctacaaaaatctcacatgtaaacgaaaa

SEQ ID NO: 522 - DNA, 600 bp, Chicken  19866894084645_3
taacgtgaaaatcacacttctgctcttcaaaaatcccccgtttgaccccaaaatcaaacttttttgctacaagagtcccccatgtatccaaaaaatcacgcatttcctctacaaaaatctcacatgtaaacgaaaatcatgcagttgctcttcgaaaatcccccatttgaccagaagaaaatgcaatttctctttcaaagtcccccatttaacccgaaaatgaggcattttctcttcgagaatccctgattcatcccaaaaaacacacatttkctcttcaaaaatcccccttttmtcccmaaaatcacacaacttctcttgcaaagtcccccattctacccgaaaatcttgccttttctcttctaaaatcccgcatttacccccaaatcatgcattatctcttcaaaaataccccattatccacaaattcacacattttctcgtggaaaatcccccatttaacgtgaaaatcacacttctgctcttcaaaaatcccccgtttgaccccaaaatcaaacttttttgctacaagagtcccccatgtwtccaaaaaatcacgcatttcctctacaaaaatctcacatgtaaacgaaaatcatg

SEQ ID NO: 523 - DNA, 600 bp, Chicken  19866894084645_4
ctgattcatcccaaaaaacacacatttkctcttcaaaaatcccccttttmtcccmaaaatcacacaacttctcttgcaaagtcccccattctacccgaaaatcttgccttttctcttctaaaatcccgcatttacccccaaatcatgcattatctcttcaaaaataccccattatccacaaattcacacattttctcgtggaaaatcccccatttaacgtgaaaatcacacttctgctcttcaaaaatcccccgtttgaccccaaaatcaaacttttttgctacaagagtcccccatgtwtccaaaaaatcacgcatttcctctacaaaaatctcacatgtaaacgaaaatcatgcagttgctcttcgaaaatcccccatttgaccagaagaaaatgcaatttctctttcaaagtcccccatttaacccgaaaatgaggcattttctcttcgagaatccctgattcatcccaaaaaacacacattttctcttcaaaaatcccccttttatccccaaaatcacacaacttctcttgcaaagtcccccattctacccgaaaatcttgccttttctcttgtaaaatcccgcatttacccccaa

SEQ ID NO: 524 - DNA, 422 bp, Chicken  19866894084651_1
gcatgattttggggtaaatgcaggattttccaagagaaatggcgagattttcgggttgaatgggggactttgcaagagaagttgtgtgattttggggataaaagggggatttttgaagagaaaatgtgtgatttttgtttaaatggggtatttttgaagagataatgcatgatttggggttaaatgggggattgttgaagagacagtgcatgattttcgggttaaggggtgattctagaatagaaaacgcgtgattttcggggttaaacagctatttttgaagagaatgtgcatgatttycagtttaaatcagggattctcatagagaaaatgtgtgagttttgtttaaagggggtatttttgaagggaaaatgtgtattttcgggataaatccgggattctcaaagagaaaactgcctcat

SEQ ID NO: 525 - DNA, 600 bp, Chicken  19866894084667_1
taagaaagtttgtaggtagtggtaatttagacattgactctaagattttaatgaggagctaagttagctttttctgatgctttggctgtttgggaagggtaaatttcattgcttacgtatgcttaagagtgcccactgtgtgggcagagtgaggaggtgggtgacgttctggagagtgctgcagagtggtttccagcaaggttggattgcgtgctgcaccacgtccttctataatgagcacagctgtgtgaggatgctcaaaggtctttgagacagcatcctggctgctggcagtctgartctctggttaawcagcaagtcttggtaatgaacttttagtaccttacactcaataaagcagtgsctaagttttttgacctaaagcagatctgtaatttcctgctttctggtgcccatctttgcagctggggaatgtgtggccccacatccatccataacaatgaattgaacagttatttaaatgtttgcagtgatttccttctgctgctggcattgtcagagtgacccaggactttgcgatgccccaaggggacaaaagcaaagtgctgctttacctgatattgtcctgatgtacactgg

SEQ ID NO: 526 - DNA, 600 bp, Chicken  19866894084667_2
taggtagtggtaatttagacattgactctaagattttaatgaggagctaagttagctttttctgatgctttggctgtttgggaagggtaaatttcattgcttacgtatgcttaagagtgcccactgtgtgggcagagtgaggaggtgggtgacgttctggagagtgctgcagagtggtttccagcaaggttggattgcgtgctgcaccacgtccttctataatgagcacagctgtgtgaggatgctcaaaggtctttgagacagcatcctggctgctggcagtctgartctctggttaawcagcaagtcttggtaatgaacttttagtaccttacactcaataaagcagtgsctaagttttttgacctaaagcagatctgtaatttcctgctttctggtgcccatctttgcagctggggaatgtgtggccccacatccatccataacaatgaattgaacagttatttaaatgtttgcagtgatttccttctgctgctggcattgtcagagtgacccaggactttgcgatgccccaaggggacaaaagcaaagtgctgctttacctgatattgtcctgatgtacactgggaaactcttcat

SEQ ID NO: 527 - DNA, 600 bp, Chicken  19866894084667_3
tagctttttctgatgctttggctgtttgggaagggtaaatttcattgcttacgtatgcttaagagtgcccactgtgtgggcagagtgaggaggtgggtgacgttctggagagtgctgcagagtggtttccagcaaggttggattgcgtgctgcaccacgtccttctataatgagcacagctgtgtgaggatgctcaaaggtctttgagacagcatcctggctgctggcagtctgartctctggttaawcagcaagtcttggtaatgaacttttagtaccttacactcaataaagcagtgsctaagttttttgacctaaagcagatctgtaatttcctgctttctggtgcccatctttgcagctggggaatgtgtggccccacatccatccataacaatgaattgaacagttatttaaatgtttgcagtgatttccttctgctgctggcattgtcagagtgacccaggactttgcgatgccccaaggggacaaaagcaaagtgctgctttacctgatattgtcctgatgtacactgggaaactcttcatggtatgataggaaaaggaaatgttacaaagtgttggctgtgggaaacgtatc

SEQ ID NO: 528 - DNA, 600 bp, Chicken  19866894084667_4
accctctgtttatatttgcatgcatacacattcatgcatttttttagcaagctcagagatttggtttggatccactcataaaaacagggaaaataagagttgttcagtgaccttcagctgagaagagattgagaggagtaaaagagaaccatctttgctctgtggcctttacagaggtgtttggagtctgagctttttagactgcgttgtggttctgtgggcatatgataaaatatggctaactgctgttacagccctgggacctgggctcagattgcctttggagagctgtttgtgtgrgagtttgctcttagagtagcagttaccttatggggagggggagtatggtagtgtgtgggagactgtgaaatctggaagtatatttcagccgcatttctctttctccttctagagatataaagacattaaatatctttctaaccaaagcaaacctgattaaattgggagactatggcttggcaaagaagctgaactctgagtactctatggccgagactgtgagtatatgctttcttttgtgcagaactgagggttggagtttgttttttcttgtttatttttccatttcatctctgcatg

SEQ ID NO: 529 - DNA, 600 bp, Chicken  19866894084669_1
tttctagctagcattcagagcacagaaaaaaaaccagcactaagcttatcatcaggtcatctcccattaattgctctaacgttgattagttacagaggaaactgaatcctcagatatggagccatttgtaagaattgcagagctgataaaagtctgtgcagctgtgctgtaagatagcaagacacttaagcttaaagcaagtcattgaggttgttcagatgggtaacagctttactgtatgtctgttaagggcatgtgtgtcctgactgacattggagggcttggtgatattctagaccscaccagtttctgttttgagcgtgctaaattcagtccagtttcatcagaaattatttttcccttttcctgtgtcattttctcttcctcccacagcatgaatgttgtgaactgtaagcataaacacaaacatagtgagctgttacctagcacattcaatctagacatttggtggcaccgagcccacaacttccatgcccttacctctgctcttagttttacaatgctcaactctttaattgcagttaagcttttaaatyactctggttttctctgaagtgctgaagcagggctggagggaaa

SEQ ID NO: 530 - DNA, 531 bp, Chicken  19866894084669_2
gtgtcctgactgacattggagggcttggtgatattctagaccscaccagtttctgttttgagcgtgctaaattcagtccagtttcatcagaaattatttttcccttttcctgtgtcattttctcttcctcccacagcatgaatgttgtgaactgtaagcataaacacaaacatagtgagctgttacctagcacattcaatctagacatttggtggcaccgagcccacaacttccatgcccttacctctgctcttagttttacaatgctcaactctttaattgcagttaagcttttaaatyactctggttttctctgaagtgctgaagcagggctggagggaaaacatcacagttctctttgaagctcagcacttggagatgaactagttgctgaacttcagaggacatggcagtccctctgcaggtcagattgctaacctttgcaaagtaattgggccccctgaatatttgtctgccatgagacaacaaaagccttctttttaccctggcatttgaaaatattcatttcag

SEQ ID NO: 531 - DNA, 599 bp, Chicken  19866894084676_1
  misc_feature (1)..(95): n is any nucleotide
nnnnnnnnnnnnnnnnnnnnnnnnnnnnnnnnnnnnnnnnnnnnnnnnnnnnnnnnnnnnnnnnnnnnnnnnnnnnnnnnnnnnnnnnnnnnnnnattgccatctaaatgcaggggtttgtccttcctgctgtgaaagccagtagctgtgggcgccctgctgtgaatacagaatgaaacaatttattacaaaaaggacctctctaaatcaatctagaaattgctaccagaggcctggaagcagatgtgacattcaaaactcgacaccatccactgtacaagcctttgttcattataacarttcctggtgaattcttccttggagtttgaaaagattcccaagcagactttaaaggccagcatttcaaaatcwccagttacacaaagctgtttccttctcttcccctttatagattggacacctggtatattttggagacacaggcaatgtagaaaagtttttttttcgcccttgctctacagactaaatctatgctaatagatctctgtgtgtacttagatgttttatcttctacctactcacatagaggatgcctgaaagtcatgtgtgaaaccctttgatttgttggatacataatg

SEQ ID NO: 532 - DNA, 599 bp, Chicken  19866894084676_2
  misc_feature (1)..(23): n is any nucleotide
nnnnnnnnnnnnnnnnnnnnnnnattgccatctaaatgcaggggtttgtccttcctgctgtgaaagccagtagctgtgggcgccctgctgtgaatacagaatgaaacaatttattacaaaaaggacctctctaaatcaatctagaaattgctaccagaggcctggaagcagatgtgacattcaaaactcgacaccatccactgtacaagcctttgttcattataacarttcctggtgaattcttccttggagtttgaaaagattcccaagcagactttaaaggccagcatttcaaaatcwccagttacacaaagctgtttccttctcttcccctttatagattggacacctggtatattttggagacacaggcaatgtagaaaagtttttttttcgcccttgctctacagactaaatctatgctaatagatctctgtgtgtacttagatgttttatcttctacctactcacatagaggatgcctgaaagtcatgtgtgaaaccctttgatttgttggatacataatgtttgctaaacatatttttcctattatatgttaccgatttcagttgtgttctgtgccagttgcactttgaggt

SEQ ID NO: 533 - DNA, 600 bp, Chicken  19866894084676_3
gctgtgaatacagaatgaaacaatttattacaaaaaggacctctctaaatcaatctagaaattgctaccagaggcctggaagcagatgtgacattcaaaactcgacaccatccactgtacaagcctttgttcattataacarttcctggtgaattcttccttggagtttgaaaagattcccaagcagactttaaaggccagcatttcaaaatcwccagttacacaaagctgtttccttctcttcccctttatagattggacacctggtatattttggagacacaggcaatgtagaaaagwttttttttcgcccttgctctacagactaaatctatgctaatagatctctgtgtgtacttagatgttttatcttctacctactcacatagaggatgcctgaaagtcatgtgtgaaaccctttgatttgttggatacataatgtttgctaaacatatttttcctattatatgttaccgatttcagttgtgttctgtgccagttgcactttgaggttaacatatacagtaagaatcaccttcttaatgtagcttgaattttgaaggctccctagcagcactttctgactgaccttatgctcct

SEQ ID NO: 534 - DNA, 454 bp, Chicken  19866894084688_1
ttggaacacagacttgtaaaaacaaaaaacgtaccaatataaactcaacctgtaaatacgaagtaatatcactggttacaaaaataaactaaaagagattttctctttaggatcatctgagcatttcagtttgacaaagtcttttggtctggcgggagtccaagaccaagaagtccagacctgcttctgttctttctggggcaccctggggtttctgagggtcctctctgtattaaaggtctttaatttgctatgagatgtcagctggagaaggaaaaatatggacttattctgcaattygctgtaggcagaggggagcaggggaaattatgctttaattcaattgatactcctctcttattcttcattatgaaacgaagagaactttcaggtgcttcttactgcaccgttgttttcctctgtgtttctcattcatattaggaaaaaaacattt

SEQ ID NO: 535 - DNA, 599 bp, Chicken  19866894084690_1
  misc_feature (1)..(261): n is any nucleotide
nnnnnnnnnnnnnnnnnnnnnnnnnnnnnnnnnnnnnnnnnnnnnnnnnnnnnnnnnnnnnnnnnnnnnnnnnnnnnnnnnnnnnnnnnnnnnnnnnnnnnnnnnnnnnnnnnnnnnnnnnnnnnnnnnnnnnnnnnnnnnnnnnnnnnnnnnnnnnnnnnnnnnnnnnnnnnnnnnnnnnnnnnnnnnnnnnnnnnnnnnnnnnnnnnnnnnnnnnnnnnnnnnnnnnnnnnnnnnnnnnnnnnnnnnnnnnnnnnnnnncccacagcccccatccctgtccctcatgctgctccactrgaggatcctcrcacttgcagcaggaggaccccaaacccttccctgccccatrctggggagcatgggcagcaccgcacacagcacaaggagcccttcctgcagctggaaaagccatccaggaatcaattcgactgtacggttattactattagagtgagaaaaatctcttaactctagcactggggggaaaagacgctcctgctgacattcatttactaccaagaaccgtacgtgcctcagattcttggcagtgagtttaagacagctcatgtcctccatgcgttggtggccacccgcgt

SEQ ID NO: 536 - DNA, 599 bp, Chicken  19866894084690_2
  misc_feature (1)..(250): n is any nucleotide
nnnnnnnnnnnnnnnnnnnnnnnnnnnnnnnnnnnnnnnnnnnnnnnnnnnnnnnnnnnnnnnnnnnnnnnnnnnnnnnnnnnnnnnnnnnnnnnnnnnnnnnnnnnnnnnnnnnnnnnnnnnnnnnnnnnnnnnnnnnnnnnnnnnnnnnnnnnnnnnnnnnnnnnnnnnnnnnnnnnnnnnnnnnnnnnnnnnnnnnnnnnnnnnnnnnnnnnnnnnnnnnnnnnnnnnnnnnnnnnnnnnnnnnnnncccacagcccccatccctgtccctcatgctgctccactrgaggatcctcrcacttgcagcaggaggaccccaaacccttccctgccccatrctggggagcatgggcagcaccgcacacagcacaaggagcccttcctgcagctggaaaagccatccaggaatcaattcgactgtacggttattactattagagtgagaaaaatctcttaactctagcactggggggaaaagacgctcctgctgacattcatttactaccaagaaccgtacgtgcctcagattcttggcagtgagtttaagacagctcatgtcctccatgcgttggtggccacccgcgttgacttgttgg

SEQ ID NO: 537 - DNA, 599 bp, Chicken  19866894084690_3
  misc_feature (1)..(209): n is any nucleotide
nnnnnnnnnnnnnnnnnnnnnnnnnnnnnnnnnnnnnnnnnnnnnnnnnnnnnnnnnnnnnnnnnnnnnnnnnnnnnnnnnnnnnnnnnnnnnnnnnnnnnnnnnnnnnnnnnnnnnnnnnnnnnnnnnnnnnnnnnnnnnnnnnnnnnnnnnnnnnnnnnnnnnnnnnnnnnnnnnnnnnnnnnnnnnnnnnnnnnnnnnnnnnnnnncccacagcccccatccctgtccctcatgctgctccactrgaggatcctcrcacttgcagcaggaggaccccaaacccttccctgccccatrctggggagcatgggcagcaccgcacacagcacaaggagcccttcctgcagctggaaaagccatccaggaatcaattcgactgtacggttattactattagagtgagaaaaatctcttaactctagcactggggggaaaagacgctcctgctgacattcatttactaccaagaaccgtacgtgcctcagattcttggcagtgagtttaagacagctcatgtcctccatgcgttggtggccacccgcgttgacttgttggcttctgtgtggcacaaaaagccaattttcagtcctcgccaa

SEQ ID NO: 538 - DNA, 600 bp, Chicken  19866894084691_1
ttctgtctcttttagcagagcggctttggctaatgaaggcagagctgacacaggtaatacccacagaagagttacagaaagaagctgtttcatcccctttctacttcacagtgctaagacaaatatctgacattactggttatgactttcattacaagttttgtttcaatccatcaagtttggtaatggtgctgtgggtgatgaacaacacacgtaagcacctcttctttagaaggtggtgtgaagggattttaatacctgaggtcaagtcaatccagtctcaactactacaaaaattcrggacagaattatgcagaaggaagaattaaatatgtgcaggcaaatattcaagagaaaaaaagaatagcaaaaactgattggaaagactagcaggactgtaatgtgttataacttaactatttgtagataagaaaatacacaaattttaaatcattctcaaatttaataataatttctaatattagaaattctatttcagtgcatgaattctgctgaacttttaagtcaaatgacaacgaakatagtagaactgtaatgcaggtaaggaactggcaaatcatgcaacagcagtgacttata

SEQ ID NO: 539 - DNA, 506 bp, Chicken  19866894084691_2
tgaagggattttaatacctgaggtcaagtcaatccagtctcaactactacaaaaattcrggacagaattatgcagaaggaagaattaaatatgtgcaggcaaatattcaagagaaaaaaagaatagcaaaaactgattggaaagactagcaggactgtaatgtgttataacttaactatttgtagataagaaaatacacaaattttaaatcattctcaaatttaataataatttctaatattagaaattctatttcagtgcatgaattctgctgaacttttaagtcaaatgacaacgaakatagtagaactgtaatgcaggtaaggaactggcaaatcatgcaacagcagtgacttatatgggaaaaaggaataatagattcaaggggagttttcttggcagagtttcatgacagtaaatctggctattaaattgctttaatattttcaccaagtatcaatgtcagattgtgggggatgacctgaacttgggaaatattatcaata

SEQ ID NO: 540 - DNA, 600 bp, Chicken  19866894084696_1
gaaattattgattattttatagggaaatatattatttagtatatttaaaaataggaatatgtagtatttagtatatggaaaatactataacacataatatttgcaaatttatacatatgcaagaaaaaatactatttattgttcattcagtcaaacaattagtgctactacttagccaagcagaaaataatctctcaggagctattctgctcttaataaaaacaggtcaaatcggagataaataacatatttatcatggaaggactcctaatctgtaacacctttgatagcaatgttaayaaatatgtagtagtagcttgtacacaaactgtccagtaagccacatatgtatctgttggtaattataaaagaagtactttcttcctctatagaccagctgaaggcatttccagcagcaaccttgaacggcctgtaaatgcgtagtcccagaacaaaagttatttcctgcctataactggttcttcttcttttaaaattttagattattttcaccagtctcctttctggaatattctagaatattaaagaatagaatattaaagaaaaatctaggaagggaagtagagaaatacatatgcc

SEQ ID NO: 541 - DNA, 600 bp, Chicken  19866894084697_1
tcatttactcttaaacaaatgccatgtctataaaatttataagtaatttgttttatgcagaaatttaacttgctccaggcacatttttctcctgcgctggatatcttaactctagctgcaacgtaaacttgcctgcagtttcctatctgctgtggctgcagatccgtgagctcacagctgcccgtgctccatcacgctgggggattactgccgagcactggtttcattcattcaggaaacctgcccctcactgcaggcagggatccagggccgggtgcaagcagctcatcttccctcctwacaagcacagagatcaccagccaagcaacaatgctttctatgattttgctctcaacttgccagccctgtaattgtaaccctatatatacggtccctcccacctcagcagttctgctcacttagtctcctccattgtgtatgtgcaggtattttatgtgagacttaattattcttggtcctatcagccaagacaagcatgcatgacattaactccctcgtgggacatgaaatggtgcacccttccagaccatctacgtccagaaatggataaaggcaataggatcttcttacattaaaagc

SEQ ID NO: 542 - DNA, 600 bp, Chicken  19866894084698_1
catagctgcagaaaagtgcacattaattcacatgtcatttatgaattctgctagaacctatgtcaccatcagttgttatcaggttatatatacatgtaaaaacaagtgtctatgtgataattaagttatgtgattagctgtctgtaatagtacagttacaactagttttgttaaagtaatacattttatgtacagaattggactgcaaataataatactattttttttaatctttgagtgtacttttcatgtttttaagttggtgccacctgacgcatcttaaaaagtgtgaaaaatatkaatattctgcttctcagatataaaggcgcatattgatctgcttgtttgccaagcaagaaattgctgatgcagatgaatacagaattggtttractgaattgtaatgagtaaattctagctttcaaaactgatatattatgggaaaaaaatagtacataagccttttggacagctggaccttagatttttttgaaagaataagttcaatcatgacagcttttaatacctatgttgctgaaaatcatcattattacattgtgctaatgtagttatcatctgaaggtggaatctgagttatta

SEQ ID NO: 543 - DNA, 600 bp, Chicken  19866894084698_2
catgtaaaaacaagtgtctatgtgataattaagttatgtgattagctgtctgtaatagtacagttacaactagttttgttaaagtaatacattttatgtacagaattggactgcaaataataatactattttttttaatctttgagtgtacttttcatgtttttaagttggtgccacctgacgcatcttaaaaagtgtgaaaaatatkaatattctgcttctcagatataaaggcgcatattgatctgcttgtttgccaagcaagaaattgctgatgcagatgaatacagaattggtttractgaattgtaatgagtaaattctagctttcaaaactgatatattatgggaaaaaaatagtacataagccttttggacagctggaccttagatttttttgaaagaataagttcaatcatgacagcttttaatacctatgttgctgaaaatcatcattattacattgtgctaatgtagttatcatctgaaggtggaatctgagttattaagttacgtggggaaaacttaaaatcagtttgataaatcttggaaagtaaagttctgtttgcactgatggaaaataccaactttggggggagg

SEQ ID NO: 544 - DNA, 600 bp, Chicken  19866894084698_3
aagtactgcaatgactaccacttaccttttattttttcactcctgctctgtcttttcttgtgttgtgccaattcattcctttttcaagctcttcaggttttccagcccaaagtacattttaaaaggtttcatagttttggccatttcttcatctgtctttaacagtgaaataataaaaatagagttgtggtatacaaagttcaaggagaccctcagcaaaatcaacagtatgttttcatcctgaaaatatatggtacctcttcatgtatctttgcagtatacattccagctttcccagaycataaggtgccttttcatccattttcctccaactatcagctgtgtggagtaccttcaacactcttattttcagartaactttgtttagtctgtgctgtggcttgggtggtctggacaataccacgtgccagatggccacaaaaatcagtatcacaaactgagtaagacttttatccaccagacagcaacttccatggttgtccaatgtcccagagttgtagtttcttatctgctaaattcttctccagatgactctattttttttccacacatctggacttcagagatgtgacygctcac

SEQ ID NO: 545 - DNA, 600 bp, Chicken  19866894084698_4
ttcctttttcaagctcttcaggttttccagcccaaagtacattttaaaaggtttcatagttttggccatttcttcatctgtctttaacagtgaaataataaaaatagagttgtggtatacaaagttcaaggagaccctcagcaaaatcaacagtatgttttcatcctgaaaatatatggtacctcttcatgtatctttgcagtatacattccagctttcccagaycataaggtgccttttcatccattttcctccaactatcagctgtgtggagtaccttcaacactcttattttcagartaactttgtttagtctgtgctgtggcttgggtggtctggacaataccacgtgccagatggccacaaaaatcagtatcacaaactgagtaagacttttatccaccagacagcaacttccatggttgtccaatgtcccagagttgtagtttcttatctgctaaattcttctccagatgactctattttttttccacacatctggacttcagagatgtgacygctcactgctaaaacaaaagcaaaaaaagaagagaattacagcactttttttttaataaacgtgtctagtagttgattttg

SEQ ID NO: 546 - DNA, 600 bp, Chicken  19866894084698_5
ccagaycataaggtgccttttcatccattttcctccaactatcagctgtgtggagtaccttcaacactcttattttcagartaactttgtttagtctgtgctgtggcttgggtggtctggacaataccacgtgccagatggccacaaaaatcagtatcacaaactgagtaagacttttatccaccagacagcaacttccatggttgtccaatgtcccagagttgtagtttcttatctgctaaattcttctccagatgactctattttttttccacacatctggacttcagagatgtgacygctcactgctaaaacaaaagcaaaaaaagaagagaattacagcactttttttttaataaacgtgtctagtagttgattttgaaggagaatttttttagcattcaaaacattctaggtagtgtcatgtttaaatggccatctgtatttctgttcttgctggcaaaagaaattwaaaaaaaaatgactacccaagataacaacattgaaatttatccacagtaatcatattcaacgctgtctgagtttgcgatttacaattctttaagatcagtagccatctcttctattaactgcttccag

SEQ ID NO: 547 - DNA, 564 bp, Chicken  19866894084698_6
acttttatccaccagacagcaacttccatggttgtccaatgtcccagagttgtagtttcttatctgctaaattcttctccagatgactctattttttttccacacatctggacttcagagatgtgacygctcactgctaaaacaaaagcaaaaaaagaagagaattacagcactttttttttaataaacgtgtctagtagttgattttgaaggagaatttttttagcattcaaaacattctaggtagtgtcatgtttaaatggccatctgtatttctgttcttgctggcaaaagaaattwaaaaaaaaatgactacccaagataacaacattgaaatttatccacagtaatcatattcaacgctgtctgagtttgcgatttacaattctttaagatcagtagccatctcttctattaactgcttccagtgaccacttagccaacctgaataagaaaatgggctgacataaactgaatgtattactaatgaggacagagtaagagagaactccaacaggaagatgttcagaggtacactgttagaaaccttgtttctgttacatg

SEQ ID NO: 548 - DNA, 600 bp, Chicken  19866894084702_1
gtgtttgctgttagccttgaatggcaggaggccagcagagtaaaagatgtgtagctactaacacattgcagaggccttcctttacctcagcaccaggaaactgtacccttggcatcggcagacctgagtcctgctctccgatacacagttttactgcctttttcatacacaggcagattcacactgtgtcctttttgttgtcagcagcgacagaagggtgccagaactcactcaaatggtatggctaggagaggaatttgggaatgcagaagagatgaagaaagaactcaaagccaatcrcamagggttttttttgttgttgtagttgttaccgttctaatggcagacacccaggtctgtctgcagtcagcaccagggaggtccagagagcccgtgatggggatgaagcaatagcattcatattgccagtgagacagtcagcgccccagtttgcctttgaggggggaggaaggagggagatacaggtatataggtgggtgaatgcagcgagggtctatggcttggaaatctatttggctgcaaattgaaaataagcccttgtggggacaacaatcaagtcccactagttactatctcaat

SEQ ID NO: 549 - DNA, 600 bp, Chicken  19866894084702_2
tttgctgttagccttgaatggcaggaggccagcagagtaaaagatgtgtagctactaacacattgcagaggccttcctttacctcagcaccaggaaactgtacccttggcatcggcagacctgagtcctgctctccgatacacagttttactgcctttttcatacacaggcagattcacactgtgtcctttttgttgtcagcagcgacagaagggtgccagaactcactcaaatggtatggctaggagaggaatttgggaatgcagaagagatgaagaaagaactcaaagccaatcrcamagggttttttttgttgttgtagttgttaccgttctaatggcagacacccaggtctgtctgcagtcagcaccagggaggtccagagagcccgtgatggggatgaagcaatagcattcatattgccagtgagacagtcagcgccccagtttgcctttgaggggggaggaaggagggagatacaggtatataggtgggtgaatgcagcgagggtctatggcttggaaatctatttggctgcaaattgaaaataagcccttgtggggacaacaatcaagtcccactagttactatctcaatgtg

SEQ ID NO: 550 - DNA, 600 bp, Chicken  19866894084702_3
tgttagccttgaatggcaggaggccagcagagtaaaagatgtgtagctactaacacattgcagaggccttcctttacctcagcaccaggaaactgtacccttggcatcggcagacctgagtcctgctctccgatacacagttttactgcctttttcatacacaggcagattcacactgtgtcctttttgttgtcagcagcgacagaagggtgccagaactcactcaaatggtatggctaggagaggaatttgggaatgcagaagagatgaagaaagaactcaaagccaatcrcamagggmtttttttgttgttgtagttgttaccgttctaatggcagacacccaggtctgtctgcagtcagcaccagggaggtccagagagcccgtgatggggatgaagcaatagcattcatattgccagtgagacagtcagcgccccagtttgcctttgaggggggaggaaggagggagatacaggtatataggtgggtgaatgcagcgagggtctatggcttggaaatctatttggctgcaaattgaaaataagcccttgtggggacaacaatcaagtcccactagttactatctcaatgtgccctg

SEQ ID NO: 551 - DNA, 599 bp, Chicken  19866894084708_1
  misc_feature (1)..(59): n is any nucleotide
nnnnnnnnnnnnnnnnnnnnnnnnnnnnnnnnnnnnnnnnnnnnnnnnnnnnnnnnnnnttttattttaatcaagacccaaagacaagtcagcaggaggcagaatttttttttgctttaaattaaaggccactacactgtttttaattggcaacctgtccctctcagctgatcagataaatgtctcaaaatcccatggtaacctgttaaaaacgtatcccttgtggtttatcttcaaagtatgcagtgcagcatatcacagtgcaaaatcctgtaatggtactgacaggtttgttacagygagactgtgtttccctatctcagtaatattattagatttttgcctccacaacaaaagcaacagtcttcttaattatgttgtaacccattgttcccaaaacaacatcttcagcagtgtttgcaatcaaacacagctccatattgaagtccctgttggtacaccacattgccgtgtgataaacaagatactgtttttataaaccaatcaacaacaacaacaaaaaaaaaacctaatcagcttgctagcaagttctaaattctctcttattattttgttaataaaatccctcctggaaattt

SEQ ID NO: 552 - DNA, 600 bp, Chicken  19866894084708_2
cttgtggtttatcttcaaagtatgcagtgcagcatatcacagtgcaaaatcctgtaatggtactgacaggtttgttacagygagactgtgtttccctatctcagtaatattattagatttttgcctccacaacaaaagcaacagtcttcttaattatgttgtaacccattgttcccaaaacaacatcttcagcagtgtttgcaatcaaacacagctccatattgaagtccctgttggtacaccacattgccgtgtgataaacaagatactgtttttataaaccaatcaacaacaacaacyaaaaaaaaacctaatcagcttgctagcaagttctaaattctctcttattattttgttaataaaatccctcctggaaatttctaggaaatgtcaagatttatgtttcctgtctgcattctgaaatggccttttttttgcagatcaattagctcacactgagcccttgtgccaattatgcttcattatgcttcttgtaatgctaatacacttactggtgtaatgaaactcatgtgagtaatataacaaacagtatgcacagttaagataaaacctgtgcctttccaggaatgcctacgtact

SEQ ID NO: 553 - DNA, 600 bp, Chicken  19866894084708_3
ttgtggtttatcttcaaagtatgcagtgcagcatatcacagtgcaaaatcctgtaatggtactgacaggtttgttacagygagactgtgtttccctatctcagtaatattattagatttttgcctccacaacaaaagcaacagtcttcttaattatgttgtaacccattgttcccaaaacaacatcttcagcagtgtttgcaatcaaacacagctccatattgaagtccctgttggtacaccacattgccgtgtgataaacaagatactgtttttataaaccaatcaacaacaacaacayaaaaaaaacctaatcagcttgctagcaagttctaaattctctcttattattttgttaataaaatccctcctggaaatttctaggaaatgtcaagatttatgtttcctgtctgcattctgaaatggccttttttttgcagatcaattagctcacactgagcccttgtgccaattatgcttcattatgcttcttgtaatgctaatacacttactggtgtaatgaaactcatgtgagtaatataacaaacagtatgcacagttaagataaaacctgtgcctttccaggaatgcctacgtactg

SEQ ID NO: 554 - DNA, 600 bp, Chicken  19866894084713_1
aatttattttgacctcccatgaaaagatttgatttttcttcaggattgttggatgatttaattaacttttttgcattctgaggaaagaaaaatatgcataaattcatatagaaaaaattaagttattgatgattttgagagcttttttaatgaattaaccttttaaagaactgacaacaaaatatttcagagccatctaatttgtgttttgagacagaaatgaaaagctataggttccttaggagtcatgtctgatacactgtagaaagcctctggttttcctaaattgtgaagagatawttaatctacatttctacaagatttagaaggtggcaaaataagaggcatcattcccaactgaagtgacaaaatgctctttatatatagtgctatatctactgccatcttgcttaactacagatatatgaaaacactatcgaattttgcctaggttgcagtaggattcttttgtcaagagttgggatttcccattatttaagcagaattccagactatagtaaggagattttgtcttagacgattgtagagaacatctttctttgtgaaatgcaaattaaaattagctataacttaggagaa

SEQ ID NO: 555 - DNA, 600 bp, Chicken  19866894084713_2
tgcctaggttgcagtaggattcttttgtcaagagttgggatttcccattatttaagcagaattccagactatagtaaggagattttgtcttagacgattgtagagaacatctttctttgtgaaatgcaaattaaaattagctataacttaggagaaggcagcctgaactctgaggtgagaagctttatgtacagagacaaaacatgcacagaagaaggctctcagggtctctcggagtagtccaattctgacaggctttcttcttcatcaagtaactattacaaagaattttccaaaagrgatccctttaatgtgatttaagacacctcagtaatgaagaaagcacaaatttcttagtaactaattttttagaattccacccatcttgccagagaaaaccattttaactcatttgaaggcagctgtctaaaatgtctatggagcttctgccaatcaggggaaaaggaaagacagtgggaaatgcaacaggagaaagattctcaggagtcaagaggatgtccaagccacaaatacattccagtagatcactaatgagtgaacatgtctcatgtcttaccgcctgctacaatcactcattag

SEQ ID NO: 556 - DNA, 600 bp, Chicken  19866894084717_1
gactttctccagtccaagatgaggagtatcttctctgggagactgacggccctggaactgttcgacatcctggaccactattcgaagaactgtgacatgattgttggcaaccaaaacctcatgcatgccctgaaacaggaaaaatttgacctgctcctggtagatcccaatgagatgtgtggatttgttatagctcaccttttaggggttaagtatgccgtcttttccactggcctctggtacccagcagaagtgggtgctccagctcccctctcttatgttccagaatttaactcactmcttacagatcgcatgaacctatttgagaggatgaaaaatacttttgtktatgttatttcaagatttggagtcagctttttggttctgccaaaatatgaaaggataatgcagaaacacaaggttctgccagaacgatctatgtatgacttggttcacggatccagcctgtggatgctttgtactgatatagcgctggagtttccaagaccaacgctaccgaatgttgtttatgtgggaggaatcctaaccaaaccggccagccctctgccagaagtaaggtttgctgagcttaaagtaatt

SEQ ID NO: 557 - DNA, 600 bp, Chicken  19866894084717_2
gccctggaactgttcgacatcctggaccactattcgaagaactgtgacatgattgttggcaaccaaaacctcatgcatgccctgaaacaggaaaaatttgacctgctcctggtagatcccaatgagatgtgtggatttgttatagctcaccttttaggggttaagtatgccgtcttttccactggcctctggtacccagcagaagtgggtgctccagctcccctctcttatgttccagaatttaactcactmcttacagatcgcatgaacctatttgagaggatgaaaaatacttttgtktatgttatttcaagatttggagtcagctttttggttctgccaaaatatgaaaggataatgcagaaacacaaggttctgccagaacgatctatgtatgacttggttcacggatccagcctgtggatgctttgtactgatatagcgctggagtttccaagaccaacgctaccgaatgttgtttatgtgggaggaatcctaaccaaaccggccagccctctgccagaagtaaggtttgctgagcttaaagtaatttctgcggtacctgtttgacctcatatgatgagtgacggtttttaagca

SEQ ID NO: 558 - DNA, 600 bp, Chicken  19866894084717_3
gggagagaaaccgagatgcaaactcagaatgagacttttgaggttgcaggaagtattcttctttggagttaagtgcttaattgtacggtagaggaaaaaagcagtgcacactactttgaaaattacatcggtgacttttaaccaaatgtggattaaaacaggaatgaacaggtgaataagcttatacttaactaagcctattgataggttatgccatctttaatttcatggtattaatgtttttatggagtttgcttcctttggtttggtaggtaaaaatggctttaaaactaggtgtaygtgaataaaatgtgtaaaggtgatcacatggagattttctgagttgccataataaacaccagggctgtattcaggtacagatttttacagtgcactcgtttaccatcaggtaccgagtttcaggctgacatggtaatagcgtggatggattgactccggaaatcctgactgcatagattaataattaagcttgattaattcagtgtaccatgtggtcttgatacctgatagccaagaatgcctttgttgagcaacacaatagtgagtgggcaggcagaacaaaatttcatagaaaatcat

SEQ ID NO: 559 - DNA, 600 bp, Chicken  19866894084719_1
gatgaaagcagtatctcagtttggtaatactaccaggctaagcctggtttcattacttcttgcacagggttttgtgtaaaagagatcaggaaaaaaaaaagctggaatcataactaagaacagcaaaaaggaagtcacagcaggaaatgggcatgtcgtgtcccatcatgtgccagtgcgtcttagtcctcaattgttgtaaaattcatattctatttctgtttatccatcctttcttctgctagctcagaatagctttgcttgtgatatcctcatctgtcccagctgcgtgctattttsgagcagaagttgccatttgcagcagacttccatactgcataacctcttgcgatgggcagatatccaccaaaggctatgtgggctacagtggaatttattgcatgagtgacctcactcagttctccaggggttgaaggtcagtgcactaatttatggtatcaatctaccttcagcaattggtactgtttcaaaataccttttgtgtttcaggargtgtcttaagttcaatacatttaaatcacttttatatgatttcaagttccataaggtaaatttgttgccaatataaaatgtcttcaa

SEQ ID NO: 560 - DNA, 600 bp, Chicken  19866894084719_2
tatttctgtttatccatcctttcttctgctagctcagaatagctttgcttgtgatatcctcatctgtcccagctgcgtgctattttsgagcagaagttgccatttgcagcagacttccatactgcataacctcttgcgatgggcagatatccaccaaaggctatgtgggctacagtggaatttattgcatgagtgacctcactcagttctccaggggttgaaggtcagtgcactaatttatggtatcaatctaccttcagcaattggtactgtttcaaaataccttttgtgtttcaggargtgtcttaagttcaatacatttaaatcacttttatatgatttcaagttccataaggtaaatttgttgccaatataaaatgtcttcaagtacttcaggaagaaggatttgtttgagctggtgttcattatgggaagattaatggggccactgatcccattaatttgctgttgacccttaacttcatataataggtcaggcatccctacttttagcttcagggcaagtttactcagtgaacaaaatttcatcttgttgtataacatctttcttcagataagttccgttcatctttagcatct

SEQ ID NO: 561 - DNA, 599 bp, Chicken  19866894084727_1
  misc_feature (1)..(72): n is any nucleotide
nnnnnnnnnnnnnnnnnnnnnnnnnnnnnnnnnnnnnnnnnnnnnnnnnnnnnnnnnnnnnnnnnnnnnnnncaattatttctgtccttatggtatgctttatcagctgcatatgaagcataaggaactcatggaatctcagaaaaagcaaacatcacagtagatctttgtaagcaagcttaatgctatgacgcaatggaaaatacagcaataatagcaggatgacacaactctaggctgcagcaaatgagaacaagctcaaaaaacaacagctataaatgcagaaacaaaagaagaaaractgcttacctgtagaagaccttcagtagacaggaacctcccacagaagatacctttacctccgctgccaacccttaaatgaggtctgggaggggaatggatcctggctccaccccttctcgtcactcaggagcattgcatgcacctgagctcccctggattggccctgccttcccaccaggtgctcaatcaccgtttcaggtcatgacatttccactacatcaggtctgtataactgccaactaaaccaggacaaccgtcttccatgtcaatctttttcaatcctccattcttactag

SEQ ID NO: 562 - DNA, 600 bp, Chicken  19866894084731_1
gataggcaaccatggctaccgttgtgggatcagcaaacttcctttcacagctgtaaatatttgtagtggagccaattagaggcggcatgcttttgtcagcattgcctaggaaacatcaatacctcctccaaagaatcccccacctctccttatcctgccggcatttattgaacagtagtgtcagctctggtagttaatgttgcctcccacatgcacggcgttggaagctctgttggcagtaggtgagaaactgcccacagcatggcacaaagctgctcctgggggcaccaaaacctgggytcmtgctcctcagccttcagatgagcctgtraaaccagcacggaggcagttgtgaagtatcccaggcatgcattttcaatcggctgcattccaaactggctgaaagatttggggattattttatatagctgtttgtatgcaaaatccctgttctgagaaatgcctttcaagggtatttgtagactgatacatctgctcacaggttgattctgtaaacaagattgctgtgtatagaaatcatagacaatatgctgtcccctttcactcagagtggaaaaaatatatataaccaaataaatc

SEQ ID NO: 563 - DNA, 600 bp, Chicken  19866894084731_2
aggcaaccatggctaccgttgtgggatcagcaaacttcctttcacagctgtaaatatttgtagtggagccaattagaggcggcatgcttttgtcagcattgcctaggaaacatcaatacctcctccaaagaatcccccacctctccttatcctgccggcatttattgaacagtagtgtcagctctggtagttaatgttgcctcccacatgcacggcgttggaagctctgttggcagtaggtgagaaactgcccacagcatggcacaaagctgctcctgggggcaccaaaacctgggytcmtgctcctcagccttcagatgagcctgtraaaccagcacggaggcagttgtgaagtatcccaggcatgcattttcaatcggctgcattccaaactggctgaaagatttggggattattttatatagctgtttgtatgcaaaatccctgttctgagaaatgcctttcaagggtatttgtagactgatacatctgctcacaggttgattctgtaaacaagattgctgtgtatagaaatcatagacaatatgctgtcccctttcactcagagtggaaaaaatatatataaccaaataaatctca

SEQ ID NO: 564 - DNA, 600 bp, Chicken  19866894084731_3
agcaaacttcctttcacagctgtaaatatttgtagtggagccaattagaggcggcatgcttttgtcagcattgcctaggaaacatcaatacctcctccaaagaatcccccacctctccttatcctgccggcatttattgaacagtagtgtcagctctggtagttaatgttgcctcccacatgcacggcgttggaagctctgttggcagtaggtgagaaactgcccacagcatggcacaaagctgctcctgggggcaccaaaacctgggytcmtgctcctcagccttcagatgagcctgtraaaccagcacggaggcagttgtgaagtatcccaggcatgcattttcaatcggctgcattccaaactggctgaaagatttggggattattttatatagctgtttgtatgcaaaatccctgttctgagaaatgcctttcaagggtatttgtagactgatacatctgctcacaggttgattctgtaaacaagattgctgtgtatagaaatcatagacaatatgctgtcccctttcactcagagtggaaaaaatatatataaccaaataaatctcagaaatattcagaaaacaactcccctaca

SEQ ID NO: 565 - DNA, 600 bp, Chicken  19866894084742_1
gttatcctgctatttatcccatagctgagataacaatacctaaaggaaaacagcgtgctagcagcattgcattttaagatggccataatatactcctgaagctttcagtaaaaaagaaaattatctgttgaggaagtttttcttttctagacaaagtacccaaagtagcctcagcattttcacagtatgacacagtttagatatatctatgagtctctcatagataaatgtaaaaagtctctgagtagccaccgacaatgcacatcataatggtttggggattttagaattgcatttgtyagtagtacacaagcacataaggtagaaagggatggtcctcaaaggttttgtgtagagaaacatgaataagctatgttagcagtatacaatctgaaaagataagccacaatgatgggaaaagtatttctcaaatgtccccagatgctcacagtaaataagtaaattcatcaaactgattaacaggtaacaagtctcagtgctggtagacaaatccagctgtcaccaaagtctgttgagaattttgtttttacacaagtgagatggagagttactcatagataactgcatgagaaggtttag

SEQ ID NO: 566 - DNA, 600 bp, Chicken  19866894084742_2
cagttatctgtgacatagtgagaagaggaagatggtaacttttgaggcatattcttgaacgcaatcttttaattttggaatacatacaaatgacaaatccaacatatcacagaaattaaacaataaatatatgcagctttttgggcttcttgtcatccttgctctgctgttggcttggccatggtttgagttctaaattatcctgaaaattatatggttgttgttacaggccttattttagcctgtagtatagtttagaatatatcatagtttggaaacaaaatgttattaaagttctgrtaaataaatctcaaaatatggagagaagtatctacaaaagctgctccaaaagtaattcctcctgctttattatgttggcccacagtgtcagaggcggatggtggtggtatgacagtagtggctgaaccttcccgacaatatttcattatgttttgttgctattatgacagatggcagcagaggggcagtctgacaaaatggtgtctagcacagaagtgcatctgaagcaaaggtgtgtcattgaattcctccatgcagaaaaatggcacccactgacattcatcaatgcttgctgaacat

SEQ ID NO: 567 - DNA, 600 bp, Chicken  19866894084744_1
ggtctcccagtatgagagacacggaaagagactggtgaagggccacaaaagcgattaaggggctggaatatctaacactgctccatctggaagctcagggtatctcaaggactacaagtatctgaagggagggtacaaagaggatggagccaggctcttttcagtggtgtccagtgcgaggacaagaggcgatggacacaaactggaacacagaaggttcccactgaacaccaggaagcacttctgcactcacacaggttgcccagaggttataaagactcctccttagagatccacagmagctatctggaaatcatcctgagaaacatgctctacatgacctggcctgagaaatcctcctccggccaagtctttgatatacccaacgtcaaggaattcaatactgttgtaccracacggtctgtacgccacagaaggtactgttaccacaatgtaatgaacattaactctacacttagtgagctcatagctcatgccttggaagaccaagcacctcaccaggctttgccagaacaccatcagattaaagacgtgtaagctgcagtttaagccctgctatgacatctgacttcacacttg

SEQ ID NO: 568 - DNA, 600 bp, Chicken  19866894084744_2
caagtatctgaagggagggtacaaagaggatggagccaggctcttttcagtggtgtccagtgcgaggacaagaggcgatggacacaaactggaacacagaaggttcccactgaacaccaggaagcacttctgcactcacacaggttgcccagaggttataaagactcctccttagagatccacagmagctatctggaaatcatcctgagaaacatgctctacatgacctggcctgagaaatcctcctccggccaagtctttgatatacccaacgtcaaggaattcaatactgttgtaccracacggtctgtacgccacagaaggtactgttaccacaatgtaatgaacattaactctacacttagtgagctcatagctcatgccttggaagaccaagcacctcaccaggctttgccagaacaccatcagattaaagacgtgtaagctgcagtttaagccctgctatgacatctgacttcacacttggtagtccctcagcacagatgtagtgttattttgcctcttggcttaaatgttacatcgctatgtctgcccactgatgctggcagagcagcacagggccctggtagcagaaagatg

SEQ ID NO: 569 - DNA, 600 bp, Chicken  19866894084745_1
tttttcagtttatcacttgacttagacaacagagaggaaatactctactagagccccttttacttaattatattattgatttttttatcatcttccacatctacagaccatgattactctgagtttacacatgggaaagaagtgctactctttctactctaccatctggttcctctgatataataaacatagaaagaattaaaggaaaatggtgcaacttcatccaccttctctcctgcttattgcttgtattcatttgacatgagttcatttgtgttctcttgcagtcagagaacacartgccataatgatataaagaacatagcagcattccttatctgcactatttggagttgtgctgtgaaggactatggatgagatctaacttagctttaaacactatcagaagaacsgcagattttttctacttttaaagaagtgcacattaagcagaaaataaataaataaataaataaagcagaaaagttcctctcaaacaagggtcctaagaaaacactgaaaactgacaytgctatttttcatagagcactcatgtttcctgaaatgaytgcaacacatctgaccagagaatcaaagaat

SEQ ID NO: 570 - DNA, 556 bp, Chicken  19866894084745_2
ttactctgagtttacacatgggaaagaagtgctactctttctactctaccatctggttcctctgatataataaacatagaaagaattaaaggaaaatggtgcaacttcatccaccttctctcctgcttattgcttgtattcatttgacatgagttcatttgtgttctcttgcagtcagagaacacartgccataatgatataaagaacatagcagcattccttatctgcactatttggagttgtgctgtgaaggactatggatgagatctaacttagctttaaacactatcagaagaacsgcagattttttctacttttaaagaagtgcacattaagcagaaaataaataaataaataaataaagcagaaaagttcctctcaaacaagggtcctaagaaaacactgaaaactgacaytgctatttttcatagagcactcatgtttcctgaaatgaytgcaacacatctgaccagagaatcaaagaatggtgtaagctggaagggaccttcaaagatgatctggtccaatcttcctgctcagccagggctacctaga

SEQ ID NO: 571 - DNA, 439 bp, Chicken  19866894084745_3
ctctcctgcttattgcttgtattcatttgacatgagttcatttgtgttctcttgcagtcagagaacacartgccataatgatataaagaacatagcagcattccttatctgcactatttggagttgtgctgtgaaggactatggatgagatctaacttagctttaaacactatcagaagaacsgcagattttttctacttttaaagaagtgcacattaagcagaaaataaataaataaataaataaagcagaaaagttcctctcaaacaagggtcctaagaaaacactgaaaactgacaytgctatttttcatagagcactcatgtttcctgaaatgaytgcaacacatctgaccagagaatcaaagaatggtgtaagctggaagggaccttcaaagatgatctggtccaatcttcctgctcagccagggctacctaga

SEQ ID NO: 572 - DNA, 400 bp, Chicken  19866894084745_4
atttgtgttctcttgcagtcagagaacacartgccataatgatataaagaacatagcagcattccttatctgcactatttggagttgtgctgtgaaggactatggatgagatctaacttagctttaaacactatcagaagaacsgcagattttttctacttttaaagaagtgcacattaagcagaaaataaataaataaataaataaagcagaaaagttcctctcaaacaagggtcctaagaaaacactgaaaactgacaytgctatttttcatagagcactcatgtttcctgaaatgaytgcaacacatctgaccagagaatcaaagaatggtgtaagctggaagggaccttcaaagatgatctggtccaatcttcctgctcagccagggctacctaga

SEQ ID NO: 573 - DNA, 600 bp, Chicken  19866894084746_1
ctgactaaccagaatgcacagattcccaagctcagctgtatgttaacattatacagcacagctccttattgccatctgagcagaggtcacaagcagatgtaaccaattctgcacagtgatacgcccacagtaacaaaacctgacctgtaggctttcaggccttagtagatttagtgcagtgctgcatgaccacaacaacagctgttctctgtgaactggtagtggtggcctagcagttttggtctgggtctgcagttgggttgctcagtcagactggcagcatttacactcactgtggaracaaccctccaaaataccaaacattgagcaccatttggacataaaaaggaagacattctgacacygtttctggtttgttatccatgttctgcaccatagcatcacgtagcaaactgggagttgaagagttaatgctgaggttctgtggattgtggatggttctggggatgcggttctcagaagagacgagtaaactgcagctcccagaagactacattattcagtttcccatccggagggaaagataaagctgactgggagtcatgagattgttcctcttttgcccgctttggctctgtg

SEQ ID NO: 574 - DNA, 600 bp, Chicken  19866894084746_2
ttattgccatctgagcagaggtcacaagcagatgtaaccaattctgcacagtgatacgcccacagtaacaaaacctgacctgtaggctttcaggccttagtagatttagtgcagtgctgcatgaccacaacaacagctgttctctgtgaactggtagtggtggcctagcagttttggtctgggtctgcagttgggttgctcagtcagactggcagcatttacactcactgtggaracaaccctccaaaataccaaacattgagcaccatttggacataaaaaggaagacattctgacacygtttctggtttgttatccatgttctgcaccatagcatcacgtagcaaactgggagttgaagagttaatgctgaggttctgtggattgtggatggttctggggatgcggttctcagaagagacgagtaaactgcagctcccagaagactacattattcagtttcccatccggagggaaagataaagctgactgggagtcatgagattgttcctcttttgcccgctttggctctgtgtgctccctggccatctcgcctccagcattagaataaggcctttggttttcagacactcgctctct

SEQ ID NO: 575 - DNA, 600 bp, Chicken  19866894084746_3
tctctcatttatttgatttattggcttcaattccaattatattgtattacatcatattatcttgcaatccactataatttttaataaattagttttttcttagcttgtggcctgtttttttccccctcatctaagccgatctccctatcttttccctattcccttgagttgaaggaacaaggccattcatctttctagacacacattttcagccccagagctgagaaatgatgcaataaacatcatagctacagctttgcaagcaaatacgcatacagcaaaacaaagcagcctccttawggaattttcaacagatggcatttcattactccaagtctgttctgcattactgcaagttctcctttactcttcttactgctttgtcctgaacatttctgtcccctaaaaactacttcctacttttctttccaggttctcagaattttcggagaattcatctttcttcctcagccatggggatactcattatcatcctcattagtggggttacaaaggaaccaagctgcactctattgaaagctacaccatgatgtttttgtggttgtctgcttcaaaacatatggaaaagcagactgtatt

SEQ ID NO: 576 - DNA, 599 bp, Chicken  19866894084747_1
  misc_feature (1)..(145): n is any nucleotide
nnnnnnnnnnnnnnnnnnnnnnnnnnnnnnnnnnnnnnnnnnnnnnnnnnnnnnnnnnnnnnnnnnnnnnnnnnnnnnnnnnnnnnnnnnnnnnnnnnnnnnnnnnnnnnnnnnnnnnnnnnnnnnnnnnnnnnnnnnnnnnnnnctcagtgttccagtgttctgtcactctcactgtaaagttcgtccttttatttgtatggaacaacttcctatcttccagcttctgtcccttgttctgttgctgcatgccaccaagaacggcccatccctcgactcccatgctttagataagcagcratgagatcccctctcagccttctcaagactgaagagttgcagtttccttctatggaagatgctccaagcctctgatcacctctgtggccctccagttgactccttctagaagatccctgtcatttttgagcygaggagcccagaactggacaaactattctcaatattctggcctcagcagggcagaatagaggaagagcatcacctccctcaatacgttggccatactccttcttgatgcatcctaatgtgccactggccttctttaccacagtagtacactgtatgacatgcataat

SEQ ID NO: 577 - DNA, 599 bp, Chicken  19866894084747_2
  misc_feature (1)..(13): n is any nucleotide
nnnnnnnnnnnnnctcagtgttccagtgttctgtcactctcactgtaaagttcgtccttttatttgtatggaacaacttcctatcttccagcttctgtcccttgttctgttgctgcatgccaccaagaacggcccatccctcgactcccatgctttagataagcagcratgagatcccctctcagccttctcaagactgaagagttgcagtttccttctatggaagatgctccaagcctctgatcacctctgtggccctccagttgactccttctagaagatccctgtcatttttgagcygaggagcccagaactggacaaactattctcaatattctggcctcagcagggcagaatagaggaagagcatcacctccctcaatacgttggccatactccttcttgatgcatcctaatgtgccactggccttctttaccacagtagtacactgtatgacatgcataatacatatgaatatgggtaagatatgagcatctttaacctagaactaaattcaatagaagtcccactgaactgacagaaatgctacacccttacagtgttaaaacatatccagatccaagttactgaggatgtc

SEQ ID NO: 578 - DNA, 599 bp, Chicken  19866894084751_1
  misc_feature (1)..(21): n is any nucleotide
nnnnnnnnnnnnnnnnnnnnntttccccattgtaggacttaggggcatatttctttactatatttattttataaattgtttcttaggtagaattgtcaatggaagacattgaaaccattttaaatacactaatatatgatggaaaagtggagatgactattatcgctgcaaaggaagggacggtaggcagtgtggatggacagatgaagctgtacagagctgttagtcctctcatacaacccactggattagtgaggacaccctgcgggctctgtccagtaagtaacaaattctgtacaygaataggtggtgcatgcacattttgggtacagcccttcaaatggtcagctggtgtgaatgaaggttttgcctgtgagtggttcttgtgggtttctaagccaagtatgctcgtgatgctcatgagcatcactggtgatgctttagctgtggtgtaaggggcagagcctttagaccaggacatttctatgatttccaacttacatgctgactctttcctttactgtgtgttacagagtgtgttcaagttcagcctgttctgaaatrgaactttttattatctgaccttgtgttctttgcct

SEQ ID NO: 579 - DNA, 508 bp, Chicken  19866894084751_2
gcgggctctgtccagtaagtaacaaattctgtacaygaataggtggtgcatgcacattttgggtacagcccttcaaatggtcagctggtgtgaatgaaggttttgcctgtgagtggttcttgtgggtttctaagccaagtatgctcgtgatgctcatgagcatcactggtgatgctttagctgtggtgtaaggggcagagcctttagaccaggacatttctatgatttccaacttacatgctgactctttcctttactgtgtgttacagagtgtgttcaagttcagcctgttctgaaatrgaactttttattatctgaccttgtgttctttgcctatttatatccgtttttaaaagctaactcacatctgtctagcatgtggccccttctgcaaggatcatgagttgattcgtaggtaaaacttgccagatgtgtctgttgcatcgtttatttcagtgggatctgttttgctttgttgtgctcacactgctctgcctcagaactggca

SEQ ID NO: 580 - DNA, 600 bp, Chicken  19866894084761_1
ttgatatcaggaaatcatggggctctgtgtttagagatttactgcagaagtgtggaaatatggatttgataaactagtgcctatgatttacttaacttatgtttgatatagtagtaagggttttatgaatgtggattactttttgtgccaacagctcggaattgttgtatgtatgtaggcagaaagactcattctgcttccaaagttatttaatttttttgtgtttgaatgtttttttgtaagtgttaaagtgtaaaaatatatatataaaatattcttaccacaaaatattgcctgcaytgttatttttataactaactgtttataaagtctttatgtatttataggggttttttgggggggagggatagtttgtgggttttttccccccccaagaactgtattcacttcttcaatcctgaagatcagctactgcccctgtagttcataaagagagtatggtactgttatttgggtctgtgatttcctcgatgaattgaggtactgtgctgtgttgagaggcctctgctctctaaggacagtgtgtgattcaagtagtgttcaaggttggaaaggactactaggaccatccatcacccc

SEQ ID NO: 581 - DNA, 600 bp, Chicken  19866894084764_1
gctggctgaagtaaatagctgtctcctctgcttagtgcactggagagttaataaatttagtttcctagtagctatgctgctgagtgattaccattgcagttactgcttgggcactccctgctgtccttcaaacttcttctggatgttaactcttgagtgcataaaacttcagcggcatacttgcagtgtatgtgttcaccacccttgctgcatgccacttggtacttcagagtgcactgcattaaaacctctgaagcccagcagtaagttcaggtcagacaaaccagaggatatgaagaraaatccctcagtgtcttggtcgcagatgctcagcctctaggaagctgaccaggctggtagcaggatacatcccactacctatatcctctgtttgcatcccttctgytctgatgctgctgtgccccagaagcctgttgtcctctcccatgctccgtcttgattcagctcagaggctatgataggagctgccatcccccctgcatttagcacaccatctctgtggcttctggtctctccagcacaacttttggagcaggttcagactgaccttgtaatgtatacgatggtgaggcttagggg

SEQ ID NO: 582 - DNA, 600 bp, Chicken  19866894084764_2
ttgggcactccctgctgtccttcaaacttcttctggatgttaactcttgagtgcataaaacttcagcggcatacttgcagtgtatgtgttcaccacccttgctgcatgccacttggtacttcagagtgcactgcattaaaacctctgaagcccagcagtaagttcaggtcagacaaaccagaggatatgaagaraaatccctcagtgtcttggtcgcagatgctcagcctctaggaagctgaccaggctggtagcaggatacatcccactacctatatcctctgtttgcatcccttctgytctgatgctgctgtgccccagaagcctgttgtcctctcccatgctccgtcttgattcagctcagaggctatgataggagctgccatcccccctgcatttagcacaccatctctgtggcttctggtctctccagcacaacttttggagcaggttcagactgaccttgtaatgtatacgatggtgaggcttaggggagcgttttgccaggtctaggtgattaattatcttactgggagaagtccaacaggtagagtaataccagacaggtgtttattgagattacaaccatatttcctccca

SEQ ID NO: 583 - DNA, 437 bp, Chicken  19866894084772_1
ggaatttctctctccatttgagtagagagcggatgctgtctttgggcctcccaagttcataggcttccctgagctcagataaaggcacggcttattcagagaaggcgtagaggttgtgatgctggggcacagcatttgatcaagcatcagacctgttgaaagcaccagacccgagtgcagcaccagcccatgaaaccactctgctggggaccaaggagtctaatgggggtcaaagagtttggagagaggaagcagggctgggaagaagaaaggagcagcctgggctgagaggccctcagmgtacagcatgacgggagagtttttrgttcagtatacattggaagtgttttctcacatctgattcaacccgagtgaccccgtaggtagctggcatcttcagtaggatcagaccataatggattttaaagagaaaagag

SEQ ID NO: 584 - DNA, 412 bp, Chicken  19866894084772_2
agagcggatgctgtctttgggcctcccaagttcataggcttccctgagctcagataaaggcacggcttattcagagaaggcgtagaggttgtgatgctggggcacagcatttgatcaagcatcagacctgttgaaagcaccagacccgagtgcagcaccagcccatgaaaccactctgctggggaccaaggagtctaatgggggtcaaagagtttggagagaggaagcagggctgggaagaagaaaggagcagcctgggctgagaggccctcagmgtacagcatgacgggagagtttttrgttcagtatacattggaagtgttttctcacatctgattcaacccgagtgaccccgtaggtagctggcatcttcagtaggatcagaccataatggattttaaagagaaaagag

SEQ ID NO: 585 - DNA, 600 bp, Chicken  19866894084776_1
tgaacctatctccttttgtatctcagtagctacgccagctaacagtcaaactttttgggtggttggtgactcacagaacacaccacagggaaggaaaattatgttttcactcttggatgtgatcgcgggttgtacaacggcagtcaaaaaatccaaagatgaggtacatgcagaaaatgtgacaaatggaaataaccgagaggccttttcctcaacacaataataaaaaaaaaaccttggttccagagctttgcatcttccagatcacaaaaataggggagcagtaggcttttgcagatyacaaaggcctaaaaatgtgccatgtggcttgtgatgaagggcagctgagaggaaaggaggacagttgaattttgtcacaaaaaataatcataaaagtccttgaggcaaaaagaaataaaaaaaaataagaggggattacttggcatacaggggtagcaggaagctctgaaggaccagaataatacaccatcaaaacacaactctttaaagagtaccttttcgtctctgctcaggttgttgtcttttgttccatctcatttcggtgaccatcagtacatctgtcttttcccttctcagctg

SEQ ID NO: 586 - DNA, 600 bp, Chicken  19866894084776_2
ggacagttgaattttgtcacaaaaaataatcataaaagtccttgaggcaaaaagaaataaaaaaaaataagaggggattacttggcatacaggggtagcaggaagctctgaaggaccagaataatacaccatcaaaacacaactctttaaagagtaccttttcgtctctgctcaggttgttgtcttttgttccatctcatttcggtgaccatcagtacatctgtcttttcccttctcagctggatgaggttgacagtaatccaattggatacaagcccagatgcatttcttccttcgttycttctttgtagtctgtataaaaaaacagcaaaacccagacaagacaagcattacttacaattcaaagtcaacctctggttcaaacraacccccaaccaaacacgaaaatagcaccaaaaaatctattacagaaattaagctgataaaaawtatttcatttctccacaatttctgttcactcttaatattggacagggcaatgtgacctgaaaatcaactctgctaagtrtagaatcatagaatcatggaatcattatggttggaaaagacctccaagatcatcaagcccaatcgccaacc

SEQ ID NO: 587 - DNA, 600 bp, Chicken  19866894084776_3
atacaggggtagcaggaagctctgaaggaccagaataatacaccatcaaaacacaactctttaaagagtaccttttcgtctctgctcaggttgttgtcttttgttccatctcatttcggtgaccatcagtacatctgtcttttcccttctcagctggatgaggttgacagtaatccaattggatacaagcccagatgcatttcttccttcgttycttctttgtagtctgtataaaaaaacagcaaaacccagacaagacaagcattacttacaattcaaagtcaacctctggttcaaacraacccccaaccaaacacgaaaatagcaccaaaaaatctattacagaaattaagctgataaaaawtatttcatttctccacaatttctgttcactcttaatattggacagggcaatgtgacctgaaaatcaactctgctaagtrtagaatcatagaatcatggaatcattatggttggaaaagacctccaagatcatcaagcccaatcgccaacccatcaccaccatgcccaytaaccatatccctcagtgccacatacacccttttctatacatataatgcatagaagtcttctgatcca

SEQ ID NO: 588 - DNA, 600 bp, Chicken  19866894084776_4
agagtaccttttcgtctctgctcaggttgttgtcttttgttccatctcatttcggtgaccatcagtacatctgtcttttcccttctcagctggatgaggttgacagtaatccaattggatacaagcccagatgcatttcttccttcgttycttctttgtagtctgtataaaaaaacagcaaaacccagacaagacaagcattacttacaattcaaagtcaacctctggttcaaacraacccccaaccaaacacgaaaatagcaccaaaaaatctattacagaaattaagctgataaaaawtatttcatttctccacaatttctgttcactcttaatattggacagggcaatgtgacctgaaaatcaactctgctaagtrtagaatcatagaatcatggaatcattatggttggaaaagacctccaagatcatcaagcccaatcgccaacccatcaccaccatgcccaytaaccatatccctcagtgccacatacacccttttctatacatataatgcatagaagtcttctgatccatttttaatgagctaataacactgaactctgcagaaataggcacccaggtttgtggtttcacatg

SEQ ID NO: 589 - DNA, 600 bp, Chicken  19866894084776_5
cccttctcagctggatgaggttgacagtaatccaattggatacaagcccagatgcatttcttccttcgttycttctttgtagtctgtataaaaaaacagcaaaacccagacaagacaagcattacttacaattcaaagtcaacctctggttcaaacraacccccaaccaaacacgaaaatagcaccaaaaaatctattacagaaattaagctgataaaaawtatttcatttctccacaatttctgttcactcttaatattggacagggcaatgtgacctgaaaatcaactctgctaagtrtagaatcatagaatcatggaatcattatggttggaaaagacctccaagatcatcaagcccaatcgccaacccatcaccaccatgcccaytaaccatatccctcagtgccacatacacccttttctatacatataatgcatagaagtcttctgatccatttttaatgagctaataacactgaactctgcagaaataggcacccaggtttgtggtttcacatgcacacgttcacatgcacacacagacctgctgggcttggaaagggccctttggagatatctggtccaacccctcttggac

SEQ ID NO: 590 - DNA, 600 bp, Chicken  19866894084776_6
aaaaaaacagcaaaacccagacaagacaagcattacttacaattcaaagtcaacctctggttcaaacraacccccaaccaaacacgaaaatagcaccaaaaaatctattacagaaattaagctgataaaaawtatttcatttctccacaatttctgttcactcttaatattggacagggcaatgtgacctgaaaatcaactctgctaagtrtagaatcatagaatcatggaatcattatggttggaaaagacctccaagatcatcaagcccaatcgccaacccatcaccaccatgcccaytaaccatatccctcagtgccacatacacccttttctatacatataatgcatagaagtcttctgatccatttttaatgagctaataacactgaactctgcagaaataggcacccaggtttgtggtttcacatgcacacgttcacatgcacacacagacctgctgggcttggaaagggccctttggagatatctggtccaacccctcttggacagagagtccacagcttcttgctgtggatcaccttcataataaaaatatcttttcacatcagaagtcacaagattccagctgtcaggaaa

SEQ ID NO: 591 - DNA, 600 bp, Chicken  19866894084782_1
tggctgcccacgtcagtaaaagaagttactgatacgctctccttgctctcatgggatgagcaagtcttcttgctcgtagcaaggtctttaagttcaaatttagccgtcaggtccatggacaaaggccttggtttcctaacccacgatttctctgtaggagacttttcctcagaagcttccacagtacgatgcttttgatctctcagagattccagaaaagcagcagatactggtctaggttttggcttttgctgcacatcaagagagaaatcaactttactgttcatgttatttgcatcrgtgttgtttttctccgctggatgatcttcagtagcatctttcttttctccagctttgagggagttccaggagaccggtcgaagactggaggaaagcgatatctgcctgtgaagagacccttcaggactcctggaggtctcaggtgatggctgagatagtttctcctgcttcacgttgcactgaggctcttttgtctgcatagtactcaacaccctgcggtcatcagcagccctttttccttgggccaggctcacctttgactgctctgtgcccgccgtctcaaacagaatgacagtatty

SEQ ID NO: 592 - DNA, 600 bp, Chicken  19866894084782_2
gtgttgtttttctccgctggatgatcttcagtagcatctttcttttctccagctttgagggagttccaggagaccggtcgaagactggaggaaagcgatatctgcctgtgaagagacccttcaggactcctggaggtctcaggtgatggctgagatagtttctcctgcttcacgttgcactgaggctcttttgtctgcatagtactcaacaccctgcggtcatcagcagccctttttccttgggccaggctcacctttgactgctctgtgcccgccgtctcaaacagaatgacagtattygtattgtgaccactatagtaagtcatgtttgtgacgacttcgctgccagccttgctttcatttccaatggctttgtgatctactaatggaggaacatttccgcccgacaccttagcagacgttgtttcttcagaaggctttctaataagactgcttgatctgaaagctgtaataggtggttttacatttgcaaaagtatctgaaggcgtatctttagaaaaaggtttggggaagagtcttggccttgatcccagcgacggcattgttgcagatctcagagtgctcccaaatttgttcttt

SEQ ID NO: 593 - DNA, 600 bp, Chicken  19866894084782_3
tcagagagcattcagagtctggcaaggcacacaatcatatatatatgggtaatatcactggagacagaaatcctgagtatttcaaggcaaaaatctggctcctgcacggaaacaaaggcaccggatttaaccatatggagtaagggaatgtgcagttttcagttactaaagaatcaacaagaaattaccacctgaaccacctgcagttgtgaagggtaaataatttggtcggcacgatagctattaaatgcaaacacggttagatccacatctcagtgagtactgtttgcaaattcaagygttgtcaatcactggttaaacactgagctctgtgttactgtaatctcaattactgtaatttgctttctattgtaaatctcctctctgcgacaaccttgtgggaaggcctacctgcaggctgaccttcaaacggcccattttcaaccgaaaacacggcttccaccgtgacaaagcagctttgccaccatctccccgataaaggcaggagatgagctctgcctttaaccacattattactgcagagatgagggaaaatcagcagcccagcagcagacgcctcccctcgggctcaccttgcca

SEQ ID NO: 594 - DNA, 600 bp, Chicken  19866894084782_4
aaatctcctctctgcgacaaccttgtgggaaggcctacctgcaggctgaccttcaaacggcccattttcaaccgaaaacacggcttccaccgtgacaaagcagctttgccaccatctccccgataaaggcaggagatgagctctgcctttaaccacattattactgcagagatgagggaaaatcagcagcccagcagcagacgcctcccctcgggctcaccttgccaggccccttcacctgccaatgcactcgaaattctgccccagctgctcaccccaaacacctccgggtctgcaacytcttctttccaaagcagtccctgacccaatcagcttattggaatcaatctgttccttccgcgatctcacagctcctcatgaaatcttcctccctctcccgctccttattctaagaaacgccatcaaaacgcaattaaaacgctctcgcattccaaggatgaaaggctttgtgaagagcagctatgccctaaaagcagaagaggaacactgctgaagcaagggcgatgctagcagagaagactgcgaggcaagaaatcaagatgctgatttcatacagccatagagctgtttgaattggac

SEQ ID NO: 595 - DNA, 600 bp, Chicken  19866894084784_1
gttgatgagacagatgactttgtgatccagtgtagcaactaagagctatttggaacagggtgagaagacttcaggataagaagcagggaccagtgctggtggcacaggtgtctttgtgatggcaattccagtcctgcaggaattgtgcagtaagagctctgaaacacactcaccagccactgctacagctgctcttgcacaaatagttcagggttagcacactgctgatgtaaagatctctggggggagaagaaaatgcttgctacctgtccaggtttgtaggcccgttttttgcagccyctcacttcacttactttaacaactgcataaggcatgacaagaatgctggcttgctctgtgagtgggggcaaaggcagrcagaccctattcagatagactggaagtgtccatgatgtgatatgtgtttccagatgcttcaccttctgctttgtcacctggctgcagcactgcagacctcagaaaccccacaggagatcctgactcagcagttctgcacagttctgtcttgctggagcctgcagctgcaaaaccaaggtgcagggggagggggaagcacacgatgaaatgcatagtctgatc

SEQ ID NO: 596 - DNA, 600 bp, Chicken  19866894084784_2
agaagcagggaccagtgctggtggcacaggtgtctttgtgatggcaattccagtcctgcaggaattgtgcagtaagagctctgaaacacactcaccagccactgctacagctgctcttgcacaaatagttcagggttagcacactgctgatgtaaagatctctggggggagaagaaaatgcttgctacctgtccaggtttgtaggcccgttttttgcagccyctcacttcacttactttaacaactgcataaggcatgacaagaatgctggcttgctctgtgagtgggggcaaaggcagrcagaccctattcagatagactggaagtgtccatgatgtgatatgtgtttccagatgcttcaccttctgctttgtcacctggctgcagcactgcagacctcagaaaccccacaggagatcctgactcagcagttctgcacagttctgtcttgctggagcctgcagctgcaaaaccaaggtgcagggggagggggaagcacacgatgaaatgcatagtctgatccctgcctctctattcatcacagatcctgtgcataataaataggctggatcagcctttttttgtcatcctgtcatcatg

SEQ ID NO: 597 - DNA, 600 bp, Chicken  19866894084786_1
tttttttctcttagctgatgtatgcctttcaacctgaactatatcaaagtcagcatttagcactgtgtatttactttagcttgcatgcaatttgcaaatgatatactgtacttttctacagttaatttgttcatttcaatggataatgcacccatgaactttctgaattttgtgctgaaaatatgataagtgggttatattatgtagtgaaggagttgtaatatgaaaacacctccatatcatcaattatgtaccagcttaatacaaaatgatattaatacatgaatcaataaaggaagytgtataataggattctcatgagaacatgcagcggatgtttattaaagatgtaagttctatgttaagaaagaaagctttgctttattcatttatttgataagcagctcasctgccctgagtgaaatgattttgttgtatattcacaaggaactctcacgtgtatttctcatttttctcacagagttcagaaatttaatagccaatacagatatcataaaagcctgactgttgtttgtggtcaacggtgcagttttctttgagcagtgaggaagagaaatgtgtctgtgtgtgatggagagt

SEQ ID NO: 598 - DNA, 600 bp, Chicken  19866894084786_2
acttttctacagttaatttgttcatttcaatggataatgcacccatgaactttctgaattttgtgctgaaaatatgataagtgggttatattatgtagtgaaggagttgtaatatgaaaacacctccatatcatcaattatgtaccagcttaatacaaaatgatattaatacatgaatcaataaaggaagytgtataataggattctcatgagaacatgcagcggatgtttattaaagatgtaagttctatgttaagaaagaaagctttgctttattcatttatttgataagcagctcasctgccctgagtgaaatgattttgttgtatattcacaaggaactctcacgtgtatttctcatttttctcacagagttcagaaatttaatagccaatacagatatcataaaagcctgactgttgtttgtggtcaacggtgcagttttctttgagcagtgaggaagagaaatgtgtctgtgtgtgatggagagtggcaatcagtactaagatgtgcacccagtttgttgggaaaagtaatgggatataaaggaaagcaggagcagagtgaaggaagcacagaagagctgatgggaagcccctg

SEQ ID NO: 599 - DNA, 600 bp, Chicken  19866894084790_1
gcctgcggggacggacttaccggtggggacggacttaccgcttgggaacatgatcagtgcgagctggatgagccgggcagctctctgccgggcttggcttaactccagctccgagtgctcctcctgctggctcaggaagaaatacgccagtggcaccgagaaggcgaaattggggagctgggacaaattccggtgactctgcaggatcagagggagagaattaccgagaaatgatgctatgcagcgatctcaatacagcttcccagctactggctcggtgcccccacatctgagtaagcrattttgagtttatacaattggttgtaggatacgaggattacaacagaacctaacactgaccccttagccttcatggctgtgccaatcacctccagctgacagcctgccactgagacagcccccaaaggggtgagggttacagaagccccatgctctccagtccagcttgatggggagaaccccaggggcaagctcccccctagccctgccttgctcctcacaaggctgctggcaactcacctcccactcctggaacatgcgtgtcaggaaggcgtactctctggctcggagggacagaaa

SEQ ID NO: 600 - DNA, 600 bp, Chicken  19866894084790_2
ggtagaaagccctgcatggagagcaggaacaggttttagaagcctgatttgagagaagcagcacgtctcattcaagagcggggaccaaaaatgagcccaaatcaatacttcttttcctccttcctcaaattttgatcactttgtgaaagcattgggacaataaacgcatagctcgtcctacacctgatccccttgtgcacgcacacacacctcagggctagctactcagggcaacagaaacaaggcaatctctgaagtctgcatgctacaggctttgcacagccatgcctctgctgctgyccctgcactgcatagggatggtgacacagcacacgtgacatgcatagtggggggggagatgaacatccaaattgggtgagatacagatcacagcgttcgggtcacgggcagcacagtctggcagygagcgggtgctggaaacctgagcaatctccaggtagagcaatttgggagagattacttaggtcagctgactggaaaattcccagaataaagtcaccttcctctgcagctgcagaactatcagtgttacataaacaaccaggccttgaggagcacaagtgccaggaacagtggctg

SEQ ID NO: 601 - DNA, 600 bp, Chicken  19866894084790_3
caaattttgatcactttgtgaaagcattgggacaataaacgcatagctcgtcctacacctgatccccttgtgcacgcacacacacctcagggctagctactcagggcaacagaaacaaggcaatctctgaagtctgcatgctacaggctttgcacagccatgcctctgctgctgyccctgcactgcatagggatggtgacacagcacacgtgacatgcatagtggggggggagatgaacatccaaattgggtgagatacagatcacagcgttcgggtcacgggcagcacagtctggcagygagcgggtgctggaaacctgagcaatctccaggtagagcaatttgggagagattacttaggtcagctgactggaaaattcccagaataaagtcaccttcctctgcagctgcagaactatcagtgttacataaacaaccaggccttgaggagcacaagtgccaggaacagtggctgaacagacagcacataagtgaccaaacacagagttgaccacaaaaagaggagttttaggacaaaaataagtgctacttcaggctaacgggtactaattgtacaaaagggatgtgacagggaggaac

SEQ ID NO: 602 - DNA, 600 bp, Chicken  19866894084800_1
atttgatgctatggacactgtatggatctcaacccaaccactaaccaataattcactccctggttctcttaggatgggctctctctaggacaaatttacagtgatggagggaatataccacacagcaaggggcaaaccaggtaggataggacatagagtttttactgtgctcaagtcacttattcattcaacatatagtgtttccacagctctagtgctattcccatgtccttcataatccctgtgatatgagaagtggcattggctcactattcaagactaagaaatatggtagagagrggattaagtagcaaagaatatccatggatttggagatttcttatttgtaacacgctgtgatctgccactttctctcttcaaagtgcagctgctggtggtgtgtacccacagctgtgaactctcaagtattctgcagatcggatgggaagctcaagttgggctctcagaagacaaaawttcatgacaaagcagcacttcaatggcctgcctagacttgctaagaggtttacagtctgcattttcctctgcacggagaactcgagatagatgctctccttcaggtggtgtcaccctcactac

SEQ ID NO: 603 - DNA, 600 bp, Chicken  19866894084800_2
acttattcattcaacatatagtgtttccacagctctagtgctattcccatgtccttcataatccctgtgatatgagaagtggcattggctcactattcaagactaagaaatatggtagagagrggattaagtagcaaagaatatccatggatttggagatttcttatttgtaacacgctgtgatctgccactttctctcttcaaagtgcagctgctggtggtgtgtacccacagctgtgaactctcaagtattctgcagatcggatgggaagctcaagttgggctctcagaagacaaaawttcatgacaaagcagcacttcaatggcctgcctagacttgctaagaggtttacagtctgcattttcctctgcacggagaactcgagatagatgctctccttcaggtggtgtcaccctcactactatttgaagacacagtatttatggtcctacaaggagtccttgttatagtatttcatggttgactggcaataaacgtggttggctctgtgattaatttctctggagcacttgtcagacacctgaactgggagctggcctcttgctccctgtttacatgcccagttccaaagcagttcg

SEQ ID NO: 604 - DNA, 600 bp, Chicken  19866894084804_1
taggatagtttctcctgcacattaggtaagtagagcaagagaaacaatcagctttggtgttacagcatgtgggaatgtttccttgtacaaaacaacatgctgctcttgaactctgtacttgggtgagccatggcagccaccatggcaataggaatctggtccactgatactactgtacacagtatgtgttcgtgcacacaaaaacaaataaaaccgttcattattcctttctagtctgcccaccaaaaccaatgcatgtaacttcaaactgctcataccaatgaagtgtatcatgcctgytttaggagtgtgggctctgaaaattgccttttagacacttttcatcttataactcacagctaaaatgtgcagtattttgacatttttgttcttttatgttccaatatacttgcatactttgttacctctttcatgattcattattggaaaccattttcttgtgcgttctagttagggcactgactctcactacgtgcttggagtgctaactctawggagaattcatactgyaatggatgtagcgaggcyccaaagataygggtccccagtacagggaaaactgtataaaagtgcaaaaat

SEQ ID NO: 605 - DNA, 600 bp, Chicken  19866894084804_2
gttcattattcctttctagtctgcccaccaaaaccaatgcatgtaacttcaaactgctcataccaatgaagtgtatcatgcctgytttaggagtgtgggctctgaaaattgccttttagacacttttcatcttataactcacagctaaaatgtgcagtattttgacatttttgttcttttatgttccaatatacttgcatactttgttacctctttcatgattcattattggaaaccattttcttgtgcgttctagttagggcactgactctcactacgtgcttggagtgctaactctawggagaattcatactgyaatggatgtagcgaggcyccaaagataygggtccccagtacagggaaaactgtataaaagtgcaaaaattatgagctatttctcttcttcatagctttgtgatattataaggcctgacttggatacagaattacggatggaggaaaaatttgaaagtatttggaatgatttgtttagcgaagctccaaaggatgtggtctcagtggattaagctatttgtaatttctcccagcctttcccaaatatggatttttaatattctgtccaataaataagacctacta

SEQ ID NO: 606 - DNA, 600 bp, Chicken  19866894084804_3
tagtctgcccaccaaaaccaatgcatgtaacttcaaactgctcataccaatgaagtgtatcatgcctgytttaggagtgtgggctctgaaaattgccttttagacacttttcatcttataactcacagctaaaatgtgcagtattttgacatttttgttcttttatgttccaatatacttgcatactttgttacctctttcatgattcattattggaaaccattttcttgtgcgttctagttagggcactgactctcactacgtgcttggagtgctaactctawggagaattcatactgyaatggatgtagcgaggcyccaaagataygggtccccagtacagggaaaactgtataaaagtgcaaaaattatgagctatttctcttcttcatagctttgtgatattataaggcctgacttggatacagaattacggatggaggaaaaatttgaaagtatttggaatgatttgtttagcgaagctccaaaggatgtggtctcagtggattaagctatttgtaatttctcccagcctttcccaaatatggatttttaatattctgtccaataaataagacctactagcttcaagataaaaaa

SEQ ID NO: 607 - DNA, 600 bp, Chicken  19866894084804_4
caatgcatgtaacttcaaactgctcataccaatgaagtgtatcatgcctgytttaggagtgtgggctctgaaaattgccttttagacacttttcatcttataactcacagctaaaatgtgcagtattttgacatttttgttcttttatgttccaatatacttgcatactttgttacctctttcatgattcattattggaaaccattttcttgtgcgttctagttagggcactgactctcactacgtgcttggagtgctaactctawggagaattcatactgyaatggatgtagcgaggcyccaaagataygggtccccagtacagggaaaactgtataaaagtgcaaaaattatgagctatttctcttcttcatagctttgtgatattataaggcctgacttggatacagaattacggatggaggaaaaatttgaaagtatttggaatgatttgtttagcgaagctccaaaggatgtggtctcagtggattaagctatttgtaatttctcccagcctttcccaaatatggatttttaatattctgtccaataaataagacctactagcttcaagataaaaaaatctactagctttaagat

SEQ ID NO: 608 - DNA, 600 bp, Chicken  19866894084804_5
aacttcaaactgctcataccaatgaagtgtatcatgcctgytttaggagtgtgggctctgaaaattgccttttagacacttttcatcttataactcacagctaaaatgtgcagtattttgacatttttgttcttttatgttccaatatacttgcatactttgttacctctttcatgattcattattggaaaccattttcttgtgcgttctagttagggcactgactctcactacgtgcttggagtgctaactctawggagaattcatactgyaatggatgtagcgaggcyccaaagataygggtccccagtacagggaaaactgtataaaagtgcaaaaattatgagctatttctcttcttcatagctttgtgatattataaggcctgacttggatacagaattacggatggaggaaaaatttgaaagtatttggaatgatttgtttagcgaagctccaaaggatgtggtctcagtggattaagctatttgtaatttctcccagcctttcccaaatatggatttttaatattctgtccaataaataagacctactagcttcaagataaaaaaatctactagctttaagataagataaaaa

SEQ ID NO: 609 - DNA, 600 bp, Chicken  19866894084806_1
gtattcaccacatactgctattaatgcagtatagggtccaaatgcagcagcaggggttaatatttggacatagctgtttttctaacccttcgtatcacttttatttcctctccttttctttctctccttaacctctcttttactgctgttaaattccttgctttcatttttgtagctcagcctcccagccttctccaatgctgttcggcaccagttcaggctcagccttatttctcctgatatgtcaccccacaggcagggagcctaaagcaacaccactccctccagcttgcagcctgkggctggatctatctctgggccattttgctgatcaggagcagggaggggagacagggatctgaagagcagccctgcaccttcacacwtgcaggagggagagagcacacaggggtgcacaagagcaccttcaccccattagctgagctctkccctatttccagcactgtgactgctgctggcccasgagagccccttccctttggtgtaacccaggaggctgtcggattgggtctgatggttactggctggccytgcacaatgtgcataaacaaagggagcaaaaagacatcaaatgctccc

SEQ ID NO: 610 - DNA, 600 bp, Chicken  19866894084806_2
ccttcgtatcacttttatttcctctccttttctttctctccttaacctctcttttactgctgttaaattccttgctttcatttttgtagctcagcctcccagccttctccaatgctgttcggcaccagttcaggctcagccttatttctcctgatatgtcaccccacaggcagggagcctaaagcaacaccactccctccagcttgcagcctgkggctggatctatctctgggccattttgctgatcaggagcagggaggggagacagggatctgaagagcagccctgcaccttcacacwtgcaggagggagagagcacacaggggtgcacaagagcaccttcaccccattagctgagctctkccctatttccagcactgtgactgctgctggcccasgagagccccttccctttggtgtaacccaggaggctgtcggattgggtctgatggttactggctggccytgcacaatgtgcataaacaaagggagcaaaaagacatcaaatgctccctcctcttctctctatatgtgctgtgacaccaagagggaaccctctgaaaaggaaatacagccaatagaatacaaaatccttttttt

SEQ ID NO: 611 - DNA, 600 bp, Chicken  19866894084806_3
taaattccttgctttcatttttgtagctcagcctcccagccttctccaatgctgttcggcaccagttcaggctcagccttatttctcctgatatgtcaccccacaggcagggagcctaaagcaacaccactccctccagcttgcagcctgkggctggatctatctctgggccattttgctgatcaggagcagggaggggagacagggatctgaagagcagccctgcaccttcacacwtgcaggagggagagagcacacaggggtgcacaagagcaccttcaccccattagctgagctctkccctatttccagcactgtgactgctgctggcccasgagagccccttccctttggtgtaacccaggaggctgtcggattgggtctgatggttactggctggccytgcacaatgtgcataaacaaagggagcaaaaagacatcaaatgctccctcctcttctctctatatgtgctgtgacaccaagagggaaccctctgaaaaggaaatacagccaatagaatacaaaatccttttttttttctcaagtttctgcaccctctttttcctttcccatggcgctttctcgtttctccttcacgc

SEQ ID NO: 612 - DNA, 600 bp, Chicken  19866894084806_4
ccagccttctccaatgctgttcggcaccagttcaggctcagccttatttctcctgatatgtcaccccacaggcagggagcctaaagcaacaccactccctccagcttgcagcctgkggctggatctatctctgggccattttgctgatcaggagcagggaggggagacagggatctgaagagcagccctgcaccttcacacwtgcaggagggagagagcacacaggggtgcacaagagcaccttcaccccattagctgagctctkccctatttccagcactgtgactgctgctggcccasgagagccccttccctttggtgtaacccaggaggctgtcggattgggtctgatggttactggctggccytgcacaatgtgcataaacaaagggagcaaaaagacatcaaatgctccctcctcttctctctatatgtgctgtgacaccaagagggaaccctctgaaaaggaaatacagccaatagaatacaaaatccttttttttttctcaagtttctgcaccctctttttcctttcccatggcgctttctcgtttctccttcacgctacataaatagtgttgagcactgatgggatttcaa

SEQ ID NO: 613 - DNA, 569 bp, Chicken  19866894084806_5
caggcagggagcctaaagcaacaccactccctccagcttgcagcctgkggctggatctatctctgggccattttgctgatcaggagcagggaggggagacagggatctgaagagcagccctgcaccttcacacwtgcaggagggagagagcacacaggggtgcacaagagcaccttcaccccattagctgagctctkccctatttccagcactgtgactgctgctggcccasgagagccccttccctttggtgtaacccaggaggctgtcggattgggtctgatggttactggctggccytgcacaatgtgcataaacaaagggagcaaaaagacatcaaatgctccctcctcttctctctatatgtgctgtgacaccaagagggaaccctctgaaaaggaaatacagccaatagaatacaaaatccttttttttttctcaagtttctgcaccctctttttcctttcccatggcgctttctcgtttctccttcacgctacataaatagtgttgagcactgatgggatttcaattctgttcaaaaccccaaaaaggtattttaaggttat

SEQ ID NO: 614 - DNA, 600 bp, Chicken  19866894084807_1
tacattcaagttttaggactttactccttgtcctatcactatgcaccaccaagattatcctgatctcatccatttgcctcccaccaccccgtaaatatttataaacgtttatcgcatttcctctcagacttctcttctgaaggctgaacagacccaggttattcagtctttcttcaccaaatacccaacattcactgcacacacccatacttcctaaatttcctgtaattcaccttcctattgaaaatctattaaagaaatgattttttaagtccacgaatctgacaagcataatataayttcatttacaacacaaccacatctgtattctgactattccgaattgtttaaaaagtaattcttagttctcamgttacaatcattgtcattgtgtgtttgggtcttaaatgtaccagcaacrtcaacctgtcttcctgccatcatacagggaaccccacatcaactgccttctagtttgatactccttttmggagcaaataaatggtgggagtcacatgaaaaaaaaacagtatgacacaggatctctaaaatacgcagtcctgaagtcagaagagtgcacagagccttaagcaactctgc

SEQ ID NO: 615 - DNA, 600 bp, Chicken  19866894084807_2
tttgcctcccaccaccccgtaaatatttataaacgtttatcgcatttcctctcagacttctcttctgaaggctgaacagacccaggttattcagtctttcttcaccaaatacccaacattcactgcacacacccatacttcctaaatttcctgtaattcaccttcctattgaaaatctattaaagaaatgattttttaagtccacgaatctgacaagcataatataayttcatttacaacacaaccacatctgtattctgactattccgaattgtttaaaaagtaattcttagttctcamgttacaatcattgtcattgtgtgtttgggtcttaaatgtaccagcaacrtcaacctgtcttcctgccatcatacagggaaccccacatcaactgccttctagtttgatactccttttmggagcaaataaatggtgggagtcacatgaaaaaaaaacagtatgacacaggatctctaaaatacgcagtcctgaagtcagaagagtgcacagagccttaagcaactctgcaactctgacccaaaagcacactttaaaatagaagccttccatttatgagaaaacaaagcttttcatagcacc

SEQ ID NO: 616 - DNA, 600 bp, Chicken  19866894084807_3
tctcagacttctcttctgaaggctgaacagacccaggttattcagtctttcttcaccaaatacccaacattcactgcacacacccatacttcctaaatttcctgtaattcaccttcctattgaaaatctattaaagaaatgattttttaagtccacgaatctgacaagcataatataayttcatttacaacacaaccacatctgtattctgactattccgaattgtttaaaaagtaattcttagttctcamgttacaatcattgtcattgtgtgtttgggtcttaaatgtaccagcaacrtcaacctgtcttcctgccatcatacagggaaccccacatcaactgccttctagtttgatactccttttmggagcaaataaatggtgggagtcacatgaaaaaaaaacagtatgacacaggatctctaaaatacgcagtcctgaagtcagaagagtgcacagagccttaagcaactctgcaactctgacccaaaagcacactttaaaatagaagccttccatttatgagaaaacaaagcttttcatagcaccaaaagatttctaacaacacaaagagcagaacaatgctccatcatacgct

SEQ ID NO: 617 - DNA, 600 bp, Chicken  19866894084807_4
ttcactgcacacacccatacttcctaaatttcctgtaattcaccttcctattgaaaatctattaaagaaatgattttttaagtccacgaatctgacaagcataatataayttcatttacaacacaaccacatctgtattctgactattccgaattgtttaaaaagtaattcttagttctcamgttacaatcattgtcattgtgtgtttgggtcttaaatgtaccagcaacrtcaacctgtcttcctgccatcatacagggaaccccacatcaactgccttctagtttgatactccttttmggagcaaataaatggtgggagtcacatgaaaaaaaaacagtatgacacaggatctctaaaatacgcagtcctgaagtcagaagagtgcacagagccttaagcaactctgcaactctgacccaaaagcacactttaaaatagaagccttccatttatgagaaaacaaagcttttcatagcaccaaaagatttctaacaacacaaagagcagaacaatgctccatcatacgcttaagcctgtagacatcctgaaaggaacttgaatggagatcctcatatagagaacctcaaaacgttcatc

SEQ ID NO: 618 - DNA, 596 bp, Chicken  19866894084812_1
tagaacaaactacctttgtttatattaaccagaactgtggaaaggcaaaggattaacaataacaaacaaacaaacaaacaaaatcacatatggtagtataacaaggtgtgatagatgctcctgaacatatctgttctgtactttcctgcatgtgtaaaaggaagattaatgaagtattgccatagagatatgtccataagtgacacaaccatattatcagaaagatttgtaaattatttatctgtccccacatggtagacattcagatgcataagagaggttggaccttgattcccactragattaaggcagtgcgagcttcaccttgacaagttcagctaaattattagtgcttgattttcttcccaaatctggatagttatagttcaagtatttaaatacttaaatgcagatggaaaatgtgaatgtgacagcgatccctgataaatacttctgttagaagaggtggtctctaatttggggggggagaggaggcagagaagtgtaaaaccatcatagtagaatcatggaatcatttgagtggaaaggtcctttaaaggtttttagtccaactcctttgcactaagagggacaca

SEQ ID NO: 619 - DNA, 600 bp, Chicken  19866894084814_1
aaagagtgcaaattttctgcatggaggaattcaatttcacacttttgcttcatacgcatttccatatcagacaacattttgtccttctgatgccatctgtcactcagcaacaaaatttaacagaaaactgggggaaatgattcaacctctattgtcatactactgcctctgatgttgtgagccaatataataaaatgggctgctccgaaagcaatgcctcctttgtatttgctcttagatttccagtaatagaaaacttacatttaaaatgtcatcctaccgtgcatcagaaagaaacaycactcttctctattctttggtaacaaacaccactcagtaaatcacgatctttgaatacttaccagcttatggtttgaacaaagagatcccactactgatgcctgttatctggtacacttttaaggaatcttaccctttctatatttcacttctaagagtggcctcactgaattaagatataatttaaatgggttctttttatattaacatatgatcttaccaacatccattcttaagaatctttgtagaaaatttatctgattattataaaggtgcatttttattaagtaataacaagct

SEQ ID NO: 620 - DNA, 600 bp, Chicken  19866894084824_1
gaagcctattaatgcagcatcagtctgctctgtgttgggtttctcaaaaatacagggacttgtgggttacatacagaacacagtttttttccccatggtgaaaagttattgttagtcctcaggtgtggcatactgaaaaaggttttatgtacaaaatatctgatggactttaagagttaagccatcaagagatttatttttcagcagtacctgtcataagggtcagcaaaaccacagtttccaccagattatatgtagtataataatggacatatctgcacatctttaagcctcccaagkgtacagacgattcccctacgtaaggtgatcttggagatcacataatcagctttcctgggcaacactactttatcaaaggccagttttttacctaagcaaaatgcaccttctgcaatgtcaaggcaatacaccttagaacgtactctactttgagaaaggatcaaagcatgaataaggcagacagagatttatttatggcaagtcttgtctccgtatcacacataacagaacagaacctgctgaagccagcttttagtgctgtaaagacaatctgagctaaactgtacccctgcatgttcc

SEQ ID NO: 621 - DNA, 600 bp, Chicken  19866894084827_1
acaactatgtaataactggcacaactgtgtaattacaatacagcactatctaaggttacatcattatcattacgcttaacactaaaacaaaacgtggttatcctgattggtgtcaacacatttgtcatatgccacccaggaagatgaggctatgtacatgccaccacccaagccctcctgaacttgaaaaaaacacctttgtttctgtatatatgatataataagaaaaatacacaggactttgactatttgggcttaaatttgcccttccttttcacttttcctcttctcatcgcttckttaggcagctttctgtttgttactgagtacactgaaycactgaaagaaaatctacctctgtgtgtaacgtttgtctgtagtctacctatgcatatctgtagtccatttccacaggaaagtgaactttgaagacccaacagcagcgttaactcaatggcgttgcacagagaacatacgtctcagtgttgatcgtctggttaaataggtatcttaatgaactaacatgtgtctatctacaaacagtgtattacatgaaaagtagaatgcagctgaaggaagaataatattgaaaatatcatt

SEQ ID NO: 622 - DNA, 600 bp, Chicken  19866894084827_2
atacagcactatctaaggttacatcattatcattacgcttaacactaaaacaaaacgtggttatcctgattggtgtcaacacatttgtcatatgccacccaggaagatgaggctatgtacatgccaccacccaagccctcctgaacttgaaaaaaacacctttgtttctgtatatatgatataataagaaaaatacacaggactttgactatttgggcttaaatttgcccttccttttcacttttcctcttctcatcgcttckttaggcagctttctgtttgttactgagtacactgaaycactgaaagaaaatctacctctgtgtgtaacgtttgtctgtagtctacctatgcatatctgtagtccatttccacaggaaagtgaactttgaagacccaacagcagcgttaactcaatggcgttgcacagagaacatacgtctcagtgttgatcgtctggttaaataggtatcttaatgaactaacatgtgtctatctacaaacagtgtattacatgaaaagtagaatgcagctgaaggaagaataatattgaaaatatcatttttgcacgatcttgctggttttagttctagaatatta

SEQ ID NO: 623 - DNA, 600 bp, Chicken  19866894084831_1
cttttaattgtgtctttaactctcattgagaaaacttctaattctatcacagcatacatacaaagacctttagaaggagcaggaaatgctatgaaatgtacagacacagcaaacatttagcaaactcaggaaacattcaaaaaaaacccaaacccattcctgttcaaactcacttcttaaatattttcaagcctttgtaattagaattacattaaaattccagggaagataaacattctgataaactgaagaatacttaaagtgactttttttttttaatcaaatctcccagaagccttyaaaaaaaaaaaaaaagacaaattacaaacagtggcagcacgaaccattttagagacagaattaatccgacaaaatgttcaagtactttgaaagtactttgtaagtaccacttgctgttaataaatgggacgaaaaagacatctgaattgtgcttagatgcacaagggagaaatgctcacactttcaagagtggaattgattcagaaaaatcttagaaaacacctgaagtggttactgtgagtcacaaccacttacagcagaactcaccagctgcaatagcaagtacaagctatgctgttt

SEQ ID NO: 624 - DNA, 600 bp, Chicken  19866894084834_1
agtcaagaaaaggttatgaccaacagaaaatgctgcactgagaataagcaggagaaaatttaattgtctgagatgtacatttccctagggcacacgattaattgtagtggaaatgttcaattgcttgtaattttgcagaaaattccctcctgggctctgaaactttagatgcttagtcatagcttaatggagcgttttcttagaaagttcagctaaatttttctcaagttatgcatatgggaactgaaagagttttgagggaccaacagaaaatggctcaaattcacaagaaatactttrgatttagaggaaactaatgatggaggtcagaatttgatgtgctttatttttctagtttgatatgtgatgtgttctgatgtgggaatgcagctttggtgaaaaggagattaagcaagaagtaatagatatatttgtctaaaatgcataatacactctaacatttagttcataactgcaatgatttctcacagcattgtggtatactttcaactgtacgctgcagtaggtactcagttactagaataacgcatgtaccatatttattcattagcagtattggcatgcgactcattgagtgct

SEQ ID NO: 625 - DNA, 600 bp, Chicken  19866894084842_1
gaccgtgtcggcgtttcttcaccgcgcacagagaccgagtggctcggagcagcccgacgccgcatatggtaaggcactgccagcacgagtttccagaacagtaatagtatcttcttaactttgtttcccctgagaaatctttgatagtactgtgttagctccgacagtaatgcctcctatttatttccatggaaacgacaacagatatgaagaccgcagtaacactgtttgtcagagcaaattctcagctacaaaacgctatttttcaacatagtcgctgccattaatgttctgttttcrccagtgatgaacaggagttacttccatgtcagatgccattctgtcagactgcccctctgctgccatstgtcacacggcaacaaaatacaacaggatattggtggaaaggttcagcctctgctgctatacgwccaacatccacctctgatgttatgggccgacatcataaaacaggaggcattactttcggagcagccgtcatatttgagcacattggacgacagttttatttgaatgtctaaaactcatttgcttctttggggtttatttgcttgtttgctgagactgatayttttcctc

SEQ ID NO: 626 - DNA, 595 bp, Chicken  19866894084842_10
tttaccaccagagtgactttattcagtacgctgtgtggacgcatttttaattaaacatgaggcatgctaaaactggatttaccatcttgttgaatggtggcccagggactgcagaactgcgtctagcagagaattcaaattcatctgtttcgttctccaaatacttccttaatcaccaggctgtgtgttatttggaggtggagacaggtgcatattgattaygtcctacaaagtgataaagagagcagataaatggataaagactgagagagaaagagctcgtatcactgggatctaggsttccaccacattccttaaaaagcagcaattatcyaaattaatttggaaktatagctaatgttgcttgcagtaaggaatgaaacactgctgagcaaaaccaaagatctgcttgattattcaaatgtgctttgcaatgaagcaaaatatggataatatactatttattgtaatgtaagattgtaagtattttccatttccactttttttcttgtatgaagaccttatctctagttactgttacacacagcatcaatattttaagcatagattatcatgcaactactttaagtaaaag

SEQ ID NO: 627 - DNA, 561 bp, Chicken  19866894084842_11
gtggacgcatttttaattaaacatgaggcatgctaaaactggatttaccatcttgttgaatggtggcccagggactgcagaactgcgtctagcagagaattcaaattcatctgtttcgttctccaaatacttccttaatcaccaggctgtgtgttatttggaggtggagacaggtgcatattgattaygtcctacaaagtgataaagagagcagataaatggataaagactgagagagaaagagctcgtatcactgggatctaggsttccaccacattccttaaaaagcagcaattatcyaaattaatttggaaktatagctaatgttgcttgcagtaaggaatgaaacactgctgagcaaaaccaaagatctgcttgattattcaaatgtgctttgcaatgaagcaaaatatggataatatactatttattgtaatgtaagattgtaagtattttccatttccactttttttcttgtatgaagaccttatctctagttactgttacacacagcatcaatattttaagcatagattatcatgcaactactttaagtaaaag

SEQ ID NO: 628 - DNA, 546 bp, Chicken  19866894084842_12
attaaacatgaggcatgctaaaactggatttaccatcttgttgaatggtggcccagggactgcagaactgcgtctagcagagaattcaaattcatctgtttcgttctccaaatacttccttaatcaccaggctgtgtgttatttggaggtggagacaggtgcatattgattaygtcctacaaagtgataaagagagcagataaatggataaagactgagagagaaagagctcgtatcactgggatctaggsttccaccacattccttaaaaagcagcaattatcyaaattaatttggaaktatagctaatgttgcttgcagtaaggaatgaaacactgctgagcaaaaccaaagatctgcttgattattcaaatgtgctttgcaatgaagcaaaatatggataatatactatttattgtaatgtaagattgtaagtattttccatttccactttttttcttgtatgaagaccttatctctagttactgttacacacagcatcaatattttaagcatagattatcatgcaactactttaagtaaaag

SEQ ID NO: 629 - DNA, 600 bp, Chicken  19866894084842_2
ggtaaggcactgccagcacgagtttccagaacagtaatagtatcttcttaactttgtttcccctgagaaatctttgatagtactgtgttagctccgacagtaatgcctcctatttatttccatggaaacgacaacagatatgaagaccgcagtaacactgtttgtcagagcaaattctcagctacaaaacgctatttttcaacatagtcgctgccattaatgttctgttttcrccagtgatgaacaggagttacttccatgtcagatgccattctgtcagactgcccctctgctgccatstgtcacacggcaacaaaatacaacaggatattggtggaaaggttcagcctctgctgctatacgwccaacatccacctctgatgttatgggccgacatcataaaacaggaggcattactttcggagcagccgtcatatttgagcacattggacgacagttttatttgaatgtctaaaactcatttgcttctttggggtttatttgcttgtttgctgagactgatayttttcctcagtactatattccttacaccaccttsaaacaaagcacagtgctgctattgcwgttccttaatttgga

SEQ ID NO: 630 - DNA, 600 bp, Chicken  19866894084842_3
gagaaatctttgatagtactgtgttagctccgacagtaatgcctcctatttatttccatggaaacgacaacagatatgaagaccgcagtaacactgtttgtcagagcaaattctcagctacaaaacgctatttttcaacatagtcgctgccattaatgttctgttttcrccagtgatgaacaggagttacttccatgtcagatgccattctgtcagactgcccctctgctgccatstgtcacacggcaacaaaatacaacaggatattggtggaaaggttcagcctctgctgctatacgwccaacatccacctctgatgttatgggccgacatcataaaacaggaggcattactttcggagcagccgtcatatttgagcacattggacgacagttttatttgaatgtctaaaactcatttgcttctttggggtttatttgcttgtttgctgagactgatayttttcctcagtactatattccttacaccaccttsaaacaaagcacagtgctgctattgcwgttccttaatttggaaggtagaaataaatgatgtgtccaagaaggactcgagtactgtgacttgtgtggactactgaac

SEQ ID NO: 631 - DNA, 600 bp, Chicken  19866894084842_4
tgttttcrccagtgatgaacaggagttacttccatgtcagatgccattctgtcagactgcccctctgctgccatstgtcacacggcaacaaaatacaacaggatattggtggaaaggttcagcctctgctgctatacgwccaacatccacctctgatgttatgggccgacatcataaaacaggaggcattactttcggagcagccgtcatatttgagcacattggacgacagttttatttgaatgtctaaaactcatttgcttctttggggtttatttgcttgtttgctgagactgatayttttcctcagtactatattccttacaccaccttsaaacaaagcacagtgctgctattgcwgttccttaatttggaaggtagaaataaatgatgtgtccaagaaggactcgagtactgtgacttgtgtggactactgaacatttcagcatcagggcttcacaagtgaatctgtaagatatctgccctgtcttctcagtgaatgaggagtgctataatcctaacacagacttgtcaaagcygtgacattgaggagggaactccttcagggcagcaggctgagcagaaaaatgctgaacacag

SEQ ID NO: 632 - DNA, 600 bp, Chicken  19866894084842_5
tgtcagatgccattctgtcagactgcccctctgctgccatstgtcacacggcaacaaaatacaacaggatattggtggaaaggttcagcctctgctgctatacgwccaacatccacctctgatgttatgggccgacatcataaaacaggaggcattactttcggagcagccgtcatatttgagcacattggacgacagttttatttgaatgtctaaaactcatttgcttctttggggtttatttgcttgtttgctgagactgatayttttcctcagtactatattccttacaccaccttsaaacaaagcacagtgctgctattgcwgttccttaatttggaaggtagaaataaatgatgtgtccaagaaggactcgagtactgtgacttgtgtggactactgaacatttcagcatcagggcttcacaagtgaatctgtaagatatctgccctgtcttctcagtgaatgaggagtgctataatcctaacacagacttgtcaaagcygtgacattgaggagggaactccttcagggcagcaggctgagcagaaaaatgctgaacacaggttattcattaaaatccgtactgctgtggggcaa

SEQ ID NO: 633 - DNA, 600 bp, Chicken  19866894084842_6
ccctctgctgccatstgtcacacggcaacaaaatacaacaggatattggtggaaaggttcagcctctgctgctatacgwccaacatccacctctgatgttatgggccgacatcataaaacaggaggcattactttcggagcagccgtcatatttgagcacattggacgacagttttatttgaatgtctaaaactcatttgcttctttggggtttatttgcttgtttgctgagactgatayttttcctcagtactatattccttacaccaccttsaaacaaagcacagtgctgctattgcwgttccttaatttggaaggtagaaataaatgatgtgtccaagaaggactcgagtactgtgacttgtgtggactactgaacatttcagcatcagggcttcacaagtgaatctgtaagatatctgccctgtcttctcagtgaatgaggagtgctataatcctaacacagacttgtcaaagcygtgacattgaggagggaactccttcagggcagcaggctgagcagaaaaatgctgaacacaggttattcattaaaatccgtactgctgtggggcaaaacagagcgctgccaggctgcctctt

SEQ ID NO: 634 - DNA, 600 bp, Chicken  19866894084842_7
tgaatgtctaaaactcatttgcttctttggggtttatttgcttgtttgctgagactgatayttttcctcagtactatattccttacaccaccttsaaacaaagcacagtgctgctattgcwgttccttaatttggaaggtagaaataaatgatgtgtccaagaaggactcgagtactgtgacttgtgtggactactgaacatttcagcatcagggcttcacaagtgaatctgtaagatatctgccctgtcttctcagtgaatgaggagtgctataatcctaacacagacttgtcaaagcygtgacattgaggagggaactccttcagggcagcaggctgagcagaaaaatgctgaacacaggttattcattaaaatccgtactgctgtggggcaaaacagagcgctgccaggctgcctcttccttgtgcgttcatagcacagaaacctcccctgrcaataaaaaggcctgcatcactccaaggtggagcggaaagtgaggggtccaactcttttatccagtgatttagcaagtagaacagttggcaagagtgtggggtacctgcagtgggaggttaccccatcagcattttctgagcatc

SEQ ID NO: 635 - DNA, 600 bp, Chicken  19866894084842_8
gtccaagaaggactcgagtactgtgacttgtgtggactactgaacatttcagcatcagggcttcacaagtgaatctgtaagatatctgccctgtcttctcagtgaatgaggagtgctataatcctaacacagacttgtcaaagcygtgacattgaggagggaactccttcagggcagcaggctgagcagaaaaatgctgaacacaggttattcattaaaatccgtactgctgtggggcaaaacagagcgctgccaggctgcctcttccttgtgcgttcatagcacagaaacctcccctgrcaataaaaaggcctgcatcactccaaggtggagcggaaagtgaggggtccaactcttttatccagtgatttagcaagtagaacagttggcaagagtgtggggtacctgcagtgggaggttaccccatcagcattttctgagcatcttttaccaccagagtgactttattcagtacgctgtgtggacgcatttttaattaaacatgaggcatgctaaaactggatttaccatcttgttgaatggtggcccagggactgcagaactgcgtctagcagagaattcaaattcatctgtttcgtt

SEQ ID NO: 636 - DNA, 600 bp, Chicken  19866894084842_9
tttagcaagtagaacagttggcaagagtgtggggtacctgcagtgggaggttaccccatcagcattttctgagcatcttttaccaccagagtgactttattcagtacgctgtgtggacgcatttttaattaaacatgaggcatgctaaaactggatttaccatcttgttgaatggtggcccagggactgcagaactgcgtctagcagagaattcaaattcatctgtttcgttctccaaatacttccttaatcaccaggctgtgtgttatttggaggtggagacaggtgcatattgattaygtcctacaaagtgataaagagagcagataaatggataaagactgagagagaaagagctcgtatcactgggatctaggsttccaccacattccttaaaaagcagcaattatcyaaattaatttggaaktatagctaatgttgcttgcagtaaggaatgaaacactgctgagcaaaaccaaagatctgcttgattattcaaatgtgctttgcaatgaagcaaaatatggataatatactatttattgtaatgtaagattgtaagtattttccatttccactttttttcttgtatgaagacct

SEQ ID NO: 637 - DNA, 600 bp, Chicken  19866894084843_1
gtattacagtaatttattattgttcttaagattttgtgttgccagttgcaggcaataaggttttgtttgatacattttgcattgcgtttttataagtagttaaaaatcacaaaggataatacgcagcaaaatactttactatgaagttattaaggggagcttatacacatgaggaagaccagctttttacacaggcagacaggggggacataggacaaggggggatgactttaaattaaatgatggcagatttaggttggatgtttggaggaaattcttcactgagagggcagtgaggtrcaggcacagctgcccagagaagctgtggtrccccaaccctagaggcactcaaggccaggttggatggggacctgggcagcctgaactggtggggggcagccctgcccacagcagggggttggargtgatgattctatgaatattatgaaaggaatagaagatgttaaagtctaaagataggtatcctgaacaaatgtaaaaattatttgtagtctcttggtttttaagatgcaatagatattttgtaaatgagcacaattagtacttgtctaactctacagtaatatgattgcatttatt

SEQ ID NO: 638 - DNA, 600 bp, Chicken  19866894084843_2
attttgtgttgccagttgcaggcaataaggttttgtttgatacattttgcattgcgtttttataagtagttaaaaatcacaaaggataatacgcagcaaaatactttactatgaagttattaaggggagcttatacacatgaggaagaccagctttttacacaggcagacaggggggacataggacaaggggggatgactttaaattaaatgatggcagatttaggttggatgtttggaggaaattcttcactgagagggcagtgaggtrcaggcacagctgcccagagaagctgtggtrccccaaccctagaggcactcaaggccaggttggatggggacctgggcagcctgaactggtggggggcagccctgcccacagcagggggttggargtgatgattctatgaatattatgaaaggaatagaagatgttaaagtctaaagataggtatcctgaacaaatgtaaaaattatttgtagtctcttggtttttaagatgcaatagatattttgtaaatgagcacaattagtacttgtctaactctacagtaatatgattgcatttatttcttccatttttgcaaggtttctgcatcag

SEQ ID NO: 639 - DNA, 600 bp, Chicken  19866894084843_3
agcaaaatactttactatgaagttattaaggggagcttatacacatgaggaagaccagctttttacacaggcagacaggggggacataggacaaggggggatgactttaaattaaatgatggcagatttaggttggatgtttggaggaaattcttcactgagagggcagtgaggtrcaggcacagctgcccagagaagctgtggtrccccaaccctagaggcactcaaggccaggttggatggggacctgggcagcctgaactggtggggggcagccctgcccacagcagggggttggargtgatgattctatgaatattatgaaaggaatagaagatgttaaagtctaaagataggtatcctgaacaaatgtaaaaattatttgtagtctcttggtttttaagatgcaatagatattttgtaaatgagcacaattagtacttgtctaactctacagtaatatgattgcatttatttcttccatttttgcaaggtttctgcatcagattgcacataatttgctgaccaacagtatggtagctgtctgttcaactgataagtaaataaattcattttaacagtcattaaacatttgtttca

SEQ ID NO: 640 - DNA, 600 bp, Chicken  19866894084845_1
gagccaagtactgggttgagaaagctgccaggctcttccctgggaatcctgctgcttacagactgaaggtaaattccaacttctaatctctgttctatgcctaggagaaaggaactttggtttctttaagtgatgggaaaaccatgttaataacagtatccaagaggtcgagattagacaggtgaagtattgcctctgtgatgtgactgcactgcttgctaggttttttttatttgagttaaaaactgtagaatgtaggagatgctgttattcccaaatactggataaatgctttcagtygtacaatctcacttttgtacaggcgttagttttctgtagcacaacagcaatgaaattgaagtcttgagaggcttgtgctttgggtttttttgtgtggcgtttggttggtgttttggtgtggttatttatttatttgtttgtttatttagacaaactgttctgtatcaaggtctaccgtctttgaaccaaatggcttgacagtcttaacttatcgcctacaagatgcraactctgaagtttttttttttgttttctctcttctaaaatacttgtcaagttctctgtagcacctagcggctt

SEQ ID NO: 641 - DNA, 600 bp, Chicken  19866894084845_2
ttttatttgagttaaaaactgtagaatgtaggagatgctgttattcccaaatactggataaatgctttcagtygtacaatctcacttttgtacaggcgttagttttctgtagcacaacagcaatgaaattgaagtcttgagaggcttgtgctttgggtttttttgtgtggcgtttggttggtgttttggtgtggttatttatttatttgtttgtttatttagacaaactgttctgtatcaaggtctaccgtctttgaaccaaatggcttgacagtcttaacttatcgcctacaagatgcraactctgaagtttttttttttgttttctctcttctaaaatacttgtcaagttctctgtagcacctagcggcttttcagtgtagtttgggtaacagtctgtagtggcagtgagaaaagagtcaggtaatgtggttgctgtaaagtctctcatggaggatgaaattttaacgtgttgccttcatatttgataggagcagttactggagcgtaaaggtgaagctggatggaatcagctcttggatatgattcgaacagaactctgtgcgaaaccagacgatctctaccttaacatcagactgg

SEQ ID NO: 642 - DNA, 600 bp, Chicken  19866894084845_3
ttaacatcagactggttgctctctaccgttcaaataataaattaagagacgctgtgcttcattgtcaggaggtggagaagaaaatacctgtagactcaagcttggaatggtgttcatgtgtcataaggacatttgaggtatttaatcatattttgattctgtcataatctcccacgtccttgaaactggtgttattctcttagtattgttacgaaggcagcttattctcaagtggcttaactccttcaactgtaatgtctgctgaaaccaattatttacttgggattttcttaaaccttwtggagtcrtctagtttctagctgaagtactaagttagatatagcagctctgtcagggagggaattgctcaggcgaacagttcctggaactttgctgctgaagagtatgttaatatctcacctgggaaactgaattatgtagcagcatgttctggagaagctcctgccttcgtagaaggatggtggttccttattctctgatgaactttattcttcaggagtaccttgaatcagtacaagacttggagtctgatagaaataattggagagctatcaagaaagatcatctgctggcctattc

SEQ ID NO: 643 - DNA, 600 bp, Chicken  19866894084845_4
agactggttgctctctaccgttcaaataataaattaagagacgctgtgcttcattgtcaggaggtggagaagaaaatacctgtagactcaagcttggaatggtgttcatgtgtcataaggacatttgaggtatttaatcatattttgattctgtcataatctcccacgtccttgaaactggtgttattctcttagtattgttacgaaggcagcttattctcaagtggcttaactccttcaactgtaatgtctgctgaaaccaattatttacttgggattttcttaaaccttwtggagtcrtctagtttctagctgaagtactaagttagatatagcagctctgtcagggagggaattgctcaggcgaacagttcctggaactttgctgctgaagagtatgttaatatctcacctgggaaactgaattatgtagcagcatgttctggagaagctcctgccttcgtagaaggatggtggttccttattctctgatgaactttattcttcaggagtaccttgaatcagtacaagacttggagtctgatagaaataattggagagctatcaagaaagatcatctgctggcctattctagcttgg

SEQ ID NO: 644 - DNA, 600 bp, Chicken  19866894084846_1
aatcttgacctcttggatgctgttattaacatggttttcccatcacttaaagaaaccaaagtttctttctcctaggcatagaacagagattagaagttggaatttaccttcaatctgtaagcagcaggattcccagggaagagcctggcagctttctcaacccagtacttggctctttcatcagtgatgttgtgattgctcagtaactctgcaatcttcagtaccagatctttctgcattggattcagctccacagaacgctagttttccccatgcacacacacaagagaaaaaaagctyattagtaactcgatctcgcagtccatatggaacaagaaagaaaacatatcccacactaaacagacccagcaagtcaaacgagaacgatcagtaagtactttctcactactttaagaaaagcctcccttttgaaaggccaccattggtttctaacacccagacaactgctggaattcagaagactgtaagagaaataatgccaaaaccagctcctctgcctctaccacaagacgctgctctactcagacagctggactagcagtatctycagtctaacctcatatggagacttctgagaaa

SEQ ID NO: 645 - DNA, 563 bp, Chicken  19866894084846_2
ccccatgcacacacacaagagaaaaaaagctyattagtaactcgatctcgcagtccatatggaacaagaaagaaaacatatcccacactaaacagacccagcaagtcaaacgagaacgatcagtaagtactttctcactactttaagaaaagcctcccttttgaaaggccaccattggtttctaacacccagacaactgctggaattcagaagactgtaagagaaataatgccaaaaccagctcctctgcctctaccacaagacgctgctctactcagacagctggactagcagtatctycagtctaacctcatatggagacttctgagaaacagaattaagtcacaaagaccgacagcgctccactgtgctggcaacaagactctggtgcataccctctccctccccaaagcctgaataacgaaacactgactgtgaatttcacgtttacacgcttgcctaatcagaactgtatttgccccgttccctctgcctcggaggaaacaaacaaacaagaagcccaccactaacaaaaacaacactgcactgaaaaacactctcag

SEQ ID NO: 646 - DNA, 600 bp, Chicken  19866894084849_1
cctaacttgggtctgtatatttcagctttgtctcgggcaatcccaagagccctggaggagataaatggatcttttattttggtggctaagaacaaaacagaaaccactggcaacaatgtcctgtcttctgtaacgtgcgtgaggctcactgtacaaataagctttcccttttcatcttcctaatgctatttttagaacatattggcagtgccagatgtctctttcagaggctagactccagtgctggagttagatttataaccgtgtgcttcctggccacagatgttgaagatgagaggsctgtgggaaaagctcccccattgctaagatgacattgttcaaaaagctgtttaaaatagttactcacagcatcttgagtatttccacatagcagccaaggatcctgtctgcctgggcgctcagctcaatgctcatggtgctgcaggtgggactgaccatcaagcagtcaatcaggttgggctcgctgtcattgcccacgttggctgtcatcttctgattagccgtgttgttgcgctccacttccacgtggatttcattcgaagtgacaatgactggcttgagccgggattcagtcaaggt

SEQ ID NO: 647 - DNA, 600 bp, Chicken  19866894084851_1
aactactttgctgctcactgataagggagtgtattctgggatattccagactgctgaattactgaatgaactagcctgagcatgatgagcttgccactgcaagcaacgggatagttcgtccctcaagctgccgtttcctaatatcaaaaagtaattaatctccgttgacttccatcatgaggtgaatagtttgccaacacttaccacatagcattgtgttagaaattgtacatgtccagtgctctggagaggcgcctaaggcattaactgtgaatgttactttcagcagggatgcgtacstgggcatgttctttggagttagaagagccatggcagtaagggattgcacaatggtttccataaacagaatcttatgcttggagcttttcatcttgttgaactaaagttttccatgtttggtctcagataggagcagaattactcaagaaaytttgggaaggaaagaatagctcccagctcaaacccatctcgaggactaagcctgatttcaccacatttgttctcttccaagatttacttcaatgtgtggtaccttctccattttttaatttttgtttcctcatttcaaagaatgttaac

SEQ ID NO: 648 - DNA, 600 bp, Chicken  19866894084851_2
taattaatctccgttgacttccatcatgaggtgaatagtttgccaacacttaccacatagcattgtgttagaaattgtacatgtccagtgctctggagaggcgcctaaggcattaactgtgaatgttactttcagcagggatgcgtacstgggcatgttctttggagttagaagagccatggcagtaagggattgcacaatggtttccataaacagaatcttatgcttggagcttttcatcttgttgaactaaagttttccatgtttggtctcagataggagcagaattactcaagaaaytttgggaaggaaagaatagctcccagctcaaacccatctcgaggactaagcctgatttcaccacatttgttctcttccaagatttacttcaatgtgtggtaccttctccattttttaatttttgtttcctcatttcaaagaatgttaactgaggcaagatgtactctgtctccagaaacacgtaagactcatgacatatggtggaaaagccccaagcaaaggaaggtatcactcatatacatcaactacattcttccctttacaatctgatgttattcacgtaagctgaaatataacctg

SEQ ID NO: 649 - DNA, 597 bp, Chicken  19866894084853_1
tatgttggggcccataaaccttctctgcctaatatgacagtagcaagacacaacgctgcgttcctcacatctctgtggaagtgaattaaccattcgtggatccctcatcaaaagctctcaggtctgagtgcataaataacgctccctccatcccagagctgctcgggcagcagggactgagcaccgccatcggtggtgcccactgaggcagtctgcagcgtcagtggcccaggagcctgtggtctgcaggtgctctgtttgagctctcagcttagcagaggagatctgatgtcttcagcrgccaaatgtgtggctggaaaagtggctcccacctgtccccactgccgggatggtcatagactgcttccaggtgagtgagctagctgctagatagattcatctttgcactaaggttttctctttgctgattgaagcggcttccttcaccttcccgtgctttgtgagtgtgtgtttgtcttaaatgacctttggaatgaaaatattaacagaaaaggaaaacatggttgtaatttatgaaatgttagcccagatgcctccagggggctgtagacctttcagtctttcaagctgatacat

SEQ ID NO: 650 - DNA, 599 bp, Chicken  19866894084854_1
  misc_feature (1)..(69): n is any nucleotide
nnnnnnnnnnnnnnnnnnnnnnnnnnnnnnnnnnnnnnnnnnnnnnnnnnnnnnnnnnnnnnnnnnnnntttgtccccagtgtcccacattccaatggaaaaagtcgtagaggctctgatggccaacagcgctaccctctgccaacacagagcacagatctttttctccctctagtggctagactccaccaacaactcatggagaaggaaacgggttcctcagggccatgtcagtcttctgtgaagcctttctctggctgcttacagcaaagattacccatcgctataaggagggcaaastcaagggaaacacggtcagacattgtgtaagtaccctgccttgagtttctgatccaggcatgcaggatcctactggtttgattttactgatgaaaaagggaaggaagcaggggtgcagacatccatcctctacaggacattgtccccttggttttagctgtattttctgctgacctggaagtggatttctcactgtgtcagaactgggctctaggacagacaaatcaggagcaaatctggggctcagtaccagtggtcacacctaaatccacctccagcattcagactgaggcagaaag

SEQ ID NO: 651 - DNA, 600 bp, Chicken  19866894084854_2
ccccaccctgactgggggccatcaaacacaacactgaagaatgggaaatggggtcttcaaggcttgtggtcaaatagacctttctgttttccacacatacattttaaaaaccaggtgcatggggcagagcacaacataaaacacactcagctacccaacagcagtgactgtaggaatgccaggctaatggtgcactcaagcttcaccccctcaagagtttaccaaggtagctgtgtatcatcagaaacccagccagaaacagagctgctgacctgcaaggtttgggaactcaatctattyccactgtcattggaaaggaaagctctgagctgcttttgtgraataagccgtcactgtggcactgaagtcaatctgtatttggtcagagctctggtttatcacaagaaaaacaaacattcaacttccagccttgctggacactgccccagcatccaatgttggtttcctggctgctaacaaacaccagcatgttgaagaataagcagcaagggtactgctgaagctctgaggctttactcttctgggtccaagccttgttttaaagcctgaaagtgagatgccagcgcccagggagagaca

SEQ ID NO: 652 - DNA, 600 bp, Chicken  19866894084854_3
tgggaaatggggtcttcaaggcttgtggtcaaatagacctttctgttttccacacatacattttaaaaaccaggtgcatggggcagagcacaacataaaacacactcagctacccaacagcagtgactgtaggaatgccaggctaatggtgcactcaagcttcaccccctcaagagtttaccaaggtagctgtgtatcatcagaaacccagccagaaacagagctgctgacctgcaaggtttgggaactcaatctattyccactgtcattggaaaggaaagctctgagctgcttttgtgraataagccgtcactgtggcactgaagtcaatctgtatttggtcagagctctggtttatcacaagaaaaacaaacattcaacttccagccttgctggacactgccccagcatccaatgttggtttcctggctgctaacaaacaccagcatgttgaagaataagcagcaagggtactgctgaagctctgaggctttactcttctgggtccaagccttgttttaaagcctgaaagtgagatgccagcgcccagggagagacagaggacggctcttggaaggtgctcaaacacatggaagtcca

SEQ ID NO: 653 - DNA, 599 bp, Chicken  19866894084857_1
  misc_feature (1)..(74): n is any nucleotide
nnnnnnnnnnnnnnnnnnnnnnnnnnnnnnnnnnnnnnnnnnnnnnnnnnnnnnnnnnnnnnnnnnnnnnnnnnaagaagaagaaaaagaaaaagaaaaaggagaagaaaaaggagaagaagaagaaaaagaaaaagagaaaggaaaagaaaaagagaaaggaaaagaaaaagagaaaggaaaagaaaaaggaaaaggaaaaggaaaagaaaaagaaaaagaaaaagaaaaagaaaaagaaaaagaaaaagaaaaagaaaaagaaaaagagaaaggaaaagaaaaaggaaaaggaaaagraaaagaaaaagaaaaagagggtcttgtccatctaaaaatgaaccagaaagacagtgtgtgtgtgctacctcaagtggggccttgcttccgactttgtgctacttgcagaatttaccagcaaggaaacaagtatagaactcaacatagtctcagtgaaacgctaacagagcatcccctctctgtggtgaaagcatcacatcacgagctggaatcatattttgcagtgggaagaaagactaaaggaggtagaagatgataaacaagaaatcttgtgtttgatataatattttacttacttg

SEQ ID NO: 654 - DNA, 599 bp, Chicken  19866894084858_1
  misc_feature (1)..(150): n is any nucleotide
nnnnnnnnnnnnnnnnnnnnnnnnnnnnnnnnnnnnnnnnnnnnnnnnnnnnnnnnnnnnnnnnnnnnnnnnnnnnnnnnnnnnnnnnnnnnnnnnnnnnnnnnnnnnnnnnnnnnnnnnnnnnnnnnnnnnnnnnnnnnnnnnnnnnnncattacacttaaccaaggcagacaatgtcatcttctggtctcaagtcctcggccttttccagagaaacccaaattgaggcttttcttgagaaaaattcctttccaagtaatagattctgttgagtctccacatcccagtctgtatttgayatcgtgctagcatgaaggagcaagtacactgacctctcactaatgcagctgtctgcgtaagaaaatktattcatcctgtgcacagctaattgataatctttgtgggtttttaaaacatttaaataactcatagttgacagtttgattttaaacttctgtttttgcagtcattcttttttggctcagaacagcagctttctttgaaagctatccctgttagttaaatcctacgtatagcttgctcttcttgttgaagtttttctgacatttgctgtctctggctaaaatatttcagagct

SEQ ID NO: 655 - DNA, 599 bp, Chicken  19866894084858_2
  misc_feature (1)..(83): n is any nucleotide
nnnnnnnnnnnnnnnnnnnnnnnnnnnnnnnnnnnnnnnnnnnnnnnnnnnnnnnnnnnnnnnnnnnnnnnnnnnnnnnnnnncattacacttaaccaaggcagacaatgtcatcttctggtctcaagtcctcggccttttccagagaaacccaaattgaggcttttcttgagaaaaattcctttccaagtaatagattctgttgagtctccacatcccagtctgtatttgayatcgtgctagcatgaaggagcaagtacactgacctctcactaatgcagctgtctgcgtaagaaaatktattcatcctgtgcacagctaattgataatctttgtgggtttttaaaacatttaaataactcatagttgacagtttgattttaaacttctgtttttgcagtcattcttttttggctcagaacagcagctttctttgaaagctatccctgttagttaaatcctacgtatagcttgctcttcttgttgaagtttttctgacatttgctgtctctggctaaaatatttcagagcttcactaaaaacattccaacatttgaataggtattatgctgcaaactggtatctaagtactattctgg

SEQ ID NO: 656 - DNA, 600 bp, Chicken  19866894084864_1
agccttcctttatgacttgcaagtagatttctctccttcaaaatgcagacagaaacacagacttatttttcagatgacggatgctacatagagctaaatgagatatttatatttaatagtaattatgccttgactaggaagaaaatgtaggtccctgttttctctgtgataccacatacaaacagaaatacaagacaaactaccaaagcaaatgattagctatcattacttagcaaatatttgcttccttgatcagaagtgactatcatggataaaagaaaaaccgctgagaagctgttrggtgtactttgctgttggtttgctttaccagcctctgcagaaacagaggctcattgttactttcagaaaacaggtttttctcctgattacagatccagagtccaaactcacaagctgtgtctatgctgtctgcccaaggctgcctttaaatctgtcctctttgtagccaacagggctccagatgcagtagcaaggccagtggattcatgcatgtcatggctaagcttccttccaggctgccttgggattgctgcatgggttgggaatggagtatgctgctcatttagtgtctgtatctgt

SEQ ID NO: 657 - DNA, 600 bp, Chicken  19866894084866_1
ttctttcttgggaactcaggatcggacagcagtttgtagcacattgagagtttggttaagtgtagaacagtaaagctgaactttcaagcctcacaggttctgatattgaaactaaattttctgatgcagtgtagaagagaggaggctaatttaatccaggctctaaatggtgcttttttcagaatagcttatttgcatgacagataaagctgtattttggcagaaagttaataagatgcaacagcattcctatcatattccccttgtaatggatacacttagaattgatgtgttgtgttstcagcattctcatatttgccayttgtgtctgaaggataacaggtggaactgtgcttttagtgataggtagggaaactagcttcagccccagrtgcattgcacatacctkctgtgtgctgaaatgtcagccctgcatctatctgacatgattggaacttatatacagaatagtgctgatgttaagctttgacagacagatcactgggcrcttaggaaatctgaagcagacttgaggtgtgcaagtgaaatcagaacttttaagatctgctagtatttagaggtctaattctgtctattttt

SEQ ID NO: 658 - DNA, 600 bp, Chicken  19866894084866_2
cggacagcagtttgtagcacattgagagtttggttaagtgtagaacagtaaagctgaactttcaagcctcacaggttctgatattgaaactaaattttctgatgcagtgtagaagagaggaggctaatttaatccaggctctaaatggtgcttttttcagaatagcttatttgcatgacagataaagctgtattttggcagaaagttaataagatgcaacagcattcctatcatattccccttgtaatggatacacttagaattgatgtgttgtgttstcagcattctcatatttgccayttgtgtctgaaggataacaggtggaactgtgcttttagtgataggtagggaaactagcttcagccccagrtgcattgcacatacctkctgtgtgctgaaatgtcagccctgcatctatctgacatgattggaacttatatacagaatagtgctgatgttaagctttgacagacagatcactgggcrcttaggaaatctgaagcagacttgaggtgtgcaagtgaaatcagaacttttaagatctgctagtatttagaggtctaattctgtctatttttttctttcaggtcgctattaaag

SEQ ID NO: 659 - DNA, 600 bp, Chicken  19866894084866_3
acaggttctgatattgaaactaaattttctgatgcagtgtagaagagaggaggctaatttaatccaggctctaaatggtgcttttttcagaatagcttatttgcatgacagataaagctgtattttggcagaaagttaataagatgcaacagcattcctatcatattccccttgtaatggatacacttagaattgatgtgttgtgttstcagcattctcatatttgccayttgtgtctgaaggataacaggtggaactgtgcttttagtgataggtagggaaactagcttcagccccagrtgcattgcacatacctkctgtgtgctgaaatgtcagccctgcatctatctgacatgattggaacttatatacagaatagtgctgatgttaagctttgacagacagatcactgggcrcttaggaaatctgaagcagacttgaggtgtgcaagtgaaatcagaacttttaagatctgctagtatttagaggtctaattctgtctatttttttctttcaggtcgctattaaagcatgacatgtagaggaatttctagctacagcctttgagttgaaattgcgagtttgtggacaatattttta

SEQ ID NO: 660 - DNA, 600 bp, Chicken  19866894084866_4
aactaaattttctgatgcagtgtagaagagaggaggctaatttaatccaggctctaaatggtgcttttttcagaatagcttatttgcatgacagataaagctgtattttggcagaaagttaataagatgcaacagcattcctatcatattccccttgtaatggatacacttagaattgatgtgttgtgttstcagcattctcatatttgccayttgtgtctgaaggataacaggtggaactgtgcttttagtgataggtagggaaactagcttcagccccagrtgcattgcacatacctkctgtgtgctgaaatgtcagccctgcatctatctgacatgattggaacttatatacagaatagtgctgatgttaagctttgacagacagatcactgggcrcttaggaaatctgaagcagacttgaggtgtgcaagtgaaatcagaacttttaagatctgctagtatttagaggtctaattctgtctatttttttctttcaggtcgctattaaagcatgacatgtagaggaatttctagctacagcctttgagttgaaattgcgagtttgtggacaatatttttattgtctgttctgtttaa

SEQ ID NO: 661 - DNA, 600 bp, Chicken  19866894084866_5
gctgtattttggcagaaagttaataagatgcaacagcattcctatcatattccccttgtaatggatacacttagaattgatgtgttgtgttstcagcattctcatatttgccayttgtgtctgaaggataacaggtggaactgtgcttttagtgataggtagggaaactagcttcagccccagrtgcattgcacatacctkctgtgtgctgaaatgtcagccctgcatctatctgacatgattggaacttatatacagaatagtgctgatgttaagctttgacagacagatcactgggcrcttaggaaatctgaagcagacttgaggtgtgcaagtgaaatcagaacttttaagatctgctagtatttagaggtctaattctgtctatttttttctttcaggtcgctattaaagcatgacatgtagaggaatttctagctacagcctttgagttgaaattgcgagtttgtggacaatatttttattgtctgttctgtttaaacaagtgaacagtgcctagtgaataggtgacttttacaccttttatgaagaatacttctgtgatgctgtttcattctgcatatttgtgtagtttggtgc

SEQ ID NO: 662 - DNA, 600 bp, Chicken  19866894084866_6
tacacttagaattgatgtgttgtgttstcagcattctcatatttgccayttgtgtctgaaggataacaggtggaactgtgcttttagtgataggtagggaaactagcttcagccccagrtgcattgcacatacctkctgtgtgctgaaatgtcagccctgcatctatctgacatgattggaacttatatacagaatagtgctgatgttaagctttgacagacagatcactgggcrcttaggaaatctgaagcagacttgaggtgtgcaagtgaaatcagaacttttaagatctgctagtrtttagaggtctaattctgtctatttttttctttcaggtcgctattaaagcatgacatgtagaggaatttctagctacagcctttgagttgaaattgcgagtttgtggacaatatttttattgtctgttctgtttaaacaagtgaacagtgcctagtgaataggtgacttttacaccttttatgaagaatacttctgtgatgctgtttcattctgcatatttgtgtagtttggtgctttgttccaagttgtgttttgaaaggagtatgttttgcatgtatttttttagtctcgattttgac

SEQ ID NO: 663 - DNA, 599 bp, Chicken  19866894084872_1
  misc_feature (1)..(111): n is any nucleotide
nnnnnnnnnnnnnnnnnnnnnnnnnnnnnnnnnnnnnnnnnnnnnnnnnnnnnnnnnnnnnnnnnnnnnnnnnnnnnnnnnnnnnnnnnnnnnnnnnnnnnnnnnnnnnnnttttaacagctagcaaatccactctacctaacagtgtgaggattttgtcatctacatttatgtccagaatgagcttgagtagcaactatatggtagtatcttcactctcttcacttctctcttccaacaccactaccacagttctcctgctcaccttatgtaacacttcagcgagaccacttacaagamracctactggatcttctacaagaagaccctaaaggatgcagttactagaaaaaaaaataaagtgcaaaacacttatccagactctaaaggtttcatactgtgacccatagagaagtatatttattagattactcagatttctgtttctgtcagccctgtgctctagggtatgaaagtgcaaagcaaaagcacaaaaaaaagccacaccacgaaggacaccctgttcccctaacacaggttcccagaagtgraggtgttaaagaaaaacttgttacagaaccttttctgctacagaagcc

SEQ ID NO: 664 - DNA, 599 bp, Chicken  19866894084872_2
  misc_feature (1)..(110): n is any nucleotide
nnnnnnnnnnnnnnnnnnnnnnnnnnnnnnnnnnnnnnnnnnnnnnnnnnnnnnnnnnnnnnnnnnnnnnnnnnnnnnnnnnnnnnnnnnnnnnnnnnnnnnnnnnnnnnttttaacagctagcaaatccactctacctaacagtgtgaggattttgtcatctacatttatgtccagaatgagcttgagtagcaactatatggtagtatcttcactctcttcacttctctcttccaacaccactaccacagttctcctgctcaccttatgtaacacttcagcgagaccacttacaagamracctactggatcttctacaagaagaccctaaaggatgcagttactagaaaaaaaaataaagtgcaaaacacttatccagactctaaaggtttcatactgtgacccatagagaagtatatttattagattactcagatttctgtttctgtcagccctgtgctctagggtatgaaagtgcaaagcaaaagcacaaaaaaaagccacaccacgaaggacaccctgttcccctaacacaggttcccagaagtgraggtgttaaagaaaaacttgttacagaaccttttctgctacagaagcca

SEQ ID NO: 665 - DNA, 600 bp, Chicken  19866894084872_3
gttctcctgctcaccttatgtaacacttcagcgagaccacttacaagamracctactggatcttctacaagaagaccctaaaggatgcagttactagaaaaaaaaataaagtgcaaaacacttatccagactctaaaggtttcatactgtgacccatagagaagtatatttattagattactcagatttctgtttctgtcagccctgtgctctagggtatgaaagtgcaaagcaaaagcacaaaaaaaagccacaccacgaaggacaccctgttcccctaacacaggttcccagaagtgraggtgttaaagaaaaacttgttacagaaccttttctgctacagaagccaatacaaactagtatcttgcttgggtttttctgtttgttctaaatgatgttttgatttattcaatcatttatcttcaacattgaaatggaacactcaaagaaacgctgacagctctgggaaacatggcaytcaacccacaaaagaaaaattatagatacaatcaccagcaatatctattccctaatacaaccctccctaacgtgctttaattaaaatgtagagatagaataaattcagtctttgaacttact

SEQ ID NO: 666 - DNA, 542 bp, Chicken  19866894084872_4
tactcagatttctgtttctgtcagccctgtgctctagggtatgaaagtgcaaagcaaaagcacaaaaaaaagccacaccacgaaggacaccctgttcccctaacacaggttcccagaagtgraggtgttaaagaaaaacttgttacagaaccttttctgctacagaagccaatacaaactagtatcttgcttgggtttttctgtttgttctaaatgatgttttgatttattcaatcatttatcttcaacattgaaatggaacactcaaagaaacgctgacagctctgggaaacatggcaytcaacccacaaaagaaaaattatagatacaatcaccagcaatatctattccctaatacaaccctccctaacgtgctttaattaaaatgtagagatagaataaattcagtctttgaacttactcatcctagctaacatctcttatagtttactcatttatgaagccatcaccatacgtttaagcctgtaactgtaaattgagaatcagcagtgttcttaatggggtcctcggggaacttatca

SEQ ID NO: 667 - DNA, 499 bp, Chicken  19866894084882_1
gaatcagacattcctatctgaaccagctatttaaacagtcatccttcttaaaaagtgtgtattttatagtctttcatgtgactgtatagtttacttccatttatgtgcccacttgtctctgaaatcctgattgatattcttcctgaggctttcccttctgtcatccacctgcctcctctcctttcttagacttgtactcataaactctcacatgtgagcccagattactcctacttagaccccatttagcctctctaaaagctgtaagaaaatcttgcctcttctctttcactaccttcyctgggaattcaacgcactataactgagtgcagcactttttcacttcagatttaccccagcctccttccttgcctttaccatgttggagagtctccatgctgtattacagtccccctggcaacagctcactagtctgcacagtgcaggaaatggcggaatttatctgtacaagccaaacaagatgtatctgctttacatg

SEQ ID NO: 668 - DNA, 600 bp, Chicken  19866894084883_1
ttagacagatgttcacttaaggaaataaagagaacagaagaagccatcactgaggaattttacgagagtactgacaactctgcacctcatcaagggcactggtaaagttaaagccactgaagacgtttctgctcaactccaggataactgctgaccttgcagaagtcggcatttagcaaatgtggcttaggaaaatagcattatacttttcattttactattttcccaaacaccatccatacactgtactgtgtatttcaaggaaattaactgcacttccttatataataatataatacyttcatgatttgtcctaactatgtctgcgcatcaggaaaatctatattcaaaaagattttgtcatttaagtaaaattaaatactgccagttacatctcatcctcataaaagcatatatatgaacggctggaatggtttttggttaatacatttaaatgttactactgtcaagagttcgcatagtacgcaatttgttgaattgaacaaacgtagtgctgtgacatttcactaccaaaagattaagggagaaaaaaaacccaatatcttgttgataatctgtccagataaaacagagagagag

SEQ ID NO: 669 - DNA, 600 bp, Chicken  19866894084888_1
actagctgagaaaatacaacaagaaatgtcagaaagtgcagtcctgtacaggaaagtgtgagatggttgaatctgtaaaaatgggctctcgtcaaaaaggaggcatgaatataacaaaccctgaactggattgccaatgttttcccaaattttgctgcattttctggaatgctctcagagacccaagtcgtatctctttacatgtatgagtagatgtagcatctgaaaagccaaatgtgaaccaaaatacctgttattagaacagtatcacccagatagttaaagcagcccaagaacaamagcctacatgcatatgcatttatagtcaccctgagtgcaattgcctgcagcttataaatttctatttatttattttaaaatgtcatacatatatgtaaaacagtttatgtattgtctagttatctgcagattttgtgtgcttattcacacgtgttcgtgcgttttgcaatcatctgggtttatctatcccctcacatcaaatcctgaattttgttctggaatcctctcttgcatttcatagccagcctcataataagtgacctgtctgtggctgagatccatggtgtattggcagatttc

SEQ ID NO: 670 - DNA, 599 bp, Chicken  19866894084889_1
  misc_feature (1)..(195): n is any nucleotide
nnnnnnnnnnnnnnnnnnnnnnnnnnnnnnnnnnnnnnnnnnnnnnnnnnnnnnnnnnnnnnnnnnnnnnnnnnnnnnnnnnnnnnnnnnnnnnnnnnnnnnnnnnnnnnnnnnnnnnnnnnnnnnnnnnnnnnnnnnnnnnnnnnnnnnnnnnnnnnnnnnnnnnnnnnnnnnnnnnnnnnnnnnnnnnnnnnnatgtccccaaaatccccattatctcccacctctccaaagtccccaagatccccattacccccaatatcctcattacaccccaaatgtccccaatgtcccctccaygtcccccagagaccccattagccccaatagctcccaaactgtccccagtgtccccattaaccccaaaatgaccccattacgccccacacccctcccaaccccatgccctcagaccccttcatccctctcactcctctctcccyygcagacccctgggggactctgaccccactcggggtccccccccggactccycccagctgcgaactgaaccccacgaacccccagaccggctctgacccatggagccgccctctgcaccccgacgcccgcagccccccaaccgcgggggggcagtg

SEQ ID NO: 671 - DNA, 599 bp, Chicken  19866894084889_2
  misc_feature (1)..(52): n is any nucleotide
nnnnnnnnnnnnnnnnnnnnnnnnnnnnnnnnnnnnnnnnnnnnnnnnnnnnatgtccccaaaatccccattatctcccacctctccaaagtccccaagatccccattacccccaatatcctcattacaccccaaatgtccccaatgtcccctccaygtcccccagagaccccattagccccaatagctcccaaactgtccccagtgtccccattaaccccaaaatgaccccattacgccccacacccctcccaaccccatgccctcagaccccttcatccctctcactcctctctcccyygcagacccctgggggactctgaccccactcggggtccccccccggactccycccagctgcgaactgaaccccacgaacccccagaccggctctgacccatggagccgccctctgcaccccgacgcccgcagccccccaaccgcgggggggcagtggtgggtggcggcggtggggaccccgcagtacggtgtcactgcgctgctgcagggggggatgggcacagaaggaaccatcactgccgccggtaagggggaacytggggtgtccctccctgggtgtccccatgtccctatctgtc

SEQ ID NO: 672 - DNA, 599 bp, Chicken  19866894084889_3
  misc_feature (1)..(51): n is any nucleotide
nnnnnnnnnnnnnnnnnnnnnnnnnnnnnnnnnnnnnnnnnnnnnnnnnnnatgtccccaaaatccccattatctcccacctctccaaagtccccaagatccccattacccccaatatcctcattacaccccaaatgtccccaatgtcccctccaygtcccccagagaccccattagccccaatagctcccaaactgtccccagtgtccccattaaccccaaaatgaccccattacgccccacacccctcccaaccccatgccctcagaccccttcatccctctcactcctctctcccyygcagacccctgggggactctgaccccactcggggtccccccccggactccycccagctgcgaactgaaccccacgaacccccagaccggctctgacccatggagccgccctctgcaccccgacgcccgcagccccccaaccgcgggggggcagtggtgggtggcggcggtggggaccccgcagtacggtgtcactgcgctgctgcagggggggatgggcacagaaggaaccatcactgccgccggtaagggggaacytggggtgtccctccctgggtgtccccatgtccctatctgtcc

SEQ ID NO: 673 - DNA, 600 bp, Chicken  19866894084889_4
atgtccccaaaatccccattatctcccacctctccaaagtccccaagatccccattacccccaatatcctcattacaccccaaatgtccccaatgtcccctccaygtcccccagagaccccattagccccaatagctcccaaactgtccccagtgtccccattaaccccaaaatgaccccattacgccccacacccctcccaaccccatgccctcagaccccttcatccctctcactcctctctcccyygcagacccctgggggactctgaccccactcggggtccccccccggactccycccagctgcgaactgaaccccacgaacccccagaccggctctgacccatggagccgccctctgcaccccgacgcccgcagccccccaaccgcgggggggcagtggtgggtggcggcggtggggaccccgcagtacggtgtcactgcgctgctgcagggggggatgggcacagaaggaaccatcactgccgccggtaagggggaacytggggtgtccctccctgggtgtccccatgtccctatctgtccccccgtgtgtccccatttgtcccctcctctgcatgtgtcccaatgtccccat

SEQ ID NO: 674 - DNA, 521 bp, Chicken  19866894084889_5
catgccctcagaccccttcatccctctcactcctctctcccyygcagacccctgggggactctgaccccactcggggtccccccccggactccycccagctgcgaactgaaccccacgaacccccagaccggctctgacccatggagccgccctctgcaccccgacgcccgcagccccccaaccgcgggggggcagtggtgggtggcggcggtggggaccccgcagtacggtgtcactgcgctgctgcagggggggatgggcacagaaggaaccatcactgccgccggtaagggggaacytggggtgtccctccctgggtgtccccatgtccctatctgtccccccgtgtgtccccatttgtcccctcctctgcatgtgtcccaatgtccccatacatccctataataaccatatgtccccactcatccccatattccccatgtgtccccatatccccacacatcccagtgtgccccaacacatccccatgtgcccccccccatgcatcactaccatcccc

SEQ ID NO: 675 - DNA, 600 bp, Chicken  19866894084891_1
ctatgattgcctggcatacatttaatcgtttgcagttaatacatttggccagtagttagatttccattgtcttcaattgctctaaagacaatactgcaaaattcttccagtcacaaataatgcaggatccaataaaaactatgggaagcaagttccaattacatggcacggtgtgccatatctgtcagtctctatgtaagctggtatttcacagatgaaacttggcaaaagacttcatattaagtaacataagagttatgaacttccagttacatttgatttgagaaaaagtgcagacaytaaccttagagcaagtcaccacttttacaaaactrttacaatttgatatgaacagtttaakataaacgtatacatactgtaggaacaaccctctaatcttttttggaagagcatttgcaccaacctaagaatgaaatgggttgttatgtcaaactgtggaactgttctcaactgttctaaaccactacagatttatagtggattctataggctttcattgatttcactcccttcaaattctgtgggttcacaggctcatctacagggtcactgtgaacagctccccgttccccagcatcc

SEQ ID NO: 676 - DNA, 600 bp, Chicken  19866894084891_2
ttaatacatttggccagtagttagatttccattgtcttcaattgctctaaagacaatactgcaaaattcttccagtcacaaataatgcaggatccaataaaaactatgggaagcaagttccaattacatggcacggtgtgccatatctgtcagtctctatgtaagctggtatttcacagatgaaacttggcaaaagacttcatattaagtaacataagagttatgaacttccagttacatttgatttgagaaaaagtgcagacaytaaccttagagcaagtcaccacttttacaaaactrttacaatttgatatgaacagtttaakataaacgtatacatactgtaggaacaaccctctaatcttttttggaagagcatttgcaccaacctaagaatgaaatgggttgttatgtcaaactgtggaactgttctcaactgttctaaaccactacagatttatagtggattctataggctttcattgatttcactcccttcaaattctgtgggttcacaggctcatctacagggtcactgtgaacagctccccgttccccagcatcctcagcaaatgcactgtgcacacagtagtgttctcc

SEQ ID NO: 677 - DNA, 600 bp, Chicken  19866894084891_3
ttccattgtcttcaattgctctaaagacaatactgcaaaattcttccagtcacaaataatgcaggatccaataaaaactatgggaagcaagttccaattacatggcacggtgtgccatatctgtcagtctctatgtaagctggtatttcacagatgaaacttggcaaaagacttcatattaagtaacataagagttatgaacttccagttacatttgatttgagaaaaagtgcagacaytaaccttagagcaagtcaccacttttacaaaactrttacaatttgatatgaacagtttaakataaacgtatacatactgtaggaacaaccctctaatcttttttggaagagcatttgcaccaacctaagaatgaaatgggttgttatgtcaaactgtggaactgttctcaactgttctaaaccactacagatttatagtggattctataggctttcattgatttcactcccttcaaattctgtgggttcacaggctcatctacagggtcactgtgaacagctccccgttccccagcatcctcagcaaatgcactgtgcacacagtagtgttctcctaggctgcctagacagtgactgggct

SEQ ID NO: 678 - DNA, 600 bp, Chicken  19866894084897_1
acccccagcagccagctccatgcctgcagagctctgcccacgctgtgacaatccccagcgccgccaggaacgtgccgtctcctccaaaagttaataattgatggcctcgggggctgcacgaggggaaagggaggaggagaaacaaacagtttacattgtctttcctaccaggatttgcatatttgaaaagcccttggattgcaacacggtgccggcagagctgcagatgctggcggtgtgccacgtgccgggctggtgccatgcggtgaccccggggctgcagagctgggagggggctgytgggactgctaaaggcagagcctcatgtcacagaggtgccactccagcaggaaacacagtgatatgctcacacacacacagaggtgctccactgaaccctgctccaaatataccctcttttaggaagcactgctgatgcctcccgccgtacaaagacacggggcacacagctgggtttggtttctgcatcgctttccttcctccttacctgatttttccatgacaccaaagaagggcaggggaatgtgagcaaaaggagagctggtttggcacccaatgactcaaaagccctgagaactc

SEQ ID NO: 679 - DNA, 438 bp, Chicken  19866894084897_2
cgccgtacaaagacacggggcacacagctgggtttggtttctgcatcgctttccttcctccttacctgatttttccatgacaccaaagaagggcaggggaatgtgagcaaaaggagagctggtttggcacccaatgactcaaaagccctgagaactcagacagcaaaatccaaataaagagggtcacatcctgctttagttgcacctgtgccaatggggacacctcagtcccttccggagccgctgggaaccggaggtggttgggacctgcaaaccccactggggcaccaccacaatccygcaccaacccggggacacggggacaatgccatgaagtcacccgaggaacaaacagcactgccagggacagccacttccatgcaagctcctattagcagccagatgggaatgaagccgcagacacaaaggatcagcaac

SEQ ID NO: 680 - DNA, 599 bp, Chicken  19866894084899_1
  misc_feature (1)..(138): n is any nucleotide
nnnnnnnnnnnnnnnnnnnnnnnnnnnnnnnnnnnnnnnnnnnnnnnnnnnnnnnnnnnnnnnnnnnnnnnnnnnnnnnnnnnnnnnnnnnnnnnnnnnnnnnnnnnnnnnnnnnnnnnnnnnnnnnnnnnnnnnnnntatggaaatatattgtaaaacaaagggtctgtgatgtttcctgatggccatctgaactggcaacaggtagaagtgcatgggagtgcactgccgtgcattagcaaaagactacatgtgtacaaatggagctcctttgcttactacactgtgagcctggacgtrgcaattgtcagatgcttgggataccagaatcccagaggtctgaaatgacaggcaaaatttaagctaatactgtgctggaagtgaacttgctaacaatgcattaaatgcatgttctgttatctcttaagcaacaccaaaaagcatattctgcaaaaacagtaagccagcacatttaraaagataattgtttctctctaaaaatctgaaaactattagcaacwaacctgtttctcaatgtcttccaacaaactactagcaccaaggcgaaagagctctggtttcagccattccactcccag

SEQ ID NO: 681 - DNA, 600 bp, Chicken  19866894084899_2
tcctgatggccatctgaactggcaacaggtagaagtgcatgggagtgcactgccgtgcattagcaaaagactacatgtgtacaaatggagctcctttgcttactacactgtgagcctggacgtrgcaattgtcagatgcttgggataccagaatcccagaggtctgaaatgacaggcaaaatttaagctaatactgtgctggaagtgaacttgctaacaatgcattaaatgcatgttctgttatctcttaagcaacaccaaaaagcatattctgcaaaaacagtaagccagcacatttaraaagataattgtttctctctaaaaatctgaaaactattagcaacwaacctgtttctcaatgtcttccaacaaactactagcaccaaggcgaaagagctctggtttcagccattccactcccagttcctcttttaccagcataagccaagtaatagcttcttttgctgtccgaataccaccagcaggcttaaatccaacctatatatataaaaaaaaatgcaatacttcattatggccccagaagaacaatcagcatttgtagacatgccatctaaatctatgtggtgtatataaaaaaaa

SEQ ID NO: 682 - DNA, 600 bp, Chicken  19866894084899_3
tgcactgccgtgcattagcaaaagactacatgtgtacaaatggagctcctttgcttactacactgtgagcctggacgtrgcaattgtcagatgcttgggataccagaatcccagaggtctgaaatgacaggcaaaatttaagctaatactgtgctggaagtgaacttgctaacaatgcattaaatgcatgttctgttatctcttaagcaacaccaaaaagcatattctgcaaaaacagtaagccagcacatttaraaagataattgtttctctctaaaaatctgaaaactattagcaacwaacctgtttctcaatgtcttccaacaaactactagcaccaaggcgaaagagctctggtttcagccattccactcccagttcctcttttaccagcataagccaagtaatagcttcttttgctgtccgaataccaccagcaggcttaaatccaacctatatatataaaaaaaaatgcaatacttcattatggccccagaagaacaatcagcatttgtagacatgccatctaaatctatgtggtgtatataaaaaaaactctgttctggtaaatatctgactgtaagcagtgtttggtctgga

SEQ ID NO: 683 - DNA, 600 bp, Chicken  19866894084900_1
gcactcgatggcatgctaaagtttcagcacacacaggcactctcaactctcaattattcatgggaggtttaaccagattcagtggattaactgtgattcaggcagagaaacaccatagccaggaacagtgggagcatgacctggggtccagcatgggtggaagttgcctgagtggaccacagctgactccagagaagccatgctaccatctgcctatagtgcatctcccagaaactccaggttcctatgagatccgaacaggtaggtgtatcaaaacgccaagttggaactttgcacaaygtcagacttactcctgtagaaatcagagtaccaagaagcactgccccaaaacctgagtagctttgccacagccaggcctgcattggtgtggctcatcacaggtcacgcagacctgattctccctgtgtggaatcattgcagcatccctgcatcagcgcataaccagcgtggaggtgtgaacctatgggctaggaaatgaagaaccgttaactcccactgactttatcaaaattgtccacgtttacaaagttggagaagcataaagtagcattttgcattaccaaaagcagcagtctattt

SEQ ID NO: 684 - DNA, 600 bp, Chicken  19866894084903_1
cttttacgaagaagattgaattggaatttcatctataacattaatttaatgcattacaataatgagtcccaatcccagccctgaagcttcaaggaagcttgaatatggaaacgtacctgcacccaagatttctgccttaagccacccacggtgcaataggccaaaccacaatctatacattaatctccctctgaactttgtaaaatctcgatttctcccaaaatggataatgatattaattaaatgagcttaaggtgaggatgcagttcaaagatttaaccggtaatgagatgggtagaraatcccaagagagaaattataggaattatcagttacctgcacacaaattatcagtgctgcaaatatgatagagcttactcattagcttctctctgcaactctacaagaacagcrgcctcctgtgcatcttcagtcawacctgccagccccagagatgtgtcagacaaaccagggcatccaagctggctcctgatacctgggttgaagcacctgaacaattattccatttctttcttcccttataggcacaggttctcccasgctggaagattttgtggcaacagatctcttcaaaggtta

SEQ ID NO: 685 - DNA, 600 bp, Chicken  19866894084903_2
acctgcacccaagatttctgccttaagccacccacggtgcaataggccaaaccacaatctatacattaatctccctctgaactttgtaaaatctcgatttctcccaaaatggataatgatattaattaaatgagcttaaggtgaggatgcagttcaaagatttaaccggtaatgagatgggtagaraatcccaagagagaaattataggaattatcagttacctgcacacaaattatcagtgctgcaaatatgatagagcttactcattagcttctctctgcaactctacaagaacagcrgcctcctgtgcatcttcagtcawacctgccagccccagagatgtgtcagacaaaccagggcatccaagctggctcctgatacctgggttgaagcacctgaacaattattccatttctttcttcccttataggcacaggttctcccasgctggaagattttgtggcaacagatctcttcaaaggttagaggatgccagtagccagttgtctacacttgaaaaggcatcatatttggagctcagctggtgaacaaagccaccttctgggagttattaaactggtttccagaaccacagaatt

SEQ ID NO: 686 - DNA, 600 bp, Chicken  19866894084903_3
taagccacccacggtgcaataggccaaaccacaatctatacattaatctccctctgaactttgtaaaatctcgatttctcccaaaatggataatgatattaattaaatgagcttaaggtgaggatgcagttcaaagatttaaccggtaatgagatgggtagaraatcccaagagagaaattataggaattatcagttacctgcacacaaattatcagtgctgcaaatatgatagagcttactcattagcttctctctgcaactctacaagaacagcrgcctcctgtgcatcttcagtcawacctgccagccccagagatgtgtcagacaaaccagggcatccaagctggctcctgatacctgggttgaagcacctgaacaattattccatttctttcttcccttataggcacaggttctcccasgctggaagattttgtggcaacagatctcttcaaaggttagaggatgccagtagccagttgtctacacttgaaaaggcatcatatttggagctcagctggtgaacaaagccaccttctgggagttattaaactggtttccagaaccacagaatttttgtgtgctggccattttggct

SEQ ID NO: 687 - DNA, 600 bp, Chicken  19866894084903_4
tgcagttcaaagatttaaccggtaatgagatgggtagaraatcccaagagagaaattataggaattatcagttacctgcacacaaattatcagtgctgcaaatatgatagagcttactcattagcttctctctgcaactctacaagaacagcrgcctcctgtgcatcttcagtcawacctgccagccccagagatgtgtcagacaaaccagggcatccaagctggctcctgatacctgggttgaagcacctgaacaattattccatttctttcttcccttataggcacaggttctcccasgctggaagattttgtggcaacagatctcttcaaaggttagaggatgccagtagccagttgtctacacttgaaaaggcatcatatttggagctcagctggtgaacaaagccaccttctgggagttattaaactggtttccagaaccacagaatttttgtgtgctggccattttggcttttctcaagtagtttttgtcccaaagtgcttcaagcragttatcacatgcaccagaggcagcaaaaaacctactgtagatttaaaaattattttcctttcagaacacagtccaatattgccatc

SEQ ID NO: 688 - DNA, 600 bp, Chicken  19866894084903_5
catccaagctggctcctgatacctgggttgaagcacctgaacaattattccatttctttcttcccttataggcacaggttctcccasgctggaagattttgtggcaacagatctcttcaaaggttagaggatgccagtagccagttgtctacacttgaaaaggcatcatatttggagctcagctggtgaacaaagccaccttctgggagttattaaactggtttccagaaccacagaatttttgtgtgctggccattttggcttttctcaagtagtttttgtcccaaagtgcttcaagcragttatcacatgcaccagaggcagcaaaaaacctactgtagatttaaaaattattttcctttcagaacacagtccaatattgccatcatgtctgtaaacagaaaaacagcatgatgctaccagagaggtgtagaacagcatctaagtgctaaccatcaagcaatatcttctgggacaacgaaagcgcagggagattttgctaaccatatccatgtgcagcacagctacaatcaatcatttcagatgataactatcaaattgaatgtaactgacagtcattaacaccacttatggatgagt

SEQ ID NO: 689 - DNA, 588 bp, Chicken  19866894084906_1
gtcacagcagggataaggaggatcaaatggggaggggtggccctggctcggaagatggtgcagggaacgtgccggcagcgatcggcgcttaggatacagcttgggcttcgcttaccaggagtcgtcccgatcccactgctccctctcgagtccgagcccacgcgtgacccggcgccacctcttatcacccgtccgccccgcgctgccaccccgcccttccccgctgccttccccggcagccccacgagtccgcgtcccgcgtggatcgcgctgtgctcccggggttcatctcccccctcyccgccccacaacgcccccaagccccgctgcctgcgggatcgctccgcacaccgcctcccacgcgggacttcccggggccgcccggtgcctccaattcccttccgcgggagcccgctggggaccggtaggcagagacaaaggcggtaaaatatctgtgctcagctcaagccgctccgagccccgccgatcccttaactagatcgttaggggattatccgggacctcagcaccggggggcggctgtccgcgccgtcccgctaacgggcgtctgcggagctacgggagaga

SEQ ID NO: 690 - DNA, 600 bp, Chicken  19866894084910_1
ttccctccacgtcgttgtgctcacaaggagcttagtttgcagccatgggtatttgtgcaccagcatgtccagagcaggatgtatagcagtgcatgttgcaggtgggaccacaccccagagtccttggacttcagcaatctactgagacagagagcgcaacctgcttcctctctgaaggatggagaagagaaaacaagtgtaacgtgagcatcatgacaatggcagagggtctccagccaacataggatctgacttccctcacattgtgtgactacgtgtaggactgagctctctcctttrtagctggtagatttcccttgaagtgacttcatctcatctaagaacagtcctaaactggaggtgcctgtctgtycccaytcctgtacaaatggcctgggtcagtaggtacccatccctggaaactsttaaggtcaggctggatcaggctttgagcaccttgatcaagctgtaggtgtctgtgctcgttgcagtggagttgaaccagatggcctttaaaggtcctttccaactctatgattctgggaggttaagctggatgctgaattagattgctcccaagctggatgaaagcatctgaac

SEQ ID NO: 691 - DNA, 600 bp, Chicken  19866894084910_2
gcaggatgtatagcagtgcatgttgcaggtgggaccacaccccagagtccttggacttcagcaatctactgagacagagagcgcaacctgcttcctctctgaaggatggagaagagaaaacaagtgtaacgtgagcatcatgacaatggcagagggtctccagccaacataggatctgacttccctcacattgtgtgactacgtgtaggactgagctctctcctttrtagctggtagatttcccttgaagtgacttcatctcatctaagaacagtcctaaactggaggtgcctgtctgtycccaytcctgtacaaatggcctgggtcagtaggtacccatccctggaaactsttaaggtcaggctggatcaggctttgagcaccttgatcaagctgtaggtgtctgtgctcgttgcagtggagttgaaccagatggcctttaaaggtcctttccaactctatgattctgggaggttaagctggatgctgaattagattgctcccaagctggatgaaagcatctgaaccttcacacacggcasaaataatccccattgaaatagctgtgtgtctgattctggaacggcagagggtatggaa

SEQ ID NO: 692 - DNA, 600 bp, Chicken  19866894084910_3
atgtatagcagtgcatgttgcaggtgggaccacaccccagagtccttggacttcagcaatctactgagacagagagcgcaacctgcttcctctctgaaggatggagaagagaaaacaagtgtaacgtgagcatcatgacaatggcagagggtctccagccaacataggatctgacttccctcacattgtgtgactacgtgtaggactgagctctctcctttrtagctggtagatttcccttgaagtgacttcatctcatctaagaacagtcctaaactggaggtgcctgtctgtycccaytcctgtacaaatggcctgggtcagtaggtacccatccctggaaactsttaaggtcaggctggatcaggctttgagcaccttgatcaagctgtaggtgtctgtgctcgttgcagtggagttgaaccagatggcctttaaaggtcctttccaactctatgattctgggaggttaagctggatgctgaattagattgctcccaagctggatgaaagcatctgaaccttcacacacggcasaaataatccccattgaaatagctgtgtgtctgattctggaacggcagagggtatggaaggaag

SEQ ID NO: 693 - DNA, 600 bp, Chicken  19866894084910_4
ggacttcagcaatctactgagacagagagcgcaacctgcttcctctctgaaggatggagaagagaaaacaagtgtaacgtgagcatcatgacaatggcagagggtctccagccaacataggatctgacttccctcacattgtgtgactacgtgtaggactgagctctctcctttrtagctggtagatttcccttgaagtgacttcatctcatctaagaacagtcctaaactggaggtgcctgtctgtycccaytcctgtacaaatggcctgggtcagtaggtacccatccctggaaactsttaaggtcaggctggatcaggctttgagcaccttgatcaagctgtaggtgtctgtgctcgttgcagtggagttgaaccagatggcctttaaaggtcctttccaactctatgattctgggaggttaagctggatgctgaattagattgctcccaagctggatgaaagcatctgaaccttcacacacggcasaaataatccccattgaaatagctgtgtgtctgattctggaacggcagagggtatggaaggaagcacagagaatgctggaagaatggaggccatggagaggacaactgtga

SEQ ID NO: 694 - DNA, 479 bp, Chicken  19866894084910_5
ccttgaagtgacttcatctcatctaagaacagtcctaaactggaggtgcctgtctgtycccaytcctgtacaaatggcctgggtcagtaggtacccatccctggaaactsttaaggtcaggctggatcaggctttgagcaccttgatcaagctgtaggtgtctgtgctcgttgcagtggagttgaaccagatggcctttaaaggtcctttccaactctatgattctgggaggttaagctggatgctgaattagattgctcccaagctggatgaaagcatctgaaccttcacacacggcasaaataatccccattgaaatagctgtgtgtctgattctggaacggcagagggtatggaaggaagcacagagaatgctggaagaatggaggccatggagaggacaactgtgaggatggagggtgccaagaagcagctctcagcacccaggcactgcctgcaccctgggcaccagagagccg

SEQ ID NO: 695 - DNA, 599 bp, Chicken  19866894084911_1
  misc_feature (1)..(212): n is any nucleotide
nnnnnnnnnnnnnnnnnnnnnnnnnnnnnnnnnnnnnnnnnnnnnnnnnnnnnnnnnnnnnnnnnnnnnnnnnnnnnnnnnnnnnnnnnnnnnnnnnnnnnnnnnnnnnnnnnnnnnnnnnnnnnnnnnnnnnnnnnnnnnnnnnnnnnnnnnnnnnnnnnnnnnnnnnnnnnnnnnnnnnnnnnnnnnnnnnnnnnnnnnnnnnnnnnnnnaactgaagagaaatagccttacctgactacagcaactatttaacttttgtgtaccactattcagttacaagtgcagatggggagcaaycaaagaaagagctctgtgttgtcccatgcttcaaacatcaatctgtgggctggccaacaagacagaaaggagatgcaggcagcaataccttcgagaacttaatttagaagctttcttggctttcaaagatatgaattcagaagaattactcctgatatcattaaaagctgaacactcttggagcagcaagacaagtgacgtgctatttctttattgtggtgcagaagaggtgatgacacgtggcactgcagaggtgccatggatcacaagtgcagacttgctggctgggagctgctgac

SEQ ID NO: 696 - DNA, 600 bp, Chicken  19866894084911_2
ttctttattgtggtgcagaagaggtgatgacacgtggcactgcagaggtgccatggatcacaagtgcagacttgctggctgggagctgctgacactgacagccgatggcacagaagctaagcacatgctcagcccacagcaggggctgtgtgagcatccttggcaatcctgcccctggtccctatgagatttctgctcctctcaactctccttgctacagggtaaggcctttcagctcagaagctgctattgtatgaccaataggtttgggacagctggccactgctatcataaacctamayyagarcatgacttaatccagaccactctttgtaaagaaggaaatacattttaaatgaagactgttgaacttcaaaccatcaaataagaacacggacttattaaaataaagccttcagaatataagatacatttaagcaatttgtattagtaactatgtcaaaacgtacagggtagaatacagcaacagttaccaagacacgtatcttccctgcaagctttcatgtaaactctatgctccattttaggtgatcatctgaatggttctgacgtgcttcaaatagaaaggatgcaggggca

SEQ ID NO: 697 - DNA, 600 bp, Chicken  19866894084911_3
ctttattgtggtgcagaagaggtgatgacacgtggcactgcagaggtgccatggatcacaagtgcagacttgctggctgggagctgctgacactgacagccgatggcacagaagctaagcacatgctcagcccacagcaggggctgtgtgagcatccttggcaatcctgcccctggtccctatgagatttctgctcctctcaactctccttgctacagggtaaggcctttcagctcagaagctgctattgtatgaccaataggtttgggacagctggccactgctatcataaacctamayyagarcatgacttaatccagaccactctttgtaaagaaggaaatacattttaaatgaagactgttgaacttcaaaccatcaaataagaacacggacttattaaaataaagccttcagaatataagatacatttaagcaatttgtattagtaactatgtcaaaacgtacagggtagaatacagcaacagttaccaagacacgtatcttccctgcaagctttcatgtaaactctatgctccattttaggtgatcatctgaatggttctgacgtgcttcaaatagaaaggatgcaggggcaga

SEQ ID NO: 698 - DNA, 600 bp, Chicken  19866894084911_4
tttattgtggtgcagaagaggtgatgacacgtggcactgcagaggtgccatggatcacaagtgcagacttgctggctgggagctgctgacactgacagccgatggcacagaagctaagcacatgctcagcccacagcaggggctgtgtgagcatccttggcaatcctgcccctggtccctatgagatttctgctcctctcaactctccttgctacagggtaaggcctttcagctcagaagctgctattgtatgaccaataggtttgggacagctggccactgctatcataaacctamayyagarcatgacttaatccagaccactctttgtaaagaaggaaatacattttaaatgaagactgttgaacttcaaaccatcaaataagaacacggacttattaaaataaagccttcagaatataagatacatttaagcaatttgtattagtaactatgtcaaaacgtacagggtagaatacagcaacagttaccaagacacgtatcttccctgcaagctttcatgtaaactctatgctccattttaggtgatcatctgaatggttctgacgtgcttcaaatagaaaggatgcaggggcagag

SEQ ID NO: 699 - DNA, 600 bp, Chicken  19866894084911_5
ttgtggtgcagaagaggtgatgacacgtggcactgcagaggtgccatggatcacaagtgcagacttgctggctgggagctgctgacactgacagccgatggcacagaagctaagcacatgctcagcccacagcaggggctgtgtgagcatccttggcaatcctgcccctggtccctatgagatttctgctcctctcaactctccttgctacagggtaaggcctttcagctcagaagctgctattgtatgaccaataggtttgggacagctggccactgctatcataaacctamayyagarcatgacttaatccagaccactctttgtaaagaaggaaatacattttaaatgaagactgttgaacttcaaaccatcaaataagaacacggacttattaaaataaagccttcagaatataagatacatttaagcaatttgtattagtaactatgtcaaaacgtacagggtagaatacagcaacagttaccaagacacgtatcttccctgcaagctttcatgtaaactctatgctccattttaggtgatcatctgaatggttctgacgtgcttcaaatagaaaggatgcaggggcagagctct

SEQ ID NO: 700 - DNA, 600 bp, Chicken  19866894084917_1
ctgctcccttcagagccaggcccacagtgcctgcaattcccattaattcccactacaattaacagggcagctcacagagctttgatgacagtggggtctgcaagagcaattctatcaaaattatctatggataaaagagagtaattataggagcaaattccttgctgagactttatcagctgctttgtctaacagtgttagggagcagggaagacttcagctcccctggttctgcagacagctctcctggggcaggtgaggtggtggttatccaagaggggaggtaattgcttcaggagrgcaaaactggagaagccttcagagtgcatccgtactgctcccaggaaggcctgtggaaatgatgcrcgctgattgaggaggtgggctgctgggtctgctctgaaaccgcagggaggggaaggatggtgagaaaagggtggaaaagggtgaaaaacaaattaacccccaacaactgcacaaaggagcggcctgctccctgcaggcatccctgcctggtggctgctgggagatgaaaggcagcgaaagcagtggcaaaatactcgtaacaatgcttatgggctcaggacctttgaagccatc

SEQ ID NO: 701 - DNA, 600 bp, Chicken  19866894084917_2
gcagctcacagagctttgatgacagtggggtctgcaagagcaattctatcaaaattatctatggataaaagagagtaattataggagcaaattccttgctgagactttatcagctgctttgtctaacagtgttagggagcagggaagacttcagctcccctggttctgcagacagctctcctggggcaggtgaggtggtggttatccaagaggggaggtaattgcttcaggagrgcaaaactggagaagccttcagagtgcatccgtactgctcccaggaaggcctgtggaaatgatgcrcgctgattgaggaggtgggctgctgggtctgctctgaaaccgcagggaggggaaggatggtgagaaaagggtggaaaagggtgaaaaacaaattaacccccaacaactgcacaaaggagcggcctgctccctgcaggcatccctgcctggtggctgctgggagatgaaaggcagcgaaagcagtggcaaaatactcgtaacaatgcttatgggctcaggacctttgaagccatcttgagtgctgctaaatcgcttgttttcttcctgttctgcctgggatttggttggctttgtgccccc

SEQ ID NO: 702 - DNA, 599 bp, Chicken  19866894084918_1
  misc_feature (1)..(225): n is any nucleotide
nnnnnnnnnnnnnnnnnnnnnnnnnnnnnnnnnnnnnnnnnnnnnnnnnnnnnnnnnnnnnnnnnnnnnnnnnnnnnnnnnnnnnnnnnnnnnnnnnnnnnnnnnnnnnnnnnnnnnnnnnnnnnnnnnnnnnnnnnnnnnnnnnnnnnnnnnnnnnnnnnnnnnnnnnnnnnnnnnnnnnnnnnnnnnnnnnnnnnnnnnnnnnnnnnnnnnnnnnnnnnnnnntaacccgaatgtagtctagtaaggtttgctcaagtgagatggaaaacgaagaggtaggctccaaaacagacttgmggtgagtgttttgtatgacttggggyttctagaacaacctgtatttttccataaaattgaaatgggcttggtgtcggttgtcccttactctcaccttgctgtcaccaggtcctcttcctttgcccatctttagggctccccagttctgatgggatctcagtgccaccttctgatcccacaaagcttggctctgtycttggccttttgggttccagmgcgtttgctacaggttatggagtgtttctcttctctctcttcttgtcttccatgttgcccgttggcgcctcggtggagtttca

SEQ ID NO: 703 - DNA, 599 bp, Chicken  19866894084918_2
  misc_feature (1)..(199): n is any nucleotide
nnnnnnnnnnnnnnnnnnnnnnnnnnnnnnnnnnnnnnnnnnnnnnnnnnnnnnnnnnnnnnnnnnnnnnnnnnnnnnnnnnnnnnnnnnnnnnnnnnnnnnnnnnnnnnnnnnnnnnnnnnnnnnnnnnnnnnnnnnnnnnnnnnnnnnnnnnnnnnnnnnnnnnnnnnnnnnnnnnnnnnnnnnnnnnnnnnnnnnntaacccgaatgtagtctagtaaggtttgctcaagtgagatggaaaacgaagaggtaggctccaaaacagacttgmggtgagtgttttgtatgacttggggyttctagaacaacctgtatttttccataaaattgaaatgggcttggtgtcggttgtcccttactctcaccttgctgtcaccaggtcctcttcctttgcccatctttagggctccccagttctgatgggatctcagtgccaccttctgatcccacaaagcttggctctgtycttggccttttgggttccagmgcgtttgctacaggttatggagtgtttctcttctctctcttcttgtcttccatgttgcccgttggcgcctcggtggagtttcagtgacccaaacgcagacggctctgcg

SEQ ID NO: 704 - DNA, 599 bp, Chicken  19866894084918_3
  misc_feature (1)..(30): n is any nucleotide
nnnnnnnnnnnnnnnnnnnnnnnnnnnnnntaacccgaatgtagtctagtaaggtttgctcaagtgagatggaaaacgaagaggtaggctccaaaacagacttgmggtgagtgttttgtatgacttggggyttctagaacaacctgtatttttccataaaattgaaatgggcttggtgtcggttgtcccttactctcaccttgctgtcaccaggtcctcttcctttgcccatctttagggctccccagttctgatgggatctcagtgccaccttctgatcccacaaagcttggctctgtycttggccttttgggttccagmgcgtttgctacaggttatggagtgtttctcttctctctcttcttgtcttccatgttgcccgttggcgcctcggtggagtttcagtgacccaaacgcagacggctctgcgttgaccaagcgtgatgccaagagaagaggtaggcaccagaacaggctgctggtgagtgctgtgcatgactcggggttcttagaacgacttgcgttcctccctaacccgtgtttttcagtactactattgagggttttcactttgattctaggataggagactctaccat

SEQ ID NO: 705 - DNA, 599 bp, Chicken  19866894084918_4
  misc_feature (1)..(9): n is any nucleotide
nnnnnnnnntaacccgaatgtagtctagtaaggtttgctcaagtgagatggaaaacgaagaggtaggctccaaaacagacttgmggtgagtgttttgtatgacttggggyttctagaacaacctgtatttttccataaaattgaaatgggcttggtgtcggttgtcccttactctcaccttgctgtcaccaggtcctcttcctttgcccatctttagggctccccagttctgatgggatctcagtgccaccttctgatcccacaaagcttggctctgtycttggccttttgggttccagmgcgtttgctacaggttatggagtgtttctcttctctctcttcttgtcttccatgttgcccgttggcgcctcggtggagtttcagtgacccaaacgcagacggctctgcgttgaccaagcgtgatgccaagagaagaggtaggcaccagaacaggctgctggtgagtgctgtgcatgactcggggttcttagaacgacttgcgttcctccctaacccgtgtttttcagtactactattgagggttttcactttgattctaggataggagactctaccatcagatggcgttgcctgttctt

SEQ ID NO: 706 - DNA, 422 bp, Chicken  19866894084918_5
aacccgtgtttttcagtactactattgagggttttcactttgattctaggataggagactctaccatcagatggcgttgcctgttcttctctccccagcttgcagagttggatgtgacctcagcgtggataaggggtaagtgattccttcatcccgaccagaaggtaatctctacttgtcttgtgctgtgcggagcaggttgcagtggagaagtgcagttgtccggggcgctgcaaggactctattgaggcatttggtggacgccgcaggaacccacagccagagatggacgccaagackcactccttcctctgtctggcaagctctgctgacccctgaggtttttcccatgcttgcagmggtcctacgggcttgctgttggttgtcgcttgtgctcaccttgctgtcaccgggtgttcttc

SEQ ID NO: 707 - DNA, 362 bp, Chicken  19866894084918_6
ctaccatcagatggcgttgcctgttcttctctccccagcttgcagagttggatgtgacctcagcgtggataaggggtaagtgattccttcatcccgaccagaaggtaatctctacttgtcttgtgctgtgcggagcaggttgcagtggagaagtgcagttgtccggggcgctgcaaggactctattgaggcatttggtggacgccgcaggaacccacagccagagatggacgccaagackcactccttcctctgtctggcaagctctgctgacccctgaggtttttcccatgcttgcagmggtcctacgggcttgctgttggttgtcgcttgtgctcaccttgctgtcaccgggtgttcttc

SEQ ID NO: 708 - DNA, 600 bp, Chicken  19866894084929_1
tgctgtgtccaccaagagcctcagtagagcccttgcagcgcgcaggagtgtcacaacactccactgccacctgatggaaacaagacaacgtaagtagagatcaccttctgataatgaaatacagctctcttacccctttccaaggatcagggcacgtccaacgccgcaacctggggaggtcaggaatgacagcggcacctggtggtggagcgtccagtcctggaaagaaagaagaaaccttcacgtttggtgctgaacaacacgggttagttagaaagagagggcattctaggaaccccragtcacgcacagcactcaccagcagcctgttctgaagcctagctcttcctttggcatcacacttggtcaacgcagagccgtctgcgttttggtcactgaaactccaccgaggcgccaacgggcaacatggaagacaagaagagaaacactccataaccygtagcaaacgctctggaacccaaaaggcmaagaacagagccatgccgactgggagtgacagaaggcacccacagccagcaatgatggggagctctaagccagctggtgcagggacaagatggggtaagtgttggtcaagct

SEQ ID NO: 709 - DNA, 498 bp, Chicken  19866894084929_2
aacgccgcaacctggggaggtcaggaatgacagcggcacctggtggtggagcgtccagtcctggaaagaaagaagaaaccttcacgtttggtgctgaacaacacgggttagttagaaagagagggcattctaggaaccccragtcacgcacagcactcaccagcagcctgttctgaagcctagctcttcctttggcatcacacttggtcaacgcagagccgtctgcgttttggtcactgaaactccaccgaggcgccaacgggcaacatggaagacaagaagagaaacactccataaccygtagcaaacgctctggaacccaaaaggcmaagaacagagccatgccgactgggagtgacagaaggcacccacagccagcaatgatggggagctctaagccagctggtgcagggacaagatggggtaagtgttggtcaagctggagttggactccatcagggcacatttggacttggtgagccctgggagacggcaaag

SEQ ID NO: 710 - DNA, 469 bp, Chicken  19866894084929_3
acagcggcacctggtggtggagcgtccagtcctggaaagaaagaagaaaccttcacgtttggtgctgaacaacacgggttagttagaaagagagggcattctaggaaccccragtcacgcacagcactcaccagcagcctgttctgaagcctagctcttcctttggcatcacacttggtcaacgcagagccgtctgcgttttggtcactgaaactccaccgaggcgccaacgggcaacatggaagacaagaagagaaacactccataaccygtagcaaacgctctggaacccaaaaggcmaagaacagagccatgccgactgggagtgacagaaggcacccacagccagcaatgatggggagctctaagccagctggtgcagggacaagatggggtaagtgttggtcaagctggagttggactccatcagggcacatttggacttggtgagccctgggagacggcaaag

SEQ ID NO: 711 - DNA, 600 bp, Chicken  19866894084935_1
tttgctcaagtgagatggaaaatgaagaggtaggctccaaaacagacttgtggtaagtgttttgtatggcttggggtttctagcatgtcatctgtttttctgtgtaacccatgtggttcagtacctgataggaaggtttcttctttccttctagtattggagacttacccaccacatggtgatgccttccctgacctccttgattgcagtgtggggatgtgccctgatccttggaaaggggtgagtgattccttcatccttactagaaggtaatctctacttaccttttcttgtgtccakcaggtggcactggagagttgtgaccctgctgagcagtgcaaggactctactgaggctcttggtggacacagcgagaacccacacccatagrtggatgccaatatctattccttcctgtctggcaagctctgttgtcccctgaggtcgttcccatgcttgcmgaggtcctatgggcttgttgttggtttacccttgtgctcacttggctttccaagggtgttcctcttacttgacaacacctttcccagtctcyatttccaagcaggagctccccttggcctccgtgtctcgctctggcca

SEQ ID NO: 712 - DNA, 600 bp, Chicken  19866894084935_2
ctgtttttctgtgtaacccatgtggttcagtacctgataggaaggtttcttctttccttctagtattggagacttacccaccacatggtgatgccttccctgacctccttgattgcagtgtggggatgtgccctgatccttggaaaggggtgagtgattccttcatccttactagaaggtaatctctacttaccttttcttgtgtccakcaggtggcactggagagttgtgaccctgctgagcagtgcaaggactctactgaggctcttggtggacacagcgagaacccacacccatagrtggatgccaatatctattccttcctgtctggcaagctctgttgtcccctgaggtcgttcccatgcttgcmgaggtcctatgggcttgttgttggtttacccttgtgctcacttggctttccaagggtgttcctcttacttgacaacacctttcccagtctcyatttccaagcaggagctccccttggcctccgtgtctcgctctggccaggyagatgtggtgcgccaacggtatgcagagtccagaccctgagcagaacaactgaggagagaggctgccctgggtgagacaggagaagtg

SEQ ID NO: 713 - DNA, 600 bp, Chicken  19866894084935_3
gacttacccaccacatggtgatgccttccctgacctccttgattgcagtgtggggatgtgccctgatccttggaaaggggtgagtgattccttcatccttactagaaggtaatctctacttaccttttcttgtgtccakcaggtggcactggagagttgtgaccctgctgagcagtgcaaggactctactgaggctcttggtggacacagcgagaacccacacccatagrtggatgccaatatctattccttcctgtctggcaagctctgttgtcccctgaggtcgttcccatgcttgcmgaggtcctatgggcttgttgttggtttacccttgtgctcacttggctttccaagggtgttcctcttacttgacaacacctttcccagtctcyatttccaagcaggagctccccttggcctccgtgtctcgctctggccaggyagatgtggtgcgccaacggtatgcagagtccagaccctgagcagaacaactgaggagagaggctgccctgggtgagacaggagaagtgccccttgaagcgggggacgccccgctggcgctgcctctcgcatccaccggcagcacgttccttctctctc

SEQ ID NO: 714 - DNA, 600 bp, Chicken  19866894084935_4
tcatccttactagaaggtaatctctacttaccttttcttgtgtccakcaggtggcactggagagttgtgaccctgctgagcagtgcaaggactctactgaggctcttggtggacacagcgagaacccacacccatagrtggatgccaatatctattccttcctgtctggcaagctctgttgtcccctgaggtcgttcccatgcttgcmgaggtcctatgggcttgttgttggtttacccttgtgctcacttggctttccaagggtgttcctcttacttgacaacacctttcccagtctcyatttccaagcaggagctccccttggcctccgtgtctcgctctggccaggyagatgtggtgcgccaacggtatgcagagtccagaccctgagcagaacaactgaggagagaggctgccctgggtgagacaggagaagtgccccttgaagcgggggacgccccgctggcgctgcctctcgcatccaccggcagcacgttccttctctctccttgctgcccggcgctttgccgtctcccagggctcaccaagtccaaatgttccccgatggagtccaactccagcttgaccaacactcacccg

SEQ ID NO: 715 - DNA, 600 bp, Chicken  19866894084935_5
gtggcactggagagttgtgaccctgctgagcagtgcaaggactctactgaggctcttggtggacacagcgagaacccacacccatagrtggatgccaatatctattccttcctgtctggcaagctctgttgtcccctgaggtcgttcccatgcttgcmgaggtcctatgggcttgttgttggtttacccttgtgctcacttggctttccaagggtgttcctcttacttgacaacacctttcccagtctcyatttccaagcaggagctccccttggcctccgtgtctcgctctggccaggyagatgtggtgcgccaacggtatgcagagtccagaccctgagcagaacaactgaggagagaggctgccctgggtgagacaggagaagtgccccttgaagcgggggacgccccgctggcgctgcctctcgcatccaccggcagcacgttccttctctctccttgctgcccggcgctttgccgtctcccagggctcaccaagtccaaatgttccccgatggagtccaactccagcttgaccaacactcacccggtctgtccccgcaccagctggcttagggctccccagcagtgctggctgtc

SEQ ID NO: 716 - DNA, 600 bp, Chicken  19866894084935_6
agagtccagaccctgagcagaacaactgaggagagaggctgccctgggtgagacaggagaagtgccccttgaagcgggggacgccccgctggcgctgcctctcgcatccaccggcagcacgttccttctctctccttgctgcccggcgctttgccgtctcccagggctcaccaagtccaaatgttccccgatggagtccaactccagcttgaccaacactcacccggtctgtccccgcaccagctggcttagggctccccagcagtgctggctgtcgctgccttctgtcgctcccaatcrgcatggctctgttctttgccttttgggttccagagtgtttgctacaggttatggagtgtttctcttctctctcttcttgtcctccatgttgcctgttggcgcctcggtggagtttcagtgacccaaatgcagactgctctgcgttgcccaagcgtgatgccaagagaagaggtaggcaccagaacaggctgctggtgagtgctgtgcatgactcggggttcctagaacgtccactctttcttactaacccgtgttgttcagcaccaaacgtgaaggtttcttcttttcttccaggactgg

SEQ ID NO: 717 - DNA, 600 bp, Chicken  19866894084950_1
aggacaagaagagagagaagagaaacactccataacctgtagcaaacgctctggaacccaaaaagcaaagaacagagccgtgctgactgggagcgacagaaggcaccgacagccagcactgctggggagccctaagccagctggtgcggggacagaccgggtgagtgttggtcaagctggagttggactccatcagggaacatttggacttggtgagccctgggagacggcaaagcgccgggcagcaaggagagagaaggaacgtgctggctgccggtggatgcgagaggcagcgccagyggggcgtcccccgcttcaaggggcacttctcctgtctcacccagggcagcctctctcctcagttgttctgctcagggtctggactctgcataccgttggcgcaccacatctgcctggccagagcgagacatggaggccaaggggacctcctgcttggaaacaggttgggaaaatattataaggcaacaacacccggtgaaagccaagtgaacacaagacacaaccgacaccaagcagataggacctctgcaagcatggaaacgacctcaggggtcagcagagcttgccagacagaggaag

SEQ ID NO: 718 - DNA, 599 bp, Chicken  19866894084952_1
  misc_feature (1)..(113): n is any nucleotide
nnnnnnnnnnnnnnnnnnnnnnnnnnnnnnnnnnnnnnnnnnnnnnnnnnnnnnnnnnnnnnnnnnnnnnnnnnnnnnnnnnnnnnnnnnnnnnnnnnnnnnnnnnnnnnnnngtaatctctacttgtcttgtgctgtgtggaacaggtgcagtggagaagtgcagttgtccggggcgctgcaaggactctattgaggcatttggtggacgcagcaggaacccatagccagagatggacgccaagatgcactccttcctctgtctggcaagctctgctgacccctgaggtcgttcccacrcttgcagaggtcctacgggcttggtgttggttgtcgcttgtgctcaccttgctgtcaccgggtgttcttcctttacccatctttagggctccccagttctgatgggatctccgtgccttctgttgatcccagagtacttcaatttgttcttttattttcaggttctgtaccatttcatgcttttgtgatgtgtgttttrtttatttatttatttttaaaatattcacatacctaccaaaatgtaactgcccagctaatttaatgataacaatattaaagcacattggccttgccctcct

SEQ ID NO: 719 - DNA, 600 bp, Chicken  19866894084952_2
atttggtggacgcagcaggaacccatagccagagatggacgccaagatgcactccttcctctgtctggcaagctctgctgacccctgaggtcgttcccacrcttgcagaggtcctacgggcttggtgttggttgtcgcttgtgctcaccttgctgtcaccgggtgttcttcctttacccatctttagggctccccagttctgatgggatctccgtgccttctgttgatcccagagtacttcaatttgttcttttattttcaggttctgtaccatttcatgcttttgtgatgtgtgttttrtttatttatttatttttaaaatattcacatacctaccaaaatgtaactgcccagctaatttaatgataacaatattaaagcacattggccttgccctcctcaccggggaagcctcgccccctcaccccccaatttgtttggtttatgaataattttaactttttattttctgattttttcctttccttaatattattttctatttctgtttttttctcattctttttcttttttctttttttttccccttttcttttctgactcctattctgtttcctgttattttctatttttttattt

SEQ ID NO: 720 - DNA, 600 bp, Chicken  19866894084956_1
ttctgctcaaccaaacagccagagcaacctccaggcacagacccttccccttcagctgccagcctttaaatgagctcaggtgggctctggctccacccagtcccactccacaggggaactgcttccacctgtgctccctgggctgtccacaccttaaccaggtgctccatcactgcttctggcccacaactaacagttcagacagaatcagaaacattaacagaattagtaacaaaatacaagttggaaaaataattagaattggaaaaaaataggtaaagaattattaagtaaagaagwcatagaattagtaaaggaattggaaaaagaattggaaaagtatgtagaaaagtaaaacgaattagaaagagaaagggacttagaaggagaaaaagaattagggaagtatttagaagaagaatgagacaaagaaaaagaatatgaaaaagaaatagaaagcagataattaaaagaataataaaaaggggctggaaaaaaagggaatgacgtagaaaagttactagaaaataatatcaaacagaatgggagtcagaaaagaaaaaggagaaggaaaaagaatgagaaaaagaatcagaaacc

SEQ ID NO: 721 - DNA, 600 bp, Chicken  19866894084957_1
ggccttctgttcagcgcaaaaagtctactgaggatctaggtggatagaacaggaacgcagagccatagttggatgccaagatgcacgccttcctctgtctggcaagctctgctgacccctgaggtcatttccatgcttgcagaggtcctatctgtttggtgtcggttgtgccttgtgttcacttggctttcacctggggttgttgccttataatatttttcccaccctgtttccaagcaggagctccccttggcctccatgtttcgctctggccaggcagatgtggtgcgccaatggtaygcagagtgtagatcccaagcagaacaactgagagaggctgccctgggtgagacaggagaagtgccccttggagtgggggacgccccgctggcactgcctctcgcatccaccggcagcacgttccttctctctccttggcacccaactctttgctgtctctcaggctcaccaagtccaaatgttccctgatggagtccaactccagcttgaccaacactcaccccttagagctccccagcattgctggctgttggtgccttctstcgctccaagtcagcacggctctgttctttgcctttt

SEQ ID NO: 722 - DNA, 600 bp, Chicken  19866894084957_2
tcgctctggccaggcagatgtggtgcgccaatggtaygcagagtgtagatcccaagcagaacaactgagagaggctgccctgggtgagacaggagaagtgccccttggagtgggggacgccccgctggcactgcctctcgcatccaccggcagcacgttccttctctctccttggcacccaactctttgctgtctctcaggctcaccaagtccaaatgttccctgatggagtccaactccagcttgaccaacactcaccccttagagctccccagcattgctggctgttggtgccttctstcgctccaagtcagcacggctctgttctttgccttttgggttccagagcgtttgctacaggttatggagtgtttctcttctctctcttcttgtcctccatgttgcccgttggcgccttggtagagtttcagtgacccaaatgcagactgctctgcattgaccaattgtgatgccaagagaagaggtaggcaccacaacaggctgctggtgagtgctgtgcatgacttggggttcttagaatgacttgtgttctttgattctaggataggagactctgccgtcagatggcgttgcctgttc

SEQ ID NO: 723 - DNA, 600 bp, Chicken  19866894084962_1
gacagaggaaggagtgcatcttggcgtccatctctggctgtgggttcctgctgcgtccaccaaatgcctcaatagagtccttgcagcaccccggacaactgcacttctccactgcaacctgttccacacagcacaagacaagtagagattaccttctggtcagggtgaaggaatcacttaccccttaaccaatgctgaggtcacatccaactctgcaaactggggagagaagaacaggcaacgccatctgacagcagagtctcctatcctagaatcaaagttaaaaccctcaatagtagyactgaacaacacaggttagggaggaacgcaagtcattctaagaaccccaaggcacgcacagcattcaccagcagcctgttctggtgcctgcctcttctcttggcatcgtgcttggtcaacgcagagcagtctgcatttgggtcactgaaactccaccaaggcaacaacgggctacatggaagacaagaagagagagaagagaaacactccatacctgtagcaaacactctggaacccaaaaggcaaagaactgagccatgctgaytgggagtgacagaaggcaccgacagccagcaatgc

SEQ ID NO: 724 - DNA, 600 bp, Chicken  19866894084962_2
atcctagaatcaaagttaaaaccctcaatagtagyactgaacaacacaggttagggaggaacgcaagtcattctaagaaccccaaggcacgcacagcattcaccagcagcctgttctggtgcctgcctcttctcttggcatcgtgcttggtcaacgcagagcagtctgcatttgggtcactgaaactccaccaaggcaacaacgggctacatggaagacaagaagagagagaagagaaacactccatacctgtagcaaacactctggaacccaaaaggcaaagaactgagccatgctgaytgggagtgacagaaggcaccgacagccagcaatgctggggagcctttagccagctggtgcrgggacagaccgggtgagtgytggtcaagctggagatggactccatcagggaatatttggacttggcgagccctgggagatggcaaagcgccgggcaccaaggagagagaaggaacgtgctgccggtggatgcgagaggcagcgccagcggggcgtcccccgcttcaaggggcacttctcctgtctcacccagggcagcctctctcctcagctgttcttttgctcagggtctggactcca

SEQ ID NO: 725 - DNA, 600 bp, Chicken  19866894084962_3
cgcaagtcattctaagaaccccaaggcacgcacagcattcaccagcagcctgttctggtgcctgcctcttctcttggcatcgtgcttggtcaacgcagagcagtctgcatttgggtcactgaaactccaccaaggcaacaacgggctacatggaagacaagaagagagagaagagaaacactccatacctgtagcaaacactctggaacccaaaaggcaaagaactgagccatgctgaytgggagtgacagaaggcaccgacagccagcaatgctggggagcctttagccagctggtgcrgggacagaccgggtgagtgytggtcaagctggagatggactccatcagggaatatttggacttggcgagccctgggagatggcaaagcgccgggcaccaaggagagagaaggaacgtgctgccggtggatgcgagaggcagcgccagcggggcgtcccccgcttcaaggggcacttctcctgtctcacccagggcagcctctctcctcagctgttcttttgctcagggtctggactccacgtaccgttggcacaccacatctgcctggccagagcgagacacggaggccaaggggacctc

SEQ ID NO: 726 - DNA, 600 bp, Chicken  19866894084962_4
ccaaggcacgcacagcattcaccagcagcctgttctggtgcctgcctcttctcttggcatcgtgcttggtcaacgcagagcagtctgcatttgggtcactgaaactccaccaaggcaacaacgggctacatggaagacaagaagagagagaagagaaacactccatacctgtagcaaacactctggaacccaaaaggcaaagaactgagccatgctgaytgggagtgacagaaggcaccgacagccagcaatgctggggagcctttagccagctggtgcrgggacagaccgggtgagtgytggtcaagctggagatggactccatcagggaatatttggacttggcgagccctgggagatggcaaagcgccgggcaccaaggagagagaaggaacgtgctgccggtggatgcgagaggcagcgccagcggggcgtcccccgcttcaaggggcacttctcctgtctcacccagggcagcctctctcctcagctgttcttttgctcagggtctggactccacgtaccgttggcacaccacatctgcctggccagagcgagacacggaggccaaggggacctcctgcttggaaatagagaatg

SEQ ID NO: 727 - DNA, 579 bp, Chicken  19866894084963_1
attaccttctggtcaggatgaaggaatcacttaccccttaaccaatgctgaggtcacatccaactctgcaaactggggagagaagaacaggcaacgccatctgacagcagagtctcctatcctagaatcaaagttaaaaccctcaatagtagtactgaacaacacaggttagggaggaacgcaagtcattctaagaaccccaaggcacgcacagcattcaccagcagcctgttctggtgcctgcttcttctcttggcatcgtgcttggtcaacgcagagcagtctgcatttgggtcactraaactccaccgaggcaacaacgggctacatggaagacaagaagagagagaagagaaacactccataacctgtagcaaacactctggaacccaaaaggcaaagaactgagccatgctgattgggagcgacagaaggcaccgacagccagcaatgctggggagcctttagccagctggtgaggggacagaccgggtgagtgttggtcaagctggagttggactccatcagggaatatttggacttggcgagccctgggagatggcaaagcgccgggcacca

SEQ ID NO: 728 - DNA, 600 bp, Chicken  19866894084966_1
cagaactgtactgactgggagggacagaaggcactgagatcccatcagaactgaggagccctaagccagctggtgcggggacagaccgggtgagtgttggtcaagctggagttggactccatcagggaacatttggacttggtgagccctgggagacggcaaagcgtcgggtgccaaggagagagaaggaacgtgctgccggtggatgcgagaggcagcgccagcggggcgtcccccgcttcaaggggcacttctcctgtctcacccagggcagcctctctccccatttcttttggttgrattctgaaggctttgatccattgacacaccacatctgcctggccagagcgagacatggaggccaaagggagctcctgcttggaaatggagagtgggaaagggtgtcaagtaagaggaacacccttggaaagccaagtgagcacaagcgaaaaccaacaacaagcccataggacctctgcaagcatkggaatgacctcaggggacaacagagcttgccagacagaggaaggaatagatattggcatccatttacgggtgtgggttctcgctgtgtccaccaagagcctcagtagagtcctt

SEQ ID NO: 729 - DNA, 600 bp, Chicken  19866894084966_2
aggaacgtgctgccggtggatgcgagaggcagcgccagcggggcgtcccccgcttcaaggggcacttctcctgtctcacccagggcagcctctctccccatttcttttggttgrattctgaaggctttgatccattgacacaccacatctgcctggccagagcgagacatggaggccaaagggagctcctgcttggaaatggagagtgggaaagggtgtcaagtaagaggaacacccttggaaagccaagtgagcacaagcgaaaaccaacaacaagcccataggacctctgcaagcatkggaatgacctcaggggacaacagagcttgccagacagaggaaggaatagatattggcatccatttacgggtgtgggttctcgctgtgtccaccaagagcctcagtagagtccttgcactgctcagcagggtcacaactctccagtgccaccttatgaacacaagaaaaggtaagtagagattaccttctagtgaggatgcaggaatcactcacccctttccaaggatcagggcacatcccacactgcaatcaaggaggtcagggaaggcatcaccatgtggtgggtaagtctccaatact

SEQ ID NO: 730 - DNA, 512 bp, Chicken  19866894084971_1
gttcccacgcttgcagaggtcctacgggcttggtgttggttgtcgcttgtgctcaccttgctgtcaccgggtgttcttcctttgcccatcataaggggtcccctgttctgatggggtctctgtgccttctgcttatcccagagaacatgggtttgttctcttatatccaggttcagtatgttttcctgttgttatgtgatgtttgccttagtttttttattttttattttttttccgggctgcttattgatccatcctgggtctgcaataaaccaaatgatttctggtaaggtttgaccwagtgagatggaaaatcaagtggtaaactccaaaacaggcttgcagtgagtgtgtcgtatgacttggggtttctagcttgacatctgtttttctgtgtaacccatgtggttcagtacctgatttgaaggtttcttctttccttctagtattggagacttacccaccacatggtgatgccttccctgacctccttgattgcagtgtgggatgtg

SEQ ID NO: 731 - DNA, 600 bp, Chicken  19866894084990_1
ctacagttaaaaacaacaaaaacaaaacagcaatcatacaaatcagattattagatggttcataaataactttttagaatacccattttatgaatttattgccattataatcaactactacaaaaaaacatgagcaaacttcctctacactggcatgtctaggaatacacacctataaacacaattctgggttgaaatttttatatatcagatagctttgcacaaactgttttccaatattatattaaattgagatgaattgaaaagtgactcactgcaaataagttgtttatagttaayggactccatttttgcattgacagcaccatattagtaaagaattactctaaatatattgtaccttctaataattggaagatatacagaatacctactagtctttgacaggacagaaatggtatcaaatgcacacatggatcacttgcagatatcagaagttacgagataaaagcagcttaacatatactaagcttgtttaaaagtgcatgcagtcctggcacactagtttaccttgttctacacataagactcccctctcgtgtgtgatgtaccacctggtaccttctatggaatacatac

SEQ ID NO: 732 - DNA, 599 bp, Chicken  19866894084993_1
  misc_feature (1)..(27): n is any nucleotide
nnnnnnnnnnnnnnnnnnnnnnnnnnncagtattactccctttcaagaagtatttattagcttttccttctccttatgttgtctttgtctaagccttgcaggtctgatttgagaagacgtaatgtttactgcttttctgcctataggttcttctgttctgaatgattgatgccatacaggaaacatcacagaaatgtggaagatgcatcagagcacatcttgtcattgactaatgattcaacactcaaggaattgacctcctgcaaaatcttcttcacaatgtgttttacaaacattgcwtttacaarcagtaactaattcgattcatcagatcagaatgctctcacagctgagcacagtgccactgataggaggagacaggaaaaaaaaaaagcatagtttaatcgcatggcatttctctcttaagcctgcagaagtccattcttctagcaaggactgttagaatttttggatttaaaataaaactctcagagaagccaacggcagtccatgaaatgcaggcagtttgctttgcacatatctttcaagagggtgtttttctgttagatgaagggaggatttaacagttatgggacaaa

SEQ ID NO: 733 - DNA, 599 bp, Chicken  19866894084993_2
  misc_feature (1)..(19): n is any nucleotide
nnnnnnnnnnnnnnnnnnncagtattactccctttcaagaagtatttattagcttttccttctccttatgttgtctttgtctaagccttgcaggtctgatttgagaagacgtaatgtttactgcttttctgcctataggttcttctgttctgaatgattgatgccatacaggaaacatcacagaaatgtggaagatgcatcagagcacatcttgtcattgactaatgattcaacactcaaggaattgacctcctgcaaaatcttcttcacaatgtgttttacaaacattgcwtttacaarcagtaactaattcgattcatcagatcagaatgctctcacagctgagcacagtgccactgataggaggagacaggaaaaaaaaaaagcatagtttaatcgcatggcatttctctcttaagcctgcagaagtccattcttctagcaaggactgttagaatttttggatttaaaataaaactctcagagaagccaacggcagtccatgaaatgcaggcagtttgctttgcacatatctttcaagagggtgtttttctgttagatgaagggaggatttaacagttatgggacaaatccgtatt

SEQ ID NO: 734 - DNA, 600 bp, Chicken  19866894084998_1
gtgcccatgacagtggcagaggagccagctggtagaagacagtaggccatccaattgtgagatgagaatttggtccctgaccgtcttttgttttaattcaggcatagctgtagacagcagtggctttgtaataaagaagtgacctctcaatagagatctctcgatgaaaaccggatttctatcccatgggaaattctggtattttcgtatttgtttttatctcaaattggaacacatcgttcctaaaaagaatttgtttgcaaatgtcagagcatttcatgttgacattttgagctaacrcgaaagagttttgcttgaatcaggtcatcatttgcttctgcctgaatgggagcwgtagctgtgtgtttyctgctatcccaggaaagcccaccatgggctaaactgattctaccataacgtacccktatttcttccagtagctgagttgcttggaggaatcgcatgtctcctggagcacggtgtrctgactcaggcagatgtagaacaaaacaagaaccgttggttttctggttggaacatctctgattggaacgtttctgggaagcattttttcccttttgggaaatcttgttctgtaca

SEQ ID NO: 735 - DNA, 600 bp, Chicken  19866894084998_2
ttgtgagatgagaatttggtccctgaccgtcttttgttttaattcaggcatagctgtagacagcagtggctttgtaataaagaagtgacctctcaatagagatctctcgatgaaaaccggatttctatcccatgggaaattctggtattttcgtatttgtttttatctcaaattggaacacatcgttcctaaaaagaatttgtttgcaaatgtcagagcatttcatgttgacattttgagctaacrcgaaagagttttgcttgaatcaggtcatcatttgcttctgcctgaatgggagcwgtagctgtgtgtttyctgctatcccaggaaagcccaccatgggctaaactgattctaccataacgtacccktatttcttccagtagctgagttgcttggaggaatcgcatgtctcctggagcacggtgtrctgactcaggcagatgtagaacaaaacaagaaccgttggttttctggttggaacatctctgattggaacgtttctgggaagcattttttcccttttgggaaatcttgttctgtacaaaatgtcattttctgaagggagagggatctgttttcccttctttctaagggaaa

SEQ ID NO: 736 - DNA, 600 bp, Chicken  19866894084998_3
ttggtccctgaccgtcttttgttttaattcaggcatagctgtagacagcagtggctttgtaataaagaagtgacctctcaatagagatctctcgatgaaaaccggatttctatcccatgggaaattctggtattttcgtatttgtttttatctcaaattggaacacatcgttcctaaaaagaatttgtttgcaaatgtcagagcatttcatgttgacattttgagctaacrcgaaagagttttgcttgaatcaggtcatcatttgcttctgcctgaatgggagcwgtagctgtgtgtttyctgctatcccaggaaagcccaccatgggctaaactgattctaccataacgtacccktatttcttccagtagctgagttgcttggaggaatcgcatgtctcctggagcacggtgtrctgactcaggcagatgtagaacaaaacaagaaccgttggttttctggttggaacatctctgattggaacgtttctgggaagcattttttcccttttgggaaatcttgttctgtacaaaatgtcattttctgaagggagagggatctgttttcccttctttctaagggaaaatgttcagtcagtcc

SEQ ID NO: 737 - DNA, 600 bp, Chicken  19866894084998_4
ttgtaataaagaagtgacctctcaatagagatctctcgatgaaaaccggatttctatcccatgggaaattctggtattttcgtatttgtttttatctcaaattggaacacatcgttcctaaaaagaatttgtttgcaaatgtcagagcatttcatgttgacattttgagctaacrcgaaagagttttgcttgaatcaggtcatcatttgcttctgcctgaatgggagcwgtagctgtgtgtttyctgctatcccaggaaagcccaccatgggctaaactgattctaccataacgtacccktatttcttccagtagctgagttgcttggaggaatcgcatgtctcctggagcacggtgtrctgactcaggcagatgtagaacaaaacaagaaccgttggttttctggttggaacatctctgattggaacgtttctgggaagcattttttcccttttgggaaatcttgttctgtacaaaatgtcattttctgaagggagagggatctgttttcccttctttctaagggaaaatgttcagtcagtccaacatgcaacagatatgctcacgtgtgtataygaaagtgtttcttttctactttaa

SEQ ID NO: 738 - DNA, 600 bp, Chicken  19866894084998_5
catgggaaattctggtattttcgtatttgtttttatctcaaattggaacacatcgttcctaaaaagaatttgtttgcaaatgtcagagcatttcatgttgacattttgagctaacrcgaaagagttttgcttgaatcaggtcatcatttgcttctgcctgaatgggagcwgtagctgtgtgtttyctgctatcccaggaaagcccaccatgggctaaactgattctaccataacgtacccktatttcttccagtagctgagttgcttggaggaatcgcatgtctcctggagcacggtgtrctgactcaggcagatgtagaacaaaacaagaaccgttggttttctggttggaacatctctgattggaacgtttctgggaagcattttttcccttttgggaaatcttgttctgtacaaaatgtcattttctgaagggagagggatctgttttcccttctttctaagggaaaatgttcagtcagtccaacatgcaacagatatgctcacgtgtgtataygaaagtgtttcttttctactttaacaaacgtagcagccgtgttctgttctcatttcmcacattccmcacatctctcagacttc

SEQ ID NO: 739 - DNA, 600 bp, Chicken  19866894084998_6
actgattctaccataacgtacccktatttcttccagtagctgagttgcttggaggaatcgcatgtctcctggagcacggtgtrctgactcaggcagatgtagaacaaaacaagaaccgttggttttctggttggaacatctctgattggaacgtttctgggaagcattttttcccttttgggaaatcttgttctgtacaaaatgtcattttctgaagggagagggatctgttttcccttctttctaagggaaaatgttcagtcagtccaacatgcaacagatatgctcacgtgtgtataygaaagtgtttcttttctactttaacaaacgtagcagccgtgttctgttctcatttcmcacattccmcacatctctcagacttcttctcccattagtttcagtggagctaatccagtcacagcaacagagaaccaaatttggcccagataagagatttattgtttttaacaacaacagagagacggatctacagctggtacgaacaaaggaaatcagcagaatttgcacgacttacacctgtgaaggatcagccccagatttattaatagccaactacctgtagtgcttacaaatgcattt

SEQ ID NO: 740 - DNA, 600 bp, Chicken  19866894084998_7
tcgcatgtctcctggagcacggtgtrctgactcaggcagatgtagaacaaaacaagaaccgttggttttctggttggaacatctctgattggaacgtttctgggaagcattttttcccttttgggaaatcttgttctgtacaaaatgtcattttctgaagggagagggatctgttttcccttctttctaagggaaaatgttcagtcagtccaacatgcaacagatatgctcacgtgtgtataygaaagtgtttcttttctactttaacaaacgtagcagccgtgttctgttctcatttcmcacattccmcacatctctcagacttcttctcccattagtttcagtggagctaatccagtcacagcaacagagaaccaaatttggcccagataagagatttattgtttttaacaacaacagagagacggatctacagctggtacgaacaaaggaaatcagcagaatttgcacgacttacacctgtgaaggatcagccccagatttattaatagccaactacctgtagtgcttacaaatgcatttacatcccatttccagtgctactttggccacatttgcagccttgcccactcagtctgg

SEQ ID NO: 741 - DNA, 600 bp, Chicken  19866894084998_8
tcctggagcacggtgtrctgactcaggcagatgtagaacaaaacaagaaccgttggttttctggttggaacatctctgattggaacgtttctgggaagcattttttcccttttgggaaatcttgttctgtacaaaatgtcattttctgaagggagagggatctgttttcccttctttctaagggaaaatgttcagtcagtccaacatgcaacagatatgctcacgtgtgtataygaaagtgtttcttttctactttaacaaacgtagcagccgtgttctgttctcatttcmcacattccmcacatctctcagacttcttctcccattagtttcagtggagctaatccagtcacagcaacagagaaccaaatttggcccagataagagatttattgtttttaacaacaacagagagacggatctacagctggtacgaacaaaggaaatcagcagaatttgcacgacttacacctgtgaaggatcagccccagatttattaatagccaactacctgtagtgcttacaaatgcatttacatcccatttccagtgctactttggccacatttgcagccttgcccactcagtctggcagggaggg

SEQ ID NO: 742 - DNA, 541 bp, Chicken  19866894085003_1
aggatgcatttcactatgaggagaaattcctcatgacatttcatttgtacaataaagtatgaaatctaattgtaatctctccctcaggtgggtttcttacaagcttctttcattcattcatcacaaaatctacaaggaactttctgccagtcatccattgtgggagcacataaacacatagaaacacagaataactgaatcatggaatccttagacttggaagggacctctgaaggcgcctcatttagtccaactctcctgcagggaacagagacaccacaattatgattttcttaaagwtttttaatgaaaaaaataagctgattattttgaagtggactgatgctttctcccagctaacccgagttgagactcttggtgcaactcctggtttatttaacagagcaattgagaattctaggcaaagaatatcataaatactcaaacagctatgttatcactctgcacttttattgatgaaagtaaggcatttattgtctcttaccacaggtgatttcaagcagcagaattctcttgcttg

SEQ ID NO: 743 - DNA, 600 bp, Chicken  19866894085006_1
ggctgcctgcagtatgaattctgacatttcagtgggcagtggtgggaggcagacaacaacaacctatccaaacctactgcttaaaggagagaaaaccacattgtgacaaacatcagggaagtggtccttcaaaatgagccagcagcgcaatgggagatgccactcccacagctcctccagcttcccacttttctctatacatggagcatgactgttgcatgtagccataacagtattctcatccttctagtgaaataagcctctcatgcttattcggcatgtgcctataaccctagcacygaactgtgttccgtctccttgctgctaagaaggaagcctcccctccgtgccaaggaaaacgtgtccctccagcagtgactgtttactatggctttcctggattcaccaatgtggtagaataccaataccgatatattcactgggatgttgccmctggcatggggagacgcaggtaatccacctgatttccccacacttctagaaagatgagcagcagtacgcagaaaggagtttgatctctcctatggctctcattttaacattcatggccaccccagtgcctgtagacactagttcata

SEQ ID NO: 744 - DNA, 600 bp, Chicken  19866894085006_2
gagatgccactcccacagctcctccagcttcccacttttctctatacatggagcatgactgttgcatgtagccataacagtattctcatccttctagtgaaataagcctctcatgcttattcggcatgtgcctataaccctagcacygaactgtgttccgtctccttgctgctaagaaggaagcctcccctccgtgccaaggaaaacgtgtccctccagcagtgactgtttactatggctttcctggattcaccaatgtggtagaataccaataccgatatattcactgggatgttgccmctggcatggggagacgcaggtaatccacctgatttccccacacttctagaaagatgagcagcagtacgcagaaaggagtttgatctctcctatggctctcattttaacattcatggccaccccagtgcctgtagacactagttcataaaagttataaagctgtcctggatattacagaggtatgaagctctaaagttgttttgatggactcctcattacagataccctaaaagagacaggtgtactgaggtcctgtgaattcacatgagctatctttaattttacaagttcatattgact

SEQ ID NO: 745 - DNA, 600 bp, Chicken  19866894085006_3
ggatattacagaggtatgaagctctaaagttgttttgatggactcctcattacagataccctaaaagagacaggtgtactgaggtcctgtgaattcacatgagctatctttaattttacaagttcatattgactttattccctgtaaatgacttacaaacatgggttatatccatagccaataggaaattattcctgtaggaaattgcatcagccacattcctatgtcctctgccttcccagcctcaatagatcataacctaggaagatcatggaatcccagagaatcccagcttggaasagatccacaaggagcacagatccttggatcatctctcaactttgatcaaggatcaactcttggcctcttggctccacacaggactacccaaaattcaaatgcaattgtaatggaaacagataaaatgtttaatcttccactggaaaatagggggcattggtttatgtttaatcaacatagaggtagaattctttgatcaagtactgtttatactaaagcattggatgtcctggccactgatgttatctgattaatcaagtaatactgctcttcatggaaaggataaagggaagttgacaa

SEQ ID NO: 746 - DNA, 600 bp, Chicken  19866894085009_1
ttctgcgacccactggagccagctcagctcaggccagttgctttccccacaaccaacggcagcagcccgcggccccgagcgccggccgagcagggcaggggcaccgtgccaggaccaaaccccttcccacctgacacaggtacgtgctgccatgggcacctgctctgctcagccagctgtgacagcagaaaggggatgcagtgggaaagctgtcccttggggggcttttttgggccaagtctccacccattacaaacggggaaggccagggggaagtcttgagaggtgatggcctcgtgkaggactagggggggattcaggttgggtattaggagacgtttcttctcttatagcgtggtgatgcaatgccacaggctgcccagggaggtggtggggtcaccatccctggaggtgttccacaaccatggggatgtggcactgagggatgtgggcagtgggcatggtggggtgggttgggcttgggcttggggatctgagaggtcttgtccaacctgaatgcttctgtgattctgtgttcatgcttgtgggtgctgaagaggtgcagggtggcagaactgggcttaaatatgcctcctgtcc

SEQ ID NO: 747 - DNA, 600 bp, Chicken  19866894085011_1
cttgtgggaagacccgactcctccttgacagccagcacttcgaggcttattgtgaaaactaagagaataatgtgagggcagaggattgcaaaccgagcatggcattaggaagaattcactggaccagtttattaccttcactataaagtgatatgcaattttactgaaggtatttactgaacttcacataaaacacattacacagaccaattatctaacatcacatctaaattagcctctttgaaagttctgattttattaaagccgcagctcacagcatatttatttgtactgcccttyccccccccccctcagataagagtagaaagcaagctgtttgcattcagccccattacataactgcccaaaacgtcattagcaagataggtgcttatagaggccattgcattcataacacaaaataatctgctctcagggttggtcaccctatagcgcagaaagagttattgctattctgcttcatttgctaaggaggactcttctgcttggctaaaccctgaacggactccatttaactgtcccggcatttcttatctcatccaaccatgtccaagggattcataatcccccacagcaaga

SEQ ID NO: 748 - DNA, 599 bp, Chicken  19866894085012_1
  misc_feature (1)..(4): n is any nucleotide
nnnnagtgttgttttgtatttcatttctttttcaagaggagtttcttgtattttccacttctaaatgcttgtatgacaaatagatgctctcttgccaaaaatctccaggtgtttagtgatggacatcaggaaatggatttgccagactaagcaataaactccttgggaactcacttgttctatcactaatcagcactaaaaccaatcatcatttatactgagagacttttaccagaatattaagcttttaaggctgtttaagaaacttttaaaggaagcttttttcttcaagagaatagmccttttattaaaatttcacctataatcttaggtgcatcactgaagaaatatagyatattaaatacacttcactctcatatttcttttcctagcacttctgtttctgctctccgtgtgcaagtattatatcttcttcttgtaagattttggcatatattaattctawaatagtgaataattatgaaaaggcggcaacactctttaccactcaagtaatttatcataccccacatatgtatccatactttaaaactgccaagcagatcaaagcaatattctttgcaacaatagactatact

SEQ ID NO: 749 - DNA, 600 bp, Chicken  19866894085012_2
ccacttctaaatgcttgtatgacaaatagatgctctcttgccaaaaatctccaggtgtttagtgatggacatcaggaaatggatttgccagactaagcaataaactccttgggaactcacttgttctatcactaatcagcactaaaaccaatcatcatttatactgagagacttttaccagaatattaagcttttaaggctgtttaagaaacttttaaaggaagcttttttcttcaagagaatagmccttttattaaaatttcacctataatcttaggtgcatcactgaagaaatatagyatattaaatacacttcactctcatatttcttttcctagcacttctgtttctgctctccgtgtgcaagtattatatcttcttcttgtaagattttggcatatattaattctawaatagtgaataattatgaaaaggcggcaacactctttaccactcaagtaatttatcataccccacatatgtatccatactttaaaactgccaagcagatcaaagcaatattctttgcaacaatagactatactctatgaagaagtgagtataataggtataccgtacatcaaagatgaatttataaga

SEQ ID NO: 750 - DNA, 600 bp, Chicken  19866894085012_3
gaactcacttgttctatcactaatcagcactaaaaccaatcatcatttatactgagagacttttaccagaatattaagcttttaaggctgtttaagaaacttttaaaggaagcttttttcttcaagagaatagmccttttattaaaatttcacctataatcttaggtgcatcactgaagaaatatagyatattaaatacacttcactctcatatttcttttcctagcacttctgtttctgctctccgtgtgcaagtattatatcttcttcttgtaagattttggcatatattaattctawaatagtgaataattatgaaaaggcggcaacactctttaccactcaagtaatttatcataccccacatatgtatccatactttaaaactgccaagcagatcaaagcaatattctttgcaacaatagactatactctatgaagaagtgagtataataggtataccgtacatcaaagatgaatttataagagagtataaaattagggcttactgtaagtaaaaacactgcactggagacgtggcatgaaattcttcacagaatattaaagcacttaagaagaagatttacacataaatcatca

SEQ ID NO: 751 - DNA, 599 bp, Chicken  19866894085013_1
  misc_feature (1)..(34): n is any nucleotide
nnnnnnnnnnnnnnnnnnnnnnnnnnnnnnnnnntagaaacgtaaaaaaaatattcacagcaagcatggttttatcagaaagagggtatgaacagtctcactgaggtaaacacttgttgtagagattactgcctgtctcaccagttccctagtgaccaccctgcactcacaattagggtaagcccctctgtaactgcatgaggtcatgtttttctttcaagcagcagtatattaccatgcttgttatcactcctctccacagattctctcaaagattagatcatctccagggcatccttkgctattctgaaattttcagtatcattctcacaatagtagaaagaaaaaaaaaaaaagacaaaaaaaattagaaatcagcatttagggagaaacaaagatacctatgtactgagggggaaaaaaaagaatgaaagaagcagatcatcctagaactgccaattttttgtatcctttgaggattagatccaagcttataatttcagttcaattatctaaatagaaatgctctaattgcactaggattgtgttttccctggagtgttatttctttcaagtatcctgctgtttatttatatgca

SEQ ID NO: 752 - DNA, 600 bp, Chicken  19866894085016_1
ggaaactcaaagcaagagatgtgagtaaaacacagctcacagtgcaggtggtgactgaagtgaccactgtgttcaagtttgcggtgagttagtttgggatgtagtcttgctgaacactgatcactctactgaaactaggactatcacagcttgtagaaaattgcaaatactgacatttttctatatgaatgtatcaactatcagtacctgacagagtaatttctcaccacagtctcctggatagagtagatgattcaatatcagcatcagtgagctgtaaatgctagggtagactattawaactagtggaaaaagtctgatattttcacctagtattcatgttctttctatacctcactatctctatttggcctagtcaatttttccatggtcttatctgtatgaacttaaatttcataaaattgtaatagctgaatcattcatgtgtttgtaagaaatctaagtcaaatatactcacagcagtaatgcttgagaaaaatgcatgcaatttgtttaagggagctgtactttccatcttcactccattcctcatttacctggtacttgttcagaagtagcatgtctgttttgaaatactat

SEQ ID NO: 753 - DNA, 450 bp, Chicken  19866894085026_1
tccggggcctcacctgcagcgccagccctccctgcaacaccccagctacaagtagcacctctctctgtcaccaggtccttcctagaaacagccagctaggttgtaggcacagccccatgcctgcaaccacggacagatgtctcttttttttttgtttaggtagggctgaaatgctctaagacgacattattccccccccctcccgctttcttctgccttgggcacaaagcaattaacagaaatgatcactaaaccactctgggaatagggggaagaagaagagggaagcacagccagccygcttggctcgggccgctcgtttaaaacaatgcaagtgagtgtagctggttctgctggcagcacccacaggaccactctgccggggagcagcaggcactcagcagggaccccgagcccagcagggaccccgagcccagctgctgtttgcag

SEQ ID NO: 754 - DNA, 600 bp, Chicken  19866894085030_1
gtacgttaacggttgttgactttccttttttggtgtgtcccaaataaattaatataacatacttttgggcttttgtttcttctttctaaagggggaggaaagaggaaactgaagctgaaataaatctctgctacactctccctaccaggctcttgcaggagcagctgcaaagcatgcaggtggacctgctttcatctggactgcacagggcagcagtaggaaagcttctagagataggaggagagtctagaagccccacgtggagcctgttttccccaaagtgctggagccctgcagcarcagaaggtaaggggagagggctgaaagttttgcacctggtgccagtgtttcacttcagctggctgtgtgcttcaggcactgagagatcagtatcagagagcctctccttctgggcagagatctcatggtcttaccctctgcatcggttcccctttctgtgtgctctctcctgactgtgattcagggacatgttgaggggattctaagagatgagcacagggcaggcggtgtctgaaagacacgcggggggaatgctttgcaggacttgggtagaaaggaaatggggaaggaagaaatggt

SEQ ID NO: 755 - DNA, 600 bp, Chicken  19866894085033_1
ggagggatctgagaggaaatgtgaacagtatttccatgattgtacagaaattatatgctgtctgggttgtaccaataattgctccagtttggagaatttgaccatacacagaaaagcacagaactgattccagttgaactaaatttgaatcctgtgatttccctttgcattatctaacataggaaaaagatacatttggcataagtttcatttgcaacccccatttcagaaaaccctgtgttcacctgtgcacacccctcaagtttgtgtatgcaagctctagggaccacaggtctgctmtctcaattttgtacagatcactttctggtcaatacgcaataagcacaacctcaaagtcaatgaggggctaaacctttcatcccctatctatgcctgtgacagggctctttaagggggaaaaagacaaaaaagctcataagttagtccctgcaaagcagccaaatatgtataaactgtcaatgtcaagtgaggagcaggaaagagaagaacagtgattgaggaactaactagagaatagacaaaaactctttctgttttcctttccctacttagatcctcccatctaactcagaagggtac

SEQ ID NO: 756 - DNA, 600 bp, Chicken  19866894085033_2
tcctttgcaggaagattcctcaaggagccctcctgacctctttccaggtaatatcctcctcggatgaaccaaagcccagagctcccttaaggaagtatttctcacaatattctttctcagaagctaaatggaagtacagaagacaggcccctctttacatcttctactcctgcaaattaattgctacctacagcatgttcagcatgtacagcatgcatcactgattccccattccattaagttcagtttagatgggcaatgcaaattaattgaggaatgcagcataaccctaagcttcayggtgaaatcctctgtaaatcaagacccagcttaactaacatcctagggaccaacagaaatggcatgtagatacccagctaacatggaccaggctcatcacttccttaaaagaagcttacgtgatgacagtgtaatttagtttaattgatgggacacctggragacagaggagcgcttgtgctcaatacatcctccccaccaccatgctcaatggcacgcagactcagagcaaagtgaagggccagaccacaagctacagaagagaaattagaactgcagacaggcatagaagctcacaga

SEQ ID NO: 757 - DNA, 600 bp, Chicken  19866894085033_3
ttctactcctgcaaattaattgctacctacagcatgttcagcatgtacagcatgcatcactgattccccattccattaagttcagtttagatgggcaatgcaaattaattgaggaatgcagcataaccctaagcttcayggtgaaatcctctgtaaatcaagacccagcttaactaacatcctagggaccaacagaaatggcatgtagatacccagctaacatggaccaggctcatcacttccttaaaagaagcttacgtgatgacagtgtaatttagtttaattgatgggacacctggragacagaggagcgcttgtgctcaatacatcctccccaccaccatgctcaatggcacgcagactcagagcaaagtgaagggccagaccacaagctacagaagagaaattagaactgcagacaggcatagaagctcacagatctggtgaaacaacctggcccatcacactcgcaacatcacccctcccaaggtggtggactggtggcatgtttatgaaaaagactttgaaggacagcagtgaagcaactttctgtgtatttacagattgctatgaccacgcatatttggataaaacaagaga

SEQ ID NO: 758 - DNA, 366 bp, Chicken  19866894085033_4
ctggtgaaacaacctggcccatcacactcgcaacatcacccctcccaaggtggtggactggtggcatgtttatgaaaaagactttgaaggacagcagtgaagcaactttctgtgtatttacagattgctatgaccacgcatatttggataaaacaagagatcaatcataaggcctggcatcacacactggatggagataccacagtagtgactaacagaggggtgaagcagagccttcagacttcaagcaagcagatagtgaagagatgctgagggaagagggctgtactcaaaaccacrgtctaagagtgtaatcttggcagccacactgtgggggagctgcacaaggaaagactgcatttatca

SEQ ID NO: 759 - DNA, 600 bp, Chicken  19866894085037_1
gatgggagctgtgctgtgggcacggaatgcggccgcgtggcgtgggtggcttttttctgccaactgactcacagcagcctgctccagagcacgtcaaatctatctcctggggctggggatggttttggcttcatgacttttaatgggagctcttattgttcttaatgagttacattctttcctcctcttttcttgtgttctggacgcaggagtaggagggctctttcctgcaggtcacaaagttatcctggggacacagcatccacagtgagatcactgtagcaatcctgtgccctgtckccagtacagccagcactctgttcagcatagtagatgaacagagtcctaatagaccgaaaacaaagcaaatcaaacgctgtagcgggcacttacagaataatttgccacttcagcagtagctgtgtgggccagtaggttacctgctcccctaaataagggttcaccccagcctgaaaacatactaacttatatcctttatcagactgttttttgttggagtagatgcagatattctctttttttcctcatgaaatattttgttggaaatatttcctttctttaggcttaaatggatgcctt

SEQ ID NO: 760 - DNA, 600 bp, Chicken  19866894085038_1
cttcggccccggtggtccaattggccctggtggtcctgcgtgcccctgcggagagcagacagtgtgtgaggagacaggaaggagctgtctgagccgaagtccgtcttacatctgctacagctaagaactgctaggagatgaaggatgaaaataaagctctcacctggtaacccttcaagccaggctccccctgagcacccatccttcctggagcaccctggagaagcaagcaaaggaagcaccatgagcagcctgcaggcgttacccacaggtatgggatacactgggtgtgaattctayatctgcccttttggacatctttatatccagattagcattgtgctagggagtccaccaatgagaccattgccatgcatgacctaatcctgaactacagggaggaaaccttttggtatgggttctgagggcaggaagggagttttctgggttgtgatgagggcattgcaaaagctctgtgttgcatctctatcaatctgcacaaaayggtttaggccagatcatcagattaaaatgaagtgcaacttttccagagaaatccatttagtgtggaagaaaaccctttcctcaagacaggctgca

SEQ ID NO: 761 - DNA, 558 bp, Chicken  19866894085038_2
tcctggagcaccctggagaagcaagcaaaggaagcaccatgagcagcctgcaggcgttacccacaggtatgggatacactgggtgtgaattctayatctgcccttttggacatctttatatccagattagcattgtgctagggagtccaccaatgagaccattgccatgcatgacctaatcctgaactacagggaggaaaccttttggtatgggttctgagggcaggaagggagttttctgggttgtgatgagggcattgcaaaagctctgtgttgcatctctatcaatctgcacaaaayggtttaggccagatcatcagattaaaatgaagtgcaacttttccagagaaatccatttagtgtggaagaaaaccctttcctcaagacaggctgcagagatgtgctcagtccaacgcactactgctcagacactgctctacttgctgtgcaataatccatggagacattgccaatgagtacaaagggaggacatatggggaggccataatttctgatgcaggaaaacactatcagcagaacccttattccatcattcat

SEQ ID NO: 762 - DNA, 599 bp, Chicken  19866894085045_1
  misc_feature (1)..(20): n is any nucleotide
nnnnnnnnnnnnnnnnnnnnatttagagtttcccacatcaagctgctggtttctttccttggctggttttaatgtatgtgcatatgttgagcagatacagagttcctcttctctattctaaacagttgctttaatgccatgtccccaacaccttcatcctctcttctggacctcaatcaaaacaaagtatttttagttttgcattaaaatgagaacaatacacggaggaagggattggctccacagctcagcagaatttgctctcctaactagacagccccagttacagataaccctaaygcagttatttctctgagcacacgagcaagttgtagacagcactgagcaggtttcactgacatagatgtgtacagaggggaatgtgagtggcaatgtgtgctccttgcacttaacgcatgtgctgcgctgcaccatacccagcacgcagccttaaccccccagggtctgtgtttaactgagcagcccaggggctctgttaaagcccaactgcagtgtggctgtgctttccaacctctcggagagaggaatatctgaacgtaggatttaacattaatctcrgcaccagatggtgatacacc

SEQ ID NO: 763 - DNA, 600 bp, Chicken  19866894085045_2
ccagttacagataaccctaaygcagttatttctctgagcacacgagcaagttgtagacagcactgagcaggtttcactgacatagatgtgtacagaggggaatgtgagtggcaatgtgtgctccttgcacttaacgcatgtgctgcgctgcaccatacccagcacgcagccttaaccccccagggtctgtgtttaactgagcagcccaggggctctgttaaagcccaactgcagtgtggctgtgctttccaacctctcggagagaggaatatctgaacgtaggatttaacattaatctcrgcaccagatggtgatacaccagatattctttttaaggtgaacatgtgatctactgtacagcaaaccagaggggtctgcagtcacatgacgaaacgtataataagtctgatagagctttgatgagacaactgacctggttaccatctgtagcaacaagaagcaagcttgacatttttggaacattctccccagaagctgaattcttccacctctgtggcacagcaatcctgctgagcaaaccacaccgagaaacagaaggaagcaaaagatacgctgctcgaagcatgttgttaagggtac

SEQ ID NO: 764 - DNA, 600 bp, Chicken  19866894085049_1
aggaatgctagccagggccccagcttgccatctttcaaggtgtgttgtgctgctctgcttcgggcagcccaggagagcagcacggttgcaccccaggctcttgtacctaatggtaatttattaccagctttgtatttaacattcctttttttgaagtgtaaacttagagccagcagatagatgtactattagattaatattggtaagagtcaaatgcactcgttgcttttaagtgtacaaaatggtatttcatcagctgtacggctcattggaggccaaaaaggaatattaatcaagtamattatttgacaaatatgatgagattaaacaaaygacatttgctaagtgctggtcagctgctctgccctgtcccattcctctttctctcattgtctttctagttttcattctactttttcatggtttctcttttctcattttccatgagccattcttagaatctatttcagttattttttccccttcccctttttcttttctccctctactgttatctctcagtatatcacggcctttctttcattctttcctctgccttatttttyagcctctctttttgagtctaaatgagccgttttc

SEQ ID NO: 765 - DNA, 587 bp, Chicken  19866894085049_2
ttcaaggtgtgttgtgctgctctgcttcgggcagcccaggagagcagcacggttgcaccccaggctcttgtacctaatggtaatttattaccagctttgtatttaacattcctttttttgaagtgtaaacttagagccagcagatagatgtactattagattaatattggtaagagtcaaatgcactcgttgcttttaagtgtacaaaatggtatttcatcagctgtacggctcattggaggccaaaaaggaatattaatcaagtamattatttgacaaatatgatgagattaaacaaaygacatttgctaagtgctggtcagctgctctgccctgtcccattcctctttctctcattgtctttctagttttcattctactttttcatggtttctcttttctcattttccatgagccattcttagaatctatttcagttattttttccccttcccctttttcttttctccctctactgttatctctcagtatatcacggcctttctttcattctttcctctgccttatttttyagcctctctttttgagtctaaatgagccgttttccccttttactccaccttggg

SEQ ID NO: 766 - DNA, 354 bp, Chicken  19866894085049_3
cattggaggccaaaaaggaatattaatcaagtamattatttgacaaatatgatgagattaaacaaaygacatttgctaagtgctggtcagctgctctgccctgtcccattcctctttctctcattgtctttctagttttcattctactttttcatggtttctcttttctcattttccatgagccattcttagaatctatttcagttattttttccccttcccctttttcttttctccctctactgttatctctcagtatatcacggcctttctttcattctttcctctgccttatttttyagcctctctttttgagtctaaatgagccgttttccccttttactccaccttggg

SEQ ID NO: 767 - DNA, 599 bp, Chicken  19866894085055_1
  misc_feature (1)..(43): n is any nucleotide
nnnnnnnnnnnnnnnnnnnnnnnnnnnnnnnnnnnnnnnnnnntctttgactccgggaccttgtttgtggcctgatctgtccagtcaccagaaacactgggtctgactattccataaggtgttcacaaagatgaatgtggcctatgatgcagcaatgacaaacagttttgtagttgagtcctaagcctaagctcactgctttcagtgtaggtatctagctacagagaatcttcctgtgtgcctcatcagcattttcttatgcttgtttgcatgcacactggctcttccttttcccacacytttcagggacaagcaaagccatcagctttatatctcctccatgaacttttgaatgccctcctcctacacttcatcatgttccttgcctgcaggcacatgcaggcatctaactcctttggttctctagtggtagaggcagtgccagaactttaggttttcttccttgtctcagccctgcatgaggtgcttgcatcctctcccctttccccagtgaccagtggtgtggggccatgacctgatccagctgggcaggttctgcaggccagtgcctgggttgrgrcttsctggtggctctgggc

SEQ ID NO: 768 - DNA, 565 bp, Chicken  19866894085055_2
tggctcttccttttcccacacytttcagggacaagcaaagccatcagctttatatctcctccatgaacttttgaatgccctcctcctacacttcatcatgttccttgcctgcaggcacatgcaggcatctaactcctttggttctctagtggtagaggcagtgccagaactttaggttttcttccttgtctcagccctgcatgaggtgcttgcatcctctcccctttccccagtgaccagtggtgtggggccatgacctgatccagctgggcaggttctgcaggccagtgcctgggttgrgrcttsctggtggctctgggcacatcaggtgtcatccttaagtcacagccactgtcccagctgctaccttagaccccagaagtggagccttgtaatggctggctgatcttggctgacttggctgcaggaggatgcccagctctgtaggcccctttgtcatctaagccaggatgtctgggaattttttttgctggggaccccatagtgcctcctacacaggaggacacagcagagagctgtggcactgcatagccctggcataaag

SEQ ID NO: 769 - DNA, 563 bp, Chicken  19866894085055_3
gctcttccttttcccacacytttcagggacaagcaaagccatcagctttatatctcctccatgaacttttgaatgccctcctcctacacttcatcatgttccttgcctgcaggcacatgcaggcatctaactcctttggttctctagtggtagaggcagtgccagaactttaggttttcttccttgtctcagccctgcatgaggtgcttgcatcctctcccctttccccagtgaccagtggtgtggggccatgacctgatccagctgggcaggttctgcaggccagtgcctgggttgrgrcttsctggtggctctgggcacatcaggtgtcatccttaagtcacagccactgtcccagctgctaccttagaccccagaagtggagccttgtaatggctggctgatcttggctgacttggctgcaggaggatgcccagctctgtaggcccctttgtcatctaagccaggatgtctgggaattttttttgctggggaccccatagtgcctcctacacaggaggacacagcagagagctgtggcactgcatagccctggcataaag

SEQ ID NO: 770 - DNA, 559 bp, Chicken  19866894085055_4
ttccttttcccacacytttcagggacaagcaaagccatcagctttatatctcctccatgaacttttgaatgccctcctcctacacttcatcatgttccttgcctgcaggcacatgcaggcatctaactcctttggttctctagtggtagaggcagtgccagaactttaggttttcttccttgtctcagccctgcatgaggtgcttgcatcctctcccctttccccagtgaccagtggtgtggggccatgacctgatccagctgggcaggttctgcaggccagtgcctgggttgrgrcttsctggtggctctgggcacatcaggtgtcatccttaagtcacagccactgtcccagctgctaccttagaccccagaagtggagccttgtaatggctggctgatcttggctgacttggctgcaggaggatgcccagctctgtaggcccctttgtcatctaagccaggatgtctgggaattttttttgctggggaccccatagtgcctcctacacaggaggacacagcagagagctgtggcactgcatagccctggcataaag

SEQ ID NO: 771 - DNA, 600 bp, Chicken  19866894085061_1
ggtccttgtttccagtttaaaaaaacagttcgtggctttccaagcatgcaacatgcagtacacctgtgttcatagaatgccagaatcattaaggttgggatagaccatcatctagtccaaccatccgcctaccaccaatactacccactaaccatgtccctaagtacaacatccactctttccttaaacacctccaggggcagtgactccactacttcccctggcagccttttccagtgcatcaccactcttcctgagatgaaaatctccctaatatccaacctgaaatgttgtgggaarttgaacagattgaaggccccttccctgacaaatgtgctttatggtcastcctgggtcctgaagccaaaaggaagcacagctgaagcatgactgttgggttcatgcaacaccctaccgtgtggccagcctcctccaagagctgctttgtctcccgaacagcacgtctcattgcagggcttggcatggtgaagaaatctgtttcataatagcctatgcggagggggttgtgtgctggaatacacctgtagaacaaggaaaatctctgcctgaaaractgtcagaagccaacagcacacacac

SEQ ID NO: 772 - DNA, 600 bp, Chicken  19866894085061_2
caacatgcagtacacctgtgttcatagaatgccagaatcattaaggttgggatagaccatcatctagtccaaccatccgcctaccaccaatactacccactaaccatgtccctaagtacaacatccactctttccttaaacacctccaggggcagtgactccactacttcccctggcagccttttccagtgcatcaccactcttcctgagatgaaaatctccctaatatccaacctgaaatgttgtgggaarttgaacagattgaaggccccttccctgacaaatgtgctttatggtcastcctgggtcctgaagccaaaaggaagcacagctgaagcatgactgttgggttcatgcaacaccctaccgtgtggccagcctcctccaagagctgctttgtctcccgaacagcacgtctcattgcagggcttggcatggtgaagaaatctgtttcataatagcctatgcggagggggttgtgtgctggaatacacctgtagaacaaggaaaatctctgcctgaaaractgtcagaagccaacagcacacacacgacgcagggcagggcacttatctcatcatcataccaaaccacattaca

SEQ ID NO: 773 - DNA, 600 bp, Chicken  19866894085061_3
atatccaacctgaaatgttgtgggaarttgaacagattgaaggccccttccctgacaaatgtgctttatggtcastcctgggtcctgaagccaaaaggaagcacagctgaagcatgactgttgggttcatgcaacaccctaccgtgtggccagcctcctccaagagctgctttgtctcccgaacagcacgtctcattgcagggcttggcatggtgaagaaatctgtttcataatagcctatgcggagggggttgtgtgctggaatacacctgtagaacaaggaaaatctctgcctgaaaractgtcagaagccaacagcacacacacgacgcagggcagggcacttatctcatcatcataccaaaccacattacatcgtaggttggcacaccactggcgctttgcctaagaaacaacagctcttcccagagccctgcatcccttacctcttcattgaaggggaggggaggaacagtgctgtccagattgaacatgtcctcgcacagcagtgcccgcatgcacagtgccaagctctccacgtcttttgccatcggccccacagctgcagtcactaagggaagccaggagagagcatttatg

SEQ ID NO: 774 - DNA, 600 bp, Chicken  19866894085063_1
atctctccaagcaaaaccaaggcatgaggcaagggataaagggcttaaaaatggcaacgtgctttctcagtgtgagatcaagatggtagcatggtatgcacccaaacctgtcaatgtaaaattgtttcagtgacccccataccaaccagtgcaggtagcacgccttcttagggctacagcagtgtgatgtgatttctaggaatttggaaggatcatagtctttgttcggttaacagaaatagttgtcattcccactactgtcagtctaaaatataggtgtgaaaagctagctgagaaagrgtaggtccttgtcttgctccagtttatcagagggagaggaggttctttgatatatgtatacccgatgtgctattaagaaacaacggttcaaatgtttgtctcaccagtttattacaaactttaatcaatcaggggagatggggaaggggaggccagcgactttttcaaattaggctgatggggaagggaaagcaggtgatagaaaagacagaaaagaagcaagaattgcataaagtggggatagtcaccaccaagatccagcagcgtcttgttgcacgccgttcctatggtccgaggcaa

SEQ ID NO: 775 - DNA, 599 bp, Chicken  19866894085065_1
  misc_feature (1)..(111): n is any nucleotide
nnnnnnnnnnnnnnnnnnnnnnnnnnnnnnnnnnnnnnnnnnnnnnnnnnnnnnnnnnnnnnnnnnnnnnnnnnnnnnnnnnnnnnnnnnnnnnnnnnnnnnnnnnnnnnntcaagcagggtcacctagaacacattccccaggatcatatctagttgtgtttgagtatctccatagaaggagactccgcaacctctctgggcagcctgttccagtgctctgtcaccctcacagtaaggaagttatttctcatgtgcagatggaactttctttgttgcaatttgggcccactgcctcttktcctgtttccaggcacctctgcaaacagcctggccccatccttttgataccctcccttaagawacttgtacacattaataagatcccctctcagccctcttttctccaggctaaaagctctgtcagcctctcctcaaaggagagatgttccagccccttagtcatctttgatayggggtacaacaccactttctgcacgtctcatgtcaaataaatgtctcaagctccccatacactgtctgtaaaccaaaaaatggctcataaaggagagaagacagccaaaacttccacccacagaa

SEQ ID NO: 776 - DNA, 599 bp, Chicken  19866894085065_2
  misc_feature (1)..(48): n is any nucleotide
nnnnnnnnnnnnnnnnnnnnnnnnnnnnnnnnnnnnnnnnnnnnnnnntcaagcagggtcacctagaacacattccccaggatcatatctagttgtgtttgagtatctccatagaaggagactccgcaacctctctgggcagcctgttccagtgctctgtcaccctcacagtaaggaagttatttctcatgtgcagatggaactttctttgttgcaatttgggcccactgcctcttktcctgtttccaggcacctctgcaaacagcctggccccatccttttgataccctcccttaagawacttgtacacattaataagatcccctctcagccctcttttctccaggctaaaagctctgtcagcctctcctcaaaggagagatgttccagccccttagtcatctttgatayggggtacaacaccactttctgcacgtctcatgtcaaataaatgtctcaagctccccatacactgtctgtaaaccaaaaaatggctcataaaggagagaagacagccaaaacttccacccacagaaaaatacacaggggagtctatgcaaaatgtcagctgcttcaggtagctgtgcagttagcttatg

SEQ ID NO: 777 - DNA, 600 bp, Chicken  19866894085065_3
tagaaggagactccgcaacctctctgggcagcctgttccagtgctctgtcaccctcacagtaaggaagttatttctcatgtgcagatggaactttctttgttgcaatttgggcccactgcctcttktcctgtttccaggcacctctgcaaacagcctggccccatccttttgataccctcccttaagawacttgtacacattaataagatcccctctcagccctcttttctccaggctaaaagctctgtcagcctctcctcaaaggagagatgttccagccccttagtcatctttgatayggggtacaacaccactttctgcacgtctcatgtcaaataaatgtctcaagctccccatacactgtctgtaaaccaaaaaatggctcataaaggagagaagacagccaaaacttccacccacagaaaaatacacaggggagtctatgcaaaatgtcagctgcttcaggtagctgtgcagttagcttatgctattggcagggaaaatacagtccattcaattctcctcttaatgacttataacttaataacagataatgcaaaaataaatacgcaacagtattaataatatcaagaatacat

SEQ ID NO: 778 - DNA, 599 bp, Chicken  19866894085066_1
  misc_feature (1)..(87): n is any nucleotide
nnnnnnnnnnnnnnnnnnnnnnnnnnnnnnnnnnnnnnnnnnnnnnnnnnnnnnnnnnnnnnnnnnnnnnnnnnnnnnnnnnnnnnnaaactgctcaaagcataccattaaagctaaatctcaaataacaaaaagaaggagaggaaaagggagtagaccagaaactaggagtaaaaaaaaaaaaaagataggcaggcagtacagtctcttaactaaattatctccttggtgaggctttaacatggacttcagcacccactgttaactcattacaccctatcgtaaatgcacatctaacarcgagccctcctatccaaaaacgtaccgctgctgcattacctacaagccttgaaaagccagagtctctgtattttaaacagctatgtttaaaaataataaagctcaattatttttaacaaagggccgttcagagccttcgtayatgttcaactgcagtaactattctttccctctgaaatcccacttcagaaacgaaaagtatttctcatttgagaagtgctagactagaggaaaattttgaagtgtgggctgcacagtgtgtataccgtagggggaaaaagcatttcagatttgattca

SEQ ID NO: 779 - DNA, 600 bp, Chicken  19866894085066_2
ggaaaagggagtagaccagaaactaggagtaaaaaaaaaaaaaagataggcaggcagtacagtctcttaactaaattatctccttggtgaggctttaacatggacttcagcacccactgttaactcattacaccctatcgtaaatgcacatctaacarcgagccctcctatccaaaaacgtaccgctgctgcattacctacaagccttgaaaagccagagtctctgtattttaaacagctatgtttaaaaataataaagctcaattatttttaacaaagggccgttcagagccttcgtayatgttcaactgcagtaactattctttccctctgaaatcccacttcagaaacgaaaagtatttctcatttgagaagtgctagactagaggaaaattttgaagtgtgggctgcacagtgtgtataccgtagggggaaaaagcatttcagatttgattcatgctctccacatgcttcatacttttacctactatagtttctttatattgttgcagcagtaaaatacctggcttagcttttgctccatgcaggtttagattgatttcccttctaaattccttgtaacagtaggaataaatggta

SEQ ID NO: 780 - DNA, 599 bp, Chicken  19866894085071_1
  misc_feature (1)..(104): n is any nucleotide
nnnnnnnnnnnnnnnnnnnnnnnnnnnnnnnnnnnnnnnnnnnnnnnnnnnnnnnnnnnnnnnnnnnnnnnnnnnnnnnnnnnnnnnnnnnnnnnnnnnnnnnnctccgctccctggtgtttggctgctggggctcagagcttccacagccgagctggaggctgtggggagatctcctccaatgacatctgtggggtgacagtggggagagctgatctgcttggagtcttttgtcctgatggcaacgttcctatactcagcttccactggagaatacaagagggaatggacttgctcttyggatagcagctrtaagataaccaaagcatatagcatttacaaaaggaagaatgccaaagtcattccactcaaatgttctacccataatagggcacataggtagtatctacaagcacataaatttaaaatcttcctgtgttagatgctagcccaacacagtctttgcttcagactaccttaagcatttctgaaactggttaactgtaaaatrattgcatttcatttgcagagcaaagtcaggattaaactacctttgggactgtagcatcttggaaggatgctcaccagtcactctgcag

SEQ ID NO: 781 - DNA, 599 bp, Chicken  19866894085071_2
  misc_feature (1)..(92): n is any nucleotide
nnnnnnnnnnnnnnnnnnnnnnnnnnnnnnnnnnnnnnnnnnnnnnnnnnnnnnnnnnnnnnnnnnnnnnnnnnnnnnnnnnnnnnnnnnnnctccgctccctggtgtttggctgctggggctcagagcttccacagccgagctggaggctgtggggagatctcctccaatgacatctgtggggtgacagtggggagagctgatctgcttggagtcttttgtcctgatggcaacgttcctatactcagcttccactggagaatacaagagggaatggacttgctcttyggatagcagctrtaagataaccaaagcatatagcatttacaaaaggaagaatgccaaagtcattccactcaaatgttctacccataatagggcacataggtagtatctacaagcacataaatttaaaatcttcctgtgttagatgctagcccaacacagtctttgcttcagactaccttaagcatttctgaaactggttaactgtaaaatrattgcatttcatttgcagagcaaagtcaggattaaactacctttgggactgtagcatcttggaaggatgctcaccagtcactctgcagcatgagataatg

SEQ ID NO: 782 - DNA, 600 bp, Chicken  19866894085071_3
ctgatctgcttggagtcttttgtcctgatggcaacgttcctatactcagcttccactggagaatacaagagggaatggacttgctcttyggatagcagctrtaagataaccaaagcatatagcatttacaaaaggaagaatgccaaagtcattccactcaaatgttctacccataatagggcacataggtagtatctacaagcacataaatttaaaatcttcctgtgttagatgctagcccaacacagtctttgcttcagactaccttaagcatttctgaaactggttaactgtaaaatrattgcatttcatttgcagagcaaagtcaggattaaactacctttgggactgtagcatcttggaaggatgctcaccagtcactctgcagcatgagataatggtctcattttgaactcacatgtaaagcctccactgcaaaatcatccacgcacatgtatgccagtagaattggattgagagaataaatcatggatttggttttgtgaggagaagcaggttcccagtcagctatgacaaggtagctggaacagcagttatcacagcaggcaactctaatattcactttaaaaaaaataaaat

SEQ ID NO: 783 - DNA, 600 bp, Chicken  19866894085073_1
cacagaagaccttttaaagttgtttgttgatgttaaaattttagtttgcttttcgttacgttaattgaaccttcaatgtctcgactgctctgtcactgcaatgtgttttcattcattttttgttgtcttgctaaattgcctacatgatcgcattaaaagcaaaagcaacagggcatgtagtacacataatgagaattccatttattcctctatttgatgtcattctgagctaatctctggctgttctgcatcgttctctttcttcatggttttttttttattgttttctcctcataataytctcactgattagcaaagataggtgaaaaatgagatgagatggaattaatgctttaaaacatcagatgttctttgtaccatgctgcaaggctgccttatgcaatgcatccataattacgtaatgccaatggttccagaattaaagtgccctggacaatatgtgtccgtgacatgttggcaacctgtgatgctaccaaactacaaatggtcattcctacacatcagcacgtggctcctcatcctccattgagctgaaatcagctgctaaagaaatattttagattttggttgttacgatgc

SEQ ID NO: 784 - DNA, 600 bp, Chicken  19866894085081_1
attatgcaggtgctattctaatcattcagctttttaattaaggaacgaggtaagaaaacagaatcataaaaacacttttgtgagagctgagaaaatcgtgagcgactgcatgaataaagcctttataccttaccctgacaggtcagacaccaattgcctgacttacgaccttttcttgctgaaacaatggttaacagctttctcaccttgttcccattatagcctttattctcggagagaatttatggaaatggcccccaaatgcttacgctaaagaggggatgcagaaagatattgcarttttaattggtgcgtgtcccgtgtaaagatactttctttgtgggtcgttctgaagcggagggtctcagtccggcacgggaatttgggcggaccgaggtgctttgagggggagcacagcagcccagcgccgctggaagttgccgggatgcccgggcagccggagcggcggggccggcgccggtccccctttgttcagcgcatcagaaggcatcgtgctccttgatcccgcaatgcaaacttcaagcctttgtggtctttgttattattatttaatttctttccctcgccttcctcctcacc

SEQ ID NO: 785 - DNA, 600 bp, Chicken  19866894085092_1
atctctactttgtacctttgctcttctcttgctatgttctggtacacttaaagctaggataccctagggatgtagctgagaaacatctctcaaaagggggagagtgaggacacagttatttgtggagagaaaatgaataaccttggtattttaaagggagaatgttgatttggccttttctcaaagaatgacatagagagtgtcatggttggattaaaagggagaaaaatattgtatcacctctgggttctttaaaggcagttagttataaatagattcagactgtgagaaatattaaawaaawttctagagaccttcagttttgcttcaatttacaaaataactccctgtaccagatgtgattcacccagtctctggctttatgcagacgtatcattaataaaacacaatgtgaagatatccatggagctcttcaagatctctcttggagttcttttgatgtctgcaaacagctttgacatgtgtcagaactgtttctctagacagcttcctgggctatttggtactcttctaaggcagagcagatctgctgtgagaaaggcattttggagaagactgctttccagtttttacctttcc

SEQ ID NO: 786 - DNA, 600 bp, Chicken  19866894085092_2
ctactttgtacctttgctcttctcttgctatgttctggtacacttaaagctaggataccctagggatgtagctgagaaacatctctcaaaagggggagagtgaggacacagttatttgtggagagaaaatgaataaccttggtattttaaagggagaatgttgatttggccttttctcaaagaatgacatagagagtgtcatggttggattaaaagggagaaaaatattgtatcacctctgggttctttaaaggcagttagttataaatagattcagactgtgagaaatattaaawaaawttctagagaccttcagttttgcttcaatttacaaaataactccctgtaccagatgtgattcacccagtctctggctttatgcagacgtatcattaataaaacacaatgtgaagatatccatggagctcttcaagatctctcttggagttcttttgatgtctgcaaacagctttgacatgtgtcagaactgtttctctagacagcttcctgggctatttggtactcttctaaggcagagcagatctgctgtgagaaaggcattttggagaagactgctttccagtttttacctttccgggc

SEQ ID NO: 787 - DNA, 600 bp, Chicken  19866894085099_1
atctgcaactccagccccagctccctcctcatcctcatccaaatttcaccgagcccgctcagggggagccagagatgaacgctaccgatctggtaagggcagatcctgatcagctggggttcttgccaatgaaggctaatggtcccctgaccaaaaatcctaccttggttctctgtgaaggaacaccagacttgtgggaccgtagcagctgaagtgcaaagtagaagaaccggataagtctttgccttctcgattttctggcttgaatgcagctctttaataccagttgttcacagaaaraaaagcctattttaaccgtgtctgatggtaaccaggttcagtgaagtgactgataataatttgtttgtggaattgatgactgttgtatagatctactctaggaaagttactcatgagatggcaatacgtagttgtttgggaaggtgcagtaaaatgggggttgcacgtgtgtagaaggcaagcagtaattgagcgtaggtaagctttgtgtgttttttctcctctactgttgcaaaattgagcacattaacttccattttgcagatatccacacagaagcagttcaagcagcactggcaa

SEQ ID NO: 788 - DNA, 600 bp, Chicken  19866894085105_1
agtcttgcaagagatccccgcctgtgtccgaatgacgcactgagggctgagggccgcagtatcccggtgttcctttatccaggcgcccttacggccgtgcagccgccgcccttcgctgccccccccccccacagcgcccctcccgcgccgggtgctgaagtcccggctgttcgaagcaccggagatgtctgcaggccgagcacagcggtacgtcacggcacggaaacctgctgggagttttttgatgactttcccttgggagaggtcattaattatggtatcaggaggaggtttttcacycagagggtggtgacacactgaacaggttgcccaaggaggctgtggrtgccccatccctgcaggcattcgaggccaggctggatgtggctctgggcagcctgggctgctgttggcgaccctgcacatagcagggggttggagctgatgggcactgtgggccttttcaacccaggccgttctgtgatcctatgaaattaacttcaaagtctgtgctaagaaggagttgcagttcatctcttcttcacccaacctttgtcatactcccagtctctctctttttaaattccagtttcttctctg

SEQ ID NO: 789 - DNA, 600 bp, Chicken  19866894085105_2
ctgagggccgcagtatcccggtgttcctttatccaggcgcccttacggccgtgcagccgccgcccttcgctgccccccccccccacagcgcccctcccgcgccgggtgctgaagtcccggctgttcgaagcaccggagatgtctgcaggccgagcacagcggtacgtcacggcacggaaacctgctgggagttttttgatgactttcccttgggagaggtcattaattatggtatcaggaggaggtttttcacycagagggtggtgacacactgaacaggttgcccaaggaggctgtggrtgccccatccctgcaggcattcgaggccaggctggatgtggctctgggcagcctgggctgctgttggcgaccctgcacatagcagggggttggagctgatgggcactgtgggccttttcaacccaggccgttctgtgatcctatgaaattaacttcaaagtctgtgctaagaaggagttgcagttcatctcttcttcacccaacctttgtcatactcccagtctctctctttttaaattccagtttcttctctgaattaagtatccctcattacttaatcccttttgtcgtccctcatgg

SEQ ID NO: 790 - DNA, 600 bp, Chicken  19866894085110_1
ccttttaatggatctggcacagcccagctgagaaatagggggaccagaaggaagagcgtatgacggcagcatgaaaatacacaagtgactggaaacagctgtcatggcaaaaggacaggtgaaaggatggaagagttggaatatgaagctagtagccctgaagtgggctttttcataaaatgaggatatattttatgtagcagttaaacattgcagtttactggcagctattttccaccagaaaatacaacaggcaatggagtaagaagtgataaatcagatccagccttgtttctacaraacctgaacctcctctgagacctgaacccctccaacgtgcacatgaatgtccaccttaattccacactaacggctgcgcacgggagaccaagttgtaggcagctgtgtgttcaaggaaaagctctgtgaaacaatttttttctatctgacaagcagggaagcaactcatcacgaaaccagccagaacctgtgctttagcagctgggcagcaggggccataagcaactcatttaacgcacgatctcatttcaagaaaacacaaawggggcttcaattagaaaaactgtcaggaaacacctt

SEQ ID NO: 791 - DNA, 600 bp, Chicken  19866894085110_2
agaagtgataaatcagatccagccttgtttctacaraacctgaacctcctctgagacctgaacccctccaacgtgcacatgaatgtccaccttaattccacactaacggctgcgcacgggagaccaagttgtaggcagctgtgtgttcaaggaaaagctctgtgaaacaatttttttctatctgacaagcagggaagcaactcatcacgaaaccagccagaacctgtgctttagcagctgggcagcaggggccataagcaactcatttaacgcacgatctcatttcaagaaaacacaaawggggcttcaattagaaaaactgtcaggaaacaccttcttcattcctgtgcttctggaacaagatatcaaccagctttcatgatgttgagatctagctctttgtaccacctggtcccaaggacacgtatgggctgctccctccccgtgacccactgtgtgcctgtgtgccttgcagacctgttttacgtcaccagcaacaatgcagcctgtgctcatacacatggaatgaatcattttctgtttaatcctgctaattatttacatgtcttacagtcgggagagccccaaacaaattacaca

SEQ ID NO: 792 - DNA, 600 bp, Chicken  19866894085111_1
agctctgagcttgagggactgtcctgtattttaagttcaagaaatccaagcagcaaaaagtttccagttcaagtctgccctccgctggtattaatgaaacactgctaatgaattttgaatcaatattgtctttgtgtaacaaaggaggggaactaaatccatagagggctgacacagatgacacctttagataactttattttttttcattttttataataaagactttgtaaatatcttcttttaaaggctcatgtaggctcactgcctgattcctattcttcaggcttttgaaagccygccagcatttcattcccatcagacagctgccaaaactaacatacacgcgagaagtaattttctgcacatgttttttaagggatttaatagaaaagctgcagaaaaataytatgctatgatacaattaacaattctaatatactgtgctatacatgtcagcccagtaataacgtcataaaagagaccagtgtcagtctagtctagcatyctctcactacaagcaagttttccttctgatatgtcaaagaccaacttgtttattttagagagaactttccatcacagatcccacatkcaatt

SEQ ID NO: 793 - DNA, 600 bp, Chicken  19866894085111_2
gaattttgaatcaatattgtctttgtgtaacaaaggaggggaactaaatccatagagggctgacacagatgacacctttagataactttattttttttcattttttataataaagactttgtaaatatcttcttttaaaggctcatgtaggctcactgcctgattcctattcttcaggcttttgaaagccygccagcatttcattcccatcagacagctgccaaaactaacatacacgcgagaagtaattttctgcacatgttttttaagggatttaatagaaaagctgcagaaaaataytatgctatgatacaattaacaattctaatatactgtgctatacatgtcagcccagtaataacgtcataaaagagaccagtgtcagtctagtctagcatyctctcactacaagcaagttttccttctgatatgtcaaagaccaacttgtttattttagagagaactttccatcacagatcccacatkcaattaacatgtctcttcactcaggaggactcattttctatatttcaagcaggaaggtaattggaaaatgatacttactcacacgggttcacgtagtacgatttcaatcccaaa

SEQ ID NO: 794 - DNA, 600 bp, Chicken  19866894085111_3
attttttataataaagactttgtaaatatcttcttttaaaggctcatgtaggctcactgcctgattcctattcttcaggcttttgaaagccygccagcatttcattcccatcagacagctgccaaaactaacatacacgcgagaagtaattttctgcacatgttttttaagggatttaatagaaaagctgcagaaaaataytatgctatgatacaattaacaattctaatatactgtgctatacatgtcagcccagtaataacgtcataaaagagaccagtgtcagtctagtctagcatyctctcactacaagcaagttttccttctgatatgtcaaagaccaacttgtttattttagagagaactttccatcacagatcccacatkcaattaacatgtctcttcactcaggaggactcattttctatatttcaagcaggaaggtaattggaaaatgatacttactcacacgggttcacgtagtacgatttcaatcccaaagtggcatttgtgtctggaatataaaatttgtactgcgatgaattgggagataaggcacctctgcttcatttttcttgtcatcctcacgcttcgttatgc

SEQ ID NO: 795 - DNA, 600 bp, Chicken  19866894085111_4
agccygccagcatttcattcccatcagacagctgccaaaactaacatacacgcgagaagtaattttctgcacatgttttttaagggatttaatagaaaagctgcagaaaaataytatgctatgatacaattaacaattctaatatactgtgctatacatgtcagcccagtaataacgtcataaaagagaccagtgtcagtctagtctagcatyctctcactacaagcaagttttccttctgatatgtcaaagaccaacttgtttattttagagagaactttccatcacagatcccacatkcaattaacatgtctcttcactcaggaggactcattttctatatttcaagcaggaaggtaattggaaaatgatacttactcacacgggttcacgtagtacgatttcaatcccaaagtggcatttgtgtctggaatataaaatttgtactgcgatgaattgggagataaggcacctctgcttcatttttcttgtcatcctcacgcttcgttatgcttaactgcatttaatctcctgcgactgctacttaagcctaaaacgaaggagtaaaatgcaattttgttggatgtacagctaatgcac

SEQ ID NO: 796 - DNA, 600 bp, Chicken  19866894085111_5
atcccaaagtggcatttgtgtctggaatataaaatttgtactgcgatgaattgggagataaggcacctctgcttcatttttcttgtcatcctcacgcttcgttatgcttaactgcatttaatctcctgcgactgctacttaagcctaaaacgaaggagtaaaatgcaattttgttggatgtacagctaatgcacactcgaataaatgtgaagaaaaaatgtattagagaacaataattttattttggccctttgaaagcctgaaaatcaggctcagatttgtagtctgtgccaagtatgrctaacagacttcataatgcagagcacaaggaattttcaaaagttgcttgaacgtcctatccatctgataaaattactgyagaaatgactatgtgactatgattgaaaataaaaacttcaggagtacatataacattycataagaagcagtgaaaggcacacagcaaatctgttgttacctcttttcttyttctttaggcaggaagctatgccaaagtctactcaaatcccattaattagtgccatatgcacagttgctacaaatcatcctcctcaactggactgaaaaaatagcccttgt

SEQ ID NO: 797 - DNA, 600 bp, Chicken  19866894085111_6
ttcttgtcatcctcacgcttcgttatgcttaactgcatttaatctcctgcgactgctacttaagcctaaaacgaaggagtaaaatgcaattttgttggatgtacagctaatgcacactcgaataaatgtgaagaaaaaatgtattagagaacaataattttattttggccctttgaaagcctgaaaatcaggctcagatttgtagtctgtgccaagtatgrctaacagacttcataatgcagagcacaaggaattttcaaaagttgcttgaacgtcctatccatctgataaaattactgyagaaatgactatgtgactatgattgaaaataaaaacttcaggagtacatataacattycataagaagcagtgaaaggcacacagcaaatctgttgttacctcttttcttyttctttaggcaggaagctatgccaaagtctactcaaatcccattaattagtgccatatgcacagttgctacaaatcatcctcctcaactggactgaaaaaatagcccttgtatccagaatgtctcgattttgcccttgtagatcagctataggagctttttaataatcccaagtgaaaagcaacagcaat

SEQ ID NO: 798 - DNA, 600 bp, Chicken  19866894085111_7
cttaagcctaaaacgaaggagtaaaatgcaattttgttggatgtacagctaatgcacactcgaataaatgtgaagaaaaaatgtattagagaacaataattttattttggccctttgaaagcctgaaaatcaggctcagatttgtagtctgtgccaagtatgrctaacagacttcataatgcagagcacaaggaattttcaaaagttgcttgaacgtcctatccatctgataaaattactgyagaaatgactatgtgactatgattgaaaataaaaacttcaggagtacatataacattycataagaagcagtgaaaggcacacagcaaatctgttgttacctcttttcttyttctttaggcaggaagctatgccaaagtctactcaaatcccattaattagtgccatatgcacagttgctacaaatcatcctcctcaactggactgaaaaaatagcccttgtatccagaatgtctcgattttgcccttgtagatcagctataggagctttttaataatcccaagtgaaaagcaacagcaatggcacactgaaacaccagtgagtaatttgccaaatggtgacagtactcaatgcattac

SEQ ID NO: 799 - DNA, 600 bp, Chicken  19866894085111_8
tgcacactcgaataaatgtgaagaaaaaatgtattagagaacaataattttattttggccctttgaaagcctgaaaatcaggctcagatttgtagtctgtgccaagtatgrctaacagacttcataatgcagagcacaaggaattttcaaaagttgcttgaacgtcctatccatctgataaaattactgyagaaatgactatgtgactatgattgaaaataaaaacttcaggagtacatataacattycataagaagcagtgaaaggcacacagcaaatctgttgttacctcttttcttyttctttaggcaggaagctatgccaaagtctactcaaatcccattaattagtgccatatgcacagttgctacaaatcatcctcctcaactggactgaaaaaatagcccttgtatccagaatgtctcgattttgcccttgtagatcagctataggagctttttaataatcccaagtgaaaagcaacagcaatggcacactgaaacaccagtgagtaatttgccaaatggtgacagtactcaatgcattactggaaagagtctaaaagaacattacagataagtgtttcaggctgtcagtacg

SEQ ID NO: 800 - DNA, 514 bp, Chicken  19866894085119_1
tctcagcacactggggtgctggtgggacacgctgccccctcccaatgggatatgctgggctcaaacctggcagcaccatagtgggcatcctcactccctcccgcatcccaaagctccagcagtgacgtggggtgctgatgaggtggatcagagttcagctggacgcatccttccctgcagcccctctccccagagaccccagagccaccgtcaccggtgccagcactcaatcctgctcaccaaagcgcccccccccccaacaaacccccgtcccccttcccctaaatcacagcctccccrgggaagccaagcagccaagtgaaattcctgctgcttcctcctgcccgaagctgcctcccccttgccagccaagagcacatgctggcagaattcgggatgccccacaccatcccaccatccagccctgggttcccagcctgggggctgcaagggctggggggagggggccgtaagccctggctgcccttcaaagccattcctttgctaagaggag

SEQ ID NO: 801 - DNA, 600 bp, Chicken  19866894085122_1
tattgactctgagtaaacagctctttctaaagactctacaaagtgttatcggtcagtaatacacagtaaatagatggagaattacactgtcacggtttgaacaaaagagagaaagagaggggtgcagataatgaatcattaataatcctgagtttttgtgttgctctttaaaggttccccgagggagggaagtgacagggctctgactccaccatgtgacacaaacatcagactaaaatacaatttcttctccatcaaaatgtggctccactctggtgttacctgacccagagtgatccrcccagggcttccaaccgcagtcgtttgctatgaatttggctgaaatgcaaggctagtagatgagatctgaggagaagaaagggtctcagagataatacagattctcctttcggagattttttaaatatatatatatatataggcagataacaacctaccagaatgtgtatggcctacaaatactgggcttgccttgcttagacgaagagtatctttgcactgccctgctgtccgttcctatgtaatggaaaagagagctctgatcatctgtatataacagaggagggaatattcttggcc

SEQ ID NO: 802 - DNA, 600 bp, Chicken  19866894085123_1
cttgggtttctctttaaataaatgaaaagcatgtttgttttttttagagcagtagtacttccattttaccagctcaagcatttgggactgattcagtctcattcctaccaatatacattgctggagcactgtaccatgctgctttctagagaggatttttatgccatgatcgtagtatagagacattgcatgtagttctgtgtctgcctttgcatgatctgactagaccaaatcagttttaattccaaactggatctgggatctgtccaaccctgcagtttatgagatgtccactgaagstctgtggagatgagtaaatgagagtggctgaagcacagtatttcagccatctgtagtcccactcctcctgaggaaacacgacatgactggagacaataggaacagtttgctgaagtaaacctactcaacccttattgtcttttggggttggcaacaagctgacgtgcaacaaaagctgttgcaatttatagacaggagtataatttgtggaaaagaccattcgtgctcatagcttgtcctgcttttgctgatgagctcaaagtacttctgattattcagacagagctatagtcaaaacaa

SEQ ID NO: 803 - DNA, 600 bp, Chicken  19866894085123_2
atactatttgaaattttaaataaaatttctcttttgtattttgtgggcatcgagacccgaaacaattagctttttcaaatgaagctaaggatacttttaaaagaaaatgatgtttaaaaaaattctacattccttaactgagacattccagggcagaacatatgtttacaggcatgttatgcaggcatatggaagcacagttttaatgatttataaagctgctgagccttaattgagtagcattatggaattcaagtaagtcatgttagttttcagtttaaaccttaagattcagagacwtataatgatagctgtcataaaaattctttattgaaggtaatacctgatagtggagtacttaaaagctatattatattagaaaaaatactggtttctctgtgtgtggaactaaaatggcctgtaatgattgttcatattttttaagttggactggtaattcttctatgtatctttatcttccatttcagtttattttctttaggttttaagaaactgcaaggaaaacactgattaaatgccaaaggtggctgaacagaaaaatattatgcagtcagtcttaggaagaaggcacctttataa

SEQ ID NO: 804 - DNA, 599 bp, Chicken  19866894085127_1
  misc_feature (1)..(152): n is any nucleotide
nnnnnnnnnnnnnnnnnnnnnnnnnnnnnnnnnnnnnnnnnnnnnnnnnnnnnnnnnnnnnnnnnnnnnnnnnnnnnnnnnnnnnnnnnnnnnnnnnnnnnnnnnnnnnnnnnnnnnnnnnnnnnnnnnnnnnnnnnnnnnnnnnnnnnnnntccattttgattaatcataatctgttaccacgctgctggagaaatctacacacgcacctcttgtaggtaagatgatgaatctgatgtgtggagctgttctgggagctccgagtctcttaggtgacttggcactcagacgacttgccamgtgaaggtgaaaaaaagaggtcctattgattttagctggaattctgtgagaagccaatgaaaggacgcagaacactgaagtgatgctgaaaaagkgactgtgcttgctgtgttcccatccaccattggtttcattcacaattatgtctaattttacatttttgtgcgatagatggcagttaccttaacattaaatagaaacataaagattctggaatcttcacttacttcwgctstaagttggtttttgctcccctggggctaaatggcttttacaaacattgtctaaccacactgctg

SEQ ID NO: 805 - DNA, 599 bp, Chicken  19866894085127_2
  misc_feature (1)..(57): n is any nucleotide
nnnnnnnnnnnnnnnnnnnnnnnnnnnnnnnnnnnnnnnnnnnnnnnnnnnnnnnnntccattttgattaatcataatctgttaccacgctgctggagaaatctacacacgcacctcttgtaggtaagatgatgaatctgatgtgtggagctgttctgggagctccgagtctcttaggtgacttggcactcagacgacttgccamgtgaaggtgaaaaaaagaggtcctattgattttagctggaattctgtgagaagccaatgaaaggacgcagaacactgaagtgatgctgaaaaagkgactgtgcttgctgtgttcccatccaccattggtttcattcacaattatgtctaattttacatttttgtgcgatagatggcagttaccttaacattaaatagaaacataaagattctggaatcttcacttacttcwgctstaagttggtttttgctcccctggggctaaatggcttttacaaacattgtctaaccacactgctggacttttccaagggtccggagcttaaactgttgatctcctcaaaccytgggaggatgtaatgccttgctccagaagtgttcataaagcaaaatga

SEQ ID NO: 806 - DNA, 600 bp, Chicken  19866894085127_3
tctgatgtgtggagctgttctgggagctccgagtctcttaggtgacttggcactcagacgacttgccamgtgaaggtgaaaaaaagaggtcctattgattttagctggaattctgtgagaagccaatgaaaggacgcagaacactgaagtgatgctgaaaaagkgactgtgcttgctgtgttcccatccaccattggtttcattcacaattatgtctaattttacatttttgtgcgatagatggcagttaccttaacattaaatagaaacataaagattctggaatcttcacttacttcwgctstaagttggtttttgctcccctggggctaaatggcttttacaaacattgtctaaccacactgctggacttttccaagggtccggagcttaaactgttgatctcctcaaaccytgggaggatgtaatgccttgctccagaagtgttcataaagcaaaatgaaataatttgatggaaggtgttaaggaagctttaaagtattagtcctaattgaaaacctatcagcggacttttaaagccttccctcttcaatttttatggactgtcttaattgacttttaaaggtttttattgcattt

SEQ ID NO: 807 - DNA, 600 bp, Chicken  19866894085127_4
atgtgtggagctgttctgggagctccgagtctcttaggtgacttggcactcagacgacttgccamgtgaaggtgaaaaaaagaggtcctattgattttagctggaattctgtgagaagccaatgaaaggacgcagaacactgaagtgatgctgaaaaagkgactgtgcttgctgtgttcccatccaccattggtttcattcacaattatgtctaattttacatttttgtgcgatagatggcagttaccttaacattaaatagaaacataaagattctggaatcttcacttacttcwgctstaagttggtttttgctcccctggggctaaatggcttttacaaacattgtctaaccacactgctggacttttccaagggtccggagcttaaactgttgatctcctcaaaccytgggaggatgtaatgccttgctccagaagtgttcataaagcaaaatgaaataatttgatggaaggtgttaaggaagctttaaagtattagtcctaattgaaaacctatcagcggacttttaaagccttccctcttcaatttttatggactgtcttaattgacttttaaaggtttttattgcatttatga

SEQ ID NO: 808 - DNA, 534 bp, Chicken  19866894085127_5
tgagaagccaatgaaaggacgcagaacactgaagtgatgctgaaaaagkgactgtgcttgctgtgttcccatccaccattggtttcattcacaattatgtctaattttacatttttgtgcgatagatggcagttaccttaacattaaatagaaacataaagattctggaatcttcacttacttcwgctstaagttggtttttgctcccctggggctaaatggcttttacaaacattgtctaaccacactgctggacttttccaagggtccggagcttaaactgttgatctcctcaaaccytgggaggatgtaatgccttgctccagaagtgttcataaagcaaaatgaaataatttgatggaaggtgttaaggaagctttaaagtattagtcctaattgaaaacctatcagcggacttttaaagccttccctcttcaatttttatggactgtcttaattgacttttaaaggtttttattgcatttatgaacaggctaagtagaaatattcctttattcatctgcaaataagata

SEQ ID NO: 809 - DNA, 600 bp, Chicken  19866894085129_1
ggaatattgctttgtccttattaagtttagtttttggtcattacgtaagtcttcacttgctatgctttgtgcttcaaactcttttaaagtaagattcaaagtagaaggttatataaacagtcatatttatgccatctagcagtggatcaaagggaatattcctcacaattgcagttaatgtatgtcatttgaaaacataattacctcctgattgctgcctgcttcgcacagctctgtgctgtgttttggagctgcagtgaggcagcgatgctgccggcggacagcagcagtacgcagacygagtagtgtgagcggtgtggtccgttccagggcacgtgccccactgagacttcagggaggggacaagtgagaaaaggactggcraatttggcatcagcacttgtaatrtgtcagtgaactggaggakttgctcctctttctaatgragcgagttctcagcgtmtgtttcaggctgttgatttgtgtgtttgcaggatttgtatattgccagtgaagccgttcctgtctaaagaagcgttttgtgtaggaaaccctaactttgatccttcagaaacgacagtgtaatttaatttatttgag

SEQ ID NO: 810 - DNA, 600 bp, Chicken  19866894085129_2; identical to SEQ ID NO: 809

SEQ ID NO: 811 - DNA, 600 bp, Chicken  19866894085129_3
taaagtaagattcaaagtagaaggttatataaacagtcatatttatgccatctagcagtggatcaaagggaatattcctcacaattgcagttaatgtatgtcatttgaaaacataattacctcctgattgctgcctgcttcgcacagctctgtgctgtgttttggagctgcagtgaggcagcgatgctgccggcggacagcagcagtacgcagactgagtagtgtgagcggtgtggtccgttccagggcacgtgccccactgagacttcagggaggggacaagtgagaaaaggactggcraatttggcatcagcacttgtaatrtgtcagtgaactggaggakttgctcctctttctaatgragcgagttctcagcgtmtgtttcaggctgttgatttgtgtgtttgcaggatttgtatattgccagtgaagccgttcctgtctaaagaagcgttttgtgtaggaaaccctaactttgatccttcagaaacgacagtgtaatttaatttatttgaggactgtcaataaatgcttgatcgttctgtagattatggggtgacgctggggttaaatagataaagaagagttgggagcgttctg

SEQ ID NO: 812 - DNA, 600 bp, Chicken  19866894085129_4
ttatataaacagtcatatttatgccatctagcagtggatcaaagggaatattcctcacaattgcagttaatgtatgtcatttgaaaacataattacctcctgattgctgcctgcttcgcacagctctgtgctgtgttttggagctgcagtgaggcagcgatgctgccggcggacagcagcagtacgcagactgagtagtgtgagcggtgtggtccgttccagggcacgtgccccactgagacttcagggaggggacaagtgagaaaaggactggcraatttggcatcagcacttgtaatrtgtcagtgaactggaggakttgctcctctttctaatgragcgagttctcagcgtmtgtttcaggctgttgatttgtgtgtttgcaggatttgtatattgccagtgaagccgttcctgtctaaagaagcgttttgtgtaggaaaccctaactttgatccttcagaaacgacagtgtaatttaatttatttgaggactgtcaataaatgcttgatcgttctgtagattatggggtgacgctggggttaaatagataaagaagagttgggagcgttctgcccaaagtcttgtttaagcctcac

SEQ ID NO: 813 - DNA, 600 bp, Chicken  19866894085129_5
tatgccatctagcagtggatcaaagggaatattcctcacaattgcagttaatgtatgtcatttgaaaacataattacctcctgattgctgcctgcttcgcacagctctgtgctgtgttttggagctgcagtgaggcagcgatgctgccggcggacagcagcagtacgcagactgagtagtgtgagcggtgtggtccgttccagggcacgtgccccactgagacttcagggaggggacaagtgagaaaaggactggcraatttggcatcagcacttgtaatrtgtcagtgaactggaggakttgctcctctttctaatgragcgagttctcagcgtmtgtttcaggctgttgatttgtgtgtttgcaggatttgtatattgccagtgaagccgttcctgtctaaagaagcgttttgtgtaggaaaccctaactttgatccttcagaaacgacagtgtaatttaatttatttgaggactgtcaataaatgcttgatcgttctgtagattatggggtgacgctggggttaaatagataaagaagagttgggagcgttctgcccaaagtcttgtttaagcctcactggtctcctgttttttttt

SEQ ID NO: 814 - DNA, 600 bp, Chicken  19866894085129_6
tcaaagggaatattcctcacaattgcagttaatgtatgtcatttgaaaacataattacctcctgattgctgcctgcttcgcacagctctgtgctgtgttttggagctgcagtgaggcagcgatgctgccggcggacagcagcagtacgcagactgagtagtgtgagcggtgtggtccgttccagggcacgtgccccactgagacttcagggaggggacaagtgagaaaaggactggcraatttggcatcagcacttgtaatrtgtcagtgaactggaggakttgctcctctttctaatgragcgagttctcagcgtmtgtttcaggctgttgatttgtgtgtttgcaggatttgtatattgccagtgaagccgttcctgtctaaagaagcgttttgtgtaggaaaccctaactttgatccttcagaaacgacagtgtaatttaatttatttgaggactgtcaataaatgcttgatcgttctgtagattatggggtgacgctggggttaaatagataaagaagagttgggagcgttctgcccaaagtcttgtttaagcctcactggtctcctgttttttttttcctgtagcagtttgacaa

SEQ ID NO: 815 - DNA, 600 bp, Chicken  19866894085129_7
cacaattgcagttaatgtatgtcatttgaaaacataattacctcctgattgctgcctgcttcgcacagctctgtgctgtgttttggagctgcagtgaggcagcgatgctgccggcggacagcagcagtacgcagactgagtagtgtgagcggtgtggtccgttccagggcacgtgccccactgagacttcagggaggggacaagtgagaaaaggactggcraatttggcatcagcacttgtaatrtgtcagtgaactggaggakttgctcctctttctaatgragcgagttctcagcgtmtgtttcaggctgttgatttgtgtgtttgcaggatttgtatattgccagtgaagccgttcctgtctaaagaagcgttttgtgtaggaaaccctaactttgatccttcagaaacgacagtgtaatttaatttatttgaggactgtcaataaatgcttgatcgttctgtagattatggggtgacgctggggttaaatagataaagaagagttgggagcgttctgcccaaagtcttgtttaagcctcactggtctcctgttttttttttcctgtagcagtttgacaaaattgcctttcctacca

SEQ ID NO: 816 - DNA, 600 bp, Chicken  19866894085145_1
attttgaatgttattttattccagtcttatcaaaatataaatcaaaattttctgataccaggatttttttcttcatgtaggaaattcataagtatgctgcaatcaacattttttaatacccaattttcctattagcttcctgtcctgaaaattgattagtttgtttgacctttttaatctgtaatataactcattgacatccacatttaataaaataaaaaataataataataaaaaaatctgtaaatgaaacttgatcaaaactttcagactgtgcagaactgaggtactaaaacaggwaacccttctgcagcagaaagatgaaggtgaataatccctgcagttcagtttgatctacttctgtgactgctagtcctaaccactttctcagctgttggaagtacagtgatgtagaaactatacaaaaggaagaaagagacggtgaattattttactgtaagataacactgtgggctatgggcagtggtgttttctgttcagttccagtggtaggccgtttgtttttcatttagttgtaattaatttcactaaaatctgtttctcttctgaaacagagatgatgttatatgcaatttgtat

SEQ ID NO: 817 - DNA, 600 bp, Chicken  19866894085145_2
tttgaatgttattttattccagtcttatcaaaatataaatcaaaattttctgataccaggatttttttcttcatgtaggaaattcataagtatgctgcaatcaacattttttaatacccaattttcctattagcttcctgtcctgaaaattgattagtttgtttgacctttttaatctgtaatataactcattgacatccacatttaataaaataaaaaataataataataaaaaaatctgtaaatgaaacttgatcaaaactttcagactgtgcagaactgaggtactaaaacaggwawcccttctgcagcagaaagatgaaggtgaataatccctgcagttcagtttgatctacttctgtgactgctagtcctaaccactttctcagctgttggaagtacagtgatgtagaaactatacaaaaggaagaaagagacggtgaattattttactgtaagataacactgtgggctatgggcagtggtgttttctgttcagttccagtggtaggccgtttgtttttcatttagttgtaattaatttcactaaaatctgtttctcttctgaaacagagatgatgttatatgcaatttgtatac

SEQ ID NO: 818 - DNA, 600 bp, Chicken  19866894085145_3
ttgaatgttattttattccagtcttatcaaaatataaatcaaaattttctgataccaggatttttttcttcatgtaggaaattcataagtatgctgcaatcaacattttttaatacccaattttcctattagcttcctgtcctgaaaattgattagtttgtttgacctttttaatctgtaatataactcattgacatccacatttaataaaataaaaaataataataataaaaaaatctgtaaatgaaacttgatcaaaactttcagactgtgcagaactgaggtactaaaacaggwaawccttctgcagcagaaagatgaaggtgaataatccctgcagttcagtttgatctacttctgtgactgctagtcctaaccactttctcagctgttggaagtacagtgatgtagaaactatacaaaaggaagaaagagacggtgaattattttactgtaagataacactgtgggctatgggcagtggtgttttctgttcagttccagtggtaggccgtttgtttttcatttagttgtaattaatttcactaaaatctgtttctcttctgaaacagagatgatgttatatgcaatttgtatact

SEQ ID NO: 819 - DNA, 600 bp, Chicken  19866894085145_4
tgaatgttattttattccagtcttatcaaaatataaatcaaaattttctgataccaggatttttttcttcatgtaggaaattcataagtatgctgcaatcaacattttttaatacccaattttcctattagcttcctgtcctgaaaattgattagtttgtttgacctttttaatctgtaatataactcattgacatccacatttaataaaataaaaaataataataataaaaaaatctgtaaatgaaacttgatcaaaactttcagactgtgcagaactgaggtactaaaacaggwaacwcttctgcagcagaaagatgaaggtgaataatccctgcagttcagtttgatctacttctgtgactgctagtcctaaccactttctcagctgttggaagtacagtgatgtagaaactatacaaaaggaagaaagagacggtgaattattttactgtaagataacactgtgggctatgggcagtggtgttttctgttcagttccagtggtaggccgtttgtttttcatttagttgtaattaatttcactaaaatctgtttctcttctgaaacagagatgatgttatatgcaatttgtatacta

SEQ ID NO: 820 - DNA, 600 bp, Chicken  19866894085147_1
gctaacaattacttaggttgtcaaagagattttttttctaagttttgaggctgggatccttgcagccactctgaaataccagctatttcagacagctatggccatgtctcagaacactgccagcaattaataagcctactagtatgaacctaatgaactttatcacctgaaagcagacacaaagtgaccagttcacaaagaaaaaaaaagcatactgtaacaaaaagaggtgattttgatagagatatgttaaaaagaaggaactacaaaaacaccacacttcaaaacctccttaaaatwaaaaaaaaaaaaaatgcatttctatatgtaaataatattcaaaatcttcagctaaagagctgaagctgtgagttttcaagtgagttttgaggttttgaaaatccattcatggttatatgagatccaatgtaagctgaaggactctctttttagaagtattttggagcayatgtttagaaacccctggtcaagagaagaaaaattgtatgataaaaataagaataactccatcaatatttgttaagaaaagtttccctctctcactgyttccaatccctttgcagcaaaaccacacataac

SEQ ID NO: 821 - DNA, 600 bp, Chicken  19866894085147_2
aaagcagacacaaagtgaccagttcacaaagaaaaaaaaagcatactgtaacaaaaagaggtgattttgatagagatatgttaaaaagaaggaactacaaaaacaccacacttcaaaacctccttaaaataaaaaaaaaaaaaaatgcatttctatatgtaaataatattcaaaatcttcagctaaagagctgaagctgtgagttttcaagtgagttttgaggttttgaaaatccattcatggttatatgagatccaatgtaagctgaaggactctctttttagaagtattttggagcayatgtttagaaacccctggtcaagagaagaaaaattgtatgataaaaataagaataactccatcaatatttgttaagaaaagtttccctctctcactgyttccaatccctttgcagcaaaaccacacataactcagtaagaccccactggctacttggcaaaatctgtgaagttcagtatgttgcagcattttattcttaaaacttgttactataaaattgagagcataacagcaaaaggcaacatcttgacaattttgcacactggaaatattgactttgcagcaatgtgaccatcagaa

SEQ ID NO: 822 - DNA, 600 bp, Chicken  19866894085147_3
aaaaacaccacacttcaaaacctccttaaaataaaaaaaaaaaaaaatgcatttctatatgtaaataatattcaaaatcttcagctaaagagctgaagctgtgagttttcaagtgagttttgaggttttgaaaatccattcatggttatatgagatccaatgtaagctgaaggactctctttttagaagtattttggagcayatgtttagaaacccctggtcaagagaagaaaaattgtatgataaaaataagaataactccatcaatatttgttaagaaaagtttccctctctcactgyttccaatccctttgcagcaaaaccacacataactcagtaagaccccactggctacttggcaaaatctgtgaagttcagtatgttgcagcattttattcttaaaacttgttactataaaattgagagcataacagcaaaaggcaacatcttgacaattttgcacactggaaatattgactttgcagcaatgtgaccatcagaacgtggtttcacattacatcacagtagttgtaaagtaaaatatttcacctttgctactgcttaacaaattcaccaactatcacctaatttaaagatgtc

SEQ ID NO: 823 - DNA, 600 bp, Chicken  19866894085149_1
aactggctgcagggctgggcccagagagtggtgatgaatggagtcaaatccagctggtggctggtcacaagtggtgctccccaggatttggtattgaggcctgtcttgttcaatgtgtttatcaatgacctggatgagggcattgagtaccccctcagtaaatttgcaggtgaggaggctgggaggaggtgtcaatctgcgtgggggtaggaatgccctgcagagggatctggacaggctgggtagctggactgagactaatgggttgaagttgaacaagactaagtgctgggtcctgcrctttggccacaacaaccctgggcaatgctacaggctacagggacatggtttagtgggaaatactggtgataggtggatggttgggctgggtgatcttagaggtcttttccaaccttggtaattctgtgattccatggttctgtatgaagtggtttggactggactgttcattctaccagcactctttcttacaccaaatggtggttgagagcctcattttttagcatacagtccattgcactttgcattattttttactaacacgtaatttgaaggaatatcttatgaagtaattgggaa

SEQ ID NO: 824 - DNA, 600 bp, Chicken  19866894085149_2
cttatgaagtaattgggaatgcattcagattgtccttttcttgttattcaccacatcacaaatgttattaggtatcagatcacttttgtacccagagagtggcggtcaatggctcaatgtccagatggacatcggtgacaagtggtgtccctcaggggtcagtactgggaccttgcaactgagtcttggcaacccatgctatcagtgcaaactggaggttgtaaggacagagcacagccttactggaaaggacttgggggtactggtgaatggcagctgaacacaagccagcactgtgcyctcacagcccagaaagccagctgtacgctgggctgcatcaaaagcagcatggacagcagggtgaggggagggatcctgcccctttaccttgcactggtgagatctcacctggagtactacatccagatgtggagtcctcattacatggacatgttagagcacgtccagaggagggacacaaaaatgatcccagggatggaacaccgctcctatgagaacaggctgaaagagcagaggctgtgaagcctggagaagagaagkctgcagggagacagagcagcctttcagtagctaaaggga

SEQ ID NO: 825 - DNA, 600 bp, Chicken  19866894085149_3
actggtgaatggcagctgaacacaagccagcactgtgcyctcacagcccagaaagccagctgtacgctgggctgcatcaaaagcagcatggacagcagggtgaggggagggatcctgcccctttaccttgcactggtgagatctcacctggagtactacatccagatgtggagtcctcattacatggacatgttagagcacgtccagaggagggacacaaaaatgatcccagggatggaacaccgctcctatgagaacaggctgaaagagcagaggctgtgaagcctggagaagagaagkctgcagggagacagagcagcctttcagtagctaaagggaggctataagaaagaggggaacagactttttagcaggacttattgtcacaggcaaggggaaaccgtttcaaactaaaagagagaagatttagattagataaaaggaataatatttttttacagtaagagtggtgaggcactggtacagattgcccagagaggtgatgggtgccctgccctgggagacacggtcaggctggatggggctctgagcaatctgatctagcagacttccctattcattgccaggagttggactaga

SEQ ID NO: 826 - DNA, 600 bp, Chicken  19866894085151_1
attaaggccagaatggcttttgtagctcttctcacactcagggcacttatagggtctgtctcctgtgtgggtgcgtctgtggtacttgaggtccgaattgcttctgtagcccttcccacactcggggcacttgtggggtctctctcccgtgtggacatgctggtggtatctgaggtgggatctggctctgaagctcttgtgacactcggggcatttgtagggtctctctcctgtgtggacgcgctggtgacaaatgagttcagttctgcttttgaagctcttcccacactcggagcactsgtagggtctgtctcccgtgtggatgcgccggtggcagacgaggtgggtactctttttgaagctcttcccacactcggagcactcgtagggcctctcccctgtgtggatgcgccggtggcagacgaggtgggtactccttctgaagctcttcccacactcgtggcactcgtagggcctctcccctgtgtggatgcgccggtggcaggtgaggttgtaactgcttctgaagcccttcccacactcgcagcacttaaagcagttctcttccgtgtggatgcgctgacggacagtgaggtcgga

SEQ ID NO: 827 - DNA, 600 bp, Chicken  19866894085151_2
acgggctctgccttttctcctggcgctcatcgtcgctccttaggccttcaggctgctcatgatctgagctgcggctcaggggatttctcactctctttcccagatggtttcccagtggcttcctgaagtgctctccttgctccaggcccccttgggcatctctgatttctaccatggaggcactaccccaaagccttttggccacaccgcttctctgcagatcctcctttatacctgaggtctcatctgctgctggatgatagaggaaatgcagaaatagcacacggtgccccaaatttygcccagccaaagatggcttttgccattcccaacctcctctttacctccaccacctcacctgggcaaaagtcttccgctacgtcctcakggctgtgcacatctgggatccagggctcttcccctccttccagcagggagatcaccatgggtttggggactggaagttcagcttcaaggagagaaacagtggagatgagagcattgccatcattctggcacagctgcttgtccagccacccaactacgtgtccctccccacttgtgaaaccacaatcagggctgaacggcgctggaagaaaa

SEQ ID NO: 828 - DNA, 600 bp, Chicken  19866894085151_3
cactctctttcccagatggtttcccagtggcttcctgaagtgctctccttgctccaggcccccttgggcatctctgatttctaccatggaggcactaccccaaagccttttggccacaccgcttctctgcagatcctcctttatacctgaggtctcatctgctgctggatgatagaggaaatgcagaaatagcacacggtgccccaaatttygcccagccaaagatggcttttgccattcccaacctcctctttacctccaccacctcacctgggcaaaagtcttccgctacgtcctcakggctgtgcacatctgggatccagggctcttcccctccttccagcagggagatcaccatgggtttggggactggaagttcagcttcaaggagagaaacagtggagatgagagcattgccatcattctggcacagctgcttgtccagccacccaactacgtgtccctccccacttgtgaaaccacaatcagggctgaacggcgctggaagaaaacatactgacttccttttgagcccagcacacctttaacgtgtctgaaaatcatgcagggaagggaattattcccaattccctttacaaa

SEQ ID NO: 829 - DNA, 420 bp, Chicken  19866894085151_4
tgcacatctgggatccagggctcttcccctccttccagcagggagatcaccatgggtttggggactggaagttcagcttcaaggagagaaacagtggagatgagagcattgccatcattctggcacagctgcttgtccagccacccaactacgtgtccctccccacttgtgaaaccacaatcagggctgaacggcgctggaagaaaacatactgacttccttttgagcccagcacacctttaacgtgtctgaaaatcatgcagggaagggaattattcccaattccctttacaaagcttygtgttccttccaaattcctcagtgaccaaggtttcacaaaggttcatgcgagctgaacagagaagcgtatcctgctccaggagtaacctgggacttgtctgggtgctggagccggtggca

SEQ ID NO: 830 - DNA, 600 bp, Chicken  19866894085155_1
tgcattggtgtctatctgccaagagtggtaagaagttggtatgtgtgtggctgtaataactaacaaatgaagtattttttagtaaagtatttacattgttgaattaacatcagtgcacatgggttacttcaatgtaaagtccttgtgcataagtgtcttggcttacagaacaggaaaacacctaatgaaagcagaaagataactatcaatttactatatcagaaagctttaatacaggtagagtgtttctattttaaaaaaagtttgaatagtgtaaaagacaacaaagagcatattttycttgctgcaratgcagggaggctaggtcatctgctgaagttcttggtcattccctgtgtgttcagctgcaatttaactccatctctggagagttgaaggcgacctaagtagtgaatgctgtgactgcaaggggttaaccgacaatttatgtaaagtcttagtattctgcaaaacgaaatgtgcatgtgaaatggaaaaaaaaggaaaagattatatttgtcagctgtgctaccatatgttgctctggcggaagcgcagcaaaatggtgacaatttctattttattgaatgaggatctgtg

SEQ ID NO: 831 - DNA, 600 bp, Chicken  19866894085155_2
tctatctgccaagagtggtaagaagttggtatgtgtgtggctgtaataactaacaaatgaagtattttttagtaaagtatttacattgttgaattaacatcagtgcacatgggttacttcaatgtaaagtccttgtgcataagtgtcttggcttacagaacaggaaaacacctaatgaaagcagaaagataactatcaatttactatatcagaaagctttaatacaggtagagtgtttctattttaaaaaaagtttgaatagtgtaaaagacaacaaagagcatattttycttgctgcaratgcagggaggctaggtcatctgctgaagttcttggtcattccctgtgtgttcagctgcaatttaactccatctctggagagttgaaggcgacctaagtagtgaatgctgtgactgcaaggggttaaccgacaatttatgtaaagtcttagtattctgcaaaacgaaatgtgcatgtgaaatggaaaaaaaaggaaaagattatatttgtcagctgtgctaccatatgttgctctggcggaagcgcagcaaaatggtgacaatttctattttattgaatgaggatctgtgttgatttcca

SEQ ID NO: 832 - DNA, 600 bp, Chicken  19866894085155_3
ccagtaacctagtatatccatggctacagggtgacctcggattgcagtctccttgaaaataaaatatcagagattcagctcaatccatctgcatattttaatggatttagcccttggagggcatgggggaatagtcttgtgaaaagataagtggcagatacaggaaatatagacaaatttgaagctctttaaaatctgaggagaacttatctcatcagcgtgattaaaacaagtgtgtgtaaaggctttggtggttgcagactactctcagccatctggtcatgctgggaggcagggctycgaggtttgggcacagagctgcacaaacataactaaatttctcttggacatgggytgatacatttgctggctccactgtgtcatgcgggcttacttgtgagggttttgcagagtaagggctatctgtgccatgcctctyttcatggtacagagatgtcctagaagaatctgctttcgttrttctaggatcacagctttctcaaaaaacttttatcagcttactgagacctcaaggtgtgagctgcagtgagttgggtgcttgctaagtgtcactgagcatcaggggctctcgctgactcc

SEQ ID NO: 833 - DNA, 600 bp, Chicken  19866894085155_4
aaaataaaatatcagagattcagctcaatccatctgcatattttaatggatttagcccttggagggcatgggggaatagtcttgtgaaaagataagtggcagatacaggaaatatagacaaatttgaagctctttaaaatctgaggagaacttatctcatcagcgtgattaaaacaagtgtgtgtaaaggctttggtggttgcagactactctcagccatctggtcatgctgggaggcagggctycgaggtttgggcacagagctgcacaaacataactaaatttctcttggacatgggytgatacatttgctggctccactgtgtcatgcgggcttacttgtgagggttttgcagagtaagggctatctgtgccatgcctctyttcatggtacagagatgtcctagaagaatctgctttcgttrttctaggatcacagctttctcaaaaaacttttatcagcttactgagacctcaaggtgtgagctgcagtgagttgggtgcttgctaagtgtcactgagcatcaggggctctcgctgactccacatgcaccatggatgcacaacatctctttgggccatatgtcaagtgcaaggtac

SEQ ID NO: 834 - DNA, 600 bp, Chicken  19866894085155_5
tgaaaagataagtggcagatacaggaaatatagacaaatttgaagctctttaaaatctgaggagaacttatctcatcagcgtgattaaaacaagtgtgtgtaaaggctttggtggttgcagactactctcagccatctggtcatgctgggaggcagggctycgaggtttgggcacagagctgcacaaacataactaaatttctcttggacatgggytgatacatttgctggctccactgtgtcatgcgggcttacttgtgagggttttgcagagtaagggctatctgtgccatgcctctyttcatggtacagagatgtcctagaagaatctgctttcgttrttctaggatcacagctttctcaaaaaacttttatcagcttactgagacctcaaggtgtgagctgcagtgagttgggtgcttgctaagtgtcactgagcatcaggggctctcgctgactccacatgcaccatggatgcacaacatctctttgggccatatgtcaagtgcaaggtacaagaaaacagttctgaggtgcacaagaaatgatgctcatttaccttcattatagcaaggttaagcttatgttgcttatgttgca

SEQ ID NO: 835 - DNA, 600 bp, Chicken  19866894085155_6
gaagctctttaaaatctgaggagaacttatctcatcagcgtgattaaaacaagtgtgtgtaaaggctttggtggttgcagactactctcagccatctggtcatgctgggaggcagggctycgaggtttgggcacagagctgcacaaacataactaaatttctcttggacatgggytgatacatttgctggctccactgtgtcatgcgggcttacttgtgagggttttgcagagtaagggctatctgtgccatgcctctyttcatggtacagagatgtcctagaagaatctgctttcgttrttctaggatcacagctttctcaaaaaacttttatcagcttactgagacctcaaggtgtgagctgcagtgagttgggtgcttgctaagtgtcactgagcatcaggggctctcgctgactccacatgcaccatggatgcacaacatctctttgggccatatgtcaagtgcaaggtacaagaaaacagttctgaggtgcacaagaaatgatgctcatttaccttcattatagcaaggttaagcttatgttgcttatgttgcactttcggggagacctcattgtggccttctgatacttgaagg

SEQ ID NO: 836 - DNA, 596 bp, Chicken  19866894085166_1
agtcctcatcccatccttcctatggggctggggcatgcgctgaccctgctcccgtccccaggtgacctacaacgtgacgggcttcatcgagaagaacaacgacctgctgttccgtgacctgtcccaggccatgtgggccgcccggcacactctgctgcgctccctcttccccgagggcgacccccagagaccctccctcaaactgccccccaccaccggctcccagttcaaggcatccgtggcgacgctgatgaagaacctctactccaagaaccccaactacatcaggtagcacccagygggactgcatgtgcggggtacgcggtgggacccccccacgcccaccgctgccccccccgccccccccccccccaggtgcatcaagcccaacgacaccaagacggcgatgctcttcactccggacctggtgctggctcaggtgcgctacctggggctgatggagaacgtgagggtaaggcgtgcaggctacgccttccgtcagctctaccagcccttcctggagcgctacaagatgctgagcaggaagacctggccccgctggacgggcggtgacaggtcaagaggggagggggggg

SEQ ID NO: 837 - DNA, 600 bp, Chicken  19866894085171_1
tagttaataataaggttcaaaactccaggctgtcgcttgtaaaaagcacacagaagatctgaaatagcataatatgcttcttgggaaggatatgaatcctttcttctaaaggaccaaacaggctcaaagtgatcaagggcagccaaggacaagtcaggctgggggtaggaaagcaagctcattttatctctgtatgaaacaatgctgcagagaccaggaacaccagcacagcttcccaagacaaagctgaatcctctgaaggctccagttcccacagcttccatgccccattggacaccytggggacaaagagccactgtacagaacccagagtgtgctcaaagcatagcagagccttggccaaaagtcacccagggcactggggtgagaaaagtgagccgaattcaggccccatcatcacctgcagccctggctgtcctctttccaagcataaaatccactgctgtgtgcaggaggcagcaataggcaaaaggaaaaagagccacgtctgttagaaaggaataattgcaggcatgcaacccaccctggtggggaaaactgttctgytggagtaaaaacctgcaggaaragaacgcctgc

SEQ ID NO: 838 - DNA, 600 bp, Chicken  19866894085171_2
gttcccacagcttccatgccccattggacaccytggggacaaagagccactgtacagaacccagagtgtgctcaaagcatagcagagccttggccaaaagtcacccagggcactggggtgagaaaagtgagccgaattcaggccccatcatcacctgcagccctggctgtcctctttccaagcataaaatccactgctgtgtgcaggaggcagcaataggcaaaaggaaaaagagccacgtctgttagaaaggaataattgcaggcatgcaacccaccctggtggggaaaactgttctgytggagtaaaaacctgcaggaaragaacgcctgctggaaaggtgtcctccacattaagcattttaagggcaaaaaatgtagtcttcttcacttccaattaacagcatttgcagagcttttacatcaatcatttaggggctactaaataaaaaaaatcccctctttgcttttactggttaatacttactgatgtctcctttattttcctgcttttgtattcatcaatatttccttttatctcaggctggaaaccatccgtaacgctcagaggaaagcttcaygccctcaagagcaaaaaaaa

SEQ ID NO: 839 - DNA, 600 bp, Chicken  19866894085171_3
attggacaccytggggacaaagagccactgtacagaacccagagtgtgctcaaagcatagcagagccttggccaaaagtcacccagggcactggggtgagaaaagtgagccgaattcaggccccatcatcacctgcagccctggctgtcctctttccaagcataaaatccactgctgtgtgcaggaggcagcaataggcaaaaggaaaaagagccacgtctgttagaaaggaataattgcaggcatgcaacccaccctggtggggaaaactgttctgytggagtaaaaacctgcaggaaragaacgcctgctggaaaggtgtcctccacattaagcattttaagggcaaaaaatgtagtcttcttcacttccaattaacagcatttgcagagcttttacatcaatcatttaggggctactaaataaaaaaaatcccctctttgcttttactggttaatacttactgatgtctcctttattttcctgcttttgtattcatcaatatttccttttatctcaggctggaaaccatccgtaacgctcagaggaaagcttcaygccctcaagagcaaaaaaaagacaccccagagaagtcagaaa

SEQ ID NO: 840 - DNA, 540 bp, Chicken  19866894085171_4
ggtggggaaaactgttctgytggagtaaaaacctgcaggaaragaacgcctgctggaaaggtgtcctccacattaagcattttaagggcaaaaaatgtagtcttcttcacttccaattaacagcatttgcagagcttttacatcaatcatttaggggctactaaataaaaaaaatcccctctttgcttttactggttaatacttactgatgtctcctttattttcctgcttttgtattcatcaatatttccttttatctcaggctggaaaccatccgtaacgctcagaggaaagcttcaygccctcaagagcaaaaaaaagacaccccagagaagtcagaaataaacaatctttacaaatcacccaatgaagaaatgcccaatttgtttgcaccgcaacgtgggagtgcagggggttaaaagtgccctctgtgctgcagaatggccaaaaattaagcttgacattcagcttctccattcaggtgggcatttcagagcctccagcagggttctgtcctgtcgtgtcgagtagcaaatggat

SEQ ID NO: 841 - DNA, 600 bp, Chicken  19866894085173_1
gttaattatacatttatcaattttaaaatctaaagttcctcctgaaagaataacagagaactgccagtttttacataagggtttggcttatatctttatccaaaaaaagagacatggtgagtcatagtattcatgcagtatttttttaatattttccatttctacacagtccagatcactcctgcaatgaaaatatattgtcattttatcataaagtatcatcatataatatgacagcatctttcattatggaatctattttttttctattgaattttaattgctcttccttactcattwcatgtctttgctgtaattctcattacagacatttttcttttgataattcacaaacattcataacttcagataacttttgtctctgaggacagcaagataagtagtatatccttaaacagtgctaatcttctttatcttaaaagcacaactatgtattatgatgagtatgtgagcagcatgcaaagaggaaaaacttttcgattgatcttgaaataagtatagcattagaaacaaaaataacctctaatggtgagcttaagtcttcagctgtcaaatgttttcagacaatatttaaaactt

SEQ ID NO: 842 - DNA, 600 bp, Chicken  19866894085182_1
acccccctccgctttgcattggtaggatttctcctgctcttcttccctaacagatatttattgtgcccttctaaaaatctatgtaaatcagatgatgaaatggggaaaagtttcttgcccagactgagccagctgcactgttagagcaggatctctgcgagctttaaccttctgcatttcctgacacactcaggttctcagcctgttctcccatgtaaaggtgctttaaaagtgactgtataaaccacagcgtgctgcagctgatgattttatcctcttcatggtagggcagcacagtgkccaggagcacagtacagtaggttttctttcaagtgcatrcctttggctgwgggctgctggagtggcagggaggacaggagctctgtgaagktgtgagtcagagaaatgcagcttgttctggaagtgagataaagcatgaaaaaatctttattagctgcaaggggaaatttcagcagtcatccctatggggcaaccagaatgcctaattttaaatgtttaaaatgtggttatggtataaagtgtaaaaatacaaaaatggttttgtcaataaaaactcattcagaagggaaacctgcagct

SEQ ID NO: 843 - DNA, 600 bp, Chicken  19866894085182_2
ttcttccctaacagatatttattgtgcccttctaaaaatctatgtaaatcagatgatgaaatggggaaaagtttcttgcccagactgagccagctgcactgttagagcaggatctctgcgagctttaaccttctgcatttcctgacacactcaggttctcagcctgttctcccatgtaaaggtgctttaaaagtgactgtataaaccacagcgtgctgcagctgatgattttatcctcttcatggtagggcagcacagtgkccaggagcacagtacagtaggttttctttcaagtgcatrcctttggctgwgggctgctggagtggcagggaggacaggagctctgtgaagktgtgagtcagagaaatgcagcttgttctggaagtgagataaagcatgaaaaaatctttattagctgcaaggggaaatttcagcagtcatccctatggggcaaccagaatgcctaattttaaatgtttaaaatgtggttatggtataaagtgtaaaaatacaaaaatggttttgtcaataaaaactcattcagaagggaaacctgcagctactttatactggaagcagattgtctttataggttgagag

SEQ ID NO: 844 - DNA, 600 bp, Chicken  19866894085182_3
cagatatttattgtgcccttctaaaaatctatgtaaatcagatgatgaaatggggaaaagtttcttgcccagactgagccagctgcactgttagagcaggatctctgcgagctttaaccttctgcatttcctgacacactcaggttctcagcctgttctcccatgtaaaggtgctttaaaagtgactgtataaaccacagcgtgctgcagctgatgattttatcctcttcatggtagggcagcacagtgkccaggagcacagtacagtaggttttctttcaagtgcatrcctttggctgwgggctgctggagtggcagggaggacaggagctctgtgaagktgtgagtcagagaaatgcagcttgttctggaagtgagataaagcatgaaaaaatctttattagctgcaaggggaaatttcagcagtcatccctatggggcaaccagaatgcctaattttaaatgtttaaaatgtggttatggtataaagtgtaaaaatacaaaaatggttttgtcaataaaaactcattcagaagggaaacctgcagctactttatactggaagcagattgtctttataggttgagagttgtttgttgt

SEQ ID NO: 845 - DNA, 600 bp, Chicken  19866894085182_4
atgatgaaatggggaaaagtttcttgcccagactgagccagctgcactgttagagcaggatctctgcgagctttaaccttctgcatttcctgacacactcaggttctcagcctgttctcccatgtaaaggtgctttaaaagtgactgtataaaccacagcgtgctgcagctgatgattttatcctcttcatggtagggcagcacagtgkccaggagcacagtacagtaggttttctttcaagtgcatrcctttggctgwgggctgctggagtggcagggaggacaggagctctgtgaagktgtgagtcagagaaatgcagcttgttctggaagtgagataaagcatgaaaaaatctttattagctgcaaggggaaatttcagcagtcatccctatggggcaaccagaatgcctaattttaaatgtttaaaatgtggttatggtataaagtgtaaaaatacaaaaatggttttgtcaataaaaactcattcagaagggaaacctgcagctactttatactggaagcagattgtctttataggttgagagttgtttgttgttgttggctcttttttacatgttaagggaagatctgcaggct

SEQ ID NO: 846 - DNA, 599 bp, Chicken  19866894085185_1
  misc_feature (1)..(11): n is any nucleotide
nnnnnnnnnnnctccactcttgccaaatgaatggatttgttcccatgattcgcacagcttgacttctcccaatgatggcacctgagatgcaatggccagggagctgcaggggtgaccccagacccaccgagagctggttgagctgctgaatttatctctatgagtggacgaggggaaaaaccagatctctaattaatgcagttttattccctaataatggtacagagtactgatctgatttcaggacattttaaagggcagtaggttaaaagtaagcttccttttctgcgctttgctgcrttaacctgcaaagatgatggyccttaatttttaagtccaattactttggacagagagaggcagaaggctgtttctttagcctgtagttaatgattttcagaggggctgagggtaacagcacttctctctctcctctgactgcacaacacctccacagtttgttcccccatcaaaacaaaaccacaggggaggtgcatccctcctgacatctctttatgagggttttcctgaagtgtggccatgttcraagacaccrggaaacgtcaaccaaaaaagaagacagccctgtgtttatgacc

SEQ ID NO: 847 - DNA, 600 bp, Chicken  19866894085185_2
gccaaatgaatggatttgttcccatgattcgcacagcttgacttctcccaatgatggcacctgagatgcaatggccagggagctgcaggggtgaccccagacccaccgagagctggttgagctgctgaatttatctctatgagtggacgaggggaaaaaccagatctctaattaatgcagttttattccctaataatggtacagagtactgatctgatttcaggacattttaaagggcagtaggttaaaagtaagcttccttttctgcgctttgctgcrttaacctgcaaagatgatggyccttaatttttaagtccaattactttggacagagagaggcagaaggctgtttctttagcctgtagttaatgattttcagaggggctgagggtaacagcacttctctctctcctctgactgcacaacacctccacagtttgttcccccatcaaaacaaaaccacaggggaggtgcatccctcctgacatctctttatgagggttttcctgaagtgtggccatgttcraagacaccrggaaacgtcaaccaaaaaagaagacagccctgtgtttatgaccaccttccgtttgtaaggtaacc

SEQ ID NO: 848 - DNA, 600 bp, Chicken  19866894085185_3
attttaaagggcagtaggttaaaagtaagcttccttttctgcgctttgctgcrttaacctgcaaagatgatggyccttaatttttaagtccaattactttggacagagagaggcagaaggctgtttctttagcctgtagttaatgattttcagaggggctgagggtaacagcacttctctctctcctctgactgcacaacacctccacagtttgttcccccatcaaaacaaaaccacaggggaggtgcatccctcctgacatctctttatgagggttttcctgaagtgtggccatgttcraagacaccrggaaacgtcaaccaaaaaagaagacagccctgtgtttatgaccaccttccgtttgtaaggtaacctacttggggaagtaattttccttttgggtaaatagagtgggttaattaagcaaagtatatgaaatagttattgactttggctgctctgttgcatacgatcattgggctgtcagtggctttcctttaattaagtttccctgctgtcttgtcatatgctgagattttgagtctttggccttggatttattttattacatacatatatagagcttctggcacagaaatg

SEQ ID NO: 849 - DNA, 600 bp, Chicken  19866894085185_4
ggcagtaggttaaaagtaagcttccttttctgcgctttgctgcrttaacctgcaaagatgatggyccttaatttttaagtccaattactttggacagagagaggcagaaggctgtttctttagcctgtagttaatgattttcagaggggctgagggtaacagcacttctctctctcctctgactgcacaacacctccacagtttgttcccccatcaaaacaaaaccacaggggaggtgcatccctcctgacatctctttatgagggttttcctgaagtgtggccatgttcraagacaccrggaaacgtcaaccaaaaaagaagacagccctgtgtttatgaccaccttccgtttgtaaggtaacctacttggggaagtaattttccttttgggtaaatagagtgggttaattaagcaaagtatatgaaatagttattgactttggctgctctgttgcatacgatcattgggctgtcagtggctttcctttaattaagtttccctgctgtcttgtcatatgctgagattttgagtctttggccttggatttattttattacatacatatatagagcttctggcacagaaatgtcctgtgtc

SEQ ID NO: 850 - DNA, 600 bp, Chicken  19866894085193_1
gacaaaaatatgccgtataaaagcaaatgacatgtaacttgatcgttacttgacgtgtaactctacggatttgattttgtgctaatcctccatctgctgctccttgtcagtatggatgtgctaaaatggtcgtgtacaacccttcccttgcaattaataaagtatgttgcgtatgtatcaaaatccccaatctccagcatagagatgtaagagaggaagtaggtaacgtgaatgaagaccagcagtaccttgtgcatttgtaatgtccttcacgttccaagaattttaggggaaatcctrctttgaactctcaatggaaaacctcagcagttgctgtccctgccacgttgtgtgtagcaggtgttcccatgctgacagcaatggaacttaatctcagtttgtctgttttgtgcaccattggaggtaatgattcttccagactgcaggttctgcagattggcattagctacacgaccccatagcccttctgctcatcggcaggtgaatcagaaggaaggggagaacagattgatatgtgaccccagaggaaagataggaggccttgaacatctgttaccttaatatgctgattccatagcc

SEQ ID NO: 851 - DNA, 600 bp, Chicken  19866894085193_2
tccttcctgagcaccttgtttttaggtgaatgggggtgggaaggaagccaagaggttggttttataatgggtgctggtgaatcttctgtgaaattttacttatttttaggaatagtaccacagagccccaataggattcctagctatttagttcaaactgagcaaaatcatctaccactttggactctgcttaaagaagcatacagaaacacataatgatgagtattgaaagtggtatatgttaaatattgcctctaaacccatctaaatggtaatatattcaaatatataattccgggyctttctgtagatggtgtgagaaaaagacccccatttccatttattcctttgtagcttgctgcttttttttttattttgccttttttccatcagacatacattgatagcacatctttcatacttgtctgatggaatgctaacttgaagcccctaaaattatgcaatggtaataacaactaatggccaatagtaggtaataacttattaatgtgaggtggtgagtaataacgtatggtgaagcagagtgtgatgagggcagcagcacttggaattcctgtaggctgagaggtagcagggact

SEQ ID NO: 852 - DNA, 599 bp, Chicken  19866894085197_1
  misc_feature (1)..(56): n is any nucleotide
nnnnnnnnnnnnnnnnnnnnnnnnnnnnnnnnnnnnnnnnnnnnnnnnnnnnnnnncacaggcccacattcacaagagtagcccaaataatacccagtcactgagaccaccttcatcaagaatgagagcactatgaccagataacatgtacaagatccagttgagtatactcaaaaaaaaaacaaatttccaagttgccaatactcacacagagagtaaaagaaatgatctggatgttcatcactgatgtccatttgccacaatgtcaataaactgttcttctccacagggtctaacttyacacatcaatacagtttttatctcattcttgactygtgaaagattccagtatagaagctcaccaagcagtgtctccagtaatacccttgggtccaatttccagaattaaaggactcactgcaygtgagcagaacaagagcaggaaccgtaacttacaccattacgttagcagaaaggacaggtgtttgagaagctgcactgtatgcacacaaagaaactatggccctgccactgtggggctatgagaagctgtgtggaggcatctatgctaacctcaagggtgccattggctgcacgct

SEQ ID NO: 853 - DNA, 599 bp, Chicken  19866894085197_2
  misc_feature (1)..(21): n is any nucleotide
nnnnnnnnnnnnnnnnnnnnncacaggcccacattcacaagagtagcccaaataatacccagtcactgagaccaccttcatcaagaatgagagcactatgaccagataacatgtacaagatccagttgagtatactcaaaaaaaaaacaaatttccaagttgccaatactcacacagagagtaaaagaaatgatctggatgttcatcactgatgtccatttgccacaatgtcaataaactgttcttctccacagggtctaacttyacacatcaatacagtttttatctcattcttgactygtgaaagattccagtatagaagctcaccaagcagtgtctccagtaatacccttgggtccaatttccagaattaaaggactcactgcaygtgagcagaacaagagcaggaaccgtaacttacaccattacgttagcagaaaggacaggtgtttgagaagctgcactgtatgcacacaaagaaactatggccctgccactgtggggctatgagaagctgtgtggaggcatctatgctaacctcaagggtgccattggctgcacgcttagagtcacacagcccactgccagatgcctaccga

SEQ ID NO: 854 - DNA, 600 bp, Chicken  19866894085197_3
gagagcactatgaccagataacatgtacaagatccagttgagtatactcaaaaaaaaaacaaatttccaagttgccaatactcacacagagagtaaaagaaatgatctggatgttcatcactgatgtccatttgccacaatgtcaataaactgttcttctccacagggtctaacttyacacatcaatacagtttttatctcattcttgactygtgaaagattccagtatagaagctcaccaagcagtgtctccagtaatacccttgggtccaatttccagaattaaaggactcactgcaygtgagcagaacaagagcaggaaccgtaacttacaccattacgttagcagaaaggacaggtgtttgagaagctgcactgtatgcacacaaagaaactatggccctgccactgtggggctatgagaagctgtgtggaggcatctatgctaacctcaagggtgccattggctgcacgcttagagtcacacagcccactgccagatgcctaccgaggtaaatgcatgtcatgttcttaaggcaacgtgaacagatccccagttgtcaaggaaaaactgtcattcataccagttgttttcccaac

SEQ ID NO: 855 - DNA, 600 bp, Chicken  19866894085197_4
aggtaaatgcatgtcatgttcttaaggcaacgtgaacagatccccagttgtcaaggaaaaactgtcattcataccagttgttttcccaacagcaacatgtgaaagagtaaagatagcccagcaatgcagcatgcatgacataggctcagacaaccacataatgtagaaatctatagtcagacaagagagatggttgaagaacactctttcctgcagtttaacttatttcacgtgtttgcaagattgaattcagtttctgttcacctccagatgattgctttcattaacatgattaacagrgacaccatccctgaccacactcaatactgcattgtcacatgctattactaaaatgtcaggcagaccttctggaaggtcaacatgttayaggtgaataataaagcatgtccgcccactgtaataacaagtaaatacatttgctgtgcataagcaatttctctttggtgctgcacgtcctactccatgagtaggtttaagaatggtctcatgcaacaacacatgacaacaaaaggaaaaaaaaaaccaacaaaacttgacatcaatcctagctcctcagagtggggcaggattgcaacatct

SEQ ID NO: 856 - DNA, 600 bp, Chicken  19866894085197_5
acagcaacatgtgaaagagtaaagatagcccagcaatgcagcatgcatgacataggctcagacaaccacataatgtagaaatctatagtcagacaagagagatggttgaagaacactctttcctgcagtttaacttatttcacgtgtttgcaagattgaattcagtttctgttcacctccagatgattgctttcattaacatgattaacagrgacaccatccctgaccacactcaatactgcattgtcacatgctattactaaaatgtcaggcagaccttctggaaggtcaacatgttayaggtgaataataaagcatgtccgcccactgtaataacaagtaaatacatttgctgtgcataagcaatttctctttggtgctgcacgtcctactccatgagtaggtttaagaatggtctcatgcaacaacacatgacaacaaaaggaaaaaaaaaaccaacaaaacttgacatcaatcctagctcctcagagtggggcaggattgcaacatcttacacactgcatcagcacaccacacttacaggtgcattccagttttctttagttctcaccacccactgcctactgtacagattcatga

SEQ ID NO: 857 - DNA, 490 bp, Chicken  19866894085197_6
taacaagtaaatacatttgctgtgcataagcaatttctctttggtgctgcacgtcctactccatgagtaggtttaagaatggtctcatgcaacaacacatgacaacaaaaggaaaaaaaaaaccaacaaaacttgacatcaatcctagctcctcagagtggggcaggattgcaacatcttacacactgcatcagcacaccacacttacaggtgcattccagttttctttagttctcaccacccactgcctactgtacagattcatgacagacgtagtgatgagaccagcaaaacaaaatraaggaggccaatayaaacacaggatacggttaagggatggggcagaattatcagtgctcaaagtaacaagctgggctcagactttctgattaggagcctatcagagagatgctcactagcaaacctgaaaccattggtatgttcaatttgtcagtaaaaattacttcacgtgggaaccataaagacacgt

SEQ ID NO: 858 - DNA, 476 bp, Chicken  19866894085197_7
atttgctgtgcataagcaatttctctttggtgctgcacgtcctactccatgagtaggtttaagaatggtctcatgcaacaacacatgacaacaaaaggaaaaaaaaaaccaacaaaacttgacatcaatcctagctcctcagagtggggcaggattgcaacatcttacacactgcatcagcacaccacacttacaggtgcattccagttttctttagttctcaccacccactgcctactgtacagattcatgacagacgtagtgatgagaccagcaaaacaaaatraaggaggccaatayaaacacaggatacggttaagggatggggcagaattatcagtgctcaaagtaacaagctgggctcagactttctgattaggagcctatcagagagatgctcactagcaaacctgaaaccattggtatgttcaatttgtcagtaaaaattacttcacgtgggaaccataaagacacgt

SEQ ID NO: 859 - DNA, 600 bp, Chicken  19866894085201_1
tgctatgaagaaataaaatcctgaaagatttgtactttttacaaacaaagatattccatggtgagattgtagtggctttaagagagaggatttgtccctgcaaatgtttctttggaaacataatggtgagaggacagtggaggctaagagaacattagtactgcttcaacacaattaattccttctctcatacctccacaatatgtcaggaactttctctccccatggatgtcatgtattttgcattgtactctttctcctctacactatttcctaggtccttcccatttagtgtctaarcccttcttctctttttcttttcatccaagcagaagaggccagctacccaacagccaaggaaaagggagataagaaggctgacatgaagacagaggaagaaaaaaaagaaaagaaaaaaaaaaccaacaaaaaaccacctaggaaactgcataattcaatattttatagtttacagaaactataaaatgttttgactatctaacaaatatcttgactttttgccatttatcaagtgttctgctgatatcacttaagacaatttaatgagaaaaagaatgtttacaaaaagaagcaatgctg

SEQ ID NO: 860 - DNA, 600 bp, Chicken  19866894085202_1
ggagaatcttacctatcatatttaagaagatactttctgaacagcttagatcaacattttgagaaccttcagagtgttttgtattgcccatatttgtctttctagagtgtgatggttctctgattttaagtattttttctgtctttacatttactttttctccttgagtctttacaaatttttaagttttgtcctgtgaaatctttcaactccttgttctgttggcctgctgtaagtggaaatcttttatgttcttgcagaacttaaacaattccaatgagttagcgagtctgaaaaacwtacaataaaaccaaattattcatatacgcagaattcttaaaaactgcagactagcaagatctttttttttcctggcaatagcataatttgtaatcaccttttttttttcttttttttttctgtacttaagaaagtgtgaagtattttgcatgaataattatgtatgatcaactcttgagttttgtaatgcaaaataaaatgggttttattttaagtaagctgaaaaagtatcccacttgcatgctgaacagtctgctttgtcctaatgcagtatacaaaaacttaaaaggttgtaattaa

SEQ ID NO: 861 - DNA, 599 bp, Chicken  19866894085205_1
  misc_feature (1)..(1): n is any nucleotide
nttgctttctctggttctgcagctggtaggatgaatgtcagactggtgtacaccgctgtggcgaaggacagatttgtcataatcttcctggggcttatcgctgtgactgcaagatgggctatcagtatgatgcattcagcaggagctgcattggtatgtaaagtgcaaactgagatgaaacaactgattgattgagccttggacctcaaggcagtatttagcaccattgtagtgtgcagttattagttctgcaatgcagtgcctcagaagataatggattcagctccaaagcagccgtcrctcagtcaaccagctatttagagctctgcccctctgcagtgggtatggaccaggtgtccttggtttagtttggctgcaggttatcagttaaagtcatctgcaaagtattttcctgcaggttatgcttctcctgctgaggaaatttgtctttctaaagtcttcacaacttccttcgtaagagaccatgatagagcattttgtatttcatcactgctatacaccaattagagcataaaggcaaacagaaaaaagtctgaggctgcagcatttcatgctctgcaaatcaatctctgacactt

SEQ ID NO: 862 - DNA, 600 bp, Chicken  19866894085208_1
gctgtggttctcaaggacttgaaaacgtgcagtgaaaaaaaagttagaaatgataggtgaattattacaaaagttagtgatattgagttgtatatgtgggaggataatttgatttttgggttggtttgcacagaaatcccactgatttaatgttttgagctcattcatatgggagcaaaagtgcatgatgttgtcagagatgtcaaatattccacggtagagatgagggtttttcctttagtttgggtttactattagaattcagatttcattactactaattaatattgctttctctcktagagtcagtggctgcagtgaccattttgcatcttcagaaaaggaagcctacgagtgtgttcgaaatattatctcaacgttgaattatgagcctgtgccagaagagcttgtggagcatgaccctcctctctatagctctgatgaactcttggggctggcaccacgagattatagctgtactcttcctgtaaaattggtaagctggcagatcctgtgttccttcattcttttggtctgctctagctgttatcttcggattaataggcaataaggtgttcttctccctttgagaaatcatga

SEQ ID NO: 863 - DNA, 600 bp, Chicken  19866894085211_1
gggttggaagggacctctggggatcatgaagtctaaccccttgctaaagcaggttccctacagcaggttgcaaaggtaggcatccaggccttcagggaaggagactcctaacctgtctgggcagcctgtaccagtgctctgtcaccctcgcagtaaagaagttcttccttggattagcatggaacttcctgtgctacagtttctgctcggtgccccttgtcctattgctgcaccccactgaaaagaacccggccccatccatttgactcccacactttagatatttataaaaaagtgatkaaatcctccctcagccttcccttctccagactaaaaggccctgggtctcttagtctttccttgtacatattaagagatctaggctcttaatctttggggtcccattggactctgtccgggatatccctgtcttttgaactggggagcccagaactgtcaaragaaagttaaatttctagaggacattaggatgataaagagacaaataatagttcggactggacaaagaattcccatcgacttattttctctgaaaaatcaggttttcaggctgaacaaatacccctcccagaacaggtg

SEQ ID NO: 864 - DNA, 600 bp, Chicken  19866894085211_2
ttcttccttggattagcatggaacttcctgtgctacagtttctgctcggtgccccttgtcctattgctgcaccccactgaaaagaacccggccccatccatttgactcccacactttagatatttataaaaaagtgatkaaatcctccctcagccttcccttctccagactaaaaggccctgggtctcttagtctttccttgtacatattaagagatctaggctcttaatctttggggtcccattggactctgtccgggatatccctgtcttttgaactggggagcccagaactgtcaaragaaagttaaatttctagaggacattaggatgataaagagacaaataatagttcggactggacaaagaattcccatcgacttattttctctgaaaaatcaggttttcaggctgaacaaatacccctcccagaacaggtggctgtatctactgtgattcattaccagaacaaaaggaagaaaagtagaacaaggccatagaggaaaatgtgctatgctatcaaacaagacaaaaaaatgttataacaaaaagagcacaacatggattaaaatcatggttaaatgtactgttcaataatata

SEQ ID NO: 865 - DNA, 599 bp, Chicken  19866894085214_1
  misc_feature (1)..(209): n is any nucleotide
nnnnnnnnnnnnnnnnnnnnnnnnnnnnnnnnnnnnnnnnnnnnnnnnnnnnnnnnnnnnnnnnnnnnnnnnnnnnnnnnnnnnnnnnnnnnnnnnnnnnnnnnnnnnnnnnnnnnnnnnnnnnnnnnnnnnnnnnnnnnnnnnnnnnnnnnnnnnnnnnnnnnnnnnnnnnnnnnnnnnnnnnnnnnnnnnnnnnnnnnnnnnnnnnnacgcattcacatctgaaaatgcattgtagatttaagaaaagatctgtgactaaaaaagcaaatgtgtgaaacattttttcctgccattccraaatagaaacagcaattgcatattcacagctggaatgtgagcaagttatattaagagaaaaacacaasttcagatattgactttcagtcagttaaactatagatgttcttagtacattaatgctgyagaatgcgatgtgtcacagaagtggagtgggaatagggatacattacaaaaaatgcccaaatttctctctactgtacatatgtgagccaatatagatacttccatcagagatgcttctatcgtgcaacttgataggattgtacatctcggaggagggcaggcatatagcaagt

SEQ ID NO: 866 - DNA, 599 bp, Chicken  19866894085214_2
  misc_feature (1)..(141): n is any nucleotide
nnnnnnnnnnnnnnnnnnnnnnnnnnnnnnnnnnnnnnnnnnnnnnnnnnnnnnnnnnnnnnnnnnnnnnnnnnnnnnnnnnnnnnnnnnnnnnnnnnnnnnnnnnnnnnnnnnnnnnnnnnnnnnnnnnnnnnnnnnnnnacgcattcacatctgaaaatgcattgtagatttaagaaaagatctgtgactaaaaaagcaaatgtgtgaaacattttttcctgccattccraaatagaaacagcaattgcatattcacagctggaatgtgagcaagttatattaagagaaaaacacaasttcagatattgactttcagtcagttaaactatagatgttcttagtacattaatgctgyagaatgcgatgtgtcacagaagtggagtgggaatagggatacattacaaaaaatgcccaaatttctctctactgtacatatgtgagccaatatagatacttccatcagagatgcttctatcgtgcaacttgataggattgtacatctcggaggagggcaggcatatagcaagtacatgtggaatggaagagagaaagagagctgagagggggaatgttttaccaaaacctaaggttgaaaa

SEQ ID NO: 867 - DNA, 599 bp, Chicken  19866894085214_3
  misc_feature (1)..(83): n is any nucleotide
nnnnnnnnnnnnnnnnnnnnnnnnnnnnnnnnnnnnnnnnnnnnnnnnnnnnnnnnnnnnnnnnnnnnnnnnnnnnnnnnnnnacgcattcacatctgaaaatgcattgtagatttaagaaaagatctgtgactaaaaaagcaaatgtgtgaaacattttttcctgccattccraaatagaaacagcaattgcatattcacagctggaatgtgagcaagttatattaagagaaaaacacaasttcagatattgactttcagtcagttaaactatagatgttcttagtacattaatgctgyagaatgcgatgtgtcacagaagtggagtgggaatagggatacattacaaaaaatgcccaaatttctctctactgtacatatgtgagccaatatagatacttccatcagagatgcttctatcgtgcaacttgataggattgtacatctcggaggagggcaggcatatagcaagtacatgtggaatggaagagagaaagagagctgagagggggaatgttttaccaaaacctaaggttgaaaacatgactcccatattgatgtctcaaaagtttttctcctattaatggaaactgtgcaat

SEQ ID NO: 868 - DNA, 600 bp, Chicken  19866894085214_4
atctcggaggagggcaggcatatagcaagtacatgtggaatggaagagagaaagagagctgagagggggaatgttttaccaaaacctaaggttgaaaacatgactcccatattgatgtctcaaaagtttttctcctattaatggaaactgtgcaatgtaaataaggtggtaagggaacagacttctctctgggtgacagtagtcatgtcatttctaaagggcatttcagtaatttaatgaaattgagtacattgggttatacgtgtaaaatttgagcatatctcactgagataaagtggraaggctgcttttctgaatgggatacctcccagaatatcagtacttgtctctaaaaaccaaaaaacagaacacaaagaattttttcaacatttcagtcatacttcaaaattaacacagagatacttttactatttcatttttttttcctgaacattaggttttgctttttttatacaatgcagatatgagctatttggcaaatgtaggagaaaaagcacgcaaaccaaacaatctattaatgctcagaactatatatgtattccctaaaaatgtaaagcatttttgcttatttattatgta

SEQ ID NO: 869 - DNA, 600 bp, Chicken  19866894085214_5
gaactatatatgtattccctaaaaatgtaaagcatttttgcttatttattatgtaaaacaaaactgttaagatgataataaagtcctgtagccaaaggaaaagtgagtttggtttctctttcaccacaaaacacagggcttcacattgtatattggaaaatttatttcaattcaacatttaattcgactttcagtgccttacaaaatgcacggatttgacgcatcccatttaagctgcattgcattctaaaggaagagtcttggagaactgaaaataacacagaatcactaacaaaacastctaatgcaagatattcaaatacaacgtcagttcacaattcttccctgcagttcttttaatcaattgattgctacatgatgacagtgtgctgcatgccaccattttttgacctctgttcttacctcagtccagatttaatgtctttgctgtctgatcagtgctgtgcatcactgtcacatcttatgcatgcaaatggctttatcagggcatttccccccaggaatccatcagctgttggcagcacaaatctttgccatggcagctattaagctgtacttcagaaaacatttatatagcaa

SEQ ID NO: 870 - DNA, 599 bp, Chicken  19866894085220_1
  misc_feature (1)..(64): n is any nucleotide
nnnnnnnnnnnnnnnnnnnnnnnnnnnnnnnnnnnnnnnnnnnnnnnnnnnnnnnnnnnnnnnnaaatgacaagagttatgtcagaggtatcaacggttaagcttttatgagtcctgaatagaatctatagcagggtacaagcacatactacttatgcttacagtggaattaaatctaaacaaaatgcactggaattaaataacataaaaataatgaaatgatgttcattccaaaaattctccatatatatctgatgtttatattgtaatgttgtattttgacaaataagaaaaagcttrtaggatatctagatcatgaaagactacttaaaaaatacactaggcaacagtaactttatgtatcaataaatacttgggcttttaagagacctaaaaagctattgttggctatgaaatcatcagttgctgtctagaagaacaatatttgaagcacttattcagtaaaatgtgtagcataaaaccctcagagtaataaacaacataataaaaactgtcagtgccttaattgtttaaaaggtgccttcgagcctgaagccaaggccacatagttaaaataatgacttaaggtgttataaatt

SEQ ID NO: 871 - DNA, 600 bp, Chicken  19866894085221_1
aagagaccaaccccactctcgctgtcatcacctttcaggtattggaagagagcaataaggtctctcctcagcctcctcttccccagactaaacagtcccagttccttcagtcactccttgtagggcacattctccaagcccttcacaagccttgttgcccttctatggttcaaaatgaatgaagagttatattctcttcattcatattaactgtcataatattttttcacttcacacttatgaatactaattagacttcatatccccacactgtagaacagaaaggttatattataaaaytatgggtcagtagttagacaagtcatcagcaaaaccagaactcaaatacgggctcctagatctatgcttatttcactaaatgtgctgggatataccatattaattgaccttagaatattctggtattcttgtatgagtcacaaactctgacagttgaactctgtgatgtttgcacatgcccacctctaaagcttgtccaggtccctctggatgcatcccttccctcctgtgtgtgaatgcaccacacagcccggtgtcatttgcaagtcatgtttgcatagcacttgcccaggaataggg

SEQ ID NO: 872 - DNA, 600 bp, Chicken  19866894085222_1
gcaaactaagttgtccctttgggatcccatcattatctctagaaattgttttggacataacttagcacaggaagctatctgcttgagaacagattgctagagattgctaatccttatgaagatccccctatttaacatgtggaggatcttcctagggcaggaattctgtggatttaaactacgttttggctattttgttgagtctttaaggaagtgtgtgaaaacaaaacttgatccatctctgaggtgtgggttcaagcagagtccagccttggtgcagacagagagaatataaacagyaggttttgggggagggggcgcagctagtgcttggtaggacttactgatctctgctcactactactgcatttcaggtgactatatgatcatggtcctcatgtatttcacacctttaactcattagcagagtgccaagaatggagctggaagcaggcgagaagctgaatggtgcaggaggatgtgtctgcagatgaagaaaatacatctccaaggctgtctcagagcaggaaaatgtgtgtcagaattaaatgtccgaacttctcagtcatcacagttacaataggggaagatcgattatac

SEQ ID NO: 873 - DNA, 600 bp, Chicken  19866894085223_1
ttcggaaaacatgttaatagtctaaagtctatttctgtgtttaccttgatcattttattgcctctctttatgaagtgaaaactttgaggctaagtctctaccatctgaaagcttttatcagaaatagaaaataaataagagttacctggctacggttgcactgacctcaggtgggagtgcttgccaattctgtaaagcaaatctatttatttactcttgattttatgatatacttctcagtgtgtactcggtgtgcaggacgtgctatttccgtgccctttcactagatagatatatatrtcatatgccctattgaactcaaggggttaagctagaaaagttacctatctcaacacatgaaaaggaagaattagccgttgttccctagctactcgtgtagctttcaacacctttcctatggtgtctagtattgatagaatatataactgtgaaaagacaagaaaatgcaccaaagtgatctaagtaaactatcatcttgacatgttttttctagctattgaaaacctttccatattgcaactcattctgacagtgaaactgtagaattcctctgatttaagtaccatctggttatgctca

SEQ ID NO: 874 - DNA, 482 bp, Chicken  19866894085223_2
cacctttcctatggtgtctagtattgatagaatatataactgtgaaaagacaagaaaatgcaccaaagtgatctaagtaaactatcatcttgacatgttttttctagctattgaaaacctttccatattgcaactcattctgacagtgaaactgtagaattcctctgatttaagtaccatctggttatgctcaaagctttaaagctattatctcagcataaaatttcagcatcctatacttttttcttcgccaaactatccatttttaagccacaaatatttttccagtcctttcagatkttatctaaaagtatattttaacagtatttaaatagttcttaaacaataacaatttatcttgatagatgacatgctgtgttttttcattttattttaattagccattgtggaaccaaattcccttttgttttactcctttgaatactgtttaattacagttatcatgccaaatatcttaaagg

SEQ ID NO: 875 - DNA, 600 bp, Chicken  19866894085225_1
atcgggaaatgcctgggctcacttggccttgccattattttccctctttgcttcttgttcatctcagagctgccactttctgggtgtgtgttgaaagcttaactgattcataaatgtcagtgcaaacttcaacctataaagccaagcattaaaatttcatggcaccggagctgcagacagcagggcagcatggctgcaatgctacggagcagaggcagcactggggatcatcggagaggaattcagtggggttgggaaacctgagctttacacagagacaagacactgccaccagcatcytggctgtgccaccactactgccttgttcccattgagtacccaaagcaccatgcayctctaaggggatgcagaggaatccccccccygatgacagcacacccaagtgyccrtgtgtccaatggggacatgtgcaagcttcactgcattcaaaggccaagaaatagccccaaatttgggaagaatagcaggcacgctcctggcaccacagccaccccgctgcacaattcagatccttttttcccaagcagagcaggagggcactgtggcttccatgctgcacgctgggggctctgctttgtt

SEQ ID NO: 876 - DNA, 600 bp, Chicken  19866894085225_2
tgttcatctcagagctgccactttctgggtgtgtgttgaaagcttaactgattcataaatgtcagtgcaaacttcaacctataaagccaagcattaaaatttcatggcaccggagctgcagacagcagggcagcatggctgcaatgctacggagcagaggcagcactggggatcatcggagaggaattcagtggggttgggaaacctgagctttacacagagacaagacactgccaccagcatcytggctgtgccaccactactgccttgttcccattgagtacccaaagcaccatgcayctctaaggggatgcagaggaatccccccccygatgacagcacacccaagtgyccrtgtgtccaatggggacatgtgcaagcttcactgcattcaaaggccaagaaatagccccaaatttgggaagaatagcaggcacgctcctggcaccacagccaccccgctgcacaattcagatccttttttcccaagcagagcaggagggcactgtggcttccatgctgcacgctgggggctctgctttgtttccaacacagcaaaaccaacattcctcaccatctcccgcttagatgcagctcaac

SEQ ID NO: 877 - DNA, 600 bp, Chicken  19866894085225_3
tgtgttgaaagcttaactgattcataaatgtcagtgcaaacttcaacctataaagccaagcattaaaatttcatggcaccggagctgcagacagcagggcagcatggctgcaatgctacggagcagaggcagcactggggatcatcggagaggaattcagtggggttgggaaacctgagctttacacagagacaagacactgccaccagcatcytggctgtgccaccactactgccttgttcccattgagtacccaaagcaccatgcayctctaaggggatgcagaggaatccccccccygatgacagcacacccaagtgyccrtgtgtccaatggggacatgtgcaagcttcactgcattcaaaggccaagaaatagccccaaatttgggaagaatagcaggcacgctcctggcaccacagccaccccgctgcacaattcagatccttttttcccaagcagagcaggagggcactgtggcttccatgctgcacgctgggggctctgctttgtttccaacacagcaaaaccaacattcctcaccatctcccgcttagatgcagctcaacagtttttgctggaacttgtttttttgttttt

SEQ ID NO: 878 - DNA, 600 bp, Chicken  19866894085225_4
tcataaatgtcagtgcaaacttcaacctataaagccaagcattaaaatttcatggcaccggagctgcagacagcagggcagcatggctgcaatgctacggagcagaggcagcactggggatcatcggagaggaattcagtggggttgggaaacctgagctttacacagagacaagacactgccaccagcatcytggctgtgccaccactactgccttgttcccattgagtacccaaagcaccatgcayctctaaggggatgcagaggaatccccccccygatgacagcacacccaagtgyccrtgtgtccaatggggacatgtgcaagcttcactgcattcaaaggccaagaaatagccccaaatttgggaagaatagcaggcacgctcctggcaccacagccaccccgctgcacaattcagatccttttttcccaagcagagcaggagggcactgtggcttccatgctgcacgctgggggctctgctttgtttccaacacagcaaaaccaacattcctcaccatctcccgcttagatgcagctcaacagtttttgctggaacttgtttttttgttttttttttaattcaccctgaggtt

SEQ ID NO: 879 - DNA, 600 bp, Chicken  19866894085225_5
taaatgtcagtgcaaacttcaacctataaagccaagcattaaaatttcatggcaccggagctgcagacagcagggcagcatggctgcaatgctacggagcagaggcagcactggggatcatcggagaggaattcagtggggttgggaaacctgagctttacacagagacaagacactgccaccagcatcytggctgtgccaccactactgccttgttcccattgagtacccaaagcaccatgcayctctaaggggatgcagaggaatccccccccygatgacagcacacccaagtgyccrtgtgtccaatggggacatgtgcaagcttcactgcattcaaaggccaagaaatagccccaaatttgggaagaatagcaggcacgctcctggcaccacagccaccccgctgcacaattcagatccttttttcccaagcagagcaggagggcactgtggcttccatgctgcacgctgggggctctgctttgtttccaacacagcaaaaccaacattcctcaccatctcccgcttagatgcagctcaacagtttttgctggaacttgtttttttgttttttttttaattcaccctgaggttaaa

SEQ ID NO: 880 - DNA, 600 bp, Chicken  19866894085225_6
ctcatcatgaaatggaaacattcagctcaaacaaatgtaaaaaagtgtcaaaattacaagcgaatgggaagagaattgaactaaggggtgctggacaagtctaactagacacagcaccagcagctccacctctaaggcatatttggactcgctacgtaatcagccatgattccacaaacaggaactctgtaaaccactctgcacattattttccgaaaccccagccctgcactggatccatctttccacccacatggatccaattacagcatcggcacccaaactctctgggacaaccaraaaagaaagaagtgggtaaaccaaggctttgcttcgttctgatgggcaccacaaacccttttaattcttagcaggctgctccaaatggcattatagcaggctgttgccctaatatttattcatcccctaccattatcccacttgtagttttctagagagcaaagcctgttacctggtgcagagctcaccccttggaaacagcctgcttagcaggaaaaggagctctgtaatataaagacctcataactacatataaaaaaaaagcacggaggcactgtgtaatgcaatgagaccaaactc

SEQ ID NO: 881 - DNA, 600 bp, Chicken  19866894085227_1
tctcacattcagatgttgttatatacctaaagtacaacaaataataaaacatatgaatgtgtccatcaatatttattgctctttttatttaaaccctttctatttaaaccctttttttaatgtagtattataataatggtactaacacaatctagatgttttccatcttggaaaacagctgcctcttctgtagataggtgctcagccatgtcatgcaaagaaagaatcgtttgaccaaaggcatacctaaataaaaggagttgtctagattccttttaaagttatggaagaaaaatatgygatttaagagcaaaattaatctcattccaaactagaaagataaagcatgtttataaggtgtatttatttccataagggaagcctagcacacatggactttcacatggtagctgctcgcctagattaaatgaaacccatactacctcaccagttttaaacaaccatggtagcagggtattgctgtgatctataatattcaaaatctttaatacaatactggagtcctctaatatgcattttacagttataataagttattatagaaagagcaacttaaggatgactaacagcccaatgcgy

SEQ ID NO: 882 - DNA, 600 bp, Chicken  19866894085227_2
gatttaagagcaaaattaatctcattccaaactagaaagataaagcatgtttataaggtgtatttatttccataagggaagcctagcacacatggactttcacatggtagctgctcgcctagattaaatgaaacccatactacctcaccagttttaaacaaccatggtagcagggtattgctgtgatctataatattcaaaatctttaatacaatactggagtcctctaatatgcattttacagttataataagttattatagaaagagcaacttaaggatgactaacagcccaatgcgygtctgagaaaagcccttcctaagggagaagctgagaggatactccatccagacccctaccaggatttggaatggatatagtagaagtaaaggcatagtataaagtgcagcacacatgtaccacaagaaccttaagaagtagctcaggattaggttgtgctgtgagcctgaggctgcatcacagctcagaataagaagagtgcaaaggtggtttagaatccatgtgaactcactctttttcataggagtaataattctgagctgtacaatgccatttcatgctgaaatacctatgttaatg

SEQ ID NO: 883 - DNA, 599 bp, Chicken  19866894085228_1
  misc_feature (1)..(108): n is any nucleotide
nnnnnnnnnnnnnnnnnnnnnnnnnnnnnnnnnnnnnnnnnnnnnnnnnnnnnnnnnnnnnnnnnnnnnnnnnnnnnnnnnnnnnnnnnnnnnnnnnnnnnnnnnnnnaggaataacttgtaaaggcactctaattccatccatttggagctgactgtagctctgaagcagccgcagataacttaagatgttgcaagttcagaagggatttttatctctctgtttggagaagcatcgccttgacttcatcggcacaatctcagtgtgaggctgtagtttaaataacaggaaggaagagcrgctgccccgggtccaagtttgccccaggatttgggataaaggccgggctgccaagcagggggtcccaaaccccatagcagccccatcccacgtgctctggggctatggagggatgcgggggacggttggatcagaacatcgctgccatccaggggatctgggcatgaagtgtacagggaagccctgatggaagaaaacagagcaatgccatgctgagcttcccagagcagagcagggtgagcaggtcctggccctgtgctgcagccccactcagaccagtctatgtctcggtcgctgtc

SEQ ID NO: 884 - DNA, 600 bp, Chicken  19866894085228_2
gggaagccctgatggaagaaaacagagcaatgccatgctgagcttcccagagcagagcagggtgagcaggtcctggccctgtgctgcagccccactcagaccagtctatgtctcggtcgctgtctgctccctgtgccagctgttaaccagcaccacttgctcggcctgagctgacccagccaatacctggaattaatgaaacaaaaaggccatgaagcaaggagctgttgttacctaatgtgtctcatcccctgagcaacgtgtccatcagcacggtgctgcgcatcaggaggggaaggmgatttgggtgcctcgctgtgtgctcagcagctcggatcccctctgctgcttcacctttctaacctgcatctcttctgctgtttttatagaaacagcctcaattattcccaccctgttctagcaggcctagggccaagctgcttagctgcaggttttcctgctcgtgaacagcaagcaacacctatccacgcaatgcagaagaagcatcccagtgggtttgcatttgcgctttgctaaagacagtgcttttggggctgaatttcacccaggagaggcagcaggagactctgcagtgctcag

SEQ ID NO: 885 - DNA, 599 bp, Chicken  19866894085229_1
  misc_feature (1)..(33): n is any nucleotide
nnnnnnnnnnnnnnnnnnnnnnnnnnnnnnnnntgtgtgtgacagatacctcccaggtctttccatcctcctgtagcagaccaactgcttagtctgtggaaggtaaccttatacattaagacttatttttgtgggaaaataatgttgtgttgctttcactgttttttcagaagtattggtttagcatggaaaaaggaaaagatttagtgttttctagttcagaactgctccatgttaaaaccctttaaagggatgtctctttaagtgggtatctctgcctattcatgacttttgtacttytaaattaagtaaataaaaagagactatatgtttctatttgaaaatatgacatgactaaacttgctgtcagtttcccagaatttgcaacatgtacaggagctgcaagtgaatcagagtgcaggctgataagcacactatgttaaccctctttgatgctctgggtttgagaaataaaatacttgggccacagcaatgctcaggcattgtaaccggttgtcaacccagttagcccagcagcagatgtggaaactgcagccagtgcatgtagtagagtgctgcgtgatgcgggtagttcatta

SEQ ID NO: 886 - DNA, 600 bp, Chicken  19866894085231_1
tttggttacggtgctcctcctcctccacctgaccagtttgccccacctggagtaccccctccacctgccactccaggggcagcaccactagcttttcctccaccaccaccgccatctcaggcaactcaggacatgagcaaacccccaactgctcagccagaattcccttacagtcaatttggtaagtaactgcatgtgaaacgtactcagcttgatccttccccttcctgattttcttttctacttgggtagaatgtcagcactgagaaactgcttgctaacactgacagcacttctctsaagggtggacgtgccagctgccagctctcaagtggtccttaatccatccagtattccagccagcaggagttctcttaaccagctctggccattgtgcgtgtcccgcaaagtggtcttcagagatgtgtgcactgataggaaacatcactgatttacactgtgcctgaatctgtagttagaacttttctctaatcacttcatgcagcttgtagccagctgttttgtttaactgactttgaaaagttggagggcrgaygtgagtaagagtagtattgagaggcaagggtattaaaatccagg

SEQ ID NO: 887 - DNA, 600 bp, Chicken  19866894085231_2
atgtcagcactgagaaactgcttgctaacactgacagcacttctctsaagggtggacgtgccagctgccagctctcaagtggtccttaatccatccagtattccagccagcaggagttctcttaaccagctctggccattgtgcgtgtcccgcaaagtggtcttcagagatgtgtgcactgataggaaacatcactgatttacactgtgcctgaatctgtagttagaacttttctctaatcacttcatgcagcttgtagccagctgttttgtttaactgactttgaaaagttggagggcrgaygtgagtaagagtagtattgagaggcaagggtattaaaatccaggctgtgtgctttttactcccatccttgtccctctcctggctgttgggagttgtggttttgtcaggagcacacaatgcttaggctgttatttgtgctctgtaagtaactgttggaagcagctgataaagatgctgataggacatgttttcaggcagtcagatagtactgtcaaacaaaaaaagaccccacagctagacaggcacttgtgctcctgaktaaagtgtccctgtctgtggaaacagggacttctcata

SEQ ID NO: 888 - DNA, 600 bp, Chicken  19866894085231_3
tcagcactgagaaactgcttgctaacactgacagcacttctctsaagggtggacgtgccagctgccagctctcaagtggtccttaatccatccagtattccagccagcaggagttctcttaaccagctctggccattgtgcgtgtcccgcaaagtggtcttcagagatgtgtgcactgataggaaacatcactgatttacactgtgcctgaatctgtagttagaacttttctctaatcacttcatgcagcttgtagccagctgttttgtttaactgactttgaaaagttggagggcrgaygtgagtaagagtagtattgagaggcaagggtattaaaatccaggctgtgtgctttttactcccatccttgtccctctcctggctgttgggagttgtggttttgtcaggagcacacaatgcttaggctgttatttgtgctctgtaagtaactgttggaagcagctgataaagatgctgataggacatgttttcaggcagtcagatagtactgtcaaacaaaaaaagaccccacagctagacaggcacttgtgctcctgaktaaagtgtccctgtctgtggaaacagggacttctcatactg

SEQ ID NO: 889 - DNA, 600 bp, Chicken  19866894085231_4
gctgttttgtttaactgactttgaaaagttggagggcrgaygtgagtaagagtagtattgagaggcaagggtattaaaatccaggctgtgtgctttttactcccatccttgtccctctcctggctgttgggagttgtggttttgtcaggagcacacaatgcttaggctgttatttgtgctctgtaagtaactgttggaagcagctgataaagatgctgataggacatgttttcaggcagtcagatagtactgtcaaacaaaaaaagaccccacagctagacaggcacttgtgctcctgaktaaagtgtccctgtctgtggaaacagggacttctcatactgctttcccactcagtcccacctttgagcagcgttgctcctaagacccatctgtggcagacatttttctgaaggcattgtaataggtcrttttacacttctgaagttaactttttgcagtaggcctgtggattaacattactgtccccaaaggaggattggccttccagatgcactggtaaagcaagcatatattgtctctgaacttgaaacgttaatgttgttacaaacacagctgctgtcatagaaagctttgtgcttg

SEQ ID NO: 890 - DNA, 536 bp, Chicken  19866894085231_5
gggagttgtggttttgtcaggagcacacaatgcttaggctgttatttgtgctctgtaagtaactgttggaagcagctgataaagatgctgataggacatgttttcaggcagtcagatagtactgtcaaacaaaaaaagaccccacagctagacaggcacttgtgctcctgaktaaagtgtccctgtctgtggaaacagggacttctcatactgctttcccactcagtcccacctttgagcagcgttgctcctaagacccatctgtggcagacatttttctgaaggcattgtaataggtcrttttacacttctgaagttaactttttgcagtaggcctgtggattaacattactgtccccaaaggaggattggccttccagatgcactggtaaagcaagcatatattgtctctgaacttgaaacgttaatgttgttacaaacacagctgctgtcatagaaagctttgtgcttgtgactcaagaaggaagtgtatttttgtcttgctacagcttctttacagattctttttgaatggg

SEQ ID NO: 891 - DNA, 600 bp, Chicken  19866894085232_1
ggatggcaaggaaggagttcttctgttggggaggatcttttctgttgaagagactccacttattcctacatttgaaaaaggatgaaattcttaactactggctgaatcctttgcacaggaaagctaggttggtagatgaaagcactgagttaatattcagagcatcttaagaagatgttaaatacacaggaggagccgtgacatgtgggccatgttccacatttttagaacatatttcagaattaattgtgctgacaaaattttataaagagcagctccagacttttcgttttggcaacrgttgcttctggctgctgtctagcagatgaacatgtttttctggttttattactttgagcttggctcacaagcttactgtacagatgattatgggggagaattacctacactcattaaccaggcttaaaatacttacaacagtcaacagctttttagcacgttgcccagagatcccagggaggcaggagggagaatagcaatatgaccagataggaagagtgaagcctggaataggatccaggctgtgttgtcatttgcagccaatatagatggctgtctgggatccagagtgctgaggtc

SEQ ID NO: 892 - DNA, 600 bp, Chicken  19866894085243_1
tggatgggcgtatgttctgctgggtgaaacactggttggatgaccaggcccaaaggattgtggccaatggagctaaatccagccggtcacgagtggtgtccctcagggctcagtactggggccacgactacttagcatgtttattaaagatcttgaggaggggattgagtgcaccctcagtaagttcgcagacaacaccaagttaggagggagtgttgatctgcctgaggggagaaaggcactacagagggacctggatagactggatcgatgggccaaagtaaactgtatgagtttcaryagggccaagtgtcaggtcctgcattttggtcacaacaaaccccaggcaaccctacaggcttggggatgagtggctggaaagctgcctgatggaaagggaccttggtgtactgatggacagttggctgagtatgagccagcagtgtgcccaagtggccaagaaggccaatgacattctggcttgtaccaggaatggtgaggtgagcaggactagggaagtaatcctgcccctgtacttggcactggtcaggcctcacctggagtactgtgttcatttttgggcacctcagtacaggaagg

SEQ ID NO: 893 - DNA, 600 bp, Chicken  19866894085243_2
ggatgggcgtatgttctgctgggtgaaacactggttggatgaccaggcccaaaggattgtggccaatggagctaaatccagccggtcacgagtggtgtccctcagggctcagtactggggccacgactacttagcatgtttattaaagatcttgaggaggggattgagtgcaccctcagtaagttcgcagacaacaccaagttaggagggagtgttgatctgcctgaggggagaaaggcactacagagggacctggatagactggatcgatgggccaaagtaaactgtatgagtttcaryagggccaagtgtcaggtcctgcattttggtcacaacaaaccccaggcaaccctacaggcttggggatgagtggctggaaagctgcctgatggaaagggaccttggtgtactgatggacagttggctgagtatgagccagcagtgtgcccaagtggccaagaaggccaatgacattctggcttgtaccaggaatggtgaggtgagcaggactagggaagtaatcctgcccctgtacttggcactggtcaggcctcacctggagtactgtgttcatttttgggcacctcagtacaggaagga

SEQ ID NO: 894 - DNA, 599 bp, Chicken  19866894085246_1
  misc_feature (1)..(8): n is any nucleotide
nnnnnnnnggctgttaagcactggaataggctccccagggaggtggttgagtcaccatccctggatgtgtttaaaaaccatttggatgtggtgctcagggacatgattcagtggacgattgttagagaagtatggttaagttgcagatgaacttgatgatccttaaggttttttttctaacctgagcaactctatgattctatgattactccactcaaaccattctgggggcaagagaacaggcacaatatctgatgtaagattacactttaaagtaaataaacaaacaaacaaacaaayaaataaataaatgtgcttgcagatttctgcattagaaaataatttccaggcatttttttctgatgctatcttactcattattaatgaagtgaaatagtaagctgaaaatcaatcaccaccaattcattaaatatgaaaattgaagcataagtttatgtttttgtatgcaaagtgatccagaaccatatacatttgcatgtatgaccacacttcaattcagcctcaattttttctggcagaatgttcaacrgagggtgatatttcaaacaatgccatgctgtcacagacgttagtgagct

SEQ ID NO: 895 - DNA, 600 bp, Chicken  19866894085246_2
tctgatgtaagattacactttaaagtaaataaacaaacaaacaaacaaayaaataaataaatgtgcttgcagatttctgcattagaaaataatttccaggcatttttttctgatgctatcttactcattattaatgaagtgaaatagtaagctgaaaatcaatcaccaccaattcattaaatatgaaaattgaagcataagtttatgtttttgtatgcaaagtgatccagaaccatatacatttgcatgtatgaccacacttcaattcagcctcaattttttctggcagaatgttcaacrgagggtgatatttcaaacaatgccatgctgtcacagacgttagtgagctttgggctggatgctcgaaaactggacagaaagtggaactgaacagcgaagggaaaagcaatatcaattttttgtgctactaactggttgcagtcaattgtcagcttagggaaaaccaaatgtcataaaaagcacacagcagaatgcttgaattgcagaggaacaacagttggcaagtctgagacatggccataccttcaagctatgtggacatctctgtatcgtctctgaagttcagaggcacaaacctga

SEQ ID NO: 896 - DNA, 600 bp, Chicken  19866894085249_1
atttttttttccagaagagaaaatctgcatgtgggatagaaatagtattaacttgctctatgagagctcacagcagaagtgcatttgcaatgtgtcattgggtctctgtctgtcagcccatttccatggggaggcaagatttagtgtacgggctccagctgagcaccttataacatcagtgcaggaaaagcaatttagcaaatgaagctgcattatataggatgtcaagcagcctacttctgggtcctgttctctgcaagggacttcatcgtgacataaactgaaggcatgattaacagmcttgaaattgaaagcacaagaaaaatcctcatgcaaaataatccaaaagcagcctgccctcaagttccccaagcagcagttgggttgggtgtgtgttttctgtcacagagatgaagtgtcctgcctatagacttttttatttctcttgtataaatcaactaagagctgactataaaaatgaattggagaggggggggtraagatggatttatttggccccttgccttctttttcccattgccttcttcctgtagatggcacaagtgtgagtcttattgtctgtccaccttgcatcgaaat

SEQ ID NO: 897 - DNA, 600 bp, Chicken  19866894085249_2
aaatgaagctgcattatataggatgtcaagcagcctacttctgggtcctgttctctgcaagggacttcatcgtgacataaactgaaggcatgattaacagmcttgaaattgaaagcacaagaaaaatcctcatgcaaaataatccaaaagcagcctgccctcaagttccccaagcagcagttgggttgggtgtgtgttttctgtcacagagatgaagtgtcctgcctatagacttttttatttctcttgtataaatcaactaagagctgactataaaaatgaattggagaggggggggtraagatggatttatttggccccttgccttctttttcccattgccttcttcctgtagatggcacaagtgtgagtcttattgtctgtccaccttgcatcgaaatacgcagagagaatgagatcttaaagacgcttgattcgagcataggttttagtagggaaaatcaaaaggaaggaaggatggacgaggtyatctggttatgaaactttcttatttaaaaccttggcttttatgcagagacagcacagaagcagtggcttctgtkattttattgaatcttgctgtatttgatgtttttgcta

SEQ ID NO: 898 - DNA, 600 bp, Chicken  19866894085249_3
gtgtgtgttttctgtcacagagatgaagtgtcctgcctatagacttttttatttctcttgtataaatcaactaagagctgactataaaaatgaattggagaggggggggtraagatggatttatttggccccttgccttctttttcccattgccttcttcctgtagatggcacaagtgtgagtcttattgtctgtccaccttgcatcgaaatacgcagagagaatgagatcttaaagacgcttgattcgagcataggttttagtagggaaaatcaaaaggaaggaaggatggacgaggtyatctggttatgaaactttcttatttaaaaccttggcttttatgcagagacagcacagaagcagtggcttctgtkattttattgaatcttgctgtatttgatgtttttgctagcaacccatttctgtgcttgggttatgttctgggagatttctcttttgagaaagggtttccagcccagctctcttggcatcatcagcagactgtaccctaaacctttgcaaaccggacagcctataagtagacgatgcagtttgttatcgctgttaaccccatcatttccgtattacaaatcagaaccg

SEQ ID NO: 899 - DNA, 600 bp, Chicken  19866894085249_4
gagctgactataaaaatgaattggagaggggggggtraagatggatttatttggccccttgccttctttttcccattgccttcttcctgtagatggcacaagtgtgagtcttattgtctgtccaccttgcatcgaaatacgcagagagaatgagatcttaaagacgcttgattcgagcataggttttagtagggaaaatcaaaaggaaggaaggatggacgaggtyatctggttatgaaactttcttatttaaaaccttggcttttatgcagagacagcacagaagcagtggcttctgtkattttattgaatcttgctgtatttgatgtttttgctagcaacccatttctgtgcttgggttatgttctgggagatttctcttttgagaaagggtttccagcccagctctcttggcatcatcagcagactgtaccctaaacctttgcaaaccggacagcctataagtagacgatgcagtttgttatcgctgttaaccccatcatttccgtattacaaatcagaaccgttcaaattgtcaggtaacgttgctttgcccgtggataccccagcagagcatctcagaatggaggtgaatcagct

SEQ ID NO: 900 - DNA, 599 bp, Chicken  19866894085251_1
  misc_feature (1)..(106): n is any nucleotide
nnnnnnnnnnnnnnnnnnnnnnnnnnnnnnnnnnnnnnnnnnnnnnnnnnnnnnnnnnnnnnnnnnnnnnnnnnnnnnnnnnnnnnnnnnnnnnnnnnnnnnnnnncagcactgagattgatcaacctttcttcctcccatgacatgcttagccttgtcaaagtgttggaaccagcttcagttttctctgtttcctatgattctgagttaaccctcttttcaggaaattagtggcttcctgtaggctattcgtagttgctgctggctgagaagagtgaggtgatgtctgtgcaatgaaaygtgataaagtgttgaggaggattagctttttccttttctagggctgggatggcacagttgagcgcgatagcggtttgggaccagtgccacgagcaacttctgctctccttcrtgttgctgcagtgggggcattgagctttggtggaagatgagccaaaactcagtgcttttgttctctggatttgttggctccttaattcatttggaggtactggggtggttttcattgtttgcttaggaaagcaaaaccaaatgaaatctgctgagaatccttcttgttttagggaactgtgtacggg

SEQ ID NO: 901 - DNA, 592 bp, Chicken  19866894085251_2
cagcactgagattgatcaacctttcttcctcccatgacatgcttagccttgtcaaagtgttggaaccagcttcagttttctctgtttcctatgattctgagttaaccctcttttcaggaaattagtggcttcctgtaggctattcgtagttgctgctggctgagaagagtgaggtgatgtctgtgcaatgaaaygtgataaagtgttgaggaggattagctttttccttttctagggctgggatggcacagttgagcgcgatagcggtttgggaccagtgccacgagcaacttctgctcrtgttgctgcagtgggggcattgagctttggtggaagatgagccaaaactcagtgcttttgttctctggatttgttggctccttaattcatttggaggtactggggtggttttcattgtttgcttaggaaagcaaaaccaaatgaaatctgctgagaatccttcttgttttagggaactgtgtacggggtcagggagaccacggcgttttcactgcacggattgtccgttgttgcagggaccctttttgtgccctgggaactcacgttggggcttctccttcctgctctgcgt

SEQ ID NO: 902 - DNA, 600 bp, Chicken  19866894085253_1
cagagccctgaagtgcttgcaggaggaaccttgaaagaaaagtaatgaacaagtttggttacagtttttgaggaggaagggaattatttacataggtgtaatattaacacaaattataattagtaaaagaaaaaaaagcacttactatttttcttattgaatttgcactctggaaaacattgaaaagtagattagaaatgcaatgataactgtcagaattcttattctgacaaagtgagtgttttctttgtgtttaaacgtttttctacaactgctttcctaatgaaactaatataaaastaattaaactcaatatatttcttataaataataaaaaataatttgcataatgtatcttctaatgaactatttttagaaaccaatgcatttttgtcaactgttatacccctaacacaataattccaagcactactataattaccaaggaaatgcaagtttcttacctgattagcgggacacttttcaatatgagcaacaataatttctcccggtagcttgactaaaacrtaagaagccatgttacagagggctatgttgtttccatcaaatgtaataacactcagttcagacagaacagaa

SEQ ID NO: 903 - DNA, 600 bp, Chicken  19866894085253_2
gacaaagtgagtgttttctttgtgtttaaacgtttttctacaactgctttcctaatgaaactaatataaaastaattaaactcaatatatttcttataaataataaaaaataatttgcataatgtatcttctaatgaactatttttagaaaccaatgcatttttgtcaactgttatacccctaacacaataattccaagcactactataattaccaaggaaatgcaagtttcttacctgattagcgggacacttttcaatatgagcaacaataatttctcccggtagcttgactaaaacrtaagaagccatgttacagagggctatgttgtttccatcaaatgtaataacactcagttcagacagaacagaacactgacctaaaaaagaagtgtcatttaatgaggctaccacaaaacataatattaggcatttctaaaaatgttcagtttgacaaatactttcatatgaagtgctttcatataagatactttcatatatatgtctagatggcattgttctgcagacagcatactgagccacaaggagaagcaccttatgttactctgtggaaaacagcttagccgagtgctttgctccc

SEQ ID NO: 904 - DNA, 600 bp, Chicken  19866894085253_3
ataagtttcagaaatgctgcagtttttaatataatttctctttgaactcctggtactctaggcagaaagtctgctcccagtctctacagtttctaaatgtcagtaataactccttctagagctgagtgaaatctggaggttctttcatgaaaggctactattttatttgtattcttcctcaaaatgctgacgtacaaatgttttctaatgatacatattctgaagattttcatctgaaaatgttgatattcatcttgcagttctaatttcagtgtttttgtttgaaacaaactcgactcytgaatgttaattcaaagataccaaagcatttactatatttcattgtgttctgctgatgagacccaagtcatctcctttaaattaatttctatattcaacattatctgtccactgtaatagtctcttagtttatcacctaaaawttacataktaaggctctatgttgtaagtatttataaataaaagtgacttacaaggacattcccattctgggcaacaactatcattattaacttgaactggcattcctcgaaaaccacagtctggcttctgcacatccttaaggcagttctttgaaag

SEQ ID NO: 905 - DNA, 600 bp, Chicken  19866894085253_4
ttcatgaaaggctactattttatttgtattcttcctcaaaatgctgacgtacaaatgttttctaatgatacatattctgaagattttcatctgaaaatgttgatattcatcttgcagttctaatttcagtgtttttgtttgaaacaaactcgactcytgaatgttaattcaaagataccaaagcatttactatatttcattgtgttctgctgatgagacccaagtcatctcctttaaattaatttctatattcaacattatctgtccactgtaatagtctcttagtttatcacctaaaawttacataktaaggctctatgttgtaagtatttataaataaaagtgacttacaaggacattcccattctgggcaacaactatcattattaacttgaactggcattcctcgaaaaccacagtctggcttctgcacatccttaaggcagttctttgaaaggttgtataacatccagcycgtatgaacacatacatactggctacatttgtcgacaggttcaaggtatcttggctttcgtataagaaaaaaacaaccagaatcaactttacactcattggactaacgaaccattaacaattctt

SEQ ID NO: 906 - DNA, 600 bp, Chicken  19866894085253_5
aggctactattttatttgtattcttcctcaaaatgctgacgtacaaatgttttctaatgatacatattctgaagattttcatctgaaaatgttgatattcatcttgcagttctaatttcagtgtttttgtttgaaacaaactcgactcytgaatgttaattcaaagataccaaagcatttactatatttcattgtgttctgctgatgagacccaagtcatctcctttaaattaatttctatattcaacattatctgtccactgtaatagtctcttagtttatcacctaaaawttacataktaaggctctatgttgtaagtatttataaataaaagtgacttacaaggacattcccattctgggcaacaactatcattattaacttgaactggcattcctcgaaaaccacagtctggcttctgcacatccttaaggcagttctttgaaaggttgtataacatccagcycgtatgaacacatacatactggctacatttgtcgacaggttcaaggtatcttggctttcgtataagaaaaaaacaaccagaatcaactttacactcattggactaacgaaccattaacaattcttcactagtt

SEQ ID NO: 907 - DNA, 444 bp, Chicken  19866894085253_6
taccaaagcatttactatatttcattgtgttctgctgatgagacccaagtcatctcctttaaattaatttctatattcaacattatctgtccactgtaatagtctcttagtttatcacctaaaawttacataktaaggctctatgttgtaagtatttataaataaaagtgacttacaaggacattcccattctgggcaacaactatcattattaacttgaactggcattcctcgaaaaccacagtctggcttctgcacatccttaaggcagttctttgaaaggttgtataacatccagcycgtatgaacacatacatactggctacatttgtcgacaggttcaaggtatcttggctttcgtataagaaaaaaacaaccagaatcaactttacactcattggactaacgaaccattaacaattcttcactagttcatgctctgct

SEQ ID NO: 908 - DNA, 600 bp, Chicken  19866894085254_1
ttgctcaccgcccctgttccccgtttgtgttggcagacagaaaatggggtcctgctgccctcgctgcagtcggccctgcccttcctggacctgcacggcactccccggctggagttccaccagtcggtgtttgacgagctgagggagaagctgctggagcgggtctcggccatcgccttggaagggaaggtggaggaaaggtctgtaggctcgttggttatttgcggtgagcgggggatttaatgtgaacattatctgcagtgggcaagtggcttctgaaaaagacttgagtcttctggrggctcaagttgtagtgtttgagatgagccatttttgtcctttgcagttaaacggtagttggagtctcttggttttatgtgttttcaggtacaagaagctggaagatctcctggagaaaagcttttccttggtcaagatgccttccatacagcctgtggtaatgtgtgtcatgaagcacttgcccaaggtaaaactgctgcttaggctggcctgttttgttgtgtccctggtggcttgtgctgttacttctctgttgtatgacttctcttggctgtgctgttggctggactgcaggctcca

SEQ ID NO: 909 - DNA, 600 bp, Chicken  19866894085255_1
tgttccctcagagcagtggcatgccgacttgccagcagtcaggggaagaagtgacccacgtcattgtgggaattaaaatctcccccagcttgcttcattttggcctttaaaaagaaccaactgaaaatccacattgttcccagaaggcagtggtctgggatgtgacacagccagctctgcttgaggtctgggtctgtcccactacagacattatgagagatgagcgctcaggacgaggtcactgggccttgtactggtcaaactgcctcctgtactgccactggacaccacacagagaaktctggccctgtctcctttacatcctcccacaaggcatgcagtggaggagacgatcatatctctccacctgctggcaacacttccacgtgcagcccagaatgctcgtggcctctttttgccacaggggcacgctgctggcaggaccggcttcttgcctgtgaagaccaccacagcttctgcagaactgttttccagcaggaggaccccaatgtgcacaggtgccatttgcccccaggtgcgacatctcgtttggttgcatttcacaaggctctctcagtaytcctggtcacattcttgtcc

SEQ ID NO: 910 - DNA, 600 bp, Chicken  19866894085255_2
ctggacaccacacagagaaktctggccctgtctcctttacatcctcccacaaggcatgcagtggaggagacgatcatatctctccacctgctggcaacacttccacgtgcagcccagaatgctcgtggcctctttttgccacaggggcacgctgctggcaggaccggcttcttgcctgtgaagaccaccacagcttctgcagaactgttttccagcaggaggaccccaatgtgcacaggtgccatttgcccccaggtgcgacatctcgtttggttgcatttcacaaggctctctcagtaytcctggtcacattcttgtcccttagatgtttgcaaatggtttccagggaagtttgctccactggcttcccaggcaccaacagaggctgactggagtgtagttccttggaccttctccttgaacacagaagtgacattcaccttttttccagtcgctgggaaacgtgcctggtcacctttcaaagataacgcagcgtggccctgcagagacaccagttggctccctcagcacccatcaggtcgacggcattaaaaaaagagggctggtttacctcctcgatyctgcaaataaagtcactca

SEQ ID NO: 911 - DNA, 600 bp, Chicken  19866894085255_3
cacaaggctctctcagtaytcctggtcacattcttgtcccttagatgtttgcaaatggtttccagggaagtttgctccactggcttcccaggcaccaacagaggctgactggagtgtagttccttggaccttctccttgaacacagaagtgacattcaccttttttccagtcgctgggaaacgtgcctggtcacctttcaaagataacgcagcgtggccctgcagagacaccagttggctccctcagcacccatcaggtcgacggcattaaaaaaagagggctggtttacctcctcgatyctgcaaataaagtcactcaagactcacttccttctgcaaatgcagttcagagaatgcaactgaaatgctgtttcctgcatttttaagagacactgtgaacatatcgagcaggttttaaaaacaagccattctgcatccactattgctgcaacaggaacgagcaagaacagccttgctcccatgcatgggatgcgagagcactgaaataaagcgtcaggcatattgccttctcacttctgcaaatgtgttttgcaaagcatacaacctcatctctggttttactgcaaacccaaagcaaaa

SEQ ID NO: 912 - DNA, 600 bp, Chicken  19866894085269_1
tcacctagtgtcaaaatatatatactttttttccattttatttcttttcccctaggacattgttcttgctccctgaagtgcaagttttcaggcagcagaattatctctcatttccatgctgtgcaaacaacatgggcagactttagctttggaattacccagcagttccctagtcagcgcagaaatatcagcatgcagggtgttgagaactacagctattgtagacaagcatcacattactaagaaatccccagactcctcaaaataagaggaagcaaggagggaaccagctctcaagamgatgtttttgaattgcaacatctcccaggacttctcatggagcagtactttctgtcctcatcctctatccctcaggcataatttmactggaagagggaaggtcttagagaaaggaaattaaaaaaaaaaaaaaaaaaaaatctcattttcttctctgtgagggaaaaagtaaaaataaatcactccagctgcgagagactggaatcagtagggagactggatgtgaatttcctcggaaaatgtttacagctgctgctgagtgggtttcaagcatttcagatggataccccagaarcccca

SEQ ID NO: 913 - DNA, 600 bp, Chicken  19866894085269_2
tttcaggcagcagaattatctctcatttccatgctgtgcaaacaacatgggcagactttagctttggaattacccagcagttccctagtcagcgcagaaatatcagcatgcagggtgttgagaactacagctattgtagacaagcatcacattactaagaaatccccagactcctcaaaataagaggaagcaaggagggaaccagctctcaagamgatgtttttgaattgcaacatctcccaggacttctcatggagcagtactttctgtcctcatcctctatccctcaggcataatttmactggaagagggaaggtcttagagaaaggaaattaaaaaaaaaaaaaaaaaaaaatctcattttcttctctgtgagggaaaaagtaaaaataaatcactccagctgcgagagactggaatcagtagggagactggatgtgaatttcctcggaaaatgtttacagctgctgctgagtgggtttcaagcatttcagatggataccccagaarccccaggtgaatgaaaaaaaaaaatagaagtgtaaaaaaaactaatctctaaggtttgtgctgaaaacccaagtcctgtatgggaaagtt

SEQ ID NO: 914 - DNA, 518 bp, Chicken  19866894085269_3
aagamgatgtttttgaattgcaacatctcccaggacttctcatggagcagtactttctgtcctcatcctctatccctcaggcataatttmactggaagagggaaggtcttagagaaaggaaattaaaaaaaaaaaaaaaaaaaaatctcattttcttctctgtgagggaaaaagtaaaaataaatcactccagctgcgagagactggaatcagtagggagactggatgtgaatttcctcggaaaatgtttacagctgctgctgagtgggtttcaagcatttcagatggataccccagaarccccaggtgaatgaaaaaaaaaaatagaagtgtaaaaaaaactaatctctaaggtttgtgctgaaaacccaagtcctgtatgggaaagttgtctagctatgaccctaccacaaggtggatttagtgctatgagttacccacagactgcctgcccccagcccatcttaagctcagattcatagatttgattgatactggtaaataaaacaaataagagg

SEQ ID NO: 915 - DNA, 600 bp, Chicken  19866894085270_1
aatggagttagattttaagaaccaagctggagccctgactctgtttctgctgtggctgacccagcagggagcccttgttctttgtggtttgtttttgcccaaaccaaactcagttatacagtagctctagcagtctatctgctgattactgatttagcagagaatctcagtatgatctaattattgcaacgcaggaaccctacatactttgctggaaccagctaataaagagcttaaattgacatgccccagggttagcaccccgcaggaagagttaaaagctgccagcaaccggtgctytgcaggagcagcaccttctggggagttgatcttttaccactgataccaytggtgaaatggggagaacagagaatttgcacttctgatattttggctgtcgtatgggcaatgtgatgcatttatgtcctaaatagcagaaataatgtcactgttcatagaaggactagtgtcttcctgtccccttagctgtgggtgctattaaatgccatacttcactgtcaactctcaaccacttaaccctgaggcagaagctttgtctacttgtggcagtagctcccctccagtttctaagccttcttc

SEQ ID NO: 916 - DNA, 600 bp, Chicken  19866894085270_2
ctgtggctgacccagcagggagcccttgttctttgtggtttgtttttgcccaaaccaaactcagttatacagtagctctagcagtctatctgctgattactgatttagcagagaatctcagtatgatctaattattgcaacgcaggaaccctacatactttgctggaaccagctaataaagagcttaaattgacatgccccagggttagcaccccgcaggaagagttaaaagctgccagcaaccggtgctytgcaggagcagcaccttctggggagttgatcttttaccactgataccaytggtgaaatggggagaacagagaatttgcacttctgatattttggctgtcgtatgggcaatgtgatgcatttatgtcctaaatagcagaaataatgtcactgttcatagaaggactagtgtcttcctgtccccttagctgtgggtgctattaaatgccatacttcactgtcaactctcaaccacttaaccctgaggcagaagctttgtctacttgtggcagtagctcccctccagtttctaagccttcttcaggaaaagggtttgataagtaccactaaatctatatgtgtgcatctgga

SEQ ID NO: 917 - DNA, 600 bp, Chicken  19866894085270_3
cagtagctcccctccagtttctaagccttcttcaggaaaagggtttgataagtaccactaaatctatatgtgtgcatctggacaatgctgagtaactccttccttggcttgtgtgcttgctcagggctaacagatctttcacacctcttttacctgcatggcagtatggacaaacagaattgtagcaaacctcctgttggacctgatgtaatgtaatggggggaaaaaaagaagaggcgtatcttctcttaccttctctttatccattgagagtgtggcttaagacatttacatggcccrggaatgatgtgttttatttttcatgcttgaattgttaagctacagaatattctggagtgatgcactgcctgtcatttgctattcgttgcatcagagaggaggaaaggagatgactgtgcataagtggttcagacactaggatgggagagaagagcttggatttcagatgtctctccatcagtcagcaggtgttttttttgtaggaattaatgatttgagtgagacttgaactctgtcctgatcagtgtgggccacagatatgcctgtatgttctctttggcacagtgctgatgagctcag

SEQ ID NO: 918 - DNA, 600 bp, Chicken  19866894085280_1
ttacacaccttctgcctgccagtccggactgcaggttggatcagttttggtgcttccccaaatctgtctcagggcatccttaagccacttgctgaaacccacagccccatggcagttcctgcaccgctccctggctgccttgcacgcggcactaattatttgcacaaatcagtgcctctgcaacatattggaaacaatctgaggtattgaagtgtggcaggcgtttgtcttccatcccttggattctcttcaaataacctccatctgtctgccagctcctggcccagggcacggtgagcygctgcacacaaacaccgcctggccggcggcaggcagcacctcggggcacacttgcccaatgtttgtttggttttgcctgcttgtttgtcgtacctcctctgctcacaacctgagtgctcatctgatagtagggctgctggttgtgcaaggctcgcgtgcggtcctggctgcaggaactaaatctctccatttttatcctgttcacgggaccagggcctcttgcaccatttttcttcccccggcgacctgtagataaggatcctcagagctgtcgtgtcctgcagagtgagggaggatagg

SEQ ID NO: 919 - DNA, 600 bp, Chicken  19866894085284_1
ctactaaaatactaacacttgtggcttctgtgaatgtcatgatattgaagtagtttatctgtggaattccttactttccctgccagtagctacatgcaacaggagtgagcaggtttggtaggtggctgcaacagtaaaactgtatttgtagcaaactaggagttataatatcagttaatttattaataattgatataactgaaaactaattaattactgttattataaagacttccaggagcatgtgatctgacataggtgaagtggtttatgcctggctgttacttatcacaaaggctyctggagcaatagtgaacagggaactgtacagtgtacactgagagtacaaaactgcagagtgatgcaaagctgatcttgccatttgctgatgctccatatctttctttctaaacatacacctcgggcattcttttccaaagacagctttacagtgcatagagatggggagaatacctttgtgagcaagtttgaaggtaaggtgagaaatagctatttttgggggagtcaatttggttttagtggcaagtattcctatttagttggtgatatacctgacataagtagacaagtaattcaaac

SEQ ID NO: 920 - DNA, 600 bp, Chicken  19866894085284_2
agagatggggagaatacctttgtgagcaagtttgaaggtaaggtgagaaatagctatttttgggggagtcaatttggttttagtggcaagtattcctatttagttggtgatatacctgacataagtagacaagtaattcaaacggtatgtttagtataacagatggaaaaactgtggtgaacagaaagaaccagtgagtattcagttgaccttgtagctccctggtgagcagcacagatataacctttataggatggattagctgtcagagcagtaatgtctatgttagttttcttcaamgaaaaatcttgccttcagcaactgtaagcgatggttattaaaatgcaagaaatcagctctgtttatatatacatatataaagaacacataattcagtatggctaattctctaagacgataaatcacttgactttgattaagatgatgtcttcttaagctgttgttccataatttattttttaccaagttagtatccacacagcattaagcttatgcaggtctcratatggttgtcattttgtgatgcttctgtaygcagctgagagaaccccttatattttgatgtactaaccatagttt

SEQ ID NO: 921 - DNA, 600 bp, Chicken  19866894085284_3
gtgagcagcacagatataacctttataggatggattagctgtcagagcagtaatgtctatgttagttttcttcaamgaaaaatcttgccttcagcaactgtaagcgatggttattaaaatgcaagaaatcagctctgtttatatatacatatataaagaacacataattcagtatggctaattctctaagacgataaatcacttgactttgattaagatgatgtcttcttaagctgttgttccataatttattttttaccaagttagtatccacacagcattaagcttatgcaggtctcratatggttgtcattttgtgatgcttctgtaygcagctgagagaaccccttatattttgatgtactaaccatagtttttcatgggaaaggatgctgctatcaaaaataaattagaatccttactgaagctctgcaaactatcagtctctcttttgagagtcatagtagtgaagatacaatatgaagtttaacacgggttagcgaggggaaaaatccctaatgttcaagtgcttctaacttgggtcttgacacaattaataattgtcaagcctcccattccatgcaataagagaatcagatg

SEQ ID NO: 922 - DNA, 600 bp, Chicken  19866894085284_4
ggattagctgtcagagcagtaatgtctatgttagttttcttcaamgaaaaatcttgccttcagcaactgtaagcgatggttattaaaatgcaagaaatcagctctgtttatatatacatatataaagaacacataattcagtatggctaattctctaagacgataaatcacttgactttgattaagatgatgtcttcttaagctgttgttccataatttattttttaccaagttagtatccacacagcattaagcttatgcaggtctcratatggttgtcattttgtgatgcttctgtaygcagctgagagaaccccttatattttgatgtactaaccatagtttttcatgggaaaggatgctgctatcaaaaataaattagaatccttactgaagctctgcaaactatcagtctctcttttgagagtcatagtagtgaagatacaatatgaagtttaacacgggttagcgaggggaaaaatccctaatgttcaagtgcttctaacttgggtcttgacacaattaataattgtcaagcctcccattccatgcaataagagaatcagatgttctttgtagctactgaacgttgtatgcagc

SEQ ID NO: 923 - DNA, 600 bp, Chicken  19866894085286_1
ggctattaacatactagaactacccccttagatctgaaataaaatactcacttggaacacttcaatctcaaccatctagaaatgttcattggaagcaaatattaagtgacagcataatttcagattgtgtaccggtaaacaacacaatgcaatgtttttgccatgtcttctgtgaagcagaggagaaagaccgctttatacagggcattgttctttctgttggacaagtgtgtgaaagttctatgccgttactttgagtagtaatgcatagatgaggatgacaccactgtcagagaagcrtgaagacatctgtataaattggcatactgtgactttgtccagcaaaattccaggtagaggagttcatcctgaacacaagcaccttaaatggagatactcagactggcatcatgtacaatagtgtaagttcccatactttaatgaatgaattatgcatagctctgttacacctgagctcttggaaattatctggatggtaggaggagtgataaattagaagtgcttttaagttaaacaaaactgacttctaatactgaagaatactgctttcttatttctgctgttcctcatatgcttgca

SEQ ID NO: 924 - DNA, 484 bp, Chicken  19866894085286_2
aagacatctgtataaattggcatactgtgactttgtccagcaaaattccaggtagaggagttcatcctgaacacaagcaccttaaatggagatactcagactggcatcatgtacaatagtgtaagttcccatactttaatgaatgaattatgcatagctctgttacacctgagctcttggaaattatctggatggtaggaggagtgataaattagaagtgcttttaagttaaacaaaactgacttctaatactgaagaatactgctttcttatttctgctgttcctcatatgcttgcacrctggaaagctattacatatccaagggacatcagcatgtttaaaactgtggttgttgcctgagtttactcttgcgtccctcagcagttgccaggttgaagagataagtctctttctgagacactgtaaagggttggtacagtaagggatgggaaaatgaagacttccattcagtctttacagatt

SEQ ID NO: 925 - DNA, 600 bp, Chicken  19866894085290_1
gcttttatttccttgtgtccttacagctcatctcatcatagaaggcagtcaggttggtatagcacagtctaaccctggtaaatccaatctacttgcttttagtcaccttcactgtccttcatgccttcatgccttcatgctcctggaagtgttttcattggagacttcccccaggaatctcctagggaggaggcaggagcaaacagcccctggttcctgcttgtttattcatttgggtttttcacgtgggagaaacagttgtacccccagctgcccccgcctgtccaaagacagaaagcygccagacagtaccaggatcatagaatagtagaatcacaaggttggaaaggacctacaagatcatctggtccatccgtcctcccatcaccattgctcccataagcyacttaaccatatctcgtagctcctcatccagacgcctcttgaacactgccagggatggcgactccaccacctccctgggcagccattccagtgcctgaccattctctgagmgaaaaagatgctgcagagcagctcctggagccccacaccaaacacatgccagggaattgcatctataattacgtctctgaggga

SEQ ID NO: 926 - DNA, 600 bp, Chicken  19866894085290_2
ccttcactgtccttcatgccttcatgccttcatgctcctggaagtgttttcattggagacttcccccaggaatctcctagggaggaggcaggagcaaacagcccctggttcctgcttgtttattcatttgggtttttcacgtgggagaaacagttgtacccccagctgcccccgcctgtccaaagacagaaagcygccagacagtaccaggatcatagaatagtagaatcacaaggttggaaaggacctacaagatcatctggtccatccgtcctcccatcaccattgctcccataagcyacttaaccatatctcgtagctcctcatccagacgcctcttgaacactgccagggatggcgactccaccacctccctgggcagccattccagtgcctgaccattctctgagmgaaaaagatgctgcagagcagctcctggagccccacaccaaacacatgccagggaattgcatctataattacgtctctgagggagctcataagtatcattcctcctagctagaccttgtatagaattaagtcagcaggttcagaacagagaatatcttccctctcccactctatatcacaattgttaat

SEQ ID NO: 927 - DNA, 600 bp, Chicken  19866894085290_3
ctgcttgtttattcatttgggtttttcacgtgggagaaacagttgtacccccagctgcccccgcctgtccaaagacagaaagcygccagacagtaccaggatcatagaatagtagaatcacaaggttggaaaggacctacaagatcatctggtccatccgtcctcccatcaccattgctcccataagcyacttaaccatatctcgtagctcctcatccagacgcctcttgaacactgccagggatggcgactccaccacctccctgggcagccattccagtgcctgaccattctctgagmgaaaaagatgctgcagagcagctcctggagccccacaccaaacacatgccagggaattgcatctataattacgtctctgagggagctcataagtatcattcctcctagctagaccttgtatagaattaagtcagcaggttcagaacagagaatatcttccctctcccactctatatcacaattgttaatgtattacttcctagctttaatcaagaaataaaggaggatataaaagcataataaagacaaactggtttaaaattaacaacaaaaaaaaaaaatcagaatttcaggaataca

SEQ ID NO: 928 - DNA, 600 bp, Chicken  19866894085291_1
tcctttggcgtgtgttggatctgttcctacattcaggtgtcaggcttttccctgcaggtctggaggctgaaaccaggggctaccagggcctgtggcctctccacttcccaggtaagcagggctgcagctggggcacggtgccccacagctggacacaaaaacctgctgctgcctgaactgtggggagttgggaactgctgagcccctggaactggtgccggcagaggggatcttggttcccctcagcatgggtaactgaggtgagcctggagaagagaagagcagaaaatgcaacagagktggactggagtggctctgaaagaggaatgaactgatgctgggagcagaaaggtggactagatgttgcccaagagaggcacgagcggttctcaggtgtgagtgcccatgctggtcaggtgccctgctctccttcctgctgcagcggtgggctccatggggttatggactgctttctgtgcccttcctaaggtgttttgggtggaagctggcacactgctgtgcacttgtggaagtacgttgtcagtgccagagaaaggagttcctggagagcaatggctgcaytgctkttggttcccttcc

SEQ ID NO: 929 - DNA, 600 bp, Chicken  19866894085291_2
cagaaaatgcaacagagktggactggagtggctctgaaagaggaatgaactgatgctgggagcagaaaggtggactagatgttgcccaagagaggcacgagcggttctcaggtgtgagtgcccatgctggtcaggtgccctgctctccttcctgctgcagcggtgggctccatggggttatggactgctttctgtgcccttcctaaggtgttttgggtggaagctggcacactgctgtgcacttgtggaagtacgttgtcagtgccagagaaaggagttcctggagagcaatggctgcaytgctkttggttcccttcctggaagcagagtcctgcctgtgccagcctcggaaacacctggcacccccgtgtgccttctggccctttgctcactctatctttgctctcttccagccactcccactctcccggctccatggctgctgtgcacgagtggtcctgcacccgctgcaccttcctgaaccccgtgggccaacggcagtgctccatatgcgaagccccgcgccagaagcctgacctcaaccacatcctgcggctcagcgtggaggagcagaagtgggcctgtgcccgctgcaccttc

SEQ ID NO: 930 - DNA, 600 bp, Chicken  19866894085291_3
aatgcaacagagktggactggagtggctctgaaagaggaatgaactgatgctgggagcagaaaggtggactagatgttgcccaagagaggcacgagcggttctcaggtgtgagtgcccatgctggtcaggtgccctgctctccttcctgctgcagcggtgggctccatggggttatggactgctttctgtgcccttcctaaggtgttttgggtggaagctggcacactgctgtgcacttgtggaagtacgttgtcagtgccagagaaaggagttcctggagagcaatggctgcaytgctkttggttcccttcctggaagcagagtcctgcctgtgccagcctcggaaacacctggcacccccgtgtgccttctggccctttgctcactctatctttgctctcttccagccactcccactctcccggctccatggctgctgtgcacgagtggtcctgcacccgctgcaccttcctgaaccccgtgggccaacggcagtgctccatatgcgaagccccgcgccagaagcctgacctcaaccacatcctgcggctcagcgtggaggagcagaagtgggcctgtgcccgctgcaccttcaggaa

SEQ ID NO: 931 - DNA, 435 bp, Chicken  19866894085291_4
agccagggcccagcggctctcccctgcctgtcatcaatggcatcctgcccaagcctgcagtgctggtggagcccaagggcacagccaaaggaggaggctgccaaggtggaaagcagcagcgaggattcagaggggaagagtcccgacgaagcagagctggagagcggctgggcttgccagcgctgcacgctgcacaacactccagtggccaactcctgctcggcctgcggcgggccgcgcaaactctccctgcccaaaatcccaccagaggcgctggtcgtccctgaggtcatcaccccygctggcttccacatggccccctccaccccgcagtctttagtccccacagacatctgtgatggtgatgccgcggccgctcagggcccggtggcgatgaacaagaggcacagaagatgccgaccttcagccccttct

SEQ ID NO: 932 - DNA, 599 bp, Chicken  19866894085294_1
  misc_feature (1)..(79): n is any nucleotide
nnnnnnnnnnnnnnnnnnnnnnnnnnnnnnnnnnnnnnnnnnnnnnnnnnnnnnnnnnnnnnnnnnnnnnnnnnnnnnncccccccccccccccccttaggggtcccacagcagcagccccgctctgctctctgcaggatgactttctctccaaactgctaatgagcacatttctgcccatctgtcatggaaaccacagaaaccgtgtcagagaggtgaggatccgggggcgagcagcccttccctcactgcatccatcggtgccaccatcagtgccacccatccatccgtccacccttyctgcaatgccacagccccgggtgctgcagcacagtgtgaggagtgggasgaggaggcagcctgcacctgtatgcacgtgcgtgtgcaatgtcaaggagtgtggccatgcacagtggtgtgtaaatcctcgtgcagtgtgcaaggatgggcaagcacgtgtctgcatgcaccgaggtgcttgtgtgcacacagggctgtgcatgtgttcctgcacaggtgtgtgaccttgtgtgctcatggccgtgtyggggtgcaaatgttgtgcatgtatgcagctctgctggttgttcttgcacatg

SEQ ID NO: 933 - DNA, 599 bp, Chicken  19866894085294_2
  misc_feature (1)..(30): n is any nucleotide
nnnnnnnnnnnnnnnnnnnnnnnnnnnnnncccccccccccccccccttaggggtcccacagcagcagccccgctctgctctctgcaggatgactttctctccaaactgctaatgagcacatttctgcccatctgtcatggaaaccacagaaaccgtgtcagagaggtgaggatccgggggcgagcagcccttccctcactgcatccatcggtgccaccatcagtgccacccatccatccgtccacccttyctgcaatgccacagccccgggtgctgcagcacagtgtgaggagtgggasgaggaggcagcctgcacctgtatgcacgtgcgtgtgcaatgtcaaggagtgtggccatgcacagtggtgtgtaaatcctcgtgcagtgtgcaaggatgggcaagcacgtgtctgcatgcaccgaggtgcttgtgtgcacacagggctgtgcatgtgttcctgcacaggtgtgtgaccttgtgtgctcatggccgtgtyggggtgcaaatgttgtgcatgtatgcagctctgctggttgttcttgcacatggctgtgcacggtcctcacatctgtgtgtgcatggcagcactgcagccyr

SEQ ID NO: 934 - DNA, 600 bp, Chicken  19866894085294_3
actgcatccatcggtgccaccatcagtgccacccatccatccgtccacccttyctgcaatgccacagccccgggtgctgcagcacagtgtgaggagtgggasgaggaggcagcctgcacctgtatgcacgtgcgtgtgcaatgtcaaggagtgtggccatgcacagtggtgtgtaaatcctcgtgcagtgtgcaaggatgggcaagcacgtgtctgcatgcaccgaggtgcttgtgtgcacacagggctgtgcatgtgttcctgcacaggtgtgtgaccttgtgtgctcatggccgtgtyggggtgcaaatgttgtgcatgtatgcagctctgctggttgttcttgcacatggctgtgcacggtcctcacatctgtgtgtgcatggcagcactgcagccyrcatgtgagagtgcaagcctgcgtgtgcgcatgctctgcatgtaagtgcatgtgtatgcacagctgtttgcaggtcatgcttgcacacgtgtgtgcacaccctgcttggaggggtgggtgcatagcattgtttcttgcacttctctgctttgtaccttcttgcctacgtcactcttatttacttaaggagaaagtggctg

SEQ ID NO: 935 - DNA, 600 bp, Chicken  19866894085294_4
asgaggaggcagcctgcacctgtatgcacgtgcgtgtgcaatgtcaaggagtgtggccatgcacagtggtgtgtaaatcctcgtgcagtgtgcaaggatgggcaagcacgtgtctgcatgcaccgaggtgcttgtgtgcacacagggctgtgcatgtgttcctgcacaggtgtgtgaccttgtgtgctcatggccgtgtyggggtgcaaatgttgtgcatgtatgcagctctgctggttgttcttgcacatggctgtgcacggtcctcacatctgtgtgtgcatggcagcactgcagccyrcatgtgagagtgcaagcctgcgtgtgcgcatgctctgcatgtaagtgcatgtgtatgcacagctgtttgcaggtcatgcttgcacacgtgtgtgcacaccctgcttggaggggtgggtgcatagcattgtttcttgcacttctctgctttgtaccttcttgcctacgtcactcttatttacttaaggagaaagtggctgcagaggcgcagggccggagctgtggggctccttctgcatccccgcaccctctgagcagggtcactaattagcagcactaattgctcccaccggtgctggt

SEQ ID NO: 936 - DNA, 600 bp, Chicken  19866894085294_5
sgaggaggcagcctgcacctgtatgcacgtgcgtgtgcaatgtcaaggagtgtggccatgcacagtggtgtgtaaatcctcgtgcagtgtgcaaggatgggcaagcacgtgtctgcatgcaccgaggtgcttgtgtgcacacagggctgtgcatgtgttcctgcacaggtgtgtgaccttgtgtgctcatggccgtgtyggggtgcaaatgttgtgcatgtatgcagctctgctggttgttcttgcacatggctgtgcacggtcctcacatctgtgtgtgcatggcagcactgcagccyrcatgtgagagtgcaagcctgcgtgtgcgcatgctctgcatgtaagtgcatgtgtatgcacagctgtttgcaggtcatgcttgcacacgtgtgtgcacaccctgcttggaggggtgggtgcatagcattgtttcttgcacttctctgctttgtaccttcttgcctacgtcactcttatttacttaaggagaaagtggctgcagaggcgcagggccggagctgtggggctccttctgcatccccgcaccctctgagcagggtcactaattagcagcactaattgctcccaccggtgctggtg

SEQ ID NO: 937 - DNA, 600 bp, Chicken  19866894085296_1
tctgtcatctttcttggcctggtgacatccaactttgctatgcactcaaataagagatgcttggggggctcagaaatgcctgtctgtgacacactggttgtgaaatacaaatgcacggtgtgaattccttgatttctaactggtgtttggacaaaaacataggctgggggtggtgtgaagcagcagtccctgatccaggcccaaaggggtttcccagggaccacagtgagctggaaaatgtgtgcatttattgctgagcagcacttgcagcacatcctgcagtgcacaacaaacccagcragcccttgcatttgcagtgagcagccagcaggaattgtcccagagccttctcctggagaagccctgcaggactgtgaggtcccttccaacccatccactctgtgcttctgactgcacatcccagctggctctgagcagccttgcctccacgtgcagggrtgaaacagcagttaatagtatcagccatgtattatccaaagacttttctggggagaagcgccttggatcatctgtcctttgcatcagtaggagaaacagcggagcaggcaggacctaattgctcgttaaggcagcacctgt

SEQ ID NO: 938 - DNA, 564 bp, Chicken  19866894085296_2
taggctgggggtggtgtgaagcagcagtccctgatccaggcccaaaggggtttcccagggaccacagtgagctggaaaatgtgtgcatttattgctgagcagcacttgcagcacatcctgcagtgcacaacaaacccagcragcccttgcatttgcagtgagcagccagcaggaattgtcccagagccttctcctggagaagccctgcaggactgtgaggtcccttccaacccatccactctgtgcttctgactgcacatcccagctggctctgagcagccttgcctccacgtgcagggrtgaaacagcagttaatagtatcagccatgtattatccaaagacttttctggggagaagcgccttggatcatctgtcctttgcatcagtaggagaaacagcggagcaggcaggacctaattgctcgttaaggcagcacctgttgtattgtctcccagatgaatgtctgcacacagatctctctgctgcctgcgagtgccctcattttgagcctgcaacgtgttggctttgcaaaacgcctcctgcctttccctggggtttggctc

SEQ ID NO: 939 - DNA, 600 bp, Chicken  19866894085303_1
tggtttggctctgtggaaaggggaaattctggtggaagcagcgtgctccatgctcatcacgtgaaaccttagaaagtttccataagaagcactggcatttcttgtaatattgataacatctgatcttgcatatggcaacttaaattggatttgctcctttttttttttatgaagtcatgtgctcttgcaggtggcaagcacaaacacagacctgaacttcagtcatccagtggacttaaaatgtaatgagtttcaataactgctttgcagaaaaataggattccagtgctctctaaagcrtcagtgagcagtggacatcctcatctccagtctgactgcagttcgcagcatgccctcagtttcaaaagagaataacagcttcagttctcttttcttttactgaggatgcagccagagcawcctgtcactcaagaaggtcagtatcactggactgttagaaactcagtgctacaaaacaaaagtagcaccaccatggtcctttttgtctttcctagcaatggaaatattcttatcatataaattctacctcagaaaggcaaaagacattggcaagtggaagaattaagttctgatatgaac

SEQ ID NO: 940 - DNA, 600 bp, Chicken  19866894085303_2
tgatcttgcatatggcaacttaaattggatttgctcctttttttttttatgaagtcatgtgctcttgcaggtggcaagcacaaacacagacctgaacttcagtcatccagtggacttaaaatgtaatgagtttcaataactgctttgcagaaaaataggattccagtgctctctaaagcrtcagtgagcagtggacatcctcatctccagtctgactgcagttcgcagcatgccctcagtttcaaaagagaataacagcttcagttctcttttcttttactgaggatgcagccagagcawcctgtcactcaagaaggtcagtatcactggactgttagaaactcagtgctacaaaacaaaagtagcaccaccatggtcctttttgtctttcctagcaatggaaatattcttatcatataaattctacctcagaaaggcaaaagacattggcaagtggaagaattaagttctgatatgaacagacgtttcaaacatatttcttgacccctagagaaataayttatatccccctgtacttccttcccttcctctgtggtactcaagtacattataagcagaggtatcatttatatgtagcac

SEQ ID NO: 941 - DNA, 600 bp, Chicken  19866894085303_3
gttcgcagcatgccctcagtttcaaaagagaataacagcttcagttctcttttcttttactgaggatgcagccagagcawcctgtcactcaagaaggtcagtatcactggactgttagaaactcagtgctacaaaacaaaagtagcaccaccatggtcctttttgtctttcctagcaatggaaatattcttatcatataaattctacctcagaaaggcaaaagacattggcaagtggaagaattaagttctgatatgaacagacgtttcaaacatatttcttgacccctagagaaataayttatatccccctgtacttccttcccttcctctgtggtactcaagtacattataagcagaggtatcatttatatgtagcacaggatctattctaatcctcatgtattaagtgacgttaactacaggtctctctgtacagctgtttgcacagctggatgtgtcagatagaataagttcatcctttctaagacgagcttaaatctgcagcctaccagtatctttctcatttacaccaagcaccctttcacgttgttcccataagggaggttggttttagcagtcatgttcttggtgcagtcct

SEQ ID NO: 942 - DNA, 599 bp, Chicken  19866894085311_1
  misc_feature (1)..(86): n is any nucleotide
nnnnnnnnnnnnnnnnnnnnnnnnnnnnnnnnnnnnnnnnnnnnnnnnnnnnnnnnnnnnnnnnnnnnnnnnnnnnnnnnnnnnnnacccaataaggacagataaagaaatgcaaagaccattgcaaaacactgtttattactattttcagtggcggtgagtactccaaaatgaatccctgtacagctgaacttttggcatcagacaatactgctgggacctcagcagaccacagtcagctcattttttgcatctgaatccctaaaaaaagaacaccccagacttttagggtggaattcrttttaatcaaatatttgtgtcttatgttgtggctttaaaacaatcactgtccagtggaaagtgatacaatatggcacactgaaaagcattcccagagycatcagaatgcaatcgctgaggagttcattttctgcaaggtcttaaaacacaaccatgcagtaaaaaaactttatttcattgtctggctattctgccaagtccgttccttcctggaatgtttattaaatttagtttcatgtggtctgtaaatatatatacatatatgcattcatatctggtctcctcttgcctcaggaggc

SEQ ID NO: 943 - DNA, 600 bp, Chicken  19866894085311_10
ctggcttaaaggagctcttagcwtttgctacaaatgccactcgtttacaagatttcgggtgcattatgttgcagcatttaattggttgctttttttatatatataattaccattaattgcacactaagtatttaatattaattattgcagtttgactcttttccctttttgaaagattttaggttacaagtaaaccttctgtcagttatttttttaaagtctttcagaaatttgtgccttgactaatcctycaggaagtttattcccaattacagtgtggactattacttaatttgttgyttttttcctcacatctggcccagtacacgggacacatggggacttggccccatggccacgaccaaaattactgccctggccccaaagacagggctgcaaaagtcattattgacaatgactcctgcaaagcaccagaacgcccatttgagatgtctgttaaatacagttcaaacaacactgcaccagaaatgttatgaatattttaaagtgccttcttaaagttcgagattgcctactgaaggcggtcattaatgcaggtttcattagagaagcagactggaacaagttatcgagttacca

SEQ ID NO: 944 - DNA, 600 bp, Chicken  19866894085311_2
cagataaagaaatgcaaagaccattgcaaaacactgtttattactattttcagtggcggtgagtactccaaaatgaatccctgtacagctgaacttttggcatcagacaatactgctgggacctcagcagaccacagtcagctcattttttgcatctgaatccctaaaaaaagaacaccccagacttttagggtggaattcrttttaatcaaatatttgtgtcttatgttgtggctttaaaacaatcactgtccagtggaaagtgatacaatatggcacactgaaaagcattcccagagycatcagaatgcaatcgctgaggagttcattttctgcaaggtcttaaaacacaaccatgcagtaaaaaaactttatttcattgtctggctattctgccaagtccgttccttcctggaatgtttattaaatttagtttcatgtggtctgtaaatatatatacatatatgcattcatatctggtctcctcttgcctcaggaggctgggtgggctgcagcctgctttaggggaattagtactagtgctcgaattttagctacatgcaaagatgtgacaaaacaaatttgctctccctgtgggag

SEQ ID NO: 945 - DNA, 600 bp, Chicken  19866894085311_3
atcagaatgcaatcgctgaggagttcattttctgcaaggtcttaaaacacaaccatgcagtaaaaaaactttatttcattgtctggctattctgccaagtccgttccttcctggaatgtttattaaatttagtttcatgtggtctgtaaatatatatacatatatgcattcatatctggtctcctcttgcctcaggaggctgggtgggctgcagcctgctttaggggaattagtactagtgctcgaattttagctacatgcaaagatgtgacaaaacaaatttgctctccctgtgggagytttgccctccctgtggatgactaaatctagattacatagctcgtgctgataaaaatgcagcaatctcttctttcgttattatttttgtgttggagtttttctttcttcttcttcttcttytttttttttttttgaccaagagcacagagtattgacttgatgattccaacgcagctgtctggcagtgttaatcaatgatctctgcttgctcacaatgtactaccagcgttagatcatggtgacaagagcagtacaagcttagtgcagcctccgagtaaatcatcactctcttagtcacta

SEQ ID NO: 946 - DNA, 600 bp, Chicken  19866894085311_4
tttattaaatttagtttcatgtggtctgtaaatatatatacatatatgcattcatatctggtctcctcttgcctcaggaggctgggtgggctgcagcctgctttaggggaattagtactagtgctcgaattttagctacatgcaaagatgtgacaaaacaaatttgctctccctgtgggagytttgccctccctgtggatgactaaatctagattacatagctcgtgctgataaaaatgcagcaatctcttctttcgttattatttttgtgttggagtttttctttcttcttcttcttcytytttttttttttttgaccaagagcacagagtattgacttgatgattccaacgcagctgtctggcagtgttaatcaatgatctctgcttgctcacaatgtactaccagcgttagatcatggtgacaagagcagtacaagcttagtgcagcctccgagtaaatcatcactctcttagtcactatgagcacttggactaaatgagcatttggagtaaatactgttttccacatgttagaaaccaaagtaaaattgctcctctcctctccccacaaactgtttcrtatctctgattactgtgc

SEQ ID NO: 947 - DNA, 600 bp, Chicken  19866894085311_5
tattaaatttagtttcatgtggtctgtaaatatatatacatatatgcattcatatctggtctcctcttgcctcaggaggctgggtgggctgcagcctgctttaggggaattagtactagtgctcgaattttagctacatgcaaagatgtgacaaaacaaatttgctctccctgtgggagytttgccctccctgtggatgactaaatctagattacatagctcgtgctgataaaaatgcagcaatctcttctttcgttattatttttgtgttggagtttttctttcttcttcttcttcttytttttttttttttgaccaagagcacagagtattgacttgatgattccaacgcagctgtctggcagtgttaatcaatgatctctgcttgctcacaatgtactaccagcgttagatcatggtgacaagagcagtacaagcttagtgcagcctccgagtaaatcatcactctcttagtcactatgagcacttggactaaatgagcatttggagtaaatactgttttccacatgttagaaaccaaagtaaaattgctcctctcctctccccacaaactgtttcrtatctctgattactgtgccc

SEQ ID NO: 948 - DNA, 600 bp, Chicken  19866894085311_6
ctttcttcttcttcttcttytttttttttttttgaccaagagcacagagtattgacttgatgattccaacgcagctgtctggcagtgttaatcaatgatctctgcttgctcacaatgtactaccagcgttagatcatggtgacaagagcagtacaagcttagtgcagcctccgagtaaatcatcactctcttagtcactatgagcacttggactaaatgagcatttggagtaaatactgttttccacatgttagaaaccaaagtaaaattgctcctctcctctccccacaaactgtttcrtatctctgattactgtgcccatcgcaaaatattcttctgtcttccatagctagataattgaatccctattgtttccatagtcttaatgaagttcctgtaagatccttgcttgttacatctgaaaattgaataaaaaattcctttgtgctgacagcttcattgtagtcagtgttcaaaatatcaaaggaagaacactaaatgttcataatgtaaagtgtcaggagtgcaatctgggataatagaatacatgtcttgcaaacttgcactttaatatggcaaactacttggtcagcaagcaaa

SEQ ID NO: 949 - DNA, 600 bp, Chicken  19866894085311_7
ttagcagagatatctgttacacaggcaaagagagagacggcactgaaaggatttatgttatttttgagccttggcttgcacacgaatgatgtgaatctttctactgaaagaaaagtgaggtccaatttttcaaaacgttgccttgaagttttgtttttcagagttggtgacctgattggaaaagcagctctctggaaaaataattatgggagacaaaaaataataagaaaaaagaaagaaaatacgtgatgtgctgtagaagttccagccacaaacagattttcattctcttgtgcatawgaaagcaaataaaaaatgaaagcaactacgcaaaaagaagagcagaaagcaacaaatggattaacaggtttggttgatctctttctttaagaaaagaaacaagatttggtcaccctttttgactggttaactgtgtcctccttcacaggtactgctgatgaagaacacacatttgtaacttactgtaattatctgttattttatatatatatatgtttatataatatcctacagatgagtccttagaaatactaagtaaggaattgctaaaaccaaagcctgtaagtgaaatagttcaga

SEQ ID NO: 950 - DNA, 600 bp, Chicken  19866894085311_8
caggagcacctggttatggatgccacctctgctcagcagggatcaggacaacccctataacagctactggtcagtttatggctcaaacgtgtttatatttatttactgagcactgattgcattaccatttgcatttgcagaagaggttcacatttactccattgttttgttgctaaagttatttcaactgtgcaaaggttaagtctgactttcatcgtatctaagtaaatgtattaaggtaacacttattcccaaagcaaaagcctttaagaagtgactggcttaaaggagctcttagcwtttgctacaaatgccactcgtttacaagatttcgggtgcattatgttgcagcatttaattggttgctttttttatatatataattaccattaattgcacactaagtatttaatattaattattgcagtttgactcttttccctttttgaaagattttaggttacaagtaaaccttctgtcagttatttttttaaagtctttcagaaatttgtgccttgactaatcctycaggaagtttattcccaattacagtgtggactattacttaatttgttgyttttttcctcacatctggcccag

SEQ ID NO: 951 - DNA, 600 bp, Chicken  19866894085311_9
atgtattaaggtaacacttattcccaaagcaaaagcctttaagaagtgactggcttaaaggagctcttagcwtttgctacaaatgccactcgtttacaagatttcgggtgcattatgttgcagcatttaattggttgctttttttatatatataattaccattaattgcacactaagtatttaatattaattattgcagtttgactcttttccctttttgaaagattttaggttacaagtaaaccttctgtcagttatttttttaaagtctttcagaaatttgtgccttgactaatcctycaggaagtttattcccaattacagtgtggactattacttaatttgttgyttttttcctcacatctggcccagtacacgggacacatggggacttggccccatggccacgaccaaaattactgccctggccccaaagacagggctgcaaaagtcattattgacaatgactcctgcaaagcaccagaacgcccatttgagatgtctgttaaatacagttcaaacaacactgcaccagaaatgttatgaatattttaaagtgccttcttaaagttcgagattgcctactgaaggcggtcatta

SEQ ID NO: 952 - DNA, 600 bp, Chicken  19866894085314_1
tcatgagtgacattatttgacagagatgtcaactgatgtattttgccatagttgggtcaaatactgtgctgatatttacgtgattagcgaaaatttgagtttccaccctgttttataaaggagctgccttcttacacagctcttttcatttctgcaggcaagtgtgctgttctgtcgttcaaggacttcctctgctgcagaccaactgaaatttctgaaaacgatgttttcctctgtgagagccgctacaacgaaagcgacaaacaaatgaagaaatttaaggggctcaagagattttcrctctctgcaaaagttgtcgatgatgaaatatattattttaggtaaaaatgttatgggaatgaggagcactgtgtattatggtgggttgacccacccggcatctgagcccctattcagccacttgcacactccccttagtgtgacgaagaaaagggcaaaagcaagaaacactcttttgttaatagaaagacagtataattactgatgcaaagctatgcatgcaagcaaagcaaaataggaatttgctacttcccatcagctggcagatgtttagctacttgctgaaaagcagggcctcag

SEQ ID NO: 953 - DNA, 599 bp, Chicken  19866894085315_1
  misc_feature (1)..(63): n is any nucleotide
nnnnnnnnnnnnnnnnnnnnnnnnnnnnnnnnnnnnnnnnnnnnnnnnnnnnnnnnnnnnnnntggtctgcagcagaggaagtccttgaacgacagaacagcacacttgcctgcagaaatgaaaagagctgtgtaagaaggcagctcctttataaaacagggtggaaactcaaatttgcgctaatcacgtaaatatcagcacagtatttgacccaactatggcaaaatacatcagttgacatctctgtcaaataatgtcactcatgagaaacctacgccaactgaatgcagcttttggartttttttttwaagaattaaaaaaaaaaaacaattaaaagattaacaacaaaaaaaaagccatcactagtctataacacagtatttagcacagcatctagattacacaatgaagtacataacagtcatcttattcaacaaaccaaatatcaacctccaggttgatatgactttccaggtacatatactggaataattacattaatgagcaagaataatgggactttcctgctcactgactttagatttttgcttgtttttttcttttaaatgtacagagtgcccagtggatttaaagttg

SEQ ID NO: 954 - DNA, 599 bp, Chicken  19866894085315_2
  misc_feature (1)..(53): n is any nucleotide
nnnnnnnnnnnnnnnnnnnnnnnnnnnnnnnnnnnnnnnnnnnnnnnnnnnnntggtctgcagcagaggaagtccttgaacgacagaacagcacacttgcctgcagaaatgaaaagagctgtgtaagaaggcagctcctttataaaacagggtggaaactcaaatttgcgctaatcacgtaaatatcagcacagtatttgacccaactatggcaaaatacatcagttgacatctctgtcaaataatgtcactcatgagaaacctacgccaactgaatgcagcttttggattttttttttwaagaattaaaaaaaaaaaacaattaaaagattaacaacaaaaaaaaagccatcactagtctataacacagtatttagcacagcatctagattacacaatgaagtacataacagtcatcttattcaacaaaccaaatatcaacctccaggttgatatgactttccaggtacatatactggaataattacattaatgagcaagaataatgggactttcctgctcactgactttagatttttgcttgtttttttcttttaaatgtacagagtgcccagtggatttaaagttgctaggaatta

SEQ ID NO: 955 - DNA, 600 bp, Chicken  19866894085316_1
gtcagctttgggttcatgcttaattgccccattttcttgcaacttcagactcccaccttcccctctgctcctctcgttccccctccctggcccctgagcacgcatcactttgggatcggtctgacattgggtcctgactatgcagcagtgagccatccagtgaatcctgagattgcctttcatctgcttcacacttggtctctttgaaagccacagtcttacacaaaactttagaaagcagaaccccagacataaaatcacaagacaggaggttgagcactgtatcaccagccaagaagmcagaggttgcagcatttctcttactactcagcactggacatgcatctgcttcccaggcaccaccttattctccagggtggcagggaacaagggtcattaccatcttaaaccctttcattcacattaggtgttacttgactgaatggtttayagcctaaaaccaatataagcacrgtgacaacctgatccaaaacattcctctttttggtattcagagaagagctcgagagtctcccagaagttaaagaatgctttcacatcctatatcttcagaagagtcctttccaaaatcttaagctt

SEQ ID NO: 956 - DNA, 600 bp, Chicken  19866894085316_2
gccatccagtgaatcctgagattgcctttcatctgcttcacacttggtctctttgaaagccacagtcttacacaaaactttagaaagcagaaccccagacataaaatcacaagacaggaggttgagcactgtatcaccagccaagaagmcagaggttgcagcatttctcttactactcagcactggacatgcatctgcttcccaggcaccaccttattctccagggtggcagggaacaagggtcattaccatcttaaaccctttcattcacattaggtgttacttgactgaatggtttayagcctaaaaccaatataagcacrgtgacaacctgatccaaaacattcctctttttggtattcagagaagagctcgagagtctcccagaagttaaagaatgctttcacatcctatatcttcagaagagtcctttccaaaatcttaagcttgctctgtctcctcatactgctgaaggatttgttggggattagccaggatatttcatgcaactttcacaatgttaagccaagagtatgtacaagatctctacaaagagaaagagacctttctccatgaatacagaggattgtttaagaagta

SEQ ID NO: 957 - DNA, 600 bp, Chicken  19866894085316_3
gcctttcatctgcttcacacttggtctctttgaaagccacagtcttacacaaaactttagaaagcagaaccccagacataaaatcacaagacaggaggttgagcactgtatcaccagccaagaagmcagaggttgcagcatttctcttactactcagcactggacatgcatctgcttcccaggcaccaccttattctccagggtggcagggaacaagggtcattaccatcttaaaccctttcattcacattaggtgttacttgactgaatggtttayagcctaaaaccaatataagcacrgtgacaacctgatccaaaacattcctctttttggtattcagagaagagctcgagagtctcccagaagttaaagaatgctttcacatcctatatcttcagaagagtcctttccaaaatcttaagcttgctctgtctcctcatactgctgaaggatttgttggggattagccaggatatttcatgcaactttcacaatgttaagccaagagtatgtacaagatctctacaaagagaaagagacctttctccatgaatacagaggattgtttaagaagtaatgtgagcgattaaggaataatt

SEQ ID NO: 958 - DNA, 600 bp, Chicken  19866894085316_4
gtacaagatctctacaaagagaaagagacctttctccatgaatacagaggattgtttaagaagtaatgtgagcgattaaggaataattaagttgttgaagcagacatctaggttgggtgaaaggagaaaaaagcagtaagagaggagtggaatagattttctaggcaaattggaatcactgtcaccagaggtttttacagagcaggcggacaaacagttgtcaggaacaacacagacatggcttgaagacattgagatgatctgaatgacctcttgcagacatgcagaaaatccagttgstctaaggacagggtaattaccagtgagcaaggcagcagcaggaacgctgaggacctgctcagaataaaactgctgtgacaaatgcagcatgcaaggtctggcccagtagaattctaagaatgactctcatccccattctagmttttacatacaaaatgaatgtgatagaattctccttgattcttataaaaacaaacatatcatttaaagaaaagtctagaaaaaggtgcattagattggacacacaatttattaaacaagaagcacaaacccagccctctcagcagcctgaatccacta

SEQ ID NO: 959 - DNA, 600 bp, Chicken  19866894085316_5
aggagtggaatagattttctaggcaaattggaatcactgtcaccagaggtttttacagagcaggcggacaaacagttgtcaggaacaacacagacatggcttgaagacattgagatgatctgaatgacctcttgcagacatgcagaaaatccagttgstctaaggacagggtaattaccagtgagcaaggcagcagcaggaacgctgaggacctgctcagaataaaactgctgtgacaaatgcagcatgcaaggtctggcccagtagaattctaagaatgactctcatccccattctagmttttacatacaaaatgaatgtgatagaattctccttgattcttataaaaacaaacatatcatttaaagaaaagtctagaaaaaggtgcattagattggacacacaatttattaaacaagaagcacaaacccagccctctcagcagcctgaatccactactttccatcactacgcagagaaagctatgtaytcttgcaacgcacataatcacgctgccccacttcttcacccagcttaaatgatccacgaaaaaggaaaaaattgaatggtctgagagcaaaagctgtccacagcagcatt

SEQ ID NO: 960 - DNA, 600 bp, Chicken  19866894085316_6
cagcagcaggaacgctgaggacctgctcagaataaaactgctgtgacaaatgcagcatgcaaggtctggcccagtagaattctaagaatgactctcatccccattctagmttttacatacaaaatgaatgtgatagaattctccttgattcttataaaaacaaacatatcatttaaagaaaagtctagaaaaaggtgcattagattggacacacaatttattaaacaagaagcacaaacccagccctctcagcagcctgaatccactactttccatcactacgcagagaaagctatgtaytcttgcaacgcacataatcacgctgccccacttcttcacccagcttaaatgatccacgaaaaaggaaaaaattgaatggtctgagagcaaaagctgtccacagcagcatttcattcttctaactgttctgacacagtttaaagaaaactttgaagagctggcccagaaagttctcactctttctgggtcattcataggcaaccagactcactcttttgaaacatttattatcaagagatgcccagtctaagtgatctagtgtatctaaataattctatgcagctgctcacaaggaccttg

SEQ ID NO: 961 - DNA, 600 bp, Chicken  19866894085318_1
gatgacatcctggctgtactgaggtctaccaagggaacgttcttactcccttcagtggctgggattttatcttaactgaataagatcctttggatgtgaattgctattaaatttccattgatgtaatctcttgccgttgttatttttctgccagtgtaatattacatcagttgggccactataaatacacagttctaattcacattcaaaatgaaaagcttttcttgtgttttcaagaacatttctgctgaatgctctcgctcgttctgatgttattatcttatctcttttcagtcttgrtattgtggtattttacagtcaatcagaaccaaaaaataaaagcaaaatcaaaacatcctgatactttctgttctgtttctctaacatcttgaaaagcaaatctgtgatccatataggcaaagtaatttcctaacttggagtgagatgaaagcaatagtagtaacatagatttaaagcrtgtatatagcacyttggagactctgctgccatgctttaacatgtgggacagtttttaagataccraagttcctttttaaatgtgtcagctttaacttggtctctttaaatagcccattaaag

SEQ ID NO: 962 - DNA, 600 bp, Chicken  19866894085318_2
ctataaatacacagttctaattcacattcaaaatgaaaagcttttcttgtgttttcaagaacatttctgctgaatgctctcgctcgttctgatgttattatcttatctcttttcagtcttgrtattgtggtattttacagtcaatcagaaccaaaaaataaaagcaaaatcaaaacatcctgatactttctgttctgtttctctaacatcttgaaaagcaaatctgtgatccatataggcaaagtaatttcctaacttggagtgagatgaaagcaatagtagtaacatagatttaaagcrtgtatatagcacyttggagactctgctgccatgctttaacatgtgggacagtttttaagataccraagttcctttttaaatgtgtcagctttaacttggtctctttaaatagcccattaaagtcccctaataggaagaatttgcagcttgcagctacttctgtgcatgcataatgcagaaagaaatgagatatctcatgtgccctgtggctcagacttctccttgcaattaataagcactgaagtagatgacaagaagattattacacttttttttaatagatgaaaggtttggtagact

SEQ ID NO: 963 - DNA, 600 bp, Chicken  19866894085318_3
gttctaattcacattcaaaatgaaaagcttttcttgtgttttcaagaacatttctgctgaatgctctcgctcgttctgatgttattatcttatctcttttcagtcttgrtattgtggtattttacagtcaatcagaaccaaaaaataaaagcaaaatcaaaacatcctgatactttctgttctgtttctctaacatcttgaaaagcaaatctgtgatccatataggcaaagtaatttcctaacttggagtgagatgaaagcaatagtagtaacatagatttaaagcrtgtatatagcacyttggagactctgctgccatgctttaacatgtgggacagtttttaagataccraagttcctttttaaatgtgtcagctttaacttggtctctttaaatagcccattaaagtcccctaataggaagaatttgcagcttgcagctacttctgtgcatgcataatgcagaaagaaatgagatatctcatgtgccctgtggctcagacttctccttgcaattaataagcactgaagtagatgacaagaagattattacacttttttttaatagatgaaaggtttggtagacttacgatgtggatt

SEQ ID NO: 964 - DNA, 600 bp, Chicken  19866894085318_4
tctgctgaatgctctcgctcgttctgatgttattatcttatctcttttcagtcttgrtattgtggtattttacagtcaatcagaaccaaaaaataaaagcaaaatcaaaacatcctgatactttctgttctgtttctctaacatcttgaaaagcaaatctgtgatccatataggcaaagtaatttcctaacttggagtgagatgaaagcaatagtagtaacatagatttaaagcrtgtatatagcacyttggagactctgctgccatgctttaacatgtgggacagtttttaagataccraagttcctttttaaatgtgtcagctttaacttggtctctttaaatagcccattaaagtcccctaataggaagaatttgcagcttgcagctacttctgtgcatgcataatgcagaaagaaatgagatatctcatgtgccctgtggctcagacttctccttgcaattaataagcactgaagtagatgacaagaagattattacacttttttttaatagatgaaaggtttggtagacttacgatgtggattgtcaacagggctaaacattattctgaaacaatgaatctttgttttttgtttt

SEQ ID NO: 965 - DNA, 600 bp, Chicken  19866894085318_5
agtagatgacaagaagattattacacttttttttaatagatgaaaggtttggtagacttacgatgtggattgtcaacagggctaaacattattctgaaacaatgaatctttgttttttgtttttttgaggaggacaaagagcatagctatctccaacatgcaggactgcatatttgttcttatatctaggagtgcatgcataccttgcttttaactagattggactactaactagcacagtgattttaatcctctatcgtcagtagtatgacacagttcagttttgaccaaagccccttrttttgtgctctccagtggagttattaattcaaaggagggagactataaggacgtaactttcgagtgcagttctgatatgaacaaactatgaatcaggtgttcagtcacattaaatgattccttctctaatgcagggttttaaaccagtacttttttttaacgtaagagaaatttaagaagccatacttcatggagttactcacaagttattttctatttacattgtaaactcaattattcaggaatgtaattttttagtattttttctgtaaggctaaaagtcaaatagttgatacctag

SEQ ID NO: 966 - DNA, 600 bp, Chicken  19866894085321_1
gtgggcccccggccagcagccatgctcggcatttccttgcgttcctcggagccaagggacccggcacacaaacccacgcagctgcggagccagaggtgcaggctgcgttgtgaggagaggaaaagccccgaggaagcagggttttagggaaagaaaataaaagatagttttggaggcggagaagaaaaatgggtttattgttctttctttgtagaaacaaataatgcagcctggggagcaagccgggactgccagcacgggggcaagggcagcgcggggggctgggatgccgggaatggyggagtgctggaaaaatagttgttgtttttctttctttatctctttctaacaaagaactggagttgctggagagggggcaggggcagggctggggacgcgggatgtcccaggggcacacggagtgatccgtagcgtccttttgggagccgttgcccaaactggaggctgagcattttggcagagggcttaggggcttgcagcccccccactgccacatgctccccacaagccgccctgggtgcatcctgcagagaacactacagccaatgtgtcgagcgaggcggagcgcaaggcgcagcg

SEQ ID NO: 967 - DNA, 600 bp, Chicken  19866894085328_1
ctactgaggtgggagggagcgccgagcgcattcagacatgaaaaaatagaacgttcctggttgaaataaaattgaaaacagagctactccatctctgacaagcaacaaggacgatgaatggtattaaatttgctggtataaaagcagccaggagggctgtggcatgctggctgtcacacaccttctgcctctcaccccataagcatgaatatccgatgcctggtggacgcagtgcagagaaaataaaaaaccagagctacctgcagggtagcagacttattttacttcttttcctggaasatagaccaggtgtccagcagcagctctgggagatgatgaaaccctcaagggggaaatgggaggtaatgtaatgggctcacagcggtgccagyggtgctctgtaggaagcgcagcccaacacacagtgctccaacctctgggcaattggctccatgcacggtttcaagccactctctgggttatcctacatgccttttctgattttcccacctatccgtatctgctttcattacagaaaagggctggaaaggacccagtggtgttcttctctttgttgagccaatcccctgcaggctggat

SEQ ID NO: 968 - DNA, 600 bp, Chicken  19866894085328_2
ctctgacaagcaacaaggacgatgaatggtattaaatttgctggtataaaagcagccaggagggctgtggcatgctggctgtcacacaccttctgcctctcaccccataagcatgaatatccgatgcctggtggacgcagtgcagagaaaataaaaaaccagagctacctgcagggtagcagacttattttacttcttttcctggaasatagaccaggtgtccagcagcagctctgggagatgatgaaaccctcaagggggaaatgggaggtaatgtaatgggctcacagcggtgccagyggtgctctgtaggaagcgcagcccaacacacagtgctccaacctctgggcaattggctccatgcacggtttcaagccactctctgggttatcctacatgccttttctgattttcccacctatccgtatctgctttcattacagaaaagggctggaaaggacccagtggtgttcttctctttgttgagccaatcccctgcaggctggatacaaaaccacatcacctccccccccagatctcctcagtccttcccaggaattattctgaatgcttctccagggaggtgctacgttttcaagg

SEQ ID NO: 969 - DNA, 600 bp, Chicken  19866894085332_1
gtgtcttaccaggaggctctgctttttgcccccccctttttgttttcctggtgatagaggctgaatattagttttcaaatgggttatattttgtctgcagcaatttctgtcattattctctgccattgttctgactcttacaggcaaattagagatattcaaaggcaattttcatgattgtttgttgtcaggggcgtatgaatggctgttctattttactaggaagtttcattaaataaagcacaagcgctgtaaacagccaggtaaagattggttcgtttagggacagatcctgcccgstacttaggtcagcatccaggagatccagcaggactgtctcctgacagacacgattacagcttctttgtttaagaaaggacaatattgctctccccagctggcctcagccagccctgaaagtggggttgagccatgactccagccctggtagaaagtgggcctggtacactgagggagtctctgctctttcctataagcctagggctgaaaaacaggaatttccatctgcacatgagaaaaaattcttcactatgtgggtgactgagcactgttgcatattcaaaagtcctcaatctgcag

SEQ ID NO: 970 - DNA, 600 bp, Chicken  19866894085333_1
ttggtagtagcatggtgaaagtggagtatgttgtatggcaggctgctcttaggtgagatgcattgctgtgagatgaaaatctgactagcaatttttaaattgtgtcattattttcttgtagattttatggttttatcaagattcattggaaaatatcttatttgcttcacatttgttacttttcctaaattcatagaatgtaattacaaaatgattgtggggtggactatgttcaattatgaatatagtattgtgtagtaagaatattctaattcccactagaaaatcttatctttctcstttttttttttttcaacatcaataagtttctatataactatgatatatctgcattcaatcttcaaaattttgtttaagaaggatggaaaattctctattgcagtaattttctcaatgttgttataatttgaattgcattttcttctagttctgctatataagtcagtccttgtttttgaatgtcttctcttacattaaaggggagtattaagcccaccatttgaaaggaaacatatatctgggctagtacattgtgactgaaaagtactagaggaaactggcacagattgtaacacagaa

SEQ ID NO: 971 - DNA, 600 bp, Chicken  19866894085333_2; identical to SEQ ID NO: 970

SEQ ID NO: 972 - DNA, 600 bp, Chicken  19866894085335_1
gttggtctgttatcaggcagctcctgccgtgatcccaccagatagcaagcacagcactgaagcacacggcttagcaaagtccaccttatctccagttaagcccatggttttctccttgaatctctcatcacagctgcttgtgctgctgcttgggataagtgtttacaaagacgtgccagccgaattgcctgctgttcctaccatctctccgtgacagcagaggaaagcacagccaccagcttggctcccctcttgcttagcctcctggtttggtttaaagggctgcagtcatgggggatrttgctcttgtggtgtcctgaccccaatcttttggccaccaacagaagtgctgctccagaaggagtgtgtgcccacaagctgtttctcttgtgaagtgttgagatttattgctcgtgagctctccatawatcagatgattttattgagccattcctattttccatcacaggatgtgaatggcagacctgcatgtgtgcctccgtactaggaacttggctcgcttgtttattttcctcatgactaaattgtgaggttagaaacgggttaagaacagttccatccacgtgaggtagttttatc

SEQ ID NO: 973 - DNA, 600 bp, Chicken  19866894085335_2
cacagctgcttgtgctgctgcttgggataagtgtttacaaagacgtgccagccgaattgcctgctgttcctaccatctctccgtgacagcagaggaaagcacagccaccagcttggctcccctcttgcttagcctcctggtttggtttaaagggctgcagtcatgggggatrttgctcttgtggtgtcctgaccccaatcttttggccaccaacagaagtgctgctccagaaggagtgtgtgcccacaagctgtttctcttgtgaagtgttgagatttattgctcgtgagctctccatawatcagatgattttattgagccattcctattttccatcacaggatgtgaatggcagacctgcatgtgtgcctccgtactaggaacttggctcgcttgtttattttcctcatgactaaattgtgaggttagaaacgggttaagaacagttccatccacgtgaggtagttttatcatgaatgacctcttcaaaattttaatttatctcatgtacaaacttaaaatgtagaacaaagaatgagtaatcattagtgctcactgggatccgaaagtcaaatcataatttttgcaccttctaccatc

SEQ ID NO: 974 - DNA, 600 bp, Chicken  19866894085336_1
tgcgccatccatgaggctcccagtgccaggttggatggggccctgggcagcctggtctagcagtctgcaaccttgcctgtggcagggggttggaactagctaacctgtgaggttccttccaacccaagacactctatgattccccagtagagcactgggccctgccagcaccacagcagatacacatggctccgctgtcttcatggctccattgtcctcacggctaaaatgagttgtaaagtgaggcacgggtaaaagggcaaggaacaatgctttaaataaaacaggagcactctgcawtacctgatactctactttttatgccacctgcatgttctgaaagaagacgagacacgcttagtccccgcagctggccacacagccctctcaaggcctttttgtgccacttggaaaacactgaaagaaagaaatacatagaaaataaacaaggcaagaaacttggaaaaaatagaatgtaaagagagatacctcattggaaaattgcaaatwcatttctgtcacatacttagatacgcatatcttgagcaatgtaggtagagtaaaaaagagaagaaaattatccccgttccaacatacaga

SEQ ID NO: 975 - DNA, 600 bp, Chicken  19866894085336_2
attgtcctcacggctaaaatgagttgtaaagtgaggcacgggtaaaagggcaaggaacaatgctttaaataaaacaggagcactctgcawtacctgatactctactttttatgccacctgcatgttctgaaagaagacgagacacgcttagtccccgcagctggccacacagccctctcaaggcctttttgtgccacttggaaaacactgaaagaaagaaatacatagaaaataaacaaggcaagaaacttggaaaaaatagaatgtaaagagagatacctcattggaaaattgcaaatwcatttctgtcacatacttagatacgcatatcttgagcaatgtaggtagagtaaaaaagagaagaaaattatccccgttccaacatacagaaaactgtaaatcctttgttttcctgtagcagatgagaagattcttcaacaagtaataaacaagaagatacattttaggaagcctctcaaatcttttcacaaagcaacatgtatattttaaaatcaaatgctttcagtttgggtatcagcatttcaagtcacatctgaaatacaaatacactgtagaaatactgctcttctaatctgcaag

SEQ ID NO: 976 - DNA, 599 bp, Chicken  19866894085337_1
  misc_feature (1)..(119): n is any nucleotide
nnnnnnnnnnnnnnnnnnnnnnnnnnnnnnnnnnnnnnnnnnnnnnnnnnnnnnnnnnnnnnnnnnnnnnnnnnnnnnnnnnnnnnnnnnnnnnnnnnnnnnnnnnnnnnnnnnnnnnntgttgtttcctccccccccccccctccacagaacatttcagaagcagctgcagcttattcaagtatactgtagcgtgaaaggcaaaaagtattaccttgctgtttcttcttaccatttaatgagttttaggtcaagtctttggttatgagacaatctgggttgctacttggcagtcttgcrttatgagtcacataaatgaaaatattactctgtgttgtttcatccctcagtatgcagtggaaaccrtgtttttatttatgattttgcatgtttgtaccatctgatacagcaaaaacttccagtggctgccatcctttatatactcggagtttgctgttaggctgccccttcacttggtcttaaatgacaaatttcagagattaattcagatactcttctttgcacgcttcctgcttatgtggacttctgaatttgcgatctgatacaatttgcaccccccatccccaggctgatatgtt

SEQ ID NO: 977 - DNA, 599 bp, Chicken  19866894085337_2
  misc_feature (1)..(53): n is any nucleotide
nnnnnnnnnnnnnnnnnnnnnnnnnnnnnnnnnnnnnnnnnnnnnnnnnnnnntgttgtttcctccccccccccccctccacagaacatttcagaagcagctgcagcttattcaagtatactgtagcgtgaaaggcaaaaagtattaccttgctgtttcttcttaccatttaatgagttttaggtcaagtctttggttatgagacaatctgggttgctacttggcagtcttgcrttatgagtcacataaatgaaaatattactctgtgttgtttcatccctcagtatgcagtggaaaccrtgtttttatttatgattttgcatgtttgtaccatctgatacagcaaaaacttccagtggctgccatcctttatatactcggagtttgctgttaggctgccccttcacttggtcttaaatgacaaatttcagagattaattcagatactcttctttgcacgcttcctgcttatgtggacttctgaatttgcgatctgatacaatttgcaccccccatccccaggctgatatgttacttccaaactagtcgtaatataaaaatgctttgttcaagaaatgaaattgcatttgtggtacatc

SEQ ID NO: 978 - DNA, 600 bp, Chicken  19866894085344_1
atagctactgattttttaattttgtcagctaataaattacgataaataggaagagatacacaaattctgatgaggtaaataaagctgcctcttcaggacattttcaaacaaaaaacctcttcacaggtcttttgaagttacagaatgttctcaaagctaattctggcatattggcataaacatacagtttcatgaagttataaagaaggtctcacattagcctggtattgctccagtatcacatggcctggaaactctggctcaggaactgatgcaaatttcttgataatgtcttcaagrgcttgaagacccgccattcgtaactggttgctgtgatcagttgcagccatgaatgccattcgaataaggtcagagagatggagtactaagaagtcatcttaaaatagaacaaaagaagaactatttaataacttaaattatagctgacatgacagacatytgtaatattttcctaacagatgtacaaatttcacacgttcttttccaaaggtacrcatttaggaagyggaagaaatacaagaaagaatgtaacctatttttcttcccacctcctttaaactgacataagaacatttattc

SEQ ID NO: 979 - DNA, 600 bp, Chicken  19866894085344_2
ttctggcatattggcataaacatacagtttcatgaagttataaagaaggtctcacattagcctggtattgctccagtatcacatggcctggaaactctggctcaggaactgatgcaaatttcttgataatgtcttcaagrgcttgaagacccgccattcgtaactggttgctgtgatcagttgcagccatgaatgccattcgaataaggtcagagagatggagtactaagaagtcatcttaaaatagaacaaaagaagaactatttaataacttaaattatagctgacatgacagacatytgtaatattttcctaacagatgtacaaatttcacacgttcttttccaaaggtacrcatttaggaagyggaagaaatacaagaaagaatgtaacctatttttcttcccacctcctttaaactgacataagaacatttattctcaagacaatcttaaaaattaagcacaaatttgaaacaaagtagaatgtgagacaaaaaaaaattgcattggatagaatattttaaaatgtggctgagtagcttgtaagaggtaggaacattcagtaaaactgatctcatgattcccttccgccctatat

SEQ ID NO: 980 - DNA, 600 bp, Chicken  19866894085344_3
attagcctggtattgctccagtatcacatggcctggaaactctggctcaggaactgatgcaaatttcttgataatgtcttcaagrgcttgaagacccgccattcgtaactggttgctgtgatcagttgcagccatgaatgccattcgaataaggtcagagagatggagtactaagaagtcatcttaaaatagaacaaaagaagaactatttaataacttaaattatagctgacatgacagacatytgtaatattttcctaacagatgtacaaatttcacacgttcttttccaaaggtacrcatttaggaagyggaagaaatacaagaaagaatgtaacctatttttcttcccacctcctttaaactgacataagaacatttattctcaagacaatcttaaaaattaagcacaaatttgaaacaaagtagaatgtgagacaaaaaaaaattgcattggatagaatattttaaaatgtggctgagtagcttgtaagaggtaggaacattcagtaaaactgatctcatgattcccttccgccctatatatacagaaaatcttcaaggcagttcttgagtcttatgcttacagtgacctctgct

SEQ ID NO: 981 - DNA, 600 bp, Chicken  19866894085344_4
ttgctccagtatcacatggcctggaaactctggctcaggaactgatgcaaatttcttgataatgtcttcaagrgcttgaagacccgccattcgtaactggttgctgtgatcagttgcagccatgaatgccattcgaataaggtcagagagatggagtactaagaagtcatcttaaaatagaacaaaagaagaactatttaataacttaaattatagctgacatgacagacatytgtaatattttcctaacagatgtacaaatttcacacgttcttttccaaaggtacrcatttaggaagyggaagaaatacaagaaagaatgtaacctatttttcttcccacctcctttaaactgacataagaacatttattctcaagacaatcttaaaaattaagcacaaatttgaaacaaagtagaatgtgagacaaaaaaaaattgcattggatagaatattttaaaatgtggctgagtagcttgtaagaggtaggaacattcagtaaaactgatctcatgattcccttccgccctatatatacagaaaatcttcaaggcagttcttgagtcttatgcttacagtgacctctgctgacagaagaaag

SEQ ID NO: 982 - DNA, 600 bp, Chicken  19866894085348_1
ctgtgcaaggaaaaggtgggtgaggagtggggtcagctggacaataaccagactgcaagttctgtgcaacgacctggttggttctcagtatggggaaaagcacctcctttcctccccactcttcagatcctgcctccatccctcctgtcttcccaggtgcactgtctcccaaaggcacaacagtggcttgcatttccctttccatacaacggctgtggataggaaccataaatccccaagtccgggtttcacaagagactacaaaacctcttgggagtggggagaagaggagggcaaccstggcacatttggaaaaggctgaagagaaagaagcactcttagctggaagctgaacccagagcactcattactgcgagctctggatgcagacttcttgaacttgagtcccctgctcatgcttttttgatccattttccttccaagcattttaatggttctatctgggatgggagcacaaaaacaccccataacacaacaagccaaatcagtcagcaacacctgtgcaagcccaatgtcttgacaaagatccagggcttgagatttcagttaccagcacagccagttgatgagtgccagcct

SEQ ID NO: 983 - DNA, 600 bp, Chicken  19866894085361_1
ttttattattttcacgctagatggtgaaaaattagaaagcatgtcagcaggacctcattatgataggtgaagatctgacaatttgcagctttaggtacatacccataagtttctttcttggccaattaaaagttcaacctttggtatctagtaaaatttagatgaaagtttcatgtgaacagcctgcctgtcagaatttctgcacagtattttctgctcttggtcaggctgaataggcactgagaaaagtaaagaacagtgaacacaagggtaagagtaaaatagctaaaagctgcatamatacagtaatttaagtaaaatataagtaataataaaaataagaagtatcaaaacaccttccttcttctgtcctttgtcctccagaagtccttggaactccttttatcttagtccttagtctcacttttcttctgcataccagagctcagtaatatatgtttcctttgacctttatttgtaaagctaggccaatatttttaatcaggtatttacagtcaggcgcctaaatctatattaagtgtctaaataaggcttgcattttaaatgagccaggcattaagtcaatagcaattgtggctg

SEQ ID NO: 984 - DNA, 600 bp, Chicken  19866894085361_2
cggcccttttggtgcccaataccttacaagctcgaaagcattcacaaccattttggtacaaattttaccttcactgtgtagtatactccttatgttaaataaaattctgctctcacactacctttggcataagaccagagcatttcaggctgacccaaatgacagaacataactaaacgttgcacagacacttacttattttgtgactatttttgctgttattaagccacgtgacattttccaattctcttgcattcactgtacaattaaaaacggctatacaaaaaaaaaaaaaaaaamaaaaaaacccacatcaccttgctttcctttatgctaggaaaatcaaagattattctagtggaaagatgctctgttttggatgaaaatgcttgttcacctcttggatgtgctcctcacactatctgtctcccggctgttgggtctggattcaggcagggctcacgggaggtggatgtctggaggatgggaagcagccaggtgactgacaaccatgtaggctgggcgcagcactgaggagtagggacaaaaggagctgaccctgcagggggaattgatggctttgctgagggaggactgcgg

SEQ ID NO: 985 - DNA, 599 bp, Chicken  19866894085362_1
  misc_feature (1)..(164): n is any nucleotide
nnnnnnnnnnnnnnnnnnnnnnnnnnnnnnnnnnnnnnnnnnnnnnnnnnnnnnnnnnnnnnnnnnnnnnnnnnnnnnnnnnnnnnnnnnnnnnnnnnnnnnnnnnnnnnnnnnnnnnnnnnnnnnnnnnnnnnnnnnnnnnnnnnnnnnnnnnnnnnnnnnnncagaatgtactagaggttttggaatacacactgcaagaccaaaaaaggtcatacagaaggccagttccaataattatggcgattccttctctctccacttggagtggttaggccagcctttggaaataagggcagrgggagatgggggctctaagcagcagtttgtacccccarttcactgttgtagccacaacccatgacattycaaatccatacgctcttggtagcacacatgccattgcttactgatctggagcttgattatataccaactagctccagcatacaattttttggcaracatgagtgaagcatgcatccatgttcttaatgttatgaccaacagcgcgttaggcacaaacacctcttttccctcctgccactctcactgaattaagctttctccctttttcaagcttttgtattttaagaatc

SEQ ID NO: 986 - DNA, 599 bp, Chicken  19866894085362_2
  misc_feature (1)..(126): n is any nucleotide
nnnnnnnnnnnnnnnnnnnnnnnnnnnnnnnnnnnnnnnnnnnnnnnnnnnnnnnnnnnnnnnnnnnnnnnnnnnnnnnnnnnnnnnnnnnnnnnnnnnnnnnnnnnnnnnnnnnnnnnnnnnnnncagaatgtactagaggttttggaatacacactgcaagaccaaaaaaggtcatacagaaggccagttccaataattatggcgattccttctctctccacttggagtggttaggccagcctttggaaataagggcagrgggagatgggggctctaagcagcagtttgtacccccarttcactgttgtagccacaacccatgacattycaaatccatacgctcttggtagcacacatgccattgcttactgatctggagcttgattatataccaactagctccagcatacaattttttggcaracatgagtgaagcatgcatccatgttcttaatgttatgaccaacagcgcgttaggcacaaacacctcttttccctcctgccactctcactgaattaagctttctccctttttcaagcttttgtattttaagaatcactccatgttaatgatatctcagtttttacttgtgccc

SEQ ID NO: 987 - DNA, 599 bp, Chicken  19866894085362_3
  misc_feature (1)..(95): n is any nucleotide
nnnnnnnnnnnnnnnnnnnnnnnnnnnnnnnnnnnnnnnnnnnnnnnnnnnnnnnnnnnnnnnnnnnnnnnnnnnnnnnnnnnnnnnnnnnnnnncagaatgtactagaggttttggaatacacactgcaagaccaaaaaaggtcatacagaaggccagttccaataattatggcgattccttctctctccacttggagtggttaggccagcctttggaaataagggcagrgggagatgggggctctaagcagcagtttgtacccccarttcactgttgtagccacaacccatgacattycaaatccatacgctcttggtagcacacatgccattgcttactgatctggagcttgattatataccaactagctccagcatacaattttttggcaracatgagtgaagcatgcatccatgttcttaatgttatgaccaacagcgcgttaggcacaaacacctcttttccctcctgccactctcactgaattaagctttctccctttttcaagcttttgtattttaagaatcactccatgttaatgatatctcagtttttacttgtgcccmaacttagtatcactgttstttcatcctgga

SEQ ID NO: 988 - DNA, 600 bp, Chicken  19866894085362_4
cagaatgtactagaggttttggaatacacactgcaagaccaaaaaaggtcatacagaaggccagttccaataattatggcgattccttctctctccacttggagtggttaggccagcctttggaaataagggcagrgggagatgggggctctaagcagcagtttgtacccccarttcactgttgtagccacaacccatgacattycaaatccatacgctcttggtagcacacatgccattgcttactgatctggagcttgattatataccaactagctccagcatacaattttttggcaracatgagtgaagcatgcatccatgttcttaatgttatgaccaacagcgcgttaggcacaaacacctcttttccctcctgccactctcactgaattaagctttctccctttttcaagcttttgtattttaagaatcactccatgttaatgatatctcagtttttacttgtgcccmaacttagtatcactgttstttcatcctggaagattttcagtcaacttaaattgcaaccagcatacagaaattctgaaagccattaagaaaataaagctgtatttctgcaacctgtgcgccttatta

SEQ ID NO: 989 - DNA, 600 bp, Chicken  19866894085362_5
ttcactgttgtagccacaacccatgacattycaaatccatacgctcttggtagcacacatgccattgcttactgatctggagcttgattatataccaactagctccagcatacaattttttggcaracatgagtgaagcatgcatccatgttcttaatgttatgaccaacagcgcgttaggcacaaacacctcttttccctcctgccactctcactgaattaagctttctccctttttcaagcttttgtattttaagaatcactccatgttaatgatatctcagtttttacttgtgcccmaacttagtatcactgttstttcatcctggaagattttcagtcaacttaaattgcaaccagcatacagaaattctgaaagccattaagaaaataaagctgtatttctgcaacctgtgcgccttattattctattcctcctttaaaaaaaaacaacacccagacgcacatatgmttaaggtaagcaagttatccatacattcacagataatttgttaaatacaccrtattactagaataactgatgcctaataaacttgactgccatacgccaattcctccatgttttacttgatcatgaac

SEQ ID NO: 990 - DNA, 600 bp, Chicken  19866894085362_6
acccatgacattycaaatccatacgctcttggtagcacacatgccattgcttactgatctggagcttgattatataccaactagctccagcatacaattttttggcaracatgagtgaagcatgcatccatgttcttaatgttatgaccaacagcgcgttaggcacaaacacctcttttccctcctgccactctcactgaattaagctttctccctttttcaagcttttgtattttaagaatcactccatgttaatgatatctcagtttttacttgtgcccmaacttagtatcactgttstttcatcctggaagattttcagtcaacttaaattgcaaccagcatacagaaattctgaaagccattaagaaaataaagctgtatttctgcaacctgtgcgccttattattctattcctcctttaaaaaaaaacaacacccagacgcacatatgmttaaggtaagcaagttatccatacattcacagataatttgttaaatacaccrtattactagaataactgatgcctaataaacttgactgccatacgccaattcctccatgttttacttgatcatgaacttaagtaggtagaaaaag

SEQ ID NO: 991 - DNA, 600 bp, Chicken  19866894085362_7
cgcgttaggcacaaacacctcttttccctcctgccactctcactgaattaagctttctccctttttcaagcttttgtattttaagaatcactccatgttaatgatatctcagtttttacttgtgcccmaacttagtatcactgttstttcatcctggaagattttcagtcaacttaaattgcaaccagcatacagaaattctgaaagccattaagaaaataaagctgtatttctgcaacctgtgcgccttattattctattcctcctttaaaaaaaaacaacacccagacgcacatatgmttaaggtaagcaagttatccatacattcacagataatttgttaaatacaccrtattactagaataactgatgcctaataaacttgactgccatacgccaattcctccatgttttacttgatcatgaacttaagtaggtagaaaaagatgatgctgcttcttaaaaaaatagatttgcttaaaacatctgtgccaacacagagcccacagcatccacacatggcaggaggctcaacaaacagtgtttttgaaacagtagaaaaataactcaaattcatacctccgcactcttcaataagat

SEQ ID NO: 992 - DNA, 600 bp, Chicken  19866894085362_8
ctttctccctttttcaagcttttgtattttaagaatcactccatgttaatgatatctcagtttttacttgtgcccmaacttagtatcactgttstttcatcctggaagattttcagtcaacttaaattgcaaccagcatacagaaattctgaaagccattaagaaaataaagctgtatttctgcaacctgtgcgccttattattctattcctcctttaaaaaaaaacaacacccagacgcacatatgmttaaggtaagcaagttatccatacattcacagataatttgttaaatacaccrtattactagaataactgatgcctaataaacttgactgccatacgccaattcctccatgttttacttgatcatgaacttaagtaggtagaaaaagatgatgctgcttcttaaaaaaatagatttgcttaaaacatctgtgccaacacagagcccacagcatccacacatggcaggaggctcaacaaacagtgtttttgaaacagtagaaaaataactcaaattcatacctccgcactcttcaataagattggctatggtttctgcttcatcttcagccatttttaatatattacttagtcc

SEQ ID NO: 993 - DNA, 600 bp, Chicken  19866894085366_1
tagggaaatcctacggtttccttagtggtgatggggaaaaaaagagatcttgagaaataacttcagcattcacctgacacagctgcttttcacagtaaatgccagttttgcagttttcattactctcaaagggaggagtctttttcagtagattaactgcacttgcactatttctctgatataattggctacattctgtcttgcttactttaaaattttattcctatttattataactttttttgccattttgttgccactcttgaatctttgacttttcgtgtaccttattcttgtttmcccagaataactccttttattgaagaaaaaatgattgacatttctcctacttgcaaaatgaatcatatttctgttgttgttttttattttacatggaacttgtgcaattattcttgatgtctgtttgtgataggttctataatactgatagagaactgtgcaaattgccagtctaaactcagtggaatcctcttatcttattcttcagcagtattaaacaagctaaactatgtatttcagttgtaactaaaaaactgctttctagttgtctgtttatgttgaactgcattagagaagtgt

SEQ ID NO: 994 - DNA, 600 bp, Chicken  19866894085367_1
ggcctcggctggctgagagacagcccccatcaggcagcagctgccaggcaccattgtcctctgtgtggccgcagtgttatgatgtcactgaggcggagcaggagtggcaccaacagcataggcaggtggtgcaatacagtagtttgggcagcatcccgggcagcccccatccggacctgcattggttccccacgtgccgctacataacacgtttgagactctggaacctgagggagaggtgagtgaggatgcagtggaaggtccacccgcgatgttgtcaagggcaagacggtcgactcyaccgctccagactgccccagccaggaaggacagagggtgattgccataggcggttcctgctgagagcagcagagggcgctgtgtaccggccgtaccgcagggargtgtgctgcctgcctgggccggatcaggggtatttctggggtctgattcacccctctctgatcattgtccttcactggtagttcaggccagtagccatgaagtcactgagagaagcctgaggaccatcagaaaggacttcaggggactggggcagttagagggtgcagtgggcatacaggttgtgttttcctctat

SEQ ID NO: 995 - DNA, 600 bp, Chicken  19866894085367_2
tggcaccaacagcataggcaggtggtgcaatacagtagtttgggcagcatcccgggcagcccccatccggacctgcattggttccccacgtgccgctacataacacgtttgagactctggaacctgagggagaggtgagtgaggatgcagtggaaggtccacccgcgatgttgtcaagggcaagacggtcgactcyaccgctccagactgccccagccaggaaggacagagggtgattgccataggcggttcctgctgagagcagcagagggcgctgtgtaccggccgtaccgcagggargtgtgctgcctgcctgggccggatcaggggtatttctggggtctgattcacccctctctgatcattgtccttcactggtagttcaggccagtagccatgaagtcactgagagaagcctgaggaccatcagaaaggacttcaggggactggggcagttagagggtgcagtgggcatacaggttgtgttttcctctatccctgcagtggcagggagggatactgggaggagcgagaaagcccacctcataaacacgtggctgagaggctggtgaaaatgcargaattttggttattttgccc

SEQ ID NO: 996 - DNA, 600 bp, Chicken  19866894085367_3
accggccgtaccgcagggargtgtgctgcctgcctgggccggatcaggggtatttctggggtctgattcacccctctctgatcattgtccttcactggtagttcaggccagtagccatgaagtcactgagagaagcctgaggaccatcagaaaggacttcaggggactggggcagttagagggtgcagtgggcatacaggttgtgttttcctctatccctgcagtggcagggagggatactgggaggagcgagaaagcccacctcataaacacgtggctgagaggctggtgaaaatgcargaattttggttattttgcccatggagtggtttactcagcacctggcctgatggctgtgggtgggtctcagctgtctcaaaggggggaatggatccttgcccaggagctggcagggctcactgagaggttttcagactgggtatggagagggaaaggaataaaaccaggtctgctcctagggagtgataacaggattaggggtgaggcaaaggactgaagtgcagctgaagtgcatctacaccagtgctcacagcatgggcaataaacaggaggaactggaagccattgtgagggaggcaa

SEQ ID NO: 997 - DNA, 600 bp, Chicken  19866894085371_1
tccagctgcttttctgtctctagctggtaaatgtaatagagtgtaaggtgtcttcttttttcttattttctttctattattattcttacaatatattattattattgacataattggctgtatcaaaagcaaaaaataataaattaaaaatgggtaccgacaaaacaactttgtaatcttaccgtgaacctcattcccctcccccaggctgctacaaagtaatattatcaggccttatgttataggatatggaggtatcggcataagcagaggctgcctccaagctgctttgcaggtctrtgtggactgagcagatatttttgtcacygggaaagtgagtatgttgttttgccagccaagctcaaaatctctaccttttctttattgcaggagtccaaatttaaagaaactggagtcattacacctgaagaagtaagtatttagaacctttgaaatacatttggaaagcatgaaagtactggtaagttttactcaaagwgctccgtgttcatctcaaacagtttaatctttgtcagttaagtattccttcttgaaacaatttccacaatgtgaaaggtctaartgggattcttaccctac

SEQ ID NO: 998 - DNA, 600 bp, Chicken  19866894085371_2
aaatgtaatagagtgtaaggtgtcttcttttttcttattttctttctattattattcttacaatatattattattattgacataattggctgtatcaaaagcaaaaaataataaattaaaaatgggtaccgacaaaacaactttgtaatcttaccgtgaacctcattcccctcccccaggctgctacaaagtaatattatcaggccttatgttataggatatggaggtatcggcataagcagaggctgcctccaagctgctttgcaggtctrtgtggactgagcagatatttttgtcacygggaaagtgagtatgttgttttgccagccaagctcaaaatctctaccttttctttattgcaggagtccaaatttaaagaaactggagtcattacacctgaagaagtaagtatttagaacctttgaaatacatttggaaagcatgaaagtactggtaagttttactcaaagwgctccgtgttcatctcaaacagtttaatctttgtcagttaagtattccttcttgaaacaatttccacaatgtgaaaggtctaartgggattcttaccctacaggggaagtagatcagcatcagaattct

SEQ ID NO: 999 - DNA, 430 bp, Chicken  19866894085371_3
tcccccaggctgctacaaagtaatattatcaggccttatgttataggatatggaggtatcggcataagcagaggctgcctccaagctgctttgcaggtctrtgtggactgagcagatatttttgtcacygggaaagtgagtatgttgttttgccagccaagctcaaaatctctaccttttctttattgcaggagtccaaatttaaagaaactggagtcattacacctgaagaagtaagtatttagaacctttgaaatacatttggaaagcatgaaagtactggtaagttttactcaaagwgctccgtgttcatctcaaacagtttaatctttgtcagttaagtattccttcttgaaacaatttccacaatgtgaaaggtctaartgggattcttaccctacaggggaagtagatcagcatcagaattctc

SEQ ID NO: 1000 - DNA, 346 bp, Chicken  19866894085371_4
gctgctttgcaggtctrtgtggactgagcagatatttttgtcacygggaaagtgagtatgttgttttgccagccaagctcaaaatctctaccttttctttattgcaggagtccaaatttaaagaaactggagtcattacacctgaagaagtaagtatttagaacctttgaaatacatttggaaagcatgaaagtactggtaagttttactcaaagwgctccgtgttcatctcaaacagtttaatctttgtcagttaagtattccttcttgaaacaatttccacaatgtgaaaggtctaartgggattcttaccctacaggggaagtagatcagcatcagaattctc

SEQ ID NO: 1001 - DNA, 494 bp, Chicken  19866894085372_1
gtagcagcctgggggaggggaatgaggttcacaataagattacaaagttgttttgtcggtacccatttttaatttattattttttgcttttgatacagccaattatgtcaataataataataatatattgtaagaataataatagaaagaaaataagaaaaaagaagacaccttacactctattacatttaccagctagagacagaaaagcagctggaaataatcgccttcagagtaacaattttgagactgtttaaaacactgaatgacagtgtaatgcatcaatatgtgggtttctasgtaagaaaggtcatgaaatgaaggactgaaccaactttcacctatggtaagaaaagttgcaatgactctgttactggcttttttagtacccattttgttttgatgccttcattataaacaccactgaaccagttatgattacaacagatggcaaacagccacatgatttagtttagcatagaaaaaattaagaa

SEQ ID NO: 1002 - DNA, 600 bp, Chicken  19866894085374_1
gacgctgttggtacacttgttcttttcaaggctatgtgtattttacttcatgtgcaagttggcatacgtttgcaatgcagcagtttaacgatagagggaaaaaataaatatactcagggcaaatgaactgctgtgtacaaaactgaaccagaagaagtgtctgatatcatgtgggtaatacctcagactcatcacttttcttcttgaatttcaatacctctagtgttactttggcattaggtatccctggaagattaacatgcgtgtcttgatttgatgtttcagaagggaaaaaacccrcatttcaccatttstgttgtaaatatgtgtaggtttttcttycccaaccccccccctccaaggggagcagtctatttgagctaggtgaggtattttttaaaacaggtgaaagtgatttgaggctgatgtaatacctgttgttaatagagaagctcatttggaaytaagtagatacaaagctgacaatatccctttcagtatttcctagaattctatctaaataaatcttcctccattttactcgttttacgcagtattatatggaagcattcctgaactttaatccattacatgaaataa

SEQ ID NO: 1003 - DNA, 600 bp, Chicken  19866894085374_2
acttgttcttttcaaggctatgtgtattttacttcatgtgcaagttggcatacgtttgcaatgcagcagtttaacgatagagggaaaaaataaatatactcagggcaaatgaactgctgtgtacaaaactgaaccagaagaagtgtctgatatcatgtgggtaatacctcagactcatcacttttcttcttgaatttcaatacctctagtgttactttggcattaggtatccctggaagattaacatgcgtgtcttgatttgatgtttcagaagggaaaaaacccrcatttcaccatttstgttgtaaatatgtgtaggtttttcttycccaaccccccccctccaaggggagcagtctatttgagctaggtgaggtattttttaaaacaggtgaaagtgatttgaggctgatgtaatacctgttgttaatagagaagctcatttggaaytaagtagatacaaagctgacaatatccctttcagtatttcctagaattctatctaaataaatcttcctccattttactcgttttacgcagtattatatggaagcattcctgaactttaatccattacatgaaataatgggcttacttcct

SEQ ID NO: 1004 - DNA, 600 bp, Chicken  19866894085374_3
ttacttcatgtgcaagttggcatacgtttgcaatgcagcagtttaacgatagagggaaaaaataaatatactcagggcaaatgaactgctgtgtacaaaactgaaccagaagaagtgtctgatatcatgtgggtaatacctcagactcatcacttttcttcttgaatttcaatacctctagtgttactttggcattaggtatccctggaagattaacatgcgtgtcttgatttgatgtttcagaagggaaaaaacccrcatttcaccatttstgttgtaaatatgtgtaggtttttcttycccaaccccccccctccaaggggagcagtctatttgagctaggtgaggtattttttaaaacaggtgaaagtgatttgaggctgatgtaatacctgttgttaatagagaagctcatttggaaytaagtagatacaaagctgacaatatccctttcagtatttcctagaattctatctaaataaatcttcctccattttactcgttttacgcagtattatatggaagcattcctgaactttaatccattacatgaaataatgggcttacttcctttttaagcaggacaaaaggaacaagctg

SEQ ID NO: 1005 - DNA, 600 bp, Chicken  19866894085374_4
tatcatgtgggtaatacctcagactcatcacttttcttcttgaatttcaatacctctagtgttactttggcattaggtatccctggaagattaacatgcgtgtcttgatttgatgtttcagaagggaaaaaacccrcatttcaccatttstgttgtaaatatgtgtaggtttttcttycccaaccccccccctccaaggggagcagtctatttgagctaggtgaggtattttttaaaacaggtgaaagtgatttgaggctgatgtaatacctgttgttaatagagaagctcatttggaaytaagtagatacaaagctgacaatatccctttcagtatttcctagaattctatctaaataaatcttcctccattttactcgttttacgcagtattatatggaagcattcctgaactttaatccattacatgaaataatgggcttacttcctttttaagcaggacaaaaggaacaagctgttgaatggtataagaaaggaattgaagagctggaaagaggaatagctgtcttagttgttggtcaaggtaagccagttttgagtattgtgaaaaagatttgttttattgatcaatactgattt

SEQ ID NO: 1006 - DNA, 599 bp, Chicken  19866894085383_1
  misc_feature (1)..(31): n is any nucleotide
nnnnnnnnnnnnnnnnnnnnnnnnnnnnnnntgagaatgtccgatgacctcatgtaaatatccagaagtgcctttgcagaatgttgactaagttgagaaagttgattttagcccattctggagagggaacacacagtaaaagtagagtggtgagccaagtgaggtgagcagaggtggctgctctgaccatatcgcaccagtacgaataatctcattagtcttgactgtttctgtgctgcagaagccgtgtggttattaacagacagaatggtttgctcgagggaaagatagcatgggaarcagttttccatccctgaaatgtgttcactgaatattctagaaaaaaaaagtcatacaaggatagatacagttggccattaagagttatgaggaagtaggaattcattatgtgatcctgccttcacctggcatgtccagcttcatagttaaactgctcttaaatctcagataattctgaaaagaggtgacttctggttcttgtgtgcatacctggtgagctaagtgacataaaatatttgcttgaaagttttgtactacatacaattttatcatgtatgtatgtactatctctgtaaatt

SEQ ID NO: 1007 - DNA, 600 bp, Chicken  19866894085386_1
ttgttgtgaaataactgctatggtatccacttccttgtgcaggattctgggttgtaacaaactatgcccgctacattttttactttaaataccaaaggttttcactgtctaaagatgttgggtttggttttaggacttattcattattttctggacagattctgagttctccgtgtgagatggatgatagtttactacacacaacagcatgactgcagtgtctacatcacatatatgtaatatataaaggccgaccaatgtgactagcacaatgaaagctgtttctgggtctcagggttyttaaacagttagttatggaagtcagaacagcagagcaggcctggaacagatcccgctctagactgcatcctcctgcctacctagtagtctgattttttgccatggattctgcccaaacttccctttggaagtgacacatcctgatgctgaaagaccttcccaggaaagtttcagcagggaggaaatcggagaatataacatctcataaactccctatgactccagaacaaggcccaaaggctatcattacygagatgcatactgctagcgtcatttccaagagaggatctcaatttattg

SEQ ID NO: 1008 - DNA, 600 bp, Chicken  19866894085386_2
cgaccaatgtgactagcacaatgaaagctgtttctgggtctcagggttyttaaacagttagttatggaagtcagaacagcagagcaggcctggaacagatcccgctctagactgcatcctcctgcctacctagtagtctgattttttgccatggattctgcccaaacttccctttggaagtgacacatcctgatgctgaaagaccttcccaggaaagtttcagcagggaggaaatcggagaatataacatctcataaactccctatgactccagaacaaggcccaaaggctatcattacygagatgcatactgctagcgtcatttccaagagaggatctcaatttattgtgtgttgggagtttctagggtcagctccatcctgctatgtagtataacaatgcgtcagttgcacaataggagtaacctcacagtattcatatgtcacttcaacaagagaacagaaaaaaatgctcatgtagctacagggtggtttggctttcctgacattgaattcttacatggcaggcatcagttctttaatagaagagatttttggaatgaaaacaaactcattagtagcaaccaattacaaatctgtg

SEQ ID NO: 1009 - DNA, 600 bp, Chicken  19866894085386_3
tcctgacattgaattcttacatggcaggcatcagttctttaatagaagagatttttggaatgaaaacaaactcattagtagcaaccaattacaaatctgtgtttcctgcccttgacaaatttccccatttccctgtgttgttgtttttttctcccccttcattgtcatgtcatgtcagagctgattataagagaacggccttttccagaagaccattacatgggtgggctttgggctgctaagcttcaccactcttcgagagatcacagacctcaacctcagtgtcttcgtcctttccckaagacaatgaaaacactaaagtgaaagcsctgtggtaaatcttttagccttgagtgttaatggattctgagatgraaggaaaagctcttatttcacagtcaaaggctaaacaagaagcagtttctattgtgttgtaaaaaaccaagtggccaaatacggttatccctctatgcagcagaagccttagccttttgcatcacaaacacccagtgaggcttgtatgtcataattgctgatctcttgggatacgccagatatgtttcagctcaccacctgatactgagcaacatcagagaaaca

SEQ ID NO: 1010 - DNA, 600 bp, Chicken  19866894085386_4
atcagttctttaatagaagagatttttggaatgaaaacaaactcattagtagcaaccaattacaaatctgtgtttcctgcccttgacaaatttccccatttccctgtgttgttgtttttttctcccccttcattgtcatgtcatgtcagagctgattataagagaacggccttttccagaagaccattacatgggtgggctttgggctgctaagcttcaccactcttcgagagatcacagacctcaacctcagtgtcttcgtcctttccckaagacaatgaaaacactaaagtgaaagcsctgtggtaaatcttttagccttgagtgttaatggattctgagatgraaggaaaagctcttatttcacagtcaaaggctaaacaagaagcagtttctattgtgttgtaaaaaaccaagtggccaaatacggttatccctctatgcagcagaagccttagccttttgcatcacaaacacccagtgaggcttgtatgtcataattgctgatctcttgggatacgccagatatgtttcagctcaccacctgatactgagcaacatcagagaaacaggcagctctgcctggaggctgccatcccc

SEQ ID NO: 1011 - DNA, 600 bp, Chicken  19866894085386_5
tagtagcaaccaattacaaatctgtgtttcctgcccttgacaaatttccccatttccctgtgttgttgtttttttctcccccttcattgtcatgtcatgtcagagctgattataagagaacggccttttccagaagaccattacatgggtgggctttgggctgctaagcttcaccactcttcgagagatcacagacctcaacctcagtgtcttcgtcctttccckaagacaatgaaaacactaaagtgaaagcsctgtggtaaatcttttagccttgagtgttaatggattctgagatgraaggaaaagctcttatttcacagtcaaaggctaaacaagaagcagtttctattgtgttgtaaaaaaccaagtggccaaatacggttatccctctatgcagcagaagccttagccttttgcatcacaaacacccagtgaggcttgtatgtcataattgctgatctcttgggatacgccagatatgtttcagctcaccacctgatactgagcaacatcagagaaacaggcagctctgcctggaggctgccatcccctcacagagatcttgaaagcagaaatggtaagacacggacaacatca

SEQ ID NO: 1012 - DNA, 600 bp, Chicken  19866894085386_6
gtaaaaaaccaagtggccaaatacggttatccctctatgcagcagaagccttagccttttgcatcacaaacacccagtgaggcttgtatgtcataattgctgatctcttgggatacgccagatatgtttcagctcaccacctgatactgagcaacatcagagaaacaggcagctctgcctggaggctgccatcccctcacagagatcttgaaagcagaaatggtaagacacggacaacatcagaagcctcgcaacaggggacgctcccagcagaggcaaagaggcaaaggcaggagacaragaaggaggcaaaggagaaagacaaggacaagaggtactgtctttcaggctgagtggtggaaaggttgtgacaagatgaggctttctgaaaaatcctagtgaaaccacagtgctgctgggactatcttgtgactagccatggaaacctctttatggctcaggaatgatcctgacaaactggaagaagcttttgactccctcgagggtagaagccttgcaaagagatcttgacaaattagaggtctgggcaatcaccaactacacggtgttcaacaagagcaagtgttggattctgcggct

SEQ ID NO: 1013 - DNA, 600 bp, Chicken  19866894085387_1
gtcctctctccacacacattcatgtgcaactcatatcccagcctttggtctgcgccaagctggcgtcattcaggctttgggtgcaactgcaccaagcaaagtatctccaaagtccaacatgcacatttggtggtgagcagatatttctggcctccctctgggagctgcatctcctgcttaccacagcttgctctgcctttcagctgggatcaccgagctccctgggacagagctattttgtcaaagaaataattttaaatgaaaaccatgaagtgcaatgtttacttctaataatgagcrttcacatcagaaaccagactctgtgggacttaactttcatccatccagaaaatagaaatagcttttatataaaattaaaatacacaaaaccaacttgactcttgaactgagcattcacaataagctgcttgtccaaagtctgatatatttactaaaagcacactgaaggaaaacaggagctactcagaagcaatttacaaacaggaaaacaggggaaattggctgggtaatttattctccaggaagtttttgcatggttgtataagcaaggcacccagcagaaaggctctgtcacgttgt

SEQ ID NO: 1014 - DNA, 600 bp, Chicken  19866894085387_2
aaggctctgtcacgttgtacctgtttatgacttaaatatcagtgtcccccagtgcagtcatcttattagtgccaggtgcccgctagcgcgactcagaaattgcagttctaagggccaaaggggaatcctgattttaggaactgttttccctcacagagagtctgaaaacccattaaagcccatgctgttactgttttatttcctggtgactgcagcttcatacatgcacaaattcgtacatagaactcagctgcttatagtagcatgtgacactgagaccagatgcaaagcttccacctktctgtaagtgtccaaaacttatccctcctatattccattgtctccctgtcattcactgtcagcacctgctttaccsagtgctgttttgttctctgctctctcctcttgatgagctcatcactgccattcttcttaacactgaccattcagtgggaattagcgagaaggaaacttccctttgccacccagcagcaaccagcacagaactgtacctacagctctttacctgaagatgtgaggtagcagaaaaaccagaactgaaaagctgtggggcaaaaataaatcatcccccagatttca

SEQ ID NO: 1015 - DNA, 600 bp, Chicken  19866894085387_3
tgcccgctagcgcgactcagaaattgcagttctaagggccaaaggggaatcctgattttaggaactgttttccctcacagagagtctgaaaacccattaaagcccatgctgttactgttttatttcctggtgactgcagcttcatacatgcacaaattcgtacatagaactcagctgcttatagtagcatgtgacactgagaccagatgcaaagcttccacctktctgtaagtgtccaaaacttatccctcctatattccattgtctccctgtcattcactgtcagcacctgctttaccsagtgctgttttgttctctgctctctcctcttgatgagctcatcactgccattcttcttaacactgaccattcagtgggaattagcgagaaggaaacttccctttgccacccagcagcaaccagcacagaactgtacctacagctctttacctgaagatgtgaggtagcagaaaaaccagaactgaaaagctgtggggcaaaaataaatcatcccccagatttcaggtgaactcatttagtatctttattactggcaatagagacagatattgatggactgcaggtatgatctgggtgggc

SEQ ID NO: 1016 - DNA, 600 bp, Chicken  19866894085390_1
tgttaggtacaaaacatacggataaaagtgattcaattacctaatgcaattatgagagagaaattgtcatgtgctgttgaagttttcaaagtcattgtgaagagggagaatggcttgccagtaatttctagaaagccatagattttaattcaaaattcagtgtttaccatttaaaatctgttttagaaagatccacatcttatagtattaattctctataagcatcaggaagcttttggaataacttttcttgctcactgggtttatcatagttgagtcctcttccaaggcttagcaatwcaacagtttctgtttcttcaccttttcacagcagttcatacagttcacattgttagtcagcataacacgtatagatgtgaaccatgacgctgagtagagttcctggaaaaaagtatgaccgacttgttatttaatttataacagaaaagaagtcttaacctgttagcagtgagtaagcagcaagccctgaagttgaagagctaaggctacgtattattttctttgtttgttttctgtaaattgctgaagtgaaattttttcttgagtttctcaggtgtccttaattaaatttatttagaa

SEQ ID NO: 1017 - DNA, 599 bp, Chicken  19866894085396_1
  misc_feature (1)..(102): n is any nucleotide
nnnnnnnnnnnnnnnnnnnnnnnnnnnnnnnnnnnnnnnnnnnnnnnnnnnnnnnnnnnnnnnnnnnnnnnnnnnnnnnnnnnnnnnnnnnnnnnnnnnnnncttccccgaatcctggagagaaaaagggagggagggggacaggatctgggtcaacagcagtagctgatgagggatgaggagcaagtcagaaggagaccagatgtgatgctggagggatagggatgagaatggagtggtgaggagatgagtcaaaagatgtgagaggtgaaagggttgagccaaatacatctgtgacayacctgactggtagaaaggagcatagattgatttccagatgttctcaaccaaaagcttaaatagcacgaactgaagccccggcttggaaaccagggaaataaatcttcctacctgagctcttgagacagagcaaacactcctgtgatggatggtgtctgttttctctgcctgttcgccattttctacacctgtatgtcatattcctttcaaaagctgtgattggggagccgaaaaggagggactttttgcctcgaaagggctcacagttccacaaagccttgggagccgctgggaagggc

SEQ ID NO: 1018 - DNA, 599 bp, Chicken  19866894085402_1
  misc_feature (1)..(22): n is any nucleotide
nnnnnnnnnnnnnnnnnnnnnntgagggcttgagctgcaaggaggaggaaaagatgaggtgagaagctccagccaacactcccaggtcttctgcagctccctgcccttggaggtgagccatcgttggggcggtgggacttggtgatggtctgccatgttcccaaacacctcctagcacctccaaccaccccatggcacagcatccccaccctcaccgtgctcatgcctgccagccttgctggaccccaatttctttcctgtccagcattgcctgcgaccatcctacagaggaagccttgygcctgtattgtgatggggcgaccgctgctccatcccaatcccctcaaccacacagsataarcgaacatstctccttccccaagcagatctaacccctctccaggcatatcccaaagcagcacaaggagcaagtgccccatagacctcaatggccatccctccatctccctgaagatcagtggggctttctggggctcctgctcgccctatggctgcactcacccaggaggagcagggctctgctcaccgccatcccgaaccacctgtctagctctagatgcccccacacagaggtgatg

SEQ ID NO: 1019 - DNA, 600 bp, Chicken  19866894085402_2
aggtgagaagctccagccaacactcccaggtcttctgcagctccctgcccttggaggtgagccatcgttggggcggtgggacttggtgatggtctgccatgttcccaaacacctcctagcacctccaaccaccccatggcacagcatccccaccctcaccgtgctcatgcctgccagccttgctggaccccaatttctttcctgtccagcattgcctgcgaccatcctacagaggaagccttgygcctgtattgtgatggggcgaccgctgctccatcccaatcccctcaaccacacagsataarcgaacatstctccttccccaagcagatctaacccctctccaggcatatcccaaagcagcacaaggagcaagtgccccatagacctcaatggccatccctccatctccctgaagatcagtggggctttctggggctcctgctcgccctatggctgcactcacccaggaggagcagggctctgctcaccgccatcccgaaccacctgtctagctctagatgcccccacacagaggtgatgtccccgtgtggagatgctcttctgagaacaaaggaaggaaatgggtttggttcacta

SEQ ID NO: 1020 - DNA, 600 bp, Chicken  19866894085402_3
agaagctccagccaacactcccaggtcttctgcagctccctgcccttggaggtgagccatcgttggggcggtgggacttggtgatggtctgccatgttcccaaacacctcctagcacctccaaccaccccatggcacagcatccccaccctcaccgtgctcatgcctgccagccttgctggaccccaatttctttcctgtccagcattgcctgcgaccatcctacagaggaagccttgygcctgtattgtgatggggcgaccgctgctccatcccaatcccctcaaccacacagsataarcgaacatstctccttccccaagcagatctaacccctctccaggcatatcccaaagcagcacaaggagcaagtgccccatagacctcaatggccatccctccatctccctgaagatcagtggggctttctggggctcctgctcgccctatggctgcactcacccaggaggagcagggctctgctcaccgccatcccgaaccacctgtctagctctagatgcccccacacagaggtgatgtccccgtgtggagatgctcttctgagaacaaaggaaggaaatgggtttggttcactaatatt

SEQ ID NO: 1021 - DNA, 600 bp, Chicken  19866894085402_4
cagccaacactcccaggtcttctgcagctccctgcccttggaggtgagccatcgttggggcggtgggacttggtgatggtctgccatgttcccaaacacctcctagcacctccaaccaccccatggcacagcatccccaccctcaccgtgctcatgcctgccagccttgctggaccccaatttctttcctgtccagcattgcctgcgaccatcctacagaggaagccttgygcctgtattgtgatggggcgaccgctgctccatcccaatcccctcaaccacacagsataarcgaacatstctccttccccaagcagatctaacccctctccaggcatatcccaaagcagcacaaggagcaagtgccccatagacctcaatggccatccctccatctccctgaagatcagtggggctttctggggctcctgctcgccctatggctgcactcacccaggaggagcagggctctgctcaccgccatcccgaaccacctgtctagctctagatgcccccacacagaggtgatgtccccgtgtggagatgctcttctgagaacaaaggaaggaaatgggtttggttcactaatatttcataaag

SEQ ID NO: 1022 - DNA, 600 bp, Chicken  19866894085416_1
gctcatacgctgtaccactgtctgtgcatgcactgtgccacagcagcatgatgcctcgtgccttatttcccatctgcagccaggagcagccacatggcccgggctgcagctctgtgctgctctcctgcccttgcacagtgcctctctgtttgatttttctgggctctgtacttcactcccactgttttgaagggacagccatctagcaatgacagggtcaccatgctcactgcatcaacccactgcctttctgaacgtgaaagccggagcagtgccagggggaagcagccagcacccaayggcccacactgctctcrggtcactttgcaaacttcyccctgtcagaagtgccctacagcagcactgygcttccaggctctcccttggtgtctacagaccaacccaaggaggaatgcagagctgcgcagtcatttgggcagcatggcctcagggcaagggagcttggaggaaacgaaaaatgcatttattttttattctgtgcaagttaggagttctggggctgtaggcaaagttttgaagcatttctcattctggatgttgacaggaaggggttggcttcactcactgaaaaatgtgtgt

SEQ ID NO: 1023 - DNA, 600 bp, Chicken  19866894085416_2
ctgtctgtgcatgcactgtgccacagcagcatgatgcctcgtgccttatttcccatctgcagccaggagcagccacatggcccgggctgcagctctgtgctgctctcctgcccttgcacagtgcctctctgtttgatttttctgggctctgtacttcactcccactgttttgaagggacagccatctagcaatgacagggtcaccatgctcactgcatcaacccactgcctttctgaacgtgaaagccggagcagtgccagggggaagcagccagcacccaayggcccacactgctctcrggtcactttgcaaacttcyccctgtcagaagtgccctacagcagcactgygcttccaggctctcccttggtgtctacagaccaacccaaggaggaatgcagagctgcgcagtcatttgggcagcatggcctcagggcaagggagcttggaggaaacgaaaaatgcatttattttttattctgtgcaagttaggagttctggggctgtaggcaaagttttgaagcatttctcattctggatgttgacaggaaggggttggcttcactcactgaaaaatgtgtgtgagtacgcctggggaga

SEQ ID NO: 1024 - DNA, 600 bp, Chicken  19866894085416_3
gccacagcagcatgatgcctcgtgccttatttcccatctgcagccaggagcagccacatggcccgggctgcagctctgtgctgctctcctgcccttgcacagtgcctctctgtttgatttttctgggctctgtacttcactcccactgttttgaagggacagccatctagcaatgacagggtcaccatgctcactgcatcaacccactgcctttctgaacgtgaaagccggagcagtgccagggggaagcagccagcacccaayggcccacactgctctcrggtcactttgcaaacttcyccctgtcagaagtgccctacagcagcactgygcttccaggctctcccttggtgtctacagaccaacccaaggaggaatgcagagctgcgcagtcatttgggcagcatggcctcagggcaagggagcttggaggaaacgaaaaatgcatttattttttattctgtgcaagttaggagttctggggctgtaggcaaagttttgaagcatttctcattctggatgttgacaggaaggggttggcttcactcactgaaaaatgtgtgtgagtacgcctggggagaaagaagtgtatttagactt

SEQ ID NO: 1025 - DNA, 600 bp, Chicken  19866894085416_4
tgcctcgtgccttatttcccatctgcagccaggagcagccacatggcccgggctgcagctctgtgctgctctcctgcccttgcacagtgcctctctgtttgatttttctgggctctgtacttcactcccactgttttgaagggacagccatctagcaatgacagggtcaccatgctcactgcatcaacccactgcctttctgaacgtgaaagccggagcagtgccagggggaagcagccagcacccaayggcccacactgctctcrggtcactttgcaaacttcyccctgtcagaagtgycctacagcagcactgygcttccaggctctcccttggtgtctacagaccaacccaaggaggaatgcagagctgcgcagtcatttgggcagcatggcctcagggcaagggagcttggaggaaacgaaaaatgcatttattttttattctgtgcaagttaggagttctggggctgtaggcaaagttttgaagcatttctcattctggatgttgacaggaaggggttggcttcactcactgaaaaatgtgtgtgagtacgcctggggagaaagaagtgtatttagacttccttcttctcttcat

SEQ ID NO: 1026 - DNA, 600 bp, Chicken  19866894085416_5
tcccatctgcagccaggagcagccacatggcccgggctgcagctctgtgctgctctcctgcccttgcacagtgcctctctgtttgatttttctgggctctgtacttcactcccactgttttgaagggacagccatctagcaatgacagggtcaccatgctcactgcatcaacccactgcctttctgaacgtgaaagccggagcagtgccagggggaagcagccagcacccaayggcccacactgctctcrggtcactttgcaaacttcyccctgtcagaagtgccctacagcagcactgygcttccaggctctcccttggtgtctacagaccaacccaaggaggaatgcagagctgcgcagtcatttgggcagcatggcctcagggcaagggagcttggaggaaacgaaaaatgcatttattttttattctgtgcaagttaggagttctggggctgtaggcaaagttttgaagcatttctcattctggatgttgacaggaaggggttggcttcactcactgaaaaatgtgtgtgagtacgcctggggagaaagaagtgtatttagacttccttcttctcttcatctgagcacaacaactg

SEQ ID NO: 1027 - DNA, 600 bp, Chicken  19866894085416_6
catctgagcacaacaactgcacagcttggaagtgaagcagcagagtgctttctcctgcgtgctggaaaaagcgtggcaaactaatctgttggcttgctttttcttctatatttaggatgactgtgagaagctggctaacttcctggaaaatgccttccacaagcaccggtctcctcccttgtgagtcacccctggggcagtggggtccctgcgctatggggacgggcacacacccagcaaggagcgaccgcgggctccgggaccaacccctccagcagggccactgcagactgaatctcygcggtccatgagaggtgtatgcctttgttgtggcgtggaaagacgacagcaagcagaatagcaaccagctctaacacaaggaatggcctctgcacgagcacgtgccccggcccctattcctgaagcagcaatccagggggagctgtggggcaccggggagtgctggctgtgtttgtgaagatgtggagctgctgcaagagtcccccagactgatagatttgcctctgggagcgataagcttttctcactgtgggtcctaaagctcttttcttcccctctttgccagctggtgatgggtgc

SEQ ID NO: 1028 - DNA, 600 bp, Chicken  19866894085416_7
ggggagctgtggggcaccggggagtgctggctgtgtttgtgaagatgtggagctgctgcaagagtcccccagactgatagatttgcctctgggagcgataagcttttctcactgtgggtcctaaagctcttttcttcccctctttgccagctggtgatgggtgcagaagggaggaaagctccagcacagtttgcaatctgccacgttccatcctctatctccatttcctgctgctctgttaaggtttcccaagcacaggtgaaccactgtgatgcctttcaatgagaagctcacacctcrgtgtaagctgacaggtgggctttgtgagctggacttggaggaaactgcagcaatccaaacccgccagctggatcccaacgcggggaccagcaggaatgtcactggtgctgaacagaaccttttccacttccttttgtctcacggccttcaaaaaccttatggtatcctaaggggaaacccccctacgtctgtcccttccctgtatgtcctggggtgtttggaacttcattgcttgtgtggaggaaggggcaatcgtagctgctgcacacattgggttcctttggtagaaaccacccgcag

SEQ ID NO: 1029 - DNA, 599 bp, Chicken  19866894085425_1
  misc_feature (1)..(146): n is any nucleotide
nnnnnnnnnnnnnnnnnnnnnnnnnnnnnnnnnnnnnnnnnnnnnnnnnnnnnnnnnnnnnnnnnnnnnnnnnnnnnnnnnnnnnnnnnnnnnnnnnnnnnnnnnnnnnnnnnnnnnnnnnnnnnnnnnnnnnnnnnnnnnnnnnnttcccatccaaaatgccacgcaagacgacacacaggtgcacacagctttcttcatatcaacttcagcttttcactcacaagtgaatcaccttgtagcaacatccaaagcagctttaggcacagcagcaacgttcatgggaacgacttggaatgyccctttcattacagtcagtcatttcgttctttaacatgttctcatctgtaatttgaatacactggagaagttcaaacaacgctcaaattgctgccaggacaccacgcaggctctcacagaatgggtcggtgcagtttgtcccatccctctggggaaataaaacgcaaactactcaaaggagatgactcaaataaactgcactgccccccttcagagccagcccagcacagcccggttctgcccttcgtaccgaggtgatgctgctgcactttgtgcttttgtccagttcaagaatcact

SEQ ID NO: 1030 - DNA, 600 bp, Chicken  19866894085430_1
gtgagttcttttggacagattcttgaaacagagttggatctattaatctgttataatgaacattcactcataagaaaagttcttataaagtgaatttttcttccttaggattttttcagtgctttcagctattctttatttgggcaacgtgacgtacaagaagaaagctacaggccgtgatgaaggattggaagtaggacctcctgaagtgctggacattctttcccagcttttgaaagtagagtattactttccagctctagtgtttggaacagctgtttgttgtgctttaccttggcrttttgcttggatacattgtggcccagcatgctatgtctctgtctgtgttttatgatacttcaatgatgttcattttatgggaggtggaaagaatgaaagcaatgaaattattgggattagagatgaaatgcagcctgtagcatgggagtagaatctgttttacttgctaatcagagttgtgcaggaataaatttactggagatgtgtgctttgcaaccataggttgaaatgttttcaacatcaacatgttgatgtaaagcttgtatctgttttcaaagtgcttggcttctctgaggaaat

SEQ ID NO: 1031 - DNA, 600 bp, Chicken  19866894085431_1
aaggatttggtcagatgataaatactaaccagggccttttatataagcctccatttataaacacgtgcaacaggaagagaaacggccagctgagttttttgtttgtttttgagcaagtaaatgatatggtgagaataatgtgcctatgagaatgattaatgtgaatctgaaagctttattattgatgtttctcatacacatatattttctcttgagcatcctctgagcagttacaatgattaaagccgcctatattcccctagccccacacaaataagcacagtgtttattagctaaaakctgggtccatagcattagaagttatactgctgtggggagaacactgtggggaaaaagcattcacatggattcctgatgcatctgtgtacatctgtaaattactttcccctgtataaacaagtgcttttccagtaaatcttcagtggagtaacaggattgctttcaattgtattgactggagtccagaaataataagttattgggttttgtttgtcagatagatgatgaattgagtggcggaattctacttctgagattaacagcagtctgattccatttaggaaaggcaataaaaatatt

SEQ ID NO: 1032 - DNA, 600 bp, Chicken  19866894085434_1
atatatcaaacagagttatacaaaggaagcaaaccaccagagctcttacaagaaaacttacattttctgcagtaaggaagaggatcatgagtcaattttagcacttctagcatttgaggagtatgcatttccacatagccactttcccttggtggctttttcgatcttactattcatcaaattcctgcagttcctccaaagcctacaatggtacactctcttcacttctgctctgaaaacattttcatccagagctgtaagctgctccttgaagcagtgggatccagtgggatctgtgckagaggaactgctgggctatttcgcagtcaccttacatatccgtctcatcctattaatatataaattttatttgacactggtgaaaatggggttaaagtgcctttctcagcagagcttatgtcaaactagaagggtacaaaggtgaacttctgaaggtgactttttagcagcagattttatgtgtgaggcattttccataaaggattcatcaggattctgatataattggtacaatgttatcaatatttctggggaaaaatacagatacattgctaggtgaaagcagccttaagcacatta

SEQ ID NO: 1033 - DNA, 440 bp, Chicken  19866894085439_1
gatggatcgtttgggtttggctgcccagactgcaagaaagtaaatgacggcggagcgttcccttttataaaacaaagaagtgaggaaccgctgtcttccctcacgccaagagtgtgcccttcggccggctgtcccagcagctgcagccgccacaccgccacgcacgtacctcccaacgcccggggaaagaactactcctgggatgccaaccccgcacacacgcactgccccaaagcgcactcccacggccctgagcgctgcagcgccgcgggggatgcggggcagagccacctgtgcgtkgtttgcggggagggatcgggtaggaggggggacacgcactttcgtgccgcattgagccgggccgcccccccccccccccccagtcagcgccccgcacgccgggcaccggtccctcatccgtgccatgagcgaggaggggg

SEQ ID NO: 1034 - DNA, 599 bp, Chicken  19866894085440_1
  misc_feature (1)..(131): n is any nucleotide
nnnnnnnnnnnnnnnnnnnnnnnnnnnnnnnnnnnnnnnnnnnnnnnnnnnnnnnnnnnnnnnnnnnnnnnnnnnnnnnnnnnnnnnnnnnnnnnnnnnnnnnnnnnnnnnnnnnnnnnnnnnnnnnnnnnctttgagggtgctagaagttgtattgattttgaggaaaaacgtcttactcatgtgtatcttgtgatgtgaacaaaggaagtcttctcagccatgcagcagtctccaatctgagagtttattcttggttaaacctgactcaaaactaaaaattcgggttgttacgctgtraaattaaacttctggagtaaagcactttaaattctattaaagtcctactcaatctgtgcttttatcatttgttacaactcctacagcaagcttgctgtgtgtgagctctttacagaatcagtcatttctcgtaaccgactacagctgctgccatctgtctraagacacttccttgcagctttgggatagactttagtaacaggtgctcacagcttacctttggtcataagcaacaaaagctagtgctctttatttatgttaaggagtaaatacactggaaaattaaaacgcatatttct

SEQ ID NO: 1035 - DNA, 600 bp, Chicken  19866894085440_2
tgaggaaaaacgtcttactcatgtgtatcttgtgatgtgaacaaaggaagtcttctcagccatgcagcagtctccaatctgagagtttattcttggttaaacctgactcaaaactaaaaattcgggttgttacgctgtraaattaaacttctggagtaaagcactttaaattctattaaagtcctactcaatctgtgcttttatcatttgttacaactcctacagcaagcttgctgtgtgtgagctctttacagaatcagtcatttctcgtaaccgactacagctgctgccatctgtctraagacacttccttgcagctttgggatagactttagtaacaggtgctcacagcttacctttggtcataagcaacaaaagctagtgctctttatttatgttaaggagtaaatacactggaaaattaaaacgcatatttcttccttgtctaaamtttggttctctgagccctcttagatgaggctgcatgtgcagaggctgcattgctgcggcgtatgacttgagcagatagaactgggtcctccgcaggagtcatgagaaatgtctctgtgtctccccatagtgtaacatgtggcatattca

SEQ ID NO: 1036 - DNA, 600 bp, Chicken  19866894085440_3
tggagtaaagcactttaaattctattaaagtcctactcaatctgtgcttttatcatttgttacaactcctacagcaagcttgctgtgtgtgagctctttacagaatcagtcatttctcgtaaccgactacagctgctgccatctgtctraagacacttccttgcagctttgggatagactttagtaacaggtgctcacagcttacctttggtcataagcaacaaaagctagtgctctttatttatgttaaggagtaaatacactggaaaattaaaacgcatatttcttccttgtctaaamtttggttctctgagccctcttagatgaggctgcatgtgcagaggctgcattgctgcggcgtatgacttgagcagatagaactgggtcctccgcaggagtcatgagaaatgtctctgtgtctccccatagtgtaacatgtggcatattcaaacagaagaagcacttaaataagttttcctctagtgacagctttgtgcagtttcagttacatctaatgggctttacacaagctagtcttgtgtagatagcggagatgtgtttgattacttctttgagaacaaagagcttcatatctctttg

SEQ ID NO: 1037 - DNA, 599 bp, Chicken  19866894085442_1
  misc_feature (1)..(50): n is any nucleotide
nnnnnnnnnnnnnnnnnnnnnnnnnnnnnnnnnnnnnnnnnnnnnnnnnntgatgctgctgtgatggagctagaaagtactgagtacagggctgtgctgtgtcctgtgtgcttcctcatggctgcagagcagggtattggagcgtatgtatttgaatgagaagtgtgcatgtgttcgtatttatgtgtgtgtattttcatatatgcagtgatcaaaagacagcaatacatttttgaacaagtaatagctggaagattaggtccatagctgagtgtccccccaccatcacctgctttgtgyttgtggtgtggggctgccctgtgggatgtgctagcgctgaccacagagcgtccccaagcaaggagcttgcctgtgagcagctccccacaagcagcagcatccctgcacgcatccccttccagggagcatccctgcaagcagctccctgccagcagtaatcgctgccgcgctgcagcccggcgtttaacgagaaggcgcaaggctttcacttagccctgccaccacatttattttctggttacggctccaagtaaacattccagcgtctgctgcgcgtggtttgcgaccaaatcgcatta

SEQ ID NO: 1038 - DNA, 600 bp, Chicken  19866894085442_2
aagtaaacattccagcgtctgctgcgcgtggtttgcgaccaaatcgcattatctgccttgtccagaggaagttgcagccatatagtagagccatgtgataaacagcacttgtaattcctgcctgcctgactcacttatctccatcaagattattaatatttccagcatgtaagcagtttccaacagctgtcaaatataaacaataagctaccagaaaacttgcttctgcttctccccctgaactcagttccccacacagtgcattacagggtctgaagctaaaggtactgaagtccagcrttaactggtggcttgggtttggatgtttcgctgtcagctactgctgccaaaaatgtgtgcttcatcttaagagattaattwctagctttacaaaaaggcagtgttacttgattaagaatttaagactacagaattcctaatcgtaaaaaatcccgatttaagtcactttttttgtttctaaaattcttcagttagtagaagcgttctataaacacaccaattacatgttcttattttccaagcatttcctactgagaaagaggcaagaaatctgctgctctctggtttcttaaccacaaa

SEQ ID NO: 1039 - DNA, 600 bp, Chicken  19866894085442_3
atagtagagccatgtgataaacagcacttgtaattcctgcctgcctgactcacttatctccatcaagattattaatatttccagcatgtaagcagtttccaacagctgtcaaatataaacaataagctaccagaaaacttgcttctgcttctccccctgaactcagttccccacacagtgcattacagggtctgaagctaaaggtactgaagtccagcrttaactggtggcttgggtttggatgtttcgctgtcagctactgctgccaaaaatgtgtgcttcatcttaagagattaattwctagctttacaaaaaggcagtgttacttgattaagaatttaagactacagaattcctaatcgtaaaaaatcccgatttaagtcactttttttgtttctaaaattcttcagttagtagaagcgttctataaacacaccaattacatgttcttattttccaagcatttcctactgagaaagaggcaagaaatctgctgctctctggtttcttaaccacaaagtcatcctgtatagcttcagaatacgtcctcactctctctgtactgtcctctgtaacattacaataatctgacctgtaagg

SEQ ID NO: 1040 - DNA, 600 bp, Chicken  19866894085442_4
aatcgtaaaaaatcccgatttaagtcactttttttgtttctaaaattcttcagttagtagaagcgttctataaacacaccaattacatgttcttattttccaagcatttcctactgagaaagaggcaagaaatctgctgctctctggtttcttaaccacaaagtcatcctgtatagcttcagaatacgtcctcactctctctgtactgtcctctgtaacattacaataatctgacctgtaaggttttctctcttcttaaaatatctggatgtatctgtcctgttgtggaaggcaagaagygttagtagcacagatgcaaggtgctctgtactgagataggtggaaagccagagcattcctgggcatattgagtttatttgtgtggacacagcatatttgtttctcacttagcacgtcctggcccctctgtttcccttaggtcacccaggcaagcagcgagggtctcgcacttggaacaggctgaataatgcccacatggcttggccatctgtaagtggtgaattaatcacaagcacgggtggacaatgtctttatgttgcacgttcgggtaagctatattatgcgatagcgcacaccagg

SEQ ID NO: 1041 - DNA, 547 bp, Chicken  19866894085442_5
cagcgagggtctcgcacttggaacaggctgaataatgcccacatggcttggccatctgtaagtggtgaattaatcacaagcacgggtggacaatgtctttatgttgcacgttcgggtaagctatattatgcgatagcgcacaccaggtttgactttaattaaatatttggtccacacatgctgcaaaaaggagtgagttagcaattttctgcttaacctgacacacacagtgcaggctctgagaaagcacccgcattaagcagccggcagcagcatgatagatacaagccctgctagcastgttttgtggctttcgtttttgtagctccaaaacaacgctgcrgtctccgaaacagtctctgaagtgtccgggcactcagtcattctttttttcctttgaagaaggagcattgcaaacgccatccggtcaatgcaaacagagccagttctttctccacaaagttttgtgaaggcttttagtgcagcacaatgtcagccttcagaagccgtcatttctgcagccacttgaatgatacctctgaaatga

SEQ ID NO: 1042 - DNA, 504 bp, Chicken  19866894085442_6
tggcttggccatctgtaagtggtgaattaatcacaagcacgggtggacaatgtctttatgttgcacgttcgggtaagctatattatgcgatagcgcacaccaggtttgactttaattaaatatttggtccacacatgctgcaaaaaggagtgagttagcaattttctgcttaacctgacacacacagtgcaggctctgagaaagcacccgcattaagcagccggcagcagcatgatagatacaagccctgctagcastgttttgtggctttcgtttttgtagctccaaaacaacgctgcrgtctccgaaacagtctctgaagtgtccgggcactcagtcattctttttttcctttgaagaaggagcattgcaaacgccatccggtcaatgcaaacagagccagttctttctccacaaagttttgtgaaggcttttagtgcagcacaatgtcagccttcagaagccgtcatttctgcagccacttgaatgatacctctgaaatga

SEQ ID NO: 1043 - DNA, 369 bp, Chicken  19866894085444_1
agtgcaattaattctgttcagtgaaatccatggctggcattaacctggccttctccagccacgaatgcttcagcaacaccgaattactacccaggacaactctgttatgatactttacaacctgaggagtcttcaacgaggacacactgatttgcccagtgcagcctgaagggaaccaaagcgctggacgtggctgtccaacccccccagcacatttctgctcacatcagattaatatcagcacacctaaacagacgctcaacgaaccaacagaagaacatgctttgaaaccacatcggrgctgatgaaagcgtggttaaacttcttccaagcagcacatgtgagggaaaaaaaaaagggggggcacat

SEQ ID NO: 1044 - DNA, 600 bp, Chicken  19866894085445_1
gagcttgctctgtgatatgtctaggactacatccaagcatagagcttttgcctggattcatgaatcactcagaattagtgcattcttcatctctgcagccagatacccaaatccttggcacttgtgcttgtcttcattcaggtcttctcactacacaaagttttcaaaggacatgagccgtgggaagactgctcaaagaagccatacacagctctccctcattacctatacacggcaatttggaaggacccacagttatctgagtcagttgttctagagaagagtaaatctagaaagccygccgttactcctactgacaaaaaaaaaccmaaacaacaaaatagtcttttcctggagctactgaaaaacatgtcttttctgaggttacatagtcagataagctagagaagcctgcactgcagtcacactagggtggcaatctcacagaagggtcagtgctccatgggctgaaggacagtggtaagsccacagctcccttttcttttttccagaccaatatatrgttcagccattggctgtaatctggaggacaccagccactagtccagttagggragcattactttttggaggagtcct

SEQ ID NO: 1045 - DNA, 600 bp, Chicken  19866894085445_2
atccaagcatagagcttttgcctggattcatgaatcactcagaattagtgcattcttcatctctgcagccagatacccaaatccttggcacttgtgcttgtcttcattcaggtcttctcactacacaaagttttcaaaggacatgagccgtgggaagactgctcaaagaagccatacacagctctccctcattacctatacacggcaatttggaaggacccacagttatctgagtcagttgttctagagaagagtaaatctagaaagccygccgttactcctactgacaaaaaaaaaccmaaacaacaaaatagtcttttcctggagctactgaaaaacatgtcttttctgaggttacatagtcagataagctagagaagcctgcactgcagtcacactagggtggcaatctcacagaagggtcagtgctccatgggctgaaggacagtggtaagsccacagctcccttttcttttttccagaccaatatatrgttcagccattggctgtaatctggaggacaccagccactagtccagttagggragcattactttttggaggagtccttctggaggctccaraaccagacaccagggg

SEQ ID NO: 1046 - DNA, 600 bp, Chicken  19866894085445_3
gactgctcaaagaagccatacacagctctccctcattacctatacacggcaatttggaaggacccacagttatctgagtcagttgttctagagaagagtaaatctagaaagccygccgttactcctactgacaaaaaaaaaccmaaacaacaaaatagtcttttcctggagctactgaaaaacatgtcttttctgaggttacatagtcagataagctagagaagcctgcactgcagtcacactagggtggcaatctcacagaagggtcagtgctccatgggctgaaggacagtggtaagsccacagctcccttttcttttttccagaccaatatatrgttcagccattggctgtaatctggaggacaccagccactagtccagttagggragcattactttttggaggagtccttctggaggctccaraaccagacaccagggggcttatttatgaaagcatcaatttggttggagtttttacgtgcctgataggctgcaagcgagatttagacaccttctttgtgtttgaacaggttcaagcaatacggaaatcagtagactgcagattttcagtgggaaactatctagggaaagcaaa

SEQ ID NO: 1047 - DNA, 600 bp, Chicken  19866894085445_4
acctatacacggcaatttggaaggacccacagttatctgagtcagttgttctagagaagagtaaatctagaaagccygccgttactcctactgacaaaaaaaaaccmaaacaacaaaatagtcttttcctggagctactgaaaaacatgtcttttctgaggttacatagtcagataagctagagaagcctgcactgcagtcacactagggtggcaatctcacagaagggtcagtgctccatgggctgaaggacagtggtaagsccacagctcccttttcttttttccagaccaatatatrgttcagccattggctgtaatctggaggacaccagccactagtccagttagggragcattactttttggaggagtccttctggaggctccaraaccagacaccagggggcttatttatgaaagcatcaatttggttggagtttttacgtgcctgataggctgcaagcgagatttagacaccttctttgtgtttgaacaggttcaagcaatacggaaatcagtagactgcagattttcagtgggaaactatctagggaaagcaaaagtatacctgaagttggtataactgtctcagtgtcag

SEQ ID NO: 1048 - DNA, 600 bp, Chicken  19866894085445_5
gagaagagtaaatctagaaagccygccgttactcctactgacaaaaaaaaaccmaaacaacaaaatagtcttttcctggagctactgaaaaacatgtcttttctgaggttacatagtcagataagctagagaagcctgcactgcagtcacactagggtggcaatctcacagaagggtcagtgctccatgggctgaaggacagtggtaagsccacagctcccttttcttttttccagaccaatatatrgttcagccattggctgtaatctggaggacaccagccactagtccagttagggragcattactttttggaggagtccttctggaggctccaraaccagacaccagggggcttatttatgaaagcatcaatttggttggagtttttacgtgcctgataggctgcaagcgagatttagacaccttctttgtgtttgaacaggttcaagcaatacggaaatcagtagactgcagattttcagtgggaaactatctagggaaagcaaaagtatacctgaagttggtataactgtctcagtgtcagtgcagttctgaggaacataaccaaagcagatctaaagaggcatactgaaacat

SEQ ID NO: 1049 - DNA, 600 bp, Chicken  19866894085445_6
tgacaaaaaaaaaccmaaacaacaaaatagtcttttcctggagctactgaaaaacatgtcttttctgaggttacatagtcagataagctagagaagcctgcactgcagtcacactagggtggcaatctcacagaagggtcagtgctccatgggctgaaggacagtggtaagsccacagctcccttttcttttttccagaccaatatatrgttcagccattggctgtaatctggaggacaccagccactagtccagttagggragcattactttttggaggagtccttctggaggctccaraaccagacaccagggggcttatttatgaaagcatcaatttggttggagtttttacgtgcctgataggctgcaagcgagatttagacaccttctttgtgtttgaacaggttcaagcaatacggaaatcagtagactgcagattttcagtgggaaactatctagggaaagcaaaagtatacctgaagttggtataactgtctcagtgtcagtgcagttctgaggaacataaccaaagcagatctaaagaggcatactgaaacataaaacagatgagagctctggagccagtgacgtaaggct

SEQ ID NO: 1050 - DNA, 600 bp, Chicken  19866894085448_1
attcttggagagttctgctacttggccaccaacccacaccgtgacctcgtccagcagccccgcatcccctttccaaccccatgccctgcgatactttacatgcagggagagcagggtcttggctgcctccttctgcagccgcgtgccgttgagtggcaggtagccgatctgctggccctgggcgtacagcaggaaggtccctgcggccggcggggacacgtcgggacgcggcgagggccggacggtgggcggtgcgacgctggggagacctgggcacaccatggaggggacgaggagagrgatggctccaagcgcatcggggcagatggcactcggggtgtggggtcccagagctcttacatggcggggggctgccgggctccgagcgcgtgccttggatctccctgccgctctcgtccacgcaccagcagtacccgctgtccccgtggcactgcagcggggtgaagtggccgtgtgcatcacactgcggcacgtactggtcgccgcgggggctgcctccgtagtgctccagcaggctctgccgccagcgctcacacatggtcgggggacgctccgagggctctgccacaggaatggtga

SEQ ID NO: 1051 - DNA, 600 bp, Chicken  19866894085452_1
ctcagcaaaagagtctttatgaaacactccctttctcaactcaaagccaaacacaatggggggagaaaaaaaacaaccacgaagaaccatctttgccaacacacagctaatcacaaccatttgtttctacttccctgacttcatttatttaaagaaagatgataattcactagaacagtcagaattcgacttcctgttttctttcaaatcagtaagataacatccacttcaaactgcatgccagagttgtacagagctgtacatagtgcctaaccatactaagtacacaagagaatggarrttccaatcccttcatctccctacttttcccagtctgtggtcagtcttgggatcagcaataatggcctgaactgctacgatygcttcgttgatttttgtttgcagctctcggagctcctctatgtgcagcaaccgcaggatttgggcagcttcgttgataacagcatctgggtgagatgcagaaagagaagtcgtgtcaagcatttatatctgatacaaagagcttaagaaaagattaatctcagtgaacattccacacttcattcatgcttgtggtttttcatactggaaggaggaggc

SEQ ID NO: 1052 - DNA, 600 bp, Chicken  19866894085452_2
tcagcaaaagagtctttatgaaacactccctttctcaactcaaagccaaacacaatggggggagaaaaaaaacaaccacgaagaaccatctttgccaacacacagctaatcacaaccatttgtttctacttccctgacttcatttatttaaagaaagatgataattcactagaacagtcagaattcgacttcctgttttctttcaaatcagtaagataacatccacttcaaactgcatgccagagttgtacagagctgtacatagtgcctaaccatactaagtacacaagagaatggarrttccaatcccttcatctccctacttttcccagtctgtggtcagtcttgggatcagcaataatggcctgaactgctacgatygcttcgttgatttttgtttgcagctctcggagctcctctatgtgcagcaaccgcaggatttgggcagcttcgttgataacagcatctgggtgagatgcagaaagagaagtcgtgtcaagcatttatatctgatacaaagagcttaagaaaagattaatctcagtgaacattccacacttcattcatgcttgtggtttttcatactggaaggaggaggca

SEQ ID NO: 1053 - DNA, 600 bp, Chicken  19866894085452_3
agaaccatctttgccaacacacagctaatcacaaccatttgtttctacttccctgacttcatttatttaaagaaagatgataattcactagaacagtcagaattcgacttcctgttttctttcaaatcagtaagataacatccacttcaaactgcatgccagagttgtacagagctgtacatagtgcctaaccatactaagtacacaagagaatggarrttccaatcccttcatctccctacttttcccagtctgtggtcagtcttgggatcagcaataatggcctgaactgctacgatygcttcgttgatttttgtttgcagctctcggagctcctctatgtgcagcaaccgcaggatttgggcagcttcgttgataacagcatctgggtgagatgcagaaagagaagtcgtgtcaagcatttatatctgatacaaagagcttaagaaaagattaatctcagtgaacattccacacttcattcatgcttgtggtttttcatactggaaggaggaggcagaacttcccttgcacagagggctctgcaaagcctcacccagctctgcgcagccctcacagtaatccccagctaagtcaggt

SEQ ID NO: 1054 - DNA, 600 bp, Chicken  19866894085455_1
ctgctccaaagaacagtctataagatgactggcagatgcaaaaggtatttaatcactgctgacttgtttagtatttgaaattataaatatgcagagacaaatattttattcactatgtactcttgcactgattcccatttgatctgacaattgaagagcttacagaataattgctagctgacggtccttgtgaatactaaaatccagcacagtttgcaacatgaaacttcccaaattttagaaaaggttgattatcccttttctttttctgaggaagccttctctattgcaaggagaacrgttctctggattacatctcagttggtgcactaacctagtgtactggatgctcctcatcatgaattcatgtctgcttctgtcagtctgttgggagatctgcacacgacatgaaaccagagctgaacacagtgactgggatgggagcaaggcttgtgaaatgactgaactgtaagacaagaaacatagttaccaacatcagcaggctgttcctagtaaaaccaatatctaatactaaaacattcattaattatctaaaacatacttcatgttctgtagaggggctagctgcatcacaaatct

SEQ ID NO: 1055 - DNA, 600 bp, Chicken  19866894085458_1
cgtgccctatatatctgcaaataaaacacttcatttccctcctggggaatgtcacctcgagaaaccatcgctttcctgctcaccgccccgtccaaatcgcaggctggaaatggctttgtgggcctggctggcgctcagatgggtttaaaatatggatttatgtctttactctgcataggcaaaggtcaacaagagcaggaaatcattgcggagccgcttatttactgccagaggcgggcgctccgctcggtgatccgtccgtctgcgcgcggccgatgatgcggtgtcccgagggatgcrtggcaatggcacaggggtgggcacacggggagccaagcattgccagcacagcgggaatggggcggcggggtcaccggtgccacgggagctttgcaccgggctttccaaggcgtaaccccacaggtggcagctcgctggtggcgtcggggatgggccatggtttggggtcagagcccatagggacgcggtgaccccacggggatgtggtgacccatggggacgtggtgacccatggggacgtgctggccccacagtgcaggactggaggagccagcagtgcccggtgcctgtgcctggcgg

SEQ ID NO: 1056 - DNA, 600 bp, Chicken  19866894085460_1
tcttcctcaatgaaggcaaaatcaggttagatattgctgcagtggttcccagatgagtagttatctctccaaatatgaaacaaaatgataaaaaggtgaagtcatgagcttgcaagaatgcaacagcccccactgaatgaagatttcagtaaccagagaagctgcagctccactgctgtaagacaaaatgccatggaaacctgcttcagtctgagatccaccaagctactcttcattaacttccatccttaccctctgtcccttccagtgccccctcaccaccctcttaagctcaagcaytgcttggactgtcccagtcctcaccctgcmgtaaaaactgcaactgaccagcactacggaaaagcagggtgagtttgttaaaatgcttgctacactgcctaacaaagaaacaccatttatcatcgcacagcctcctttcagtgcagctcattgctggaggctaatttatacagaatcaatgacaaaacagttagctgggagtttattttactaagcatttgctcgtgtcaatccatttcataactgactctccttgttaaacatccccctagggaaacagctacagcatatccacttcca

SEQ ID NO: 1057 - DNA, 600 bp, Chicken  19866894085460_2
atattgctgcagtggttcccagatgagtagttatctctccaaatatgaaacaaaatgataaaaaggtgaagtcatgagcttgcaagaatgcaacagcccccactgaatgaagatttcagtaaccagagaagctgcagctccactgctgtaagacaaaatgccatggaaacctgcttcagtctgagatccaccaagctactcttcattaacttccatccttaccctctgtcccttccagtgccccctcaccaccctcttaagctcaagcaytgcttggactgtcccagtcctcaccctgcmgtaaaaactgcaactgaccagcactacggaaaagcagggtgagtttgttaaaatgcttgctacactgcctaacaaagaaacaccatttatcatcgcacagcctcctttcagtgcagctcattgctggaggctaatttatacagaatcaatgacaaaacagttagctgggagtttattttactaagcatttgctcgtgtcaatccatttcataactgactctccttgttaaacatccccctagggaaacagctacagcatatccacttccagcaccatggctggctgcagtaggtggaaga

SEQ ID NO: 1058 - DNA, 600 bp, Chicken  19866894085464_1
aaaagatttaaaataaagttatttttcaacagtgctagtttttcaacatttgttctagtgtttataaactaaatatgttatatttgaacattttaattctcatttctcttcaagtgtactcatagatccacacaaatcacaagaaaaaataaccatcgtctgctaaataagaattatattacttacaatttgctaacagaatgttaaacttcagaggtagtataaaaataaatggtacatcaggtgtatcctgttggttagcaaggagaagtgttttattttgggctaagtttatagatrgaaatatttatatatctaaataaaagttctacccaatgatatgaattcctgaaactcacaacttcgccttctaggttttctcagagttctattgattattttatttttycctgtcagcctatttctagctttacatccgcttccaattgcctttgtcctcagtasacgttcatgatacaatctaaaagcaaaaaggttatttgcctctaaagagttctctcctagcaaaacctataaaagcacttttataatttgcttttgctacattgacatgtgaatgcattgagaagaaccaggaag

SEQ ID NO: 1059 - DNA, 600 bp, Chicken  19866894085464_2
tcaagtgtactcatagatccacacaaatcacaagaaaaaataaccatcgtctgctaaataagaattatattacttacaatttgctaacagaatgttaaacttcagaggtagtataaaaataaatggtacatcaggtgtatcctgttggttagcaaggagaagtgttttattttgggctaagtttatagatrgaaatatttatatatctaaataaaagttctacccaatgatatgaattcctgaaactcacaacttcgccttctaggttttctcagagttctattgattattttatttttycctgtcagcctatttctagctttacatccgcttccaattgcctttgtcctcagtasacgttcatgatacaatctaaaagcaaaaaggttatttgcctctaaagagttctctcctagcaaaacctataaaagcacttttataatttgcttttgctacattgacatgtgaatgcattgagaagaaccaggaagcaaagtagatgttggctccagaggctttctgaactacttcttggagactgagcacgtgatctctgccaacagcgtgaaacatcttgatgcattatctaattacattata

SEQ ID NO: 1060 - DNA, 600 bp, Chicken  19866894085464_3
aataagaattatattacttacaatttgctaacagaatgttaaacttcagaggtagtataaaaataaatggtacatcaggtgtatcctgttggttagcaaggagaagtgttttattttgggctaagtttatagatrgaaatatttatatatctaaataaaagttctacccaatgatatgaattcctgaaactcacaacttcgccttctaggttttctcagagttctattgattattttatttttycctgtcagcctatttctagctttacatccgcttccaattgcctttgtcctcagtasacgttcatgatacaatctaaaagcaaaaaggttatttgcctctaaagagttctctcctagcaaaacctataaaagcacttttataatttgcttttgctacattgacatgtgaatgcattgagaagaaccaggaagcaaagtagatgttggctccagaggctttctgaactacttcttggagactgagcacgtgatctctgccaacagcgtgaaacatcttgatgcattatctaattacattatagatgagaacacttagtataacaaaaaccattaatttttaaaaatgaatttgtgaca

SEQ ID NO: 1061 - DNA, 581 bp, Chicken  19866894085465_1
ataaactggtacctcagaagaaccatgaaaagaactgttgttaaaaagtatatatttggagcatatcttcttatgtacctgtactacctcacactatacttactgactgaacactcagatctattgcagttatgcaataaactatgtttatttcctcttcactgcagttatatgtagatctcgtgtccaaatttcagaaagaaatctaccttgtagtgagttcattctcaatcccttagagatactgaattttaattgatcgttttgcctctccttcatactaattctgatacactgatraatttttatccgtgactgataaagagttacaaaatatttgtcacatgagataatttcaggtttggtcacataaagtaataataagtaaaatatcagttcaaacmtttgtttgtgccatagtcattgatatggtatctaaatgcacaatggcccttttaattatttcatctagtttcagctgacttttggtttatttgacattgatacgtatgtgcttcaatgtttttcctgctccatttttttttttttaattctatttggtaaatgtttcatatatatgt

SEQ ID NO: 1062 - DNA, 477 bp, Chicken  19866894085465_2
gactgaacactcagatctattgcagttatgcaataaactatgtttatttcctcttcactgcagttatatgtagatctcgtgtccaaatttcagaaagaaatctaccttgtagtgagttcattctcaatcccttagagatactgaattttaattgatcgttttgcctctccttcatactaattctgatacactgatraatttttatccgtgactgataaagagttacaaaatatttgtcacatgagataatttcaggtttggtcacataaagtaataataagtaaaatatcagttcaaacmtttgtttgtgccatagtcattgatatggtatctaaatgcacaatggcccttttaattatttcatctagtttcagctgacttttggtttatttgacattgatacgtatgtgcttcaatgtttttcctgctccatttttttttttttaattctatttggtaaatgtttcatatatatgt

SEQ ID NO: 1063 - DNA, 510 bp, Chicken  19866894085467_1
atgctttcctggtagactctgtttgtagaactcctgtgtgattcatactgcagtatacgtatgtgtagtgaaggacatttgtgccttagctgcctgcatgaaaatacgactagtctgtgcaggaacttagagctataaatgaagtactataatgaacatgagtgatgtaaaggtagacagctattgagagctatgttcactgcaagagttttcaaatctgattcaaaaatatttggaagataggggccatgttattgtttgactgaaaacttgctgttatgcatattgtatcttacaaawaagagcaggattgtgctggcaggtaagaagagaaagtaagttcttgacaaacaactatgtgttactgtgaaagaatcatattyaaagtccaatttctactcaaacttctttaaaaatgctatttatgattcagactgattaatgacagatgttcccaaggtacactgagtttcttccttattctcttttcaaggagtaggaacaatttaa

SEQ ID NO: 1064 - DNA, 427 bp, Chicken  19866894085467_2
ccttagctgcctgcatgaaaatacgactagtctgtgcaggaacttagagctataaatgaagtactataatgaacatgagtgatgtaaaggtagacagctattgagagctatgttcactgcaagagttttcaaatctgattcaaaaatatttggaagataggggccatgttattgtttgactgaaaacttgctgttatgcatattgtatcttacaaawaagagcaggattgtgctggcaggtaagaagagaaagtaagttcttgacaaacaactatgtgttactgtgaaagaatcatattyaaagtccaatttctactcaaacttctttaaaaatgctatttatgattcagactgattaatgacagatgttcccaaggtacactgagtttcttccttattctcttttcaaggagtaggaacaatttaa

SEQ ID NO: 1065 - DNA, 600 bp, Chicken  19866894085470_1
gaaaacggcttgaaattctgttaaaagacaagctcttgtaacagaaggggatatgatatgaacagttttggagcaggcagaaacacagcagttgtcttatctacttggtatgcagccaacatcctatacccacagagaaaaaggctacatgagataagaaggtgggctacaagaagtgaaggacacgggaaggtttcctgtgtctcctgatagcgtgtgcgacgcacagtcaccacgctataagcagaacctgactgtcctctcacttgaaaggctgtgaatcaaaaatatctgcaccgrtatctgtggagctcctttataaaaccactgcaataaaaaaggtgagtcagactggtaatgtttatccccccctgcktccaacagaagtagggctggggctgcagcattcaaactactgtaacttaatggaaattcccactgactttgacaggttaaatgaaagaaaagccaagaactgcagaaagaagctacaaggggagaggaactcgggaaggragctagccaaaacacaatccaggcaaaaaaaaacccaccaaggtatcagcatgacgctcgatctgaaacacctatttttggagt

SEQ ID NO: 1066 - DNA, 600 bp, Chicken  19866894085470_2
gcagaaacacagcagttgtcttatctacttggtatgcagccaacatcctatacccacagagaaaaaggctacatgagataagaaggtgggctacaagaagtgaaggacacgggaaggtttcctgtgtctcctgatagcgtgtgcgacgcacagtcaccacgctataagcagaacctgactgtcctctcacttgaaaggctgtgaatcaaaaatatctgcaccgrtatctgtggagctcctttataaaaccactgcaataaaaaaggtgagtcagactggtaatgtttatccccccctgcktccaacagaagtagggctggggctgcagcattcaaactactgtaacttaatggaaattcccactgactttgacaggttaaatgaaagaaaagccaagaactgcagaaagaagctacaaggggagaggaactcgggaaggragctagccaaaacacaatccaggcaaaaaaaaacccaccaaggtatcagcatgacgctcgatctgaaacacctatttttggagttacaagttgttctgggcacaacatctgcccaagtatctttgcagttgtgcatgttgctaaataaatcatagaaaaa

SEQ ID NO: 1067 - DNA, 600 bp, Chicken  19866894085470_3
gtgcgacgcacagtcaccacgctataagcagaacctgactgtcctctcacttgaaaggctgtgaatcaaaaatatctgcaccgrtatctgtggagctcctttataaaaccactgcaataaaaaaggtgagtcagactggtaatgtttatccccccctgcktccaacagaagtagggctggggctgcagcattcaaactactgtaacttaatggaaattcccactgactttgacaggttaaatgaaagaaaagccaagaactgcagaaagaagctacaaggggagaggaactcgggaaggragctagccaaaacacaatccaggcaaaaaaaaacccaccaaggtatcagcatgacgctcgatctgaaacacctatttttggagttacaagttgttctgggcacaacatctgcccaagtatctttgcagttgtgcatgttgctaaataaatcatagaaaaagcttacctggcctttcacacacagcrtttggaaaggaaacaacaggagactgaccaacaatgcgggcaaaatgacaattctggattgtaaataaagcagtgcaaattcaacagaaaagagcgttattcttgttccaatct

SEQ ID NO: 1068 - DNA, 600 bp, Chicken  19866894085470_4
agcattcaaactactgtaacttaatggaaattcccactgactttgacaggttaaatgaaagaaaagccaagaactgcagaaagaagctacaaggggagaggaactcgggaaggragctagccaaaacacaatccaggcaaaaaaaaacccaccaaggtatcagcatgacgctcgatctgaaacacctatttttggagttacaagttgttctgggcacaacatctgcccaagtatctttgcagttgtgcatgttgctaaataaatcatagaaaaagcttacctggcctttcacacacagcrtttggaaaggaaacaacaggagactgaccaacaatgcgggcaaaatgacaattctggattgtaaataaagcagtgcaaattcaacagaaaagagcgttattcttgttccaatcttttctgacctaaatcttgttattgcaaggaacagctaagtaagctgctttctgaattaaatttaactgcttttctataagctgaacaacaaaaatcctagagcctgactatgaagaaatggcgaagggcccgtagcagccgccttccctattttcctgaaaaccactctrtgcataagtrgtttct

SEQ ID NO: 1069 - DNA, 600 bp, Chicken  19866894085470_5
cctttcacacacagcrtttggaaaggaaacaacaggagactgaccaacaatgcgggcaaaatgacaattctggattgtaaataaagcagtgcaaattcaacagaaaagagcgttattcttgttccaatcttttctgacctaaatcttgttattgcaaggaacagctaagtaagctgctttctgaattaaatttaactgcttttctataagctgaacaacaaaaatcctagagcctgactatgaagaaatggcgaagggcccgtagcagccgccttccctattttcctgaaaaccactctrtgcataagtrgtttcttataatttgtactcctgcaaaatttgggccctgtgttgtctgcagtgggtgtcccagacagcctgagcagaccctgsattcccaccccggcctttctctttgccctgcctttaaccccaatcagtgcccagcacacacttgctcttgttgagccacagggaacaccaccgcggtctgcagccctccttgcagtgaggtagcacagaaatggctcagccccaggccagcatggtgccagagctggtgggaggcagcaggacagggatgtagggcaggacagcgag

SEQ ID NO: 1070 - DNA, 600 bp, Chicken  19866894085470_6
acagcrtttggaaaggaaacaacaggagactgaccaacaatgcgggcaaaatgacaattctggattgtaaataaagcagtgcaaattcaacagaaaagagcgttattcttgttccaatcttttctgacctaaatcttgttattgcaaggaacagctaagtaagctgctttctgaattaaatttaactgcttttctataagctgaacaacaaaaatcctagagcctgactatgaagaaatggcgaagggcccgtagcagccgccttccctattttcctgaaaaccactctrtgcataagtrgtttcttataatttgtactcctgcaaaatttgggccctgtgttgtctgcagtgggtgtcccagacagcctgagcagaccctgsattcccaccccggcctttctctttgccctgcctttaaccccaatcagtgcccagcacacacttgctcttgttgagccacagggaacaccaccgcggtctgcagccctccttgcagtgaggtagcacagaaatggctcagccccaggccagcatggtgccagagctggtgggaggcagcaggacagggatgtagggcaggacagcgagcagtgactta

SEQ ID NO: 1071 - DNA, 600 bp, Chicken  19866894085470_7
aattcaacagaaaagagcgttattcttgttccaatcttttctgacctaaatcttgttattgcaaggaacagctaagtaagctgctttctgaattaaatttaactgcttttctataagctgaacaacaaaaatcctagagcctgactatgaagaaatggcgaagggcccgtagcagccgccttccctattttcctgaaaaccactctrtgcataagtrgtttcttataatttgtactcctgcaaaatttgggccctgtgttgtctgcagtgggtgtcccagacagcctgagcagaccctgsattcccaccccggcctttctctttgccctgcctttaaccccaatcagtgcccagcacacacttgctcttgttgagccacagggaacaccaccgcggtctgcagccctccttgcagtgaggtagcacagaaatggctcagccccaggccagcatggtgccagagctggtgggaggcagcaggacagggatgtagggcaggacagcgagcagtgacttagggagaatactgcacagtatttcaaactgagcagcccatgccatagctgtgtggtaatccttcttcccacatcaagaattttc

SEQ ID NO: 1072 - DNA, 600 bp, Chicken  19866894085472_1
tactgcaagtgctgatctggtcaccaaggtccaaatcccacagagctgctccaggagaacacaggctggaaacccagccacagcccctcacctggctcccttcagggtgatgcacaccctgggccagatggcagcgagaaacctcagtcatcagtaaaattcagggaagtaattgtagctgctctctgaaaacttcagaaagagaagtgttaatagcttttcacatcgtattttgccttatagccaaagcacagaaattacacgactctttgtccaattaaaagaaatctggtgcaagtwgctgattaagctgtctcagtctacagtaagcatgtttgataccaaataaatagtctcaaatgcctttttttccttttccctcttgagcattctgagtagggttcttcattgtttgatatcagtgcaaaataaacggaaaataccagcctaatgtgagcctgtgacagagctggtaggtacagatacaaatgagaaaatcaggacccagatgaacaccaaagagatctaatggtgcatttttccatctctgctctgtgcgcagctgcagtagatagcctgatggcagccgtggcacaccta

SEQ ID NO: 1073 - DNA, 599 bp, Chicken  19866894085473_1
  misc_feature (1)..(5): n is any nucleotide
nnnnntcttaaaggtaaccatcaccccagcccagaaacactaaccctaacccaaacaaaaccctaaccctgcaccaaatcataaccctaagcctaatcctaacactactcaaaccaaaccctaaccccaactctaatcctaaccctaacactaaaccttaaccctaacatagcatttgttgtgactgtttctatctagctaagaacgtcttccagaacctttagtaccatagaaagatgcagatgctgctgagggtagtggggcttgtttagctcttagcctaggcagacaggtggacarcatggcctctgagcagcttctgtccccgtttcacaggttacaatgcctggaggcgcttctgtgggctctcccagcctcaaacagtggatgagctctctgaggtgctgggcaataccgaactgaccaagaagctcatggacctgtatgggacaccggataatattgacctctggattggggcaattgcagagcccttaattccccgtggcagagttgggcccctcctggcttgcatcattggcactcagttcaggaacttgcgtgatggagacaggtaggtagctctgggagcgtgccat

SEQ ID NO: 1074 - DNA, 600 bp, Chicken  19866894085474_1
cctatattcttctacatacatcaggaaacgtttttttttttttaatgggtggaaagttcctggacttaatcatctgatttattccatttccagcattatagatagcctgggtctgtttgtttgtcctttcaattaaattggcatgaataagcaataatgccactgatctcagcaaagtcacatcagtgtgaaaaaaaacatcaggtcgatggtgaggagatcagcccttgcattaatgtagtcccttcactggatcagcaagtaatttaaaataaataaataatataaacaagagacagmaaacccaaatttgaataatgagatctttgggtttgctgctgcttggaatattactcaatacaaacaaacagtagccgcaggtgctctcaaataagcccagcatgctccctaaaggtttgttagcagactgcttgcctgggggccacaggatctattacagtcttgctgttgcttcctgctgaagaaatccttcttgagagtcaccaatctggtaacaggcaagtcagtgagagttccaggaaaacactatggaagccccagtgagatgtgcgtttactgcatcaagccagatgccagata

SEQ ID NO: 1075 - DNA, 600 bp, Chicken  19866894085474_2
gttttccaggacacttaccttaaattttcctattctctacacctgaataccttgtctccttccacagtatttacaatcctcagccactagcagagttgcatttccctttctttctcccagctatcacttaagcaatataaaactaactttttctctctacaaaacaattatttcatctcctaaatcatttttattttgtttccctgaactttgtctacttgtttcaatatcaaacccttatttctgtctttctatagtgcgttatttgactatggcttgttcttgtctgttgatgagtcraactgcagcaatacaaaggacactgagagagctgaggtctggagtgagaaaacaagagctctagaattgatggactactgctaatctcccagaggaatgcttgtattcttttaccggaactggatggaatggtagattctccattaaagttgggacaatttagtgaaaggtcaaagaaagatctgtttccttgcaagtcattttactattttatcacatggagtcagaagaaacagaccttaaattccaatataatatttttttgttgtttttctgcctgtctaaatcaggctaaaaaga

SEQ ID NO: 1076 - DNA, 600 bp, Chicken  19866894085482_1
agattcagcaaatacttatctggcatccgatggtgaatactcgcttcatggctacattatccactctaatgaccatctttggcctctctttacacacttggagtctgctgttaaagagggaagcaggcagaaccatcgagcctttggaaagaaaacagaggatttatttaacgtaatgtaaactcttatttgtttcaaaactcatgagcccagaacttattttgagggaagtagaaactaagctgttgaagagagttcatgaatctcaaatgctagaaatacagcttaacttgctagtcrtagatttctattcccttcaactttagcagtgcagtcttaaggctctagaagttctggagcaatctcagattatactagaaaactgcagtgctgataaaattcatagaatggcctcggttgaaaaggacctcaaagatcattcagtttcaacctccctgctayrtgcagggttgccagccactacaccaggctgcccagagccacatccagcctggccttgaatgcctccagggatggggcatccacagcctccttgggcaacctgttccagtgyrtcaccaccctccatgtggaaaaact

SEQ ID NO: 1077 - DNA, 600 bp, Chicken  19866894085482_2
tttatttaacgtaatgtaaactcttatttgtttcaaaactcatgagcccagaacttattttgagggaagtagaaactaagctgttgaagagagttcatgaatctcaaatgctagaaatacagcttaacttgctagtcrtagatttctattcccttcaactttagcagtgcagtcttaaggctctagaagttctggagcaatctcagattatactagaaaactgcagtgctgataaaattcatagaatggcctcggttgaaaaggacctcaaagatcattcagtttcaacctccctgctayrtgcagggttgccagccactacaccaggctgcccagagccacatccagcctggccttgaatgcctccagggatggggcatccacagcctccttgggcaacctgttccagtgyrtcaccaccctccatgtggaaaaacttcttcctaatgtccaacctaaacttcccctgccttaatttaaaaccattcccccttgtcctatcactatccatccttgtgaacagctgttccccctcaagtggaagttctgcccatccagttaacatgcccaagaacagcctttcagtgtgtttgactactt

SEQ ID NO: 1078 - DNA, 600 bp, Chicken  19866894085482_3
ttatttaacgtaatgtaaactcttatttgtttcaaaactcatgagcccagaacttattttgagggaagtagaaactaagctgttgaagagagttcatgaatctcaaatgctagaaatacagcttaacttgctagtcrtagatttctattcccttcaactttagcagtgcagtcttaaggctctagaagttctggagcaatctcagattatactagaaaactgcagtgctgataaaattcatagaatggcctcggttgaaaaggacctcaaagatcattcagtttcaacctccctgctayrtgcagggttgccagccactacaccaggctgcccagagccacatccagcctggccttgaatgcctccagggatggggcatccacagcctccttgggcaacctgttccagtgyrtcaccaccctccatgtggaaaaacttcttcctaatgtccaacctaaacttcccctgccttaatttaaaaccattcccccttgtcctatcactatccatccttgtgaacagctgttccccctcaagtggaagttctgcccatccagttaacatgcccaagaacagcctttcagtgtgtttgactacttt

SEQ ID NO: 1079 - DNA, 600 bp, Chicken  19866894085482_4
agaaatacagcttaacttgctagtcrtagatttctattcccttcaactttagcagtgcagtcttaaggctctagaagttctggagcaatctcagattatactagaaaactgcagtgctgataaaattcatagaatggcctcggttgaaaaggacctcaaagatcattcagtttcaacctccctgctayrtgcagggttgccagccactacaccaggctgcccagagccacatccagcctggccttgaatgcctccagggatggggcatccacagcctccttgggcaacctgttccagtgyrtcaccaccctccatgtggaaaaacttcttcctaatgtccaacctaaacttcccctgccttaatttaaaaccattcccccttgtcctatcactatccatccttgtgaacagctgttccccctcaagtggaagttctgcccatccagttaacatgcccaagaacagcctttcagtgtgtttgactactttgtggtctttttgttataccaggcatacattatatatgtattccttcaattctgagtgctaattgcttgttactgatgtgcatccagtgcaatctgttgtggctgtacatcc

SEQ ID NO: 1080 - DNA, 600 bp, Chicken  19866894085482_5
gaaatacagcttaacttgctagtcrtagatttctattcccttcaactttagcagtgcagtcttaaggctctagaagttctggagcaatctcagattatactagaaaactgcagtgctgataaaattcatagaatggcctcggttgaaaaggacctcaaagatcattcagtttcaacctccctgctayrtgcagggttgccagccactacaccaggctgcccagagccacatccagcctggccttgaatgcctccagggatggggcatccacagcctccttgggcaacctgttccagtgyrtcaccaccctccatgtggaaaaacttcttcctaatgtccaacctaaacttcccctgccttaatttaaaaccattcccccttgtcctatcactatccatccttgtgaacagctgttccccctcaagtggaagttctgcccatccagttaacatgcccaagaacagcctttcagtgtgtttgactactttgtggtctttttgttataccaggcatacattatatatgtattccttcaattctgagtgctaattgcttgttactgatgtgcatccagtgcaatctgttgtggctgtacatcca

SEQ ID NO: 1081 - DNA, 600 bp, Chicken  19866894085486_1
tcaagcagacagcaagacatgatatcttattttcctgagctatgctgacacaaattgaactccacttattattttcttatgccagtaaagttgcatttggcatttaagcattttgcttgcagatgttggagtgctggttgtcttaatttaaataatttgcagattgtttggtagtattaaaagatagaaactcattcttcatatgactccaattttataggctttattttttttttttctgaccttgtgcaaggtaagaatttgatattaaatccaagtagcccaaggatataaagcccrttttctgttattcaaaactaggmgaggagaaagttgcctttcagctgcttgacttattcaaatatgaaaaatagatgaaaattcttcacgatgatttgagtgaagaaagtgagtgttatttctttgttggacaatgttaatcacaacagtattacccatcayatataaatgctatgaacataatacttctagcatgctcctcgttcttgaaggaatttctgtatgactgtaacagatacctctttttgtaggccttaataggtaagtgggtgggcattgttccttgtgtacatatgatgc

SEQ ID NO: 1082 - DNA, 600 bp, Chicken  19866894085486_2
atcttattttcctgagctatgctgacacaaattgaactccacttattattttcttatgccagtaaagttgcatttggcatttaagcattttgcttgcagatgttggagtgctggttgtcttaatttaaataatttgcagattgtttggtagtattaaaagatagaaactcattcttcatatgactccaattttataggctttattttttttttttctgaccttgtgcaaggtaagaatttgatattaaatccaagtagcccaaggatataaagcccrttttctgttattcaaaactaggmgaggagaaagttgcctttcagctgcttgacttattcaaatatgaaaaatagatgaaaattcttcacgatgatttgagtgaagaaagtgagtgttatttctttgttggacaatgttaatcacaacagtattacccatcayatataaatgctatgaacataatacttctagcatgctcctcgttcttgaaggaatttctgtatgactgtaacagatacctctttttgtaggccttaataggtaagtgggtgggcattgttccttgtgtacatatgatgcttgaacttcttcagtcaggacta

SEQ ID NO: 1083 - DNA, 600 bp, Chicken  19866894085486_3
attgtttggtagtattaaaagatagaaactcattcttcatatgactccaattttataggctttattttttttttttctgaccttgtgcaaggtaagaatttgatattaaatccaagtagcccaaggatataaagcccrttttctgttattcaaaactaggmgaggagaaagttgcctttcagctgcttgacttattcaaatatgaaaaatagatgaaaattcttcacgatgatttgagtgaagaaagtgagtgttatttctttgttggacaatgttaatcacaacagtattacccatcayatataaatgctatgaacataatacttctagcatgctcctcgttcttgaaggaatttctgtatgactgtaacagatacctctttttgtaggccttaataggtaagtgggtgggcattgttccttgtgtacatatgatgcttgaacttcttcagtcaggactatatggatgacatagtgctacttcgtatgaaaagagtcgtctttctgttctacattgcgttacttttatttgcttgtttgtattcctgatcaaaatggtttaagagaatgcaagtgatttttaattttattttttttaga

SEQ ID NO: 1084 - DNA, 508 bp, Chicken  19866894085490_1
cggacagaggattgtaccaactgcctatttgtaatgggaaaacagtttttttaatatattactcatattaaactttgtgatgtttttttaatcctcctcttttggctgacccacagcagcacagaaatgagcatctcagtcgtttgcctgcaaatgagttgccagcttgctgtaattctgctggcttgaaatgcagctttctctcctttacagagatggaagctgagaggagctggggaggttctttgtgagcagaggtgtgggtgggagctgctctgtgctcttaaatcctcacatctsaatctgtgggtggaggattttacaagaggagaggatrcattttcaggcttaaggcacaaaaagatcaaaatttggtcatgcatgcattggtttcttgtgtttatcagaagcatctgatactgcttaacatcatagattcatagaatggcttgggttggaagggacctttaaggtgatctagttccaaccccctgctataggcaaggat

SEQ ID NO: 1085 - DNA, 471 bp, Chicken  19866894085490_2
gaaaacagtttttttaatatattactcatattaaactttgtgatgtttttttaatcctcctcttttggctgacccacagcagcacagaaatgagcatctcagtcgtttgcctgcaaatgagttgccagcttgctgtaattctgctggcttgaaatgcagctttctctcctttacagagatggaagctgagaggagctggggaggttctttgtgagcagaggtgtgggtgggagctgctctgtgctcttaaatcctcacatctsaatctgtgggtggaggattttacaagaggagaggatrcattttcaggcttaaggcacaaaaagatcaaaatttggtcatgcatgcattggtttcttgtgtttatcagaagcatctgatactgcttaacatcatagattcatagaatggcttgggttggaagggacctttaaggtgatctagttccaaccccctgctataggcaaggat

SEQ ID NO: 1086 - DNA, 599 bp, Chicken  19866894085492_1
  misc_feature (1)..(43): n is any nucleotide
nnnnnnnnnnnnnnnnnnnnnnnnnnnnnnnnnnnnnnnnnnnttcccccttctcctatcactatccaccttcatgaacagctgtacctcctcctgtttacatgctcccttcaaatactggaaggccacaaatctgacgtttgaaaagttaaccaaggatgattaagtgcccagctgacttcaaacaaatggatatctgagctcctgaagtggttttcagtttctgcagaaccagctcctccagaacacactctgcccgttgttggtgagggatacagctcatactctatgggcactttwggccacttgctttccaaaacaaaactatgaagggtgtgctcatgtgtgtatctgtaacacaacggtaagtggcagccatcaggaaacagtcctaaaagtagaacactccactataaggatattactgagaacagtaagaagctctgtaaaaggggactatcaaaaagaatgattccccaagtaaatgtagaattattccccaagaaaactgaggacaagtatttttctttatgagtgaatgcatttaatccatttacaaatcctcatcttactggggcttctgggtaaggcaaggcatt

SEQ ID NO: 1087 - DNA, 600 bp, Chicken  19866894085492_2
ccatcaggaaacagtcctaaaagtagaacactccactataaggatattactgagaacagtaagaagctctgtaaaaggggactatcaaaaagaatgattccccaagtaaatgtagaattattccccaagaaaactgaggacaagtatttttctttatgagtgaatgcatttaatccatttacaaatcctcatcttactggggcttctgggtaaggcaaggcattgcagtactaataaagggactgctcccatgtcctcactcaaaccagaagcatcagttgggagtttcatgagtgaacragaaataaaagaaatggaagcgaggtgaygtcttgtttttaccaagcgtgctcagtgccatgcacagaagatgtcccacttcttgccccctctccagccttcccatttttaactgtgtagatctgccctgtcccttggagtggcctttaccctaatcacccataagaaagctgacttaggaagcagcaacctcttctttgctattttgttggctgtgctggtttcccactagttaagtgagctcatctccaagggttcagtcccccccaagggatcaagaaaaggagcagagctggagcc

SEQ ID NO: 1088 - DNA, 600 bp, Chicken  19866894085492_3
actccactataaggatattactgagaacagtaagaagctctgtaaaaggggactatcaaaaagaatgattccccaagtaaatgtagaattattccccaagaaaactgaggacaagtatttttctttatgagtgaatgcatttaatccatttacaaatcctcatcttactggggcttctgggtaaggcaaggcattgcagtactaataaagggactgctcccatgtcctcactcaaaccagaagcatcagttgggagtttcatgagtgaacragaaataaaagaaatggaagcgaggtgaygtcttgtttttaccaagcgtgctcagtgccatgcacagaagatgtcccacttcttgccccctctccagccttcccatttttaactgtgtagatctgccctgtcccttggagtggcctttaccctaatcacccataagaaagctgacttaggaagcagcaacctcttctttgctattttgttggctgtgctggtttcccactagttaagtgagctcatctccaagggttcagtcccccccaagggatcaagaaaaggagcagagctggagccaagcaagcagcaggagctggagtgaagac

SEQ ID NO: 1089 - DNA, 600 bp, Chicken  19866894085492_4
cccacttcttgccccctctccagccttcccatttttaactgtgtagatctgccctgtcccttggagtggcctttaccctaatcacccataagaaagctgacttaggaagcagcaacctcttctttgctattttgttggctgtgctggtttcccactagttaagtgagctcatctccaagggttcagtcccccccaagggatcaagaaaaggagcagagctggagccaagcaagcagcaggagctggagtgaagactttgcgtccctggaggaatgcgtccctggatgcagcccatctcayacaacctcatagtgaagatgggattagcagaaaaatggaaccacaaagatataaaggggtaaaattgttctgttttaggtctgatttcttttttttcctggagagttcctcaggctccagacagaaaggtgcctgctgtcatcagacaaagtacctgactgaaagcctgaacagccaaagcaattacttctgttcctgttcgtggaggtgttgtcctctggaatgaatgttttttgcacagaaatgcaatcactgaaagatgctgtgacaagaatatttgagaaccacgatactatgtct

SEQ ID NO: 1090 - DNA, 599 bp, Chicken  19866894085494_1
  misc_feature (1)..(139): n is any nucleotide
nnnnnnnnnnnnnnnnnnnnnnnnnnnnnnnnnnnnnnnnnnnnnnnnnnnnnnnnnnnnnnnnnnnnnnnnnnnnnnnnnnnnnnnnnnnnnnnnnnnnnnnnnnnnnnnnnnnnnnnnnnnnnnnnnnnnnnnnnnnaaggcaaggtgctgtgcagatgtaagctcgttagaaggtcattatcattattcacctgctgtgtctgtctgtctctctaaatggctttagctgtcagcctatttatccatgttcccctcttcctattattatatggtaagacattgcctctgctcctagcmcccctaaggccctccctccccatttcccatgccaacagcactgtgctttgtctgatgggagttcaaggagcccaaggccagactgccccgtcctccatccgtcctgtgctgctgggggaactggaggtgttcctgcagccctggatgcaaagagggtgcccagagtgtgctccccccacagccagccctcatctgtccccgtgcatcccctgtgtgctccggtgctgctgtgtagcagcgttgatcagtggagataattaatatgaggaagtagaaaattttgtcttgggcttattaca

SEQ ID NO: 1091 - DNA, 600 bp, Chicken  19866894085497_1
aatcccagtgaaacaggaaccatgagagaagtgtctattttaattcatcttacagagtcttttccagatatgattaagaacccaagctctcaaaggaaatttccttagtcagagatgagctgtttggagtcatcaagccatagaagcagcaccctgccagtagttacctgcaactacgtctgagcacaaaggcttcctcaagctggctttgaatcagaagcagagaatattcacctactcacataggcagtttatgcatcctagcaggaatctgctcctctccaaagcctgcagccacartactggcaccaatcatttacatgggaagcagcgcttgaactgctgtagttaacaactcagtgcattaaagtagcttaaaatcccccttggtttacttgactagagcaggttacaaactggctgtgatgggattgcttcatgggtcagccatcactgccacagagaaagcaaattgtggaaagtgggacagctgggttttgtaaccacctcaggtcatctgaattgaactcatctgtgtttgactcaacaccctacaggacaaaagagtattattcaattcttcacgaacagcagaggcac

SEQ ID NO: 1092 - DNA, 541 bp, Chicken  19866894085499_1
tctttgctcctggtgatgggaagggaggagaagacatacagtgaaagctctgcaatgagcccctgtgaacatccactccacctgtacaggcacagcccatgggacaggccccagtcacagccaacaggagtcactgctgccagcatggcaccgcccctgcatccatcctggggatggagctccagccagctggagcagtggaagcagccaccatccctgtagtcaccaccaccctgcttccagccctacctgagcacagctgcccctttgcccaggtcatatcgatactccaggtagccrtcgtgcaaagccagagacacaaagtctcctttgccatctgtcttctgcccattgtagaagatcatgccactgggactcttggccaggaacaccacttccatggacattttgtccctgaggagagaaggatgacagataccctccaaaccagctgcccacagactctcttcgtccacccctgtgcaaagggccctggagacatctgcctgcctggtcccacagatctcttagggatgccacc

SEQ ID NO: 1093 - DNA, 600 bp, Chicken  19866894085501_1
tacaactcatcatggcatagcatggcccagcatggcaagacatggcccagcatggcaagacacgacttggcaaagcatggcatggcatggcatggcatggaaaggcctggcatggagtggtacaactcatcacggcccagcaaggcacagcatggcacactttgcctgcactggttcctccccctgagctctcactccaaccccactccatgcagcagatctcagagccatctgcagcctcagaaaaaccaccgaagctctgagcaaacccagaggtccatctgcacagaacggcttgcrtgatgtagagtcccagggagatgtggcactgagggatgtgggcagtgggcacggtcaggtgggttgggcttggtgatctcagaagtcttttccagcctgaatgactctataattctgtgattctatgacatgagttggaacagcttcctgagagacagccattggtggcttcacagttaaagagagatcatctctcatctacctttggtctgttggctgtacacctgtagcagtgctgtgacagagtgttggcacagcttgtgcccagtgccaggtaccttgagcagtcctagaggcacc

SEQ ID NO: 1094 - DNA, 600 bp, Chicken  19866894085503_1
gagagacctccttggctttcgaacttcaaaatatgctatgttttatccaaggaattaaggtctaagttttcaaaagaaaagttcaacgtagttgaaagtgaggacctaattttattgccaggcaaaggggaaaaggagatggttgcacagcagtacatttgaaaatatttgtgtgagctgcagctgagataaggaagtgaaggaaataaatgcaaaaatagttacagtagttttcttaagctcttaatgtgtatatgaaatctgtatataagtattctttttaatgttcctcagaccatsgctgtcaggtgtcagagcttcataactagcacaatacgtttatttcttctatttttgctgcttgttcctttttgatacttttttaagttgtgggagaagatggactttttgaaacaaaaatccagactgtgtttatttttaatagaaaagttggatatagaataagagacaatttccataattggaaatcatgtttgactgtaggttacagtacttgcgaaatctgcgtrgcactgaagtgccaggttttgtgtactacgttgactgtgtgctgatgtttctagaatacagaaaatggaa

SEQ ID NO: 1095 - DNA, 600 bp, Chicken  19866894085503_2
ttttcttaagctcttaatgtgtatatgaaatctgtatataagtattctttttaatgttcctcagaccatsgctgtcaggtgtcagagcttcataactagcacaatacgtttatttcttctatttttgctgcttgttcctttttgatacttttttaagttgtgggagaagatggactttttgaaacaaaaatccagactgtgtttatttttaatagaaaagttggatatagaataagagacaatttccataattggaaatcatgtttgactgtaggttacagtacttgcgaaatctgcgtrgcactgaagtgccaggttttgtgtactacgttgactgtgtgctgatgtttctagaatacagaaaatggaatmaaggcttcccatttatgggtacagtgaaagttgggactcaaaacagaccaaatgtttctagaatgtttatggatttatgtaagacaatcagtttctactgggatttttcagcagtgcctcagaagtatgttcaactgtgtatgatcaaattaggagggggattttaaaagaaatctttgatgttttaatgttttgggttaaagtgattattttgagttacttaaactg

SEQ ID NO: 1096 - DNA, 600 bp, Chicken  19866894085503_3
tgtcaggtgtcagagcttcataactagcacaatacgtttatttcttctatttttgctgcttgttcctttttgatacttttttaagttgtgggagaagatggactttttgaaacaaaaatccagactgtgtttatttttaatagaaaagttggatatagaataagagacaatttccataattggaaatcatgtttgactgtaggttacagtacttgcgaaatctgcgtrgcactgaagtgccaggttttgtgtactacgttgactgtgtgctgatgtttctagaatacagaaaatggaatmaaggcttcccatttatgggtacagtgaaagttgggactcaaaacagaccaaatgtttctagaatgtttatggatttatgtaagacaatcagtttctactgggatttttcagcagtgcctcagaagtatgttcaactgtgtatgatcaaattaggagggggattttaaaagaaatctttgatgttttaatgttttgggttaaagtgattattttgagttacttaaactggtggtttaaggaaaatgaggtggaggtgtgaatgctgttctttgcaaagctgaatagttcttatctgaaaca

SEQ ID NO: 1097 - DNA, 600 bp, Chicken  19866894085503_4
ccatttatgggtacagtgaaagttgggactcaaaacagaccaaatgtttctagaatgtttatggatttatgtaagacaatcagtttctactgggatttttcagcagtgcctcagaagtatgttcaactgtgtatgatcaaattaggagggggattttaaaagaaatctttgatgttttaatgttttgggttaaagtgattattttgagttacttaaactggtggtttaaggaaaatgaggtggaggtgtgaatgctgttctttgcaaagctgaatagttcttatctgaaacacagaaacrcacttctttcagtgagaacatacaatgtatctgagtattggactgatgtggtatgtaaggtcttgctttacagagattttacacatatattttaaaactacttttccttttattttttttctgactgcagttgttgcaaagttaaaactgtgtgtgtgtgtcaggagtattatgttttgcmaaaacatgatttaacttcatttacaatggaccgtaagggcttggttaattttctgtgctggagggtcctacgtggtttatatgcttacacataattccagttgacaagctgtaattgag

SEQ ID NO: 1098 - DNA, 600 bp, Chicken  19866894085503_5
gttttgggttaaagtgattattttgagttacttaaactggtggtttaaggaaaatgaggtggaggtgtgaatgctgttctttgcaaagctgaatagttcttatctgaaacacagaaacrcacttctttcagtgagaacatacaatgtatctgagtattggactgatgtggtatgtaaggtcttgctttacagagattttacacatatattttaaaactacttttccttttattttttttctgactgcagttgttgcaaagttaaaactgtgtgtgtgtgtcaggagtattatgttttgcmaaaacatgatttaacttcatttacaatggaccgtaagggcttggttaattttctgtgctggagggtcctacgtggtttatatgcttacacataattccagttgacaagctgtaattgagaaatgtgagattcctgtatttttaattatgaaataagtatatttatgacagctgaaggatttgttcagaattttaccgttttggtggtgctctttgaaaatggtcttatgtccagaaggcgcgggtagccgtaatggtctttgaccagggctgatagaaagtggaggcttacataaatgtt

SEQ ID NO: 1099 - DNA, 600 bp, Chicken  19866894085503_6
cataataagcttaaggactatagctagtattaatgtgttactacttcttttttttccttgtagaactatcctcctaactttaagttgtgtgaacagcttcctgcaatgccatcaagcagtacctgagtcagtttcaaataagctagattggattctagttgcagcataagctgcttggcactcgactcattctggttagttcttctgtgaagctgggtatgttttttggtgtgcagctatttctaactgcttttgttctgttacacagttactgacacaactcaaggcaatgctttgggrtgtggattaaacctgtgggtttcagactttttgtgtgcacctgaaatgcatacttctaaagtgaaagatattgtaagagaagttgtttttttttccctgtagtacattagaagtatgatacctttcatctgttgcatcttgtttgaaagctgttgtgggtttcatgttttcttggatgctaatcagtatgaagtgctttatactacatagctgattttgtcttatcctccagattttcctaatacaagtgtattgaacatgtatttattgatctgtcctcatttggcattttaatactgg

SEQ ID NO: 1100 - DNA, 600 bp, Chicken  19866894085506_1
atgctttctcttcagctgaatctgttcacttcttttagatgtcctgccatttctgaccagaagtttctttctctttgtagagacaggtagggtgattgaactacttattcaaaataggcagccagtggttctgtcaactggctgtgcattacctggtagtggccatcttcagatgttctctggatttttcaggaattaattccttctggaatgtgttgtctgtgttgtctttggtttggctggttagggctgttcatagttaagaatgtgttcaagtgaagaattggaattatttgttcrttcttgctggataatcaaaggtctatgagcagatgtctaactacagaaaacaagatggtggagctctaatacaccagatgtttgactgaatatttgtgattaagtagtggtatacacaggtgaaagcaaacaagttttatgtcacttattcccatttgttcaattttccacccccttgaccacataagaatatgttagtgttttcatcaggtagaaaaggacagtattttctatcatttacttacaaacyataacttggattttaagagatgcttcttcaatggaaaaacaataatttga

SEQ ID NO: 1101 - DNA, 600 bp, Chicken  19866894085506_2
tgttcatagttaagaatgtgttcaagtgaagaattggaattatttgttcrttcttgctggataatcaaaggtctatgagcagatgtctaactacagaaaacaagatggtggagctctaatacaccagatgtttgactgaatatttgtgattaagtagtggtatacacaggtgaaagcaaacaagttttatgtcacttattcccatttgttcaattttccacccccttgaccacataagaatatgttagtgttttcatcaggtagaaaaggacagtattttctatcatttacttacaaacyataacttggattttaagagatgcttcttcaatggaaaaacaataatttgaaattatgaggtgtgatcagctataaataaattctgagagagttcagctgatattaagggggaggtaacctggatggtcagtttcccaaagctgcgctttaaaaaccagaacatgctcaatgtggtcaatagaaacaactgatgaccatccatcctcgttragaacagtgtctgcacacacatctgagtgattctggaggaagagactgttctatggggatggcaggacaatggacamatagaaatttgca

SEQ ID NO: 1102 - DNA, 600 bp, Chicken  19866894085506_3
caattttccacccccttgaccacataagaatatgttagtgttttcatcaggtagaaaaggacagtattttctatcatttacttacaaacyataacttggattttaagagatgcttcttcaatggaaaaacaataatttgaaattatgaggtgtgatcagctataaataaattctgagagagttcagctgatattaagggggaggtaacctggatggtcagtttcccaaagctgcgctttaaaaaccagaacatgctcaatgtggtcaatagaaacaactgatgaccatccatcctcgttragaacagtgtctgcacacacatctgagtgattctggaggaagagactgttctatggggatggcaggacaatggacamatagaaatttgcagaggcttttccttaaatactgatgtacaacgttgtggagtttgctatggcatcttttatgcttggttctactcaagtaattatacaaagaggaaatatttcagatttcaaggtcaaccactttggtcacatactgtgtgtgacattaagcagtgagttgcaatacttaggatttcactggttactctcatatggcatgtggcttgaacag

SEQ ID NO: 1103 - DNA, 531 bp, Chicken  19866894085506_4
ttacttacaaacyataacttggattttaagagatgcttcttcaatggaaaaacaataatttgaaattatgaggtgtgatcagctataaataaattctgagagagttcagctgatattaagggggaggtaacctggatggtcagtttcccaaagctgcgctttaaaaaccagaacatgctcaatgtggtcaatagaaacaactgatgaccatccatcctcgttragaacagtgtctgcacacacatctgagtgattctggaggaagagactgttctatggggatggcaggacaatggacamatagaaatttgcagaggcttttccttaaatactgatgtacaacgttgtggagtttgctatggcatcttttatgcttggttctactcaagtaattatacaaagaggaaatatttcagatttcaaggtcaaccactttggtcacatactgtgtgtgacattaagcagtgagttgcaatacttaggatttcactggttactctcatatggcatgtggcttgaacagcttgctca

SEQ ID NO: 1104 - DNA, 599 bp, Chicken  19866894085507_1
  misc_feature (1)..(21): n is any nucleotide
nnnnnnnnnnnnnnnnnnnnnaagatcaaggcaaagacatatgaaacaattgcttaagaagtggtgaaatggctcagcttcttatctcaaaaaaatacactgtcatcagtttttgctctgaatttcagtgctatgtttctctactaagtctgctagcaagaggctgtgtggctgctcctcattgctgagtctaaagcttctctcacatgggtgacatccatcagcagcaacaactactggtaacgctcagctctcaacaggattccaaccagaagcaataagccatcccctccatcactrtaggcattcagcacactttgaaatgaagtgttgtaaggcctagaagctcatgtaaaaaccctgctatgtctcttaggtttgtgccaatgtggcatgtcaaaccataggccagctgaggggatttaggaakaagtgtaggcagctaatgccaggcactggtgttcctcctcagcccaaaagacctctgccaactcatcagaagcagctggccttcagctggagcccagaatgtactttaygattcagataagaatgcggcatctaaactgcttgagggacaaaaccacattttagttctt

SEQ ID NO: 1105 - DNA, 600 bp, Chicken  19866894085507_2
ctatgtttctctactaagtctgctagcaagaggctgtgtggctgctcctcattgctgagtctaaagcttctctcacatgggtgacatccatcagcagcaacaactactggtaacgctcagctctcaacaggattccaaccagaagcaataagccatcccctccatcactrtaggcattcagcacactttgaaatgaagtgttgtaaggcctagaagctcatgtaaaaaccctgctatgtctcttaggtttgtgccaatgtggcatgtcaaaccataggccagctgaggggatttaggaakaagtgtaggcagctaatgccaggcactggtgttcctcctcagcccaaaagacctctgccaactcatcagaagcagctggccttcagctggagcccagaatgtactttaygattcagataagaatgcggcatctaaactgcttgagggacaaaaccacattttagttctttaacagccagctccttactccctgtttgctttgtcttagcgctcactaggataaagtgaaakagcagaagaggggtggactcgtttcttctagtaatggggaagagagatggtttattttgcagaaaaaca

SEQ ID NO: 1106 - DNA, 600 bp, Chicken  19866894085507_3
gtaacgctcagctctcaacaggattccaaccagaagcaataagccatcccctccatcactrtaggcattcagcacactttgaaatgaagtgttgtaaggcctagaagctcatgtaaaaaccctgctatgtctcttaggtttgtgccaatgtggcatgtcaaaccataggccagctgaggggatttaggaakaagtgtaggcagctaatgccaggcactggtgttcctcctcagcccaaaagacctctgccaactcatcagaagcagctggccttcagctggagcccagaatgtactttaygattcagataagaatgcggcatctaaactgcttgagggacaaaaccacattttagttctttaacagccagctccttactccctgtttgctttgtcttagcgctcactaggataaagtgaaakagcagaagaggggtggactcgtttcttctagtaatggggaagagagatggtttattttgcagaaaaacaaccctgtgcttatgaatgccatttgaagaaccccagaattaatgtttacatgatgctgtacctaatggagcaacatctctgcatttatgttaacagccatcattgtgca

SEQ ID NO: 1107 - DNA, 600 bp, Chicken  19866894085507_4
tgctatgtctcttaggtttgtgccaatgtggcatgtcaaaccataggccagctgaggggatttaggaakaagtgtaggcagctaatgccaggcactggtgttcctcctcagcccaaaagacctctgccaactcatcagaagcagctggccttcagctggagcccagaatgtactttaygattcagataagaatgcggcatctaaactgcttgagggacaaaaccacattttagttctttaacagccagctccttactccctgtttgctttgtcttagcgctcactaggataaagtgaaakagcagaagaggggtggactcgtttcttctagtaatggggaagagagatggtttattttgcagaaaaacaaccctgtgcttatgaatgccatttgaagaaccccagaattaatgtttacatgatgctgtacctaatggagcaacatctctgcatttatgttaacagccatcattgtgcaacgcacattgcaagtcagcaagacctcctgcttgttgcttgtggagctctggctttgtccctcttccccagccaacttgtaccataacctgaccatttagcagcttgccacagtgatgagcc

SEQ ID NO: 1108 - DNA, 599 bp, Chicken  19866894085512_1
  misc_feature (1)..(108): n is any nucleotide
nnnnnnnnnnnnnnnnnnnnnnnnnnnnnnnnnnnnnnnnnnnnnnnnnnnnnnnnnnnnnnnnnnnnnnnnnnnnnnnnnnnnnnnnnnnnnnnnnnnnnnnnnnnntcttctgtgctagctttaactgagaaaagggaactgtgcacaaagacagtcttttgctgtgtgattgcaggcaagtgaaattgtaacatcgcagtgtcctctgtaaatgaatgccacagttcccagttccgatgccttgctgcagttaagtctgcacagggctagaaacagaaactgcctctagggaggcayggcagcataggaaatgggaaaggacatccaccagcctgcaggtcagctctgcagtcttgatctttgccagggtgttttgtgtaccactgcacaaaggcagcaaggaagacctctgctttttctttctggatttaacagcataggaagagagaatggcacaggaggaakaaaatcctagtctaaacataaatcactttcctaactcataagtactcctggaagaattagaatgagacatgtttatactggaagtgctacaaaatgttgtgttttttcattaatgaggtactggctaacat

SEQ ID NO: 1109 - DNA, 600 bp, Chicken  19866894085512_2
gtgattgcaggcaagtgaaattgtaacatcgcagtgtcctctgtaaatgaatgccacagttcccagttccgatgccttgctgcagttaagtctgcacagggctagaaacagaaactgcctctagggaggcayggcagcataggaaatgggaaaggacatccaccagcctgcaggtcagctctgcagtcttgatctttgccagggtgttttgtgtaccactgcacaaaggcagcaaggaagacctctgctttttctttctggatttaacagcataggaagagagaatggcacaggaggaakaaaatcctagtctaaacataaatcactttcctaactcataagtactcctggaagaattagaatgagacatgtttatactggaagtgctacaaaatgttgtgttttttcattaatgaggtactggctaacattcagcagtacaaaatgtgttaatcagaggagctgattttatttcaggctgatgatacccttgatatcctggctccagtgaaaacaaaacaaactgatatgaaccttgttactatcaatgacacacaaaaatcagtgctgaagctcatgggtaagacttgcctccccttc

SEQ ID NO: 1110 - DNA, 599 bp, Chicken  19866894085518_1
  misc_feature (1)..(162): n is any nucleotide
nnnnnnnnnnnnnnnnnnnnnnnnnnnnnnnnnnnnnnnnnnnnnnnnnnnnnnnnnnnnnnnnnnnnnnnnnnnnnnnnnnnnnnnnnnnnnnnnnnnnnnnnnnnnnnnnnnnnnnnnnnnnnnnnnnnnnnnnnnnnnnnnnnnnnnnnnnnnnnnnnncctctgggattaaaattaagcagaagtacggaaaaaatcaaaagcaggtaaagtgagaactacagagggctttagagatgagagaaaggaagatggaataaagcatgcatgttttctgggtgctttaaatgttctgamgttgaagtgtctgcagttcatcttatactgtgacttgaatggagaaaagaaaatgctgaagaggagtctgaggagacttaygaagagacatagctgatgaaagtactagcaggacacagagttagatgctaaaacaagcacaggataacttgaatcaaaaaatcttcagcaggaaagtggtcaaattgaggakgcaaaatacrgcatatgtgttacattactctgcartcctaagttattcaaaactatacagtgtgccaaaacaatctggaacaatgaagtgcagatcgctatggaca

SEQ ID NO: 1111 - DNA, 599 bp, Chicken  19866894085518_2
  misc_feature (1)..(81): n is any nucleotide
nnnnnnnnnnnnnnnnnnnnnnnnnnnnnnnnnnnnnnnnnnnnnnnnnnnnnnnnnnnnnnnnnnnnnnnnnnnnnnnnncctctgggattaaaattaagcagaagtacggaaaaaatcaaaagcaggtaaagtgagaactacagagggctttagagatgagagaaaggaagatggaataaagcatgcatgttttctgggtgctttaaatgttctgamgttgaagtgtctgcagttcatcttatactgtgacttgaatggagaaaagaaaatgctgaagaggagtctgaggagacttaygaagagacatagctgatgaaagtactagcaggacacagagttagatgctaaaacaagcacaggataacttgaatcaaaaaatcttcagcaggaaagtggtcaaattgaggakgcaaaatacrgcatatgtgttacattactctgcartcctaagttattcaaaactatacagtgtgccaaaacaatctggaacaatgaagtgcagatcgctatggacacaagaagtcagaggtatctgattgacaggtgctacttcaacaatcatcatctataacaataaatgaccctgccctgttaaa

SEQ ID NO: 1112 - DNA, 600 bp, Chicken  19866894085518_3
aaaaaatcaaaagcaggtaaagtgagaactacagagggctttagagatgagagaaaggaagatggaataaagcatgcatgttttctgggtgctttaaatgttctgamgttgaagtgtctgcagttcatcttatactgtgacttgaatggagaaaagaaaatgctgaagaggagtctgaggagacttaygaagagacatagctgatgaaagtactagcaggacacagagttagatgctaaaacaagcacaggataacttgaatcaaaaaatcttcagcaggaaagtggtcaaattgaggakgcaaaatacrgcatatgtgttacattactctgcartcctaagttattcaaaactatacagtgtgccaaaacaatctggaacaatgaagtgcagatcgctatggacacaagaagtcagaggtatctgattgacaggtgctacttcaacaatcatcatctataacaataaatgaccctgccctgttaaaccagaccagaactgtgtgatayrtacaaatggcaactcattacagcctctctgctatgctatataacatcaattaatattttcwyttttcattcattattatatcagcatacc

SEQ ID NO: 1113 - DNA, 600 bp, Chicken  19866894085518_4
aagcaggtaaagtgagaactacagagggctttagagatgagagaaaggaagatggaataaagcatgcatgttttctgggtgctttaaatgttctgamgttgaagtgtctgcagttcatcttatactgtgacttgaatggagaaaagaaaatgctgaagaggagtctgaggagacttaygaagagacatagctgatgaaagtactagcaggacacagagttagatgctaaaacaagcacaggataacttgaatcaaaaaatcttcagcaggaaagtggtcaaattgaggakgcaaaatacrgcatatgtgttacattactctgcartcctaagttattcaaaactatacagtgtgccaaaacaatctggaacaatgaagtgcagatcgctatggacacaagaagtcagaggtatctgattgacaggtgctacttcaacaatcatcatctataacaataaatgaccctgccctgttaaaccagaccagaactgtgtgatayrtacaaatggcaactcattacagcctctctgctatgctatataacatcaattaatattttcwyttttcattcattattatatcagcatacctgaagaaggc

SEQ ID NO: 1114 - DNA, 600 bp, Chicken  19866894085518_5
gggctttagagatgagagaaaggaagatggaataaagcatgcatgttttctgggtgctttaaatgttctgamgttgaagtgtctgcagttcatcttatactgtgacttgaatggagaaaagaaaatgctgaagaggagtctgaggagacttaygaagagacatagctgatgaaagtactagcaggacacagagttagatgctaaaacaagcacaggataacttgaatcaaaaaatcttcagcaggaaagtggtcaaattgaggakgcaaaatacrgcatatgtgttacattactctgcartcctaagttattcaaaactatacagtgtgccaaaacaatctggaacaatgaagtgcagatcgctatggacacaagaagtcagaggtatctgattgacaggtgctacttcaacaatcatcatctataacaataaatgaccctgccctgttaaaccagaccagaactgtgtgatayrtacaaatggcaactcattacagcctctctgctatgctatataacatcaattaatattttcwyttttcattcattattatatcagcatacctgaagaaggcctacaggaaagctgggtggagggct

SEQ ID NO: 1115 - DNA, 600 bp, Chicken  19866894085518_6
gtactagcaggacacagagttagatgctaaaacaagcacaggataacttgaatcaaaaaatcttcagcaggaaagtggtcaaattgaggakgcaaaatacrgcatatgtgttacattactctgcartcctaagttattcaaaactatacagtgtgccaaaacaatctggaacaatgaagtgcagatcgctatggacacaagaagtcagaggtatctgattgacaggtgctacttcaacaatcatcatctataacaataaatgaccctgccctgttaaaccagaccagaactgtgtgatayrtacaaatggcaactcattacagcctctctgctatgctatataacatcaattaatattttcwyttttcattcattattatatcagcatacctgaagaaggcctacaggaaagctgggtggagggctttttatatggtcaggtagtgacagtatgagaggaaatggttttaacctgaaagagtgtagatttagactagatattaggaagaaattctttcctgtgaaggtggtgatgcactggaataggttgctcagagcagctgcggatgccccctccctggaagcacgcaaggccaggct

SEQ ID NO: 1116 - DNA, 600 bp, Chicken  19866894085518_7
tactagcaggacacagagttagatgctaaaacaagcacaggataacttgaatcaaaaaatcttcagcaggaaagtggtcaaattgaggakgcaaaatacrgcatatgtgttacattactctgcartcctaagttattcaaaactatacagtgtgccaaaacaatctggaacaatgaagtgcagatcgctatggacacaagaagtcagaggtatctgattgacaggtgctacttcaacaatcatcatctataacaataaatgaccctgccctgttaaaccagaccagaactgtgtgatayrtacaaatggcaactcattacagcctctctgctatgctatataacatcaattaatattttcwyttttcattcattattatatcagcatacctgaagaaggcctacaggaaagctgggtggagggctttttatatggtcaggtagtgacagtatgagaggaaatggttttaacctgaaagagtgtagatttagactagatattaggaagaaattctttcctgtgaaggtggtgatgcactggaataggttgctcagagcagctgcggatgccccctccctggaagcacgcaaggccaggctg

SEQ ID NO: 1117 - DNA, 600 bp, Chicken  19866894085518_8
ttcagcaggaaagtggtcaaattgaggakgcaaaatacrgcatatgtgttacattactctgcartcctaagttattcaaaactatacagtgtgccaaaacaatctggaacaatgaagtgcagatcgctatggacacaagaagtcagaggtatctgattgacaggtgctacttcaacaatcatcatctataacaataaatgaccctgccctgttaaaccagaccagaactgtgtgatayrtacaaatggcaactcattacagcctctctgctatgctatataacatcaattaatattttcwyttttcattcattattatatcagcatacctgaagaaggcctacaggaaagctgggtggagggctttttatatggtcaggtagtgacagtatgagaggaaatggttttaacctgaaagagtgtagatttagactagatattaggaagaaattctttcctgtgaaggtggtgatgcactggaataggttgctcagagcagctgcggatgccccctccctggaagcacgcaaggccaggctggatggggctgtgagcagcctggtctagggggaggtgtccctgcctattgtagggggttgga

SEQ ID NO: 1118 - DNA, 600 bp, Chicken  19866894085518_9
tcagcaggaaagtggtcaaattgaggakgcaaaatacrgcatatgtgttacattactctgcartcctaagttattcaaaactatacagtgtgccaaaacaatctggaacaatgaagtgcagatcgctatggacacaagaagtcagaggtatctgattgacaggtgctacttcaacaatcatcatctataacaataaatgaccctgccctgttaaaccagaccagaactgtgtgatayrtacaaatggcaactcattacagcctctctgctatgctatataacatcaattaatattttcwyttttcattcattattatatcagcatacctgaagaaggcctacaggaaagctgggtggagggctttttatatggtcaggtagtgacagtatgagaggaaatggttttaacctgaaagagtgtagatttagactagatattaggaagaaattctttcctgtgaaggtggtgatgcactggaataggttgctcagagcagctgcggatgccccctccctggaagcacgcaaggccaggctggatggggctgtgagcagcctggtctagggggaggtgtccctgcctattgtagggggttggaa

SEQ ID NO: 1119 - DNA, 600 bp, Chicken  19866894085520_1
actgctgtctccttttctttctaaaaaaaaaaacctaacattttgaggtcctgagatgggtcatgagcctccccagccacgtcctcaagctgacatttagcagtcaggcaccaaccatggtgcacacggaaggtggaggggtgggaggaaacagcgatctggagagcaaggacagcaggtcgcaccccaaccacatcacaccaagttggggtggctgcatttttgggctggcaaagcagatgggagccacaagcaggctcaacccgttggcacagagggggaaaaaatgccccttctgaygcttttcgcctctgcgatgtctgccatccgagcgccagagatyggcgcggggcagagagcgagaagactgcagtcatgaaatttctgcagacatctgataatattaaaataaaagcctgttggaacaaatcaatacagctcgtcctggtggtgagaaatcatctcctgatgggagctcagataacggatgctccatcacctgccggagaggcaccgagggatgctgcaggggctcatcacgcacagctgagggatgccacgtagatgtggatgctgaaaggctcctggagaagctcagct

SEQ ID NO: 1120 - DNA, 600 bp, Chicken  19866894085520_2
tgaggtcctgagatgggtcatgagcctccccagccacgtcctcaagctgacatttagcagtcaggcaccaaccatggtgcacacggaaggtggaggggtgggaggaaacagcgatctggagagcaaggacagcaggtcgcaccccaaccacatcacaccaagttggggtggctgcatttttgggctggcaaagcagatgggagccacaagcaggctcaacccgttggcacagagggggaaaaaatgccccttctgaygcttttcgcctctgcgatgtctgccatccgagcgccagagatyggcgcggggcagagagcgagaagactgcagtcatgaaatttctgcagacatctgataatattaaaataaaagcctgttggaacaaatcaatacagctcgtcctggtggtgagaaatcatctcctgatgggagctcagataacggatgctccatcacctgccggagaggcaccgagggatgctgcaggggctcatcacgcacagctgagggatgccacgtagatgtggatgctgaaaggctcctggagaagctcagctctgccctgcttgcattgctgggccaccttcctgctgcctgctg

SEQ ID NO: 1121 - DNA, 600 bp, Chicken  19866894085524_1
ataaattcagtaatcagtgtaaagtgctcagaatgtgaaaagaatcatatattcacttattttgtttgataggatctcatgaaaagaatctctgagatgtgatatgaagaccaagccctctactttgaacaaggcaatgacatcaacagtgggatcaagtgcaccctcagcacatttgtaggcaacaccaagctgtggggtgtggctgacaaaccagagggacatgatgccacccaaagggacctaggcaggcttgagcagtgagcccaggtcaacctcatgaggttcaacagagccaastgaaaggtcttgcatgtgggtcgaggcaatccccattaccagtgcgaactgggggatgaaacaattgarcgcagccctgccaaaaaagacctgagagtactcatgagtaggaagstggacatgagccagcagtgtgctgtcacagatgagaaagccacctgtatcttgggctctatcaaaagatgtgtggccagaagggtgaggaagagaatcttgcccttctaccctgtgctgctgagacttcacctggagtactgcatccagatgtagggtcctcagtacaggagagacatggacctg

SEQ ID NO: 1122 - DNA, 600 bp, Chicken  19866894085524_2
taggatctcatgaaaagaatctctgagatgtgatatgaagaccaagccctctactttgaacaaggcaatgacatcaacagtgggatcaagtgcaccctcagcacatttgtaggcaacaccaagctgtggggtgtggctgacaaaccagagggacatgatgccacccaaagggacctaggcaggcttgagcagtgagcccaggtcaacctcatgaggttcaacagagccaastgaaaggtcttgcatgtgggtcgaggcaatccccattaccagtgcgaactgggggatgaaacaattgarcgcagccctgccaaaaaagacctgagagtactcatgagtaggaagstggacatgagccagcagtgtgctgtcacagatgagaaagccacctgtatcttgggctctatcaaaagatgtgtggccagaagggtgaggaagagaatcttgcccttctaccctgtgctgctgagacttcacctggagtactgcatccagatgtagggtcctcagtacaggagagacatggacctgttggagcatgtccagaggaggagcacaaaagtgattcaagggatggaacacctcttctacgaggacagg

SEQ ID NO: 1123 - DNA, 600 bp, Chicken  19866894085524_3
ccctctactttgaacaaggcaatgacatcaacagtgggatcaagtgcaccctcagcacatttgtaggcaacaccaagctgtggggtgtggctgacaaaccagagggacatgatgccacccaaagggacctaggcaggcttgagcagtgagcccaggtcaacctcatgaggttcaacagagccaastgaaaggtcttgcatgtgggtcgaggcaatccccattaccagtgcgaactgggggatgaaacaattgarcgcagccctgccaaaaaagacctgagagtactcatgagtaggaagstggacatgagccagcagtgtgctgtcacagatgagaaagccacctgtatcttgggctctatcaaaagatgtgtggccagaagggtgaggaagagaatcttgcccttctaccctgtgctgctgagacttcacctggagtactgcatccagatgtagggtcctcagtacaggagagacatggacctgttggagcatgtccagaggaggagcacaaaagtgattcaagggatggaacacctcttctacgaggacaggctgagggagcaggggctgttcagcctggagaagacaaggctccagg

SEQ ID NO: 1124 - DNA, 600 bp, Chicken  19866894085526_1
tcctctttccaacagaatgagctgacaacttgattaggaatttgcctttttttcctggaactttagatttagttaatggacgtttttccttacagttgacaggtcgacattcagatcacacaaaaaatacttcacaaggaaataataacaacctctctgcttgatatttacactctttcaatagtttcacatttactttacatcattggcatggaaaacgtatgttgttttgatccactggtgatggggatgggagtcttcttggggggagtggtggcacgcaaaaacaaagctattggmtgtttgaagtcttgagagctcattgttttactgttaaacttctgtgacttttttcatggtacattcttaagaattaaagcaagatgatcacaatgttggctgatgagttcagtgacagaagctatcatcttaagtcaacctaacactgaaaagcagcaattctgaacaaaaactacagtgatcaattactgctccttaattttcagataacgtgtgtttttttttttaatttatgagaagtaggtttcatgtccctctgttcccttcctttgaaaaggaagtaatgttgtggtttgataa

SEQ ID NO: 1125 - DNA, 600 bp, Chicken  19866894085527_1
agagggtggaaagggcagctgtgtgcccctattcactcattttcacattagaaaaataaagaagattgctgctcctatcaaatactttcttagaaacaagggggctaaaggggggaagggaggtagtaatggggcagaaagaccagggagcaaggtgaatccaccaaagctgtcccttcagccctcaccaactggaagtaccaacacctctatggaaactattcactgaatacaagaaattactatcccagcagtgtgctgatggttcccaggtacctaacaatgcttctacctaatgcwgacattgttcttaaaaataaaataaaaaatcctgaaaagacaaaacttaagaagataagtaacaaagtcatattatactgatttacyactgcatacctccttgagggcaggatagagaggcttacaaatactagttagaagtcaagtgctaactacttctaacatctgtcagtgggcacaaagaatcattcacattcagccaacagaatctcactgtaggggaaatgaaatattaaatgcagttgaatgtagacatttgtgctctagttaacgtgaatgcttcaattcagcgttttctgc

SEQ ID NO: 1126 - DNA, 528 bp, Chicken  19866894085527_2
tcttagaaacaagggggctaaaggggggaagggaggtagtaatggggcagaaagaccagggagcaaggtgaatccaccaaagctgtcccttcagccctcaccaactggaagtaccaacacctctatggaaactattcactgaatacaagaaattactatcccagcagtgtgctgatggttcccaggtacctaacaatgcttctacctaatgcwgacattgttcttaaaaataaaataaaaaatcctgaaaagacaaaacttaagaagataagtaacaaagtcatattatactgatttacyactgcatacctccttgagggcaggatagagaggcttacaaatactagttagaagtcaagtgctaactacttctaacatctgtcagtgggcacaaagaatcattcacattcagccaacagaatctcactgtaggggaaatgaaatattaaatgcagttgaatgtagacatttgtgctctagttaacgtgaatgcttcaattcagcgttttctgccactcctcatgcctc

SEQ ID NO: 1127 - DNA, 600 bp, Chicken  19866894085528_1
gtaacaaatgtactgcttcctgcagaatcagttttctacattttgatagcttccacatttgaaatatcataaaagattttcagtattttctaaatatatatcaaattaaaatatatatatattgcattcttaaagaatggcctagtttaataggccctgtgccaatttctgcagttaccacctcatagttcccaatacgaagtgcgaagatcaaaaactcacaacatatccaaaaaagttatgattatcattaaactaagtctacctcctctgttcaatgcttccaaagcacccaatgarcaaagagtaacatttgatcactgtaacaattcgaaagagagacgtgatagaatgttgatacaagagatacaatgacaaagggactaaagcaatggcaaagtgttataaaggaagaaaaaaaaggactgctcccctatctctgaagacctaggctcccmggggaaaactccccagaggaaagatttctagaaagagatccttctagaggggcagtcagcccttaaatgaggtctaagaggtatgaaaccaggctccaccccttccagtcgcacagatgaattgcctccacctgtgctccca

SEQ ID NO: 1128 - DNA, 515 bp, Chicken  19866894085528_2
gtgccaatttctgcagttaccacctcatagttcccaatacgaagtgcgaagatcaaaaactcacaacatatccaaaaaagttatgattatcattaaactaagtctacctcctctgttcaatgcttccaaagcacccaatgarcaaagagtaacatttgatcactgtaacaattcgaaagagagacgtgatagaatgttgatacaagagatacaatgacaaagggactaaagcaatggcaaagtgttataaaggaagaaaaaaaaggactgctcccctatctctgaagacctaggctcccmggggaaaactccccagaggaaagatttctagaaagagatccttctagaggggcagtcagcccttaaatgaggtctaagaggtatgaaaccaggctccaccccttccagtcgcacagatgaattgcctccacctgtgctcccagggatgaccgggtcctttcttcaggtgctcaatcagtggttcaggccggactcaacagttaccatacagatca

SEQ ID NO: 1129 - DNA, 600 bp, Chicken  19866894085529_1
ttttaataacaacatattaatgtgtttttagatcaataaaaatctgaatttgcatctgaatgtctttacaattctaaaaaaaaataaaactgcttttttatttctgtgttatgagttgttcaattcatctagatcaatgtgaaatacttactgattatttgtcaaatgtatagtttgcaggcatggcacattcattttagggaagttgactatatagctcataaacagaaggttttcagaaatgaaagttttccattgtcttacaaatatcacaagtctactgcataatatcagtgttayttggagtttatgagaaggaataaaaaatgaatagctatttatggccattaaaatatttcatgcagcatttgacagtccacattcactcttggatctccagagggcaaaacaatgaataacactggcatttgcagggacacttaccggtagttctggacagaatttagagaagaacagtggtccttgtgtgcaatacgtaatgtaatttcattactttatttccattagtagaaacaattgacataggccatctagactacatgcagcttaatttgtgaattactttcctgaatacaaaat

SEQ ID NO: 1130 - DNA, 600 bp, Chicken  19866894085530_1
ggcagatggggatttctgggacatgctgaaatcatcacaaaatggctacagtctgttatgatgttgggttttgcgaggcctccagtctgctcagtaattctataggagaaattaaaaacagttttaaaaatctctactgagaatcactaagtaaagatgcctccaactctctagttagaaaaaggatatattgcagtatttttctcttgaagatggtggggctggccagggcaaaatggattgcttgcatgactaactgcacaaccaagcctttagattgcaaagctcttctaggatagrtgtcttttggaaaaaaaatggtgttacatcagcctttgtcctctacagaagctttcagggattgaactacgcagccaaagagtttgcacagacattctatatagaaaagataaatatacatttctctatttgtttctttggttcttgcagctaaaaagaagctttttttgttgttgtttactttgcattaatactctatagcattaataatccatttacttattttgtacttcatggttatttagtcagctcttgtttatgtgggtctttctcaaagtgagagagagagaaaaacaatgt

SEQ ID NO: 1131 - DNA, 600 bp, Chicken  19866894085531_1
cctagtgaatctgtactgcctctgataatacttccgctcatcaagagattttgctcctttttttgagggtggaaaagcctttattgaatttcttcaataaaataagaaatgcacgtaatgtattacaattttatttagcatttggtttaagacagacaaatacaagtattaaaaaatgcatgtgcactgaattagggcacagttgttaatcattaaatgttcttttcatgtaggatcggcttacaactaatcattttcctaaggtgtaaggtcactgtacatgtaaacatttggtttcartctttgtgttctctctaatagttaaaatgtcactgttttatctactgtcctgggtctgttcctgcgcaaccaaaatcaatgtacttgccatttactttaattgaactgggtttcttctgtcgctgcaagacttaatccatatgtttgccaaactgcttttaatagaaatcatctgtcctacaagcttatcagcccctgtttgcaaacacattttaagaaggaaagattgcttataattcatctaagaaaatcacaccttcaccaggcttgattttttttcttcttccttttttttttttt

SEQ ID NO: 1132 - DNA, 600 bp, Chicken  19866894087410_1
ccccatccctgcaggcattcaaggccaggctggatgtggctctgggcagcctgggctgctggttggcgaccctgcacatagcagggggttggaactggatgagcactgtggtccttttcaacccaggccattctaggattctgtgattcactgtgctgtggatggcacccacagtggggatgtcttgtaatccaccggtcacactggtgtaaaaacagacaggataacaacggccaactctgcctttgtctggcagaagcctgttttgaaaatactgaaaatacatgtgtgcatggtggygggtaggggaacgccctgacccccacctcactgatccagagacagtgtttggcagtggtgctgtgtggataaagggatcttggttcacaagcagagatggtgaagatagaggcacagcataagcaccagagactgaggaggaagatggccctgagcagggctgggagctggcagtgtactggggcaggccatgagcagcaggaaggtgcctgtttgcagagcaggagttgctttttacctatctgttttctcctagaaagctgtgcttgcaggaatgcacacctttatcacagcctgtca

SEQ ID NO: 1133 - DNA, 600 bp, Chicken  19866894087410_2
agctggcagtgtactggggcaggccatgagcagcaggaaggtgcctgtttgcagagcaggagttgctttttacctatctgttttctcctagaaagctgtgcttgcaggaatgcacacctttatcacagcctgtcatgtctggggtctgttgtttgtgatgaaaacgaatgctcccactgcctgccatgagataaagcaggacctctctcctggctggggccgagctcacatcacctctgcaggtacctcctgtcctccaggcaaagcacagctgcaagatgaatagatcccgagtcaccycactagccaggtacagcagtaaagctgcgtgattgataacctttcaatggggaaaaaacataacgtaaatcttcatctgacaaggcatagtctgagaattggacaattcattttgttgatatatttgcttttatgctgcatgaaatcatttgtgttacagagccccacagcatcactgggagctggactttgctgcactacraaccttgctgggtaaccagagctttgttccacttctgccatgggcagctgggggcacagtggcctccagatgtgtgggctgcccacggctgctggatg

SEQ ID NO: 1134 - DNA, 600 bp, Chicken  19866894087410_3
ctctctcctggctggggccgagctcacatcacctctgcaggtacctcctgtcctccaggcaaagcacagctgcaagatgaatagatcccgagtcaccycactagccaggtacagcagtaaagctgcgtgattgataacctttcaatggggaaaaaacataacgtaaatcttcatctgacaaggcatagtctgagaattggacaattcattttgttgatatatttgcttttatgctgcatgaaatcatttgtgttacagagccccacagcatcactgggagctggactttgctgcactacraaccttgctgggtaaccagagctttgttccacttctgccatgggcagctgggggcacagtggcctccagatgtgtgggctgcccacggctgctggatgagagtggtcggtgcatgtgggtgctgtgagcacagggagtgaggtggggaggagagagggctcctcaagccatggctgagggaaccgagggcaaagctgcccacagctgcccggtgtcagagagacaaagctgtcatggagatcggatcctgcctctcataaagcatcaaatcaacccacaaagaagtttctctgtatttgg

SEQ ID NO: 1135 - DNA, 600 bp, Chicken  19866894087411_1
ggacgagcggcactccggcccatgcagcagatcatcccaaagcatgtcttctgtctccgagtcatgccgtgtgctctcggagtctctccgggtcacactacagctccgggaccccacattcatgcatgacctcgagtcctttgaaatcaaataaaacttacacagaacagctccattgtgcgtaccacctccacagcaatcagtgaaatgagcttccatggggcagctgggaactgacagcccccgatgcaaactgaggtgggagcccttaaaggcaacgttagcaatagtttctgtgcrcagtatttctaagtgggaagtcccatggatagcgttggttctccatctccattctcaacatttcaaaataaacactgactcattcattcaaatgcaaaggttttcyggcttcatttcaaaaaatctgaacttaagagcatgaaggccacaatccagcactgcctccctaaaaacaagtctttagcacgggcagttggagacagcttggatcatgctgtgctgccaatgcagtgattttctgttaaacagaacagaatgctcacagttgtgaacaaagtccacaaaactgcaaatgggcag

SEQ ID NO: 1136 - DNA, 600 bp, Chicken  19866894087411_2
cgggaccccacattcatgcatgacctcgagtcctttgaaatcaaataaaacttacacagaacagctccattgtgcgtaccacctccacagcaatcagtgaaatgagcttccatggggcagctgggaactgacagcccccgatgcaaactgaggtgggagcccttaaaggcaacgttagcaatagtttctgtgcrcagtatttctaagtgggaagtcccatggatagcgttggttctccatctccattctcaacatttcaaaataaacactgactcattcattcaaatgcaaaggttttcyggcttcatttcaaaaaatctgaacttaagagcatgaaggccacaatccagcactgcctccctaaaaacaagtctttagcacgggcagttggagacagcttggatcatgctgtgctgccaatgcagtgattttctgttaaacagaacagaatgctcacagttgtgaacaaagtccacaaaactgcaaatgggcagggagagaggtcacacatgcatgagaatgatgaagcactatcattgaatcacaaagcattctgatgggagagatacacctgtgctggtcagggtcagtatagactgt

SEQ ID NO: 1137 - DNA, 599 bp, Chicken  19866894087425_1
  misc_feature (1)..(33): n is any nucleotide
nnnnnnnnnnnnnnnnnnnnnnnnnnnnnnnnncaaggaggctgtggatgccccatcccctgcaggcattcaaggccaggctggatgtggctctgggcagcctgggctgctggttggcgaccctgcacatagcagggggttggaactggatgagcactgtggtcctttgcaacccaggccattctgtgattctatgagggtttggtgcacagggacacgtgaaaggtgtccttttttcataagggtcctacatgcagacacagtattctgggatgtggggacagagagaaaggcatcgcwgaatgcattaattattatgcgattctacacatcctacacactgcaaagtgacttcaaaaatattactgaagatgcaaaaagcactaagaagctcagaaattttagctgagctgggcaaccctcattgacaccgagcactctttggatgcagggagcgcagatgctcagcagtgctgagctccrttcagcaccgatgcgtgctcaatccaccaccattcagttcttcacctccacaactgccaccaggctcttcatctggctgaatttggacccagccccacatccaggtgaagggaccc

SEQ ID NO: 1138 - DNA, 600 bp, Chicken  19866894087425_2
ctgtgattctatgagggtttggtgcacagggacacgtgaaaggtgtccttttttcataagggtcctacatgcagacacagtattctgggatgtggggacagagagaaaggcatcgcwgaatgcattaattattatgcgattctacacatcctacacactgcaaagtgacttcaaaaatattactgaagatgcaaaaagcactaagaagctcagaaattttagctgagctgggcaaccctcattgacaccgagcactctttggatgcagggagcgcagatgctcagcagtgctgagctccrttcagcaccgatgcgtgctcaatccaccaccattcagttcttcacctccacaactgccaccaggctcttcatctggctgaatttggacccagccccacatccaggtgaagggaccccactggctgggagttaggagaaggttctgccccagaggkcattgggcacagccctgggctcacagagctcagggagcgctgggacgctgctcttggccatcacatttgggtggtgctgtgtagagccaggagttgggctcagtggtccttgggtgtcccttccatctccagatgttctgtggct

SEQ ID NO: 1139 - DNA, 600 bp, Chicken  19866894087425_3
cactgcaaagtgacttcaaaaatattactgaagatgcaaaaagcactaagaagctcagaaattttagctgagctgggcaaccctcattgacaccgagcactctttggatgcagggagcgcagatgctcagcagtgctgagctccrttcagcaccgatgcgtgctcaatccaccaccattcagttcttcacctccacaactgccaccaggctcttcatctggctgaatttggacccagccccacatccaggtgaagggaccccactggctgggagttaggagaaggttctgccccagaggkcattgggcacagccctgggctcacagagctcagggagcgctgggacgctgctcttggccatcacatttgggtggtgctgtgtagagccaggagttgggctcagtggtccttgggtgtcccttccatctccagatgttctgtggctctaacctatggtgtgacatttgaagtgggtgcatagttgaactgcaagcaaagctgcagcagctcagatctaagggcacaagtggtttgggtcccaccagaccagcatggggtggtcactggggacatggcaggagctggggtccctgggcagga

SEQ ID NO: 1140 - DNA, 599 bp, Chicken  19866894087430_1
  misc_feature (1)..(37): n is any nucleotide
nnnnnnnnnnnnnnnnnnnnnnnnnnnnnnnnnnnnntagcagggggttggaactggatgagcactgtgggccttttcaacccaggccattctatgagacggtgtgattgcaccaagcaactcttcatgttcttgtgatgtgagaatattgatgggaatcataagcctgtctccctgcaccatcaggtcatgcacagccctcacctctccatcccctcatctccacaccaagccctcattttgtcccgtatctgcaacactgcacccaaggatgcttctcttatctcccagtcggacttytatttatttattatgctccatcttttcctaaatggggctgattagcgctgagcagggcagctaataggaagctggagagcagcactcgcccaggctttctaaatataaacgacttgcttgccactgctgcaggcagctcaggggcttctgcagccatgcacgggttgtctgcacggtggagggatggccgcccaagtcagagccaacaacaacaacagaaaaagctgatgagtaattccggctgttcctcgccatgtgctgccttgcgctcctctctgcgcaaacgattccagcaatga

SEQ ID NO: 1141 - DNA, 600 bp, Chicken  19866894087443_1
acctgactctttcttgagtgtgtgattcttaataatatttaatctaagggagatttaactttttttttttccttttgagaaccatgatttgtggcccaaaatactttgagtactggggatgagtgggtgtggaaggagatgcagaggtgggccagaatgcctttgtcatggagtttgtccaagttagcttctacccatgtgccaactgagcccagagccatttagttcctcaggctggaaaacaaagaggtgttttcagttcagtggagctgttgattctaggctcattcccatcaagaygtgcagtggcacatggaaagctcagtgtttttgctgaccatgagcccagaagcagtgtcagcgctgcattgggcctgagctgtttaccttgtgctggactgtaaggagaccatcttgctggaagccacctctggtctgagtggtgttgctttgcatgcatggatatgtcctcacccatttctctaatgggagcatctctagcagtgggacacgtcagcagagcaggaggtgttgaggtgtgcagtggaatggtgtaagctggcagccttgtgcctaatgcttgtatctgagacaccaagc

SEQ ID NO: 1142 - DNA, 600 bp, Chicken  19866894087445_1
agcgggtcattcccaaagccagtggcagtgatgtacacaagtgcttatgaacccacctgggaagcgctctgcagaacagcccattaggatgaaacaaaagcttaatgtgtatgtgtatatatatttattttcccaaagactgaaccacagcctctattgacacaaatctggcacacaattatttagcataaatatggtccagcagatttgtttcctcaaagcttgaaataaactgagaagacagctgcagattcaaagcttctcggcatccttggaagccagcatagttatggtgaacgrctgtgaaagctacaaatgacaataatacatttttaataaaattgctgttttaaatcatccgtttttaacatctattttgcaaacctgtgaggaaaccaaaagccattttgtggcagcctcctcatttttatatattatgaagaatctcaaagatcactccagctataaatacacattacaaatggagtttgatatggaagacaatagctgtaaaataatgcctgagggaatgaaaaatttactgaggctttgatataacactgacagccagaggctgagtgcattatttcagaatcaagg

SEQ ID NO: 1143 - DNA, 600 bp, Chicken  19866894087445_2
cagcaggagcttctgaaacagctgtagcaatcttgaccatcccttccccccccccccaataacctaacagcagcacagtaccaagaatcagcacatcccttagccacagctgcacattctgcatgtggtgtgggtccacagtgccagctgcagccatgctgttatgcagcacataaagggtacaaacaagagtcctcagctttcaggagacactgaggggcagaagaagaaaggtaacacttagcatggcaccaaggcattgctgcgattccccaaaagccagggcatagaggtgctagragcagcttgctgagtgccccagcaggaascttttcaggtgcatgcacagcactccagccaggccaacactacaaagctgcaatccaagtcctgttagatggattcctatgagcaggaaccattcagacaagcagggtcagcacagcagcactgccaagaaagcagggagcaccccagcacttgcaccagttggacaccaccagcaccctgctccttcccataaagcagggcaaggctgtgggcaacacctagctctccccctcaagcctctcagtccagaagcagagacccagagcgttt

SEQ ID NO: 1144 - DNA, 600 bp, Chicken  19866894087445_3
atcttgaccatcccttccccccccccccaataacctaacagcagcacagtaccaagaatcagcacatcccttagccacagctgcacattctgcatgtggtgtgggtccacagtgccagctgcagccatgctgttatgcagcacataaagggtacaaacaagagtcctcagctttcaggagacactgaggggcagaagaagaaaggtaacacttagcatggcaccaaggcattgctgcgattccccaaaagccagggcatagaggtgctagragcagcttgctgagtgccccagcaggaascttttcaggtgcatgcacagcactccagccaggccaacactacaaagctgcaatccaagtcctgttagatggattcctatgagcaggaaccattcagacaagcagggtcagcacagcagcactgccaagaaagcagggagcaccccagcacttgcaccagttggacaccaccagcaccctgctccttcccataaagcagggcaaggctgtgggcaacacctagctctccccctcaagcctctcagtccagaagcagagacccagagcgtttcccagtcctcttgcaactctgccatgcag

SEQ ID NO: 1145 - DNA, 600 bp, Chicken  19866894087446_1
gaatgtgtagagctgcagtcagatattcaattcaaagaatatgtctcttcattacactttatcaaacctaccttatcagataaaaatatttttcacttcacaatcacttcttattcataccattgcttcttggcagctgtcaatgttttatgggatggtttggccctgtctcttgactagtgatcactaaagcacccaggtgaccctaagcacagttaggagggatcatctggggcaaaaaaaaacagcaaaaagagcacaaaaaaaccctaaaaacacccctaaaccaccaagagcccmaaatggtcattttagccctttttctcactgttttttcacttttcattgcagagggatccgcagatctgcacctctggaatggggaaacaggggaccccgaataattaataacagtggaaatgatctgaggagaaacaaactaatttactaaatatggtatcggaatgcaagataacacactataaaacaatataattagaatttaagcatataaatcaaatataatgagagaaagagtgtccaaaagctgtaggccttgcactagtgctgtggcaatgtgcgcggtcaggacaagcagca

SEQ ID NO: 1146 - DNA, 597 bp, Chicken  19866894087458_1
tctcagtggtatggagttcttggtgacagggagttctttggtggcacggagccctccatgggatggagctcttggtgaaatggaacccttgttgaaatggagctcttagtggcatggagctctcggtggcatggagctcttgatggtatggatttctcagtgctatggggccctgggtggcatggaatccatagtggcatagagcccatgttggcactgagtactttgtgacatagagccctgggtggcatggagctcttgatggtatgaagctcttggtggtatggagctcttcatgcygtggaaccctcagtggtatggaccccttggtggcatggagccattggtggcatggagcactcagtaacacggagtccttggttgcatggttgatgacatggaactcttggtggcacagaacatggcatggagttcttggtggcatggagctctcactggtggagttcttggtggcagagctcttggtgacatagagcccttggtggcatggaacccttagtgaaacagagctctcagcaacatggagccctcggtggctgctcgctgggtgcagggagctggcagctgccccaagca

SEQ ID NO: 1147 - DNA, 600 bp, Chicken  19866894087461_1
caatttgccattgggcaacctgatgccaccgggggagtgtggctcctggcctggcccatcgcagtaacccaggggctcggagagggaatcctccacgatgacgctgtcgtccttctccagcatgcggtcctcctgcgccagcagccggctgccttcctcatcgctgtacatctccaccttgatggagctggctgcagggggggcagaaaggacacagctcaggcagggtttgctcctaaaggagcaggcactgatggggctctttgctctgacagcacgcatctccttgtgctgctgggkatgttggaacagggcactgagcacgggggttatggtctggatggccgcctgcaygtcctaaaggccaccgytttggtgctttggcgaccgactgtgggtgtaaagcattttgttcccctcatccaaaggcagagggggaaggaaaagccactgaaagcacttgggaggacgcagaaaacactgaacgttgactgcgagtcaataaaggctccacgtttcctggcacgaagagcccggtgtgagtccctcggccagcaaagcccagcgtgcagcagaagagcactctgctggttctctcac

SEQ ID NO: 1148 - DNA, 600 bp, Chicken  19866894087461_2
cccatcgcagtaacccaggggctcggagagggaatcctccacgatgacgctgtcgtccttctccagcatgcggtcctcctgcgccagcagccggctgccttcctcatcgctgtacatctccaccttgatggagctggctgcagggggggcagaaaggacacagctcaggcagggtttgctcctaaaggagcaggcactgatggggctctttgctctgacagcacgcatctccttgtgctgctgggkatgttggaacagggcactgagcacgggggttatggtctggatggccgcctgcaygtcctaaaggccaccgytttggtgctttggcgaccgactgtgggtgtaaagcattttgttcccctcatccaaaggcagagggggaaggaaaagccactgaaagcacttgggaggacgcagaaaacactgaacgttgactgcgagtcaataaaggctccacgtttcctggcacgaagagcccggtgtgagtccctcggccagcaaagcccagcgtgcagcagaagagcactctgctggttctctcacccttgctggaaaacctgggatccaactatggaaacagagagaagccgagcagga

SEQ ID NO: 1149 - DNA, 600 bp, Chicken  19866894087461_3
ggggctcggagagggaatcctccacgatgacgctgtcgtccttctccagcatgcggtcctcctgcgccagcagccggctgccttcctcatcgctgtacatctccaccttgatggagctggctgcagggggggcagaaaggacacagctcaggcagggtttgctcctaaaggagcaggcactgatggggctctttgctctgacagcacgcatctccttgtgctgctgggkatgttggaacagggcactgagcacgggggttatggtctggatggccgcctgcaygtcctaaaggccaccgytttggtgctttggcgaccgactgtgggtgtaaagcattttgttcccctcatccaaaggcagagggggaaggaaaagccactgaaagcacttgggaggacgcagaaaacactgaacgttgactgcgagtcaataaaggctccacgtttcctggcacgaagagcccggtgtgagtccctcggccagcaaagcccagcgtgcagcagaagagcactctgctggttctctcacccttgctggaaaacctgggatccaactatggaaacagagagaagccgagcaggacagcactgcrgggagca

SEQ ID NO: 1150 - DNA, 600 bp, Chicken  19866894087461_4
ccaccgytttggtgctttggcgaccgactgtgggtgtaaagcattttgttcccctcatccaaaggcagagggggaaggaaaagccactgaaagcacttgggaggacgcagaaaacactgaacgttgactgcgagtcaataaaggctccacgtttcctggcacgaagagcccggtgtgagtccctcggccagcaaagcccagcgtgcagcagaagagcactctgctggttctctcacccttgctggaaaacctgggatccaactatggaaacagagagaagccgagcaggacagcactgcrgggagcagacactacgagagcacacagccaccagagcccagggtgacaacacagcgacccatgtggctgctgggcaaaggtcccacatgctggagatccccccctgccagggctctgcccaccccgggagagccaaagggcagcccaggagagcccagcagagctacaggcactgctggccggagctggagggcatggagttgggggtaacactgccacagaccccccccacacacatctctccttcctcctgcagcaccaggagcrgggcagctgcaagcgacctacattcctggctgc

SEQ ID NO: 1151 - DNA, 600 bp, Chicken  19866894087461_5
aaacagagagaagccgagcaggacagcactgcrgggagcagacactacgagagcacacagccaccagagcccagggtgacaacacagcgacccatgtggctgctgggcaaaggtcccacatgctggagatccccccctgccagggctctgcccaccccgggagagccaaagggcagcccaggagagcccagcagagctacaggcactgctggccggagctggagggcatggagttgggggtaacactgccacagaccccccccacacacatctctccttcctcctgcagcaccaggagcrgggcagctgcaagcgacctacattcctggctgctccagcaagctgtgcaatgccacagatcagatgggctccagaggatggcaatggggcggcgagggctgagctggcacagatggggagaggagccttcctccttccctcctctacctccacagagctgctctctccctcagcctcacctccagacccctcctggaggcagagcagtgccacgcagagcacgtcctcagctgacctcgttgggaagcatcctcccactgagcagagtgggagggaatcccttaggatgtgccgtggaca

SEQ ID NO: 1152 - DNA, 599 bp, Chicken  19866894087466_1
  misc_feature (1)..(212): n is any nucleotide
nnnnnnnnnnnnnnnnnnnnnnnnnnnnnnnnnnnnnnnnnnnnnnnnnnnnnnnnnnnnnnnnnnnnnnnnnnnnnnnnnnnnnnnnnnnnnnnnnnnnnnnnnnnnnnnnnnnnnnnnnnnnnnnnnnnnnnnnnnnnnnnnnnnnnnnnnnnnnnnnnnnnnnnnnnnnnnnnnnnnnnnnnnnnnnnnnnnnnnnnnnnnnnnnnnnnccctgaagaaaccttctccatgtgtgcaacatgacagtgactgaaagctgtgcttcttaaagcatctgtccaggtttcttctatcccrtggtgatactacacctgctgtcatcttcctttcagccaggcttctttaagggcccagcaaatataagcaataaaaagcagaatattttaggaggtacagggtcaagagctaggactactgctaagaattcgtccaatgttgtattgttggtgaggaatgaaaatgtttgtactgtacaaaggcagatcttgaatctcctttgcagaacttctactacataacgtgcaggaaagcactgggcagatgactcctcatttgtctttgctggtaggagttgacagtgtgcaaattcacaggga

SEQ ID NO: 1153 - DNA, 523 bp, Chicken  19866894087469_1
ttaagtcacctggttgggtctttgttcttatgcttttaaaaggcaaagtatttctagtggtttagaagtgaaaaatagagctaatcctgaaatgcgataatgtaaaacatgcactgatctttttaatatattgtcataggatcaatagtaaatgaatcagttctctttggaataacttgtggtttatatatctggaaatcagaacattatgccttatcattatgcgcaaacagagctgatattagctaaatggacagtttttagattggaactggaatgttataaggcttctgtaagctytgtcttgtagtagggaaacgtaaatgaggtaagtaagatggattttttttttttctggaacattcttatcttctttgcaatgtgtagctttcaattgtgtgttcctgagacaggagtagttaggggtttcccccttgtcttaaagcacatctcattaactgcatgaaagtctaagctcagatgatgttcctgttacacaatgcatgctggtatttgttagctg

SEQ ID NO: 1154 - DNA, 600 bp, Chicken  19866894087475_1
agccactgctgtgcgggcagtgggagctgaggctgctgcggctgcagctcccatcgccggtgtggagaacgttgtctcagaatacaaattcctgcttttaagtggattcccattgccatccagcaggcacccccccccttcatctttatctgccttagacaacactcgctgccaggggaatttgggaatcagtgagtgtctttctgcaccacgtgcctcagtttccccacccgcaatacagctgggatgatacggatcatggctataagcacacgagccacacactgtccagaagcaccrgctaggactgaagcattgttactacagatggaaatgaacccactcattatttgtggcctctgagcactaccgtactattaagcaattataataattataattcatcaagaagataacctctgtctaaaggagctcccgtgtttaaacctgttctgccgctccacacgcactggatggattcagagtgcagcagacacgacacccaccaggagctgagcgggaccaccacgctgcacccgctgctgcctggagccgcttcctgggctcggagggatgcaggcagggcgcagggtcagggca

SEQ ID NO: 1155 - DNA, 542 bp, Chicken  19866894087475_2
cattgttactacagatggaaatgaacccactcattatttgtggcctctgagcactaccgtactattaagcaattataataattataattcatcaagaagataacctctgtctaaaggagctcccgtgtttaaacctgttctgccgctccacacgcactggatggattcagagtgcagcagacacgacacccaccaggagctgagcgggaccaccacgctgcacccgctgctgcctggagccgcttcctgggctcggagggatgcaggcagggcgcagggtcagggcacagctggcacccygcgtccccggtgtccaggaggacccttccctgcaggccagcagtgctgaggactgtgggctgacacaccacgctctgccctgccgtgagcacgcagccactcgccatccctgcgcgggcacggctgcacagccggctctcagccatcgcccgtgcgcacccacctgtgctctgaccgaaacagcggctccgtacagacactcctgctgacccccgcggccctgcgaggggctgcacgccccc

SEQ ID NO: 1156 - DNA, 599 bp, Chicken  19866894087483_1
  misc_feature (1)..(63): n is any nucleotide
nnnnnnnnnnnnnnnnnnnnnnnnnnnnnnnnnnnnnnnnnnnnnnnnnnnnnnnnnnnnnnncttgaaacttaaatgtctgttaaaattgtcatccagtgggaaaaaaaacagtcttttatgaggtacaatcttcatcaaacaaatatatatcttctctgactcaagtgaaattgaaaagcatctggccataatgcatttacttgaataaaagtgtgccacggtggaacacaggagttatattaggaaagcctccaaatttttatatcaccaatatacaatatttctgtaagatgcagrttctggaggctgatagctgatctaaattaaaagaggaaaatgaatacacagagagaaagaagcacaaactgtggtttcatataatatatttagcaatggttgtatgttgtgcgctacrtaaattcawaaccaactcrgaaacagttatrttctgagagctgagggactggaagcccaacagccctattygttcatgggcttggcaagctgtagacagctgtgtaatgtgaacaggccttacagatrgcctttttttgaatgaggttcaccgtcatccttgttcagcactgatcacttct

SEQ ID NO: 1157 - DNA, 600 bp, Chicken  19866894087483_2
ttatgaggtacaatcttcatcaaacaaatatatatcttctctgactcaagtgaaattgaaaagcatctggccataatgcatttacttgaataaaagtgtgccacggtggaacacaggagttatattaggaaagcctccaaatttttatatcaccaatatacaatatttctgtaagatgcagrttctggaggctgatagctgatctaaattaaaagaggaaaatgaatacacagagagaaagaagcacaaactgtggtttcatataatatatttagcaatggttgtatgttgtgcgctacrtaaattcawaaccaactcrgaaacagttatrttctgagagctgagggactggaagcccaacagccctattygttcatgggcttggcaagctgtagacagctgtgtaatgtgaacaggccttacagatrgcctttttttgaatgaggttcaccgtcatccttgttcagcactgatcacttcttccttagagagagtgggataatttttgcactctgaactaaggtctgcaaggaactcagctgaaaccacagcttccattatactgatggcatcaggctgggcatggaccatgacaccagt

SEQ ID NO: 1158 - DNA, 600 bp, Chicken  19866894087483_3
acaatcttcatcaaacaaatatatatcttctctgactcaagtgaaattgaaaagcatctggccataatgcatttacttgaataaaagtgtgccacggtggaacacaggagttatattaggaaagcctccaaatttttatatcaccaatatacaatatttctgtaagatgcagrttctggaggctgatagctgatctaaattaaaagaggaaaatgaatacacagagagaaagaagcacaaactgtggtttcatataatatatttagcaatggttgtatgttgtgcgctacrtaaattcawaaccaactcrgaaacagttatrttctgagagctgagggactggaagcccaacagccctattygttcatgggcttggcaagctgtagacagctgtgtaatgtgaacaggccttacagatrgcctttttttgaatgaggttcaccgtcatccttgttcagcactgatcacttcttccttagagagagtgggataatttttgcactctgaactaaggtctgcaaggaactcagctgaaaccacagcttccattatactgatggcatcaggctgggcatggaccatgacaccagtgttagccct

SEQ ID NO: 1159 - DNA, 600 bp, Chicken  19866894087483_4
tcaaacaaatatatatcttctctgactcaagtgaaattgaaaagcatctggccataatgcatttacttgaataaaagtgtgccacggtggaacacaggagttatattaggaaagcctccaaatttttatatcaccaatatacaatatttctgtaagatgcagrttctggaggctgatagctgatctaaattaaaagaggaaaatgaatacacagagagaaagaagcacaaactgtggtttcatataatatatttagcaatggttgtatgttgtgcgctacrtaaattcawaaccaactcrgaaacagttatrttctgagagctgagggactggaagcccaacagccctattygttcatgggcttggcaagctgtagacagctgtgtaatgtgaacaggccttacagatrgcctttttttgaatgaggttcaccgtcatccttgttcagcactgatcacttcttccttagagagagtgggataatttttgcactctgaactaaggtctgcaaggaactcagctgaaaccacagcttccattatactgatggcatcaggctgggcatggaccatgacaccagtgttagccctacagccatcc

SEQ ID NO: 1160 - DNA, 600 bp, Chicken  19866894087483_5
atatcttctctgactcaagtgaaattgaaaagcatctggccataatgcatttacttgaataaaagtgtgccacggtggaacacaggagttatattaggaaagcctccaaatttttatatcaccaatatacaatatttctgtaagatgcagrttctggaggctgatagctgatctaaattaaaagaggaaaatgaatacacagagagaaagaagcacaaactgtggtttcatataatatatttagcaatggttgtatgttgtgcgctacrtaaattcawaaccaactcrgaaacagttatrttctgagagctgagggactggaagcccaacagccctattygttcatgggcttggcaagctgtagacagctgtgtaatgtgaacaggccttacagatrgcctttttttgaatgaggttcaccgtcatccttgttcagcactgatcacttcttccttagagagagtgggataatttttgcactctgaactaaggtctgcaaggaactcagctgaaaccacagcttccattatactgatggcatcaggctgggcatggaccatgacaccagtgttagccctacagccatcctgaggcatttac

SEQ ID NO: 1161 - DNA, 600 bp, Chicken  19866894087483_6
cataatgcatttacttgaataaaagtgtgccacggtggaacacaggagttatattaggaaagcctccaaatttttatatcaccaatatacaatatttctgtaagatgcagrttctggaggctgatagctgatctaaattaaaagaggaaaatgaatacacagagagaaagaagcacaaactgtggtttcatataatatatttagcaatggttgtatgttgtgcgctacrtaaattcawaaccaactcrgaaacagttatrttctgagagctgagggactggaagcccaacagccctattygttcatgggcttggcaagctgtagacagctgtgtaatgtgaacaggccttacagatrgcctttttttgaatgaggttcaccgtcatccttgttcagcactgatcacttcttccttagagagagtgggataatttttgcactctgaactaaggtctgcaaggaactcagctgaaaccacagcttccattatactgatggcatcaggctgggcatggaccatgacaccagtgttagccctacagccatcctgaggcatttactattttggaacacattatggttatgtccatgcccttcctg

SEQ ID NO: 1162 - DNA, 600 bp, Chicken  19866894087483_7
gaaagcctccaaatttttatatcaccaatatacaatatttctgtaagatgcagrttctggaggctgatagctgatctaaattaaaagaggaaaatgaatacacagagagaaagaagcacaaactgtggtttcatataatatatttagcaatggttgtatgttgtgcgctacrtaaattcawaaccaactcrgaaacagttatrttctgagagctgagggactggaagcccaacagccctattygttcatgggcttggcaagctgtagacagctgtgtaatgtgaacaggccttacagatrgcctttttttgaatgaggttcaccgtcatccttgttcagcactgatcacttcttccttagagagagtgggataatttttgcactctgaactaaggtctgcaaggaactcagctgaaaccacagcttccattatactgatggcatcaggctgggcatggaccatgacaccagtgttagccctacagccatcctgaggcatttactattttggaacacattatggttatgtccatgcccttcctggcctggaaaggagaactcagtgtgagaactcgtcattaagactatgtttcagtgtag

SEQ ID NO: 1163 - DNA, 494 bp, Chicken  19866894087488_1
ttttccccctctggccttgacaggcagcccaaaccataacagcagcctaaaggccaatagaacatgagacaaaaccacacataagaatatgaagtcatttttaatttgaaactgtgtggcgctcatttagagttcctctttctaccagcagtgaaattatagattgtaatctttatgtcttgaagaacaagccaaaagcttaatgcagagaccatggctatattggcaaaggttttcaaatgagctaaagtgaagaaatggcaaccacaagcaatctaagaggctcctcactgacctgcrtaacaccagcttggtaagcaactcagttgtgttggccaacacctaatgaacgcccttctcctcacccggaatcacagaatcgctaaggttagaaaagacccacaggatcatccagtccaaccatccacccatcaccaatgggtctcattaaaccatgtccctcaacacaacatccaaacgttccttgaacacct

SEQ ID NO: 1164 - DNA, 600 bp, Chicken  19866894087496_1
tatatatatatgacatacaatatcttttgtatataagtatcttatatatatgtttgtacatgtgcgtatgtgcgtgcacttacatatgagtgaatatattcctatactaactttttgatatttgttcacttgcctacaatatgaacgtaatattgcctgagaatacatggtatttaggaacctaaatcccatatcttgatactatattgctgttagcattccactttcacattctaaagatattgactttttcttctcataatttcagagtgagggtgtatgaatgtcattcaagagagkctgtgtttaacctagaagacacattttttctttaacactgaacattaataatttacactgtaagatattaaaatattatcaaattccactcatatttttacaagatctgaacgtgaagagctagtcttccaacctcgttttgtgagcaaagttctttggatgtgatctatacctaagaaactgtgctttcttaagatatgaataataagtgattttaacactgtattaatcttcactaacatttgtgtttatgaaaattagtgtttgacaaagacctgtgaattggaattcacaccaaaa

SEQ ID NO: 1165 - DNA, 599 bp, Chicken  19866894087499_1
  misc_feature (1)..(149): n is any nucleotide
nnnnnnnnnnnnnnnnnnnnnnnnnnnnnnnnnnnnnnnnnnnnnnnnnnnnnnnnnnnnnnnnnnnnnnnnnnnnnnnnnnnnnnnnnnnnnnnnnnnnnnnnnnnnnnnnnnnnnnnnnnnnnnnnnnnnnnnnnnnnnnnnnnnnngttctcccccagccaactactttaagttttatagtttttccatatgacatcttatggtacggaatatctctttggccacttcaggtcagctgtgctggccctgccccctcccagcttcttatgctgtcccagcgccttgctggcacgacakcatgagaagctgaaaaaccggaaggttcatggctctgtacagcactgctcagcaacaactaaaacattggtgtatcatcaacattgtttttctcctatagacaaaatacagaatcacaccagacactatgaagaaaatcagttctgttccacacaagcttttacaccaaaatggaaagctaaatgcttgcttttggaattgctgaatgtagaccatgaacacaagttttaattcctgttccttctaatcaagaaattctgtgttgcttctaggaaagctgataaaaataattctactta

SEQ ID NO: 1166 - DNA, 600 bp, Chicken  19866894087503_1
agcttgtctaggagcaaatcattttgctgttgaaatctagttatccatgaatgcacttatcccattatcagtacaataaagctcaattctcatgaaatggagcacacttatttgtatgcatgacagcattagcatttgcatacaggcagtttaggttacaggtatgtgtcatatattagaacaaggaagagaagtgacactaacagaccaacaaagctgcatgcaataacttgggtggcttgagacaaagaccagctctacattagtaacttcacaagtagtggagtttttcctctttayacagtgggtgtggaratccacagaaaacactsaaagtcttcattttaagtatcaaagactatcgtctcagtaaaatggaattgttccaaattgtagatattctagcaaaattcagagatggtttatccacaagtatctcaagactttctgaaatttgtgctgttctaagatatatcagtacataaaactgctgaataactcagcctctttgaatatagtacagacaactggatcatttccaagttactgtaacttctgaaacaaaaaggacaattcatcatgttgttctaaggacaaata

SEQ ID NO: 1167 - DNA, 600 bp, Chicken  19866894087503_2
aaatcattttgctgttgaaatctagttatccatgaatgcacttatcccattatcagtacaataaagctcaattctcatgaaatggagcacacttatttgtatgcatgacagcattagcatttgcatacaggcagtttaggttacaggtatgtgtcatatattagaacaaggaagagaagtgacactaacagaccaacaaagctgcatgcaataacttgggtggcttgagacaaagaccagctctacattagtaacttcacaagtagtggagtttttcctctttayacagtgggtgtggaratccacagaaaacactsaaagtcttcattttaagtatcaaagactatcgtctcagtaaaatggaattgttccaaattgtagatattctagcaaaattcagagatggtttatccacaagtatctcaagactttctgaaatttgtgctgttctaagatatatcagtacataaaactgctgaataactcagcctctttgaatatagtacagacaactggatcatttccaagttactgtaacttctgaaacaaaaaggacaattcatcatgttgttctaaggacaaatagggaatataggaggg

SEQ ID NO: 1168 - DNA, 600 bp, Chicken  19866894087503_3
aaatctagttatccatgaatgcacttatcccattatcagtacaataaagctcaattctcatgaaatggagcacacttatttgtatgcatgacagcattagcatttgcatacaggcagtttaggttacaggtatgtgtcatatattagaacaaggaagagaagtgacactaacagaccaacaaagctgcatgcaataacttgggtggcttgagacaaagaccagctctacattagtaacttcacaagtagtggagtttttcctctttayacagtgggtgtggaratccacagaaaacactsaaagtcttcattttaagtatcaaagactatcgtctcagtaaaatggaattgttccaaattgtagatattctagcaaaattcagagatggtttatccacaagtatctcaagactttctgaaatttgtgctgttctaagatatatcagtacataaaactgctgaataactcagcctctttgaatatagtacagacaactggatcatttccaagttactgtaacttctgaaacaaaaaggacaattcatcatgttgttctaaggacaaatagggaatataggagggggaaggtgtcttactcc

SEQ ID NO: 1169 - DNA, 600 bp, Chicken  19866894087511_1
tgttaaatgttaaagatatcaaaattttctaaagggagcactgccattttttcatttggaaatgaaatgattggggattttatttctgctatttaccaaagaaagaaatcctgaatggaaagagcactgtgaaagctttcatttcacactacactcaaattatcttttaattatttctggctgccaccattactatgaagcagtggagctgctttctctccttcgtccttccctgaaaaatccatgcccatcccacagcctacccctacccctaccctactgcaaagggaactggggctkggggggcctccccagcaacaaagtgayggcactgagttggatttgcagacatccactcacatacaaagggactcacacaggcaaggagtgcctacaaggatttctcatctctgtaatacttaacgttgccaaagcgctccaaacctcctggaaataactctgtgctataaagccctgtatattctgggggtacaaatcaaccactgccatatttctttacttctgctttatttctgacttctttaaagcacagtcgttatttattgctcctatttcaacactgtgaaagcttaatggata

SEQ ID NO: 1170 - DNA, 600 bp, Chicken  19866894087511_2
tctaaagggagcactgccattttttcatttggaaatgaaatgattggggattttatttctgctatttaccaaagaaagaaatcctgaatggaaagagcactgtgaaagctttcatttcacactacactcaaattatcttttaattatttctggctgccaccattactatgaagcagtggagctgctttctctccttcgtccttccctgaaaaatccatgcccatcccacagcctacccctacccctaccctactgcaaagggaactggggctkggggggcctccccagcaacaaagtgayggcactgagttggatttgcagacatccactcacatacaaagggactcacacaggcaaggagtgcctacaaggatttctcatctctgtaatacttaacgttgccaaagcgctccaaacctcctggaaataactctgtgctataaagccctgtatattctgggggtacaaatcaaccactgccatatttctttacttctgctttatttctgacttctttaaagcacagtcgttatttattgctcctatttcaacactgtgaaagcttaatggatattttaaggccaggacagctccgacgta

SEQ ID NO: 1171 - DNA, 600 bp, Chicken  19866894087512_1
attctttaaggacctgaatctgaacagtaaaatactgtagataatatattgcttcacaacatggtaaataatttattctggctgttttaggatatttgcagggacagtgcttgggaatgtttttgatcagtgcaaacacagaaatgaatcagtttgctctctgtgttcagcaggcaaaagtttctttgagggagggcagcaaaggggcataggggtatgctaatccagctgaaaatcccgcgcagaaaagagagtaaatatgagctactgaaacagactacttccaattgctgtcaagtycttcagagtgacctgtggctaaacacccaaatgtttattgtctcagacagaaaaatgaaaacctacccggccattggtttcttcgtcctcttcgtcatcagctatggctcttctgaaaactccagcacgccacgagggtgcggactggacctcctcccgcagtatgtgtacctctgtgacctggatgccatctggggaatagttgtggaggcggttgcgggagcaggtgtgctgacaacgttactgctgatgctgattttgctggtgaggctgcccttcatcaaggaaaaagagaagaag

SEQ ID NO: 1172 - DNA, 600 bp, Chicken  19866894087516_1
acaatttgaggcacatcttttggaaaaccacaaattactttttggaaatcttgaggggacatcaagaagatgggatatggactgaagattttacctatgtttaaatcacctttgactttatgaaagagaaatgatctgctccaaactcttccgagcaggaagcctgaagggctgggctggctttcattcgtgtccaatttcttgcagtaatctaattgagatgtcagacaaagttctgggttattatctttcactgagaaattacaatgcatctgttattgttttcttctttaattattytgatggaagtagcaaaggatatttttaataagcttcactaatctgagagataacgtttgaacaaacataatatgtaatatgaccacagtgtcactaagaagaagcttattcctgggtagattttgcatctggcaatattcaaatatcagtagtttgaaatggacaacaaaacctttgcactattaacaatcttggtatggttttatttagaagtatccatagtctaaggaaaccattgttaccttttcagaatgtgccaaaatatattcccatgtatttcaatgaagattacaagatgta

SEQ ID NO: 1173 - DNA, 599 bp, Chicken  19866894087518_1
  misc_feature (1)..(44): n is any nucleotide
nnnnnnnnnnnnnnnnnnnnnnnnnnnnnnnnnnnnnnnnnnnnacagatctcttgagctgtttggagtagcgatgtgcaaaacagttttttcctgcatgacaacaattttcatgctttcagccacaaaccagttccaccatcaggtaggaaagttaaaattcaaaggaacactgtgaatagcggaaaagatcactccagcagcagggggctgctgcatatctgccaatgcacacacatatgtaaatgcacacgctccctctggggctgaatggatgcccaattgctcaaaatccacttygaaagttttcactaaaaaccraaatgacttctgcttgcaactttatttccttgaaatgactcttccaaacgctattatgcaacgcagcctcccagggggactctctcccatgcagcactggtgacccagcatcccccagcttccaaaaaagccccaaacttttggctgccctatgccaccatctccccctgccccatggctctgcccccccccagcccacgctgtgttgcagctccagctgctcccacccagcagtgactcagggccttgtgggacccacactgcacgaagggctgggc

SEQ ID NO: 1174 - DNA, 599 bp, Chicken  19866894087518_2
  misc_feature (1)..(23): n is any nucleotide
nnnnnnnnnnnnnnnnnnnnnnnacagatctcttgagctgtttggagtagcgatgtgcaaaacagttttttcctgcatgacaacaattttcatgctttcagccacaaaccagttccaccatcaggtaggaaagttaaaattcaaaggaacactgtgaatagcggaaaagatcactccagcagcagggggctgctgcatatctgccaatgcacacacatatgtaaatgcacacgctccctctggggctgaatggatgcccaattgctcaaaatccacttygaaagttttcactaaaaaccraaatgacttctgcttgcaactttatttccttgaaatgactcttccaaacgctattatgcaacgcagcctcccagggggactctctcccatgcagcactggtgacccagcatcccccagcttccaaaaaagccccaaacttttggctgccctatgccaccatctccccctgccccatggctctgcccccccccagcccacgctgtgttgcagctccagctgctcccacccagcagtgactcagggccttgtgggacccacactgcacgaagggctgggctgagtgtaggaaggggggggg

SEQ ID NO: 1175 - DNA, 600 bp, Chicken  19866894087519_1
tttactttgccctctgcagtacctgccatgagggaacagttccagttatcccagagatgctttccctgggataccttaaatgcagatatttgaatggcacacagatctaatgagctccttccattagctaacttctacagcctcaaaagcatgaatgcatcccaaataaaaactcatgtaaaaccaagcactgctgtctgaacaacagacccagtaaggttattactgtggggaaacagtggaacttggcccaagagcatgtcggagtaaagttaagtgagctaaagactgcagacctayttaattaagtagatagactattaatcacaaggaagagcagtcccaaataatatgtttataaagcttgcagtttcattctatggatgccagkgttttgttctattttctttatgtagaactagagatattcactgaagaatcaattctcagaaggacagctgttacaggctcctggcaattttcggggaaaaatgaccagatgctcagaacagggctgacagttaaaatgaagagatasatccaggaccaccagtcccaagtgcgctaagctcaccaatgaccacaaaattgcaacatttc

SEQ ID NO: 1176 - DNA, 600 bp, Chicken  19866894087519_2
gaatggcacacagatctaatgagctccttccattagctaacttctacagcctcaaaagcatgaatgcatcccaaataaaaactcatgtaaaaccaagcactgctgtctgaacaacagacccagtaaggttattactgtggggaaacagtggaacttggcccaagagcatgtcggagtaaagttaagtgagctaaagactgcagacctayttaattaagtagatagactattaatcacaaggaagagcagtcccaaataatatgtttataaagcttgcagtttcattctatggatgccagkgttttgttctattttctttatgtagaactagagatattcactgaagaatcaattctcagaaggacagctgttacaggctcctggcaattttcggggaaaaatgaccagatgctcagaacagggctgacagttaaaatgaagagatasatccaggaccaccagtcccaagtgcgctaagctcaccaatgaccacaaaattgcaacatttcagaaggtaataaatatccttagttctgtcctttatttatctattaatttattttatttctatgacttatacattaatgtttttaagcttga

SEQ ID NO: 1177 - DNA, 600 bp, Chicken  19866894087519_3
gtggaacttggcccaagagcatgtcggagtaaagttaagtgagctaaagactgcagacctayttaattaagtagatagactattaatcacaaggaagagcagtcccaaataatatgtttataaagcttgcagtttcattctatggatgccagkgttttgttctattttctttatgtagaactagagatattcactgaagaatcaattctcagaaggacagctgttacaggctcctggcaattttcggggaaaaatgaccagatgctcagaacagggctgacagttaaaatgaagagatasatccaggaccaccagtcccaagtgcgctaagctcaccaatgaccacaaaattgcaacatttcagaaggtaataaatatccttagttctgtcctttatttatctattaatttattttatttctatgacttatacattaatgtttttaagcttgaagggtgaagctggctttatgtctttttaactgagctcctgctataattgtataagtcttgcagctcagttctaataataacaccaagctacaggacctctgaaataaatctaagagagataacagcacaatatgtagcttaaaaaaa

SEQ ID NO: 1178 - DNA, 600 bp, Chicken  19866894087526_1
agtgtggctgccagcccggctgccctttggcacagctggcagtgatgcttctgcagcgtctgcaatggagcgtggatattttggggtacggaggcagagggaataaggtggcaaggagaacaaggttgcttctgggaggatgcaggagggctgcgctgctcagccgagcagtggacaaggggtggttgcctgcagagggcagcaagggagcatggccaagcactgtgctcgtgtccaactctggaccccagcactgatggctcttggatggctaaaaacaggattaggacacaggcacasctctgtcccatccagcaacttccaaaaatgtcatcaagaagagtattgtgaaaaacacctcctcagtttgtggattctggggacagcatcaccctacaacactgagcacagctgggatgcrtctccccccagcaaacctgggctgtgggcaggtgtgatgtgccagaacctctttgctrtaaatctaccatagggcaacagcctggcattagcacagtgtcacatatgtggactccaccacctccctgggcagcctgtgccagcgcctgactataagaagaaacaggcaaggagactaca

SEQ ID NO: 1179 - DNA, 600 bp, Chicken  19866894087526_2
aaggttgcttctgggaggatgcaggagggctgcgctgctcagccgagcagtggacaaggggtggttgcctgcagagggcagcaagggagcatggccaagcactgtgctcgtgtccaactctggaccccagcactgatggctcttggatggctaaaaacaggattaggacacaggcacasctctgtcccatccagcaacttccaaaaatgtcatcaagaagagtattgtgaaaaacacctcctcagtttgtggattctggggacagcatcaccctacaacactgagcacagctgggatgcrtctccccccagcaaacctgggctgtgggcaggtgtgatgtgccagaacctctttgctrtaaatctaccatagggcaacagcctggcattagcacagtgtcacatatgtggactccaccacctccctgggcagcctgtgccagcgcctgactataagaagaaacaggcaaggagactacaaacagccaagtcccttctgagtggggacaaggagacaggggaacatgagctggacagaagaactgtagcaaagcatccctcgtccccagagatgccacctggctggttgcatcgtcttcct

SEQ ID NO: 1180 - DNA, 600 bp, Chicken  19866894087526_3
gggtggttgcctgcagagggcagcaagggagcatggccaagcactgtgctcgtgtccaactctggaccccagcactgatggctcttggatggctaaaaacaggattaggacacaggcacasctctgtcccatccagcaacttccaaaaatgtcatcaagaagagtattgtgaaaaacacctcctcagtttgtggattctggggacagcatcaccctacaacactgagcacagctgggatgcrtctccccccagcaaacctgggctgtgggcaggtgtgatgtgccagaacctctttgctrtaaatctaccatagggcaacagcctggcattagcacagtgtcacatatgtggactccaccacctccctgggcagcctgtgccagcgcctgactataagaagaaacaggcaaggagactacaaacagccaagtcccttctgagtggggacaaggagacaggggaacatgagctggacagaagaactgtagcaaagcatccctcgtccccagagatgccacctggctggttgcatcgtcttcctgggacccactcagggagtcaatgaggaatcaccaataccctcttgcatccaagatgac

SEQ ID NO: 1181 - DNA, 600 bp, Chicken  19866894087533_1
ctgagatcttccgatactcttttaatgccatgctaaaaatactaaatcatagtgtaacatcaacagcaagactgtgcatttaaatgcccttttaaagatggtactgtttctgtgctacctttgaggaaaggttcctcagctgcggtaaagaagggctagtcttatttactaggcttgatgagtccatccatttacctgtctcatgaattagctgctagctttcttccctgaggagaaaaataaagacacaaaatcttaggttgaccacagaatagctagagaaatcagagcctacacagytagattgaatagaattaatactactgtatataccttgctatgtcttctgtgaatgataatacttaagtcattagttttatgttcgcatatggaggcagaaattttaatttagctggcaacatacagaaatgcatttcataacctgttctttatttcactggctatgcatgagctttcaaatctgtgttgtttaagaaagctatgaaggaaatacaatggctgctccaaaagtaatgcttcctattttatgatgttggaacacaccattagagacaaatggtggtggtattgcagtattct

SEQ ID NO: 1182 - DNA, 511 bp, Chicken  19866894087533_2
gagctttcaaatctgtgttgtttaagaaagctatgaaggaaatacaatggctgctccaaaagtaatgcttcctattttatgatgttggaacacaccattagagacaaatggtggtggtattgcagtattctgccatattctgtatgttattcctgccagtatcccattacattttgttgccatgtgacagatggcagcagaggggcagtctgacaaaacagcatctgacatggaagtgtgtatgaagcaaatgtgtgtcactgaattcctccatgtggaaaaaatggcacccactgatgygcatcaacgtttgatgaatgtttatggagaccaaacaatggatgtgagcacagtgtggtggtaggtgttgcatttcagcagtggcagaggcracagcgggtcacctccactggtgcagatattgatgagcatggcatgcgagctctctttcatcactggtgagagtgtatagctaatggtggtggctatgttgctctttctatcaaatagt

SEQ ID NO: 1183 - DNA, 419 bp, Chicken  19866894087533_3
caccattagagacaaatggtggtggtattgcagtattctgccatattctgtatgttattcctgccagtatcccattacattttgttgccatgtgacagatggcagcagaggggcagtctgacaaaacagcatctgacatggaagtgtgtatgaagcaaatgtgtgtcactgaattcctccatgtggaaaaaatggcacccactgatgygcatcaacgtttgatgaatgtttatggagaccaaacaatggatgtgagcacagtgtggtggtaggtgttgcatttcagcagtggcagaggcracagcgggtcacctccactggtgcagatattgatgagcatggcatgcgagctctctttcatcactggtgagagtgtatagctaatggtggtggctatgttgctctttctatcaaatagt

SEQ ID NO: 1184 - DNA, 536 bp, Chicken  19866894087538_1
gcagtggaaagacatgacatatgatctatctcatcttgcctccttccatttaatcccacttttaatgagcagaaacataaaaagtaaacagttcctctctcttctacaatactcattttctttccacactgtttactttgaataaccagaattcatttttagaacactgttcaatatttcattcaaagaacttcacaggcatcatccaaatgctatttttgaagcttcagcaatgttcatttgtgtactgataaggaatgcaaacttcctgggattttctccctgctcagaaggggctcyatcagtacagggggaagggtccttctttctcagctgagaaaagccacaactacacagcccagagtgcagctgcactgtggataatttatatactagtccctcatttccagatctaaattttttttcagggatttgttgccttctattatgaattctacagaataaagagcaattgctgaagtactttgtcagaactgccagcatagtaaaatatcagtatccacacagctctaaga

SEQ ID NO: 1185 - DNA, 599 bp, Chicken  19866894087549_1
  misc_feature (1)..(20): n is any nucleotide
nnnnnnnnnnnnnnnnnnnncgtgctttattttctgattgcacacctttatagttgaatgcaactagaagggaggctcaacatctcttcttatccttttctgtgccagatgtgttttttctctctagtatgtattgcacttgaagtgttaaactctccgggggcacggaggtggggatgtgaggcgaggtctatgagttacttcaaacacttctctgtgcttgcacttaagaaggagagaagggaacatgttgtaaaagcagctgaggaatatataaaagtgaaatattaatgaactagraaagctgagatagtaagacattgcgcctaatcatttaggagggctcttgtatggctgctccatrtatgcgtctgtagtacaaatgcaattagtataaaggacaacaggatttgtatttgcctagctagaagtaataataatgcaaaaaccttttttgcattggtgattatctcttggggcttgttttacccttgatttctgaggctaccacggaactgtattattgcagaaacagtaaaaaaaaaaaaaaaagtatatttcaagaatgctgtcttagagatggaatgcagaaggctgac

SEQ ID NO: 1186 - DNA, 600 bp, Chicken  19866894087549_2
tagaagggaggctcaacatctcttcttatccttttctgtgccagatgtgttttttctctctagtatgtattgcacttgaagtgttaaactctccgggggcacggaggtggggatgtgaggcgaggtctatgagttacttcaaacacttctctgtgcttgcacttaagaaggagagaagggaacatgttgtaaaagcagctgaggaatatataaaagtgaaatattaatgaactagraaagctgagatagtaagacattgcgcctaatcatttaggagggctcttgtatggctgctccatrtatgcgtctgtagtacaaatgcaattagtataaaggacaacaggatttgtatttgcctagctagaagtaataataatgcaaaaaccttttttgcattggtgattatctcttggggcttgttttacccttgatttctgaggctaccacggaactgtattattgcagaaacagtaaaaaaaaaaaaaaaagtatatttcaagaatgctgtcttagagatggaatgcagaaggctgactcagtcctgaaattactcagaggattagccttagaaggccctcttggggacgtgaggatgacttt

SEQ ID NO: 1187 - DNA, 381 bp, Chicken  19866894087549_3
ggacaacaggatttgtatttgcctagctagaagtaataataatgcaaaaaccttttttgcattggtgattatctcttggggcttgttttacccttgatttctgaggctaccacggaactgtattattgcagaaacagtaaaaaaaaaaaaaaaagtatatttcaagaatgctgtcttagagatggaatgcagaaggctgactcagtcctgaaattactcagaggattagccttagaaggccctcttggggacgtgaggatgacttttcactctgaggtagttgatcttctctggtatccsaagcggagaacaactcaggagaaggtaacatgtggctgtccaggctatgtcaaggtgtgttgtgccaacaagagatatttt

SEQ ID NO: 1188 - DNA, 600 bp, Chicken  19866894087556_1
ctactgatgctatttgccaccatagatggcaattcctgctgcatttcagggtgcaggcagaatgtgttcccttaaacacatatgtgggctctccgatcctgcaaggaaacatagcattgttcagtaaactgaacgagaccactgatgtgcctcactgcaccagtgcacagctgcatccattatggaggctgctggctggcaattccaagggtaatggcagtaacccagtctaatacagctcctcagcagtgtgagaggtgatgggagaagatgaggaaatttctttcccaagcctgttcyttctctgcattctgaagtttgagatttccattcccccattcacagatataatgacatgctcttaatggctgtaaaattactgagctcttttttaactccagcaacagcatatcactctctgacctcctgcagtagtgaattacatgaactgactacacagtacatcaggtgtgggtgttttttttccttttaacctgtattacatttacctaaccattaatctaatggaataacaccrtagttttcatattatgggataagacaagaagagcaagaaattgcttttcagtatacctctta

SEQ ID NO: 1189 - DNA, 600 bp, Chicken  19866894087556_2
ctcctcagcagtgtgagaggtgatgggagaagatgaggaaatttctttcccaagcctgttcyttctctgcattctgaagtttgagatttccattcccccattcacagatataatgacatgctcttaatggctgtaaaattactgagctcttttttaactccagcaacagcatatcactctctgacctcctgcagtagtgaattacatgaactgactacacagtacatcaggtgtgggtgttttttttccttttaacctgtattacatttacctaaccattaatctaatggaataacaccrtagttttcatattatgggataagacaagaagagcaagaaattgcttttcagtatacctcttataattctaaaatactcctgccattaacattcctccccaggctaagtatcctctgagaattctggccacatggggtagtcatagacaaaccccatttaggccttcaatagcctttgtttcccttcaatttttcaatctcaattaaacgttgacatcttccctggtgtgaaatgacccagaacatacagtgatacagtctaagtatatccaggctaaatttggccagatctttctgtaca

SEQ ID NO: 1190 - DNA, 600 bp, Chicken  19866894087573_1
cttcagtaatacctttcagtagatttcctatgctagtaaaagttagtgagttctttatactaaccttttattttatctttcattggcattatataatctttttatatttttagttaatcttgaattaattattaacgtgtgaagctcaaggtgttctgtgtcaaaaggaaactaatgtgttcactgttggaattaacagtgacacttctttttcagttcagattttaatgatcaaaaatttgttgcagagaacttctgtagtcaagattcgtgttctgaattggtaatatttgaagatarctggtatcaacttctggtttatttagttctgtagraaaaaaatagaattgcttgatgtttctctaatgaacatgtgtatagagaaataagctaggtgcctttatccctgaatttgagcaatagattagtgtgccttatatgtaaaagcctataaggtggctgcttggtggacctgtgctgaattactagagcacataaagtatcaattgagaggaatgctgttggcatctgaatcrtggtcagtgttgaaaggcaactaaaaacgctttgaaggagactgttttaatatgcatactgagg

SEQ ID NO: 1191 - DNA, 353 bp, Chicken  19866894087573_10
gtgaaatgaagaccaaggaaatggccacagtataatgctgatagttctgatgtgattttcagttgatggttaatagacagctccataagagaatattttctttaaatatttgaagttctttgggcctgtcatgttagtccatacrtagctttatctactccactgcaagttcatattctaaataaactatgtatatacacatatataaatgtacatacagtagactcatgcacagaataattgtcttctacttctgggaaaaaatatgaaataccttattaatttcaatgttaaaaatcwaaagacttcaaatctagatttttttttccagctaaaaattgcatatcgtgtaa

SEQ ID NO: 1192 - DNA, 600 bp, Chicken  19866894087573_2
gtaaaagttagtgagttctttatactaaccttttattttatctttcattggcattatataatctttttatatttttagttaatcttgaattaattattaacgtgtgaagctcaaggtgttctgtgtcaaaaggaaactaatgtgttcactgttggaattaacagtgacacttctttttcagttcagattttaatgatcaaaaatttgttgcagagaacttctgtagtcaagattcgtgttctgaattggtaatatttgaagatarctggtatcaacttctggtttatttagttctgtagraaaaaaatagaattgcttgatgtttctctaatgaacatgtgtatagagaaataagctaggtgcctttatccctgaatttgagcaatagattagtgtgccttatatgtaaaagcctataaggtggctgcttggtggacctgtgctgaattactagagcacataaagtatcaattgagaggaatgctgttggcatctgaatcrtggtcagtgttgaaaggcaactaaaaacgctttgaaggagactgttttaatatgcatactgaggaaagtggattgcattgtattaaaaaaaaaaaaaaa

SEQ ID NO: 1193 - DNA, 600 bp, Chicken  19866894087573_3
taaaagttagtgagttctttatactaaccttttattttatctttcattggcattatataatctttttatatttttagttaatcttgaattaattattaacgtgtgaagctcaaggtgttctgtgtcaaaaggaaactaatgtgttcactgttggaattaacagtgacacttctttttcagttcagattttaatgatcaaaaatttgttgcagagaacttctgtagtcaagattcgtgttctgaattggtaatatttgaagatarctggtatcaacttctggtttatttagttctgtagrraaaaaatagaattgcttgatgtttctctaatgaacatgtgtatagagaaataagctaggtgcctttatccctgaatttgagcaatagattagtgtgccttatatgtaaaagcctataaggtggctgcttggtggacctgtgctgaattactagagcacataaagtatcaattgagaggaatgctgttggcatctgaatcrtggtcagtgttgaaaggcaactaaaaacgctttgaaggagactgttttaatatgcatactgaggaaagtggattgcattgtattaaaaaaaaaaaaaaac

SEQ ID NO: 1194 - DNA, 600 bp, Chicken  19866894087573_4
aatttgttgcagagaacttctgtagtcaagattcgtgttctgaattggtaatatttgaagatarctggtatcaacttctggtttatttagttctgtagraaaaaaatagaattgcttgatgtttctctaatgaacatgtgtatagagaaataagctaggtgcctttatccctgaatttgagcaatagattagtgtgccttatatgtaaaagcctataaggtggctgcttggtggacctgtgctgaattactagagcacataaagtatcaattgagaggaatgctgttggcatctgaatcrtggtcagtgttgaaaggcaactaaaaacgctttgaaggagactgttttaatatgcatactgaggaaagtggattgcattgtattaaaaaaaaaaaaaaacctgaagatacaaaggtgatagctgtaaagacgaacaaaaaaaggcatttgatatggaatgaaacatactgtagcaaataagagttggagataagaytgtgggaatagatgtgaaacaaggccagatctgaaacagagaaatgcagccaatctgttctcaatgttcttcggcttatgagtggtttaggtcaaatttgtctg

SEQ ID NO: 1195 - DNA, 600 bp, Chicken  19866894087573_5
ccttatatgtaaaagcctataaggtggctgcttggtggacctgtgctgaattactagagcacataaagtatcaattgagaggaatgctgttggcatctgaatcrtggtcagtgttgaaaggcaactaaaaacgctttgaaggagactgttttaatatgcatactgaggaaagtggattgcattgtattaaaaaaaaaaaaaaacctgaagatacaaaggtgatagctgtaaagacgaacaaaaaaaggcatttgatatggaatgaaacatactgtagcaaataagagttggagataagaytgtgggaatagatgtgaaacaaggccagatctgaaacagagaaatgcagccaatctgttctcaatgttcttcggcttatgagtggtttaggtcaaatttgtctgttgtgtttgtcatgtgacgagcagcggtgtttgccattatgccaggtgatcctcatttctagtgttagaggttggcattaactgattgtctgtgggtccagggctgcagctcagttcctttttacagtagagcaatggaacttgaagagagctattgtcatctcatgcttctgaattgctcccagatctctctttt

SEQ ID NO: 1196 - DNA, 600 bp, Chicken  19866894087573_6
tctgaattgctcccagatctctcttttccttcagttttctcgggtaaatagtgtatttctttttccttacagctttttccttacaaatatattgtgacacagtttgtggggttaggtggattggtagcacctgaaatagatccttgaaaacatggataagaaattatctttactgcgttggatgtgatggagacggaattgtgatggagaaggaattaagtgtttggaggccagtatgctaattagagaagtctaccatgtgggattttaatagaacaataacactatagcaaataaatkaaagatttctcagaatttataggagtttagttagatctacttttttcccagtaacgttctttacaaagcatcaaaaatgcataatagcaaactgtagatttaaaaactgcatagcagtttagtgctctgaagatcctggcatgtagcaagtcattcttgacagcttttctgataaatgcatccctaataaaactaaataatggggtatttactgtgggtaaagataatttcaacatgcctgctcttgtagagcctgttagtagctggggatcagagataataatgacaaaactcttggcc

SEQ ID NO: 1197 - DNA, 600 bp, Chicken  19866894087573_7
ctgaagatcctggcatgtagcaagtcattcttgacagcttttctgataaatgcatccctaataaaactaaataatggggtatttactgtgggtaaagataatttcaacatgcctgctcttgtagagcctgttagtagctggggatcagagataataatgacaaaactcttggcctacttgttttctatttttgaaaaaggaattaaaatattgaaatagaaatttgaataggaattagcttacatacagctgaaataagaaggaaaattttaaaagatacgtattttactcaaaataaawttccgaacatgaagctgattggagtataaatagatgcagaaatatgtgttagtatgtatgtktatgtatttagatatagatacgctaattagcttcaagtaccttatcgtgtgtagtagtaaacatactggagctgtttagtgagtgaaatgaagaccaaggaaatggccacagtataatgctgatagttctgatgtgattttcagttgatggttaatagacagctccataagagaatattttctttaaatatttgaagttctttgggcctgtcatgttagtccatacrtagctttatct

SEQ ID NO: 1198 - DNA, 600 bp, Chicken  19866894087573_8
aaaactaaataatggggtatttactgtgggtaaagataatttcaacatgcctgctcttgtagagcctgttagtagctggggatcagagataataatgacaaaactcttggcctacttgttttctatttttgaaaaaggaattaaaatattgaaatagaaatttgaataggaattagcttacatacagctgaaataagaaggaaaattttaaaagatacgtattttactcaaaataaawttccgaacatgaagctgattggagtataaatagatgcagaaatatgtgttagtatgtatgtktatgtatttagatatagatacgctaattagcttcaagtaccttatcgtgtgtagtagtaaacatactggagctgtttagtgagtgaaatgaagaccaaggaaatggccacagtataatgctgatagttctgatgtgattttcagttgatggttaatagacagctccataagagaatattttctttaaatatttgaagttctttgggcctgtcatgttagtccatacrtagctttatctactccactgcaagttcatattctaaataaactatgtatatacacatatataaatgtacatac

SEQ ID NO: 1199 - DNA, 508 bp, Chicken  19866894087573_9
tcaaaataaawttccgaacatgaagctgattggagtataaatagatgcagaaatatgtgttagtatgtatgtktatgtatttagatatagatacgctaattagcttcaagtaccttatcgtgtgtagtagtaaacatactggagctgtttagtgagtgaaatgaagaccaaggaaatggccacagtataatgctgatagttctgatgtgattttcagttgatggttaatagacagctccataagagaatattttctttaaatatttgaagttctttgggcctgtcatgttagtccatacrtagctttatctactccactgcaagttcatattctaaataaactatgtatatacacatatataaatgtacatacagtagactcatgcacagaataattgtcttctacttctgggaaaaaatatgaaataccttattaatttcaatgttaaaaatcwaaagacttcaaatctagatttttttttccagctaaaaattgcatatcgtgtaa

SEQ ID NO: 1200 - DNA, 600 bp, Chicken  19866894087579_1
gacaaaaccagaaatgtactcaggagacacagaagtaggatcatgctggtttgaacagctcaaacacatataacattctcaggagctatagtaactagcccagaagagaagtggtaggtgaaggagaaagggagatagaagaaatagaggaaaacatggctttttcctgttcccacagtcttgctttctgaggagacaatggaaaaaagagtaagtcttaatagtaccagagcgatggctccctaagtacaaagatgatgacaatgtggagtgtaaacaccagataagtctcccaagagrctcatcataagccaatgttccatgtcatagcaaaacrataaccttattcctgttcctctgaaatggtaaactgcacaacagagaacatttagagaaagttagatgcgaaataaaatcatttctagaaaacacactgaaagacttccaaaaataattaaaaagctgacactgtgccttgaagctattaacccactataacacatataagaactctttttaagcagacttcgataagacctgtgttatctcagcctcttaggctgcacactaggttccaaaaagcactgctgtgttataaac

SEQ ID NO: 1201 - DNA, 600 bp, Chicken  19866894087579_2
ggatcatgctggtttgaacagctcaaacacatataacattctcaggagctatagtaactagcccagaagagaagtggtaggtgaaggagaaagggagatagaagaaatagaggaaaacatggctttttcctgttcccacagtcttgctttctgaggagacaatggaaaaaagagtaagtcttaatagtaccagagcgatggctccctaagtacaaagatgatgacaatgtggagtgtaaacaccagataagtctcccaagagrctcatcataagccaatgttccatgtcatagcaaaacrataaccttattcctgttcctctgaaatggtaaactgcacaacagagaacatttagagaaagttagatgcgaaataaaatcatttctagaaaacacactgaaagacttccaaaaataattaaaaagctgacactgtgccttgaagctattaacccactataacacatataagaactctttttaagcagacttcgataagacctgtgttatctcagcctcttaggctgcacactaggttccaaaaagcactgctgtgttataaactggcagcagctcagagcacaccatacgttcgttattc

SEQ ID NO: 1202 - DNA, 600 bp, Chicken  19866894087582_1
tatcgccagaaactggggaatgagcaccccaaatattagttctttaacagaaaaagcaccatgcctccagctgctcaacagtcacaagactacagcctggctggtagccaggggcactcctggtcacatatctgtggtgcctggtggcaaggtccatgttacagggagaatggacctgctctcacatctctcccacataaccttcagcatgcacactgagcaccagcagggaggagcaggctttggcacagtggaaagtgaccaggagcaagcattacctgcactccagccctcagcagwgcagcccctcagtgacagcaaaggcagagttccaaggtcattatcagcctgtcattacatccctggaagagtttagtgttgtagaaagccttgcagctgaaaaattatcaaggccaccctgccaaggtacaggcagttgtaatacatgcaatttgctccctccagatagctgcagcctctgagcatgctccccatgctctccgggccaacttttggatcagctttgcagacgtgaatctgttaaccattcccctcagcttcctcccaggcatcgtgcacttctcagaattcctcccagtt

SEQ ID NO: 1203 - DNA, 600 bp, Chicken  19866894087585_1
cataaagaaaaaagctgaagtttagttcagaagacagttatgagaaaaggcaactgtttcctttagtgtccccttacgtagtcgctgtttggttgtctgactttagctaaggattaatggtattagtagcgtttttgtctagaagtgctgttgcacaatgacttttgtgtagattaaactcctgctgagaatgacgtcagaagtgcctgagaattaaaagctctctgactcgtggctaggtatggctgtggagcatctgagaacttctcaggctggagaactgttaaatgaggcactgcrtcaggtctgctcagtggggaaacaagtctaagcacctascgtggtcattatgtcgcaacttgaaaatggagagtaagaaataaatggaraaaactctccaggctaccttgttacatcagttggtggtgggttttgttgggtttttttccttttgtgtagctggaacaccagaaaataggtttctggtgaaatattcccattcccttgtatggcatgtcytcagtactaacagtgttctcctgttaataatgcactcccactctctataatcttcatcatctgggcgagagagaaattgtc

SEQ ID NO: 1204 - DNA, 600 bp, Chicken  19866894087585_2
atgagaaaaggcaactgtttcctttagtgtccccttacgtagtcgctgtttggttgtctgactttagctaaggattaatggtattagtagcgtttttgtctagaagtgctgttgcacaatgacttttgtgtagattaaactcctgctgagaatgacgtcagaagtgcctgagaattaaaagctctctgactcgtggctaggtatggctgtggagcatctgagaacttctcaggctggagaactgttaaatgaggcactgcrtcaggtctgctcagtggggaaacaagtctaagcacctascgtggtcattatgtcgcaacttgaaaatggagagtaagaaataaatggaraaaactctccaggctaccttgttacatcagttggtggtgggttttgttgggtttttttccttttgtgtagctggaacaccagaaaataggtttctggtgaaatattcccattcccttgtatggcatgtcytcagtactaacagtgttctcctgttaataatgcactcccactctctataatcttcatcatctgggcgagagagaaattgtctatgtatagcgaatgcaggatgttccctccggcgtgcat

SEQ ID NO: 1205 - DNA, 600 bp, Chicken  19866894087585_3
tggttgtctgactttagctaaggattaatggtattagtagcgtttttgtctagaagtgctgttgcacaatgacttttgtgtagattaaactcctgctgagaatgacgtcagaagtgcctgagaattaaaagctctctgactcgtggctaggtatggctgtggagcatctgagaacttctcaggctggagaactgttaaatgaggcactgcrtcaggtctgctcagtggggaaacaagtctaagcacctascgtggtcattatgtcgcaacttgaaaatggagagtaagaaataaatggaraaaactctccaggctaccttgttacatcagttggtggtgggttttgttgggtttttttccttttgtgtagctggaacaccagaaaataggtttctggtgaaatattcccattcccttgtatggcatgtcytcagtactaacagtgttctcctgttaataatgcactcccactctctataatcttcatcatctgggcgagagagaaattgtctatgtatagcgaatgcaggatgttccctccggcgtgcatcggctttgcaggactagcagttgaaatgcaatataaagatcttcctgtgt

SEQ ID NO: 1206 - DNA, 600 bp, Chicken  19866894087585_4
gctctctgactcgtggctaggtatggctgtggagcatctgagaacttctcaggctggagaactgttaaatgaggcactgcrtcaggtctgctcagtggggaaacaagtctaagcacctascgtggtcattatgtcgcaacttgaaaatggagagtaagaaataaatggaraaaactctccaggctaccttgttacatcagttggtggtgggttttgttgggtttttttccttttgtgtagctggaacaccagaaaataggtttctggtgaaatattcccattcccttgtatggcatgtcytcagtactaacagtgttctcctgttaataatgcactcccactctctataatcttcatcatctgggcgagagagaaattgtctatgtatagcgaatgcaggatgttccctccggcgtgcatcggctttgcaggactagcagttgaaatgcaatataaagatcttcctgtgttgcagggattttgcctgctcagctcagaaaggaaatccattcgctgaatcaatctgagacgctgttttcccatcaggtgtacctgcaaaggaacactgggcaagttcatcgtcttgaactatatgactta

SEQ ID NO: 1207 - DNA, 600 bp, Chicken  19866894087585_5
gaaagagcagcgtgtgctgagaaagccttgaaaatgccatacctttgagaaaagcaggtttctaattcttccatgctgtaaatctctgctgagtagcatttagactttattgacaagaggaaatggttttaagttgaaggagaaaagattgaggttggatgtcagggggaagctctttactatgagagtggtgaggtgctgaaacagctgcccagagaggctgtggatgccccgtccatccctggaggtgttcaaggccaggttggatggggccctgggcagcctgggctggtatgaaaygtggaggttggtggccctgcctgtggcagaggggttggagattcgtgatccttgaggtcccttccaacccaggccattccgtgtgtgattctgtgatcgttgataatgacaattccctgtgctttcatgctgaaaaaaatcacgtactgattgattgggtccaccagacctccatttcaccacctccacgtgcacaaaagaataacagccaaatccagtagattaaatttaataacgcaacgagtttgaaccttgtttttgctatctgaagttcaaccatttgatgacaggcaatcacga

SEQ ID NO: 1208 - DNA, 600 bp, Chicken  19866894087591_1
aatcttcttcctgaacaaaacgaccaattctgaagaagttaatgcctccagatgcccttacaaaccgcagctagctccaccatctgagcaatgtaaccacagctctgaaagaaagaaagagctagcttttgtagatggataagaactgagctttctgcatatctgcataagttttagacatgatatccataaggacaaatctcccctcccatgcaagtttttgaatcatttcacttccataacctttttaataccttgcaatctaacttcataatccatccaaagaaaacggcaagtttrtcctatgcaaacttgcacataaatttttaagctgcagtatctgaggyctgagaaacccacctcaagttttgctgcagcaaaaaaataatgataaaaaaaaaatatctgaactttaaaaagtagacctgcttgcttaggttccttctttggtcgtggtckrttctctgtagacttcctgaaacatgcttaaatactagataatttaatttataaatgatatgaatgttcttggatgacgtgcagcttttccttccttaagttatttatttcttatcattagatatctaccttttctttctg

SEQ ID NO: 1209 - DNA, 600 bp, Chicken  19866894087591_2
ccagatgcccttacaaaccgcagctagctccaccatctgagcaatgtaaccacagctctgaaagaaagaaagagctagcttttgtagatggataagaactgagctttctgcatatctgcataagttttagacatgatatccataaggacaaatctcccctcccatgcaagtttttgaatcatttcacttccataacctttttaataccttgcaatctaacttcataatccatccaaagaaaacggcaagtttrtcctatgcaaacttgcacataaatttttaagctgcagtatctgaggyctgagaaacccacctcaagttttgctgcagcaaaaaaataatgataaaaaaaaaatatctgaactttaaaaagtagacctgcttgcttaggttccttctttggtcgtggtckrttctctgtagacttcctgaaacatgcttaaatactagataatttaatttataaatgatatgaatgttcttggatgacgtgcagcttttccttccttaagttatttatttcttatcattagatatctaccttttctttctgcttgtgcaggtttatagacaagtttatttgttactttttgttaagaa

SEQ ID NO: 1210 - DNA, 600 bp, Chicken  19866894087591_3
tatctgcataagttttagacatgatatccataaggacaaatctcccctcccatgcaagtttttgaatcatttcacttccataacctttttaataccttgcaatctaacttcataatccatccaaagaaaacggcaagtttrtcctatgcaaacttgcacataaatttttaagctgcagtatctgaggyctgagaaacccacctcaagttttgctgcagcaaaaaaataatgataaaaaaaaaatatctgaactttaaaaagtagacctgcttgcttaggttccttctttggtcgtggtckrttctctgtagacttcctgaaacatgcttaaatactagataatttaatttataaatgatatgaatgttcttggatgacgtgcagcttttccttccttaagttatttatttcttatcattagatatctaccttttctttctgcttgtgcaggtttatagacaagtttatttgttactttttgttaagaagtctttttgtctcattaatcatggattaaatcaatccctgcataaaaattgcttggccccagtaacagatatgatccagatctaacaaatgtctttgaagtactggtaacat

SEQ ID NO: 1211 - DNA, 600 bp, Chicken  19866894087591_4
atctgcataagttttagacatgatatccataaggacaaatctcccctcccatgcaagtttttgaatcatttcacttccataacctttttaataccttgcaatctaacttcataatccatccaaagaaaacggcaagtttrtcctatgcaaacttgcacataaatttttaagctgcagtatctgaggyctgagaaacccacctcaagttttgctgcagcaaaaaaataatgataaaaaaaaaatatctgaactttaaaaagtagacctgcttgcttaggttccttctttggtcgtggtckrttctctgtagacttcctgaaacatgcttaaatactagataatttaatttataaatgatatgaatgttcttggatgacgtgcagcttttccttccttaagttatttatttcttatcattagatatctaccttttctttctgcttgtgcaggtttatagacaagtttatttgttactttttgttaagaagtctttttgtctcattaatcatggattaaatcaatccctgcataaaaattgcttggccccagtaacagatatgatccagatctaacaaatgtctttgaagtactggtaacatt

SEQ ID NO: 1212 - DNA, 600 bp, Chicken  19866894087592_1
aatcatttcacttccataacctttttaataccttgcaatctaacttcataatccatccaaagaaaacggcaagtttgtcatatgcaaacttgcacataaatttttaagctgcagtatctgaggcctgagaaacccacctcaagttttgctgcagcaaaaacaataatgataaaaaaaataaatctgaactttaaaaagtagacctgcttgcttaggttccttctttggtcgtggtctgttctctgtaggcttcctgaaacatgcttaaatactagataatttaatttataaatgatatgwatgttcttagatgacgtgcagcttttctttccttaagttatttatttcttatcattagatatctaccttttctttctgcttgcgcaggtttatagacaagtttatttgtgacttttttgttaagaagtctttttgtctaattaatcatggattaaatcaatccctgcataaaaattgcttggccccagtaacagccttcacacttacggaacaacagaggtgagaattcctgtgtcccttccttgacgcttgtccagtgccatacctgctgctatactgccagaactcacaccaaagtac

SEQ ID NO: 1213 - DNA, 600 bp, Chicken  19866894087605_1
tgtgtgaccaccttataaaatgatattaatatagcacttgaaaaggtattaagaaaagcagagaagctgattcatggactagaaagtatgagcttataggacctaagttcacatagcttagaatgaagatatttaaacagaaatttcaagcatagatataaaggaaacctttaaagtaggtgaagccagttggacttgccttttttgagagagagaaaatacactggggacaatagtacaagctaaagaaaaatacatatttaaaataaatttatgcactctgtcataaagagtactgargaagaaaatatccctccttagtcaaatgaagtccactccacttcatgctaaggacatgagggaggtaccttctagcgcctgaayctaggtcatatgcttcttcatacaagagacagaagaagagatcagatggaaatagtaattaaacaaagcccagaagtgcccagtggcatttttgcataccagggaggtagcagctctctgtgctttgcactgctgagagaaacgrgggatgtttttccctctgacttagcgctatctccttctgggaccaaaagccccaacaagaatttcctgggc

SEQ ID NO: 1214 - DNA, 600 bp, Chicken  19866894087605_2
agtatgagcttataggacctaagttcacatagcttagaatgaagatatttaaacagaaatttcaagcatagatataaaggaaacctttaaagtaggtgaagccagttggacttgccttttttgagagagagaaaatacactggggacaatagtacaagctaaagaaaaatacatatttaaaataaatttatgcactctgtcataaagagtactgargaagaaaatatccctccttagtcaaatgaagtccactccacttcatgctaaggacatgagggaggtaccttctagcgcctgaayctaggtcatatgcttcttcatacaagagacagaagaagagatcagatggaaatagtaattaaacaaagcccagaagtgcccagtggcatttttgcataccagggaggtagcagctctctgtgctttgcactgctgagagaaacgrgggatgtttttccctctgacttagcgctatctccttctgggaccaaaagccccaacaagaatttcctgggcaccaacttgtctccacccaagccgcgaagggtctgaaggcagacccagcagctctcctctccgtgccctcccttcctgccagca

SEQ ID NO: 1215 - DNA, 600 bp, Chicken  19866894087605_3
acaatagtacaagctaaagaaaaatacatatttaaaataaatttatgcactctgtcataaagagtactgargaagaaaatatccctccttagtcaaatgaagtccactccacttcatgctaaggacatgagggaggtaccttctagcgcctgaayctaggtcatatgcttcttcatacaagagacagaagaagagatcagatggaaatagtaattaaacaaagcccagaagtgcccagtggcatttttgcataccagggaggtagcagctctctgtgctttgcactgctgagagaaacgrgggatgtttttccctctgacttagcgctatctccttctgggaccaaaagccccaacaagaatttcctgggcaccaacttgtctccacccaagccgcgaagggtctgaaggcagacccagcagctctcctctccgtgccctcccttcctgccagcactgggttacggctgtaatctaacccaaagtgagtccctatctgctaaaataaaagagtgcaaccttcaagtgctcattcatttcttttaaccaccacttttcaacattaaggattattaactttaatgccattggtgagaaactt

SEQ ID NO: 1216 - DNA, 368 bp, Chicken  19866894087605_4
aatttcctgggcaccaacttgtctccacccaagccgcgaagggtctgaaggcagacccagcagctctcctctccgtgccctcccttcctgccagcactgggttacggctgtaatctaacccaaagtgagtccctatctgctaaaataaaagagtgcaaccttcaagtgctcattcatttcttttaaccaccacttttcaacattaaggattattaactttaatgccattggtgagaaactttattatgttttcaagaaattgctttaaatcaaaactgcagataaggcatttttctcccytcagaattacatgggttgtgttggcaaccagcaggaatccatttgagcaatagaattaccacctcctg

SEQ ID NO: 1217 - DNA, 600 bp, Chicken  19866894087610_1
ttactgttgcacttcccaagaacaatttgtgtgtgcatgaaaagaccaccactacatttattccactgccttaccagtacccacaacaggacttggaaaagcccactcctcatgactgtaattcatggagtgagccatctgaacatccatgacactagaatgctgctgggctacttcttacccttttgatgtcacatctgagacaacacagggaaaagcagcaaagttgcctataagcaagtcccatgaccaaggcatagatacgcagctcagatgcaggtggctcaatttctgtgatgyaagactgaatttagatctttgacttctacaaacggcagtagagcacctcttcagactacargacgctaaagcatattaggcaaaacacgtcaatkagattttcagagatcttgcttatactttcctaatcttatttgatcatagatccctttacatagccttcatagcatcaagacctgtttcacatcaggctaagttgcacaggtaattattttattaatgtacccmtgtccgtaattcataatcgtatgccagrgtttcagtatgttagtttatgaatgaacatacaattggaaggag

SEQ ID NO: 1218 - DNA, 600 bp, Chicken  19866894087610_2
tccactgccttaccagtacccacaacaggacttggaaaagcccactcctcatgactgtaattcatggagtgagccatctgaacatccatgacactagaatgctgctgggctacttcttacccttttgatgtcacatctgagacaacacagggaaaagcagcaaagttgcctataagcaagtcccatgaccaaggcatagatacgcagctcagatgcaggtggctcaatttctgtgatgyaagactgaatttagatctttgacttctacaaacggcagtagagcacctcttcagactacargacgctaaagcatattaggcaaaacacgtcaatkagattttcagagatcttgcttatactttcctaatcttatttgatcatagatccctttacatagccttcatagcatcaagacctgtttcacatcaggctaagttgcacaggtaattattttattaatgtacccmtgtccgtaattcataatcgtatgccagrgtttcagtatgttagtttatgaatgaacatacaattggaaggagatttcctgctccagagagcttattatataagatgggagagagagaaagggaaacacagcyg

SEQ ID NO: 1219 - DNA, 600 bp, Chicken  19866894087610_3
gaaaagcccactcctcatgactgtaattcatggagtgagccatctgaacatccatgacactagaatgctgctgggctacttcttacccttttgatgtcacatctgagacaacacagggaaaagcagcaaagttgcctataagcaagtcccatgaccaaggcatagatacgcagctcagatgcaggtggctcaatttctgtgatgyaagactgaatttagatctttgacttctacaaacggcagtagagcacctcttcagactacargacgctaaagcatattaggcaaaacacgtcaatkagattttcagagatcttgcttatactttcctaatcttatttgatcatagatccctttacatagccttcatagcatcaagacctgtttcacatcaggctaagttgcacaggtaattattttattaatgtacccmtgtccgtaattcataatcgtatgccagrgtttcagtatgttagtttatgaatgaacatacaattggaaggagatttcctgctccagagagcttattatataagatgggagagagagaaagggaaacacagcygaaagaaattggcaagacaataaaaactagcaata

SEQ ID NO: 1220 - DNA, 600 bp, Chicken  19866894087610_4
gcctataagcaagtcccatgaccaaggcatagatacgcagctcagatgcaggtggctcaatttctgtgatgyaagactgaatttagatctttgacttctacaaacggcagtagagcacctcttcagactacargacgctaaagcatattaggcaaaacacgtcaatkagattttcagagatcttgcttatactttcctaatcttatttgatcatagatccctttacatagccttcatagcatcaagacctgtttcacatcaggctaagttgcacaggtaattattttattaatgtacccmtgtccgtaattcataatcgtatgccagrgtttcagtatgttagtttatgaatgaacatacaattggaaggagatttcctgctccagagagcttattatataagatgggagagagagaaagggaaacacagcygaaagaaattggcaagacaataaaaactagcaatataggaagtacttacagtgtactgacatcctgatatttgtcccctttcgtaggtgtggggaaaagaaatttacagggatttgaaggaaagcagattcacagatgtgcaaaagctattttgaagcatgaaaatca

SEQ ID NO: 1221 - DNA, 600 bp, Chicken  19866894087610_5
atagatacgcagctcagatgcaggtggctcaatttctgtgatgyaagactgaatttagatctttgacttctacaaacggcagtagagcacctcttcagactacargacgctaaagcatattaggcaaaacacgtcaatkagattttcagagatcttgcttatactttcctaatcttatttgatcatagatccctttacatagccttcatagcatcaagacctgtttcacatcaggctaagttgcacaggtaattattttattaatgtacccmtgtccgtaattcataatcgtatgccagrgtttcagtatgttagtttatgaatgaacatacaattggaaggagatttcctgctccagagagcttattatataagatgggagagagagaaagggaaacacagcygaaagaaattggcaagacaataaaaactagcaatataggaagtacttacagtgtactgacatcctgatatttgtcccctttcgtaggtgtggggaaaagaaatttacagggatttgaaggaaagcagattcacagatgtgcaaaagctattttgaagcatgaaaatcaaaacagaaaaatgggatttaaatcattc

SEQ ID NO: 1222 - DNA, 600 bp, Chicken  19866894087610_6
rgacgctaaagcatattaggcaaaacacgtcaatkagattttcagagatcttgcttatactttcctaatcttatttgatcatagatccctttacatagccttcatagcatcaagacctgtttcacatcaggctaagttgcacaggtaattattttattaatgtacccmtgtccgtaattcataatcgtatgccagrgtttcagtatgttagtttatgaatgaacatacaattggaaggagatttcctgctccagagagcttattatataagatgggagagagagaaagggaaacacagcygaaagaaattggcaagacaataaaaactagcaatataggaagtacttacagtgtactgacatcctgatatttgtcccctttcgtaggtgtggggaaaagaaatttacagggatttgaaggaaagcagattcacagatgtgcaaaagctattttgaagcatgaaaatcaaaacagaaaaatgggatttaaatcattcagtaccagaggtaccgttaaacccattcacagcctttcctttacggaggaagatgggttttttgtttgatgcaataagcaaaactgtaccatctcagaaatgga

SEQ ID NO: 1223 - DNA, 599 bp, Chicken  19866894087618_1
  misc_feature (1)..(89): n is any nucleotide
nnnnnnnnnnnnnnnnnnnnnnnnnnnnnnnnnnnnnnnnnnnnnnnnnnnnnnnnnnnnnnnnnnnnnnnnnnnnnnnnnnnnnnnnncacgttaggatttggagacacgtgaagccaaggagcttctgagggcagaaacccacacagaaggacctctgtcctgtgctgcatttactgccgagcccaaaattacaaagtatgaacatctttgggattaggccgcttccacacgctttatgtaaagccaaagcttttatttaaaataaataccttacaatcatatcatagaatcacagawtggcctgggttggaaaagaccacaatgctcatcagttccaaccccctgctatgtgcagggtcgccaaccagcagmccaggctgcccrgagccacatccagcctggccttgaatgcctgcagggatggggcatccacagcctccttgggtgaggcaaaggaaagcagyatgtgtacacaaggcaaaacactggagggaaataaaaagctaaatacaaaagctgtctctttaccaagagtgcgaaggattctgttcatccccgtcggctcagtctctggaatgctctccaaatactccaag

SEQ ID NO: 1224 - DNA, 599 bp, Chicken  19866894087618_2
  misc_feature (1)..(14): n is any nucleotide
nnnnnnnnnnnnnncacgttaggatttggagacacgtgaagccaaggagcttctgagggcagaaacccacacagaaggacctctgtcctgtgctgcatttactgccgagcccaaaattacaaagtatgaacatctttgggattaggccgcttccacacgctttatgtaaagccaaagcttttatttaaaataaataccttacaatcatatcatagaatcacagawtggcctgggttggaaaagaccacaatgctcatcagttccaaccccctgctatgtgcagggtcgccaaccagcagmccaggctgcccrgagccacatccagcctggccttgaatgcctgcagggatggggcatccacagcctccttgggtgaggcaaaggaaagcagyatgtgtacacaaggcaaaacactggagggaaataaaaagctaaatacaaaagctgtctctttaccaagagtgcgaaggattctgttcatccccgtcggctcagtctctggaatgctctccaaatactccaaggcacggacttcaaaaagscctacaagagagggagcagcacacagctgggtgagatcctcctcctcaggcattaac

SEQ ID NO: 1225 - DNA, 599 bp, Chicken  19866894087618_3
  misc_feature (1)..(2): n is any nucleotide
nncacgttaggatttggagacacgtgaagccaaggagcttctgagggcagaaacccacacagaaggacctctgtcctgtgctgcatttactgccgagcccaaaattacaaagtatgaacatctttgggattaggccgcttccacacgctttatgtaaagccaaagcttttatttaaaataaataccttacaatcatatcatagaatcacagawtggcctgggttggaaaagaccacaatgctcatcagttccaaccccctgctatgtgcagggtcgccaaccagcagmccaggctgcccrgagccacatccagcctggccttgaatgcctgcagggatggggcatccacagcctccttgggtgaggcaaaggaaagcagyatgtgtacacaaggcaaaacactggagggaaataaaaagctaaatacaaaagctgtctctttaccaagagtgcgaaggattctgttcatccccgtcggctcagtctctggaatgctctccaaatactccaaggcacggacttcaaaaagscctacaagagagggagcagcacacagctgggtgagatcctcctcctcaggcattaacatygtgtgggtg

SEQ ID NO: 1226 - DNA, 600 bp, Chicken  19866894087618_4
ctgcatttactgccgagcccaaaattacaaagtatgaacatctttgggattaggccgcttccacacgctttatgtaaagccaaagcttttatttaaaataaataccttacaatcatatcatagaatcacagawtggcctgggttggaaaagaccacaatgctcatcagttccaaccccctgctatgtgcagggtcgccaaccagcagmccaggctgcccrgagccacatccagcctggccttgaatgcctgcagggatggggcatccacagcctccttgggtgaggcaaaggaaagcagyatgtgtacacaaggcaaaacactggagggaaataaaaagctaaatacaaaagctgtctctttaccaagagtgcgaaggattctgttcatccccgtcggctcagtctctggaatgctctccaaatactccaaggcacggacttcaaaaagscctacaagagagggagcagcacacagctgggtgagatcctcctcctcaggcattaacatygtgtgggtgaggttgtgtgcgggaccaaagccaggaaggagacaaaggcatctttttttgcttaataagattaactttactgaataacta

SEQ ID NO: 1227 - DNA, 501 bp, Chicken  19866894087618_5
gaccacaatgctcatcagttccaaccccctgctatgtgcagggtcgccaaccagcagmccaggctgcccrgagccacatccagcctggccttgaatgcctgcagggatggggcatccacagcctccttgggtgaggcaaaggaaagcagyatgtgtacacaaggcaaaacactggagggaaataaaaagctaaatacaaaagctgtctctttaccaagagtgcgaaggattctgttcatccccgtcggctcagtctctggaatgctctccaaatactccaaggcacggacttcaaaaagscctacaagagagggagcagcacacagctgggtgagatcctcctcctcaggcattaacatygtgtgggtgaggttgtgtgcgggaccaaagccaggaaggagacaaaggcatctttttttgcttaataagattaactttactgaataactaaaagggcatggagctattacatatgccaacaggaaaactcgctggggcaaa

SEQ ID NO: 1228 - DNA, 441 bp, Chicken  19866894087618_6
aggctgcccrgagccacatccagcctggccttgaatgcctgcagggatggggcatccacagcctccttgggtgaggcaaaggaaagcagyatgtgtacacaaggcaaaacactggagggaaataaaaagctaaatacaaaagctgtctctttaccaagagtgcgaaggattctgttcatccccgtcggctcagtctctggaatgctctccaaatactccaaggcacggacttcaaaaagscctacaagagagggagcagcacacagctgggtgagatcctcctcctcaggcattaacatygtgtgggtgaggttgtgtgcgggaccaaagccaggaaggagacaaaggcatctttttttgcttaataagattaactttactgaataactaaaagggcatggagctattacatatgccaacaggaaaactcgctggggcaaa

SEQ ID NO: 1229 - DNA, 600 bp, Chicken  19866894087619_1
tattagatcatttcccgccccgctccctcaatttaacgtatgtaaatgcttgcccaatttacattttagaacagatacacattttccagtcagcaatagaagtttttcatggacaaaatgacacttttgtcatttatgaagaaaaaatcttatatggcttaagggaaataacaaagatatttcatttatgtgatattcttacttcatcaaaaagcattaagaattaaagtacagattcactttattaaagacagagtaaaggacaaagatcagtattctaaaggtcacattatcttaacraagtgcccccttctgacagtgtgacattgatactgaagttaaygaaaagtactctatgagatccatgccctccgcactctaaacaaagaaattagtgagcttcttcaaatgtcacacagactgtgctggtttttgccagtggccgtagatatcaaagaaaactctgggcatggcagcaggctattacattttggttagcagtttaaaaaaaacaaaaaatgactgggccactactgttgcatagagtttataaatacaagttcctctcctccccctcttttcagaatatgttttgttgaa

SEQ ID NO: 1230 - DNA, 600 bp, Chicken  19866894087619_2
aaatgcttgcccaatttacattttagaacagatacacattttccagtcagcaatagaagtttttcatggacaaaatgacacttttgtcatttatgaagaaaaaatcttatatggcttaagggaaataacaaagatatttcatttatgtgatattcttacttcatcaaaaagcattaagaattaaagtacagattcactttattaaagacagagtaaaggacaaagatcagtattctaaaggtcacattatcttaacraagtgcccccttctgacagtgtgacattgatactgaagttaaygaaaagtactctatgagatccatgccctccgcactctaaacaaagaaattagtgagcttcttcaaatgtcacacagactgtgctggtttttgccagtggccgtagatatcaaagaaaactctgggcatggcagcaggctattacattttggttagcagtttaaaaaaaacaaaaaatgactgggccactactgttgcatagagtttataaatacaagttcctctcctccccctcttttcagaatatgttttgttgaagaaatgctatctccttttaacacacatgaaaagcgacagcatt

SEQ ID NO: 1231 - DNA, 600 bp, Chicken  19866894087626_1
atcatatggaaagctctttgaagagatctccttaaggactgaaatgactggaaacaatgcaaacagagtccatataggagagtttataaggacatcataaagatgaaaatcgtaatggaaatgctttccccatgcaatgaccaacaccgccatgtggtgtttaatatattctgtcattaaaagaatttttgcaaaccaaattcacttttatgcatactccatatttccttcagttcaggcagtgaagcccacatggttctttcaggtagtttgatgttcttatgcctgattacagcgctkactcgtttattcctaccgccctgaactaggctgtgtctttaggcacagccctgagcaagacgagcagcgtgggctgaagcaccacaaaagcagcccttggaggcactgtgcctcaaggatcctcctcttctgctcatatgaaaacaagaggcaggaagaaaatttacatcatgtcttcaaaaatagtatctgactgccttgctcgcagtggccagctattctgcctatggagtaagcgggtgaagacagagcacttttggatggtattaacttctacatgcatttcatttcccctctcca

SEQ ID NO: 1232 - DNA, 600 bp, Chicken  19866894087626_2
ccgccatgtggtgtttaatatattctgtcattaaaagaatttttgcaaaccaaattcacttttatgcatactccatatttccttcagttcaggcagtgaagcccacatggttctttcaggtagtttgatgttcttatgcctgattacagcgctkactcgtttattcctaccgccctgaactaggctgtgtctttaggcacagccctgagcaagacgagcagcgtgggctgaagcaccacaaaagcagcccttggaggcactgtgcctcaaggatcctcctcttctgctcatatgaaaackagaggcaggaagaaaatttacatcatgtcttcaaaaatagtatctgactgccttgctcgcagtggccagctattctgcctatggagtaagcgggtgaagacagagcacttttggatggtattaacttctacatgcatttcatttcccctctccaagattgcttacaarcytggacctgctcttaggatcccaggagacttgctctccttttcaccaatgaaatggaaggaataggctacatcacaacacaatgagtgttgcgatgtgggataaaataggcctttgggcctcaactcccac

SEQ ID NO: 1233 - DNA, 600 bp, Chicken  19866894087626_3
ccatgtggtgtttaatatattctgtcattaaaagaatttttgcaaaccaaattcacttttatgcatactccatatttccttcagttcaggcagtgaagcccacatggttctttcaggtagtttgatgttcttatgcctgattacagcgctkactcgtttattcctaccgccctgaactaggctgtgtctttaggcacagccctgagcaagacgagcagcgtgggctgaagcaccacaaaagcagcccttggaggcactgtgcctcaaggatcctcctcttctgctcatatgaaaacaagkggcaggaagaaaatttacatcatgtcttcaaaaatagtatctgactgccttgctcgcagtggccagctattctgcctatggagtaagcgggtgaagacagagcacttttggatggtattaacttctacatgcatttcatttcccctctccaagattgcttacaarcytggacctgctcttaggatcccaggagacttgctctccttttcaccaatgaaatggaaggaataggctacatcacaacacaatgagtgttgcgatgtgggataaaataggcctttgggcctcaactcccacttc

SEQ ID NO: 1234 - DNA, 491 bp, Chicken  19866894087626_4
accgccctgaactaggctgtgtctttaggcacagccctgagcaagacgagcagcgtgggctgaagcaccacaaaagcagcccttggaggcactgtgcctcaaggatcctcctcttctgctcatatgaaaacaagaggcaggaagaaaatttacatcatgtcttcaaaaatagtatctgactgccttgctcgcagtggccagctattctgcctatggagtaagcgggtgaagacagagcacttttggatggtattaacttctacatgcatttcatttcccctctccaagattgcttacaarcytggacctgctcttaggatcccaggagacttgctctccttttcaccaatgaaatggaaggaataggctacatcacaacacaatgagtgttgcgatgtgggataaaataggcctttgggcctcaactcccacttctaaatcctatataggaacaatatgaatgacttaatggccgttagattaattctgaa

SEQ ID NO: 1235 - DNA, 489 bp, Chicken  19866894087626_5
cgccctgaactaggctgtgtctttaggcacagccctgagcaagacgagcagcgtgggctgaagcaccacaaaagcagcccttggaggcactgtgcctcaaggatcctcctcttctgctcatatgaaaacaagaggcaggaagaaaatttacatcatgtcttcaaaaatagtatctgactgccttgctcgcagtggccagctattctgcctatggagtaagcgggtgaagacagagcacttttggatggtattaacttctacatgcatttcatttcccctctccaagattgcttacaarcytggacctgctcttaggatcccaggagacttgctctccttttcaccaatgaaatggaaggaataggctacatcacaacacaatgagtgttgcgatgtgggataaaataggcctttgggcctcaactcccacttctaaatcctatataggaacaatatgaatgacttaatggccgttagattaattctgaa

SEQ ID NO: 1236 - DNA, 600 bp, Chicken  19866894087629_1
tcagagaagaagacagtctttctcttgcaatatgataacaccaggccctgtaccagttgggagaccatggaacacgttgccagtcttggctggactgtcctaccacacccactgtatggtccacatttggcatcttctgacttccatctgcttgggccaatgaaagatggactgcgtgggcaacattttccctagcaacaaagctgtcaaagcagctgtgaagcaatgggtcatgtctgtcatgcagatttttacaagcactactctcattcatagctaatggaggctgttgagaaaaayagatttctgtagctgagaatctgctctgtcaaatagttctattgtgctctttgtatctgttatagtttccatggggataaataggaggcactacttttggagccacctatgtattaccaaggccaaacactgctcacaaaaggagcgcaagacagctttgtgaattgcaagaataccaatgtttgctttgtacgtgatgggaaaactcctcacaacctcttcccccaacatctgtgatacaaatcctcttgtttctaaccacatgcaggagacaatctgcctaaggcacagaagaaattt

SEQ ID NO: 1237 - DNA, 600 bp, Chicken  19866894087629_2
ggagtgaccacactatgcaaatggcttacgtcccagcagctatgaattccaccctgcatcatacattccccctttgagtgatctccaaggaacaccgaatctggcacggacacaccaaggaacacacttcttcccagtgagctgggagggcacacacaactgatttacagtccctgaaaggacctgctgcacacctccaagacactcaggtctgtcatctcctatggccacatccagatcttcccagcagagcccagtaagctgctaagcactgtgcaaccatttctttagacactcttmtttattccttactagaaaagcaaataagtacatctaaaacaacacagcagtccacaatgctatctttatcttttgcatcctctacagagatgtatgaatgcaggctcattttgcaccagcctgctcgtcctttggaccagaatctacatttcacacactgggagctgagtgtgagcagcgatcagtgtctttctcaggaacacgaaagaggctgcatgttccctgcatgtaccttcattgccagtgaactggaactgccagcttgggcctttctgaccacagctcagaagagcgcatccc

SEQ ID NO: 1238 - DNA, 530 bp, Chicken  19866894087630_1
cagtgctatatctaaaaagtattttaaaatctctgtaaaattgctctgtccaattaaaattcctccaaagtacagccactacaaaattacaagattatgtcatttgtatcactgttgtttctaaccacttaaatacaaatacagagtagttcagtactgtacatgaataattttgaaaacgtaccttgtttaagcctgccaccaaactgatcctccagcaatccatgaaccactaacttgtagatcatggcttgtgctctctccaaatctgccagtcctagcgctcttttaataggtgarcgcatgactgctcgcttcaccatgtgtcgcatcaggaactgcagggcagcacgcatttccacatcctcatgaacaactggagaactcgcacagtcagagttgtgaccattttctgccaggacttttggtattaacagcagttcagcatatttactacaactaagaagaacactaagcgacttcatagcaccaagataaagataagacagctgtacggctctgatttctga

SEQ ID NO: 1239 - DNA, 415 bp, Chicken  19866894087633_1
ccctctgccaaatggcatttgggtggaatggtggagattgtgatttttatttaaggtgatttattgatatcattagtaatgttccctaagtggaacccacagcaatccttttaatcttcccaccatcaccgcaaatgcaaacattttttttaataacagagtgtttgaaatatcaggttattaaagcctccacttttatatttctccctgctctctccttctgtaatgggatggaaatgataatcatggaaataaagcctccccttcagacgagagtggcagagggtgtaaaatgaacasttaagcatctattccatcactttgagccagtatgggtcttagtgtaaatgaaggaggccaacttcactcccactgcaaggaaatagaagaggatgagggtttgggtgttactttg

SEQ ID NO: 1240 - DNA, 599 bp, Chicken  19866894087634_1
  misc_feature (1)..(92): n is any nucleotide
nnnnnnnnnnnnnnnnnnnnnnnnnnnnnnnnnnnnnnnnnnnnnnnnnnnnnnnnnnnnnnnnnnnnnnnnnnnnnnnnnnnnnnnnnnnnaaaacccaccagcattagttctataaaaacataatgaaataagtcagagtattgtgcaaatactgctgctaggcatcttgtctgttgtttgaacttgggatttttaatactgatgtgggtaaaacaagatcagagcttggagattcttcttgagacgagctgtgtatgcagaacctctacagtaaatcagaggtggtgggacgtgggrtaaatgtgtgcctcagcatcgtatttttcaaaccttttggcagctactcctgcttattattatcaatttgaagttaaactgaatatttgcgttagagaaaatgtgagcttagtaggactttgatggaatgtatggtgaacgttaaatttagtgttattaaaacattcactgctaaagcatagatattttaattgactattgtcagtacctttgattgttcttgtagtattctgagtcataatgaaccataataaagtttactagagggatgtttggggcttgcctgctttacaagtgtg

SEQ ID NO: 1241 - DNA, 600 bp, Chicken  19866894087634_2
aaccttttggcagctactcctgcttattattatcaatttgaagttaaactgaatatttgcgttagagaaaatgtgagcttagtaggactttgatggaatgtatggtgaacgttaaatttagtgttattaaaacattcactgctaaagcatagatattttaattgactattgtcagtacctttgattgttcttgtagtattctgagtcataatgaaccataataaagtttactagagggatgtttggggcttgcctgctttacaagtgtgtctaaaatgttcttttccattgtgtttaccytcttgaagcctttgtcagctcatgagtatgctgtagtgcgactgctagatggaaaattgtatctctatgtaatttattctcttgtggttcaaataaatactttttttaaaaagtatgccttgttcttaggtggtgtattctgttcagtaatctgataatctgcagaagatgcagtgaaagataaagataaatcagtgtttctttttttttgaagaattctgaggtaatcatagacaagacatgcaaaaacctttataaatgaaataagcagtccttcatagttagggtgctaagcccaaa

SEQ ID NO: 1242 - DNA, 576 bp, Chicken  19866894087634_3
tctcttgtggttcaaataaatactttttttaaaaagtatgccttgttcttaggtggtgtattctgttcagtaatctgataatctgcagaagatgcagtgaaagataaagataaatcagtgtttctttttttttgaagaattctgaggtaatcatagacaagacatgcaaaaacctttataaatgaaataagcagtccttcatagttagggtgctaagcccaaacaaacaacagctccttcaaacatgcagtttaaaaagcaaagctgtgacctaccagggtacagatcagatggcatctrtgagctcctatgcagcttttgtacctatgaatgtggtctgtcagaagaacatatttgttcagcactaacacacgtgctcaattccagacaagatctggcttgtaagtacctttattgaaaagtatgagggtgtggcatgttttgataagatcaggtggaggtagatttgtgactagccattgtttcattgtagtctgaatagttgctggtaaccagttacattgtgcatcagtttccagcagctgaaactgaaataatgagtctttctttttttgg

SEQ ID NO: 1243 - DNA, 600 bp, Chicken  19866894087636_1
aacctatagtgttacaggcagacctaaaattggaacagtatttcctaaagtgaaagctgttttaggagtatttgcattatagtcgcatcataaattttggacagcaagcaggaacaggtgtttattacatgcattttttctcaaatattttaacaaatcaacagtcaacaatctacctgggcatcttctctcatgctcagagatataatttcagttcaattaaattaatagttttgcagcaaattgacaaaagctagattcctcctttgactcccaaaaagccataataggaagcactgstttttttaagcaggccagcaatgatgccgttgactatctactgctttgtcttcaagatacatcagtatcttttctgctaaagaccacacactccagaaatgtctcattcatttccagtcacattccaaaggacactgctccataaagctaccacatggatatggctatgactgttgaagagccacaacttgcaagaaatacaaatcttaaatgsaaagctcatggttctacaaaaatcctctctcagtaaagawgtaaagactatacgggttagaagcacaaagaaaacaaacaaacaaa

SEQ ID NO: 1244 - DNA, 578 bp, Chicken  19866894087636_2
ttcaattaaattaatagttttgcagcaaattgacaaaagctagattcctcctttgactcccaaaaagccataataggaagcactgstttttttaagcaggccagcaatgatgccgttgactatctactgctttgtcttcaagatacatcagtatcttttctgctaaagaccacacactccagaaatgtctcattcatttccagtcacattccaaaggacactgctccataaagctaccacatggatatggctatgactgttgaagagccacaacttgcaagaaatacaaatcttaaatgsaaagctcatggttctacaaaaatcctctctcagtaaagawgtaaagactatacgggttagaagcacaaagaaaacaaacaaacaaacaaacaaacaaacaaaaaaaggtggtgtggaggggcgggaagaaacaatcatttttgtctgttgttgcaaacagtcccaaaggcctcttttttcctctctgagaagcaccagataactactcaggggtagcagataatgctttgtccaagtggtattgtcttttaagaaagggtttagggagcagaaacaag

SEQ ID NO: 1245 - DNA, 538 bp, Chicken  19866894087636_3
tagattcctcctttgactcccaaaaagccataataggaagcactgstttttttaagcaggccagcaatgatgccgttgactatctactgctttgtcttcaagatacatcagtatcttttctgctaaagaccacacactccagaaatgtctcattcatttccagtcacattccaaaggacactgctccataaagctaccacatggatatggctatgactgttgaagagccacaacttgcaagaaatacaaatcttaaatgsaaagctcatggttctacaaaaatcctctctcagtaaagawgtaaagactatacgggttagaagcacaaagaaaacaaacaaacaaacaaacaaacaaacaaaaaaaggtggtgtggaggggcgggaagaaacaatcatttttgtctgttgttgcaaacagtcccaaaggcctcttttttcctctctgagaagcaccagataactactcaggggtagcagataatgctttgtccaagtggtattgtcttttaagaaagggtttagggagcagaaacaag

SEQ ID NO: 1246 - DNA, 600 bp, Chicken  19866894087637_1
taactaagggaacaaataattttaaatataagaagaaatctactttgtctagtaggaaagggattatgattttctttcccccattcataatttcagaagcaaggatagtcaccttacttatgcaaaactagatgaggatttcactgtttgtactttttttgtttgtttgttttgttgtttgtgtgtgtgtgtatgtgtgtgtgtgatgggagacaatcataaactgaaaaatccagaatccacaattttcaatttagcatttagacaaataatctttcaatttggagacaatgaagaaaraactcaagaaactcaagtggacaaaccactatcgttaagtaaatgactcctattcaaagagtcttcctcaggcattttcttttcatgacaagttagtatttctcatttttacatttggtgttaaattaagctttttgtctgcctgatctgacttttccactttcttcctttctcatcagatgaaatgtttttgccccaaagtgcttagatatttctgtaatatgtacagtgacaactacagtagttacttaatattttagtttaaaattcactttcccctttgacctgatgggttgtaat

SEQ ID NO: 1247 - DNA, 600 bp, Chicken  19866894087638_1
attaaatggaggacagccacctcttacttacaagcgattccagactctaattagtaggatggaaccactggagatgccagtggagactataaccccagaggtaatgcagaaatgtaccactcctgtctctgatgaccatgatgagaaatacggtgtcccgtcgcttgaagagctaggtaagttcttacaccgtttggatgttgtggaatgagtatagaagtagcctaccactgaaagcataatgcttaaaataaccacgtgaaagaggttctatttctggttaattgttagctgatgccrgttatggcaaagaagtagaacaaaaagggatgatgagctccgtgcgttttaggtgtctggtttgtttaagtgggtggtcagatggatcaaactacactaagtactgctgagcttcttgaagtacagcacagccatttttttcaagataccaaatcatcatcaagctactacagtcttgattatttctttgcattatatgtgtttggtgaccttgtgttttgtcattgatctatcgctttacaatttaatttaaaacaaaacaaagtccaaaaagcttgtcctgcaataccgtaaaagatc

SEQ ID NO: 1248 - DNA, 600 bp, Chicken  19866894087640_1
gtgcaaggagaatttgcattttagaagagtgatcctgcagtcagagcaagatttgggctgagaagaatggagagggcaggagatttttggtattttttgatggcactgtgatgtttttctcctgaaaatcccccatgtaggagactttgcaagtggcctttctgcaggtatacctgccaattagatttgtttctgttgttatatgatgccttccacagactgggctttgctaatagttttcaaaggtatagatacagaacaatagaatcacagagtcattaaagctagaagagacctctrcgatcctccagcccaaccccaactcatcccagcatacccactgaccatatccctcagtgccacatctccatggttcctgaacacctgcagtgacagtgaccccaccacctccctgggcagcctgtgccagagcctggcaggtctttcagagaatattttcctaatatccaacctgaacctcccattatctcttgggtgtggcagctaagttggtttactacaaaaatctacaaaagagtcattacctagtaaattgttcctgaccacccacatccatctaaatagtaccttggatgggga

SEQ ID NO: 1249 - DNA, 599 bp, Chicken  19866894087643_1
  misc_feature (1)..(40): n is any nucleotide
nnnnnnnnnnnnnnnnnnnnnnnnnnnnnnnnnnnnnnnnaaattgaccaaatatggattaccatatcttattattgtgaattacccacttcaaaggtacacttaatagtctatttttcagtggtggcaaagacattttttaccattaaaaagtttgcaggcaaggtttcagtcaagtctacatctagctacatcacatctttgagcctgttcagaacttcacattttcaaaggcctccatccaacagcattactccagacttacaggaaccagaaactggaaagagactgccaaaagcrtaattacaccagactatgtaaattttaaaataaaggaagcaaaacaagcatggtatgaaaattctttttacactttgttgggcacgtgtgaagcactgacatgagcctatcagaaagagwccggaataatgggaggggargagagaatgagagtaggaatacagggattaaaaaagtgcatttgtattaattattttgattgcaatggctctcaagtatatcagtgtgcagctatgcatctctatgagccatgttttgacaaagatgtctccrcaagttcgtgcagatctggagtgaaa

SEQ ID NO: 1250 - DNA, 600 bp, Chicken  19866894087643_2
gtggtggcaaagacattttttaccattaaaaagtttgcaggcaaggtttcagtcaagtctacatctagctacatcacatctttgagcctgttcagaacttcacattttcaaaggcctccatccaacagcattactccagacttacaggaaccagaaactggaaagagactgccaaaagcrtaattacaccagactatgtaaattttaaaataaaggaagcaaaacaagcatggtatgaaaattctttttacactttgttgggcacgtgtgaagcactgacatgagcctatcagaaagagwccggaataatgggaggggargagagaatgagagtaggaatacagggattaaaaaagtgcatttgtattaattattttgattgcaatggctctcaagtatatcagtgtgcagctatgcatctctatgagccatgttttgacaaagatgtctccrcaagttcgtgcagatctggagtgaaaagcactttgccataagttgaagtaggcattaatttgtgacactgtcaggcaaacaagtagctgttagctactttactatgagtcccatgaattaaatgtcactcttctgaagtgtatggga

SEQ ID NO: 1251 - DNA, 600 bp, Chicken  19866894087643_3
taccattaaaaagtttgcaggcaaggtttcagtcaagtctacatctagctacatcacatctttgagcctgttcagaacttcacattttcaaaggcctccatccaacagcattactccagacttacaggaaccagaaactggaaagagactgccaaaagcrtaattacaccagactatgtaaattttaaaataaaggaagcaaaacaagcatggtatgaaaattctttttacactttgttgggcacgtgtgaagcactgacatgagcctatcagaaagagwccggaataatgggaggggargagagaatgagagtaggaatacagggattaaaaaagtgcatttgtattaattattttgattgcaatggctctcaagtatatcagtgtgcagctatgcatctctatgagccatgttttgacaaagatgtctccrcaagttcgtgcagatctggagtgaaaagcactttgccataagttgaagtaggcattaatttgtgacactgtcaggcaaacaagtagctgttagctactttactatgagtcccatgaattaaatgtcactcttctgaagtgtatgggatacgaccgattaagtgtcat

SEQ ID NO: 1252 - DNA, 521 bp, Chicken  19866894087643_4
gaaactggaaagagactgccaaaagcrtaattacaccagactatgtaaattttaaaataaaggaagcaaaacaagcatggtatgaaaattctttttacactttgttgggcacgtgtgaagcactgacatgagcctatcagaaagagwccggaataatgggaggggargagagaatgagagtaggaatacagggattaaaaaagtgcatttgtattaattattttgattgcaatggctctcaagtatatcagtgtgcagctatgcatctctatgagccatgttttgacaaagatgtctccrcaagttcgtgcagatctggagtgaaaagcactttgccataagttgaagtaggcattaatttgtgacactgtcaggcaaacaagtagctgttagctactttactatgagtcccatgaattaaatgtcactcttctgaagtgtatgggatacgaccgattaagtgtcataccactgctccaagagcacatatattttgcttttgtaaaagcagcaaatcaagt

SEQ ID NO: 1253 - DNA, 600 bp, Chicken  19866894087653_1
ggcttgattagttttccagtgagaaaagggctccattcaagatgtatgagagaaacctctgtacattcttcgatagtaagaaaagcttcaatttacgactggaagttgccgctaaatagaaagttgtaggctctgttagtgctgatgctcatggaattatttgtctcattgaagccctgttaattaggctggcttaactgagcagtattaaaagtgttgccaagatacccatagagacgttgggtctgcagtcagaccctgctattacagcatgctgtggggatgttctgctcggccccsggttgccttacgcaggagctgcaatgtgtttcagttcttgttacagcttttcaaatggaaactgaactctatttgatgtaatatattggaaacgtttctgaatggcgtatactgaagctgtaacagatactgctatatatacttacagttgctgaactctatcgcacacgctcttgattctctttcttcccygtggactttttgacaggtaaaacaaatacagcagaaagaagttgttggactctgcagcagagctcgagagcattcatgttgtgccttggataaaggatgagcagatac

SEQ ID NO: 1254 - DNA, 600 bp, Chicken  19866894087653_2
cttaactgagcagtattaaaagtgttgccaagatacccatagagacgttgggtctgcagtcagaccctgctattacagcatgctgtggggatgttctgctcggccccsggttgccttacgcaggagctgcaatgtgtttcagttcttgttacagcttttcaaatggaaactgaactctatttgatgtaatatattggaaacgtttctgaatggcgtatactgaagctgtaacagatactgctatatatacttacagttgctgaactctatcgcacacgctcttgattctctttcttcccygtggactttttgacaggtaaaacaaatacagcagaaagaagttgttggactctgcagcagagctcgagagcattcatgttgtgccttggataaaggatgagcagatactgaaggggatgtgctgagcatgcaggggtcattacgttctatagtttaaaggaaaagaaaaaccaaagcaagaagttcaaagaaaccgccattcacataactgcacttgatgattttatcaaggaaacggtgtcatgcattaaaaattgttaagcaaactagaaacagggctcctggtttgcatttatttga

SEQ ID NO: 1255 - DNA, 599 bp, Chicken  19866894087656_1
  misc_feature (1)..(139): n is any nucleotide
nnnnnnnnnnnnnnnnnnnnnnnnnnnnnnnnnnnnnnnnnnnnnnnnnnnnnnnnnnnnnnnnnnnnnnnnnnnnnnnnnnnnnnnnnnnnnnnnnnnnnnnnnnnnnnnnnnnnnnnnnnnnnnnnnnnnnnnnnnntggattatttatagtgccactagacagggcaatgcaatcattcacacacacacacacctcatcacactcagaagcatagctgttgtttttttttgcaggaaatattaggctgaagtgattcaaagtcaaacgttgcagcgtaccaaatcccagctctaggraatgatacccaaactgccacccagcatcatgcccaaacagttctatagatgtgcacagatgaaagaaagcgtatgcaagttgccaargtgaagtggaaatgcatattattgtctctcattgtaagtacagacaagccttttatagaattaagcattscctccctgcacacaggctacagtctttatatacacaagcaggtttcattattctttgacatctgccttctcctstaaaggctgaactcacccctgctcacagccataggtactgcatgcattttacacacctccctatctca

SEQ ID NO: 1256 - DNA, 599 bp, Chicken  19866894087656_2
  misc_feature (1)..(52): n is any nucleotide
nnnnnnnnnnnnnnnnnnnnnnnnnnnnnnnnnnnnnnnnnnnnnnnnnnnntggattatttatagtgccactagacagggcaatgcaatcattcacacacacacacacctcatcacactcagaagcatagctgttgtttttttttgcaggaaatattaggctgaagtgattcaaagtcaaacgttgcagcgtaccaaatcccagctctaggraatgatacccaaactgccacccagcatcatgcccaaacagttctatagatgtgcacagatgaaagaaagcgtatgcaagttgccaargtgaagtggaaatgcatattattgtctctcattgtaagtacagacaagccttttatagaattaagcattscctccctgcacacaggctacagtctttatatacacaagcaggtttcattattctttgacatctgccttctcctstaaaggctgaactcacccctgctcacagccataggtactgcatgcattttacacacctccctatctcaggctcttggtggagctctctgaaaacaccaaagcatgaatcagagctaacaagctaacacgaggaaggattcaccaataagccactc

SEQ ID NO: 1257 - DNA, 600 bp, Chicken  19866894087656_3
actagacagggcaatgcaatcattcacacacacacacacctcatcacactcagaagcatagctgttgtttttttttgcaggaaatattaggctgaagtgattcaaagtcaaacgttgcagcgtaccaaatcccagctctaggraatgatacccaaactgccacccagcatcatgcccaaacagttctatagatgtgcacagatgaaagaaagcgtatgcaagttgccaargtgaagtggaaatgcatattattgtctctcattgtaagtacagacaagccttttatagaattaagcattscctccctgcacacaggctacagtctttatatacacaagcaggtttcattattctttgacatctgccttctcctstaaaggctgaactcacccctgctcacagccataggtactgcatgcattttacacacctccctatctcaggctcttggtggagctctctgaaaacaccaaagcatgaatcagagctaacaagctaacacgaggaaggattcaccaataagccactcaccttcaacgtcacctactgtgtgcagaagcagcatggaagtgctatttccttgttgctacaggtcaaaga

SEQ ID NO: 1258 - DNA, 600 bp, Chicken  19866894087656_4
ttgcaggaaatattaggctgaagtgattcaaagtcaaacgttgcagcgtaccaaatcccagctctaggraatgatacccaaactgccacccagcatcatgcccaaacagttctatagatgtgcacagatgaaagaaagcgtatgcaagttgccaargtgaagtggaaatgcatattattgtctctcattgtaagtacagacaagccttttatagaattaagcattscctccctgcacacaggctacagtctttatatacacaagcaggtttcattattctttgacatctgccttctcctstaaaggctgaactcacccctgctcacagccataggtactgcatgcattttacacacctccctatctcaggctcttggtggagctctctgaaaacaccaaagcatgaatcagagctaacaagctaacacgaggaaggattcaccaataagccactcaccttcaacgtcacctactgtgtgcagaagcagcatggaagtgctatttccttgttgctacaggtcaaagactcctgcaaaaccagccctgtgcatctattgcaccaggagctgtcacagcagtcacctccacacagcrcctttg

SEQ ID NO: 1259 - DNA, 600 bp, Chicken  19866894087656_5
ctcctstaaaggctgaactcacccctgctcacagccataggtactgcatgcattttacacacctccctatctcaggctcttggtggagctctctgaaaacaccaaagcatgaatcagagctaacaagctaacacgaggaaggattcaccaataagccactcaccttcaacgtcacctactgtgtgcagaagcagcatggaagtgctatttccttgttgctacaggtcaaagactcctgcaaaaccagccctgtgcatctattgcaccaggagctgtcacagcagtcacctccacacagcrcctttgcattcctgcaccaccaccagaggaarccctgagaaagyctgaaaaccagagctaccagcagcagtatgagagaacctgttttcagacagattactcaatcacttcgctgtaacaaagaacagctgcttggagaggtgattcaacccactgtaagacttcgtgatccttccttcattagtggggctgccttttaaaggcgttcatcaatcaactctttgagcggggttggtctcttctcactggtgacagggtgaggggaaatggcctccagttgcaccaggggaagtttaggtt

SEQ ID NO: 1260 - DNA, 600 bp, Chicken  19866894087656_6
agccataggtactgcatgcattttacacacctccctatctcaggctcttggtggagctctctgaaaacaccaaagcatgaatcagagctaacaagctaacacgaggaaggattcaccaataagccactcaccttcaacgtcacctactgtgtgcagaagcagcatggaagtgctatttccttgttgctacaggtcaaagactcctgcaaaaccagccctgtgcatctattgcaccaggagctgtcacagcagtcacctccacacagcrcctttgcattcctgcaccaccaccagaggaarccctgagaaagyctgaaaaccagagctaccagcagcagtatgagagaacctgttttcagacagattactcaatcacttcgctgtaacaaagaacagctgcttggagaggtgattcaacccactgtaagacttcgtgatccttccttcattagtggggctgccttttaaaggcgttcatcaatcaactctttgagcggggttggtctcttctcactggtgacagggtgaggggaaatggcctccagttgcaccaggggaagtttaggttggatatcagraaaaacttctttacagaaaggg

SEQ ID NO: 1261 - DNA, 600 bp, Chicken  19866894087656_7
tgcatgcattttacacacctccctatctcaggctcttggtggagctctctgaaaacaccaaagcatgaatcagagctaacaagctaacacgaggaaggattcaccaataagccactcaccttcaacgtcacctactgtgtgcagaagcagcatggaagtgctatttccttgttgctacaggtcaaagactcctgcaaaaccagccctgtgcatctattgcaccaggagctgtcacagcagtcacctccacacagcrcctttgcattcctgcaccaccaccagaggaarccctgagaaagyctgaaaaccagagctaccagcagcagtatgagagaacctgttttcagacagattactcaatcacttcgctgtaacaaagaacagctgcttggagaggtgattcaacccactgtaagacttcgtgatccttccttcattagtggggctgccttttaaaggcgttcatcaatcaactctttgagcggggttggtctcttctcactggtgacagggtgaggggaaatggcctccagttgcaccaggggaagtttaggttggatatcagraaaaacttctttacagaaagggttgttaagcact

SEQ ID NO: 1262 - DNA, 600 bp, Chicken  19866894087656_8
cctgcaccaccaccagaggaarccctgagaaagyctgaaaaccagagctaccagcagcagtatgagagaacctgttttcagacagattactcaatcacttcgctgtaacaaagaacagctgcttggagaggtgattcaacccactgtaagacttcgtgatccttccttcattagtggggctgccttttaaaggcgttcatcaatcaactctttgagcggggttggtctcttctcactggtgacagggtgaggggaaatggcctccagttgcaccaggggaagtttaggttggatatcagraaaaacttctttacagaaagggttgttaagcactggaatgggctcccmagggaggtggttgagtcaccatccctggttgtgttttaaaaccatttggatgtggtgctcagggacatgattgagtggagggttgttagttagggtaggatggtcaggtggtggttggactcaatgatcttcaaggtcttttccaacctgagcgattctatgattcatgtacagtctccatttcaactggcattgcttgcacgcacaccttcccatcaggtttcctcattaagcaactgcatacaggagaac

SEQ ID NO: 1263 - DNA, 600 bp, Chicken  19866894087656_9
taccagcagcagtatgagagaacctgttttcagacagattactcaatcacttcgctgtaacaaagaacagctgcttggagaggtgattcaacccactgtaagacttcgtgatccttccttcattagtggggctgccttttaaaggcgttcatcaatcaactctttgagcggggttggtctcttctcactggtgacagggtgaggggaaatggcctccagttgcaccaggggaagtttaggttggatatcagraaaaacttctttacagaaagggttgttaagcactggaatgggctcccmagggaggtggttgagtcaccatccctggttgtgttttaaaaccatttggatgtggtgctcagggacatgattgagtggagggttgttagttagggtaggatggtcaggtggtggttggactcaatgatcttcaaggtcttttccaacctgagcgattctatgattcatgtacagtctccatttcaactggcattgcttgcacgcacaccttcccatcaggtttcctcattaagcaactgcatacaggagaactcaggaaacaatctatttaagttatcttcatacagctaagtaccacat

SEQ ID NO: 1264 - DNA, 600 bp, Chicken  19866894087658_1
ctactctctacctgatgatctgtcatgaacctcagctgaaaaaacatgctgtcaaactactacactgaatataaatccattaaaggtgtgtacttggaaagggaaaggatagccatttaaattctatctctaggctgtaaattcctaaataaaagtagaagtgtgttatgaaataaagctgctccagaagtcagaatagctgaatcaaagaagtaataggactgtgttccctttgcactggaaatattcagactaggagcactcgaggaatgaaagagaatgatttgtgccactcaggawtttttcctttgtcaaagaaattcctcaggagcctttgtcattgtgtttgcagattctctgtgacagggcaactaaacaaagcatcggaaattgatgaaagcaaaggaaattgatgaacaaatcaaaacccagtacaaacagggaagaccagcttgttcctcagctgctgcaacctggaaaagctacttggaaaaggggttctgacttgacattaaggaggtgtaaaatgaagacatctttctagagttcagggagggacaaaaaagagaaacaaaaggaattagtgctgagtctagtctc

SEQ ID NO: 1265 - DNA, 600 bp, Chicken  19866894087675_1
atgctgctgttagcatactctggcatctatgctctgaaaaacaagggatgtgcaagggatgcttctcccttggactcagccacagagcagctgtggctctgacatcacagcccaaacctgagcacacagccccctccagccatgcacagcccacagcggcagcagcacattccggaggctgttccccagcccataagggaacacagcgtcccgaacaataaatgcctccaaatgtgctgcaaaaggacaattaaaatgttctgaagccaccagggcactttatgcagcagtttggcagcrgcagcttcgcaatgactcttttttttttctgctgttcctgtcctaagatttcccatgatatggtgcagctgggctcagcccacactgggaaatcaggagagataagtgcagcagtgcggccattcaggaaggatgctgtcagcactcagaggtgagctgaggtgagagttatgcaggaccaatggatgcagtggggcagaagggcattgctgaggctgcagtggggcagaattccccctgcagaactccacttcagctctgatcagtgctggtaccacacgtaccccacctcagtgacac

SEQ ID NO: 1266 - DNA, 600 bp, Chicken  19866894087686_1
tcccccagagggtggtgacgcactgtacaggttgcccaaggaggctgtggatgccccatccctggaggcattcaaggccaggatggatgtggctttgggcagcctgatctgctggttggtgaccctgcacgtagcaggggttgaaactagatgatcattatggctcttttcaacccaggccattctatgttatacccaggcttgtcgttcagctatgctgtagattccctgggtaaccccacaagggctccacagcccttctgttctttacctctcctctggtgatcacctctcctctgrtgaaatggggatatcagctttcccctaccttgctgcagtgctgttgtgctatctaacttaatgcaaatctttccagtgctacaagaagcctgatcaggcagccaggaatgctacatatttatcccatcaggaacactacccatttatccaatcagatggagatgctgtggttgtcctcaggatatgtggtattctctcttcttttcttgatctttcccctgaggctgggaaaacactgagaatatggtccaggaaaaatggttagtgttttcccatagtgttttatgactcctaagtaca

SEQ ID NO: 1267 - DNA, 599 bp, Chicken  19866894087695_1
  misc_feature (1)..(35): n is any nucleotide
nnnnnnnnnnnnnnnnnnnnnnnnnnnnnnnnnnnctatgtcgtactgcccaggccggccggcaataagctctccattggtccatggtctacagtagaatttattatattctttagaggttttcaagggggaaatatgcattttcatgcttaaaaaaaggacaagttatctgcaaagtatggacaagttctggcagtcagcacgacatgttcatagaatatgtgctgaaggaaaggcagatcatttcttagggatcataatccttttagtcctttttggttctgtgttttcttgtccgtkcttcttgyctgttggcaaactaattttccttctatttcagaggaaatgygctgaatggcagatcacaggttggtcacttggctgacattggtatgttaggctaaaaaatgcaatctttgaccctgacaaaagcaaaagtcaaccacatgtacacagtacatatacacagagtgtggaaaaaggaaaaaaggtaagagactaagccacaccactgyaaaggttataagtaaccaagcagaacaaaggtccactcttaaatgctaaagatcagtgtaactctttttatggctgataacatg

SEQ ID NO: 1268 - DNA, 599 bp, Chicken  19866894087695_2
  misc_feature (1)..(27): n is any nucleotide
nnnnnnnnnnnnnnnnnnnnnnnnnnnctatgtcgtactgcccaggccggccggcaataagctctccattggtccatggtctacagtagaatttattatattctttagaggttttcaagggggaaatatgcattttcatgcttaaaaaaaggacaagttatctgcaaagtatggacaagttctggcagtcagcacgacatgttcatagaatatgtgctgaaggaaaggcagatcatttcttagggatcataatccttttagtcctttttggttctgtgttttcttgtccgtkcttcttgyctgttggcaaactaattttccttctatttcagaggaaatgygctgaatggcagatcacaggttggtcacttggctgacattggtatgttaggctaaaaaatgcaatctttgaccctgacaaaagcaaaagtcaaccacatgtacacagtacatatacacagagtgtggaaaaaggaaaaaaggtaagagactaagccacaccactgyaaaggttataagtaaccaagcagaacaaaggtccactcttaaatgctaaagatcagtgtaactctttttatggctgataacatgccatgccc

SEQ ID NO: 1269 - DNA, 600 bp, Chicken  19866894087695_3
ccaggccggccggcaataagctctccattggtccatggtctacagtagaatttattatattctttagaggttttcaagggggaaatatgcattttcatgcttaaaaaaaggacaagttatctgcaaagtatggacaagttctggcagtcagcacgacatgttcatagaatatgtgctgaaggaaaggcagatcatttcttagggatcataatccttttagtcctttttggttctgtgttttcttgtccgtkcttcttgyctgttggcaaactaattttccttctatttcagaggaaatgygctgaatggcagatcacaggttggtcacttggctgacattggtatgttaggctaaaaaatgcaatctttgaccctgacaaaagcaaaagtcaaccacatgtacacagtacatatacacagagtgtggaaaaaggaaaaaaggtaagagactaagccacaccactgyaaaggttataagtaaccaagcagaacaaaggtccactcttaaatgctaaagatcagtgtaactctttttatggctgataacatgccatgccccattgttaggctgagaactttttacagccgaacaaaagataa

SEQ ID NO: 1270 - DNA, 600 bp, Chicken  19866894087695_4
gaatatgtgctgaaggaaaggcagatcatttcttagggatcataatccttttagtcctttttggttctgtgttttcttgtccgtkcttcttgyctgttggcaaactaattttccttctatttcagaggaaatgygctgaatggcagatcacaggttggtcacttggctgacattggtatgttaggctaaaaaatgcaatctttgaccctgacaaaagcaaaagtcaaccacatgtacacagtacatatacacagagtgtggaaaaaggaaaaaaggtaagagactaagccacaccactgyaaaggttataagtaaccaagcagaacaaaggtccactcttaaatgctaaagatcagtgtaactctttttatggctgataacatgccatgccccattgttaggctgagaactttttacagccgaacaaaagataacaaccagcctttatgtggcatgccttgtaaaataataactaacaagaaagtgctctgcaaagaaggtcagtattgttatctccatgtctcggaaaggaaacttgagcagcagagctaacttgcttaaggtgccttgcttacaggcgcaggtgaatttccatgttcc

SEQ ID NO: 1271 - DNA, 600 bp, Chicken  19866894087695_5
ttttatggctgataacatgccatgccccattgttaggctgagaactttttacagccgaacaaaagataacaaccagcctttatgtggcatgccttgtaaaataataactaacaagaaagtgctctgcaaagaaggtcagtattgttatctccatgtctcggaaaggaaacttgagcagcagagctaacttgcttaaggtgccttgcttacaggcgcaggtgaatttccatgttccagcacagatatcagaaacaaggatggagaagccagccttgctctgttgggcagctgaatgcaccrccctgcttatagcaaatatctctggaatgctgcaggcatcggttcagctccacagactgcactgcgggcactgcagcagccgggctggggctgtgctgggggcacagcggatggaggagccccgcatcatcagctgggtgtgaaactgcagcgctttggctgcttcagtgggtgggacgccaggcacactggcagggcakgaggcagggtaggaaggcagccaggagaggggatttactgaggctgtcactgctcggggatgctggccagtctggtgtcccgcgtgccccggagaaagca

SEQ ID NO: 1272 - DNA, 600 bp, Chicken  19866894087695_6
ccttgcttacaggcgcaggtgaatttccatgttccagcacagatatcagaaacaaggatggagaagccagccttgctctgttgggcagctgaatgcaccrccctgcttatagcaaatatctctggaatgctgcaggcatcggttcagctccacagactgcactgcgggcactgcagcagccgggctggggctgtgctgggggcacagcggatggaggagccccgcatcatcagctgggtgtgaaactgcagcgctttggctgcttcagtgggtgggacgccaggcacactggcagggcakgaggcagggtaggaaggcagccaggagaggggatttactgaggctgtcactgctcggggatgctggccagtctggtgtcccgcgtgccccggagaaagcagtgatggcacttgctgcctcggggcctccacaggatcactcgccctccatcctgcatgtgcagggcgggaacaacctctagagtaactcattaacccaaactgcctcctgttcttatctagctctgccactgaggtgtagcaacagccctccagaaagccttggagtgcctagcgaagggccttccgtgtggctcccagt

SEQ ID NO: 1273 - DNA, 600 bp, Chicken  19866894087701_1
tacagtcttttaaccagctcgttttatattaatgatctgcatgaaaagaagctgcagtctgccctgtttgtatttccagagactgggtattagggaggggataacagcacaccctctgtgtcagtgagctgcaagatccttctgcacaaaataccgcctgagagcaaattattatcatcacaaatgctttcttctgacacagacctcacagaccatcaggactgccttcctgatctttatttatttcttcttttccccacaggtagatgcatcctcacataccctgctcagtatcagtcrtgacgcggggcagaccctgctgcagatgcattcatccccactgtgcatcccatacctgctgcagccccgtgagcctgggaggtctgagggcaccgtgccagcatcacagcactgggagggaaatccgtgcagcctgtgcctgcgtgtttgcaaacggccatcgcagtgccgtgcrtaacacttaagctgaatgagagactaaataaagattaaatggagacggatgcctctatttgcattaggagaggttttgaatctcttctcgtttgctttcccggagcagtttgcaggtgagccgtt

SEQ ID NO: 1274 - DNA, 575 bp, Chicken  19866894087701_2
catcacaaatgctttcttctgacacagacctcacagaccatcaggactgccttcctgatctttatttatttcttcttttccccacaggtagatgcatcctcacataccctgctcagtatcagtcrtgacgcggggcagaccctgctgcagatgcattcatccccactgtgcatcccatacctgctgcagccccgtgagcctgggaggtctgagggcaccgtgccagcatcacagcactgggagggaaatccgtgcagcctgtgcctgcgtgtttgcaaacggccatcgcagtgccgtgcrtaacacttaagctgaatgagagactaaataaagattaaatggagacggatgcctctatttgcattaggagaggttttgaatctcttctcgtttgctttcccggagcagtttgcaggtgagccgttggcctgccaggccctgtgcagtgaggatttttatccccgaagtttgctttgtttccagtaggtctcttaattacagcaaattaaaaattaaaagagaggacaggcagtgagtggtgggtaagcattgtcaacagctgcgcgtgatgcaag

SEQ ID NO: 1275 - DNA, 599 bp, Chicken  19866894087707_1
  misc_feature (1)..(73): n is any nucleotide
nnnnnnnnnnnnnnnnnnnnnnnnnnnnnnnnnnnnnnnnnnnnnnnnnnnnnnnnnnnnnnnnnnnnnnnnnaattccgtgggttcttctggttttagagctctaagttgaagggttaatctattaatctgaccaagaagtatccagtaggccaatgtggaataaatagcaacttaatattcacctttttattttcattattcctagataatttgattctgcgcttccagagaaactgatttgacaatgacataaattaaaaacagttcagctgtatggactgatgaggaaattgaacygatgccaatattagaaaggcgtcacagatttaaagacttacataagaggcataaatgaagagttacataccgttctgtgattcacccctcaaggtcttttgatttccccacgaggtctacctacatgtgaccccattctgcctttgttccacatcagttataatccacctgactgaattagccaaagcctatatattatttcatttctctggcttgatagccaggacttagtgttgctccatctggagtcacaaggtttggcatgaccttggagctcagagggtaagagacaatgctgc

SEQ ID NO: 1276 - DNA, 600 bp, Chicken  19866894087708_1
gctgcttattaatcgagcaccgttacactctgcaacactaagtgcaaacatgtggcagtgtgtgggtgtatgtcatgccaaaacagaccaccaactacagcacatgcttctgtgaattactgcaaagaaaaatttggtggagactgcaaaattgcacaaaaatgtataagcctattttgtcatagcaatagagcaaactgatgcagtaaacaacgaaactagatagctgttaaaataacgaccaaatattttacatttcatcattaaagatttatagaactattacctgggtcaataaayaaataaatggatgcactgttgaaatggaacataacgaatttcacacttcaacttcctagataacattgtaatttaaaaagcaatgaaaatattgacaaacaagaaaatcaaagattaaaggctaagatttatagtgaacttcactcacactataaaataattttagaattaagaagtccwattttagcaacatttaattcttcagagttctaatacctaaacaagtttccaaatgtcacacgtgaggttctccaaacagacccctaactaagaggattgctctcccactctgatcttttt

SEQ ID NO: 1277 - DNA, 600 bp, Chicken  19866894087708_2
catagcaatagagcaaactgatgcagtaaacaacgaaactagatagctgttaaaataacgaccaaatattttacatttcatcattaaagatttatagaactattacctgggtcaataaayaaataaatggatgcactgttgaaatggaacataacgaatttcacacttcaacttcctagataacattgtaatttaaaaagcaatgaaaatattgacaaacaagaaaatcaaagattaaaggctaagatttatagtgaacttcactcacactataaaataattttagaattaagaagtccwattttagcaacatttaattcttcagagttctaatacctaaacaagtttccaaatgtcacacgtgaggttctccaaacagacccctaactaagaggattgctctcccactctgatcttttttctctaacacgaacataaatgctcagtgagaaaaggtaggaaaaaaaccctttcaacatcagaagttaagatttttctgacagagtgtcaaggcattctccaagaaaaaacattttcagattcttagagtgttagaatgttagacacttgataattttcttgttgcattactatgcattc

SEQ ID NO: 1278 - DNA, 600 bp, Chicken  19866894087713_1
ctcaggattttctatgattctatgattctattatcatacaatgtggcaattagactagggatgtgctattaggtcctgaagattatctccttttaatggattttgaggagatatgagcaaaatgttcatgtttttaaggagcagtatagtagcccaaatgctctattcacttctgaaaactatatttgaatgactggtgtttaatttttccctcctgaaacagaaacagcagcattttggtcacactaggcatccagtttcttctttacaagctggactactacacataaaatcaagtgwtttttcttgcatttggttgtctttgcaggtgaaatgagtcagtttactttctatacaccagtttatcttagacatcaactcataatttactccttgctgtattacttgtatcttactgattttcagcaaagtacagtgaatgtacaagatgagtcaagaccactccatagcccaaaaggcaatccaagcaatgtctcatacaaacattttcrctgcttctcatgactcttctttccttaatgaactaatctgtaatcagtgatagatatgatctggggatagaaaacctctagaaagaat

SEQ ID NO: 1279 - DNA, 600 bp, Chicken  19866894087713_2
tcctgaaacagaaacagcagcattttggtcacactaggcatccagtttcttctttacaagctggactactacacataaaatcaagtgwtttttcttgcatttggttgtctttgcaggtgaaatgagtcagtttactttctatacaccagtttatcttagacatcaactcataatttactccttgctgtattacttgtatcttactgattttcagcaaagtacagtgaatgtacaagatgagtcaagaccactccatagcccaaaaggcaatccaagcaatgtctcatacaaacattttcrctgcttctcatgactcttctttccttaatgaactaatctgtaatcagtgatagatatgatctggggatagaaaacctctagaaagaatttgccttaagaaatggtacaccttcctttgagcagttattacytttcattctgtgcatcttcatttgtgtctttaacatctggaaataccttaataaattaactttattttttctgtagtcccactatcactatgccattatcattttcagttttaacaattaattacttacaatttaatgcaataatatttcagtttttgaaaaacagaag

SEQ ID NO: 1280 - DNA, 572 bp, Chicken  19866894087713_3
ttactttctatacaccagtttatcttagacatcaactcataatttactccttgctgtattacttgtatcttactgattttcagcaaagtacagtgaatgtacaagatgagtcaagaccactccatagcccaaaaggcaatccaagcaatgtctcatacaaacattttcrctgcttctcatgactcttctttccttaatgaactaatctgtaatcagtgatagatatgatctggggatagaaaacctctagaaagaatttgccttaagaaatggtacaccttcctttgagcagttattacytttcattctgtgcatcttcatttgtgtctttaacatctggaaataccttaataaattaactttattttttctgtagtcccactatcactatgccattatcattttcagttttaacaattaattacttacaatttaatgcaataatatttcagtttttgaaaaacagaagtagttgttggttctagatccaattcctatagagcagtaagacgaaaaaaatcagagaattgaccaaatgtacaaacccaaatttacaaacccaaacttccact

SEQ ID NO: 1281 - DNA, 599 bp, Chicken  19866894087714_1
  misc_feature (1)..(72): n is any nucleotide
nnnnnnnnnnnnnnnnnnnnnnnnnnnnnnnnnnnnnnnnnnnnnnnnnnnnnnnnnnnnnnnnnnnnnnnnacacaggaaactgataaattcctttatatccctgctaggagtgaaggccaagaatttatcagagagcaactttaatataacagtatttaccgacttaaataaataaactttaataaacttatattttcagtgcagagcagatggtgtttgacagacctgcctgaagctatgtaacatcacatgccatgctatttattttacaataatgtgatttactaaacaaaagtmtcttcctttgaaattgtacagggaagaagggcttttctatccagatttaaaggcagaagccatttcacacgtaacaggtgaaggacacttaaaatggatagtgaaaacctgtgcaagacatgaaamgtgtctctaggatttcatctgcattcctgtgcattgatgaagtattgacatagtgagasctcagtcatgtctctgtccacatggtttgattgcctgttctccagcacagattagtttatgccagttagcatctcagacaacatgcaggccatgattcagaccattgcacagag

SEQ ID NO: 1282 - DNA, 600 bp, Chicken  19866894087714_2
tttatcagagagcaactttaatataacagtatttaccgacttaaataaataaactttaataaacttatattttcagtgcagagcagatggtgtttgacagacctgcctgaagctatgtaacatcacatgccatgctatttattttacaataatgtgatttactaaacaaaagtmtcttcctttgaaattgtacagggaagaagggcttttctatccagatttaaaggcagaagccatttcacacgtaacaggtgaaggacacttaaaatggatagtgaaaacctgtgcaagacatgaaamgtgtctctaggatttcatctgcattcctgtgcattgatgaagtattgacatagtgagasctcagtcatgtctctgtccacatggtttgattgcctgttctccagcacagattagtttatgccagttagcatctcagacaacatgcaggccatgattcagaccattgcacagaggacttttcctgtaagcagtatagatgagactttttgctgttttgaggggagaagaggctggccatatggacattactagtttgtgttgwgtggcctaagggtcacagaagggctcccagttttcttg

SEQ ID NO: 1283 - DNA, 600 bp, Chicken  19866894087714_3
taaacttatattttcagtgcagagcagatggtgtttgacagacctgcctgaagctatgtaacatcacatgccatgctatttattttacaataatgtgatttactaaacaaaagtmtcttcctttgaaattgtacagggaagaagggcttttctatccagatttaaaggcagaagccatttcacacgtaacaggtgaaggacacttaaaatggatagtgaaaacctgtgcaagacatgaaamgtgtctctaggatttcatctgcattcctgtgcattgatgaagtattgacatagtgagasctcagtcatgtctctgtccacatggtttgattgcctgttctccagcacagattagtttatgccagttagcatctcagacaacatgcaggccatgattcagaccattgcacagaggacttttcctgtaagcagtatagatgagactttttgctgttttgaggggagaagaggctggccatatggacattactagtttgtgttgwgtggcctaagggtcacagaagggctcccagttttcttgggtatctccataggatgtatcttaagggatactgtttatataatttaaaaatagactaa

SEQ ID NO: 1284 - DNA, 600 bp, Chicken  19866894087714_4
ttaaaatggatagtgaaaacctgtgcaagacatgaaamgtgtctctaggatttcatctgcattcctgtgcattgatgaagtattgacatagtgagasctcagtcatgtctctgtccacatggtttgattgcctgttctccagcacagattagtttatgccagttagcatctcagacaacatgcaggccatgattcagaccattgcacagaggacttttcctgtaagcagtatagatgagactttttgctgttttgaggggagaagaggctggccatatggacattactagtttgtgttgwgtggcctaagggtcacagaagggctcccagttttcttgggtatctccataggatgtatcttaagggatactgtttatataatttaaaaatagactaaaaaggtacaacaaaaaattgaaaagaggtttaggagaagcgctaggtgtaggctacctacaggtaggtctatccttacagatagtctgtcgtctactgagcaatatcagatattcaagttaggagcataaatcaaactttacatagaatatagagtcatataggttggaaaagagcagtaagatcatcaagtccaaccatcaa

SEQ ID NO: 1285 - DNA, 600 bp, Chicken  19866894087714_5
acaggtaggtctatccttacagatagtctgtcgtctactgagcaatatcagatattcaagttaggagcataaatcaaactttacatagaatatagagtcatataggttggaaaagagcagtaagatcatcaagtccaaccatcaacccatccccaccatgcccactgaccacgtgcctcagtgccacatctccacagttcttgaacacctccaggggatggtgactccaccacctccctgggcaccctgtgccaatgccatttaagtcaatctgagaatatctactttcctccagtgacmatttagggaatgtcaggagctcttgctcataagctgtgtartttatcaggtgcctgatttattcattgtcactgtatcccctcactgactactctggaggaagttccaggttacattttggacagttttatggccccttatattagtgtcgagggttaagtgcttgatttcatatcagtggtgaatgcacagtagatctgccctgcatgaaatcactgaagaagaactgctaactagttctcttggtcgagagcactaaaataccatcccagtgtaggcttcagtgtcatgatgtttttt

SEQ ID NO: 1286 - DNA, 600 bp, Chicken  19866894087714_6
gcaatatcagatattcaagttaggagcataaatcaaactttacatagaatatagagtcatataggttggaaaagagcagtaagatcatcaagtccaaccatcaacccatccccaccatgcccactgaccacgtgcctcagtgccacatctccacagttcttgaacacctccaggggatggtgactccaccacctccctgggcaccctgtgccaatgccatttaagtcaatctgagaatatctactttcctccagtgacmatttagggaatgtcaggagctcttgctcataagctgtgtartttatcaggtgcctgatttattcattgtcactgtatcccctcactgactactctggaggaagttccaggttacattttggacagttttatggccccttatattagtgtcgagggttaagtgcttgatttcatatcagtggtgaatgcacagtagatctgccctgcatgaaatcactgaagaagaactgctaactagttctcttggtcgagagcactaaaataccatcccagtgtaggcttcagtgtcatgatgttttttgttcacactgtgttaatattcactgcaatttgcaccaaata

SEQ ID NO: 1287 - DNA, 448 bp, Chicken  19866894087714_7
tacttgagtcaaccagcacacagcacaaggctggagtaattgaaaattttctgggaatatatctttgtagtctaatagaccaggaacctggctgagaccagctcatctggcagccccatttcagacgagttaccaagggttgaattcaggttgtctgaaactaaaagcatgagccataatgctggggaccagcaaaattcaacctaagaatgaatgcgagatgaacaagatgaaactgactgtagttatagaggtgcctcctttcgtaaaaaaaacaccaaattttctgcttcgtatgawtaagtctggaattagtaatggattctttttagaaacataagagataaacttacattttgtatcaaattatcggtggcagttgatatcggtatgttttaatttctaaataaaataaagaagacaggttttacagatttctaaatgatca

SEQ ID NO: 1288 - DNA, 600 bp, Chicken  19866894087715_1
ttgaaaagatatcaccaccagtcatttatgtaagcagtgttttcccttctgccaagtaatacatgtatccagatacagaagatgggaggatagcaagttcataattgagattccagatgttcagaatttgtcatctttttctagtctacactcactaaaccagtttgcgtcaccgtacttacactgagtgatctgagtaacttggtaatttttccatgaactagtttgagggtaatgtgctgcacacttcagtcctggagactgatctccatgctaaaaactgagtggaaaaaaaaaaawaaaaatcagtagtattgggctcagtcttcaagtgaagtcttagccttactgatgaagtcgaagaaagttttgctgttacatgaagcagctgggatttcacctgtgaaattgttacctgctttgctttggtagaaattctgctgtctaaaaaattcttagtttgtctaaaaaattctaaaaaactggatcatcatgttggatactgaaataaagatttttttttcccccctttgctaatacctcttgatagccagcttacatatcttttgtgtattcaagtttcagggaagatttctactg

SEQ ID NO: 1289 - DNA, 600 bp, Chicken  19866894087718_1
ggggcatgtgtggagctgctgctggtctccgctatcagctggggctgctgcaggacacactgtgttttggtcgtaaagctggagcctggagctggggcagaaacatgccatcactataggctctacttcctgatgacacagaaatgtggcaggtagtttttgcagtcctgccagctaatctacggaccagataaacctcctacgacagaacacaaggctgctgatagaaaagtgctattcacatgtttcaccttatcctgtactctgaagcatttccctgtaaacatccacgtgcagatrgatgctgagtaaaaccacaagctttgcctttttcttgctttattgacaaggtgtgagcctgccctaagcattcttcctgctgcccctggggtgcagcaggctagggaatgtgggcccttgagtcttgccatgtgctgttagcccttcagtctgtggattggttaccatgtgaaatcatcatagtctcagcttgggaaactgaacaagttagagctggtgttgtagaactgggggcctgcctggtggactgaatagtacatttctgtgttcctcctcagcaaatggaaaagtttaggatga

SEQ ID NO: 1290 - DNA, 600 bp, Chicken  19866894087721_1
gcaggacttgctgtcccagagtgatctgtgcccgagcagcagagtccctgttgttacttatttgtgtaaacctagaagcacggcctccctgctgcgtgggctctctgtaggctgcagatatggcaaggtgttcccactacctcttccttgcgtaggagtgctttcaacacaccacagtgcagtcctggtaggagtaagtgatgagtagcaagcaagaagaataaatgttttagaactagtttattaagtgatatcaataggactatctgtaccgcggtttcatcctgaaatctcgcgtgrggtgaggtgtttgcagacaggcagtgcatgctgtcctgttaccgtgtgtgaggcactgtgctgaggttgtccctctggcaggggctggtggctgtcagagcgatggggctccgcgtggagctggggacatcagtgcctcgttgggatgagaagatttttgacattttaacattggctttatgtagaaggaagcttcrctcctgcttccttttggaagtgctgctgctcaggacctgtctgaggaagaagctctgggcatgttccagcaagggaggtttcgtgcgaattccagcagyygtc

SEQ ID NO: 1291 - DNA, 521 bp, Chicken  19866894087721_2
gtgatgagtagcaagcaagaagaataaatgttttagaactagtttattaagtgatatcaataggactatctgtaccgcggtttcatcctgaaatctcgcgtgrggtgaggtgtttgcagacaggcagtgcatgctgtcctgttaccgtgtgtgaggcactgtgctgaggttgtccctctggcaggggctggtggctgtcagagcgatggggctccgcgtggagctggggacatcagtgcctcgttgggatgagaagatttttgacattttaacattggctttatgtagaaggaagcttcrctcctgcttccttttggaagtgctgctgctcaggacctgtctgaggaagaagctctgggcatgttccagcaagggaggtttcgtgcgaattccagcagyygtcttgcagtgccagggaatgggggtttagttgctccttgaggttcttgcaacttcttgctctttgtctggcatctttctatggagtcctccatgctgaaacacactgcaggttgccattg

SEQ ID NO: 1292 - DNA, 422 bp, Chicken  19866894087721_3
gtgrggtgaggtgtttgcagacaggcagtgcatgctgtcctgttaccgtgtgtgaggcactgtgctgaggttgtccctctggcaggggctggtggctgtcagagcgatggggctccgcgtggagctggggacatcagtgcctcgttgggatgagaagatttttgacattttaacattggctttatgtagaaggaagcttcrctcctgcttccttttggaagtgctgctgctcaggacctgtctgaggaagaagctctgggcatgttccagcaagggaggtttcgtgcgaattccagcagyygtcttgcagtgccagggaatgggggtttagttgctccttgaggttcttgcaacttcttgctctttgtctggcatctttctatggagtcctccatgctgaaacacactgcaggttgccattg

SEQ ID NO: 1293 - DNA, 421 bp, Chicken  19866894087721_4
tgrggtgaggtgtttgcagacaggcagtgcatgctgtcctgttaccgtgtgtgaggcactgtgctgaggttgtccctctggcaggggctggtggctgtcagagcgatggggctccgcgtggagctggggacatcagtgcctcgttgggatgagaagatttttgacattttaacattggctttatgtagaaggaagcttcrctcctgcttccttttggaagtgctgctgctcaggacctgtctgaggaagaagctctgggcatgttccagcaagggaggtttcgtgcgaattccagcagyygtcttgcagtgccagggaatgggggtttagttgctccttgaggttcttgcaacttcttgctctttgtctggcatctttctatggagtcctccatgctgaaacacactgcaggttgccattg

SEQ ID NO: 1294 - DNA, 600 bp, Chicken  19866894087728_1
ttcaatccaatccatccatatggtccgatatcaaagtgatgccttgcttgcttggtaagcaatgctaactagctaatatcaaccaattatttttgtccccctttaaaaataaataaataaataaataaataaaaatcaagtccaaactttgtgttcttacaaataatttcaagtcagtttaactttcaaatgtgtcatgtagaactctgttcttcgttccttaaaagcttagtgtgtaaataaatttttagcagacatcagaaaactgcctttaaaaggcaaaaaagctactggtcagtyrgtacattgcagctattagaggcagaaatgttcacttttgaattaagaaagcaccagaagatggaagtttttgcttctcatagatacctctcagtcactcaagatggcattacccccagctcttccagcttttgcaatcatacataaacaccgataagaacataagaaaaagccctcaaggatcagaccatcaagcccagttttctatttccaacagtgataatatgagaagctttataggaagaatgcatgagactagacactttctkcagtccatctccttcaccagcatccacaatt

SEQ ID NO: 1295 - DNA, 600 bp, Chicken  19866894087728_2
tcaatccaatccatccatatggtccgatatcaaagtgatgccttgcttgcttggtaagcaatgctaactagctaatatcaaccaattatttttgtccccctttaaaaataaataaataaataaataaataaaaatcaagtccaaactttgtgttcttacaaataatttcaagtcagtttaactttcaaatgtgtcatgtagaactctgttcttcgttccttaaaagcttagtgtgtaaataaatttttagcagacatcagaaaactgcctttaaaaggcaaaaaagctactggtcagtyrgtacattgcagctattagaggcagaaatgttcacttttgaattaagaaagcaccagaagatggaagtttttgcttctcatagatacctctcagtcactcaagatggcattacccccagctcttccagcttttgcaatcatacataaacaccgataagaacataagaaaaagccctcaaggatcagaccatcaagcccagttttctatttccaacagtgataatatgagaagctttataggaagaatgcatgagactagacactttctkcagtccatctccttcaccagcatccacaatta

SEQ ID NO: 1296 - DNA, 600 bp, Chicken  19866894087728_3
ctttaaaaggcaaaaaagctactggtcagtyrgtacattgcagctattagaggcagaaatgttcacttttgaattaagaaagcaccagaagatggaagtttttgcttctcatagatacctctcagtcactcaagatggcattacccccagctcttccagcttttgcaatcatacataaacaccgataagaacataagaaaaagccctcaaggatcagaccatcaagcccagttttctatttccaacagtgataatatgagaagctttataggaagaatgcatgagactagacactttctkcagtccatctccttcaccagcatccacaattactgtgttagaggtgtaaaagggtacatctctacttagtgcttttaatacctatttatggacttgatgtctatgaatttgtctaaatcctttttttgsaattgactgatattcactgcctctacaaaaccctatgaaagtaaatactacaagtttcatatatacttcctattaactcttaaactgttcaactggtagtttaatttagggttctttattcgtgttrcaagatttcatgaataatagttttgcattcaatttattcactac

SEQ ID NO: 1297 - DNA, 600 bp, Chicken  19866894087728_4
tcaagatggcattacccccagctcttccagcttttgcaatcatacataaacaccgataagaacataagaaaaagccctcaaggatcagaccatcaagcccagttttctatttccaacagtgataatatgagaagctttataggaagaatgcatgagactagacactttctkcagtccatctccttcaccagcatccacaattactgtgttagaggtgtaaaagggtacatctctacttagtgcttttaatacctatttatggacttgatgtctatgaatttgtctaaatcctttttttgsaattgactgatattcactgcctctacaaaaccctatgaaagtaaatactacaagtttcatatatacttcctattaactcttaaactgttcaactggtagtttaatttagggttctttattcgtgttrcaagatttcatgaataatagttttgcattcaatttattcactacttctacaactgtgtacaccttagttacaactcacacttggttacaagttttctccactccaaactgaaatccaagtctttttattcttataataaggtagcttctccatgaaattgttttagttgccct

SEQ ID NO: 1298 - DNA, 600 bp, Chicken  19866894087728_5
tgagaagctttataggaagaatgcatgagactagacactttctkcagtccatctccttcaccagcatccacaattactgtgttagaggtgtaaaagggtacatctctacttagtgcttttaatacctatttatggacttgatgtctatgaatttgtctaaatcctttttttgsaattgactgatattcactgcctctacaaaaccctatgaaagtaaatactacaagtttcatatatacttcctattaactcttaaactgttcaactggtagtttaatttagggttctttattcgtgttrcaagatttcatgaataatagttttgcattcaatttattcactacttctacaactgtgtacaccttagttacaactcacacttggttacaagttttctccactccaaactgaaatccaagtctttttattcttataataaggtagcttctccatgaaattgttttagttgcccttctatgtactttctctaattccacaatattattcttgaaacattgagaccagaactgtacattagcactgtcttaactatagaattaaattatttccttttataaagattgttatcagcaaaagaaa

SEQ ID NO: 1299 - DNA, 600 bp, Chicken  19866894087729_1
aaagctttcctactagtactgaattttcttcaagttcctgtgtttgaattgattactcagcaatcctgtgcacagcagcggacagaaacatgaatcagtgctaaaaccacatagtattttgactgacatcagaagaaaaccagttagacctgctggatgttttgacatctcttgctaaatcaaagtgattttatgagttaatcttttatggcaacaagaaatcacctactaagaaactcagcctggaatgagtagctagtagtctttgttaaagcaatcactatactgactctcttcatktaatgatttatccattctaaataacaggagaatatgcttagactgaaatgaatgaaaaaaaaaaaggtttttgaaggaatatgggattacttttcaataagttacgcttatatttagtgatctttcttaacagagaattacaaatgcttgcattccgcatgctgcaaagaatttatactataaagtacagcttttattaaaaaaaatgcataatctgttctcaatattaaaggatcgttttccttcctgcactgtagataaaattgaaaataactgaggtataaggaactttgctacatt

SEQ ID NO: 1300 - DNA, 600 bp, Chicken  19866894087730_1
cagaaagcaaagctaaatccaaaaataaataatcagaacaaaggatgctgctatctaaataattaatcagctttgcgtagggtgggtaaacattaaaagcaactacaatcaagcagtatgattacagctaagtccattttagtagccacaaaagtattttagaaaacaggttgagccttggtggttactatgcaggtgaattacataccagattggaagctgaagcttcagaaaaggacagacctcttggaatgattagaatatgatcatgttctttgcttactctgacctgaaatggarggaaaaaaacaatggattactgacttatttctgaatttatattaactgggggaaattaatttgactaaacaggtargatcycaaatcagcattcttattctctgaaatacttacagtgatataggcatttggcagatgtgcccacccaaacaagtcagccaatctgtataaactggctaatttgcaacgagtaagtttttctcccttaacaaaygaggaggtatctatcccaggtagatcattgatgggggtaatcattccatggcctgaaaaacagaaaaagatggcagccaagcaatt

SEQ ID NO: 1301 - DNA, 600 bp, Chicken  19866894087730_2
gtagggtgggtaaacattaaaagcaactacaatcaagcagtatgattacagctaagtccattttagtagccacaaaagtattttagaaaacaggttgagccttggtggttactatgcaggtgaattacataccagattggaagctgaagcttcagaaaaggacagacctcttggaatgattagaatatgatcatgttctttgcttactctgacctgaaatggarggaaaaaaacaatggattactgacttatttctgaatttatattaactgggggaaattaatttgactaaacaggtargatcycaaatcagcattcttattctctgaaatacttacagtgatataggcatttggcagatgtgcccacccaaacaagtcagccaatctgtataaactggctaatttgcaacgagtaagtttttctcccttaacaaaygaggaggtatctatcccaggtagatcattgatgggggtaatcattccatggcctgaaaaacagaaaaagatggcagccaagcaattaaataccttccagctacgtcatggtcttctagaagcagtatatctaaattgtcagaggagcaacaccagcaattat

SEQ ID NO: 1302 - DNA, 600 bp, Chicken  19866894087730_3
gtgggtaaacattaaaagcaactacaatcaagcagtatgattacagctaagtccattttagtagccacaaaagtattttagaaaacaggttgagccttggtggttactatgcaggtgaattacataccagattggaagctgaagcttcagaaaaggacagacctcttggaatgattagaatatgatcatgttctttgcttactctgacctgaaatggarggaaaaaaacaatggattactgacttatttctgaatttatattaactgggggaaattaatttgactaaacaggtargatcycaaatcagcattcttattctctgaaatacttacagtgatataggcatttggcagatgtgcccacccaaacaagtcagccaatctgtataaactggctaatttgcaacgagtaagtttttctcccttaacaaaygaggaggtatctatcccaggtagatcattgatgggggtaatcattccatggcctgaaaaacagaaaaagatggcagccaagcaattaaataccttccagctacgtcatggtcttctagaagcagtatatctaaattgtcagaggagcaacaccagcaattattagac

SEQ ID NO: 1303 - DNA, 600 bp, Chicken  19866894087730_4
ggaagctgaagcttcagaaaaggacagacctcttggaatgattagaatatgatcatgttctttgcttactctgacctgaaatggarggaaaaaaacaatggattactgacttatttctgaatttatattaactgggggaaattaatttgactaaacaggtargatcycaaatcagcattcttattctctgaaatacttacagtgatataggcatttggcagatgtgcccacccaaacaagtcagccaatctgtataaactggctaatttgcaacgagtaagtttttctcccttaacaaaygaggaggtatctatcccaggtagatcattgatgggggtaatcattccatggcctgaaaaacagaaaaagatggcagccaagcaattaaataccttccagctacgtcatggtcttctagaagcagtatatctaaattgtcagaggagcaacaccagcaattattagactgcatctgcactgctgggacttctagggtccttactgaaatctctgctagttttgacttcgattgcatgaacatcttgcaaaggggtatttctccccttcatgaatgcataatatccctctgagaaacactgc

SEQ ID NO: 1304 - DNA, 600 bp, Chicken  19866894087730_5
aaaagatggcagccaagcaattaaataccttccagctacgtcatggtcttctagaagcagtatatctaaattgtcagaggagcaacaccagcaattattagactgcatctgcactgctgggacttctagggtccttactgaaatctctgctagttttgacttcgattgcatgaacatcttgcaaaggggtatttctccccttcatgaatgcataatatccctctgagaaacactgcctttgcttacagggaaagttactaccaggagagagaaaaggtttgggttttcaacagaaagagwgtgcgcactttgagattaatcaccctgtccaaatccccaggcaaatgttgcagggaacastyggacctgcaggactggctagagacatggagataaggcactccgagctctctgttgttctcttccacttagtctgctgtatgaactctaaggagccattttgggaccagttctcaaaagatgctgaatgccaagagttgccaactgtaccacaggcttgtaagctcccatatcgtgtcatccacccacagtgcttaggccaacttcagcacttcagtactgcaggacttgggaagactg

SEQ ID NO: 1305 - DNA, 600 bp, Chicken  19866894087730_6
tatatctaaattgtcagaggagcaacaccagcaattattagactgcatctgcactgctgggacttctagggtccttactgaaatctctgctagttttgacttcgattgcatgaacatcttgcaaaggggtatttctccccttcatgaatgcataatatccctctgagaaacactgcctttgcttacagggaaagttactaccaggagagagaaaaggtttgggttttcaacagaaagagwgtgcgcactttgagattaatcaccctgtccaaatccccaggcaaatgttgcagggaacastyggacctgcaggactggctagagacatggagataaggcactccgagctctctgttgttctcttccacttagtctgctgtatgaactctaaggagccattttgggaccagttctcaaaagatgctgaatgccaagagttgccaactgtaccacaggcttgtaagctcccatatcgtgtcatccacccacagtgcttaggccaacttcagcacttcagtactgcaggacttgggaagactggaacatcccagcaatgtttttgtaactatagcatattctaaaagttattttcaactctgg

SEQ ID NO: 1306 - DNA, 600 bp, Chicken  19866894087730_7
tatctaaattgtcagaggagcaacaccagcaattattagactgcatctgcactgctgggacttctagggtccttactgaaatctctgctagttttgacttcgattgcatgaacatcttgcaaaggggtatttctccccttcatgaatgcataatatccctctgagaaacactgcctttgcttacagggaaagttactaccaggagagagaaaaggtttgggttttcaacagaaagagwgtgcgcactttgagattaatcaccctgtccaaatccccaggcaaatgttgcagggaacastyggacctgcaggactggctagagacatggagataaggcactccgagctctctgttgttctcttccacttagtctgctgtatgaactctaaggagccattttgggaccagttctcaaaagatgctgaatgccaagagttgccaactgtaccacaggcttgtaagctcccatatcgtgtcatccacccacagtgcttaggccaacttcagcacttcagtactgcaggacttgggaagactggaacatcccagcaatgtttttgtaactatagcatattctaaaagttattttcaactctggga

SEQ ID NO: 1307 - DNA, 600 bp, Chicken  19866894087732_1
tcattgctaaagccagtaaatgtggagcctttaagaactgaattgaggctgtaagtgacgggcgtctgtaggatgttttgcagatgtaacaggtcggtgtaactgcgcgggtaaaaagcatttcctggtctcttgaagcagaagctgtggaaggccacagcaaaataaaatattctctgtactcaagatggaactgctgtaaaactgtcaagcaatgtacttgcatttagcagatctggatggaggaactaccacaagagctccgaaggaaagagtaaacctgcagcatcccagagacascaggtgacgttaaggacttttaggctctgaaatcccatttctagtattgcctattcatattttaaatttactgtttgaggcgctgtcctttgggggctcagagcccctgaatgaagtcacttaaatcattagctctctgggttgtaaagagccaaagggcatggatatcttttattgcagttgcatgacgtgaatgaaattgctggttgcttcgtgtagttaaccaagtgtattcagtgcttagagaagtgtgcaaaaacaatgcatcctcgaagcttgcagaagtaactctgacaaaag

SEQ ID NO: 1308 - DNA, 600 bp, Chicken  19866894087735_1
ttgtataactacagaactgtaaataaaacaccgctttgtgcgagatgaatttatgaacaacattccctatcactcagcactaaaccaacatttgcattgggatttagcagtattatcagagatgggaagtagagtaagatctcagatctcactcttgttctaaggaggaccaactggggcaatcaggcttcactgcgaaggacagataagattttagcataactagtgtaacgactctctggggaaacaaagcaagcacacaaagctggttttctgcttaacctgcggtgatgttacacytaagtgttttactgaggataattaggaattcaggaaccattacatactctgtgccggctgggtgaggccaatgatcagtctgacgtcccacatcagcaagaagccatcctcatcaccaccagaaggagccctggcaatcttccccctaagaagctgtccctccccaggcaggagccccagtgctgcccacagcacagccgctgctctgagccacgtggccgggcagcccctggggcacatgcagccagctaggagcacggtctggctattttttatgttccaggcacagcttttgactaa

SEQ ID NO: 1309 - DNA, 600 bp, Chicken  19866894087737_1
agtgctgagtattgtaagtgcctcagttgaaaatatacaaccagtgtcaagagatagagtgtgtttatgttgttaaggcatgtgccagtggatgttcccactgcgtatggacttgcaagttatttttcttgtttggctgtgggaggatgttaagtggcacagaggttttggaaggtctggggcagagccagaagccctaagaggaagagtcttgtaaagcacctctgttctactttggtcttctattaatatatttcaagggaaatccatccctgttataggctgaggtcttcagcagarcccttggacactcttcaccacctgctctagggctgcataaagaaagaaaatgtttagaacatccccaggtataaattttctggttctttgctggaaggacatgctacatgccctgagcatctgccattatatagccacactgatgtctgagtggtatgragccattaaaatattaacactacttgtaattaatagctaccatttctaaaatgaaactggactcttactggccatataagaccaatgctccatctagtccagactgcaggctccaaaagtagttattctggttggtccaaa

SEQ ID NO: 1310 - DNA, 600 bp, Chicken  19866894087737_2
cagaggttttggaaggtctggggcagagccagaagccctaagaggaagagtcttgtaaagcacctctgttctactttggtcttctattaatatatttcaagggaaatccatccctgttataggctgaggtcttcagcagarcccttggacactcttcaccacctgctctagggctgcataaagaaagaaaatgtttagaacatccccaggtataaattttctggttctttgctggaaggacatgctacatgccctgagcatctgccattatatagccacactgatgtctgagtggtatgragccattaaaatattaacactacttgtaattaatagctaccatttctaaaatgaaactggactcttactggccatataagaccaatgctccatctagtccagactgcaggctccaaaagtagttattctggttggtccaaagagaagtgaaaaagccttgtgaatggacaaaacgtaatagttgccagctagagaaktttccttctactccatacttctgtttgtagcaaatctgaacttttaacaaaaaagattgtgtttcttttgctaatatacataaatatatgtctttayatatta

SEQ ID NO: 1311 - DNA, 600 bp, Chicken  19866894087737_3
gaacatccccaggtataaattttctggttctttgctggaaggacatgctacatgccctgagcatctgccattatatagccacactgatgtctgagtggtatgragccattaaaatattaacactacttgtaattaatagctaccatttctaaaatgaaactggactcttactggccatataagaccaatgctccatctagtccagactgcaggctccaaaagtagttattctggttggtccaaagagaagtgaaaaagccttgtgaatggacaaaacgtaatagttgccagctagagaaktttccttctactccatacttctgtttgtagcaaatctgaacttttaacaaaaaagattgtgtttcttttgctaatatacataaatatatgtctttayatattatgcagctgtgactgttttcagtgattactsagtactttgatatctttataattggtacaaagcagtgactaaccaattgactgtgtctatctgggcctgggcacctcttatgacacagcagtggcaaacactgactcagagtggtcaccagagtgtcctgtccagaccctcctagtcttatgagtcacttggctcac

SEQ ID NO: 1312 - DNA, 600 bp, Chicken  19866894087737_4
gtatgragccattaaaatattaacactacttgtaattaatagctaccatttctaaaatgaaactggactcttactggccatataagaccaatgctccatctagtccagactgcaggctccaaaagtagttattctggttggtccaaagagaagtgaaaaagccttgtgaatggacaaaacgtaatagttgccagctagagaaktttccttctactccatacttctgtttgtagcaaatctgaacttttaacaaaaaagattgtgtttcttttgctaatatacataaatatatgtctttayatattatgcagctgtgactgttttcagtgattactsagtactttgatatctttataattggtacaaagcagtgactaaccaattgactgtgtctatctgggcctgggcacctcttatgacacagcagtggcaaacactgactcagagtggtcaccagagtgtcctgtccagaccctcctagtcttatgagtcacttggctcactcacatcaccagatcatcttgggtgcttgagttatgtgggctggggttgaatcaccgagaccccatgaggcatctccgttcccaagataagatcagt

SEQ ID NO: 1313 - DNA, 600 bp, Chicken  19866894087737_5
taatagctaccatttctaaaatgaaactggactcttactggccatataagaccaatgctccatctagtccagactgcaggctccaaaagtagttattctggttggtccaaagagaagtgaaaaagccttgtgaatggacaaaacgtaatagttgccagctagagaaktttccttctactccatacttctgtttgtagcaaatctgaacttttaacaaaaaagattgtgtttcttttgctaatatacataaatatatgtctttayatattatgcagctgtgactgttttcagtgattactsagtactttgatatctttataattggtacaaagcagtgactaaccaattgactgtgtctatctgggcctgggcacctcttatgacacagcagtggcaaacactgactcagagtggtcaccagagtgtcctgtccagaccctcctagtcttatgagtcacttggctcactcacatcaccagatcatcttgggtgcttgagttatgtgggctggggttgaatcaccgagaccccatgaggcatctccgttcccaagataagatcagtcactccagtaaagtgcaggtaaactcaaaagatggc

SEQ ID NO: 1314 - DNA, 600 bp, Chicken  19866894087739_1
ctgttaatactctctaatctgtatgcatttattttcctgccactatcttcatgtgtaacttgggagatctgacattattgttctgtcacgtatcagcatattaaaaccattctcttatactgacaaaatttctattgtctgaatagagactgtggaatttggctggacatttgttgctatttatttgttgaaataaatactgtagtatatggttgtgccaggcaagtttgtactgttggcttcaatcctgcagtactgaacttagtcacagcccttctcatatttacaagagactttggytcagtcccatgctgctgaacaaaatttctatgctaacagttaggttttgtttaatactgaattaaaaactgctgttaattgataataaagctaagtaaggtatacacagcctatagacaattaactatgtaaagaatgatggctcagtagctgacctgaggatattttctgtaaatactgcaaatgtaatttagtggtatctttgtatgttattattaacacaatgctcttaggtaaataagtgttacgtatttaacctgtcagagaagtcttgaatctgagtgtaacggcctcctgtag

SEQ ID NO: 1315 - DNA, 599 bp, Chicken  19866894087742_1
  misc_feature (1)..(12): n is any nucleotide
nnnnnnnnnnnntgaatgtaaacgaagacatgtagaacaagtaaagggagtattaaattatgatttgttatatgctgccatatgccagagcaaacatacatgcattaaagtgaagaagtgtgattgagtcagttttagctcccagttatgtatctttgaataccagatcctgctgttgttgagcaatatattggtaatgaaattaactttgtagtctgtaatgctgcctaccctatgttaaatcatgtacattgtcatgaggtgtcgtatgtcatcttaaagtactttgtgtcatgttcyccctataaatcaagtacagttggttctggaagatgaggaattattcatttaatagaaatcatgtagcaaaacaagcttaatgtagaatcactgggtttgatatctgtgatttacttccagggttggtaacccactagatgtaatgctgtaattttcatgagttaaattgcaggtgtgattatcaaattaaattttgtaaatctatttttgagatcccactttcttatatataaataacgcattcatattgaaaataagatttttggatttgctgttacgtttctacaaattcaattaca

SEQ ID NO: 1316 - DNA, 600 bp, Chicken  19866894087742_2
acttccagggttggtaacccactagatgtaatgctgtaattttcatgagttaaattgcaggtgtgattatcaaattaaattttgtaaatctatttttgagatcccactttcttatatataaataacgcattcatattgaaaataagatttttggatttgctgttacgtttctacaaattcaattacatcacatgctagccactgacctagaaacctccattaggttattcaggctttatgtgacatcagtggcatataagttcatattgttatttatgttccttaaaggactctaagtarttgtgtattcatgtttgtggtctttgtgcaatgagaacaatttggtaaatgacagcacttcagaagcacggagtgctttaagattgagccaagctaatgtaattcttctctatgttaaaaggtgaatgaaactttgacaattaagtttttaaacttattaaggagttgttgctatcagtgattagacagtcagctgttgaggcagtagcttttatataacaggatattgttttgctcatcatgttaccacatttggcaaacttttatcttaatgcgcctatcgggaataccagtctgacc

SEQ ID NO: 1317 - DNA, 600 bp, Chicken  19866894087743_1
cgttgttcaaatattagcggtggcagcaaaaccattgtgcgggagtagtcgggggaaagcagtcccttccctcacaacagttaaaactggatgctgctgccaggcccgttgggcactgaacgtggtccaggaaagctgcctagctctggagctggctgagccactccaatcttaggcattattaatttgactggagctgaaatgacacagaaagccacttcatgcacgtgatgaagcacaggggggttctgtagggctggagggaagtttaggtcagcagcttcagaaccacaggaaaawgtcctattggctttgccactgctgttgttgtgcaagataggaggaaggaggttttccagatgcttgttgaacaagacttcatgggaaatgtttataggggtgaactaaattccacaacacctctgaaatcaatggcattttgtaccgggcacaaagtggatcagtatttttatgatgacgaccttcgctgatacactgttggtctaaaaaaaaaaggaaaggaaagtgatcataaagctcagtttatgcttaaacttacggacacgtgaataattcagttcctatatgacaataaaaagg

SEQ ID NO: 1318 - DNA, 600 bp, Chicken  19866894087752_1
ctctccagcagtgagacagtgagatttctcttcagaaacacttgagcaagtgaaagctgcaaattgcactggctttaggtgacacttgggctcttaaatcatgtagacagaaccctcaaaacatagtcagagttataaacctagctgcctgatcttaaggtaagtggcctgacctttagaaaggtcacatcagagctctgcggatctttaggtgatactgaagataaatcattaagtcagttttcacatactgaaatgaagttgttcatcagcaaactgcaggagccaaccaaataaatrcagaagcatcaggactacggcttgttactaaatgtaaataaagcaggatagtattgctgtctgttctttaccttttactttcacagtgttcatttttaaatacagcaaagcgctttgctacctgtccacccatagctggttctttttcactgggtaatggaatctgtaagtaaagtagttgtttcagagcatacttttagttacattcgaggcaggacaaagtgaggatggcagagtgctggatgctgtgtttgtcctcgtccctgagcagttactatgcaatttcttattctactttgg

SEQ ID NO: 1319 - DNA, 600 bp, Chicken  19866894087752_2
taaataaagcaggatagtattgctgtctgttctttaccttttactttcacagtgttcatttttaaatacagcaaagcgctttgctacctgtccacccatagctggttctttttcactgggtaatggaatctgtaagtaaagtagttgtttcagagcatacttttagttacattcgaggcaggacaaagtgaggatggcagagtgctggatgctgtgtttgtcctcgtccctgagcagttactatgcaatttcttattctactttggtttttaaaaatttagtctcttgaaagggagagayaaagatggtttccctgtataccaagagaagctaattcgagaaagtatccgaaaatttccttactgtgaagctacgttgctccagcagcttgtgaggagtattgctcctgttgaactggtaagttctttctatcaagataatattgtctaataatttgcctagtaaattcagtttaaaataagctttcttactttctctcaggttcttcagtgtcttacattaagtaaaggttttggatgtccctgaactttctgataagctggaattttaatttacgtgttgcaggaaaattctctaaac

SEQ ID NO: 1320 - DNA, 600 bp, Chicken  19866894087753_1
atttacttcagaagcaagctggctgctgaacatatcttgctcagcaagggaggaaaagagagtctcctgcgtgtgattatggatattgctaagtgaaacgtcacaagatgtgggatttcccttctcagcttcagggtggaagtgcatcaggcaggatgcagagctctctccttccagcccctttacaccagctctcaaccaatgggatactgctatctaccattttaactcaagctatccaaatcaagagcccaccaggctcccagacatccaatgtgtgtgtgatcccttactgctcaycttgtctcagccccagttcccagaagctaaggacacaatggcaacagctgatccactgaagcgaggtaaacaccacacaggcttgtttagcctctggctccttacgtgcacctaccagactatgtgaaccaacacagtgtgtcacacaaccaatagtgttatgcaaggctgagtaatgaaagcagagactgttaccagctttaacaggcgttggatcatgccaagaacaagtcccactctgttttagttgctgcagtacaatatcccacatcttttctataataatcaaatgctcctaca

SEQ ID NO: 1321 - DNA, 600 bp, Chicken  19866894087753_2
aaggctgagtaatgaaagcagagactgttaccagctttaacaggcgttggatcatgccaagaacaagtcccactctgttttagttgctgcagtacaatatcccacatcttttctataataatcaaatgctcctacactgcagtcaggagcaggagacaaataactagtaaacagataagcaatgtctaacgagctgacaatgctgccaagaatatttgcgatctgatttcatccctgcctttctgccttccctgacctgccaccagactctgtgatatgcacggctgtttttaggctgcrgtacagagatgacttctgagcagaccaagaaaagcaatctgactggcaggctaagattcattacagagggacttggaatgctgaaaatcactgacctacaccaacccatgagctcatttatgaaacacttgcactttgttacaggtcattgggaaaaaaaataggttagatgggtgatgtatatattccaggaaacaaacccacttactggaccacaagctgaagaggagttcccctctatctacaatgccaaagagatacttgagatcagaacagattttaatcatttctacacagcaa

SEQ ID NO: 1322 - DNA, 600 bp, Chicken  19866894087753_3
tacagagatgacttctgagcagaccaagaaaagcaatctgactggcaggctaagattcattacagagggacttggaatgctgaaaatcactgacctacaccaacccatgagctcatttatgaaacacttgcactttgttacaggtcattgggaaaaaaaataggttagatgggtgatgtatatattccaggaaacaaacccacttactggaccacaagctgaagaggagttcccctctatctacaatgccaaagagatacttgagatcagaacagattttaatcatttctacacagcaawragacttctgttgaacaacatattggtggtgcgttccctcatgggcaaagaagtctatctaccatttgctgtcagccacagcagagatgaactggcaagagcacagcgtgctctgctctgtgcaggagagcgagaactgcatccacttgtcacctcctcctctgttatctgctactccaaactgacacatgcagcagatttttctgctatgtgtaacagaacaacccctaggttagcttagctgtctctcagaaacaatcatgacccatgaagggaaataaaagtaaaataatcactgcc

SEQ ID NO: 1323 - DNA, 600 bp, Chicken  19866894087753_4
acagagatgacttctgagcagaccaagaaaagcaatctgactggcaggctaagattcattacagagggacttggaatgctgaaaatcactgacctacaccaacccatgagctcatttatgaaacacttgcactttgttacaggtcattgggaaaaaaaataggttagatgggtgatgtatatattccaggaaacaaacccacttactggaccacaagctgaagaggagttcccctctatctacaatgccaaagagatacttgagatcagaacagattttaatcatttctacacagcaawragacttctgttgaacaacatattggtggtgcgttccctcatgggcaaagaagtctatctaccatttgctgtcagccacagcagagatgaactggcaagagcacagcgtgctctgctctgtgcaggagagcgagaactgcatccacttgtcacctcctcctctgttatctgctactccaaactgacacatgcagcagatttttctgctatgtgtaacagaacaacccctaggttagcttagctgtctctcagaaacaatcatgacccatgaagggaaataaaagtaaaataatcactgccc

SEQ ID NO: 1324 - DNA, 600 bp, Chicken  19866894087755_1
ttctatatctcccttacttgccactctgatcttgaggacaggatcagagccttctaccatgcctagggttatcatggcctgttctctggaccattaaactgccatggtgtgattcgacatttctcaaaaggagagcttgaactgttgtaagaagaatatacaacaaagaagtccatttgaggactacctgctgaattcaacaagaaagcaaaatgttgtaaaagaattgtagaacagccacaattttgtgttatataccatttgttctgaggggtaccgtaaaacggttgcctgatgctrtaatgtgtacctgatggcatcatgtcagttttggagagtgtcttcagcactgctcacatttgcaaatcgagaatgcaattatcactgcagaatttaaaaactggaggtattctagaagactctggacttcyctctaatgggggaaagaaggcgggagggggagggaccaaaaaacctcaccatcttcaaatgtattacctgtaacaaagagaaactagaggcattagtactcaaatgaaatctagagaggctgatgcttaagacamgaaattcagcttctaaaaggaattggccaaccaa

SEQ ID NO: 1325 - DNA, 600 bp, Chicken  19866894087755_2
agagcttgaactgttgtaagaagaatatacaacaaagaagtccatttgaggactacctgctgaattcaacaagaaagcaaaatgttgtaaaagaattgtagaacagccacaattttgtgttatataccatttgttctgaggggtaccgtaaaacggttgcctgatgctrtaatgtgtacctgatggcatcatgtcagttttggagagtgtcttcagcactgctcacatttgcaaatcgagaatgcaattatcactgcagaatttaaaaactggaggtattctagaagactctggacttcyctctaatgggggaaagaaggcgggagggggagggaccaaaaaacctcaccatcttcaaatgtattacctgtaacaaagagaaactagaggcattagtactcaaatgaaatctagagaggctgatgcttaagacamgaaattcagcttctaaaaggaattggccaaccaaaaatcttcaaaaaccactcaaacaaagctcaaagtttccaccaaagcatgaaagatcataatcttttttaattggcataattactatttaatgtcatttagaatggctgcagtgtataaataaaaaaaaca

SEQ ID NO: 1326 - DNA, 600 bp, Chicken  19866894087755_3
ctgaggggtaccgtaaaacggttgcctgatgctrtaatgtgtacctgatggcatcatgtcagttttggagagtgtcttcagcactgctcacatttgcaaatcgagaatgcaattatcactgcagaatttaaaaactggaggtattctagaagactctggacttcyctctaatgggggaaagaaggcgggagggggagggaccaaaaaacctcaccatcttcaaatgtattacctgtaacaaagagaaactagaggcattagtactcaaatgaaatctagagaggctgatgcttaagacamgaaattcagcttctaaaaggaattggccaaccaaaaatcttcaaaaaccactcaaacaaagctcaaagtttccaccaaagcatgaaagatcataatcttttttaattggcataattactatttaatgtcatttagaatggctgcagtgtataaataaaaaaaacaactttttaaagtaaaagttttcaattaaattcaattaaactactcatacttctctttcagagtaaagcattcctaaattatgaccaaacatctcaagataaaagcataaacaaatggaaatgtttcagtagttta

SEQ ID NO: 1327 - DNA, 600 bp, Chicken  19866894087755_4
cctttgaagtacatcatgattaacatgtgtcagtaacatgaagtgtatgggagcaatatgcttctgctgcactaatacaggcttccttaaccacttccatatctacctcttttcaagaaatgaggcttctaccattatatttcttattgatctagattttaaaaagtttttataatagaagtttgcagtgggcttatccatcttaagcacattcctacagtcataaattgtaatggagcagatcatcccggaagccatggtaaggcacatggaagagagggaggtgaaaaaggataactracatggcttcacttaagggcaggttttgactgaccaatsttattgctttttgtgatggcacaactgtgtcagcagacaatggaagagccactgatgtcatccatctggacttcagtaaggtttctgacacggtcccccttaacatccttctccccagattggaaagatacgcatttgataggtggactgtttgatggatgaggaactggttgtgaaatcatacccagagagttgtggccaacagctcaatctctgaatggagatcagtgataagtggtgttcctcgggggtcagtactgg

SEQ ID NO: 1328 - DNA, 600 bp, Chicken  19866894087755_5
gaagtgtatgggagcaatatgcttctgctgcactaatacaggcttccttaaccacttccatatctacctcttttcaagaaatgaggcttctaccattatatttcttattgatctagattttaaaaagtttttataatagaagtttgcagtgggcttatccatcttaagcacattcctacagtcataaattgtaatggagcagatcatcccggaagccatggtaaggcacatggaagagagggaggtgaaaaaggataactracatggcttcacttaagggcaggttttgactgaccaatsttattgctttttgtgatggcacaactgtgtcagcagacaatggaagagccactgatgtcatccatctggacttcagtaaggtttctgacacggtcccccttaacatccttctccccagattggaaagatacgcatttgataggtggactgtttgatggatgaggaactggttgtgaaatcatacccagagagttgtggccaacagctcaatctctgaatggagatcagtgataagtggtgttcctcgggggtcagtactggaaccggtgctctttaatatcttcatcaatgacatcaaca

SEQ ID NO: 1329 - DNA, 600 bp, Chicken  19866894087759_1
catcaatgagcaccagttctgtcattcttctgtctcgcctgttccatttcttgctttctgtttaataactgctaaaccagaattaaattagctatattacctaattatctagggcagatctcctatactgaagttcacttctttcctgttaccgtctgaaaagtaaaagttcgtaaattaaaataaaaaatcacaaaaattgaacctcatttggtatttctcttaagtaccagaagtcacagttcttggtgctgtggaggtctgatgcaaccactgggaagtgaagcctttcaatagcastacaaatggtccatgacttgtgtgcatttcttgtgctggttgcaatgttcccaaactccttctgyagtttctccatgctgctmtccagtcagcagcctgttccagccacagcacgctgtgtcctctgagcagatttattccacgtatcctccttacagtcttcattatttctcctgataagcatcagtgtagctastcactgacatttaagttaatcccaaacactgcggtttcacactgaacacacgatttggctccttaaactattcctgacctgctgcccttaagtaaaggtctcct

SEQ ID NO: 1330 - DNA, 600 bp, Chicken  19866894087759_2
taactgctaaaccagaattaaattagctatattacctaattatctagggcagatctcctatactgaagttcacttctttcctgttaccgtctgaaaagtaaaagttcgtaaattaaaataaaaaatcacaaaaattgaacctcatttggtatttctcttaagtaccagaagtcacagttcttggtgctgtggaggtctgatgcaaccactgggaagtgaagcctttcaatagcastacaaatggtccatgacttgtgtgcatttcttgtgctggttgcaatgttcccaaactccttctgyagtttctccatgctgctmtccagtcagcagcctgttccagccacagcacgctgtgtcctctgagcagatttattccacgtatcctccttacagtcttcattatttctcctgataagcatcagtgtagctastcactgacatttaagttaatcccaaacactgcggtttcacactgaacacacgatttggctccttaaactattcctgacctgctgcccttaagtaaaggtctcctgttcctcgcagagggttagcaaacacattcacttaaggcaaggggaactcgttgttttcattttg

SEQ ID NO: 1331 - DNA, 600 bp, Chicken  19866894087759_3
taaattagctatattacctaattatctagggcagatctcctatactgaagttcacttctttcctgttaccgtctgaaaagtaaaagttcgtaaattaaaataaaaaatcacaaaaattgaacctcatttggtatttctcttaagtaccagaagtcacagttcttggtgctgtggaggtctgatgcaaccactgggaagtgaagcctttcaatagcastacaaatggtccatgacttgtgtgcatttcttgtgctggttgcaatgttcccaaactccttctgyagtttctccatgctgctmtccagtcagcagcctgttccagccacagcacgctgtgtcctctgagcagatttattccacgtatcctccttacagtcttcattatttctcctgataagcatcagtgtagctastcactgacatttaagttaatcccaaacactgcggtttcacactgaacacacgatttggctccttaaactattcctgacctgctgcccttaagtaaaggtctcctgttcctcgcagagggttagcaaacacattcacttaaggcaaggggaactcgttgttttcattttgaggggtctttatttcttc

SEQ ID NO: 1332 - DNA, 600 bp, Chicken  19866894087759_4
aaattgaacctcatttggtatttctcttaagtaccagaagtcacagttcttggtgctgtggaggtctgatgcaaccactgggaagtgaagcctttcaatagcastacaaatggtccatgacttgtgtgcatttcttgtgctggttgcaatgttcccaaactccttctgyagtttctccatgctgctmtccagtcagcagcctgttccagccacagcacgctgtgtcctctgagcagatttattccacgtatcctccttacagtcttcattatttctcctgataagcatcagtgtagctastcactgacatttaagttaatcccaaacactgcggtttcacactgaacacacgatttggctccttaaactattcctgacctgctgcccttaagtaaaggtctcctgttcctcgcagagggttagcaaacacattcacttaaggcaaggggaactcgttgttttcattttgaggggtctttatttcttctgtaaggacactcaatttatgtcattcatttggtgatgactacatctttggacttcagatcttctttcccttcaaccctgcaaagcaattctcattcttacagccatcctttt

SEQ ID NO: 1333 - DNA, 600 bp, Chicken  19866894087765_1
agctgtgggcacagaccaatgaatggagagatgcaatagcaggaagtagctctcagggagaggcaaacctgtagcaactcactgcaaactgggggacttgtggagcagctctgaggcagctcttgctcatctaagaagtactgagcacagatggccatcactgtctttggtagagctgagaactggagacctgccccgactggattcgtgagctgtgggcaccaaaaaggcggcctcagatactctggcaaaccataccttcttcagaagaagaaacagggtttccttcctgatgggctytttggatatggacctagcagtttgcagatgggaagaatgaagacaaggcaccaggtgtccttctgctcagcctgcagaagggcagccttgtggacaacctgccagagtctgtttggggcagagtgaccaacacctgactttgtttcctcatttggaaagtgaagagtacataatatcataatatcaccaaggttggaaaagacctccaagatcatccagtccaactgtccatctctcaccaatatttcccactaaaccacatccctcagtacaacatctgaacatttcctgagcacttcc

SEQ ID NO: 1334 - DNA, 536 bp, Chicken  19866894087769_1
attgatcaataaatctttgggctgcctttcttcacccagcctctgctctgttaagactcctgcgccattctctgaaagaaaatataaagttgttgtgtttgaaagaacagattgttttgtcattagcaatgaaagagcaggaattgtgctggtcggttctgataatggctttttaatgacaaattctagtcaaagtaagatctgctttatttccacatgagtgaacttcaactattaatccaaaacccaaacacagctcgcttgctttctcacttctgcacgggttccagcctggcagargagagagactttgtaaagtggaattataatgatatttcccactcagtgcytttctgatggtgcagaaatattcctgctcctagtgctagatgagctttttgtttaattaatggtaattttaggagaatgctaatagactgcttcattataggaaatcagtggcaagatttcccctcctcttcctctccagactcctaactccaaattagttgcaataagagagagcttcaaaacga

SEQ ID NO: 1335 - DNA, 486 bp, Chicken  19866894087769_2
ttaagactcctgcgccattctctgaaagaaaatataaagttgttgtgtttgaaagaacagattgttttgtcattagcaatgaaagagcaggaattgtgctggtcggttctgataatggctttttaatgacaaattctagtcaaagtaagatctgctttatttccacatgagtgaacttcaactattaatccaaaacccaaacacagctcgcttgctttctcacttctgcacgggttccagcctggcagargagagagactttgtaaagtggaattataatgatatttcccactcagtgcytttctgatggtgcagaaatattcctgctcctagtgctagatgagctttttgtttaattaatggtaattttaggagaatgctaatagactgcttcattataggaaatcagtggcaagatttcccctcctcttcctctccagactcctaactccaaattagttgcaataagagagagcttcaaaacga

SEQ ID NO: 1336 - DNA, 599 bp, Chicken  19866894087781_1
  misc_feature (1)..(122): n is any nucleotide
nnnnnnnnnnnnnnnnnnnnnnnnnnnnnnnnnnnnnnnnnnnnnnnnnnnnnnnnnnnnnnnnnnnnnnnnnnnnnnnnnnnnnnnnnnnnnnnnnnnnnnnnnnnnnnnnnnnnnnnnnnaaaaatgattaaatgtaagttttaaaggaactaaggagtcctacatctgtgacatgagaagcttaagcactttgcacatccaaatcaaattatagtccctgctccaaagagatcaaagactgaaaaaggcagacatgcggctgtagacagtaggaaaaaacatgagtggggtgcctcrctgaccaacccagcaactgtatgaactttgaggccaacagtgccatgcgctgaaagtaaccctccaacatctgtctcactgttcctaacaacaagggtagcaatgaattatcttgctcaaaaggtgcctgcagcagctttgctcatgttctcaaggattacagtggatgttttgcaggaactccaaagcttaccacagtgacaaagagataatgactttttagattaagaaaaaggagtttcattctctctttgatgagggactgtgccaccaaacaggaggggaggaatgyctgataa

SEQ ID NO: 1337 - DNA, 600 bp, Chicken  19866894087781_2
gtgcctcrctgaccaacccagcaactgtatgaactttgaggccaacagtgccatgcgctgaaagtaaccctccaacatctgtctcactgttcctaacaacaagggtagcaatgaattatcttgctcaaaaggtgcctgcagcagctttgctcatgttctcaaggattacagtggatgttttgcaggaactccaaagcttaccacagtgacaaagagataatgactttttagattaagaaaaaggagtttcattctctctttgatgagggactgtgccaccaaacaggaggggaggaatgyctgataaagtgagatttcaatagcatacaaaaatatgactcagatgacttcacaagttattgattctgcattaagcagggtgagcrtacttaatgtctctacacctggaatggaatttgctagtaatgtttccaaagtaacccttaaaactaaagatcaatatagatcttagattttttcycccatcactgagattgttttcaaaactggatgaataatgtttaccatgtggccttcactcaagatctgctgaacttttgctacaactaaggttatctgatacgtgattgtttgggcaag

SEQ ID NO: 1338 - DNA, 600 bp, Chicken  19866894087781_3
ctgttcctaacaacaagggtagcaatgaattatcttgctcaaaaggtgcctgcagcagctttgctcatgttctcaaggattacagtggatgttttgcaggaactccaaagcttaccacagtgacaaagagataatgactttttagattaagaaaaaggagtttcattctctctttgatgagggactgtgccaccaaacaggaggggaggaatgyctgataaagtgagatttcaatagcatacaaaaatatgactcagatgacttcacaagttattgattctgcattaagcagggtgagcrtacttaatgtctctacacctggaatggaatttgctagtaatgtttccaaagtaacccttaaaactaaagatcaatatagatcttagattttttcycccatcactgagattgttttcaaaactggatgaataatgtttaccatgtggccttcactcaagatctgctgaacttttgctacaactaaggttatctgatacgtgattgtttgggcaagaggataaagacgtggatataatgaagaaggcttttacagtgagggtggtgaggaactggaacagattgctcagagatgaggtggaa

SEQ ID NO: 1339 - DNA, 600 bp, Chicken  19866894087781_4
gcaggaactccaaagcttaccacagtgacaaagagataatgactttttagattaagaaaaaggagtttcattctctctttgatgagggactgtgccaccaaacaggaggggaggaatgyctgataaagtgagatttcaatagcatacaaaaatatgactcagatgacttcacaagttattgattctgcattaagcagggtgagcrtacttaatgtctctacacctggaatggaatttgctagtaatgtttccaaagtaacccttaaaactaaagatcaatatagatcttagattttttcycccatcactgagattgttttcaaaactggatgaataatgtttaccatgtggccttcactcaagatctgctgaacttttgctacaactaaggttatctgatacgtgattgtttgggcaagaggataaagacgtggatataatgaagaaggcttttacagtgagggtggtgaggaactggaacagattgctcagagatgaggtggaagcctcatccctggagacattgaaggccaggctggatcaggctctgagtaacctgatcaagctctgggtgttcctgctgattgcaggtgagttgga

SEQ ID NO: 1340 - DNA, 600 bp, Chicken  19866894087783_1
agaacaaagctgcagaatgacggagagaaaaataactgttgatttcctgtgattagtggaatccgtggctttggcaaacttgatgtcatggtagaataaagtctgtaatttgttttaatgtggtcactggaagcaaattctagttgtctttgtttgtttgtttgtttgttttgaagactacaataaatgatgtagtaacatggaagtctgggtagttgtatgacagcataccagatgacatgggtaaatatgttggactattgccaaaggcaaaaccaactgattaattataatcttcaraatgkgtttcattttgaaaactctgcatttcttctgagcattggagaactattcaggcttttgaagttcctgtctgcaggtttgcatgttccttcagacagctgacatatagccaattttttttcttatctggaaacattttttgacatttygctcatcattaagtgacagattaatcccgagcagattgaaaagaaaaatgatctttcagtccattgtggggcctcctttaagttcctgctattatattctaaatacagattgattataaggagacaaagtattctggactttgtcaca

SEQ ID NO: 1341 - DNA, 600 bp, Chicken  19866894087783_2
aaagctgcagaatgacggagagaaaaataactgttgatttcctgtgattagtggaatccgtggctttggcaaacttgatgtcatggtagaataaagtctgtaatttgttttaatgtggtcactggaagcaaattctagttgtctttgtttgtttgtttgtttgttttgaagactacaataaatgatgtagtaacatggaagtctgggtagttgtatgacagcataccagatgacatgggtaaatatgttggactattgccaaaggcaaaaccaactgattaattataatcttcaraatgkgtttcattttgaaaactctgcatttcttctgagcattggagaactattcaggcttttgaagttcctgtctgcaggtttgcatgttccttcagacagctgacatatagccaattttttttcttatctggaaacattttttgacatttygctcatcattaagtgacagattaatcccgagcagattgaaaagaaaaatgatctttcagtccattgtggggcctcctttaagttcctgctattatattctaaatacagattgattataaggagacaaagtattctggactttgtcacaagttg

SEQ ID NO: 1342 - DNA, 595 bp, Chicken  19866894087783_3
tttgtttgtttgtttgttttgaagactacaataaatgatgtagtaacatggaagtctgggtagttgtatgacagcataccagatgacatgggtaaatatgttggactattgccaaaggcaaaaccaactgattaattataatcttcaraatgkgtttcattttgaaaactctgcatttcttctgagcattggagaactattcaggcttttgaagttcctgtctgcaggtttgcatgttccttcagacagctgacatatagccaattttttttcttatctggaaacattttttgacatttygctcatcattaagtgacagattaatcccgagcagattgaaaagaaaaatgatctttcagtccattgtggggcctcctttaagttcctgctattatattctaaatacagattgattataaggagacaaagtattctggactttgtcacaagttgtgcttcatctctgcagtaacatctcatggtttcacagcactcccatgcagcagactagaaattttgcaattgctctgtttaaaagaagcatatagttgccaaattaattgtacatagaattgaacaatgtttaaaaactcaa

SEQ ID NO: 1343 - DNA, 599 bp, Chicken  19866894087787_1
  misc_feature (1)..(11): n is any nucleotide
nnnnnnnnnnncacagtgaaagggtgctgttgtgctcagacagactgtctttgctaacgaaggaaacaagataagaaggcaaaggaatgaggagacaataggagccaaataaggaattgtggtaaggggctaagatccagtacggacaaatcaggacagggcacgatagctcaagtaaaggtatataagctgtacttcgtagtgaatagacaccattttgctgctcaacatattggtgtgtgtctgcagtcatttggccctgatcaggtaattggtcagtgtgcacaataggactaacaygggaggccaacatcacagttgcagaaagcaacactgtggttaagtcttgaaatagaaattccagagtcttatccttgttgtcagtaatgttgtacatgcaaaatatatctactggtaattcttgttttacattaatgaaaccttatgataacttcgtcacttcagtaccactgataatttaccaggaattatggttttacgttttgttttgctatgatgtaagttcacttagaatgaaaaggttttggcattcacagccacartataaaatattaaaattatatatatatacatatata

SEQ ID NO: 1344 - DNA, 435 bp, Chicken  19866894087787_2
tcaggtaattggtcagtgtgcacaataggactaacaygggaggccaacatcacagttgcagaaagcaacactgtggttaagtcttgaaatagaaattccagagtcttatccttgttgtcagtaatgttgtacatgcaaaatatatctactggtaattcttgttttacattaatgaaaccttatgataacttcgtcacttcagtaccactgataatttaccaggaattatggttttacgttttgttttgctatgatgtaagttcacttagaatgaaaaggttttggcattcacagccacartataaaatattaaaattatatatatatacatatatatatatatatttgaaatataaaatattacacgttcccagagcttaagtcagaaagaggtttatgcttatgtgaatgaaatttacaaattatcacataaaa

SEQ ID NO: 1345 - DNA, 600 bp, Chicken  19866894087791_1
gtctgtgaagagtgtggtctgtctaattgcagggatgagtctttctcttacagcagtttgctcacagcagtgctggtagcaatcagatcagcatctcaagggatcacaccgatgccagccacctttgcagtgaatgttcagtcatgtggatgtgtgatatctataagaatggatgggtgactcagatcttccctcctgtttccaaaatcttggtcttaaaacccaccttacttgaaatgggaactcagtaaattacatgaagcaaaacaaatgaatgaaagctttccaacatgctatacygggaagtgtgaaggttttctatcttccatgtagactcaactcagtgatttgactgtagagagcagatccactaggagtaaactcctccactggaaatcacacttctgttgcaatttagcctctttgtgctttaaatctgcttttggttgtgcactctggtttgggggaacacttaaatcaatggataaaatgcttgcctaagtttcattatggtcaatgagtcttatatataggttgtgccaacaaggggtagaattaaatacatttgataaagactttttagtaagaactgaaggaaat

SEQ ID NO: 1346 - DNA, 600 bp, Chicken  19866894087795_1
gtcaaaagcaataaaaactcctaaatttaatagaataatcactaaagaaacttctgtggactattgcttgtatgtgagttccttgcattagcaaatctcttacagaaaatgacaaacatttgagatatgcaaaaatactgaaaaggcttatacctcttcagttttgtccttacagttctttggctttgaaaaaaaatcaagaaaaatcagcagcttcagaatcaagcttctttctcttctttctttctttttcaccaaggattactgagttcaaagtgtgctatttacattttaacagtygaaagaaaagaaataaagaatttacgcaacagaaactcacatgaagcagtcataagaaatcttggaaaggaaaaataaattgcttcattgcaatgataagctcctcttgtatgtaatttatgaaaagccagctgtcatcaaaattcttaatttatagtgttcaacaaaatgctactaactgaaaagcattaatcaacatcaccaacttaatgcagtttgtcaaacttctcagtctcttctgccaaagaagagcattttgacaagcagattgattagtgagctaacagtgtttgactgagg

SEQ ID NO: 1347 - DNA, 599 bp, Chicken  19866894087802_1
  misc_feature (1)..(89): n is any nucleotide
nnnnnnnnnnnnnnnnnnnnnnnnnnnnnnnnnnnnnnnnnnnnnnnnnnnnnnnnnnnnnnnnnnnnnnnnnnnnnnnnnnnnnnnnncaattactgttgccattaactttgcatatgtttgtgagcaaagaactgataagaaaatctgaatgtaaactggaaaggattcaaggcactggtagacaactggggtgtatgatttccctgtctctctgtgaattgaggagagaattgtccgtagcatttcaatttagcagttggttaaggaactttcatctctgaccttctattagtattytcctttaaacttcattttatccagaaaagctttcagagaagtcaaaagaggttgcagagagatgagttcagatctgtttttatacctgttacrtctactggttttttttctagcaaggtactgattacgattatcttcatttcattgcttctgctttgctcacttgcaaagctcacagcaatgaaaacgttatcctgatattttagaatgttacaaaattctgtgttttagagagatatggtcaccctcagagctgaaaatgaatactgattattgagtctggaagtcagtcttcagct

SEQ ID NO: 1348 - DNA, 600 bp, Chicken  19866894087802_2
tactgttgccattaactttgcatatgtttgtgagcaaagaactgataagaaaatctgaatgtaaactggaaaggattcaaggcactggtagacaactggggtgtatgatttccctgtctctctgtgaattgaggagagaattgtccgtagcatttcaatttagcagttggttaaggaactttcatctctgaccttctattagtattytcctttaaacttcattttatccagaaaagctttcagagaagtcaaaagaggttgcagagagatgagttcagatctgtttttatacctgttacrtctactggttttttttctagcaaggtactgattacgattatcttcatttcattgcttctgctttgctcacttgcaaagctcacagcaatgaaaacgttatcctgatattttagaatgttacaaaattctgtgttttagagagatatggtcaccctcagagctgaaaatgaatactgattattgagtctggaagtcagtcttcagcttttccatgttaacccctagaagtctcttagattgctgattaacaattctggggttttctaaattaatattttgacttagtaaattaggttacta

SEQ ID NO: 1349 - DNA, 600 bp, Chicken  19866894087810_1
aagtccagagggtagcaatgaggtaggatcccatggtgggagacactgtgacttgggtggataagcagacaaagccttttttaaacaacactaggaagtttcttaaacacactaaaggacagggctaccatacaaggggatccaaacagtatggagcagtggtctaacagggacatcagataattaaacaaaaccagaaaacactgcatgtgctacaggctggggctgtatgggaacagctctgcagaaaaggactgggagctattagttggcagtgcaccgctcatgaacttgccatgygtcctcacagaaaagatggccaacaatgtcatgggctttattaagagaattgtggccagtagacagaaggaatggattatcctcctccattctttggtgactttcaagactggactagataaaagcctgagctagctgatgttattgcttgaatggccgtgctttgagcagaagtttgaactggaaacctgcttgggttctttcatatcctatgaatctgtgattctcatagagaactattagtgagaatgatgatttttgaatatttggataatttcatttaacctctgtagttttttt

SEQ ID NO: 1350 - DNA, 600 bp, Chicken  19866894087812_1
tctccagcttttaaggcagcgttgtggcccgagtggatagaagccttcctctctctctccccagctgcggtctccagctgagacaggtggaacggggcagtgctgcccactgctccatcagctctggatgttctccagatgccactgatggcttctgagaaggaaatcaacgcatccgcagaggctcagaggagtgactgctggctgccccgcctcaggaaagcggtgctgtcggtggctctgcccagaggcaacgcctggatgtgggccagaccttggcgagatggccgggctgggcakacaggggagccaggaggaaggaagtgaatgaagtcagtcctgtgatctgcaccagatgtgtgctcctgcttctctgcgagctcattaccgctgaccgagaggtgccctgtgtgccaccacagctsctggggggcagccaggcacagcacgggtcttcctgtccccaaagctcccatccagcacaagcactccttcccggagcccagggagagcagcggcagccaaatgagtaaggcagaaacctcgctgctcaggcagccatggtgcagcatcagagcatggtgagttgtactgagcagt

SEQ ID NO: 1351 - DNA, 600 bp, Chicken  19866894087812_2
ggatgttctccagatgccactgatggcttctgagaaggaaatcaacgcatccgcagaggctcagaggagtgactgctggctgccccgcctcaggaaagcggtgctgtcggtggctctgcccagaggcaacgcctggatgtgggccagaccttggcgagatggccgggctgggcakacaggggagccaggaggaaggaagtgaatgaagtcagtcctgtgatctgcaccagatgtgtgctcctgcttctctgcgagctcattaccgctgaccgagaggtgccctgtgtgccaccacagctsctggggggcagccaggcacagcacgggtcttcctgtccccaaagctcccatccagcacaagcactccttcccggagcccagggagagcagcggcagccaaatgagtaaggcagaaacctcgctgctcaggcagccatggtgcagcatcagagcatggtgagttgtactgagcagtggctgaggtgaggctgacactgaaaatgttgggtgggtagcgaccacaggaaacacttgcattatcaggacataaaaagtcatggggtttaaaacggtacgtccacaagggaggagctgcttaag

SEQ ID NO: 1352 - DNA, 600 bp, Chicken  19866894087815_1
gctggatgtcagggacagaggacaaatgcggataaacgctgccatcagcacaatgctcgggaaggggtggaggagcacaaggggagggaaaaatgggaccgtgccatctttgcaatggcacagcatcctgcagcccaacgggcccagagcacctctcataggcgaacgcatcaacagagctatggaaggaaggggatcctgcctgcactgaactgaagctgccttctacaaggaaggaaactgcagcaaatctcaagtttttagccccaaaagccacctatgcttttaggaggtgtcccrctatgttgatcaacaccccrgcactggcaggtacacccccaagtcctgacccacgcccaagcagggcagacggccatcccaaaaacacacctttgcccaatggctctgcagaagacaaagctgacacggaggtgacattgaggggagagggatgcagagcagagcacgtaggatcagacagcttttagcacattgcaccatccccaggagcagctctgcagtgctgggggctcactctggcacagccccccctgctttgctctgccaccccaccccctgcctgctcaacagggaatacct

SEQ ID NO: 1353 - DNA, 600 bp, Chicken  19866894087815_2
gacaaatgcggataaacgctgccatcagcacaatgctcgggaaggggtggaggagcacaaggggagggaaaaatgggaccgtgccatctttgcaatggcacagcatcctgcagcccaacgggcccagagcacctctcataggcgaacgcatcaacagagctatggaaggaaggggatcctgcctgcactgaactgaagctgccttctacaaggaaggaaactgcagcaaatctcaagtttttagccccaaaagccacctatgcttttaggaggtgtcccrctatgttgatcaacaccccrgcactggcaggtacacccccaagtcctgacccacgcccaagcagggcagacggccatcccaaaaacacacctttgcccaatggctctgcagaagacaaagctgacacggaggtgacattgaggggagagggatgcagagcagagcacgtaggatcagacagcttttagcacattgcaccatccccaggagcagctctgcagtgctgggggctcactctggcacagccccccctgctttgctctgccaccccaccccctgcctgctcaacagggaatacctgcactatatttaccagcaat

SEQ ID NO: 1354 - DNA, 600 bp, Chicken  19866894087824_1
caggacacctaaggcctattcaggaattgctttttagcagaatgtcctggtgcctgaagttgttcctctccaggtgcaggactttgcatttcttgctgaccttcatggggctcttatcagcccacctctccagtctatcaagttgccttcggatggcagcatgaacctctggtgagtcaatttttctccttcagttcgttgtcacctgtgaatttactgagggtgcactctactctattgtccaggtcatcagtgaagatggtaaacaggactagatcaagtactggcccctgggatatwgcgctcattactggcttccaactagtcattctgccactcaccactaccctctgactagtttagttgtaccacactctatcgttacaggaacatcaatacaaacatatcctctgggatagataaataagtaccggaaaggaaaggatctatgccaaacatttttgtggcacagatgaatagttgtaaagtagcattgctcaaataaaaggaaatgcttttagatgcattagctaccaccagaaaagaagaaaaagaaaaaaaatctcaggaaagaggggtttctttcaatcagagtatact

SEQ ID NO: 1355 - DNA, 599 bp, Chicken  19866894087832_1
  misc_feature (1)..(3): n is any nucleotide
nnnacccccggctgcacagcctgcagccgtcctgggacacgcagccctcagggctgtgctctgacaatgaagcacagaagcccacagctggagcaggtctttctccacagtaaagaaacatggagcaccttcagccagatatccaatggaatgtcccaaagttagtgatccctccaggaaaatcagactcattgcctggtgcaaaagacttaccttgtcaaggatagtgagaaatgcacctccagtgagctctcagcctgctattgtgccacacaacccgtaagctctcttccttctctwctccccgtcttgtgatggacatggccccagccctgctgtgtggtgctcaggagctgatcctgagcccaaatgtctctctgcagcgctgcccacttatatcagctccctgtgtctcaggagcccagcccagatgagcagcagaggatgtgatttccttctccacacagctctccctggagatatccatggccctcatgagctgacagatcctgcaaggcagcacagtcatcactgcagaatgtacttccaagtcagatccattaatcaacacgtccagaggattccaaamwcatggatgt

SEQ ID NO: 1356 - DNA, 600 bp, Chicken  19866894087832_2
ttccttctctwctccccgtcttgtgatggacatggccccagccctgctgtgtggtgctcaggagctgatcctgagcccaaatgtctctctgcagcgctgcccacttatatcagctccctgtgtctcaggagcccagcccagatgagcagcagaggatgtgatttccttctccacacagctctccctggagatatccatggccctcatgagctgacagatcctgcaaggcagcacagtcatcactgcagaatgtacttccaagtcagatccattaatcaacacgtccagaggattccaaamwcatggatgttcctaagaaaagaagtttgaccatgagagaagcaaatgccaaatctggaaacctctgctcatgacctgtaacaaaaatgacaaacagacaaagacaggaaggggtggacttcccctgttctgggcagtgatagagctgaggcagtgcaggcataacattacagaagcatagaaaggcttaggttggaggggacgtttaagagcacctcgttccatgcccccagtcatgggcaggactgcctaccacagatgaggctgcccagaatcccatccatcctgaccttgaatgcc

SEQ ID NO: 1357 - DNA, 600 bp, Chicken  19866894087832_3
tccttctctwctccccgtcttgtgatggacatggccccagccctgctgtgtggtgctcaggagctgatcctgagcccaaatgtctctctgcagcgctgcccacttatatcagctccctgtgtctcaggagcccagcccagatgagcagcagaggatgtgatttccttctccacacagctctccctggagatatccatggccctcatgagctgacagatcctgcaaggcagcacagtcatcactgcagaatgtacttccaagtcagatccattaatcaacacgtccagaggattccaaamwcatggatgttcctaagaaaagaagtttgaccatgagagaagcaaatgccaaatctggaaacctctgctcatgacctgtaacaaaaatgacaaacagacaaagacaggaaggggtggacttcccctgttctgggcagtgatagagctgaggcagtgcaggcataacattacagaagcatagaaaggcttaggttggaggggacgtttaagagcacctcgttccatgcccccagtcatgggcaggactgcctaccacagatgaggctgcccagaatcccatccatcctgaccttgaatgcct

SEQ ID NO: 1358 - DNA, 600 bp, Chicken  19866894087834_1
tttttcatcagctgccttctgcagctacagtctctcaaagactttctggtcatccaaacaaattacactgagcaagttggtgttagcagcttttttgttaacgtattcaagtaattcagagatcagatagatctgcaatgggtattttgccagcccattccatgatgaagactgacactgactccataatggcatgtcagatgcaaggagggcttgtgaagatggtacatactgtaagctggttttattgacatgaataaatacaaagacattgaagagagaatcccattctctgcttgrtraagaggctaaaggcaaagagtgagcatagtttttctttgtcctcctgtccrtctcccacatttccagattctttcttttttgtcttcccatttccaagaacttaatctctggatctgacttgtttcacctttcctytgcgtttgcagtcacataaaccaaatccctctgcaccgagcacagcagggctctgaagcctccctgtgccctcagccacctttctggccatctcagcaccttttgaaagtgttccttctgtgaaatgagttctttgctttatgacaagatgcaatattttgg

SEQ ID NO: 1359 - DNA, 600 bp, Chicken  19866894087834_10
aattaaatttcctcccattgtctggaggatcggtagaccgtggaagaggagggaggccatagtatggagccaggacagagctacaaggtctcaggggtgatgaccagggccattgatggtgccgggcagtggggctggtcttgtacggtcgatgcctctttgcagccttcggggcagggtttctgatggcacgcaggtgagccaggacacagcaacgctcccctggctatgcaacctttgacaaattgcttaggaaatcactttcaaaccmgcatagataaaattaggtacctctgtgcraaggtgcctgcttctctgaggcctgagctggcaagcctgggtaaattagcgcttttggactcctgcccacttctgagtttgcaaaatgttccctttagcctctctttgctggtttcaccatctgtcaaatggggatgttaatactgactcagtctttgtacagagttttaagcttctgagactcaaagtgtgtgataataagtgttagtaattacagtaccgtcatagcatgcaaccaagtctctggagaccagcttgctgcttgaaggacaagcagaagtcacagctaaggcacagtgc

SEQ ID NO: 1360 - DNA, 600 bp, Chicken  19866894087834_2
tttcatcagctgccttctgcagctacagtctctcaaagactttctggtcatccaaacaaattacactgagcaagttggtgttagcagcttttttgttaacgtattcaagtaattcagagatcagatagatctgcaatgggtattttgccagcccattccatgatgaagactgacactgactccataatggcatgtcagatgcaaggagggcttgtgaagatggtacatactgtaagctggttttattgacatgaataaatacaaagacattgaagagagaatcccattctctgcttgrtraagaggctaaaggcaaagagtgagcatagtttttctttgtcctcctgtccrtctcccacatttccagattctttcttttttgtcttcccatttccaagaacttaatctctggatctgacttgtttcacctttcctytgcgtttgcagtcacataaaccaaatccctctgcaccgagcacagcagggctctgaagcctccctgtgccctcagccacctttctggccatctcagcaccttttgaaagtgttccttctgtgaaatgagttctttgctttatgacaagatgcaatattttggtt

SEQ ID NO: 1361 - DNA, 600 bp, Chicken  19866894087834_3
ccaaacaaattacactgagcaagttggtgttagcagcttttttgttaacgtattcaagtaattcagagatcagatagatctgcaatgggtattttgccagcccattccatgatgaagactgacactgactccataatggcatgtcagatgcaaggagggcttgtgaagatggtacatactgtaagctggttttattgacatgaataaatacaaagacattgaagagagaatcccattctctgcttgrtraagaggctaaaggcaaagagtgagcatagtttttctttgtcctcctgtccrtctcccacatttccagattctttcttttttgtcttcccatttccaagaacttaatctctggatctgacttgtttcacctttcctytgcgtttgcagtcacataaaccaaatccctctgcaccgagcacagcagggctctgaagcctccctgtgccctcagccacctttctggccatctcagcaccttttgaaagtgttccttctgtgaaatgagttctttgctttatgacaagatgcaatattttggtttgctgttactcccatggcagctctggtattgtgtcactgctcagctcagag

SEQ ID NO: 1362 - DNA, 600 bp, Chicken  19866894087834_4
tgggtattttgccagcccattccatgatgaagactgacactgactccataatggcatgtcagatgcaaggagggcttgtgaagatggtacatactgtaagctggttttattgacatgaataaatacaaagacattgaagagagaatcccattctctgcttgrtraagaggctaaaggcaaagagtgagcatagtttttctttgtcctcctgtccrtctcccacatttccagattctttcttttttgtcttcccatttccaagaacttaatctctggatctgacttgtttcacctttcctytgcgtttgcagtcacataaaccaaatccctctgcaccgagcacagcagggctctgaagcctccctgtgccctcagccacctttctggccatctcagcaccttttgaaagtgttccttctgtgaaatgagttctttgctttatgacaagatgcaatattttggtttgctgttactcccatggcagctctggtattgtgtcactgctcagctcagagctaggtttctactactgccagccctgcaggatgtcagagaaatccagcctgttttcactttcttcacacgtcagctttcacagtt

SEQ ID NO: 1363 - DNA, 600 bp, Chicken  19866894087834_5
tgttgcagttctgtgattaagctgaatgctgctgattctcttgatggacagaatggatcagggtctgtttcttggagcctttgccattaacttcaataataacaggattaaggctaaagcttcaaaatctctgccttgtttatctaatgaaaaatacatgttcatagctcttcacagtcctttaggaaagcagttcactcacttcagtgcaagctagagccagagcccatgggcagtgcagtgagcactgctttgggctagtgggcaggtagcttgtggcgtggtgtttcctttgtgtgyccctaggatccaggccatgctctttatctttatcagtgatgtcagcagtggaactgagtgcatcctcagcaagtttgcagagctgtttacagtaagggtggtgagacacaggcacagattgcycagagaggtggtggatgccccatccctggagacgctcaaggtcaggctggatggggctttgagcaccctgacctagctgtgggtgtccctgttcactgcaggggtgttgggctagatgacctgtaagggtcccttccaactcaaatgattctatgatggtttgtactcacctttcct

SEQ ID NO: 1364 - DNA, 600 bp, Chicken  19866894087834_6
aaaatctctgccttgtttatctaatgaaaaatacatgttcatagctcttcacagtcctttaggaaagcagttcactcacttcagtgcaagctagagccagagcccatgggcagtgcagtgagcactgctttgggctagtgggcaggtagcttgtggcgtggtgtttcctttgtgtgyccctaggatccaggccatgctctttatctttatcagtgatgtcagcagtggaactgagtgcatcctcagcaagtttgcagagctgtttacagtaagggtggtgagacacaggcacagattgcycagagaggtggtggatgccccatccctggagacgctcaaggtcaggctggatggggctttgagcaccctgacctagctgtgggtgtccctgttcactgcaggggtgttgggctagatgacctgtaagggtcccttccaactcaaatgattctatgatggtttgtactcacctttcctcttggtgcctctgctgtacatagggtcccctccaaatcctcagcctacctcatttccatttgctctgtaagcaaccacctatgcggatccttttagctacgtagcagctttctggaatcttta

SEQ ID NO: 1365 - DNA, 600 bp, Chicken  19866894087834_7
gtcccctccaaatcctcagcctacctcatttccatttgctctgtaagcaaccacctatgcggatccttttagctacgtagcagctttctggaatctttaggtacattgattagagaagatttatgtaaatgagcaataagaccaaaataaagcatgcagtgcagtgaacccttcctgtgacagagaaagagcagaaaaaggtattttattgttcagaagacacctgaacttgtgtggttttatctgtgcaccactcccccatgcttgtttctttcagtatgtgccactatgctctttccytatggaaatcaaggcgttgagtctcctgagagcccaggggaaggcagtattagtgtccatggccttgtctgcaggcacaggtatttgtccgcacgcctgctgtgcaaggtttaggcaaaggattctcaagactttggatttggctgctgagctaattttagcagctgcctgtaaggagttgcttgccaggcctctgaggctacctgacaggccgacagcagtgctgaggtggtctggcttgggcttggggagggacagaagagcaggggtggaggagaagaggtgcaggaacagcacagg

SEQ ID NO: 1366 - DNA, 600 bp, Chicken  19866894087834_8
catgcacaacattcactcagaaatatacagataaaataatcccttggctttctgcttgctgtattcttaatgtttcattcatagctttataggcttcttcaaatattcatgtatcatatcataagtgaaagggagaaaaatacttcttttgcaggctcaaaagcaaatgggaaaaaaataaactcaaatcccagagcgccaggatcacatttttaaaaaacatgaggaaccaatgatttattattattttttttaatcagcacggtagctcgggggcccagtaatacttcattacattamatttgaacactgagcgcccctttgtattaatacttataattgcaaaaggaaaattaaatttcctcccattgtctggaggatcggtagaccgtggaagaggagggaggccatagtatggagccaggacagagctacaaggtctcaggggtgatgaccagggccattgatggtgccgggcagtggggctggtcttgtacggtcgatgcctctttgcagccttcggggcagggtttctgatggcacgcaggtgagccaggacacagcaacgctcccctggctatgcaacctttgacaaattgc

SEQ ID NO: 1367 - DNA, 600 bp, Chicken  19866894087834_9
tgtattaatacttataattgcaaaaggaaaattaaatttcctcccattgtctggaggatcggtagaccgtggaagaggagggaggccatagtatggagccaggacagagctacaaggtctcaggggtgatgaccagggccattgatggtgccgggcagtggggctggtcttgtacggtcgatgcctctttgcagccttcggggcagggtttctgatggcacgcaggtgagccaggacacagcaacgctcccctggctatgcaacctttgacaaattgcttaggaaatcactttcaaaccmgcatagataaaattaggtacctctgtgcraaggtgcctgcttctctgaggcctgagctggcaagcctgggtaaattagcgcttttggactcctgcccacttctgagtttgcaaaatgttccctttagcctctctttgctggtttcaccatctgtcaaatggggatgttaatactgactcagtctttgtacagagttttaagcttctgagactcaaagtgtgtgataataagtgttagtaattacagtaccgtcatagcatgcaaccaagtctctggagaccagcttgctgcttgaaggac

SEQ ID NO: 1368 - DNA, 599 bp, Chicken  19866894087838_1
  misc_feature (1)..(48): n is any nucleotide
nnnnnnnnnnnnnnnnnnnnnnnnnnnnnnnnnnnnnnnnnnnnnnnntgaacgttgtcttcttgctaaacagcttctcctgctttccccagtgcgacattaactttctccctgttttcttctttctctctgtctgtctcttgtcgttcttctctccccacagctctgctgctcacccaaggtaagactgctttttctcctttcctcatcctgctctgcttgtttttgtcctctttagtcagccctctctgtctgcatttgctgtgctcaggagcgaggcaccaccccagctccaggtgstcccatccagcaggggctgggtcagagctgtgtgttgagaccataacagtgactgatgcctgaaagccttcctccccattccagaaatttccctgcagtttcaacaaatggcccaaccagggcctgcagctttgaccccaactctgcccccctcctcagacagctygggggctttgctcctcctygtgcatcccagttttcctgcagtcacagaacccctcagccaagacaggcacgtggggtgtccccactgtcatgctggrggccactcagtgccagcagtactgctgggatatggt

SEQ ID NO: 1369 - DNA, 600 bp, Chicken  19866894087838_2
tgctgctcacccaaggtaagactgctttttctcctttcctcatcctgctctgcttgtttttgtcctctttagtcagccctctctgtctgcatttgctgtgctcaggagcgaggcaccaccccagctccaggtgstcccatccagcaggggctgggtcagagctgtgtgttgagaccataacagtgactgatgcctgaaagccttcctccccattccagaaatttccctgcagtttcaacaaatggcccaaccagggcctgcagctttgaccccaactctgcccccctcctcagacagctygggggctttgctcctcctygtgcatcccagttttcctgcagtcacagaacccctcagccaagacaggcacgtggggtgtccccactgtcatgctggrggccactcagtgccagcagtactgctgggatatggtggtctctcrctcctcacctccccatagcagcatttacctttattagcactgaatccaacgtcattgcctgaaatccccattatgctggtctagcttgatcacaccacagtggtgatttatgcctcctgtatttttctcactccttcaatcccaggtatgattacagt

SEQ ID NO: 1370 - DNA, 600 bp, Chicken  19866894087838_3
gactgctttttctcctttcctcatcctgctctgcttgtttttgtcctctttagtcagccctctctgtctgcatttgctgtgctcaggagcgaggcaccaccccagctccaggtgstcccatccagcaggggctgggtcagagctgtgtgttgagaccataacagtgactgatgcctgaaagccttcctccccattccagaaatttccctgcagtttcaacaaatggcccaaccagggcctgcagctttgaccccaactctgcccccctcctcagacagctygggggctttgctcctcctygtgcatcccagttttcctgcagtcacagaacccctcagccaagacaggcacgtggggtgtccccactgtcatgctggrggccactcagtgccagcagtactgctgggatatggtggtctctcrctcctcacctccccatagcagcatttacctttattagcactgaatccaacgtcattgcctgaaatccccattatgctggtctagcttgatcacaccacagtggtgatttatgcctcctgtatttttctcactccttcaatcccaggtatgattacagttcaatttgcactaaagaaa

SEQ ID NO: 1371 - DNA, 600 bp, Chicken  19866894087838_4
gtgctcaggagcgaggcaccaccccagctccaggtgstcccatccagcaggggctgggtcagagctgtgtgttgagaccataacagtgactgatgcctgaaagccttcctccccattccagaaatttccctgcagtttcaacaaatggcccaaccagggcctgcagctttgaccccaactctgcccccctcctcagacagctygggggctttgctcctcctygtgcatcccagttttcctgcagtcacagaacccctcagccaagacaggcacgtggggtgtccccactgtcatgctggrggccactcagtgccagcagtactgctgggatatggtggtctctcrctcctcacctccccatagcagcatttacctttattagcactgaatccaacgtcattgcctgaaatccccattatgctggtctagcttgatcacaccacagtggtgatttatgcctcctgtatttttctcactccttcaatcccaggtatgattacagttcaatttgcactaaagaaacatttatcaaaagctcaaggccaggtgagcagggtgaagggaaaagctggcaggttggcatgccaagttgaaaaccga

SEQ ID NO: 1372 - DNA, 600 bp, Chicken  19866894087838_5
agcaggggctgggtcagagctgtgtgttgagaccataacagtgactgatgcctgaaagccttcctccccattccagaaatttccctgcagtttcaacaaatggcccaaccagggcctgcagctttgaccccaactctgcccccctcctcagacagctygggggctttgctcctcctygtgcatcccagttttcctgcagtcacagaacccctcagccaagacaggcacgtggggtgtccccactgtcatgctggrggccactcagtgccagcagtactgctgggatatggtggtctctcrctcctcacctccccatagcagcatttacctttattagcactgaatccaacgtcattgcctgaaatccccattatgctggtctagcttgatcacaccacagtggtgatttatgcctcctgtatttttctcactccttcaatcccaggtatgattacagttcaatttgcactaaagaaacatttatcaaaagctcaaggccaggtgagcagggtgaagggaaaagctggcaggttggcatgccaagttgaaaaccgacagccccatatgtagaagctgtgagtcctgcagtggctgcagtaa

SEQ ID NO: 1373 - DNA, 600 bp, Chicken  19866894087838_6
agtttggatggcttcctttgttactttttcaactccaggacgactaggaataagttgagcacagcctccttcccagtaatctcattgctttaattcagtagcggcctaatttgatcagaaccttgggaaccaaataatctgtgttaaaataatataactttctccctctgttgcaatccagcttgattgcttttggcagctgttagcggatactgtggtcaccagctccgagaagctgttctccagctaacagagatagctgtacatgatggggacctctgtggggcgcagcctcctgcwgttccctgtgctgggatgccccatgcccctggggcacacagtgagtacttggccaggttctggtctggcagcactcagctctgctcctggagtatattgctggaatgtcactcagcagccatcatggctaataagtagggagagaagtgatgttctcatttagtccatgtcatgttagatttaggttacacagaagtgcaggaatggttgtaaaaatggctttgttgtgcgttttgggggaatcttccagtcctttccctcgcagaccatctcccacattcccctgcccttgcatggcac

SEQ ID NO: 1374 - DNA, 600 bp, Chicken  19866894087841_1
ttcatggaacacttagatgttgatgttgtactaagggacatggtttagtggtgaaatattggtgataggtggacggttggactagtcttttccaacctttgaggcctcccctcagcctcctcttctctgggctgaacaaaccaggggacctcaggcactccccagacatcttgccctctagacctttcacttactttgtagctctccaatagcttatgttgttctgatattgtggcacccaaacactgcactcaaggtgaggccacacagcacaaagtgggacaactcttccctcagccrctatcagtgctgggcctsgtgcaccccaggctacagttggccctagtggctgccagggcacactgctgacccacgttcagcttgctgtcagccagaaccccccaaatccccttctgtggggctgctctccaacctctcattctccagttgatgtatatagccacgttcagaatctggcatggggaaactctgaatatatgtacagactgagggatgaagagaaaataaagggaaaataagaactaaagtttcattgctctatgaggtgaaaggtaggacaaatttcacacgcaatgctat

SEQ ID NO: 1375 - DNA, 600 bp, Chicken  19866894087841_2
gttgatgttgtactaagggacatggtttagtggtgaaatattggtgataggtggacggttggactagtcttttccaacctttgaggcctcccctcagcctcctcttctctgggctgaacaaaccaggggacctcaggcactccccagacatcttgccctctagacctttcacttactttgtagctctccaatagcttatgttgttctgatattgtggcacccaaacactgcactcaaggtgaggccacacagcacaaagtgggacaactcttccctcagccrctatcagtgctgggcctsgtgcaccccaggctacagttggccctagtggctgccagggcacactgctgacccacgttcagcttgctgtcagccagaaccccccaaatccccttctgtggggctgctctccaacctctcattctccagttgatgtatatagccacgttcagaatctggcatggggaaactctgaatatatgtacagactgagggatgaagagaaaataaagggaaaataagaactaaagtttcattgctctatgaggtgaaaggtaggacaaatttcacacgcaatgctatacttgtttttaaaccaca

SEQ ID NO: 1376 - DNA, 600 bp, Chicken  19866894087841_3
tacagactgagggatgaagagaaaataaagggaaaataagaactaaagtttcattgctctatgaggtgaaaggtaggacaaatttcacacgcaatgctatacttgtttttaaaccacacaactgtagcatttgccaaggatcaaatgtgatttatttaaatatttcagcatctatgacttggctttagatatttgaaaacaacttacacatattatttgtaaggaattaaaaatcaacaaatacacaaacatttctgagattccaacatctatttcaataacagtattcatatttatagygttgcatctgactactaatacacttccacttgtctcctgtccagaaagaaagaaaatggaagcttgtgtgtggtgcccagagagctaacagattcatacaagaacagatttyggcaaaaaaacccacaaagtttatcagctcagaatttcatggaaatgttcatagcctttcttacgctacctttggtgcacactatctgttaccacgagatacctttttcagttgtgtcaaaccatgtagcacatttggtcctgtaatggactttatagcatgggtgcagtgctttcttgatgtgacat

SEQ ID NO: 1377 - DNA, 600 bp, Chicken  19866894087841_4
accacacaactgtagcatttgccaaggatcaaatgtgatttatttaaatatttcagcatctatgacttggctttagatatttgaaaacaacttacacatattatttgtaaggaattaaaaatcaacaaatacacaaacatttctgagattccaacatctatttcaataacagtattcatatttatagygttgcatctgactactaatacacttccacttgtctcctgtccagaaagaaagaaaatggaagcttgtgtgtggtgcccagagagctaacagattcatacaagaacagatttyggcaaaaaaacccacaaagtttatcagctcagaatttcatggaaatgttcatagcctttcttacgctacctttggtgcacactatctgttaccacgagatacctttttcagttgtgtcaaaccatgtagcacatttggtcctgtaatggactttatagcatgggtgcagtgctttcttgatgtgacatgaagctcatcaccaagcatgcctttgaactctggagacaaagactgctaggtttaatttatcactgtcttgtaggctttatatttctctgtgtgccctggtccggatctcac

SEQ ID NO: 1378 - DNA, 600 bp, Chicken  19866894087846_1
ctgtagcatttaaagactgtgctgcattcagactgctactggtttatatttagtaaatatttgtgtcaccctttgtaaataattagtgtactatttatacttcttttatttttttcatctcctcattccctgtggtagttacccgtacttaaggaataatgcatttatcctcatttcaaattaagtttagtaatgtattaagtttaataactttctaagtgtatgcgattcaccacttcccagtttttgatcagtgcaaagaacagttgcagtgttccttggccttctctgtattttctkgtattctctccttctataatgctgtctgcaaatttcatcttgcttctttttctttaaatccttactccagtcttgcatcttttgcaaaggaatcagcaatgttatgtaaatctagtaatatccaaacatctgtgtggtgtcaggagaaacacactgaaattaaaacaacactgtgaaatgtttgttcttttaatttcttgttgtttcccctttgttcatcttctgtatgctttcaggaagtaactgaagttttaaaaacaggcctgagttatttgtattcttcacaagatttttgatata

SEQ ID NO: 1379 - DNA, 600 bp, Chicken  19866894087852_1
aaccacacccttgcacaggagccacggtaggagacacattctttcacagagagtgggataacacctttcatttattctgtggcaagaaaagacaacgtgacaggtagatgtggggtgcgtggttttgcatcccattcccattggagtgctctggctgatgtcagggggttgatcacttgcacgatgagggaaggcacagctgagccacagccacttgttgcacctaggcagctgcctacatgcaaacaaggtcataccagccatagcgattgtgtgcagcaccacggaagaaacaaatcrtccatwgggacaggataacatagcactgaaagggcttttccgtacagatttctcaattagtactaaatcgtctcccccagcaacaaatccagacccgagtaaagacagttctagccctacaggctatgtagggtagtcttccaacattttctcaccctttatgagatgctccacagggtggaaaacttgtcagaaggcatctttgcatgcatcagaaatggagatcagtgcaacacagtatggagggtttagtgctcaaggcaccgtcagcacagtgcgaggggaagcactcggtcctgc

SEQ ID NO: 1380 - DNA, 600 bp, Chicken  19866894087852_2
acccttgcacaggagccacggtaggagacacattctttcacagagagtgggataacacctttcatttattctgtggcaagaaaagacaacgtgacaggtagatgtggggtgcgtggttttgcatcccattcccattggagtgctctggctgatgtcagggggttgatcacttgcacgatgagggaaggcacagctgagccacagccacttgttgcacctaggcagctgcctacatgcaaacaaggtcataccagccatagcgattgtgtgcagcaccacggaagaaacaaatcrtccatwgggacaggataacatagcactgaaagggcttttccgtacagatttctcaattagtactaaatcgtctcccccagcaacaaatccagacccgagtaaagacagttctagccctacaggctatgtagggtagtcttccaacattttctcaccctttatgagatgctccacagggtggaaaacttgtcagaaggcatctttgcatgcatcagaaatggagatcagtgcaacacagtatggagggtttagtgctcaaggcaccgtcagcacagtgcgaggggaagcactcggtcctgcttcaac

SEQ ID NO: 1381 - DNA, 600 bp, Chicken  19866894087857_1
ggggaagtgtgccagtgcttgtgtgtcatcatagggaaatgagtctaaactgtgtccttgctttctggtaccttccttggtggttttagcccttgaaaaggctgagctgtgttctttcatctattctgacagctgggacctgcaggtagctccttgggcatcagtgcttatggcagctgttgctgagccgaagaagggaattgtataggacaaaatgggaaagtgttcagctttcagaagcaggtgcaacgtaatcatagaacccaacagctctgactgcatacaggcagaggtgtgggragaggctgggcagggagatgctgaatgcatccctcctaggacctgcagatctgcacactgtgcctatcagagtctgctccgtgcatacctgtgtggtgccgtggtgctttttttttttccctccctctatagccctatataaacacagaaacatcacaactttatttcagggttggaagttggctgaaaggagtaaatcaagcatgactacaaggctgcagaagggcagttcgtgctgcagccatcactgtgaccaagacagacggtgtgcagggctggcatttgccttggcactctctg

SEQ ID NO: 1382 - DNA, 600 bp, Chicken  19866894087860_1
cttccagcaaatgggaatcattcagagccctttaaattagatcactgccgcactgtttgagaaaattcctctgtcatgtttccattgattctctccttccattagaaacaagtagaggcaagatatgaattgaaatattcaagcaactcttccagtaatagaattgtttttgattagatatactgtgactcattctgtggaagagccctgatgcaatagggcaattcccattgatctgtgccttcttatgccaagactcagctaaatgcaaggcatttttcagatccttaagtcgcacasagaggcagcaaacctcacttcagagcactacaagagaaattacaggggacaacgtcagctcccacagaagattcagagtcaaaactgacaggggttggggaagcagcaagagtgctgaacagtccaagctgcctaatgagaaaagaagaaggcaggacactgaacattaagccactgaaaaacacttgtgtcaacactaagagctsctgcgtgtaatttcgtgggcgatgcaatccatccagctcagaaatgctcttactgtagaaattacactaagatctgctgccctcattcacctcc

SEQ ID NO: 1383 - DNA, 600 bp, Chicken  19866894087860_2
cctgatgcaatagggcaattcccattgatctgtgccttcttatgccaagactcagctaaatgcaaggcatttttcagatccttaagtcgcacasagaggcagcaaacctcacttcagagcactacaagagaaattacaggggacaacgtcagctcccacagaagattcagagtcaaaactgacaggggttggggaagcagcaagagtgctgaacagtccaagctgcctaatgagaaaagaagaaggcaggacactgaacattaagccactgaaaaacacttgtgtcaacactaagagctsctgcgtgtaatttcgtgggcgatgcaatccatccagctcagaaatgctcttactgtagaaattacactaagatctgctgccctcattcacctccacagaccgtggacagccacccaagggctaactgcttggcactcatagtcctgcaaaggatttcccaaacgcctgagaagcaaagtcctacagaaktgtgagaagggaggttcctagggcctgacctcatcagctcagcgtgctgctaccttagcaatgcccaaatattgggggataaggcctgagaacgtgctgcatgagcagcag

SEQ ID NO: 1384 - DNA, 439 bp, Chicken  19866894087860_3
tggggaagcagcaagagtgctgaacagtccaagctgcctaatgagaaaagaagaaggcaggacactgaacattaagccactgaaaaacacttgtgtcaacactaagagctsctgcgtgtaatttcgtgggcgatgcaatccatccagctcagaaatgctcttactgtagaaattacactaagatctgctgccctcattcacctccacagaccgtggacagccacccaagggctaactgcttggcactcatagtcctgcaaaggatttcccaaacgcctgagaagcaaagtcctacagaaktgtgagaagggaggttcctagggcctgacctcatcagctcagcgtgctgctaccttagcaatgcccaaatattgggggataaggcctgagaacgtgctgcatgagcagcagagccagcaaaccctctctgtctctctca

SEQ ID NO: 1385 - DNA, 599 bp, Chicken  19866894087861_1
  misc_feature (1)..(43): n is any nucleotide
nnnnnnnnnnnnnnnnnnnnnnnnnnnnnnnnnnnnnnnnnnngagaaaaagatattctgaagaatcagaactacggttacattgaggatgtgagagcatttttctcccagtgttgcactacatgctaaaatattttatgtctgcataagactctacattataccagctagcacacacagcctgcatccttatcacggagcatgtcattaaaggacacagatgtgtcccagccagaggtgagctgtacagactgatcaaaatatgtcagtgaagctacaagaaccctccaagctgtctcraggcagaaatccatctctcttcagtcagaaagatgcagccagctgcaaaactgctctgctccagtgctgagtcccacagatgtccatctgtctttaacaggcaaccaagcagaactaggcagcagtcagtctctgttttttggtgggcaccacaaagctgagcgctctgcaatactcagaaggaaggcaccgcctttataatgctccctaaaaaaatcccttctccctgatgaaggtaggagataaaaatacacacatgcactcccacacagctcacagctgcacaaagcatatggtaa

SEQ ID NO: 1386 - DNA, 599 bp, Chicken  19866894087874_1
  misc_feature (1)..(78): n is any nucleotide
nnnnnnnnnnnnnnnnnnnnnnnnnnnnnnnnnnnnnnnnnnnnnnnnnnnnnnnnnnnnnnnnnnnnnnnnnnnnnntttaagcaggatatctgtcaaaataaaaagtcttccagctagagatgagacaagaaactgatttcatatacagtataaaatatatacatatgaattaaatatgtagaataaaaatttaacactatatgaaatgctgagatagtgtctgtaaatgaagaacagtaaattacaaaaggtgtataaatgtttatttcagaatgccactaaacacagactcatttstgaacttctacctaactatttactttcattgagaaaacaaaaagagtgaataagaacccattcctaatcagtaaaggacatatttgaaatgcctgtgaaatattagtaggattaggaaacttgggaacggggccaaggccactattaggcaggatgaggaccttcttgctgtagagcagggtgggctgagcaggaagaatggagagcagcatctcgtgtgggtagggcatgatttctgggagcatgaaggaatggagctgattttactgaaccatgcaaacctttctctagtaaaactc

SEQ ID NO: 1387 - DNA, 600 bp, Chicken  19866894087875_1
gcttgcaatattgagtatactgagtatagcattcaacctgtcttctctcagtttctatcaaaagagaaaatacttcaccgtttcaacatcatatgttagattacataaattttgaaaagtttgggaaccaaataatggtaaaatctttctgcttcttttgggctgcttttttttttttttttttttttcccccactgttttgaactttgttttcttcttttctgaaaatggtaatgggaaatagcaccatggcgagaaatttctttcaatcgtttaattaaatgagtgcaattcatcacraactctacacctttctgaagttatgtgataaatatattctgagaagtgattattcagaaagtggggggccgtgagatcaaaactgagagctagttattaccctgaaaatagctcaaagtcatagccttctcatgtctgtaatggacattaacagatggtctcagcagagccatgaaccagcctcccagtcacacctagcactggtttatctcctttggttgctcaaaaaacaggccaaaacaggtacatctgctgatgtgttccttttcaacccagcgtgggcactgtctccgcagcaac

SEQ ID NO: 1388 - DNA, 600 bp, Chicken  19866894087875_2
tcataatgaaggcttccaaagtctctgaggagtctcttccctccctgtcttggaggtaaaaagcagaaattgcttctgcctcagcctccatcccctatgctcattccataagcaaggagcagaccgtgaggcagaccatggtttggatacagcaactgcagggtccaaacagatcccaacatttatgctgccttgggatttgaccgatgcattccactgagcaatcatggtactagagcaggcataagtcatggttatggctgtagaaagtcacttattctgctaataaatgcagtatgraggtagcatctagtgctgctgttgaaatggtttttgtcaagcgggctccatccatggatgtcagattaaattaatgcttctcagactaactccatccttttctcttcattttaatgttttattctttagtcatgcatattggatccatgtcaagtggatatttacagttaataaattacaatttaatttttttttcccatgatgacatacaagttggtctatcttaagtatatagctgcacaacacagcttcacaattttatgcatagctgaacttggctgttctgcactggctatcaaa

SEQ ID NO: 1389 - DNA, 600 bp, Chicken  19866894087878_1
aaaaccacctgaaggaacatgtaaatatctgttaaggtcttgtagttgttgctagaagaagacaagtgctgggttatctgctgggtatctacctttaatgccagctgcaaaaatatctttacaaaccagacctttcatccaagatctctcacttgttttgttcgtttctcatcaatcccaagagtgatttacgctgttggagaaaatggagcaaatgttacaccctcttgttcatatatgcctattgaatggagtttgaactcttttcttttttttttctccaggaaataccctactgcrttgagcaggcacagacctgaccagcatgtgtggggatgtttggcaccagtgcttcaaaggtctgagaggatgtgaggctgtgggtaaaggtctccacttgtggcagggatgcgggaaccctgtggaggggaggtgggattggggctgcatagaccgggactgtttggaacagagctcccagagctttgcccagagatgcagaatttctgtgttaaaaaccaatggctttttatggagcagtttgcctgtaggtttgcaaagaagaacttycaggcatagggaaacagctgtttcagcatc

SEQ ID NO: 1390 - DNA, 600 bp, Chicken  19866894087878_2
ttttttttctccaggaaataccctactgcrttgagcaggcacagacctgaccagcatgtgtggggatgtttggcaccagtgcttcaaaggtctgagaggatgtgaggctgtgggtaaaggtctccacttgtggcagggatgcgggaaccctgtggaggggaggtgggattggggctgcatagaccgggactgtttggaacagagctcccagagctttgcccagagatgcagaatttctgtgttaaaaaccaatggctttttatggagcagtttgcctgtaggtttgcaaagaagaacttycaggcatagggaaacagctgtttcagcatcaagcatccccacgtgttattgcttgagcttgcaaccatcactgttccaatagcagctattcattttagcttgtgtgttcaattccccttcgcaccgtgggctgagaggttctgcttggactgagagcagcaacctcctggccacagagctgcactgctcctgctgttcccctgataaggagcaggggacactgcttcctgcagccagagctcctggcactatcaccacactgaaatctctaagaaaaacaacaggctccagcagagggat

SEQ ID NO: 1391 - DNA, 600 bp, Chicken  19866894087879_1
cgctggtatgcttctgttaattcttgaactgagttctgcattgtctataatgttacacagtgagtaaacaacatttgagcaagcagtctggattttaaatttcaaaggaaaatattgcttgcaagtaaaccaatattattagtagttgaataataacctgaattatgctgatcgaaccctgaattatactgattatgttacacttaaatgtttatatttttgttgctaggaaagtcaaaacatggagagctgtggaaaagaatatcgcgcaacaaaataaataatttcaatatcacatartttaatttgctaaactgacaaaagcagtgccactaagcgatgctgtgtttgtagcatggcattctgttgtctgcctgttctcatgctagtgagatttgtgccacctgaaccatgccagctctggagaagtagtactggagacatgttggaagggaagctataaatagccacgatttgcatttgtttttaatgtgaactcagtcttttttctgctagaaacacaaaatatattttgtggtaatggaacgatgacataatcattagtttggcaagtccaatctcaaaatatctttctctgct

SEQ ID NO: 1392 - DNA, 599 bp, Chicken  19866894087884_1
  misc_feature (1)..(149): n is any nucleotide
nnnnnnnnnnnnnnnnnnnnnnnnnnnnnnnnnnnnnnnnnnnnnnnnnnnnnnnnnnnnnnnnnnnnnnnnnnnnnnnnnnnnnnnnnnnnnnnnnnnnnnnnnnnnnnnnnnnnnnnnnnnnnnnnnnnnnnnnnnnnnnnnnnnnntattcatttcagcaatggacatttaattctttcccatgcaattcctccctctgttccccggcttcctcatgacaagaagttgggttcaatccaaacagatgcctgagcccacaccatcatgtctcactgctggggtctctctgacattacmcagagccaccagcacagccaggtaaatggatctggaataaatttaaaggctgaaactggaaaatagggagagaaactgaattttcagcttgcataagggcaatctaataaacacatagcccctgagcaatgactagttaatatgcagtttccaaagaacacatttctttaataccatatagatgarttagctgatcatattccctgccctcagccacacaagaggtcaagctagaagctcataatggtccctactggctgtgaagatccatgagtatttgttcatttgcagtttcacac

SEQ ID NO: 1393 - DNA, 600 bp, Chicken  19866894087884_2
gcaattcctccctctgttccccggcttcctcatgacaagaagttgggttcaatccaaacagatgcctgagcccacaccatcatgtctcactgctggggtctctctgacattacmcagagccaccagcacagccaggtaaatggatctggaataaatttaaaggctgaaactggaaaatagggagagaaactgaattttcagcttgcataagggcaatctaataaacacatagcccctgagcaatgactagttaatatgcagtttccaaagaacacatttctttaataccatatagatgarttagctgatcatattccctgccctcagccacacaagaggtcaagctagaagctcataatggtccctactggctgtgaagatccatgagtatttgttcatttgcagtttcacactttctgaaaaatttattccagcctctactttgtgtctwgataatgtggctgattgtgagtaaaaaaggcctttaataacagagtaaatcaatagagtaattgatgcaaaagggttttctctgagtaacaagatacacctcccacaaaggacacaatagcctggccagttttccccagggctgctcag

SEQ ID NO: 1394 - DNA, 598 bp, Chicken  19866894087884_3
taaatttaaaggctgaaactggaaaatagggagagaaactgaattttcagcttgcataagggcaatctaataaacacatagcccctgagcaatgactagttaatatgcagtttccaaagaacacatttctttaataccatatagatgarttagctgatcatattccctgccctcagccacacaagaggtcaagctagaagctcataatggtccctactggctgtgaagatccatgagtatttgttcatttgcagtttcacactttctgaaaaatttattccagcctctactttgtgtctwgataatgtggctgattgtgagtaaaaaaggcctttaataacagagtaaatcaatagagtaattgatgcaaaagggttttctctgagtaacaagatacacctcccacaaaggacacaatagcctggccagttttccccagggctgctcagttaataaatatgttttcattatggtgatgataacggtatatggcaaagatgtataagaaataggacaaacagcaagaagaaaattcattttaccacacaactggtactgccttttaggattgaacaactatatccagcctgcactaagg

SEQ ID NO: 1395 - DNA, 600 bp, Chicken  19866894087896_1
taagaagtacagagctagacatacagattttggaggtggtgttgatttatttctcatcattaagggcaagctcttaatatcactgacaaaaagtttctgcatcagctttggcctcaaggtggaactgtaggctcatttggacccatgggtagggtgaggcaatcctggagagggctgctctcaagtctcctgctgtgtaagtgcctgcagtcactacaccatctgctctgaaaattgcttacactgtttttacttgagcaaagaaacagtgatgggcaaaactcagggtttctgggagcyraggttkcatgcayagtattgctgccttaccttttacatacctcatggctaaaagatccaaggggaaaaacttgatttcctaattaggttgcattaagaggtgctgtaataacattatattgtgctgcattttactgtggtgactgggacagaaaagagggagatgggatgaacagatggatgaatctgtcatagctctccacagtacaccagtagccagtgagctgcacctgacaaaccagacctaacacttccctgtcaaaggggtgactgctgaggctatgggagcagacatgaaag

SEQ ID NO: 1396 - DNA, 600 bp, Chicken  19866894087896_2
aagaagtacagagctagacatacagattttggaggtggtgttgatttatttctcatcattaagggcaagctcttaatatcactgacaaaaagtttctgcatcagctttggcctcaaggtggaactgtaggctcatttggacccatgggtagggtgaggcaatcctggagagggctgctctcaagtctcctgctgtgtaagtgcctgcagtcactacaccatctgctctgaaaattgcttacactgtttttacttgagcaaagaaacagtgatgggcaaaactcagggtttctgggagcyraggttkcatgcayagtattgctgccttaccttttacatacctcatggctaaaagatccaaggggaaaaacttgatttcctaattaggttgcattaagaggtgctgtaataacattatattgtgctgcattttactgtggtgactgggacagaaaagagggagatgggatgaacagatggatgaatctgtcatagctctccacagtacaccagtagccagtgagctgcacctgacaaaccagacctaacacttccctgtcaaaggggtgactgctgaggctatgggagcagacatgaaaga

SEQ ID NO: 1397 - DNA, 600 bp, Chicken  19866894087896_3
tacagagctagacatacagattttggaggtggtgttgatttatttctcatcattaagggcaagctcttaatatcactgacaaaaagtttctgcatcagctttggcctcaaggtggaactgtaggctcatttggacccatgggtagggtgaggcaatcctggagagggctgctctcaagtctcctgctgtgtaagtgcctgcagtcactacaccatctgctctgaaaattgcttacactgtttttacttgagcaaagaaacagtgatgggcaaaactcagggtttctgggagcyraggttkcatgcayagtattgctgccttaccttttacatacctcatggctaaaagatccaaggggaaaaacttgatttcctaattaggttgcattaagaggtgctgtaataacattatattgtgctgcattttactgtggtgactgggacagaaaagagggagatgggatgaacagatggatgaatctgtcatagctctccacagtacaccagtagccagtgagctgcacctgacaaaccagacctaacacttccctgtcaaaggggtgactgctgaggctatgggagcagacatgaaagagagaat

SEQ ID NO: 1398 - DNA, 600 bp, Chicken  19866894087896_4
ctagacatacagattttggaggtggtgttgatttatttctcatcattaagggcaagctcttaatatcactgacaaaaagtttctgcatcagctttggcctcaaggtggaactgtaggctcatttggacccatgggtagggtgaggcaatcctggagagggctgctctcaagtctcctgctgtgtaagtgcctgcagtcactacaccatctgctctgaaaattgcttacactgtttttacttgagcaaagaaacagtgatgggcaaaactcagggtttctgggagcyraggttkcatgcayagtattgctgccttaccttttacatacctcatggctaaaagatccaaggggaaaaacttgatttcctaattaggttgcattaagaggtgctgtaataacattatattgtgctgcattttactgtggtgactgggacagaaaagagggagatgggatgaacagatggatgaatctgtcatagctctccacagtacaccagtagccagtgagctgcacctgacaaaccagacctaacacttccctgtcaaaggggtgactgctgaggctatgggagcagacatgaaagagagaatgaagcca

SEQ ID NO: 1399 - DNA, 600 bp, Chicken  19866894087897_1
aagtataaacacatagcagatttagtggtctatatttctgcattactgctctataaatatttataaagatcctcataacatttatttctttaagctaaagctatttagcttaactactttcccacaagaaaggaaaaacctctcaaatatctattatttcagtttaactttgcatatcccttgtacagtttcctagcttattgctgttgtttgtttgtttgttttctgctctttttttctcctgctttttgttttattgaggccatcataattcagcaaactctggaactaccttactaktraagcctaaggttgtgctgtgtcctatctgtaaagatctgaccccagggaagggctgtcattttcacaacactcttgcactatgaaactgtcatataaaatatatttgtgtattatacaaggaatgtgtgcaggcatatctgtatatttactcatccatgttatctcttctgtatgaatctgggtgcactatcagaaaaattattccttacctatagctcctatcgactgaaaayaaaaggctttctaagcacatgaggaatatgcatattcagtgttgttcatattgactatgtttgt

SEQ ID NO: 1400 - DNA, 600 bp, Chicken  19866894087897_2
gtataaacacatagcagatttagtggtctatatttctgcattactgctctataaatatttataaagatcctcataacatttatttctttaagctaaagctatttagcttaactactttcccacaagaaaggaaaaacctctcaaatatctattatttcagtttaactttgcatatcccttgtacagtttcctagcttattgctgttgtttgtttgtttgttttctgctctttttttctcctgctttttgttttattgaggccatcataattcagcaaactctggaactaccttactaktraagcctaaggttgtgctgtgtcctatctgtaaagatctgaccccagggaagggctgtcattttcacaacactcttgcactatgaaactgtcatataaaatatatttgtgtattatacaaggaatgtgtgcaggcatatctgtatatttactcatccatgttatctcttctgtatgaatctgggtgcactatcagaaaaattattccttacctatagctcctatcgactgaaaayaaaaggctttctaagcacatgaggaatatgcatattcagtgttgttcatattgactatgtttgtca

SEQ ID NO: 1401 - DNA, 600 bp, Chicken  19866894087897_3
ttctcctgctttttgttttattgaggccatcataattcagcaaactctggaactaccttactaktraagcctaaggttgtgctgtgtcctatctgtaaagatctgaccccagggaagggctgtcattttcacaacactcttgcactatgaaactgtcatataaaatatatttgtgtattatacaaggaatgtgtgcaggcatatctgtatatttactcatccatgttatctcttctgtatgaatctgggtgcactatcagaaaaattattccttacctatagctcctatcgactgaaaayaaaaggctttctaagcacatgaggaatatgcatattcagtgttgttcatattgactatgtttgtcatcagctacaatgatgtactttccttcctgtggtttggttgctgaggactaggagcaaggaaggccagagattctggcacagtccatttagtgcgccctgcactgctgaagaatggaagaagaaatgagagttgagtccccacagttcccaaagctacaaagagaacagaaagccaaagctagacacaaattaaacaagcattctgccctttgcaacagaaaccaaatccccatt

SEQ ID NO: 1402 - DNA, 600 bp, Chicken  19866894087898_1
gagcatcaaaaagtacttctggacctcttgtcctgcatggtgctactccatctctctttgggatgaagtgctacttgttcttgtcactgtcaagacacagaaaggacaaaacgaagtacaaaaatagtttctgtttagctggtctctactgtctactgcagtcaacagtttctcctgaaaatggacagacctagccaggtagtatttgagaataaggaatatccagctgtcactaacacaatcaaaataaaacagaagtgtagaaacacctgtctagctataaccaacatgtgctgcttyctctgcttgttgggcatgtccatcaggtaccatacacatgaatttacaagtcaagctcttaggccattttctccaatgctttctcctcagtgcataatatacccttcagtagacaaggcacaaatagacacaatcccctctccatcacaaaaatggtttatacacacacttcacagaggtaaataacaaaactttcataaggcaatggaaaatcgccttgtttctgtgtagcatgtttctgttagtcatcttactcayggggaaggaaagtgctcttacaaggctggtgggatccgaatg

SEQ ID NO: 1403 - DNA, 600 bp, Chicken  19866894087898_2
tgtagaaacacctgtctagctataaccaacatgtgctgcttyctctgcttgttgggcatgtccatcaggtaccatacacatgaatttacaagtcaagctcttaggccattttctccaatgctttctcctcagtgcataatatacccttcagtagacaaggcacaaatagacacaatcccctctccatcacaaaaatggtttatacacacacttcacagaggtaaataacaaaactttcataaggcaatggaaaatcgccttgtttctgtgtagcatgtttctgttagtcatcttactcayggggaaggaaagtgctcttacaaggctggtgggatccgaatgccctgcttgttcctcacggactatgtttgtatgaagaaatttgagtagaatcatacgtacaacagctttgcattgaggcttttgggaaggtttcacaagctttcctgttcaataaataatccttttggagcctttctaaacgcaacagtgttcagaaaagcgttacaagttggcaaacagtatgcagtatagccatcatgaatagacttcaggaactgcagatcttgcctgagcagataagcgccatttgcagggaaa

SEQ ID NO: 1404 - DNA, 600 bp, Chicken  19866894087900_1
tctgccactgcccaggacttcggtttcttctgcagcaccttgtgccatccaaaaatctagcacagggaccaaggcagcaggtagaggaaagctggttcctccttctgctttctttacatctcaaatcttttgcctcaaaagccagctgagtcggtgcgtccctcctttgctgggttgctgtgcagggatttgcacccaaaatttgctatgtgactgaaactgctgttagaccccaactgaagtctgagtgttgaggagaggagccctttggaggccagcaggcaggaaggacagatggayggatggacaggcagtgggttggcagtgctcacagaacagtgcctttgtacagagcagcagcaggaccttccgacagctctttaatgagttgttctgttgagggcagcctaccctaacccacgcagacagtattcacattgatcctggggctaatggcaaaacctgctcccagccctacagggggaggcaggagcaagaagacaagcagagagaggaagcatccccaccccacccctctgcaatggggcattgcccacatccatcagcccatcaccccctcacttccacctctgcccacat

SEQ ID NO: 1405 - DNA, 484 bp, Chicken  19866894087900_2
ccaggcaattaggcaactaattaaacacttaccctcagcttcataaacagaagagagagagaggggaaaaaggagggagggagggagctggctccggtttctgtgaaatattagctgtcagaaattgctgcttgcaaggaaaggtgcacaaaggcagacggatccaggcggacagaatgactgacggctcacagctctcggcccctttgctttgacatgagctgtggggtttgtcctcccgggcaggtgatgggcttcaggacacgaggagatgccccacaccctgggacacccaccccrtgctaaagcacacatgatgaaaggtgaaagcagaagaaatgcagcaagctgcaagccggaccatggggagaattgctttgcagtggaaaataagcaggaaaggccccagagtgagcacactgtagggtttatgttctattaggacacctcgggtttcatccattcagggacttttaggacccac

SEQ ID NO: 1406 - DNA, 600 bp, Chicken  19866894087907_1
cctggctcgtattattgaaagcaatatgaggaaccacagctcagccacacaacaagaacacacttacctatcagtgaaagcaaaacgggctgacactgtgctagcggtctatgccaacagggcttctgtagaaacacccttaaaactagtggaattgcttatgcacctgccccaggatcagacagcaaaagatcgtgcaagattattgccatttacccagctcgtttttgtctttaaatgaaaaccactcaccaaatggtgaaatagcagcaattcatgctgctcaccacaacttcagcrcaacgctggtggggacgcatttagcacagctcaagttctgtgccttccctgctgcttttagacatcacgtcccagatttagagggcatcatttacaacaacgccagattgtcactgtacagaagtggtaattacacagactgttaaaagagcatttacaagagcgccttggtaaaaatcctgcagcagctacgtgatataaaacggggtgggaggggaagtatccttccatgactgcaagaagtggaattcaagagctttggcagcgtttgcttttgggagctaccaaactccaaacaat

SEQ ID NO: 1407 - DNA, 599 bp, Chicken  19866894087909_1
  misc_feature (1)..(102): n is any nucleotide
nnnnnnnnnnnnnnnnnnnnnnnnnnnnnnnnnnnnnnnnnnnnnnnnnnnnnnnnnnnnnnnnnnnnnnnnnnnnnnnnnnnnnnnnnnnnnnnnnnnnnnatttttgaaagctgtttattaaaaaaggcacccacaaataacaaaaatctatctcaagtgttcccagtacatgacaagtgaaattgggacttctgatgctttcttggcaaaaggagtgattttagtcaagggtagtaaaggaagacattcatcacgactagtcaatctaaagcaaattgtgtttgtagatgactttgrcgcaaaactttagagagcatgttcagaaagaaggacacggtaaattacaaacctgttctgctgatgtttgctatgaggtcattaaagcaattatgttggtagcaggttgcttcgattcatttccttctttaagtgtagtttcttcattacactcaacaacccttctccttccacttctgtgactcctctatacgcctttrcctcaggctcacagtttggaaatatttttcatttgtatatgttaatgacattaaattgtgcacattggaatgagattgagagcatactgaaaattacat

SEQ ID NO: 1408 - DNA, 600 bp, Chicken  19866894087909_2
ctttcttggcaaaaggagtgattttagtcaagggtagtaaaggaagacattcatcacgactagtcaatctaaagcaaattgtgtttgtagatgactttgrcgcaaaactttagagagcatgttcagaaagaaggacacggtaaattacaaacctgttctgctgatgtttgctatgaggtcattaaagcaattatgttggtagcaggttgcttcgattcatttccttctttaagtgtagtttcttcattacactcaacaacccttctccttccacttctgtgactcctctatacgcctttrcctcaggctcacagtttggaaatatttttcatttgtatatgttaatgacattaaattgtgcacattggaatgagattgagagcatactgaaaattacattgtttccaaagctttagaaatctatttatttgactattctattagcttccaaatagtatttctaatagcatacttttactttttttctgcccaaaataacaatgagagacatctgtttgctaccttcatattcatataaatatgttgcatacttaaatgtcttatcattgttgtaaaatttacagtggttctccactgaaa

SEQ ID NO: 1409 - DNA, 600 bp, Chicken  19866894087910_1
gcaagattctcaggtctgtctactgtactgcacagagaggccctcaggaaaagccaaggaagcttttggtaacccaatgtccctaagcattatcaaggcaacacaaacaaaagtgacagagaaaacactgacattattcagatttttcctgagtacaggaaactgagatttagaatcacaccagagtccttttgacagcttaaaaaatgatgtcaggtctcccaggtcctgaagcagtgcctctcaactgtgaggtaaagccaggcaagcaactgaatcctgctaaactccaaatgatcyagctattagcacagccagaacaacacttgaaccaacaacgctgaagcaggaaaccacccatctcttattaaataaagcaggaaggactgcatgcatgcatctatgttatacataagtggaacacggattcctctttagtaattgtaacttttctagagggaagggagaagaatttactggaaagaggactcacgtgctgtaaratactgctctgaataagcagaggagcctccagcaggctggattcttaatctaaacgattctgcattggcagctgacagtcctttcagtgaagaggca

SEQ ID NO: 1410 - DNA, 579 bp, Chicken  19866894087910_2
aaaatgatgtcaggtctcccaggtcctgaagcagtgcctctcaactgtgaggtaaagccaggcaagcaactgaatcctgctaaactccaaatgatcyagctattagcacagccagaacaacacttgaaccaacaacgctgaagcaggaaaccacccatctcttattaaataaagcaggaaggactgcatgcatgcatctatgttatacataagtggaacacggattcctctttagtaattgtaacttttctagagggaagggagaagaatttactggaaagaggactcacgtgctgtaaratactgctctgaataagcagaggagcctccagcaggctggattcttaatctaaacgattctgcattggcagctgacagtcctttcagtgaagaggcacctgagtacttaataacagagaattaacaacctgacaataggcaaggtacttgctcaggcattagtaaggaaacagagtgacaccttacatgaaaagctacttgaatgccatttaaacttgtcaaattgcagaaaatagttgcaaattgataaaaatcaaggttattcattacgtgaactaa

SEQ ID NO: 1411 - DNA, 600 bp, Chicken  19866894087913_1
tctcactctgaatgcagggactgacagagccatcacctgggcaacacccagcctgactgtgctaggaagagaactatgcagtgcctccaggtcaaaacaaaaaccttcggttttgtgtgcatgtgtctgcgtgccactgtctgcagtgatgtgtagctatatttcctccactctaatatgaatcaaaagtcagagtcactcgaggacaaataatttgcaaaatgtctatcatggagcattaaaacatgtaaccaaattagaagaactgttgtctttacatctgcaagttgtctgctttgrtgttcttagaaaagcatttgctctttatagtaatcagaatgtattcagctttgcactctgccctattgcaattccactttggctatgcagtcacataagccttgtccagctgctgcagtatgttttgagggcatcttgattgcatgttactcagccatctacttcccagcacttttttcatgagtgtttagaactacagtatctcagagtaatcgtatgtacgtactggagtgacggaaagcaaaatgccattaagaagaagcagtcttaagtatgcattatacaaacaattagaggaaa

SEQ ID NO: 1412 - DNA, 600 bp, Chicken  19866894087919_1
tgcatggcctggcctggccttgctttgccttgccttgcctggcctagccctgccttgacttgccttgctctgccaggcctggacttgtcttgtgttgcctggttttgccttgccttgcctagtcttgccctgcctggcctggacttgacttgacttgacttgcctggccttgccttgcctagccttgccctgcctggcctggacttgacttgacttgcctggccttgccatgccttgcctagacttgccctgccttgcctggacttgacttgacttgcgtggacatgactggccttgccygggcttgaatttttttgcctggccttgcctagacttgccttgcctttatggccatgcttggccctgccttgcctagacttgccctgcctggcctggactkgacttgacttgcctggccttgccatgctgtgcctagacttgccctgcctgcctggacttgccttgccttgcgtagacttgcctggccttgcctgggcttgattttttgcctggccttgcctagacttgccttgcctttatggccatgcttggccctgcctggcctgggcttgccttgtcttgcctggactttcctggcct

SEQ ID NO: 1413 - DNA, 600 bp, Chicken  19866894087919_2
ggttttgccttgccttgcctagtcttgccctgcctggcctggacttgacttgacttgacttgcctggccttgccttgcctagccttgccctgcctggcctggacttgacttgacttgcctggccttgccatgccttgcctagacttgccctgccttgcctggacttgacttgacttgcgtggacatgactggccttgccygggcttgaatttttttgcctggccttgcctagacttgccttgcctttatggccatgcttggccctgccttgcctagacttgccctgcctggcctggactkgacttgacttgcctggccttgccatgctgtgcctagacttgccctgcctgcctggacttgccttgccttgcgtagacttgcctggccttgcctgggcttgattttttgcctggccttgcctagacttgccttgcctttatggccatgcttggccctgcctggcctgggcttgccttgtcttgcctggactttcctggccttgcctgcacttgaactgcctggcctggacttgccttgtcttgcctggacttgccctggctggactggagttgccttttcttgcctggccttgccttgcct

SEQ ID NO: 1414 - DNA, 600 bp, Chicken  19866894087919_3
ctggtgttgcctttccttgcttggccttgcctagccctgcctagcctggcttggcctaggcctgccttgccttgtattgcctggacctgccctggcctggacttgccttgccttgccttgcctagcctggtattgccttgcgtggacttgccctgcctggcctggacttgccatgccttgccttgccttgcctggcgtggacttgccttttcttgcctggccttgcctggccttgcctgcatgtgaactgcctggccctgccttgcctggacttgccttgccttgcctagcgttgctttscctagccctgcctggcttggcctggccttgccatgccttaccttgccttgacttgactggccttgccttgactagcgttgccttgcctggccgggccttgacttgctttgccttgcgttccctgcctggcctggaactgcctggccttgcctggacttgccttgcctagcgttgccttgcctggcctggcctggccttgccttgtctggcctggcctggatttgccttgcctgaactttccttgtcttgccttgacttgccttgccttgcctagcgttgccttgcctgacaaggcctggt

SEQ ID NO: 1415 - DNA, 600 bp, Chicken  19866894087919_4
ccttgccttgactagcgttgccttgcctggccgggccttgacttgctttgccttgcgttccctgcctggcctggaactgcctggccttgcctggacttgccttgcctagcgttgccttgcctggcctggcctggccttgccttgtctggcctggcctggatttgccttgcctgaactttccttgtcttgccttgacttgccttgccttgcctagcgttgccttgcctgacaaggcctggtcttacgttgtctggcctggcctagttttgtctagcctggccttgcctggacttgccttgyctagcgttgccttscctggctgggcctggcctttccctgcctggccaggacttgccttgccttgcctggacttgccctgcatggcctggcctggccttgctttgccttgccttgcctggcctagccctgccttgagttgccttgctctgccaggcctggacttgtcttgtgttgcctggccttgccttgccttgcctggccttgcctagacttgccttgcattaccttgccttgcctggccttcccttgccttgccgtgtctggcctggacttgccttgccttgtctggccttgcgtggc

SEQ ID NO: 1416 - DNA, 600 bp, Chicken  19866894087919_5
gcgttgccttgcctggccgggccttgacttgctttgccttgcgttccctgcctggcctggaactgcctggccttgcctggacttgccttgcctagcgttgccttgcctggcctggcctggccttgccttgtctggcctggcctggatttgccttgcctgaactttccttgtcttgccttgacttgccttgccttgcctagcgttgccttgcctgacaaggcctggtcttacgttgtctggcctggcctagttttgtctagcctggccttgcctggacttgccttgyctagcgttgccttscctggctgggcctggcctttccctgcctggccaggacttgccttgccttgcctggacttgccctgcatggcctggcctggccttgctttgccttgccttgcctggcctagccctgccttgagttgccttgctctgccaggcctggacttgtcttgtgttgcctggccttgccttgccttgcctggccttgcctagacttgccttgcattaccttgccttgcctggccttcccttgccttgccgtgtctggcctggacttgccttgccttgtctggccttgcgtggccttgctgtgactgg

SEQ ID NO: 1417 - DNA, 600 bp, Chicken  19866894087923_1
aacaacacctaaaaggcaggatgtaaggccagctacttggatttctcatttatgtttaaattggttccaaaagacagggttttttgtggctgaaatgccccaggtctggccctccagtctgttcagccagttggggttaaactcggggttaaacatttgcccagtcgtggcttccaaaccaaaaattgcaaccttgaagtgctgtctttagtaatacttacctctgtgctgaaggattaaacagttaaataagcagaatgttttgcgctgctgttacctaagtgtatgtctaaggactgmattgcctagaactctgaaacctgaaaaaccatcaycacgctttggaagcccaggttggttgggttcatgtgttttcagtggcatttgttgtgaaatttcaccacagacctccgaaggcctaaaattcattcttcagccatcccctcttgtttttaacactctcctgttgcagcctggctccgtawcactgacgtgctgtacctgatagtgctgcagcagatactttgagggagctcgggctgcccaagcgtggtgttttcatgctgtccccaccagctgcgtgtcagattctcaggcacc

SEQ ID NO: 1418 - DNA, 600 bp, Chicken  19866894087923_2
cttggatttctcatttatgtttaaattggttccaaaagacagggttttttgtggctgaaatgccccaggtctggccctccagtctgttcagccagttggggttaaactcggggttaaacatttgcccagtcgtggcttccaaaccaaaaattgcaaccttgaagtgctgtctttagtaatacttacctctgtgctgaaggattaaacagttaaataagcagaatgttttgcgctgctgttacctaagtgtatgtctaaggactgmattgcctagaactctgaaacctgaaaaaccatcaycacgctttggaagcccaggttggttgggttcatgtgttttcagtggcatttgttgtgaaatttcaccacagacctccgaaggcctaaaattcattcttcagccatcccctcttgtttttaacactctcctgttgcagcctggctccgtawcactgacgtgctgtacctgatagtgctgcagcagatactttgagggagctcgggctgcccaagcgtggtgttttcatgctgtccccaccagctgcgtgtcagattctcaggcaccattcccaaccttgcagcttaaacattagaaacact

SEQ ID NO: 1419 - DNA, 600 bp, Chicken  19866894087923_3
ttgcaaccttgaagtgctgtctttagtaatacttacctctgtgctgaaggattaaacagttaaataagcagaatgttttgcgctgctgttacctaagtgtatgtctaaggactgmattgcctagaactctgaaacctgaaaaaccatcaycacgctttggaagcccaggttggttgggttcatgtgttttcagtggcatttgttgtgaaatttcaccacagacctccgaaggcctaaaattcattcttcagccatcccctcttgtttttaacactctcctgttgcagcctggctccgtawcactgacgtgctgtacctgatagtgctgcagcagatactttgagggagctcgggctgcccaagcgtggtgttttcatgctgtccccaccagctgcgtgtcagattctcaggcaccattcccaaccttgcagcttaaacattagaaacactgttctaagtaatcctaccctgctttatgtaaaataagtaaatctcaggcttatctcagtagacacagttcaatgacttttatttccacatggtaccttccgaattttttgaattactgatcaccctgatgacttccccatggttaggcca

SEQ ID NO: 1420 - DNA, 599 bp, Chicken  19866894087925_1
  misc_feature (1)..(22): n is any nucleotide
nnnnnnnnnnnnnnnnnnnnnntttgcgtgcgtcagaaatgtagcactgagtcccacaagccccctcggtacgtttgcaacaaagctcacgtttgtcacaaataccaccagcacagtacttccacacatcgttacagacgcggctaccacagaagcttataaggcaagagttgaatgtcggcggagccagccggtctcagtgaccagcctgcagcagcggctgccacagacgtgagaaccggttggggcaggacggctccacacgagcacagcaccagggcccgcgaagccacagctggmtgggggaaaccaggtgaaacctgcgcagactcaactgaaggtgcttaagggctaccaggcctcagcgccggccgtctccaaaggtctcccccggacctgcagagcggctccgaggcagcgcgctcagggcctccaacaacaaaatccgcgagggtcgggaccggcctccaaacccaaccgcaccgagctgcgcacgcggcgagccgcgccgagcgagcagaacgggcccggctatcccagagagcgactccgggcagcccagggccccctcccgtgcgcccagggcggcgcagctgggg

SEQ ID NO: 1421 - DNA, 523 bp, Chicken  19866894087935_1
  misc_feature (1)..(15): n is any nucleotide
nnnnnnnnnnnnnnncccttgtgctggccttcttactggttctaagtactgaaactggctggtaattgatacctattaacatgtttgttgttcagattacagaaatggaaacactatactatttttcctgtgaaaggatacgttaatgagggacaatgacttacaatgcaatgtcagtactctgctcttgattaaattaaaaggttgtttttattttttactttaaattatgctatttcacactgttgggcagctgagtgtataaaacctaagtgcaataaacagggatgtttagcttawgtttgaagagctaataacattccatatgacaataaactaactttgtacttatttttgacagcctttgtctcatrcatatctttattctattcatattagaaaatccacagactttattaatgcgattttaaagaagaaattcaatctggagtgactctgtttctgattatggagtcactccaaatcttgagtcagttgagcaattttaaaaagcatgtttgag

SEQ ID NO: 1422 - DNA, 449 bp, Chicken  19866894087935_2
cccttgtgctggccttcttactggttctaagtactgaaactggctggtaattgatacctattaacatgtttgttgttcagattacagaaatggaaacactatactatttttcctgtgaaaggatacgttaatgagggacaatgacttacaatgcaatgtcagtactctgctcttgattaaattaaaaggttgtttttattttttactttaaattatgctatttcacactgttgggcagctgagtgtataaaacctaagtgcaataaacagggatgtttagcttawgtttgaagagctaarcatatctttattctattcatattagaaaatccacagactttattaatgcgattttaaagaagaaattcaatctggagtgactctgtttctgattatggagtcactccaaatcttgagtcagttgagcaattttaaaaagcatgtttgag

SEQ ID NO: 1423 - DNA, 600 bp, Chicken  19866894087941_1
attaattaaatgggtcagatccatctcactgtaaaaaatcttactgtttgtgattgactagaaagcagatgacaaatattctggatgctgttgtctaaatttggacagagatatcctatttcagaacttcagttcaaagtgatctgcaaatgcctaacctctgtgaaagaataaggtgttttttcctctgcgctttaaagcgtggctgatagtgtagcagtggtatgtctgtcattttccttgagaaaatcactgaactatgatcaaattataagtctttcaaatattcttgtgttttawtaagagatttagatgttgacagctaaaatataataagattggcacactgaaaatgtttaaggcttctaagaaaggagatcaggctctctgagttggactcatcctgctttggatgcttacaactcaaaccttcacatctgtgtttgttgttttatattcccatcaaatgaggttcaacttgtctcactccaatttataggagggagaggaggttctttgatctatgtatacccagtgtgagattaagaaacaacggttcaaatgttggtccaaccagtttattgcaaatgttaataaggg

SEQ ID NO: 1424 - DNA, 600 bp, Chicken  19866894087943_1
tattgcaaagaaaggctctaaaagtgttggagtcatgctcgctagtgaggcaagcttattgggaggatctgcatattagccacagatctgtgtcagcacagaattaaaatgcttccttactgcaccagtctgcacttttagatcaaaatctctgctttttacaatgttatatcagaaacaatgtacaacaaaaggtactccattagcacaaacttatgtagctgcatctcactgcaagtagattgcttttgggaagagcagcatgctacttcattaatgacttgctttcacatggccacrcagcaggaaatgctatgcaccagaacaacaaacacaactgtctttttacttcgctgctcaaaggtgcacacagggctggagcagtgcatgttgtgtggatggaaaaatgcatagctgtatcaaattaccgcttttaattgcattattttcaatgagcaatactcactttgtcacataggtcccagattcttgccgttccatcattgctggcagagataaataagtcttttgaggggtgcgttgctaagccccagatttccccttccatgtggcagtcaattagtaagtttgaagcagcat

SEQ ID NO: 1425 - DNA, 600 bp, Chicken  19866894087943_2
tctactttagctatactgccactgtctgaactgcaagagccttcccagcaaagacttggttcagaacagtctcctcctttgtgtctcctatccaatcttcaccaacaacagcagacggcaatgcatgccatgctgtgaagtctgccacattggctctcttaccttccctctgcagacggagcgcacacactcaatcagctgtcctgtctcgagctgaaatgctcggcaccgtttcatctcttggtcccacagctttacggcccctccttccttagtgctgaaaagcagagcattgtgttwcacagatgtctgctgtgtgggctataaccaatctttacatcaatctgcatcacttcctactaaggacacctcgtaatgtgaagggtaatgtaaagtaaataataaaaatgtggcagataacacagtcattcagcatgtcttgtattgattaaataaaaatgatatgagaaagaagaaagcagtgtgctttaggaagagtatatgtcttacggtctctctttgcctcctgtaacaataagtccatctcgaagagtggtgtacatcgtaaacactggtcctgtgtgagcttttgccacaagc

SEQ ID NO: 1426 - DNA, 600 bp, Chicken  19866894087945_1
gtgaaaagtaaggctgatagataagataaatttatgtaaacaaggtaaatgaatgtggtcagtgcttctactgtcttcatgatatcagttccaacagcagctgtttttatttaaacttctcttagctctcatccagatcttcccaacaattgccctatctgcattttggtgttgttcttcccacgaatttagaattcataggtgagatattttgccattttgctgagtttcattttctcactgaatacttcgtcaaaccgtaagttctgttttggagtgaaatggttcttccagtcgccracggtacctggaagagcagggacagaaaaagaacagtgagtctggcaatatatagcaatgaaacaaatcaaaggcagaccagttttattaatgctgcggttggcacaaattgttattgtgttaccaaccatagtctctgtgatgggtcatggtaggtcacgattatgagtaattattttattgttttgatgagactttgatgtgagaagctgaatcatcatccatattaagccctaaggcttgtttctcataatgtgtcacctggtggtgccagcagtactaagtgacacaatgaagatt

SEQ ID NO: 1427 - DNA, 600 bp, Chicken  19866894087955_1
gtggccagctaaacagtagatcctgagtttccctctgccctctgcataatacttccgagtcagaggaaagaaagcaggcaggggtgggagcattctctggtggggccctgggagctgaggcatgcagtgagccgccagcggtgattcagcctaatacagctaatggcatgcagccagacagaggaaattgtgggatcgtgatgcagcaactgtcccgtagcagtttgtttccatcatccagacgtgacttaatgccacctcacgcgttcactctttcctgtagctaaatgccttccctgycaaggggaaggcgccgagacactgcacctttgggaaaagggggtagtctgtgagtcctaaatgacgtgagagtcgggagcaggcggggagactctggggttgtgcctggtggaagcagctcaccaaagaccccatgagctcttccagcaccccagaaagctctccaggtttctgtgcatgaccctgtgcttggrcatcggttctcaragagaacctatagcacaggagracccgagatagtggctgagagtggtcccargtctaatgggacgatgctgttaaccarctsctgtgtgctaa

SEQ ID NO: 1428 - DNA, 600 bp, Chicken  19866894087955_2
atcgtgatgcagcaactgtcccgtagcagtttgtttccatcatccagacgtgacttaatgccacctcacgcgttcactctttcctgtagctaaatgccttccctgycaaggggaaggcgccgagacactgcacctttgggaaaagggggtagtctgtgagtcctaaatgacgtgagagtcgggagcaggcggggagactctggggttgtgcctggtggaagcagctcaccaaagaccccatgagctcttccagcaccccagaaagctctccaggtttctgtgcatgaccctgtgcttggrcatcggttctcaragagaacctatagcacaggagracccgagatagtggctgagagtggtcccargtctaatgggacgatgctgttaaccarctsctgtgtgctaaccaggcctttctctctattccccagggaagacgatgaagctgtagagatgcttccctacgtgatcgccaccctgggctcagcagggtccacctgcaaagcctccacatgcagcaacagcaccaaggactactgctacagtgcccgcatccgcagcacagtgctgcaggggctgccctttggcggggtgcccact

SEQ ID NO: 1429 - DNA, 600 bp, Chicken  19866894087955_3
aactgtcccgtagcagtttgtttccatcatccagacgtgacttaatgccacctcacgcgttcactctttcctgtagctaaatgccttccctgycaaggggaaggcgccgagacactgcacctttgggaaaagggggtagtctgtgagtcctaaatgacgtgagagtcgggagcaggcggggagactctggggttgtgcctggtggaagcagctcaccaaagaccccatgagctcttccagcaccccagaaagctctccaggtttctgtgcatgaccctgtgcttggrcatcggttctcaragagaacctatagcacaggagracccgagatagtggctgagagtggtcccargtctaatgggacgatgctgttaaccarctsctgtgtgctaaccaggcctttctctctattccccagggaagacgatgaagctgtagagatgcttccctacgtgatcgccaccctgggctcagcagggtccacctgcaaagcctccacatgcagcaacagcaccaaggactactgctacagtgcccgcatccgcagcacagtgctgcaggggctgccctttggcggggtgcccactgtcctagcccttg

SEQ ID NO: 1430 - DNA, 600 bp, Chicken  19866894087955_4
tccatcatccagacgtgacttaatgccacctcacgcgttcactctttcctgtagctaaatgccttccctgycaaggggaaggcgccgagacactgcacctttgggaaaagggggtagtctgtgagtcctaaatgacgtgagagtcgggagcaggcggggagactctggggttgtgcctggtggaagcagctcaccaaagaccccatgagctcttccagcaccccagaaagctctccaggtttctgtgcatgaccctgtgcttggrcatcggttctcaragagaacctatagcacaggagracccgagatagtggctgagagtggtcccargtctaatgggacgatgctgttaaccarctsctgtgtgctaaccaggcctttctctctattccccagggaagacgatgaagctgtagagatgcttccctacgtgatcgccaccctgggctcagcagggtccacctgcaaagcctccacatgcagcaacagcaccaaggactactgctacagtgcccgcatccgcagcacagtgctgcaggggctgccctttggcggggtgcccactgtcctagcccttgatttcatgtgctttcttgtaag

SEQ ID NO: 1431 - DNA, 600 bp, Chicken  19866894087955_5
tcacgcgttcactctttcctgtagctaaatgccttccctgycaaggggaaggcgccgagacactgcacctttgggaaaagggggtagtctgtgagtcctaaatgacgtgagagtcgggagcaggcggggagactctggggttgtgcctggtggaagcagctcaccaaagaccccatgagctcttccagcaccccagaaagctctccaggtttctgtgcatgaccctgtgcttggrcatcggttctcaragagaacctatagcacaggagracccgagatagtggctgagagtggtcccargtctaatgggacgatgctgttaaccarctsctgtgtgctaaccaggcctttctctctattccccagggaagacgatgaagctgtagagatgcttccctacgtgatcgccaccctgggctcagcagggtccacctgcaaagcctccacatgcagcaacagcaccaaggactactgctacagtgcccgcatccgcagcacagtgctgcaggggctgccctttggcggggtgcccactgtcctagcccttgatttcatgtgctttcttgtaagtttgcctatggctgctttggcaccttcccc

SEQ ID NO: 1432 - DNA, 600 bp, Chicken  19866894087955_6
aatgccttccctgycaaggggaaggcgccgagacactgcacctttgggaaaagggggtagtctgtgagtcctaaatgacgtgagagtcgggagcaggcggggagactctggggttgtgcctggtggaagcagctcaccaaagaccccatgagctcttccagcaccccagaaagctctccaggtttctgtgcatgaccctgtgcttggrcatcggttctcaragagaacctatagcacaggagracccgagatagtggctgagagtggtcccargtctaatgggacgatgctgttaaccarctsctgtgtgctaaccaggcctttctctctattccccagggaagacgatgaagctgtagagatgcttccctacgtgatcgccaccctgggctcagcagggtccacctgcaaagcctccacatgcagcaacagcaccaaggactactgctacagtgcccgcatccgcagcacagtgctgcaggggctgccctttggcggggtgcccactgtcctagcccttgatttcatgtgctttcttgtaagtttgcctatggctgctttggcaccttccccactaattagtcatgaagggagaactat

SEQ ID NO: 1433 - DNA, 600 bp, Chicken  19866894087955_7
gccttccctgycaaggggaaggcgccgagacactgcacctttgggaaaagggggtagtctgtgagtcctaaatgacgtgagagtcgggagcaggcggggagactctggggttgtgcctggtggaagcagctcaccaaagaccccatgagctcttccagcaccccagaaagctctccaggtttctgtgcatgaccctgtgcttggrcatcggttctcaragagaacctatagcacaggagracccgagatagtggctgagagtggtcccargtctaatgggacgatgctgttaaccarctsctgtgtgctaaccaggcctttctctctattccccagggaagacgatgaagctgtagagatgcttccctacgtgatcgccaccctgggctcagcagggtccacctgcaaagcctccacatgcagcaacagcaccaaggactactgctacagtgcccgcatccgcagcacagtgctgcaggggctgccctttggcggggtgcccactgtcctagcccttgatttcatgtgctttcttgtaagtttgcctatggctgctttggcaccttccccactaattagtcatgaagggagaactatgat

SEQ ID NO: 1434 - DNA, 600 bp, Chicken  19866894087957_1
ggctgaaatcttctggggctctatttttgattaaacaaccttgattatttttgcaagaaagtaatctatgttctagtttgaggcctgagtgctgcgattactgacacacaaatgtaacggttgcttgcgcagttttatgtaaaaatacactgagttcagattccttaaataacccttggttaagatgttagtgctaaagtgttggcttgtgagtaggaggtaaattatatgttgtagcgttatataaaactgactcacatgagtaggtgagaatcccaagaatatcagaacacccacackagtgaaagaaagatgcaagcttcctctgtacaacatgttccaaaggctgcattaacagaaccagctttartttgtttgagtagtaacagaatttttcagtgttttaagaaatcaagtactactgctttgactgtttgtcttggaaaatggaattaaaggtgaagrattttgttctgaaaaagctgcctgcagttctgactgtattttctgggtaaatagctgctgaaaataaatcaagaagttgaattatccccacaagcaagcaataattacattggaacactatatcccctttaactt

SEQ ID NO: 1435 - DNA, 600 bp, Chicken  19866894087957_2
ttctagtttgaggcctgagtgctgcgattactgacacacaaatgtaacggttgcttgcgcagttttatgtaaaaatacactgagttcagattccttaaataacccttggttaagatgttagtgctaaagtgttggcttgtgagtaggaggtaaattatatgttgtagcgttatataaaactgactcacatgagtaggtgagaatcccaagaatatcagaacacccacackagtgaaagaaagatgcaagcttcctctgtacaacatgttccaaaggctgcattaacagaaccagctttartttgtttgagtagtaacagaatttttcagtgttttaagaaatcaagtactactgctttgactgtttgtcttggaaaatggaattaaaggtgaagrattttgttctgaaaaagctgcctgcagttctgactgtattttctgggtaaatagctgctgaaaataaatcaagaagttgaattatccccacaagcaagcaataattacattggaacactatatcccctttaacttttaatccatggtttatgaagaggcagaactatttagtttagagagaatgtaattgcaaaataatgttgta

SEQ ID NO: 1436 - DNA, 600 bp, Chicken  19866894087957_3
taaataacccttggttaagatgttagtgctaaagtgttggcttgtgagtaggaggtaaattatatgttgtagcgttatataaaactgactcacatgagtaggtgagaatcccaagaatatcagaacacccacackagtgaaagaaagatgcaagcttcctctgtacaacatgttccaaaggctgcattaacagaaccagctttartttgtttgagtagtaacagaatttttcagtgttttaagaaatcaagtactactgctttgactgtttgtcttggaaaatggaattaaaggtgaagrattttgttctgaaaaagctgcctgcagttctgactgtattttctgggtaaatagctgctgaaaataaatcaagaagttgaattatccccacaagcaagcaataattacattggaacactatatcccctttaacttttaatccatggtttatgaagaggcagaactatttagtttagagagaatgtaattgcaaaataatgttgtagttgcaaggaacatatagcaatgactacgtgcatcactaggattcttagttagatatgtatataaattatataggttataaagttaaacctcaga

SEQ ID NO: 1437 - DNA, 599 bp, Chicken  19866894087971_1
  misc_feature (1)..(7): n is any nucleotide
nnnnnnngagacaaatcaccatgatgatgctagaccatcgtcatagtttgcttatagacaggtacacagaagtaaatccttgcctcgggtcttgctactagaattttttttttctttttttctataaagaacactgggagatagcctgtatctcatttctcttgttaataaagaagtgtcatgttggtcaaaatatacattcaacaattgactcactgaggtcttaacatgtacaagttttccttcattttcagattttacgatatctatacttctctacatgaaatgttattgacattsttagcaacaataaattttattacagttttcaaacttatacgcctctcacaaacagactatgtcaaggagtttgctgacattagtaaaaggtgctcagctaagtccaaaatttacagagaaataaacaaagcactgagttttccattaataagaaatgccaataaaattaagtactaatttaattaaatgctcctattattctatctctgtagtttcctgttctgttaatattagtgtcagcatagttctggattatatactagcctgactcagtgcagatcttttttcttaagttatcc

SEQ ID NO: 1438 - DNA, 600 bp, Chicken  19866894087975_1
gctgggtatgaagttgcaaaaggcaagaacagcggtactctaggatatgcattcactagcagcaggattagaggttggagaccaccagaagaaattacaaaatgatagacttgaaattaaaaacatctactctgaggttttttgagtagttttccatataactttagacctaaatcctttaaaaatggtggcaaattacttgtttatgtttcagtatttagtttgtcccattctatcacataaagactgagagaagcaagagtctctttagacttcggcaatactacgttattaaaaaaygtgttgctacgtaataatgatattaagcttctcataggtaacagtgagagggaatatctcaggatgtatctacatcgaagctgtaaaactctaattgtatgtgtgaggttttaatttaaaaagagcagagcttgcagaaaatgtcctgagaggagagtagcaaagtactggcatgaacaggtgggctgaatctttcagccatctccataaaatgcttcaggaacagatgtgccagcaattcgtgcagcattttcagggagctgcttttgaaaagagctccatttcatctaacctagcaga

SEQ ID NO: 1439 - DNA, 600 bp, Chicken  19866894087981_1
ttccaagactctcttgagcttacacaggacactggaaggcatgaacagagcctgcagtgtccacatagtgcatgtgaacacagatggagtgggtgccatggttctgctcttgtctggatgagaagtattgaaggagtggccaaaagcaagatgcccctagtaaatgatgggttcctccttgggatttcaggagctggctcaattattgctctccccccttctttttatctcactatttgcttctcagaaaagcaacttctggcatggttcttcctgttgatgtctctttgcctgtctgtycaggtgaggagctcatttacctggatccccacactacgcagcctgcagtggagcccagtgacagtggctgtctccccgatgaaagcttccactgccagcatcctccctgcagaatgagcatcgctgagcttgacccgtccattgcagtggtrcgttcctgctgcttgttttctacccagctcagaaatagcaggwccttgctaacagggacctggctgaggtgataggttggttgatctccaggcaggctgtgctctgggcaaatatgtttcaattgcagtaacattgtttaagaagctc

SEQ ID NO: 1440 - DNA, 600 bp, Chicken  19866894087981_2
gcccctagtaaatgatgggttcctccttgggatttcaggagctggctcaattattgctctccccccttctttttatctcactatttgcttctcagaaaagcaacttctggcatggttcttcctgttgatgtctctttgcctgtctgtycaggtgaggagctcatttacctggatccccacactacgcagcctgcagtggagcccagtgacagtggctgtctccccgatgaaagcttccactgccagcatcctccctgcagaatgagcatcgctgagcttgacccgtccattgcagtggtrcgttcctgctgcttgttttctacccagctcagaaatagcaggwccttgctaacagggacctggctgaggtgataggttggttgatctccaggcaggctgtgctctgggcaaatatgtttcaattgcagtaacattgtttaagaagctcctcactaggraggtcctgcttgcagagtcattaaatgccttctctaatggggcgttttctttccctggactctagtttaggctttgattcctgccttctaaaggacagatttgaatccacttctgaatctgaaacacttctgatcgcacaga

SEQ ID NO: 1441 - DNA, 600 bp, Chicken  19866894087981_3
ggctcaattattgctctccccccttctttttatctcactatttgcttctcagaaaagcaacttctggcatggttcttcctgttgatgtctctttgcctgtctgtycaggtgaggagctcatttacctggatccccacactacgcagcctgcagtggagcccagtgacagtggctgtctccccgatgaaagcttccactgccagcatcctccctgcagaatgagcatcgctgagcttgacccgtccattgcagtggtrcgttcctgctgcttgttttctacccagctcagaaatagcaggwccttgctaacagggacctggctgaggtgataggttggttgatctccaggcaggctgtgctctgggcaaatatgtttcaattgcagtaacattgtttaagaagctcctcactaggraggtcctgcttgcagagtcattaaatgccttctctaatggggcgttttctttccctggactctagtttaggctttgattcctgccttctaaaggacagatttgaatccacttctgaatctgaaacacttctgatcgcacagatcacacttctgatacagtgtgatttgtattctggtgaacctga

SEQ ID NO: 1442 - DNA, 600 bp, Chicken  19866894087981_4
gctcatttacctggatccccacactacgcagcctgcagtggagcccagtgacagtggctgtctccccgatgaaagcttccactgccagcatcctccctgcagaatgagcatcgctgagcttgacccgtccattgcagtggtrcgttcctgctgcttgttttctacccagctcagaaatagcaggwccttgctaacagggacctggctgaggtgataggttggttgatctccaggcaggctgtgctctgggcaaatatgtttcaattgcagtaacattgtttaagaagctcctcactaggraggtcctgcttgcagagtcattaaatgccttctctaatggggcgttttctttccctggactctagtttaggctttgattcctgccttctaaaggacagatttgaatccacttctgaatctgaaacacttctgatcgcacagatcacacttctgatacagtgtgatttgtattctggtgaacctgaggtgactgccctttgtttccacttgggttgcttctgtccagttttccctctgcagcagagcagaccattgcactgatcagcacttgaacagtggctacgataagcctgtggggag

SEQ ID NO: 1443 - DNA, 600 bp, Chicken  19866894087986_1
gaatcagcacagtatgaagaatgcttcagttaccaagtaatgctgccttctttgcatgctcttaacctcccatctcaattgctgttcatcaattgccaagagttagattgtggactccataggctctgtgatccctcaggactaggggcaaccacaagtttgctaataggagtgtaaggaataaacggacacatgctggagggaacacagccccctgctcagctggggttcttaggtaggatttgtctcgttcagtttaacatgccagcaccaaagactgcagtggtgtggcatcccttyataaccactggtagtgaaacagatcatttctagcatgcaagccatctggtctgctttggacatctgagtgagaatgtgataaattgtactcaagagtaaytatttctctccacagacagtaagatagaaggcagcagtacttgtggggatccaatagcaggagcaaggcccatccagatctgtaaagcatctgggtatttttggatccgtaagctgctgagaatatacatacttgaaccacttcataaacaggtgggagtgaaatagctagcaagaacaagaaagatttggtgtctatag

SEQ ID NO: 1444 - DNA, 600 bp, Chicken  19866894087986_2
agttagattgtggactccataggctctgtgatccctcaggactaggggcaaccacaagtttgctaataggagtgtaaggaataaacggacacatgctggagggaacacagccccctgctcagctggggttcttaggtaggatttgtctcgttcagtttaacatgccagcaccaaagactgcagtggtgtggcatcccttyataaccactggtagtgaaacagatcatttctagcatgcaagccatctggtctgctttggacatctgagtgagaatgtgataaattgtactcaagagtaaytatttctctccacagacagtaagatagaaggcagcagtacttgtggggatccaatagcaggagcaaggcccatccagatctgtaaagcatctgggtatttttggatccgtaagctgctgagaatatacatacttgaaccacttcataaacaggtgggagtgaaatagctagcaagaacaagaaagatttggtgtctataggtgatttctacttcgtggtgatataaatgatgaaaacagttgttacataagcaaaatcttttcaacagatggcaagaaaaagatacatctagcagtaaaa

SEQ ID NO: 1445 - DNA, 599 bp, Chicken  19866894087988_1
  misc_feature (1)..(58): n is any nucleotide
nnnnnnnnnnnnnnnnnnnnnnnnnnnnnnnnnnnnnnnnnnnnnnnnnnnnnnnnnncttgcatgtaaaaggatttatgccttcagcttcttcgtatcttgagtgagactgaggtatcggctaaactcttcagagagcaaatcgatcttgacaaatccagggaaacctgcagttagatgtgtaaaatgactctatcaggatcatgcagtgtcctgcactcataaagctgcttttatgctatgaactgcttgtaaaattggttctagcagcaaatccctctctctcacgctgcctgtccyagacatggaatgcctccatggatgcctgtaacaccgcacactgctttcccactggttcagaaagtgtgtttccattcttcttcacaatgtcacggagwtctacagcaaattttaagacatgaaatagcgtaaatatatatttttcccaatcttagaggcctacaaaagaaccaagaaaggagaatccagagaaactggatttcctgcctatagcagggggttgggactagatgaccttaaaggtaccttccaacccaaaccattctatgattctataagcttaacaccgtaactgagat

SEQ ID NO: 1446 - DNA, 600 bp, Chicken  19866894087988_2
cttgagtgagactgaggtatcggctaaactcttcagagagcaaatcgatcttgacaaatccagggaaacctgcagttagatgtgtaaaatgactctatcaggatcatgcagtgtcctgcactcataaagctgcttttatgctatgaactgcttgtaaaattggttctagcagcaaatccctctctctcacgctgcctgtccyagacatggaatgcctccatggatgcctgtaacaccgcacactgctttcccactggttcagaaagtgtgtttccattcttcttcacaatgtcacggagwtctacagcaaattttaagacatgaaatagcgtaaatatatatttttcccaatcttagaggcctacaaaagaaccaagaaaggagaatccagagaaactggatttcctgcctatagcagggggttgggactagatgaccttaaaggtaccttccaacccaaaccattctatgattctataagcttaacaccgtaactgagatgggaaggaaccttgagaggcctctcgtccaacctccttttcaaatcacaggcagccatggggacccaacaggtagctgagggctttaaccccattggat

SEQ ID NO: 1447 - DNA, 600 bp, Chicken  19866894087989_1
tgggatctcctgggaaagcgtcctcaagggcataggaacagaacagagctggcagcaatttaaggacatccttctgagagcacaaggactctccatccctaagaaatcaagcaaaggaggatggcaacaagcatgactgagcagggaccttcagtttaaactgagggaaaagagagaagtgcacagaaagtggaagcagggttgtatatcctaggaaggatatacggctgttgtccacatgtgtaaagatcaggaaagccaaggcacagatagagctgaacttgacaagggatgtgaagrataataagaagggttctacaggtacataggcagcaggagacaggccaacagtgttccccctctgataaatgagaatagagaactggcatcctcagacacataaaaagctgaggtgctcagtaagtgcttygctatggtcttaactggtggtcaggctccccatttctgccaggtatacctgaaactctaggtgagggtgagagaagtggattctgtcccactgtaacagtggaacaagtttgagacctcctcatgaaaccgaatgtatacaagtccatggggccaaatgatatgcatccc

SEQ ID NO: 1448 - DNA, 600 bp, Chicken  19866894087989_2
gcatgactgagcagggaccttcagtttaaactgagggaaaagagagaagtgcacagaaagtggaagcagggttgtatatcctaggaaggatatacggctgttgtccacatgtgtaaagatcaggaaagccaaggcacagatagagctgaacttgacaagggatgtgaagrataataagaagggttctacaggtacataggcagcaggagacaggccaacagtgttccccctctgataaatgagaatagagaactggcatcctcagacacataaaaagctgaggtgctcagtaagtgcttygctatggtcttaactggtggtcaggctccccatttctgccaggtatacctgaaactctaggtgagggtgagagaagtggattctgtcccactgtaacagtggaacaagtttgagacctcctcatgaaaccgaatgtatacaagtccatggggccaaatgatatgcatcccagggttctgtgagagatggctaatgtggttgccaagscgctctccgtcatatatgaaaaatcatagctgtccggtgaagtccctggtgactggaaaagggaaagaaagggagaaaggatgacgcagggaa

SEQ ID NO: 1449 - DNA, 600 bp, Chicken  19866894087989_3
agacaggccaacagtgttccccctctgataaatgagaatagagaactggcatcctcagacacataaaaagctgaggtgctcagtaagtgcttygctatggtcttaactggtggtcaggctccccatttctgccaggtatacctgaaactctaggtgagggtgagagaagtggattctgtcccactgtaacagtggaacaagtttgagacctcctcatgaaaccgaatgtatacaagtccatggggccaaatgatatgcatcccagggttctgtgagagatggctaatgtggttgccaagscgctctccgtcatatatgaaaaatcatagctgtccggtgaagtccctggtgactggaaaagggaaagaaagggagaaaggatgacgcagggaactacaggctggtgagtctcayctctgtgcctgggacaatcatggagctgatycttctggttacagtgttaaggcacatgcaggatgaagaggggatccaaaacagccagcatggtttcaccaagggcgtatcttccccagccaatctagtggccttctatgatggaataacaggattagtggacaggggaagggcgacagatgtcat

SEQ ID NO: 1450 - DNA, 600 bp, Chicken  19866894087989_4
caggctccccatttctgccaggtatacctgaaactctaggtgagggtgagagaagtggattctgtcccactgtaacagtggaacaagtttgagacctcctcatgaaaccgaatgtatacaagtccatggggccaaatgatatgcatcccagggttctgtgagagatggctaatgtggttgccaagscgctctccgtcatatatgaaaaatcatagctgtccggtgaagtccctggtgactggaaaagggaaagaaagggagaaaggatgacgcagggaactacaggctggtgagtctcayctctgtgcctgggacaatcatggagctgatycttctggttacagtgttaaggcacatgcaggatgaagaggggatccaaaacagccagcatggtttcaccaagggcgtatcttccccagccaatctagtggccttctatgatggaataacaggattagtggacaggggaagggcgacagatgtcatctacctggaattctgcaaagcttttgacatacttctctctaagttggagaagtatggatttgaaagatggactgtttaatggattaagaaccggttagctggttgcagccaaag

SEQ ID NO: 1451 - DNA, 600 bp, Chicken  19866894087989_5
aactctaggtgagggtgagagaagtggattctgtcccactgtaacagtggaacaagtttgagacctcctcatgaaaccgaatgtatacaagtccatggggccaaatgatatgcatcccagggttctgtgagagatggctaatgtggttgccaagscgctctccgtcatatatgaaaaatcatagctgtccggtgaagtccctggtgactggaaaagggaaagaaagggagaaaggatgacgcagggaactacaggctggtgagtctcayctctgtgcctgggacaatcatggagctgatycttctggttacagtgttaaggcacatgcaggatgaagaggggatccaaaacagccagcatggtttcaccaagggcgtatcttccccagccaatctagtggccttctatgatggaataacaggattagtggacaggggaagggcgacagatgtcatctacctggaattctgcaaagcttttgacatacttctctctaagttggagaagtatggatttgaaagatggactgtttaatggattaagaaccggttagctggttgcagccaaaggattgtgatcagtagttccacgtctgggtga

SEQ ID NO: 1452 - DNA, 600 bp, Chicken  19866894087989_6
ccagtacaagaaagacataaagctcttggaagagattcagaggagggctactaaaatgatcagagggctggagcacctctcctatggagaaaggttgagggaattggtcttgtttagtttggaggtgagaaggtgagaaggctctggggagccttccaggtacttgaagggagcatataaacaggagggggaacaactgttatgttggttgatagtgacagaataagggggaatggttttaagctaaaacaggggagatttaggttagacattaggaggaagttttccatgcagggggtrgtgacgcactggaacaggttgcccaaggaggttgtggatgctccatccttggagacattcaaggcaaagctggatgcagctctgggcagcctggtctagtgattggcaactctgcccatggtatggggtttgaaactagattatctttgaggtccttcccaaaccaggccattctagcaaactacacttacacaaaacttggccctaagctctggcaaatgaccacccagtagctaaatcactggcaccaagcatagtctcagtagaatctgggaacaaggaactgagcaaaatgaggaa

SEQ ID NO: 1453 - DNA, 600 bp, Chicken  19866894087990_1
actctgggtttgattttatatttttttaaacataaatcatatatataacaattgggagaaaattaaactgtggtcaagttatttagtcaaattttaatgacaatagagtcagtaagtttatagaaagttagattacatcagaatctccattttcttctagaacttatgaagaaaagaatttggaagaatgggtggattttatctagcaatgtagcaaatctttaacaaatgttatactaggagtatggtgactgcagctttaggaaggctagagttctctgaatttcatcaacaattccrtttagaatatgaagtggtgcactgcaaacctcacatgatataacacaagaaagattctcagacaaaaaagctagaagaaattcctaaagcaactactgaagattgtttattattcaagccagtacattttcatgtaactatgactaagactgaagattccagaaaagtatctcagcttgataagacatgataagattctgaattcgtttttcattttgtagatattctaaaatctacttatcatcactgtgaaaggtgaaaagattccttagattatttctgctattttctatcttaact

SEQ ID NO: 1454 - DNA, 600 bp, Chicken  19866894087994_1
taattgttttcaatgtctttgaaagcctttatttctacattatttctgactttggagcacgtacgttcttacgtgcatctgaggatgtgcatacatgcccatgtatgcttgctagggagaagctgcgtgatagtgaatctgatgaatgtacatatggatgataataggactgttaaaattatcccaggaccaatcattataaactgaaagaacttacacatcttgtgtgtgcacatgtgtgcaaactataaaagtagatagtaaatgtatgtagatggcttaaaccacagtcctgtcacratatcaggcagtgaacatgaaattatcattattgtataatttcaaagcttttgttgattggaagaggatttttaagacatcctgtgttttccacttttatttttgtgatggtgaaatcagtagccaggtggtttgcctgaagccaccaggtgagccatggtggtctgcatgtgctgagagatgatgctgatactactgctgtatgtaacgggaaggcttataagagtgatcatctatgctgctaaattactagaacagttcttgatatgcttttggcttctattcactaaagctgtcctg

SEQ ID NO: 1455 - DNA, 600 bp, Chicken  19866894087996_1
gggatcaaagatcttccaagatggacacaaatctaagtgtttcttgatgggtcttaagtctttattgttacaaaatgtgaattcatggatttggattttaaactgatgtttttctgtctgttttccctttgttagtgcagcttctgagaatgggttaatttgtgctttgtttcctggcaggatcatattttcctatgcaatccatacatgtctgtatgtccttatcatttgaattgtgctccgcaatcattcagaaacaggagcagttaatatggattgttcctcttgaccccaaccatrtctttgtccccatcaattcatttcattttaaaggtgattccctttctttttggctgagaatgcgatgcctgaaagtttgctttttcctgtgcttttatctcctatttcagatgccagaacacctttatggctgcatcacatgctgtttttgcacttgtctgggctgtgtgatttaatggaaggacagcttgaaaaacacggggtgcaaactgtggctttagtcattactccagtcagtgggagttattttccggggtattctgctctcttgacctattttatcccagcagctagaagcag

SEQ ID NO: 1456 - DNA, 599 bp, Chicken  19866894088009_1
  misc_feature (1)..(18): n is any nucleotide
nnnnnnnnnnnnnnnnnntgctgggatgtcagcagcagcaaacaccactgcaaaggcaccaagggatgttcagtttgatgttacttggatttcctgtagccgtgcagcgacgggaatatatatcccagtcttgttccattaaattaattgaaagctaaccattattttggagggatggaataaagtagttgctgctgcccctagaacagctctcctaatcagatgctgcacaactaaagcacctaccatttttccaaggatggagctgtcacacctgcaggtgatggcagaatgacagcygaaatgccaagtatcacttctgatgtttggcagcgttgcctagctgtttctaaaatgtctaagcatctctttgaactttctacctcttgatttttatgtaaggtttcacaatcctccactttcgtgtttcatgttctctggtgttttgtagcgcgatcctcttcacacttggacaggaaagcctgaccttattctagcctgagagcatctggcagcrtgcagcaaaacacccaaatgtttaggtgctcagaaatatcacacgttaaaaataacatgttaagtataacagaactgtacaa

SEQ ID NO: 1457 - DNA, 600 bp, Chicken  19866894088009_2
atcagatgctgcacaactaaagcacctaccatttttccaaggatggagctgtcacacctgcaggtgatggcagaatgacagcygaaatgccaagtatcacttctgatgtttggcagcgttgcctagctgtttctaaaatgtctaagcatctctttgaactttctacctcttgatttttatgtaaggtttcacaatcctccactttcgtgtttcatgttctctggtgttttgtagcgcgatcctcttcacacttggacaggaaagcctgaccttattctagcctgagagcatctggcagcrtgcagcaaaacacccaaatgtttaggtgctcagaaatatcacacgttaaaaataacatgttaagtataacagaactgtacaaggcagtgcaaaggagaacctgtgaagtcaaaagatcattctgctgtgcccagcctatttagcagctgagagtgatggtcatacagctgctggtcctggccctagcacaggtgttcccgcaacagcacaatataaacacacttccctccttaatacaacctgtgcacaaaagtgtcccttttggagagccactcgggttctccagccgtgaagggacat

SEQ ID NO: 1458 - DNA, 600 bp, Chicken  19866894088013_1
ccagttaccgtattttgtatatttttaatatttgtttttagattcctgatttaaaagtgtgaaataagtaaaacctggcaaaattttactaaaaaatgttccccatttgagtgaaaataggtgctattccatctgtctgctgacagtataggggatcctttgaatcagaatgccacagggtagcgaatcaagtaataatggatgcataagaaatacaacagagtagctacgtgaaactgcatttctaatcacaaggaatattataatcaggtttatttgacagactttactttcttaaarctttttgacttatatttattgaaaacattttttctccttcgctattcatgaagaatcttaaatttcaactattcttttacttggactgatctacagttaaccagtctgctcccagacatatcactccacttaccacagattgcagcagccactggtttggaagaggaatgtgagaatactcccatcccttctccaccagtcttagacccactagcactaggaatttactcatatttgagacaggttaaataatattccactccctagcctcccaacccctctctcctttgtagtcagtat

SEQ ID NO: 1459 - DNA, 600 bp, Chicken  19866894088016_1
tcacatctgaaatcgcatccagttaaatgcatctccatttcacaaatgcagctggataaccttacaaactcatttaccccacctcatattctaacagcctatgaaagggtgcaaagattagtaagctattgctccataggcatctactgtagccatccatctacaccacaataatggcttgcctgcctcaccttaacagcatatgcagaaacagaggctttctgcaatcagcagaatggctcttgaacatctttgttcaaactcagtacatgcatggggaatctttcctcagacatacaygttcctagtgaaattagtttattagcacaattatgtactaatgtgcagaataaagttgttttgtaattttctttgatcagcttttacatgtcagtttttctagtcatgcacaacctataacatagatcttgctggtgatgtgaacagcaaaaatacaagcatctgacatagaacctactggaattttaaaggatgctgttgtgaaattcagatgtttgaaactgcttttcttttacttgttttcagcttcagtgacttcccctagagcttccactgggcactatataggaaagtcagatt

SEQ ID NO: 1460 - DNA, 473 bp, Chicken  19866894088021_1
ccttgtgctgtaagatgaaccagcagggaagaatactgatggggatgaatggggaacttttgctaagacaccaggagaaaaagagaatccacctcctgtggaagaagggacagataacgtggggacagtacaaagaatttgctaggatatgcagggagaaaattagaaagtcaagagccaagcttgaattcagcttggccactgtagaaaaagtcaacaaaatttgtcttacaaatacattaacagtaagaggaaggctggggacaacctccatcctctactggacgcagtaaggaacakgaccagtttgtctgggatgtctgggatggggaacctacaatgagacaattagagacattctactccatctagactgtcacatgtccattgggccagatgatatccacctgaaggtgcttgagagagctggtggaggtgattgccaggctactttctaccatttgtccacatat

SEQ ID NO: 1461 - DNA, 600 bp, Chicken  19866894088022_1
tccatcctgggctcagcaccttcaggagtcaggccagaccgcccagcatcacctccaaatgatggaagtcgaagctggctttcacctccatttgttgtcccacaaggctgaggctgctgcaaacagctgcagagagcgactgtgaggactgtgcttgtggcaggcagcaatctgtgttctccagccctgcctttccttccagacctggatagtctgtgtgatggcatgtagctctctccaatgggttgctaaaactgttttctctgctcctatcccactagggagcctttatccgccacwtgcagctccatgcttcagaaacacctatcagccttcctctctctcccctatctcttttcctcttactaaaattcaacatagaaacccctctgtgtacaatacacaacgatacactcactacctcttgcaggtgaactgagcatagtgaccaattacacaaaggtacctttttatctcccaccgccccatctgtaaaatgcttgtggatgtaatgttaattttagagtgactcacagctctttattgtgcacttcttatttctgatacatagctcatcagcatagctggacaacacgcttt

SEQ ID NO: 1462 - DNA, 600 bp, Chicken  19866894088022_2
caacatagaaacccctctgtgtacaatacacaacgatacactcactacctcttgcaggtgaactgagcatagtgaccaattacacaaaggtacctttttatctcccaccgccccatctgtaaaatgcttgtggatgtaatgttaattttagagtgactcacagctctttattgtgcacttcttatttctgatacatagctcatcagcatagctggacaacacgcttttctgccagtcgcatacatttaattacagaagataaggggatatcttctgccttaaatcatgccccaagaactrcatctgaacacctctgattttgacttcaagccccccctctcccagaaggagaaagcagaccaaagaaatagatggacgggataaggagggcatttctaaagctgggctatggcccagcagttcagcattgctctgggcagctgaagcactcctgcatccccagagctgcagccaaaccagacagggtgatgggacagcccaaatctgcttgacatgactatgctaaggacgccgtgcagcagatctaacctgcaaagtggccagcagagtgagaaggtggtgaggagtcacaagagccat

SEQ ID NO: 1463 - DNA, 600 bp, Chicken  19866894088026_1
aaggagcaatggaataaaaattatttctaggaattatgaattaataataatattttattttgcaaattacaaaattatttcatttctggctactgtaatccatattaaattaacaggggtataatgagattcagaggcctttcctatttttttgcagttttatagtgaccccatttcccaccgtatggaggctggcacttaaataaatggataaagatgccaacaagtaatacatagcagaaaatgactttaatgcccccttctcatgttcttcatttgccatgttttcttctgctctgytccattctctttcattagttagataaggacccattcatttccagcatttactcccarcctgttttttccccccatgtgatctatgcagatgatgcagttcattcacctgctggtctcagtgtgagatgaagcttcagaacatttgtgaagtcacaggagaatctactgaacaggamagtcctgcatgtgtcacagtcactgccaaaacttgaggggctctcctctttctcctttattctgtttctcctcttgtcaaagcatcatgctttgtagagcgtatcaaatatacccagaccacta

SEQ ID NO: 1464 - DNA, 600 bp, Chicken  19866894088026_2
ttttgcaaattacaaaattatttcatttctggctactgtaatccatattaaattaacaggggtataatgagattcagaggcctttcctatttttttgcagttttatagtgaccccatttcccaccgtatggaggctggcacttaaataaatggataaagatgccaacaagtaatacatagcagaaaatgactttaatgcccccttctcatgttcttcatttgccatgttttcttctgctctgytccattctctttcattagttagataaggacccattcatttccagcatttactcccarcctgttttttccccccatgtgatctatgcagatgatgcagttcattcacctgctggtctcagtgtgagatgaagcttcagaacatttgtgaagtcacaggagaatctactgaacaggamagtcctgcatgtgtcacagtcactgccaaaacttgaggggctctcctctttctcctttattctgtttctcctcttgtcaaagcatcatgctttgtagagcgtatcaaatatacccagaccactagtctatgtggctcaacttggatgtgttttcaacatttgaggagatctatcaacagaa

SEQ ID NO: 1465 - DNA, 600 bp, Chicken  19866894088026_3
cccaccgtatggaggctggcacttaaataaatggataaagatgccaacaagtaatacatagcagaaaatgactttaatgcccccttctcatgttcttcatttgccatgttttcttctgctctgytccattctctttcattagttagataaggacccattcatttccagcatttactcccarcctgttttttccccccatgtgatctatgcagatgatgcagttcattcacctgctggtctcagtgtgagatgaagcttcagaacatttgtgaagtcacaggagaatctactgaacaggamagtcctgcatgtgtcacagtcactgccaaaacttgaggggctctcctctttctcctttattctgtttctcctcttgtcaaagcatcatgctttgtagagcgtatcaaatatacccagaccactagtctatgtggctcaacttggatgtgttttcaacatttgaggagatctatcaacagaagagggtgagtgaatatgcctgtgtgtcataagaaacatatctgcaagttcatctttcaacctgaagataatgcagatatggtagcagacctgggggggggcgggaaaatattgtgggta

SEQ ID NO: 1466 - DNA, 600 bp, Chicken  19866894088027_1
agtaaaactgcatccagtctctctggcagcttgatgaaacactgctaaattcagcagctccgtggctcttggcacccagagcatttccacccatttgtacttgtcttgctcgagccctgctgatcagaagagcaagaggctacaaagagtgcaaggagattttggcactgcagcaagacaggaggattgtggaacgcaacgtacccctgcaggacagagtcagtaagcaactatcttgtccagggggtactgagcaacaagctgttcagtgctgctacaaactcttcagtgctacttacrcagccccagtgtgcacagggctgctcctgccagcccagccccccctgcagggtgtggactcagtacagccctgggccatctcagtgtatctttgctttgtacccatggccagcaatgggtgtcttcccayggtgtgctcctgcacctctggttggttgtggtctctggtcttctcctggyatggaactgcttggtcccaggcctgtggcactgtattgtaaccgctaagaagggtaaaggaaatagcagactgaggggtacctgagggcatgacctgagccttcatctcagtgagtggcc

SEQ ID NO: 1467 - DNA, 600 bp, Chicken  19866894088027_2
agcaagaggctacaaagagtgcaaggagattttggcactgcagcaagacaggaggattgtggaacgcaacgtacccctgcaggacagagtcagtaagcaactatcttgtccagggggtactgagcaacaagctgttcagtgctgctacaaactcttcagtgctacttacrcagccccagtgtgcacagggctgctcctgccagcccagccccccctgcagggtgtggactcagtacagccctgggccatctcagtgtatctttgctttgtacccatggccagcaatgggtgtcttcccayggtgtgctcctgcacctctggttggttgtggtctctggtcttctcctggyatggaactgcttggtcccaggcctgtggcactgtattgtaaccgctaagaagggtaaaggaaatagcagactgaggggtacctgagggcatgacctgagccttcatctcagtgagtggccatcctgcctggctggctcctgcgtgccttctcctgatgctccttcctaaagaacagcctgggctgcagctaaatgtgagcagacatcagtgttttctgtccccagtgagcatcagaaccaggctgcttgt

SEQ ID NO: 1468 - DNA, 600 bp, Chicken  19866894088027_3
ggaggattgtggaacgcaacgtacccctgcaggacagagtcagtaagcaactatcttgtccagggggtactgagcaacaagctgttcagtgctgctacaaactcttcagtgctacttacrcagccccagtgtgcacagggctgctcctgccagcccagccccccctgcagggtgtggactcagtacagccctgggccatctcagtgtatctttgctttgtacccatggccagcaatgggtgtcttcccayggtgtgctcctgcacctctggttggttgtggtctctggtcttctcctggyatggaactgcttggtcccaggcctgtggcactgtattgtaaccgctaagaagggtaaaggaaatagcagactgaggggtacctgagggcatgacctgagccttcatctcagtgagtggccatcctgcctggctggctcctgcgtgccttctcctgatgctccttcctaaagaacagcctgggctgcagctaaatgtgagcagacatcagtgttttctgtccccagtgagcatcagaaccaggctgcttgttagaataaacatcctgggagcaaactggaaagcacaaaagtaggaaacaa

SEQ ID NO: 1469 - DNA, 600 bp, Chicken  19866894088027_4
aaatgtgagcagacatcagtgttttctgtccccagtgagcatcagaaccaggctgcttgttagaataaacatcctgggagcaaactggaaagcacaaaagtaggaaacaagagctgtaacatctgctggcttccgctgaaaagacattcatcattcagttccattgctgtgaaatccctgaaatttccctaactgatttagcatcacctttcattggctggtgcagcgtgcaactttctcaaatattcatccactctggcaagcctcaccactacttatttactgcagatgcacccaaarcccttcactgcttttcctggactctctcctcagccgctgagcctctgggttggactcaagcagcacactatcacctccagttgacaccagtactgctcaagggattaaaatggagagagagagagatcatctggtgtgtaagaccatgggctttcacaggacctccaccgtaagagtgctgtcaaggccctacagcatcagttcctccagagcaggggagctcccagcaggttcctgcacttactgtcacagggcagaaacccagggactctgacaccctcagtgcacctgtccacagcc

SEQ ID NO: 1470 - DNA, 600 bp, Chicken  19866894088030_1
aaagagacagtatattagtgtacagtgataggagctgactgtctcaccctgattcagtgtcctatcctagatttagaggcaattttcaatgcattcatagcttaaatgagtaaatttattccattaagattagtggcttacagatgttccaagtgttattgaagaaagtaaggtttccatggtaaatgcacacacattttctgtgcagtaaacaaataaaatccaggtaattttttgtgtatagctatttcttgaagattcagaactagctcacttctaaatacacaggaaaaaagatgsacactgctcacattaacagttgaaatgaccagtgattaaggtcattgaygttttgcatgtcycatttcaagtgtttgacagagaraaaatgtrgaaagtgggttcagggtttaatatgaaatttgtaagtattaaagagttttgagtaattaaattacctccaaacagcattgcaatattttattataaaggtgatattcctaacctctgtactcttttcatattgattgaaggccactgatttcaaaataaactgaatatgcaagctgtggtacagttacaaaaaaaacatgaagtttt

SEQ ID NO: 1471 - DNA, 600 bp, Chicken  19866894088030_2
tgattcagtgtcctatcctagatttagaggcaattttcaatgcattcatagcttaaatgagtaaatttattccattaagattagtggcttacagatgttccaagtgttattgaagaaagtaaggtttccatggtaaatgcacacacattttctgtgcagtaaacaaataaaatccaggtaattttttgtgtatagctatttcttgaagattcagaactagctcacttctaaatacacaggaaaaaagatgsacactgctcacattaacagttgaaatgaccagtgattaaggtcattgaygttttgcatgtcycatttcaagtgtttgacagagaraaaatgtrgaaagtgggttcagggtttaatatgaaatttgtaagtattaaagagttttgagtaattaaattacctccaaacagcattgcaatattttattataaaggtgatattcctaacctctgtactcttttcatattgattgaaggccactgatttcaaaataaactgaatatgcaagctgtggtacagttacaaaaaaaacatgaagttttatttttttataatataagacaattcatatatgtttgatgtatgatgtgt

SEQ ID NO: 1472 - DNA, 600 bp, Chicken  19866894088030_3
tatcctagatttagaggcaattttcaatgcattcatagcttaaatgagtaaatttattccattaagattagtggcttacagatgttccaagtgttattgaagaaagtaaggtttccatggtaaatgcacacacattttctgtgcagtaaacaaataaaatccaggtaattttttgtgtatagctatttcttgaagattcagaactagctcacttctaaatacacaggaaaaaagatgsacactgctcacattaacagttgaaatgaccagtgattaaggtcattgaygttttgcatgtcycatttcaagtgtttgacagagaraaaatgtrgaaagtgggttcagggtttaatatgaaatttgtaagtattaaagagttttgagtaattaaattacctccaaacagcattgcaatattttattataaaggtgatattcctaacctctgtactcttttcatattgattgaaggccactgatttcaaaataaactgaatatgcaagctgtggtacagttacaaaaaaaacatgaagttttatttttttataatataagacaattcatatatgtttgatgtatgatgtgttaaggtgagattc

SEQ ID NO: 1473 - DNA, 600 bp, Chicken  19866894088030_4
tcaatgcattcatagcttaaatgagtaaatttattccattaagattagtggcttacagatgttccaagtgttattgaagaaagtaaggtttccatggtaaatgcacacacattttctgtgcagtaaacaaataaaatccaggtaattttttgtgtatagctatttcttgaagattcagaactagctcacttctaaatacacaggaaaaaagatgsacactgctcacattaacagttgaaatgaccagtgattaaggtcattgaygttttgcatgtcycatttcaagtgtttgacagagaraaaatgtrgaaagtgggttcagggtttaatatgaaatttgtaagtattaaagagttttgagtaattaaattacctccaaacagcattgcaatattttattataaaggtgatattcctaacctctgtactcttttcatattgattgaaggccactgatttcaaaataaactgaatatgcaagctgtggtacagttacaaaaaaaacatgaagttttatttttttataatataagacaattcatatatgtttgatgtatgatgtgttaaggtgagattcaataatatcctgtacgttttaag

SEQ ID NO: 1474 - DNA, 600 bp, Chicken  19866894088030_5
ttcatagcttaaatgagtaaatttattccattaagattagtggcttacagatgttccaagtgttattgaagaaagtaaggtttccatggtaaatgcacacacattttctgtgcagtaaacaaataaaatccaggtaattttttgtgtatagctatttcttgaagattcagaactagctcacttctaaatacacaggaaaaaagatgsacactgctcacattaacagttgaaatgaccagtgattaaggtcattgaygttttgcatgtcycatttcaagtgtttgacagagaraaaatgtrgaaagtgggttcagggtttaatatgaaatttgtaagtattaaagagttttgagtaattaaattacctccaaacagcattgcaatattttattataaaggtgatattcctaacctctgtactcttttcatattgattgaaggccactgatttcaaaataaactgaatatgcaagctgtggtacagttacaaaaaaaacatgaagttttatttttttataatataagacaattcatatatgtttgatgtatgatgtgttaaggtgagattcaataatatcctgtacgttttaagtattatga

SEQ ID NO: 1475 - DNA, 600 bp, Chicken  19866894088036_1
agctgaactgtcaacagcaaaagccaaatgatgttcttgcaatgtgagctaatgctttctttgatctgaggctgacagttaggagatgcagttaagatgaatctggatgtacatcctgagtttcaaaaggtggcagaggttctctccagtaggtaaactgactgtaggtatcagaacaagggaaatctgaagaatggcttcttttcagcaaagggaaaatatggtctaccacttcacacagtctgacatagctgaaaaacaattacataagtaaatgcaataccaaaccatttcagatcrcagtagttctatttatttaagcccacagtcaagacatggctatacctatataaacaggtatactccttaaatgaataaacttgagtttaatttttggtgtctagcttctaaacaagattcacagttcagacacagaatccacctttgcttagaatgaatacttttctagaaagaaagaagcgccattttcagcccaaatcacctccccagatattcaggccccgcattttgtttctttgttgctgtccagcctgactcaaacagctccctgttcaactgatcattcacatatgtatgctc

SEQ ID NO: 1476 - DNA, 599 bp, Chicken  19866894088039_1
  misc_feature (1)..(127): n is any nucleotide
nnnnnnnnnnnnnnnnnnnnnnnnnnnnnnnnnnnnnnnnnnnnnnnnnnnnnnnnnnnnnnnnnnnnnnnnnnnnnnnnnnnnnnnnnnnnnnnnnnnnnnnnnnnnnnnnnnnnnnnnnnnnnnntgaaaaacatgaaaaacataacacaataacctaattcatatttgtggtaaaaccttgaagtaatgttttttcttgtagtattttaacaggctatggctgccgtggggaagagtgtttggcatcctgacttttacgttgctcccatttggcaattgtgactctttaagcacttyatgggatgaatagatgcatgtaaagcaagtgatgggccatggcaggacagggaacataaggctagtggtcagaaaaccctgtggggtggcaagggaggggagagtagaaggagcatgctcagtgtcatccttcttttccttggagccaagaaagaggagcaagatttgcttctgaatgtggtggcgtgaggaggaaaagggttgggattttctcaggcagagatcattttcatgtcccagagcaaaatctgaagtttattaaatggtactttataaattgtcttccggcctttctgatg

SEQ ID NO: 1477 - DNA, 600 bp, Chicken  19866894088039_2
tagatgcatgtaaagcaagtgatgggccatggcaggacagggaacataaggctagtggtcagaaaaccctgtggggtggcaagggaggggagagtagaaggagcatgctcagtgtcatccttcttttccttggagccaagaaagaggagcaagatttgcttctgaatgtggtggcgtgaggaggaaaagggttgggattttctcaggcagagatcattttcatgtcccagagcaaaatctgaagtttattaaatggtactttataaattgtcttccggcctttctgatgatgggatgttstgtgtgtcagaaacccagcagcaacacaacagccctctgaaaagcaggtataaaaggacaaattaattctctgcctgctctccaactgcttgaatattatttgttaagaacagaatttcatgcaggatgtgctaatatattaatccgtaaggtgccttcacagaaagtaagcttaaaacacattaaaaagtaatcaaggcttcattaggcagtgcttctgcagctgcttgctagcagctgagctgatataaataaggaaatgttagttgtccttgcacctaagtaacggatggaggaatc

SEQ ID NO: 1478 - DNA, 600 bp, Chicken  19866894088043_1
gctcgatacttctctgctgcaggaagaagggaacgtaacgagctggcgggtgatgtccaccaaatgtcattcctgaacacattcgctccggtccccattcaccagccccaacagcaaggctgcttccccatccactggcaacagctttcgccaagattttagaattcaacaatgaaacaggcctgcaactaaaacatttatctggcagttttccctctttaagtcaaagtgttatgttggcacactgcactgtgggtggcgatttgccagagaaaagcatgtgttggaaaaccttgctcratattatagcaatctcgtgctcgcaagcctcgcacgacgcgaggaggagctgccagcagggctcacagccggccgccctcccaggcaggagcagagcagagctcggcagcatcgaggtgctgctgggcagggggctgtgcagggaccgctgtgggcacacatccactggtcagcagaagggagctctgtggaygacagcatagaaagacgctgctctgtacttcagaaacatttccctgtgggtgcttaagtttccttgggaccagcccaagtgttttagcacggggcagataatcctta

SEQ ID NO: 1479 - DNA, 600 bp, Chicken  19866894088043_2
acatttatctggcagttttccctctttaagtcaaagtgttatgttggcacactgcactgtgggtggcgatttgccagagaaaagcatgtgttggaaaaccttgctcratattatagcaatctcgtgctcgcaagcctcgcacgacgcgaggaggagctgccagcagggctcacagccggccgccctcccaggcaggagcagagcagagctcggcagcatcgaggtgctgctgggcagggggctgtgcagggaccgctgtgggcacacatccactggtcagcagaagggagctctgtggaygacagcatagaaagacgctgctctgtacttcagaaacatttccctgtgggtgcttaagtttccttgggaccagcccaagtgttttagcacggggcagataatccttactgaagcagaaagaaaggctacaagggcttgcctgtagcacagaaaaacatattgaggaggcagcagtaacttaatatgcaggagaggcctgggctcccaagtcggttgcatcactcatttagcaacactcaagccacagagcaggagctgggcctccaagcgcaccgggcactgcgctgctgccaagatcct

SEQ ID NO: 1480 - DNA, 600 bp, Chicken  19866894088043_3
ttgaaacacctgggtgtgaacgatacagcacacagaaatgctcacagttctcggtacagactgaaaatagaggtgcagaatgacaaacttcatagcttagcaaagctgctgctagtggtagagctgcaggaagtgaatagtccaacctgctacagttatcgcaaagtgcggttagaacaaaagtgatttcttttccgtttaatgaggtttccaagtaaagccattctgggttttccatgatctccatcttgctctatttagagccagcagcagggcagatgtcacacaggaagtaacacygctgggcagctgagttcctgcagctgcagagctgctgctctcctgacttgcacagagcaaagcctggaatctagcacacctcagtggaagtcagcagaagagccccctggtcagggctcccagccacagctaccacaggcagctgccctgggggaaggggtcagaaagcagagcaggaactcagaggcaccgtgtgaccgggggacacatcccctccccagaaaaaagcacatgtgaagarcaggagggagaaaatgtggccatgattaatactccattttttataaatgaccctgtata

SEQ ID NO: 1481 - DNA, 600 bp, Chicken  19866894088043_4
ctccatcttgctctatttagagccagcagcagggcagatgtcacacaggaagtaacacygctgggcagctgagttcctgcagctgcagagctgctgctctcctgacttgcacagagcaaagcctggaatctagcacacctcagtggaagtcagcagaagagccccctggtcagggctcccagccacagctaccacaggcagctgccctgggggaaggggtcagaaagcagagcaggaactcagaggcaccgtgtgaccgggggacacatcccctccccagaaaaaagcacatgtgaagarcaggagggagaaaatgtggccatgattaatactccattttttataaatgaccctgtataattctatctgccccatttcactgatgtcaggagctgctatgctctcaaatctctcaatgtaggcagttctgtaagttcactttgaaaaaaaaaatagatggcactgtgcatgtgccattaatgcaagccttccttccaaatgcttccctcctgacacacgcatgcaatgtatgtgcctgaaagcctcctcaggaatcctggcttgtttcctatttaccctccatttgaactgaagcaggag

SEQ ID NO: 1482 - DNA, 600 bp, Chicken  19866894088049_1
attccagcagattttcagtacatttaaatgtttgctcagtatgtcagataagaaaaatttgaatgatgcatgatctgagagagaagtgaagaaggcatttcagccttgagccctaaagagattatttttcttaaagatagaaattaaactgattttggtcatgcttaactgtgaaaaggattcatgtattttatgctacaaaaggaaagccatttcaaagttgtagaattcatatagtgaaagataaaatgtgtggtgttttctttctcttgtatacctgaaatttcttaacttttaagrccaacagaacttttcagaagctgcaattcacagtcagaccaaggagccatgaatgacatgaagctttgggaaaaagggagtattaagatgccatttataaatattcctgttcttgatattaataaatgccaaccagaaatgtggaaggcaattgcctgctcactgcagattaaaccttgccacagcaaatctagaggaagtattatctgcaagtaagtaccatgaaaaaaaaaaacagttcagacgttctgctaaggattttaatgagaactgaaaaactactgtagaattgtatatgac

SEQ ID NO: 1483 - DNA, 599 bp, Chicken  19866894088058_1
  misc_feature (1)..(19): n is any nucleotide
nnnnnnnnnnnnnnnnnnntcagtaagcagataaagatagcaatggtaaattggtctgctgtctttaatatactgggtttctcactggcctcaaaagtgactcagacagcaacatagggaagagaagaatttgtttatgtggtaactatttgttgttatgcagtatagatgacaacaaggtggagactgatgagctttcagttgtttgagcgcttggtttccatgtattcctaataaatgtcttgcatcgttaagctgtggtgagggctaagtgtcatgcaaaagaaaatattctgtttygaaggattgagggtctgggtgcttctaattctttactggacacatcttgtaatagataagttgtattttatctgctatcatcttgcttatacccacaaatgagcatgagattgtatcttgggtttgtcccagattgctatcatgttctataatgaaagcagcatgatgtgatggagaaatgtcatccatttgctatctgctaacctttccaaatggttggctggatagacccatgagatttcatatttaaaatatctgtggtagttttgaaaataaagtttaggaattatctctcaatt

SEQ ID NO: 1484 - DNA, 600 bp, Chicken  19866894088059_1
cagcttggaccgaatcttttcttttatgcacacgctgccctccaaggaagaaagcattggtgttgcagcagggcctcctctgaggtcgctcgggatcagccctgtctctgtgtcagggtgctcaggaccagttgctctttccctgcagattctgccccagccccacagattgcacagggatcagagccagcgctgcacgctacccggctggcaccatgatttcgtctttgctctcccctgcttggtttggctgatgccccggtgggactcaatgcattgggggcagcttgtggagctggrgggaggccctcggtcccctctatggggtcctgcagcctcagcatcgcagtagagcctcagtgccccccacccaccatcacccccctgctgtcaccaagggctgtgctgttccagcagccagagctggtccttggggctgactgtgaagggaagagcacagcctgtccctttctggctgccagctcgtggaggggccctgggtgtgaagtcatcgttgtgcagcagtgacatcacttgtggttgccatggcgatgtctcacatggggaaggtgtcattggagaaaggtcacgagckgggat

SEQ ID NO: 1485 - DNA, 600 bp, Chicken  19866894088059_2
ctggrgggaggccctcggtcccctctatggggtcctgcagcctcagcatcgcagtagagcctcagtgccccccacccaccatcacccccctgctgtcaccaagggctgtgctgttccagcagccagagctggtccttggggctgactgtgaagggaagagcacagcctgtccctttctggctgccagctcgtggaggggccctgggtgtgaagtcatcgttgtgcagcagtgacatcacttgtggttgccatggcgatgtctcacatggggaaggtgtcattggagaaaggtcacgagckgggatgctcggctccttccagccctacaccaagctgaaaaggcagggggaagatggggagccccacgcttggcccccatatggagctgaagccctgacaatggggctgtgtgtcctgctgtgaccttggtgcatgcaggaaggacatgggcagaaggatgggagccaggagaagtggggggctgaggcagcagcagcgcagaggtgaaggggaggcattctgctcactccctccttgttctccctccttgctccagctgcagctggacgtgaccatatgatgcccctcctaccccttccc

SEQ ID NO: 1486 - DNA, 600 bp, Chicken  19866894088061_1
tttgtcatgagtatatcagctaaaacactgttatcagttcattaatataaaaggaaatagatattgccaacatagtaaacagtagtcattttcaaacctcttctcatttgttcccatgggaaaagagggaagatcctgttctttcctaacactcttaatcattctgtactttccacagtaatcctctcttattccatttttaagcataacctcaactgacttagagttcaaacaacagttaacaaaggacaaagagcctgctactcatgacaactgcagaattaccactgaatttcttaytgcaacactgagccttgaaacttaggagagactttttcacattttcctaactggaccacagaaactgtgttaataaaccctgaatgtggatgtatagattgggaaggatgattttgtggctaaagttctggtctacaacccagaataaaagtgtaatgtcccatttctgtgttctgctgagaagatcactacatgactcagctcctgtttacagtctgcagcatggctctaactacatgtgtactttagtaggatgtggtgaaggtttaaaattaacagttgtagtcactgtgggtctag

SEQ ID NO: 1487 - DNA, 578 bp, Chicken  19866894088061_2
gagagactttttcacattttcctaactggaccacagaaactgtgttaataaaccctgaatgtggatgtatagattgggaaggatgattttgtggctaaagttctggtctacaacccagaataaaagtgtaatgtcccatttctgtgttctgctgagaagatcactacatgactcagctcctgtttacagtctgcagcatggctctaactacatgtgtactttagtaggatgtggtgaaggtttaaaattaacagttgtagtcactgtgggtctagtttgacaaataaaacagtaattctwaagtcatttgagaaactcttagtcaacttttaaagaaaggctgatgcctatgtggatgtacagtatgtacttacagtggaatcaggcatatacacaatttataaaagtatgcagtactgtggataaattaagtgaagtcatgataccagtaagtttggtgactctgaaccttatgcataagcatggtcttttctactgtagtaatttgtagaagtaatccccccaagaaagatgactatgtgggcaagattaatattattttcatttgttcctctcct

SEQ ID NO: 1488 - DNA, 600 bp, Chicken  19866894088065_1
ttgaaatttttagtttagaatcatagaattgttcaggttggaagggatcttaaaaatcatccatttctacctcccccctgccccacacctgttctgtcatggacaggtttgccagccactagatcaggttgcccagagccgtatccaacctggtcttgaacacctacaggttcagtcatccacagcttctctgggaagcctgtgcgagtgcttccccaccctctgagtaaagaatttattccttacatcaattctaagcctatcttctttttagagaaactgttaacccttgtcctattrtattcccatatawaaaatgmctccccatctttcccatagacctctagtacttaaatactggaaggcctctttaagttctcttctttagtcttaagacttctttaggctgaataaccacagttctctctgtctttataggaagagtgccccagccctctgatcttcttcatgtctctcctatggacccaggctaacaggcccatgtttttcttatgctggagatccctgagttgaatacaaaactctaaatgaggtctcccaaaagcagagtaaaggagaagaatcactctcagytgtatt

SEQ ID NO: 1489 - DNA, 600 bp, Chicken  19866894088065_2
tttagaatcatagaattgttcaggttggaagggatcttaaaaatcatccatttctacctcccccctgccccacacctgttctgtcatggacaggtttgccagccactagatcaggttgcccagagccgtatccaacctggtcttgaacacctacaggttcagtcatccacagcttctctgggaagcctgtgcgagtgcttccccaccctctgagtaaagaatttattccttacatcaattctaagcctatcttctttttagagaaactgttaacccttgtcctattrtattcccatatawaaaatgmctccccatctttcccatagacctctagtacttaaatactggaaggcctctttaagttctcttctttagtcttaagacttctttaggctgaataaccacagttctctctgtctttataggaagagtgccccagccctctgatcttcttcatgtctctcctatggacccaggctaacaggcccatgtttttcttatgctggagatccctgagttgaatacaaaactctaaatgaggtctcccaaaagcagagtaaaggagaagaatcactctcagytgtatttcctttcatgtag

SEQ ID NO: 1490 - DNA, 600 bp, Chicken  19866894088065_3
tcatagaattgttcaggttggaagggatcttaaaaatcatccatttctacctcccccctgccccacacctgttctgtcatggacaggtttgccagccactagatcaggttgcccagagccgtatccaacctggtcttgaacacctacaggttcagtcatccacagcttctctgggaagcctgtgcgagtgcttccccaccctctgagtaaagaatttattccttacatcaattctaagcctatcttctttttagagaaactgttaacccttgtcctattrtattcccatatawaaaatgmctccccatctttcccatagacctctagtacttaaatactggaaggcctctttaagttctcttctttagtcttaagacttctttaggctgaataaccacagttctctctgtctttataggaagagtgccccagccctctgatcttcttcatgtctctcctatggacccaggctaacaggcccatgtttttcttatgctggagatccctgagttgaatacaaaactctaaatgaggtctcccaaaagcagagtaaaggagaagaatcactctcagytgtatttcctttcatgtagtccagga

SEQ ID NO: 1491 - DNA, 578 bp, Chicken  19866894088065_4
ctattrtattcccatatawaaaatgmctccccatctttcccatagacctctagtacttaaatactggaaggcctctttaagttctcttctttagtcttaagacttctttaggctgaataaccacagttctctctgtctttataggaagagtgccccagccctctgatcttcttcatgtctctcctatggacccaggctaacaggcccatgtttttcttatgctggagatccctgagttgaatacaaaactctaaatgaggtctcccaaaagcagagtaaaggagaagaatcactctcagytgtatttcctttcatgtagtccaggatatgcttggctttcttgtctataartgcactttgctagctcatgttgacctttttaaacatgtgtactcccaagtcattctccacagttctgctcttcacccatgtgtttcctagcctgcattcatgctccaaattgccctgacccacgtgcaagacctatcacttggacttgttgaaatacacgtttttcttacaggcccatctcttgagcctgtcaaggtccttctggatgtcatccctttcctccatca

SEQ ID NO: 1492 - DNA, 527 bp, Chicken  19866894088065_5
agtacttaaatactggaaggcctctttaagttctcttctttagtcttaagacttctttaggctgaataaccacagttctctctgtctttataggaagagtgccccagccctctgatcttcttcatgtctctcctatggacccaggctaacaggcccatgtttttcttatgctggagatccctgagttgaatacaaaactctaaatgaggtctcccaaaagcagagtaaaggagaagaatcactctcagytgtatttcctttcatgtagtccaggatatgcttggctttcttgtctataartgcactttgctagctcatgttgacctttttaaacatgtgtactcccaagtcattctccacagttctgctcttcacccatgtgtttcctagcctgcattcatgctccaaattgccctgacccacgtgcaagacctatcacttggacttgttgaaatacacgtttttcttacaggcccatctcttgagcctgtcaaggtccttctggatgtcatccctttcctccatca

SEQ ID NO: 1493 - DNA, 600 bp, Chicken  19866894088067_1
atattaggaacaatttcttctcttaaagagtggtgaagcaatggtatgggctgcatgggggtggtggaggtgttccagagctgtggagatgtagcactgaggggcatggtcagtgaggatggcttagggacggactagatgatgagtgcccaacctattggcttgcctgggctgcaccaagtgaaaaggaattgtttggggccttatatatgtaggttgctctgaaagtaatgcctcctatttatttccatggaaactacaactaatacagagagcacaataacactctttaatagagtmaactctcagctacaaaacactgtttttcaacacagtcaccaccattagctgagcatttttgacagtcatgaacaagagcctgcacaccacgcttgtcaaaatctgcagcagtggaggtgacctactgcctctgtcaccactgctgaaatgcaccacccactgcctcactgtgctcacatccactgctgggtctccataaacgttctctagtacagaaacacattcagatttttgagttcaagatctgattgcaactctatacattctctttgaaaactagcaggcaatgtatttctgtca

SEQ ID NO: 1494 - DNA, 600 bp, Chicken  19866894088067_2
gcagcacatcatccagcatacgcatgctccatcctggacctctgtcacttgctcccatagcagctggctctcacatttcgctgcctggccctgctcatctcagcagcgtgcacacagcaggggagccccgtgcaatgggataaggtcagctctctgcaggattttctcatttgctccagctgagctggcaggttgtgtactgttttagtgtatttttaacaactccccctgggcacctggatctggggttggatgctctttcaatatcacgtgtaagtaggcaggtaaagaggaaggctstgctaacaacttgcccatttgtttcaatggtgatgccaggcaataatgcatcagtacatttccttgtgagaactgtctcccacgagcagagcactgctgctccttktatcaattgcactgtcttattcctgggtctcactacagaaacttgcaacattctgccagctcatattctatctttcaaggcagaatttgcttctccccccccccaaatgtatagcatttgttccttaaatacagaaatctgcacctagtgaatagcaatgctagaactggtgcaaaaccacatcctgcagcagy

SEQ ID NO: 1495 - DNA, 600 bp, Chicken  19866894088067_3
cgtgcacacagcaggggagccccgtgcaatgggataaggtcagctctctgcaggattttctcatttgctccagctgagctggcaggttgtgtactgttttagtgtatttttaacaactccccctgggcacctggatctggggttggatgctctttcaatatcacgtgtaagtaggcaggtaaagaggaaggctstgctaacaacttgcccatttgtttcaatggtgatgccaggcaataatgcatcagtacatttccttgtgagaactgtctcccacgagcagagcactgctgctccttktatcaattgcactgtcttattcctgggtctcactacagaaacttgcaacattctgccagctcatattctatctttcaaggcagaatttgcttctccccccccccaaatgtatagcatttgttccttaaatacagaaatctgcacctagtgaatagcaatgctagaactggtgcaaaaccacatcctgcagcagyctcatctctgtcctaagtgacctcacagcagagactcccatcgctgtgcttattatgtcttattcagtggtatatcattccccaatgcaaagtatctacatgtaca

SEQ ID NO: 1496 - DNA, 600 bp, Chicken  19866894088067_4
tgctaacaacttgcccatttgtttcaatggtgatgccaggcaataatgcatcagtacatttccttgtgagaactgtctcccacgagcagagcactgctgctccttktatcaattgcactgtcttattcctgggtctcactacagaaacttgcaacattctgccagctcatattctatctttcaaggcagaatttgcttctccccccccccaaatgtatagcatttgttccttaaatacagaaatctgcacctagtgaatagcaatgctagaactggtgcaaaaccacatcctgcagcagyctcatctctgtcctaagtgacctcacagcagagactcccatcgctgtgcttattatgtcttattcagtggtatatcattccccaatgcaaagtatctacatgtacattttagacaaggaaatctaccaaaaaaaaaaaaaaaaatagccttccagataagatgtagaagcttagaattttttgacagaggaaattatgacttcacatcgcatacaaaaataaatgcaaataaacacactgaaatgaaggaaccccaaattctctggcacccgatgcaggagatgctaaaatggccatcgc

SEQ ID NO: 1497 - DNA, 600 bp, Chicken  19866894088073_1
tgaaacaggaattgagatagcaccatcacgtccagcagcagcatgccctgagaggggctcagacagcagctgttgcaaagcccatgggccctcagtgcccagagacactgctctctccccattcacccagcctgtgatgctatcacagaaggctaccaggttggtctagcactatttcctcttggtgaagccatgctgaccacaaaaattggctctctagataaggctgtctaaggccccgtccagcctgggcttgaacatctccaggaatggggcatccacaacttctctgggtccttyggtcagttcctcaccacccttaaagtggaaaaattttcctctaacatgtttatttttatgatgtgtgtgtgcaagattgtttctcggttctgaggtgcctacaactggcacttcgtggataagtgtgtttttctaacttagcaatttctcaaaaggttctctagagtgctattactgacattgtcgggagttcagcaaattaccaaatcattcagaagggaggcatggcttgagctacggtgatgcaattgactgcatctgacagcaagaacagaaataattaacctgcatattggtgta

SEQ ID NO: 1498 - DNA, 600 bp, Chicken  19866894088073_2
agctacggtgatgcaattgactgcatctgacagcaagaacagaaataattaacctgcatattggtgtaatttggggaagttgtgttagttttattaatagggaaaacagcaggacatgaaagaacaaaactgaaagaacaatgaatataagaaatgagttttgcttcagtaaataaagaacaacaggggtaagaaatcctaacaaactgatttgatatgcagccattaatgcacaaaatctgttgtctataggttagaagcaaggaaagaataaaatgcttttgttctcaacccaggaaytgtttaactgcattttctcctcccctgtgctgttgaggagaggcagtgacagagcagcataaggggcacctgggagccaagcaaggtgagcacagcacagctgggcactgagttccagtgattttgrggtcccaacctgcagcatgaggctccatgtacgttcccccctgctggacagcccagccccactgacccacaggcagcccctggcagctctgtgcaggcactgtgtggggccgcatgcccccagcacagccctggcagcccacactgcccttctactccctcaccagctggacc

SEQ ID NO: 1499 - DNA, 600 bp, Chicken  19866894088073_3
aactgaaagaacaatgaatataagaaatgagttttgcttcagtaaataaagaacaacaggggtaagaaatcctaacaaactgatttgatatgcagccattaatgcacaaaatctgttgtctataggttagaagcaaggaaagaataaaatgcttttgttctcaacccaggaaytgtttaactgcattttctcctcccctgtgctgttgaggagaggcagtgacagagcagcataaggggcacctgggagccaagcaaggtgagcacagcacagctgggcactgagttccagtgattttgrggtcccaacctgcagcatgaggctccatgtacgttcccccctgctggacagcccagccccactgacccacaggcagcccctggcagctctgtgcaggcactgtgtggggccgcatgcccccagcacagccctggcagcccacactgcccttctactccctcaccagctggaccctgcccggtcccaatgtgtcccacacagctcacagccagccctgccccaggctctgttgggctctgggcctagatagggaccaggccgggctacccattccccagtgcaggcactgagcccagtagc

SEQ ID NO: 1500 - DNA, 600 bp, Chicken  19866894088089_1
gtgaggatcgccccacagttgtgactcaaccctgctgccccccatctcttcaccatgcatacgtatttatgccttccttgcctttctccaccatcagattttgaagatggtgccatccaaaatgaagtcccattgaaagaatgtgttgtgatgaagagctgttgagtgagtcaccgcaatcgtgttggcaaggtgggctgtggagcaggccagatccttacgcttggcacgagagagtgaaaagcaaaagaggagagtgaagccggagccaggagcacccgcagtgcttggccaggcagrcagggctgggctgcaggcactttcctgcttaaccacttcagtgacacaactctgcccgagtggagacatttccaagctgtgccctcatctgggcgctgggagatgggcttaaggcaaatatagaggatgtgttccatgccagggatttaaaaggtctttgtgtcttctcttttttctttttgcccctttttcctcctctatgtgatggttagaacgtcttaacattttatgaaaactttagcctaggagggggcccttagcatctctagtccaacacctgcccaaagttgcagaaggctt

SEQ ID NO: 1501 - DNA, 600 bp, Chicken  19866894088092_1
agtacagccagtacttagtttgtttcaacatacctgcacaggatggaatgctttgcgattttctgcgtaacatctctgaatttgcttgtgaagcttcttaacatcctgtatacaacacaatttgtttttacatagtccttcagacagaccaccacaaaatgctttaccatgagccagaagctaaagagagaaaaaggaggcttttaactggcaaaaatgactgctgacagagagcggacatcagaccccaacagaaggaacagcctttgtgaagggattctgctgacatggaaacatacrtctacaaaagtgtatttaaacacctctgwgcacgtacgtgattcgtgttgttcaaggaaacaaacaaaacaaaatcactgagatttaagtacacatttaaacattcaaaactaatctcaggaatcaatgagatctgccacactacaacaaggctcagtcactgctgcgcgtgccccwcattacagtcacagagcagccaggtgggctttgcaaaagctcaaattcacgcagccttgcaggacagcgaaatgagagcagtagaaaggctcagggtagaagcatgggggagaggtctgcctt

SEQ ID NO: 1502 - DNA, 600 bp, Chicken  19866894088092_2
atacctgcacaggatggaatgctttgcgattttctgcgtaacatctctgaatttgcttgtgaagcttcttaacatcctgtatacaacacaatttgtttttacatagtccttcagacagaccaccacaaaatgctttaccatgagccagaagctaaagagagaaaaaggaggcttttaactggcaaaaatgactgctgacagagagcggacatcagaccccaacagaaggaacagcctttgtgaagggattctgctgacatggaaacatacrtctacaaaagtgtatttaaacacctctgwgcacgtacgtgattcgtgttgttcaaggaaacaaacaaaacaaaatcactgagatttaagtacacatttaaacattcaaaactaatctcaggaatcaatgagatctgccacactacaacaaggctcagtcactgctgcgcgtgccccwcattacagtcacagagcagccaggtgggctttgcaaaagctcaaattcacgcagccttgcaggacagcgaaatgagagcagtagaaaggctcagggtagaagcatgggggagaggtctgccttagacactgcgggctatactcatacaggag

SEQ ID NO: 1503 - DNA, 600 bp, Chicken  19866894088092_3
aagctaaagagagaaaaaggaggcttttaactggcaaaaatgactgctgacagagagcggacatcagaccccaacagaaggaacagcctttgtgaagggattctgctgacatggaaacatacrtctacaaaagtgtatttaaacacctctgwgcacgtacgtgattcgtgttgttcaaggaaacaaacaaaacaaaatcactgagatttaagtacacatttaaacattcaaaactaatctcaggaatcaatgagatctgccacactacaacaaggctcagtcactgctgcgcgtgccccwcattacagtcacagagcagccaggtgggctttgcaaaagctcaaattcacgcagccttgcaggacagcgaaatgagagcagtagaaaggctcagggtagaagcatgggggagaggtctgccttagacactgcgggctatactcatacaggaggctgcaaagtaacgcatgttccctgtaggggtaaagccgctctgacctcaaaatggcagattaagtgtctcaaccagtgcctgggtaccatggctgattgttctcatatttacctatcctgggaacacctcacccttttttttttttt

SEQ ID NO: 1504 - DNA, 599 bp, Chicken  19866894088093_1
  misc_feature (1)..(194): n is any nucleotide
nnnnnnnnnnnnnnnnnnnnnnnnnnnnnnnnnnnnnnnnnnnnnnnnnnnnnnnnnnnnnnnnnnnnnnnnnnnnnnnnnnnnnnnnnnnnnnnnnnnnnnnnnnnnnnnnnnnnnnnnnnnnnnnnnnnnnnnnnnnnnnnnnnnnnnnnnnnnnnnnnnnnnnnnnnnnnnnnnnnnnnnnnnnnnnnnnnttggcaccatctggaggttgtggaagtgaaattgatggggacttggacaacattaccatgtgtaaaaatgtttgtttagaagaactgcaaggaaaatgtgatgtgyttacgttttatgattactcatatcttcaaggctccaaattcaaattgccagtgataatgaaacaatcacaaactgaaaagacacaaacagagggtgctttgtttcatggtttttgtttcgataaaatacctggtaaatctgaacataagcctggagagtcacaaccagatgagtttattcatgaccgtaatctggcaaatatccctggaggatcagatcccaattcctctaagtctgtggaaacactaagaaaactaattgctgcagaaaatacaagacaggtttcaactttatctcat

SEQ ID NO: 1505 - DNA, 481 bp, Chicken  19866894088093_2
gcagaaaatacaagacaggtttcaactttatctcatagttcttcattagaatctctgtctgtagtaggtgatttgttcagctcaggtatttttaaaagtggagatggtcttcaacggagcacctctttggagagctggctgacttcctacaaaagcaatgaagatctttttagtcatcatggctcaggagacattagtgcaagcagtgattctgttggagagctcagcaaaaggacattagatcttttgaatcgtttggagaacatccagagtccattagaacaaaagataaagcgcagyatttctgacataacactccaaagtagctctcaaaaaatgtcttttactggacagctgtctgtagatattgcatcctcagttaatgaagactcagcggcttctctcacagagctcagcagcagtgaggatctttctctctgttctgaagacattgtactgcacagaaataaaataccagatt

SEQ ID NO: 1506 - DNA, 599 bp, Chicken  19866894088094_1
  misc_feature (1)..(186): n is any nucleotide
nnnnnnnnnnnnnnnnnnnnnnnnnnnnnnnnnnnnnnnnnnnnnnnnnnnnnnnnnnnnnnnnnnnnnnnnnnnnnnnnnnnnnnnnnnnnnnnnnnnnnnnnnnnnnnnnnnnnnnnnnnnnnnnnnnnnnnnnnnnnnnnnnnnnnnnnnnnnnnnnnnnnnnnnnnnnnnnnnnnnnnnnnnccattctgcagtgatatgcatttatatgcatttgctgggatataggacattttgatgacattgacattttatgactaatgctaggaatttgttggacagcatagcaatgctggraaagttaaagaaaaaaagatcagtgggatttctagcttgatttatagtgattattattgttttctacattgtttaaatttttggtataacttcagtctgagagaagctttgttgttgtgtgtcaagagtaaatctgcaatgcacgtgttctttagtgaggtcttgtgtttgtgttttaaatgtgtgaagtaccaaattagattggactaaacatctcagaatcagaatggctgaggtgggaagttgcccctttatcatttggttcaaccagtcatttggttgcccagcgccctgtccag

SEQ ID NO: 1507 - DNA, 600 bp, Chicken  19866894088094_2
tttgttgttgtgtgtcaagagtaaatctgcaatgcacgtgttctttagtgaggtcttgtgtttgtgttttaaatgtgtgaagtaccaaattagattggactaaacatctcagaatcagaatggctgaggtgggaagttgcccctttatcatttggttcaaccagtcatttggttgcccagcgccctgtccagctgggttttgaacatcttcaaggactgagattctacagactctgtgggcaccctgttccaatgtctcacaggttttgtgttcaggtagaaattcatattttaaattgygttcattagytttggctcctttttcttcatttcctttgtcatgtatttatagacattgatgggatcctgcctgagtctcctcctagtttcaggtttctcagtctttcctcatgtgagcataaaagatgctccaactccttaatcatcctagtgcatcttccttgcatgtctgttgagtactcattctctctcccctatcagttgtcttttagtcaagtgggtccagtgttttccaagcagctgctgagccttgaggagggtcccatgctaacaacaccctcgctattacgagtctcataa

SEQ ID NO: 1508 - DNA, 600 bp, Chicken  19866894088094_3
tgtgtcaagagtaaatctgcaatgcacgtgttctttagtgaggtcttgtgtttgtgttttaaatgtgtgaagtaccaaattagattggactaaacatctcagaatcagaatggctgaggtgggaagttgcccctttatcatttggttcaaccagtcatttggttgcccagcgccctgtccagctgggttttgaacatcttcaaggactgagattctacagactctgtgggcaccctgttccaatgtctcacaggttttgtgttcaggtagaaattcatattttaaattgygttcattagytttggctcctttttcttcatttcctttgtcatgtatttatagacattgatgggatcctgcctgagtctcctcctagtttcaggtttctcagtctttcctcatgtgagcataaaagatgctccaactccttaatcatcctagtgcatcttccttgcatgtctgttgagtactcattctctctcccctatcagttgtcttttagtcaagtgggtccagtgttttccaagcagctgctgagccttgaggagggtcccatgctaacaacaccctcgctattacgagtctcataacctaatggtg

SEQ ID NO: 1509 - DNA, 599 bp, Chicken  19866894088097_1
  misc_feature (1)..(68): n is any nucleotide
nnnnnnnnnnnnnnnnnnnnnnnnnnnnnnnnnnnnnnnnnnnnnnnnnnnnnnnnnnnnnnnnnnnncaggtgtaattctggtgttgctttttgcaggattgtgagttgggtcaatttaggccctgagcttacagacagtcacatccgtatagacaggcagaatttcaggaaagcatttacaatgcagaaacaacagcagaaaaacaaccttgcccacacctccaacaaggtgcagttcataacttattccatacgtatttgcacaccttgggctttctcctatttgtttcagtttgcrcaactgtttaatctttcttttcctcttaaagatttatggtacatctagtttacttacaaatgagattggtaaacctccagatcagagggaggtgatgtgtactggggcttttttgggccacgcttgcatttctgtttgagttgcctgagaatccatcactgaagaatcaatacctaccttttacgtttctcaatttatacttgctgttttttagatgtggaaaataataccagtgagacttctgtagctgattaaagtattcaggggtcttcagtatttgactcttccctttattttgg

SEQ ID NO: 1510 - DNA, 600 bp, Chicken  19866894088097_2
tacatctagtttacttacaaatgagattggtaaacctccagatcagagggaggtgatgtgtactggggcttttttgggccacgcttgcatttctgtttgagttgcctgagaatccatcactgaagaatcaatacctaccttttacgtttctcaatttatacttgctgttttttagatgtggaaaataataccagtgagacttctgtagctgattaaagtattcaggggtcttcagtatttgactcttccctttattttgggaatagatggatgctttcgcatcatgaatcattcagctcygcttctgcagtctctgtactttttctgagatcagaaacatgccgttgacctgcttcttgatagttccacaacagcaaacttgattcgtaacagcaggagtggagaaaaaaataaaaagagctacctcagtttttcagcctgcttgtcaaagctgtgagtagcaggtgaaggtctgcattgtctgctagcagaatgaggaggatggaaacatattcatcatgatggtgactcagagatggactgtctttgcattaacgaagtaaaaggatgggatatagctgcaaggagtaattatgccat

SEQ ID NO: 1511 - DNA, 600 bp, Chicken  19866894088101_1
aacattactcttactgctctcaaaagatttctttaagatacactctaaaaatatgaatcagttatacagtattcggtggtatggtatttcctaattaaatcactaatgaaaaacactgacggttgtatgtacaggcacaggtttgtgtttgcataacccaagaacagcttcaacacatggagaaatcaacccatggattaagttttataacccatcaagagtagtagagatacactaaagctttaaagtgtgtgtgtgtatatatatatatataattatttttaattgtcagcgtattayttacaaaaaatcccttagcaattgaaatcataaattctcagaatgctttattttttcattttttttaacaagtttgcctttcagattttgaaaagatatagctactaaatatatttcaaattctctacttatttttctgagagaagaattaaatagcacatgactacttcattcattgccagagagaacaaagaatgtatgttagatcaacagagtattcctgcacatatgtactcttacaaaaggacgttgcatgtatgccaccacatgggtatctttgggtaccaccggtatcatgtt

SEQ ID NO: 1512 - DNA, 600 bp, Chicken  19866894088102_1
attatttctctaggcttaaaactaatgggagatggaaaatatgatttcatttgtatacttgaaaaggggctttcgagcattttaagttgaaataggaaaaatagggaaaaaggataagtccattgtttctatttacacaaaataacctacagtatagaataaactcaaagtgtaaatctgttattggccatttaaccaggaaattaacaaatgcaaataaagggctccctctatagtttctcctataaaattacaggtaacagtattctctagtatgatggcaaaatgcacgttgtggtycatttcttctgtatacgtacatgcggtaggaaaagtgaatgttttaaaagaattgctgttattttaaatttacaaaccaaatctgtatattaacttccaagagtgcaatgttcaagttaaatgaatattcagccctctgaaaacattcacatagtaaagaagcgttctttttatttttggctttaacgttaatctttgttttgtttcaggatattgccatacggctgtttagcaactggagatcattctggccttattgaggctgtttccagttcagaaaccattgctgacattcagtta

SEQ ID NO: 1513 - DNA, 600 bp, Chicken  19866894088103_1
acagtgtttcccaaaattatcacgtcacagacctcatccctttctcatgtaacatttgctgccactaaattcaggaacagaaagctggcaccaagaacactgaggttttgtgaaaagttctgtgccaaaaagtgacaaatggatgtgacagccgatccatgctccatacattggctgttgtgctggctgccatcaagcagcagcagcaggaggacaggcagctcatatgagctggccttattttccttccccttcattgacataaatacctgtgcatttatcagcacttcctctggtccrttgctacctgcctctgtagatagcggattattgttgatgtaaagaatctcagttatttaatgatgagacaaatattcagccattagctaatactgcctcgaggaagagaggacatggctgttttgctgctggcatttttctctcctccagcgcctcccacactgctgacccagtcctgctctgccttgcctgtcctttcatagggaccttctctctctctctctctctctctccagccaacctctacctgttagcaaataaagcagtataactacagtctttttgtcagatcagcctgct

SEQ ID NO: 1514 - DNA, 600 bp, Chicken  19866894088103_2
atggctgttttgctgctggcatttttctctcctccagcgcctcccacactgctgacccagtcctgctctgccttgcctgtcctttcatagggaccttctctctctctctctctctctctccagccaacctctacctgttagcaaataaagcagtataactacagtctttttgtcagatcagcctgctacatagcatttattcccacctctcacagctggtctgagctactaatgaagggagtgccaagagttagcctttcagttgccaggataaaatacaatatcaaagctcataacttmacataaaaaaaaaaagggaaaaaataccatggtactaaaatatttcccctatggaccctcctacttagctttgcacaagaagccagttctcttttattcattagttttcatttcaaaggaaatgagaaacaaactgtcctttagcgagctgagtggagctggactttggctcccccgatggaacacacagtcaaaggcacagctgaagcctcttccaggggcagaagcagcaggaactgcattggggttcagtgcttcagctgcccactcccatatggtgagggactctggctgctgtga

SEQ ID NO: 1515 - DNA, 600 bp, Chicken  19866894088103_3
tgttttgctgctggcatttttctctcctccagcgcctcccacactgctgacccagtcctgctctgccttgcctgtcctttcatagggaccttctctctctctctctctctctctccagccaacctctacctgttagcaaataaagcagtataactacagtctttttgtcagatcagcctgctacatagcatttattcccacctctcacagctggtctgagctactaatgaagggagtgccaagagttagcctttcagttgccaggataaaatacaatatcaaagctcataacttmacatmaaaaaaaaaagggaaaaaataccatggtactaaaatatttcccctatggaccctcctacttagctttgcacaagaagccagttctcttttattcattagttttcatttcaaaggaaatgagaaacaaactgtcctttagcgagctgagtggagctggactttggctcccccgatggaacacacagtcaaaggcacagctgaagcctcttccaggggcagaagcagcaggaactgcattggggttcagtgcttcagctgcccactcccatatggtgagggactctggctgctgtgaataat

SEQ ID NO: 1516 - DNA, 600 bp, Chicken  19866894088104_1
gccggaccttgtattaccaatggtaattgaggctatcttgaactctaaaaaggaagaaagattcccataaaatagaaccaatttccgtcctcctcgatagctgaaattatgggttgtagctgaaagaccccttagtaacagttatttcatggagcagaaattattttgtttgactaccgcacagtcttgtgagttgtttttttccttatacaaccaggaaagatctgaggtcactgctgcaccagtttgactatatttgccactgagttaatagaagcagaactgtattctttacacagstcagccatgcagccattcatccggacagcagctgtgcatatttgctcttgatacttcgtatacagatgttgccagactaattaacatatagggcctgtggcattaatgctatattcagaaacatgcatttctttctttaccctctccgcatgactgcgattaatagctgtctctgctcccccccagtcgtgagtggactcagtaggaagaaaatgggagatgatggaagagctgaggactccgacacacatttctgaaagactgaattaaacagcagaaaatcagtgtgaccctaaatca

SEQ ID NO: 1517 - DNA, 600 bp, Chicken  19866894088105_1
tgcattccagtgaaaacagaaatcagatgtacggtgcatatgatagtttaattggccaatactatttaccatatgttaattgcaagttgtattgtaaattatgaggttgattatagcaataattagaacggattcatgtaagatgctgagcagtttaaaaaaaaaagagaaaagatcttctggtagaagcatttttatctcagtaacattgaaatttactctttacaacaaaactttgttaatgtgcattgttcatatccttagctgctgcaaattgtaatatacagggctagtttccartaggtggataggttataacctaaggaactgacatgttctacttttatactacagaagatgatatgttttctatgtttgcatgctacgtttatgtgcagcatatattgcaagatgtatctgtgtatagttatcacagagcaatcataactggaagggaactgaggagattttgtagtcaaatgcccttgctcaaagcaggatcagctagagtaggttgctcaggcttgtgtccagatgggtgttgagtatctccaaagacgaagactccagaacctcccttgttaaaattcagaaagttta

SEQ ID NO: 1518 - DNA, 600 bp, Chicken  19866894088106_1
caaaaatcccagctacatccacactgtgacaaaatatgaggggactttcaaagtcagcacctcagaggcaagcagccttcatagagctttctagctctaagaaattcctgcagtgagaataaaatcagctacatctcttgtaacaaaaagggaagcagtgatacgctgaaaagaggaaaaaaaggtgcttctacgtttggcattttggctacggagaacaatgaggatgaaagtgttttgcttccattctggcaaggctcacctggtctctgatcagtgtatctgttatttgaattatayrgaaactgaaggaaaaataycatttttctttgctctaaaaacacaagaaggcaaaacctgtttggattttcaaataaayacacttagaccgagcccctgtcctattagtgttccatgttagcagaaacctgaattttgatgatgcaaacattaatgaaacatgaacttcaatgttacatgaggggtgagaaaggctcctgggttgctcagacaatagagagctgatcttataaaagaggactaagactgtgccttgtttagcttaacagaacaaaggtgacatttgattgctgtcttact

SEQ ID NO: 1519 - DNA, 600 bp, Chicken  19866894088106_2
aaaaatcccagctacatccacactgtgacaaaatatgaggggactttcaaagtcagcacctcagaggcaagcagccttcatagagctttctagctctaagaaattcctgcagtgagaataaaatcagctacatctcttgtaacaaaaagggaagcagtgatacgctgaaaagaggaaaaaaaggtgcttctacgtttggcattttggctacggagaacaatgaggatgaaagtgttttgcttccattctggcaaggctcacctggtctctgatcagtgtatctgttatttgaattatayrgaaactgaaggaaaaataycatttttctttgctctaaaaacacaagaaggcaaaacctgtttggattttcaaataaayacacttagaccgagcccctgtcctattagtgttccatgttagcagaaacctgaattttgatgatgcaaacattaatgaaacatgaacttcaatgttacatgaggggtgagaaaggctcctgggttgctcagacaatagagagctgatcttataaaagaggactaagactgtgccttgtttagcttaacagaacaaaggtgacatttgattgctgtcttactg

SEQ ID NO: 1520 - DNA, 600 bp, Chicken  19866894088106_3
acactgtgacaaaatatgaggggactttcaaagtcagcacctcagaggcaagcagccttcatagagctttctagctctaagaaattcctgcagtgagaataaaatcagctacatctcttgtaacaaaaagggaagcagtgatacgctgaaaagaggaaaaaaaggtgcttctacgtttggcattttggctacggagaacaatgaggatgaaagtgttttgcttccattctggcaaggctcacctggtctctgatcagtgtatctgttatttgaattatayrgaaactgaaggaaaaataycatttttctttgctctaaaaacacaagaaggcaaaacctgtttggattttcaaataaayacacttagaccgagcccctgtcctattagtgttccatgttagcagaaacctgaattttgatgatgcaaacattaatgaaacatgaacttcaatgttacatgaggggtgagaaaggctcctgggttgctcagacaatagagagctgatcttataaaagaggactaagactgtgccttgtttagcttaacagaacaaaggtgacatttgattgctgtcttactgcaggataagtgtcaaagta

SEQ ID NO: 1521 - DNA, 600 bp, Chicken  19866894088106_4
catagagctttctagctctaagaaattcctgcagtgagaataaaatcagctacatctcttgtaacaaaaagggaagcagtgatacgctgaaaagaggaaaaaaaggtgcttctacgtttggcattttggctacggagaacaatgaggatgaaagtgttttgcttccattctggcaaggctcacctggtctctgatcagtgtatctgttatttgaattatayrgaaactgaaggaaaaataycatttttctttgctctaaaaacacaagaaggcaaaacctgtttggattttcaaataaayacacttagaccgagcccctgtcctattagtgttccatgttagcagaaacctgaattttgatgatgcaaacattaatgaaacatgaacttcaatgttacatgaggggtgagaaaggctcctgggttgctcagacaatagagagctgatcttataaaagaggactaagactgtgccttgtttagcttaacagaacaaaggtgacatttgattgctgtcttactgcaggataagtgtcaaagtaggaagcagcttcagggaaatgctggaaagaggaataaatggctgtaaattagccatgaa

SEQ ID NO: 1522 - DNA, 599 bp, Chicken  19866894088111_1
  misc_feature (1)..(89): n is any nucleotide
nnnnnnnnnnnnnnnnnnnnnnnnnnnnnnnnnnnnnnnnnnnnnnnnnnnnnnnnnnnnnnnnnnnnnnnnnnnnnnnnnnnnnnnnntgctgctgcagccttgaacccttaaaatggagaggtgttggttggttctggtatggtggtgaggaggcagaaagcagctaccaaaatgacttgcccatagtcatgtggagggtcagtggcagagatgagactagcatcaagtcttgagtggtagaactttaatttcacatctttcttctgccagtgtgaggcattcaaggccaatatgcasatgatatgaggacacttggtctcctgcccaggctctccaaactgatttccctgtgcttacactccccagtgctactgatggacatgctgtggctcagtgtgcatgtgactctgggctggctgctgttgcaaacagatttgctgggagtggtatcataagtaatcattcacagtgtatcgcataagtaaacatcgctattcttgaactgctactgggattatactcttaacgtattctagtggcattatcaaatgctagtgggttacttaactaccttttatcggccaaaaaaaacccca

SEQ ID NO: 1523 - DNA, 600 bp, Chicken  19866894088114_1
ccctgtgccttaatgcaagcaaaggatgcagacttccttgttaggctttgacaaattttaccttgcagtccttcctgattcccagtaactgatgaaaacctttttgcagagccccggccattccctggatttatggttcgtgtttccagcagcatgcggtaggagggcaaacaaatcgggtttgtgcaaggatgccaaagcaatttctccttattttcgttagcatgagaaaaggatttaggcaaaacagtgatttgtgcctgtctgcattttgctgcttgtgctaccttacctgtctgragtctgctttgtgtattgttccaagtcctgcaggaagtccagcctgtgtttgattgccagttgttgagtaaatcatgctctcagatacagcccaggccctctgctgtgagagcaaacctcttttgttcctctgccctcatgctgtctcatcctctttgtctcgggcactctgcctcstgttctctgtgcactgtcctcaggtcccagtgcagcactggacctcttttctccttgaggctttgccactcctcagtccccagtctccctgcagagaagttgaagtaaattgtatttacgcca

SEQ ID NO: 1524 - DNA, 600 bp, Chicken  19866894088114_2
gggtttgtgcaaggatgccaaagcaatttctccttattttcgttagcatgagaaaaggatttaggcaaaacagtgatttgtgcctgtctgcattttgctgcttgtgctaccttacctgtctgragtctgctttgtgtattgttccaagtcctgcaggaagtccagcctgtgtttgattgccagttgttgagtaaatcatgctctcagatacagcccaggccctctgctgtgagagcaaacctcttttgttcctctgccctcatgctgtctcatcctctttgtctcgggcactctgcctcstgttctctgtgcactgtcctcaggtcccagtgcagcactggacctcttttctccttgaggctttgccactcctcagtccccagtctccctgcagagaagttgaagtaaattgtatttacgccatgtattttcctaaagtgctctcttttgaagaacagcctccaaaaacctaacagctctccttgcatgaggggctagaatgcccatcctgactggcatatggcacactccagtgcttttgtgatgtgtcaacgttgtaagagcaaccaggttatgtatgggcagtttgcctaagcggtc

SEQ ID NO: 1525 - DNA, 442 bp, Chicken  19866894088114_3
ctcaggtcccagtgcagcactggacctcttttctccttgaggctttgccactcctcagtccccagtctccctgcagagaagttgaagtaaattgtatttacgccatgtattttcctaaagtgctctcttttgaagaacagcctccaaaaacctaacagctctccttgcatgaggggctagaatgcccatcctgactggcatatggcacactccagtgcttttgtgatgtgtcaacgttgtaagagcaaccaggttatgtatgggcagtttgcctaagcggtccctgagttcactgagatygcagctgctctgtaactgcatgcatggccaaatgacatggtgcattggggtcggtcttccacacccacttgcctgctcagaaggctgcagtttgttgctgtgctgagttttattccttccagagaaattattttaacacggg

SEQ ID NO: 1526 - DNA, 599 bp, Chicken  19866894088115_1
  misc_feature (1)..(79): n is any nucleotide
nnnnnnnnnnnnnnnnnnnnnnnnnnnnnnnnnnnnnnnnnnnnnnnnnnnnnnnnnnnnnnnnnnnnnnnnnnnnnnncaccacaccaagctaagggagctggagttggtttcatgcccttcacagcccagcccaaagcagacccaaaagagcagtgtgcaacttccccttgacacggactgatgcaagggtgcacatccaagcaatgatgctcaccctgatccagcagcacccaaatccatactaaaatacacctcatccttccagctttagaccagtcactgacagctggactcttygtttrataccaaaatggcatttgtgctttcgtggggaggtggggaagtatgttttaatatagataacagatatgaatgtatataaagccacctctgcagtccattgctctggtcggtgccccgaaagccatcggtcaccgtggatagagcgagatatgggaaaagggcaatgggaagggaattgctggggaagagcctgactttttggttcagaacagagttttccccactatacctaaaatrkgaagacccctctccctgagaaaagctgatgcttctttccttccttttcttatcag

SEQ ID NO: 1527 - DNA, 599 bp, Chicken  19866894088115_2
  misc_feature (1)..(74): n is any nucleotide
nnnnnnnnnnnnnnnnnnnnnnnnnnnnnnnnnnnnnnnnnnnnnnnnnnnnnnnnnnnnnnnnnnnnnnnnnncaccacaccaagctaagggagctggagttggtttcatgcccttcacagcccagcccaaagcagacccaaaagagcagtgtgcaacttccccttgacacggactgatgcaagggtgcacatccaagcaatgatgctcaccctgatccagcagcacccaaatccatactaaaatacacctcatccttccagctttagaccagtcactgacagctggactcttygtttrataccaaaatggcatttgtgctttcgtggggaggtggggaagtatgttttaatatagataacagatatgaatgtatataaagccacctctgcagtccattgctctggtcggtgccccgaaagccatcggtcaccgtggatagagcgagatatgggaaaagggcaatgggaagggaattgctggggaagagcctgactttttggttcagaacagagttttccccactatacctaaaatrkgaagacccctctccctgagaaaagctgatgcttctttccttccttttcttatcagaaaga

SEQ ID NO: 1528 - DNA, 600 bp, Chicken  19866894088115_3
actaaaatacacctcatccttccagctttagaccagtcactgacagctggactcttygtttrataccaaaatggcatttgtgctttcgtggggaggtggggaagtatgttttaatatagataacagatatgaatgtatataaagccacctctgcagtccattgctctggtcggtgccccgaaagccatcggtcaccgtggatagagcgagatatgggaaaagggcaatgggaagggaattgctggggaagagcctgactttttggttcagaacagagttttccccactatacctaaaatrkgaagacccctctccctgagaaaagctgatgcttctttccttccttttcttatcagaaagagcccaataggaagcttagggcaggtcacgaagcacaccaggccaggatgagaacgtgccaggaacaaacctaaacccagcaccaacactcagccaaaaggaaaacccacccccaaaccatcccgatggggatcctacaggaagcaaggtgctgcaaactgcagatcctgctgacagcaaggacatctcccaccagctgatgggtcagcaacraraaacagcacgagagagcccagaagc

SEQ ID NO: 1529 - DNA, 600 bp, Chicken  19866894088115_4
ctaaaatacacctcatccttccagctttagaccagtcactgacagctggactcttygtttrataccaaaatggcatttgtgctttcgtggggaggtggggaagtatgttttaatatagataacagatatgaatgtatataaagccacctctgcagtccattgctctggtcggtgccccgaaagccatcggtcaccgtggatagagcgagatatgggaaaagggcaatgggaagggaattgctggggaagagcctgactttttggttcagaacagagttttccccactatacctaaaatrkgaagacccctctccctgagaaaagctgatgcttctttccttccttttcttatcagaaagagcccaataggaagcttagggcaggtcacgaagcacaccaggccaggatgagaacgtgccaggaacaaacctaaacccagcaccaacactcagccaaaaggaaaacccacccccaaaccatcccgatggggatcctacaggaagcaaggtgctgcaaactgcagatcctgctgacagcaaggacatctcccaccagctgatgggtcagcaacraraaacagcacgagagagcccagaagcc

SEQ ID NO: 1530 - DNA, 600 bp, Chicken  19866894088115_5
agagttttccccactatacctaaaatrkgaagacccctctccctgagaaaagctgatgcttctttccttccttttcttatcagaaagagcccaataggaagcttagggcaggtcacgaagcacaccaggccaggatgagaacgtgccaggaacaaacctaaacccagcaccaacactcagccaaaaggaaaacccacccccaaaccatcccgatggggatcctacaggaagcaaggtgctgcaaactgcagatcctgctgacagcaaggacatctcccaccagctgatgggtcagcaacraraaacagcacgagagagcccagaagccatggcaatagggacggaccacctcaccctaccttgaaaatggaagcgtccacctcctggttgtagtcctgcttccctgcgtgcttccaggggatgcggaacatggttttctcctcattctcccagatgagccccgggtactgctcactgtcaatctgctcgatcagccactgccgcagccgcctgccaccattgcggtcacacatcctgggcagaagtgggagctgtcagtctgtctgtctatccccgcacccctttgtcccccactaacac

SEQ ID NO: 1531 - DNA, 600 bp, Chicken  19866894088115_6
agttttccccactatacctaaaatrkgaagacccctctccctgagaaaagctgatgcttctttccttccttttcttatcagaaagagcccaataggaagcttagggcaggtcacgaagcacaccaggccaggatgagaacgtgccaggaacaaacctaaacccagcaccaacactcagccaaaaggaaaacccacccccaaaccatcccgatggggatcctacaggaagcaaggtgctgcaaactgcagatcctgctgacagcaaggacatctcccaccagctgatgggtcagcaacraraaacagcacgagagagcccagaagccatggcaatagggacggaccacctcaccctaccttgaaaatggaagcgtccacctcctggttgtagtcctgcttccctgcgtgcttccaggggatgcggaacatggttttctcctcattctcccagatgagccccgggtactgctcactgtcaatctgctcgatcagccactgccgcagccgcctgccaccattgcggtcacacatcctgggcagaagtgggagctgtcagtctgtctgtctatccccgcacccctttgtcccccactaacacca

SEQ ID NO: 1532 - DNA, 600 bp, Chicken  19866894088115_7
aaatggaagcgtccacctcctggttgtagtcctgcttccctgcgtgcttccaggggatgcggaacatggttttctcctcattctcccagatgagccccgggtactgctcactgtcaatctgctcgatcagccactgccgcagccgcctgccaccattgcggtcacacatcctgggcagaagtgggagctgtcagtctgtctgtctatccccgcacccctttgtcccccactaacaccagccgggtctacggagatatcttaaatgcattctaatagctgcatctcactttcagggcaccmggctggagagccagcagaccacaatgatgtcgccaagtaggaagaaaaagctatttgggtgcaagcaatcgctctctgctccactctatcacgtgcagcgttggcaacgcgctgcctgcaaacaccagcagctgccacgtgcccctccgtgcaccaaacctccctttattacacggcaaaagccatggcagcaattctgcagccgtccctcgtcgctccgccccagccatgtgggcaggcactggacgggtgcccacaccccgtttactgaatatgacgaaagccctctctagcctatct

SEQ ID NO: 1533 - DNA, 599 bp, Chicken  19866894088123_1
  misc_feature (1)..(66): n is any nucleotide
nnnnnnnnnnnnnnnnnnnnnnnnnnnnnnnnnnnnnnnnnnnnnnnnnnnnnnnnnnnnnnnnnnctatcactaatttgagagtatccagctacaatacacttcccatcatcagcaatatcaaaacaagagtggctcagaggtcacatttaatgtgagcaaatgtactgggggtttcagctgatagcactgtctggcctaaggagaagcaataccatggcaacagtatgaaggcagaagagtatggaaaacctgaggaggaacatagagaagcaacctggtttccagaatgagtcactscgtctgtgatatgcaatggcttaggacttgtttttgtctttttctcagagacttgccttctcagatatgatgtattttttctttttctttcctttcccttccctttttttgagtcagtcttttttttttgcttcttttctgctcttctctcatgtcactgaaactgtggtactgatttcacccttaagtcacaacaaacgtattcttcagcttctgtcattctgatgtctgactttttagggagattctaataatataagatttttttttttctttaaatcagaagttttccaggtact

SEQ ID NO: 1534 - DNA, 600 bp, Chicken  19866894088125_1
catgattttgatgtgggtgactttgagacgggccccagaggcactggttgctccagctggtggagcatcagacccaggtttaggttggtcagtcaggacagacaagacaaaatccccaggtttgctgaggctctcccgcaccaagaaggtccacggggtggctttggcctggagaagtgattcagctgcaacacctgacagatgcccatggtaccacctgaaagaaataagagaaggtcagaagaggtggagatgcaagtaagtggatgcccttgagctgctgagtgccagacagtaacrctggggaaggagagaaagggggatgaggaaagatgaggggagaaacagaggaaggaggaagggagggataccaacggagaagcgagaccttgggaaaaatacgtgacacagcagttagacagctgccaagaaaaggaaagggcaagggatgagtggagctagaagggaccacagagcagaaagtacagtgggaaagcaccaagtgagatccagctgtgttatacataaaagcacagataagtaatgcttactggctttcagatcagttcaggtagggtatctgtgggtttcagtatctca

SEQ ID NO: 1535 - DNA, 600 bp, Chicken  19866894088127_1
ttgatattcaacttcctctactggctgtattctgtttgtgaagatcacctcaagttatttgaatatagggtaacagagggggaaaattactgctgtggtgcacaaatataggtttaaatgaatgtagtaagtgaatgactgcatttcttaatgatgcgcctatcagaacgtggaacaatcactgagaggaggtagtgagagcagtgctaggtggaaccaactgaaactgtccagccagaggacttgaggaccaccacagatcagtcatgcacaggcagagggattagctgggtgacttastaaggctccctccatctccakcttctgtgctatattcttcaatggacagaattatgcccattggaaatgagtgcaacagtgatcgtgcattgtgtaaatgaaaaagaaggactakgagtttcacaacaaaggaaaataaagcacatctttatgagattaaggcatttaaaggaacttccagcagctttactgatgcaagtcccacacctgtcaaactgaggtatatcttatagacaggaggtgtgaatgaggagagacagcagaaatattccaggcttttcaactatctccccaataaaa

SEQ ID NO: 1536 - DNA, 600 bp, Chicken  19866894088127_2
tggctgtattctgtttgtgaagatcacctcaagttatttgaatatagggtaacagagggggaaaattactgctgtggtgcacaaatataggtttaaatgaatgtagtaagtgaatgactgcatttcttaatgatgcgcctatcagaacgtggaacaatcactgagaggaggtagtgagagcagtgctaggtggaaccaactgaaactgtccagccagaggacttgaggaccaccacagatcagtcatgcacaggcagagggattagctgggtgacttastaaggctccctccatctccakcttctgtgctatattcttcaatggacagaattatgcccattggaaatgagtgcaacagtgatcgtgcattgtgtaaatgaaaaagaaggactakgagtttcacaacaaaggaaaataaagcacatctttatgagattaaggcatttaaaggaacttccagcagctttactgatgcaagtcccacacctgtcaaactgaggtatatcttatagacaggaggtgtgaatgaggagagacagcagaaatattccaggcttttcaactatctccccaataaaaacaaacaaacaaacaaacaaa

SEQ ID NO: 1537 - DNA, 600 bp, Chicken  19866894088127_3
aaatgaatgtagtaagtgaatgactgcatttcttaatgatgcgcctatcagaacgtggaacaatcactgagaggaggtagtgagagcagtgctaggtggaaccaactgaaactgtccagccagaggacttgaggaccaccacagatcagtcatgcacaggcagagggattagctgggtgacttastaaggctccctccatctccakcttctgtgctatattcttcaatggacagaattatgcccattggaaatgagtgcaacagtgatcgtgcattgtgtaaatgaaaaagaaggactakgagtttcacaacaaaggaaaataaagcacatctttatgagattaaggcatttaaaggaacttccagcagctttactgatgcaagtcccacacctgtcaaactgaggtatatcttatagacaggaggtgtgaatgaggagagacagcagaaatattccaggcttttcaactatctccccaataaaaacaaacaaacaaacaaacaaacaaacaagaatccaggatgctaatctgagagtaagaggcagtctggtcagaatcagctctcttggcactatatccaggttaaggaaaaatgtta

SEQ ID NO: 1538 - DNA, 600 bp, Chicken  19866894088130_1
tggaataaggagcagacgagttcttaaggaacccattgggccacattcatccctggtgttacccaatgacttaataggcatacaaaaataaaattagtccaatctgtttcttagatagatgtctctagagaaacacaagagtgaaacaagataattgaaccccttccccaagagtccagtggcatgtacagaaagcaggcaaattttcaagcaaaatgtttttcagttttactctcatttttgagaaggcttcctaagtggtgtgcattactacacattggaaagagtaaaatcagtcayagggacaagtcccacttacagccttcctatacaagcagtctcatgcagaaaggggattgtgcagagccatcatcacaggtttgagtctcagggagaagccaagcayggactcttgaaacactgcagtgggcaccaaggggtggtgaacatttaataccgtatctgtttgcttaagccaacaacagcagcaattgctaaggaaacacgagcaccgtgagctcaccagacaagtaataagatccaagtctgtatttatagagcagtcactatggattaacacaccctttaactgcatagatc

SEQ ID NO: 1539 - DNA, 600 bp, Chicken  19866894088130_2
tttcttagatagatgtctctagagaaacacaagagtgaaacaagataattgaaccccttccccaagagtccagtggcatgtacagaaagcaggcaaattttcaagcaaaatgtttttcagttttactctcatttttgagaaggcttcctaagtggtgtgcattactacacattggaaagagtaaaatcagtcayagggacaagtcccacttacagccttcctatacaagcagtctcatgcagaaaggggattgtgcagagccatcatcacaggtttgagtctcagggagaagccaagcayggactcttgaaacactgcagtgggcaccaaggggtggtgaacatttaataccgtatctgtttgcttaagccaacaacagcagcaattgctaaggaaacacgagcaccgtgagctcaccagacaagtaataagatccaagtctgtatttatagagcagtcactatggattaacacaccctttaactgcatagatcctcaccagctggcaagtgcctctggcaccctttaaacacaggaatggttgacttacataaagcaggccagcctgggcatgacatctgtcagttggtgcagtgctgc

SEQ ID NO: 1540 - DNA, 599 bp, Chicken  19866894088135_1
  misc_feature (1)..(128): n is any nucleotide
nnnnnnnnnnnnnnnnnnnnnnnnnnnnnnnnnnnnnnnnnnnnnnnnnnnnnnnnnnnnnnnnnnnnnnnnnnnnnnnnnnnnnnnnnnnnnnnnnnnnnnnnnnnnnnnnnnnnnnnnnnnnnnnnagggctgatctcttaccattttcatgctggtgagcagcccagaagagggaagaactggagctaactggtttgttgatatccagaaagaatatttccgggtggcttttcttggggggcagtgatttctccttgcatgctttggtggtgggtacctggagctggagaggggggyccctaggttgactgtctgtgggtccctttgcattgctttgacctctgtcgctttgctcccctctcctgcagagcctctcggtgaaatcctgcaaagtgttccgcattttccgccagtgggagagcatcaatccctcctgagtgggctgcagcctccaggaaccacagccttgcaggcaacgtggggcatcgtgtccatccggcatggttctgcttcacagccgtgtgctgcaaaggccacgggccaccccagtgccaaacacagcccccagcrcctgctaggacccccccccccatccc

SEQ ID NO: 1541 - DNA, 444 bp, Chicken  19866894088135_2
agggctgatctcttaccattttcatgctggtgagcagcccagaagagggaagaactggagctaactggtttgttgatatccagaaagaatatttccgggtggcttttcttggggggcagtgatttctccttgcatgctttggtggtgggtacctggagctggagaggggggyccctaggttgactgtctgtgggtccctttgcattgctttgacctctgtcgctttgctcccctctcctgcagagcctctcggtgaaatcctgcaaagtgttccgcattttccgccagtgggagagcatrcctgctaggacccccccccccatccccagctgccttcctggaagccctttcttttcacaaattgctgctggaggctttggacccctctttctctccccccagggtttcaacagccctgtttggagccggaagatgcatggggtg

SEQ ID NO: 1542 - DNA, 600 bp, Chicken  19866894088140_1
tatcagatagtatattcacaaccaatattgcaattatatctccttttacctctgttcaatgtaagtcatattcaaattttcaagcactctatgaaataacaagtgtatccttttccatacttcaactcattttcatatgtgatgccttgcactctgcttagtcatggcagtaatacatgttgtgtttaaaaagcaactgtaggaactactttgaattacatccatcaaccataaatgaaagattatatcacagtgacaggaaaagcaattacaataatcactatcttttattaagttttwaaaaataattaaatctaaaatctatcactggccttataaaagtgatcatatggttgttttgtgtttttttttttaattctgcataaattaaaaatatgacttgttaattaaaaatttcatttatacttgcattttattgcaaacasttttgtgaatgtttacatggatgaccttttagctctgatatagaatagacattttattaaacaatgacaagcaataaggccygttgttctgaggaagggaaggatacsctgttggctgtcatgcttttgagaagcacaaggcattgccccgtac

SEQ ID NO: 1543 - DNA, 600 bp, Chicken  19866894088140_2
ttgcactctgcttagtcatggcagtaatacatgttgtgtttaaaaagcaactgtaggaactactttgaattacatccatcaaccataaatgaaagattatatcacagtgacaggaaaagcaattacaataatcactatcttttattaagttttwaaaaataattaaatctaaaatctatcactggccttataaaagtgatcatatggttgttttgtgtttttttttttaattctgcataaattaaaaatatgacttgttaattaaaaatttcatttatacttgcattttattgcaaacasttttgtgaatgtttacatggatgaccttttagctctgatatagaatagacattttattaaacaatgacaagcaataaggccygttgttctgaggaagggaaggatacsctgttggctgtcatgcttttgagaagcacaaggcattgccccgtactcaaacggtatagaaggtaaaactgcagaagaacaacgaattaattagagcaatcatttttgaagacgagttccaaaacccattttaattagcaaataaagcagagtgcttggtgcttaagtactatttttgctttctgattaact

SEQ ID NO: 1544 - DNA, 600 bp, Chicken  19866894088140_3
ccataaatgaaagattatatcacagtgacaggaaaagcaattacaataatcactatcttttattaagttttwaaaaataattaaatctaaaatctatcactggccttataaaagtgatcatatggttgttttgtgtttttttttttaattctgcataaattaaaaatatgacttgttaattaaaaatttcatttatacttgcattttattgcaaacasttttgtgaatgtttacatggatgaccttttagctctgatatagaatagacattttattaaacaatgacaagcaataaggccygttgttctgaggaagggaaggatacsctgttggctgtcatgcttttgagaagcacaaggcattgccccgtactcaaacggtatagaaggtaaaactgcagaagaacaacgaattaattagagcaatcatttttgaagacgagttccaaaacccattttaattagcaaataaagcagagtgcttggtgcttaagtactatttttgctttctgattaactgggtgatggcagttgtactgtggtttgtaacaaatcacaaaatctagtgcctcattttgcatataaaacacattaaaatacc

SEQ ID NO: 1545 - DNA, 600 bp, Chicken  19866894088140_4
gacaggaaaagcaattacaataatcactatcttttattaagttttwaaaaataattaaatctaaaatctatcactggccttataaaagtgatcatatggttgttttgtgtttttttttttaattctgcataaattaaaaatatgacttgttaattaaaaatttcatttatacttgcattttattgcaaacasttttgtgaatgtttacatggatgaccttttagctctgatatagaatagacattttattaaacaatgacaagcaataaggccygttgttctgaggaagggaaggatacsctgttggctgtcatgcttttgagaagcacaaggcattgccccgtactcaaacggtatagaaggtaaaactgcagaagaacaacgaattaattagagcaatcatttttgaagacgagttccaaaacccattttaattagcaaataaagcagagtgcttggtgcttaagtactatttttgctttctgattaactgggtgatggcagttgtactgtggtttgtaacaaatcacaaaatctagtgcctcattttgcatataaaacacattaaaataccttcttccccgttctataggggccctt

SEQ ID NO: 1546 - DNA, 600 bp, Chicken  19866894088140_5
gcagtgacagcagcactatcaaacagggcagcaaacaacatagcacaagagtgccttgtgccaggatccaaaacagagacttgcaacctaccacactgccccagcaagccaggtttaaatgggatatcatttctaacaaactgtcccttcaacatcacacacacacatgcttgtaagaggccactgctgagcacctttggtttactgaaggagcacagcaggctcaatttgtgctgcagacacatccaaggtgatgtacttaaagcaaacacctgctgatatttctgaaatgtaggggaraaccactgtgagaattacaaggaaaattatgcatcaaaaatactgcctctttcttgtctgtacccagagtcctgtcactgactatacacaaaatcatttaagcagactgaaactcactgtctgtaataaaaagaatatcgcttcaggtttctgtggagtttatatgacgctggaaacaaagccacaggtccagttcagggcaagagtaccaacaccgcactgcctaaagagctcagccaccactcctcagggctttaacacagtgcacatatatgacttaggccattatgcactgggaaa

SEQ ID NO: 1547 - DNA, 600 bp, Chicken  19866894088144_1
tcaaatgggtgggtgagaagaggccagcaaagtccttgatgcctatggatactccagcactgtagctacagttcatgtgccagtatgggagatacaaatatggggacaaattcattcctcagacacatgcactgaggagctgggaagtacagtggagcagatcttccagtctccaaaaatggataatttcataggtactgatgaaatagcaagattggctgataaatacagcagataaggctaaaccacttctttcatgagctgttatggtcattcttaaagatggttcagataatcaaygtacgtgtttcccccctctgcttggtcaatcccagtgattttctttcagattcttcagtgtttcatccattactttcctctgcctttgacgtttacaacacaacctgactggagacaaagactacaaatatagctggcagatgcaatttacagtcttcctgaacaccctgatacccagattagctaggaagaagtttcagaagatgatgatccatatgtttctcctggtgtaggcaaatgtgctacagtaatagaataagctattactccttttcaaccctatccatacctgcctaacat

SEQ ID NO: 1548 - DNA, 600 bp, Chicken  19866894088148_1
cttgataatcccaggtttcttatgccagcactgagtgtctgacatgcttcagacctttgggctaattgatctctctttgattgtttttgcaagccacatatggcttaaacaatgatttcagcaggtatgtgaaactctgtaaagatagcaagaagtgatgaggatgagtcacaatgactggaaagactgttttatttaaaataaaatctcctctccagcagtgagacatcagctcagttgatccagcctattctctctcgctaaagtcgaaaacaagcaccacattttttgcctaataaygttcttagaatcacttgcttctctcttcaagacgaatacatctgcattgaacaacaactataattttacatacaagtagcgccttctattgagggggcaaagcagtttgcaacatttaattggctgagttttgctcatgatcttgctgagctgctacagagtattttgctgtcaggcccagataaatatgtgaaatgagatttctctgtgtattcaccatattttaaaatagctttctcgggatataatcaaattcctttgctgtcttgctccctgccatctgttacatgatcataatac

SEQ ID NO: 1549 - DNA, 600 bp, Chicken  19866894088159_1
gaaatgagctggaatgattaccttgggactatttatttatttatttattgaaaggaggtatgttacagccattagagaaaaacttaccctttctttctaaatgccgtgagtaagagagagatcttgccttagccatgcagactgaattctcacaccgcagtggtaaaactcctggttttccagtcttctcacaagtttaggagcactaaagtaggagcagactttcaaatttgatgcagaatgcagtagactgccttctggccccaggatcccagaaacttaccaggaaagttgcacaartcattgtgtggtgtgtttattgttgttcagtgctcaaccaaacaaaaatactagatagctaaaaatatttttctgtaaataatttttaaattattagcatttcatttttcattttctattattttccartttacaaagccaggtctctcttgttaatgcatatattagtctttttttttttttttttagatttctgcttagaagttaatatattctgacactgcatgtttgttttttttcttagacatcattgttattttttgttaattaattccatcctaacaatttgaataattagga

SEQ ID NO: 1550 - DNA, 600 bp, Chicken  19866894088159_2
tagccatgcagactgaattctcacaccgcagtggtaaaactcctggttttccagtcttctcacaagtttaggagcactaaagtaggagcagactttcaaatttgatgcagaatgcagtagactgccttctggccccaggatcccagaaacttaccaggaaagttgcacaartcattgtgtggtgtgtttattgttgttcagtgctcaaccaaacaaaaatactagatagctaaaaatatttttctgtaaataatttttaaattattagcatttcatttttcattttctattattttccartttacaaagccaggtctctcttgttaatgcatatattagtctttttttttttttttttagatttctgcttagaagttaatatattctgacactgcatgtttgttttttttcttagacatcattgttattttttgttaattaattccatcctaacaatttgaataattaggagagttgtttatctgtatgagtttttattaaatatattgctcatcttaaagctgtgcctaagtctgttcagtggtctatttaaaatgtgtgtgttctctgaccattctttagcattacagtctgccttac

SEQ ID NO: 1551 - DNA, 600 bp, Chicken  19866894088164_1
tgcagacctgctagctttaaaatttatacaaagcattttaaccttaaagatgcccttagttgttaaataagcaataataattgaaattcgtcttctcagagccgttcggtagcctagctaatcctacaacacaacttaattagagcataatagaagagtttatagctaaggagaaaactctctaatgacctgaaactatcattgccatatggcaagtgcatgctgcaaagtagctaccaaacttgttggctgagatccatcaattagcagatgacctgaagtctgatcagcagtgttacrtggcccactctgctgctggggattctgtcaggcattttaggcagctttcatctgtgctttaatcttcacaggggccttyatttagattttcttcttccttctgtacccagtggaacaaaaactattgtcttaggtttggttctctttatttctgcttctgttctgtgagccctttgccctgtgccagttttcagctaagatgctggtgcctctgttagtcaacatctttgcacctgatctgcaagaggaaagtataatgctgatgattcgggacagtgaagacaaagtccactgcaaaga

SEQ ID NO: 1552 - DNA, 600 bp, Chicken  19866894088164_2
attgaaattcgtcttctcagagccgttcggtagcctagctaatcctacaacacaacttaattagagcataatagaagagtttatagctaaggagaaaactctctaatgacctgaaactatcattgccatatggcaagtgcatgctgcaaagtagctaccaaacttgttggctgagatccatcaattagcagatgacctgaagtctgatcagcagtgttacrtggcccactctgctgctggggattctgtcaggcattttaggcagctttcatctgtgctttaatcttcacaggggccttyatttagattttcttcttccttctgtacccagtggaacaaaaactattgtcttaggtttggttctctttatttctgcttctgttctgtgagccctttgccctgtgccagttttcagctaagatgctggtgcctctgttagtcaacatctttgcacctgatctgcaagaggaaagtataatgctgatgattcgggacagtgaagacaaagtccactgcaaagatctgcagaagracatcatgatattaaacggatgcttcccagtcagtcagctctgagttcttggaacccttyctttgata

SEQ ID NO: 1553 - DNA, 600 bp, Chicken  19866894088164_3
gctgctggggattctgtcaggcattttaggcagctttcatctgtgctttaatcttcacaggggccttyatttagattttcttcttccttctgtacccagtggaacaaaaactattgtcttaggtttggttctctttatttctgcttctgttctgtgagccctttgccctgtgccagttttcagctaagatgctggtgcctctgttagtcaacatctttgcacctgatctgcaagaggaaagtataatgctgatgattcgggacagtgaagacaaagtccactgcaaagatctgcagaagracatcatgatattaaacggatgcttcccagtcagtcagctctgagttcttggaacccttyctttgatagggtgtttttttcccacttgggtttccagtaatactgagacattccatagctaaatgcagctagctccaggaaatagtggttttagcctatagaagaggcttaaaaagggcagaacacacctggttaaccacagcaaatgtttttatggctttagactagttcaaagcatgtagctcggaaaaagacaaactgattacagagttttatctgcaaaaaggtaaaagcaatttg

SEQ ID NO: 1554 - DNA, 600 bp, Chicken  19866894088164_4
gggccttyatttagattttcttcttccttctgtacccagtggaacaaaaactattgtcttaggtttggttctctttatttctgcttctgttctgtgagccctttgccctgtgccagttttcagctaagatgctggtgcctctgttagtcaacatctttgcacctgatctgcaagaggaaagtataatgctgatgattcgggacagtgaagacaaagtccactgcaaagatctgcagaagracatcatgatattaaacggatgcttcccagtcagtcagctctgagttcttggaacccttyctttgatagggtgtttttttcccacttgggtttccagtaatactgagacattccatagctaaatgcagctagctccaggaaatagtggttttagcctatagaagaggcttaaaaagggcagaacacacctggttaaccacagcaaatgtttttatggctttagactagttcaaagcatgtagctcggaaaaagacaaactgattacagagttttatctgcaaaaaggtaaaagcaatttgctcttgaaactcttaatgacaaaatgaagagagaaaattgtttagagaatctgtgattac

SEQ ID NO: 1555 - DNA, 600 bp, Chicken  19866894088164_5
taatactttttctgtctttacttaaaatgtacctattaaatgtttaaataacatcgttgattaattgatgtgtatgttagtgaaaactaaggtatgcagtaagctgagaaaccactgaatggttagtatgtttgtggtaagagagtcgtaaattgaatttataagtaataggaataaaagcgtggggcagtactattatggcagtacgtaatcaatccagtgataatagtttactcactgaggtttccttttattttgtttgtttttaagtcataaaacacgtgattcagtcatcatttrggacaaaaagatgaagayacaacccagtttcyctgttaaaagaaaaggttaggaaacctttcagtgaggagcaaataggtggttactattctcagaggtatttcttcatctgtgagatttcagtgttaattggaaccccagtccagtatagtatttattagccctcccaggagcattgcctcctgtttgtcttgctcgttagagtctacatccaaagtgatttcatttgaatcccaagtcctcttacatgtaataataactaaattataattaaatgaagaatgtaagggaggctgtgtt

SEQ ID NO: 1556 - DNA, 600 bp, Chicken  19866894088164_6
tacttaaaatgtacctattaaatgtttaaataacatcgttgattaattgatgtgtatgttagtgaaaactaaggtatgcagtaagctgagaaaccactgaatggttagtatgtttgtggtaagagagtcgtaaattgaatttataagtaataggaataaaagcgtggggcagtactattatggcagtacgtaatcaatccagtgataatagtttactcactgaggtttccttttattttgtttgtttttaagtcataaaacacgtgattcagtcatcatttrggacaaaaagatgaagayacaacccagtttcyctgttaaaagaaaaggttaggaaacctttcagtgaggagcaaataggtggttactattctcagaggtatttcttcatctgtgagatttcagtgttaattggaaccccagtccagtatagtatttattagccctcccaggagcattgcctcctgtttgtcttgctcgttagagtctacatccaaagtgatttcatttgaatcccaagtcctcttacatgtaataataactaaattataattaaatgaagaatgtaagggaggctgtgtttgcttcatcaccctttct

SEQ ID NO: 1557 - DNA, 600 bp, Chicken  19866894088164_7
ctattaaatgtttaaataacatcgttgattaattgatgtgtatgttagtgaaaactaaggtatgcagtaagctgagaaaccactgaatggttagtatgtttgtggtaagagagtcgtaaattgaatttataagtaataggaataaaagcgtggggcagtactattatggcagtacgtaatcaatccagtgataatagtttactcactgaggtttccttttattttgtttgtttttaagtcataaaacacgtgattcagtcatcatttrggacaaaaagatgaagayacaacccagtttcyctgttaaaagaaaaggttaggaaacctttcagtgaggagcaaataggtggttactattctcagaggtatttcttcatctgtgagatttcagtgttaattggaaccccagtccagtatagtatttattagccctcccaggagcattgcctcctgtttgtcttgctcgttagagtctacatccaaagtgatttcatttgaatcccaagtcctcttacatgtaataataactaaattataattaaatgaagaatgtaagggaggctgtgtttgcttcatcaccctttcttcagcatgtgctct

SEQ ID NO: 1558 - DNA, 600 bp, Chicken  19866894088164_8
aaagaaaaggttaggaaacctttcagtgaggagcaaataggtggttactattctcagaggtatttcttcatctgtgagatttcagtgttaattggaaccccagtccagtatagtatttattagccctcccaggagcattgcctcctgtttgtcttgctcgttagagtctacatccaaagtgatttcatttgaatcccaagtcctcttacatgtaataataactaaattataattaaatgaagaatgtaagggaggctgtgtttgcttcatcaccctttcttcagcatgtgctctgtctcrgctagaagttacaagcttggttctggaactgctagatgaagctttatggcccatgttagatattataatggtctttcttgaccttaaaatgttggaaagatgaggtagaatgtgataaaactaagtcttatctctcccagcagaatatattgtttagttcaattttagaaattgttcagattaaggtatctctttcaaaaatgaatttgttattgtcaaacctactatcatcctgagatgaaacctcatccgaaatcaccaaggttatttctggagctaactgatttgtctccttttttt

SEQ ID NO: 1559 - DNA, 600 bp, Chicken  19866894088172_1
tattttgaagccccaaagaaagactttcccaacatgtgggagatgaataaatactcaaaatgtctacaactgctgttgctgctacagctgccaggtttggaaatgaacaaagtatgcatacgcatgagcgcatgcgtgtgagagacagagagaaatacagcgtgggcactcttggggtcaggagagaccagtaataagaaacacattttacaagcagcaagagaattatttttaccatccacatttacaagtcctcaggcagcgaactgtgttgtttgagtatttttaaggctaattatktatagtatgcagggcttgaacctgcagatcttagtttggcagctcttcaagagatgcactgyagtgtatgcagtggaggggtgagaggcattagatgggcacatggtgtccacagaaggacatcaaaggctttgctggctccagtgaacactcagctgctgtctacagtatcagatattacacaggtgtgaaaaggagagcagttcataaagctgtgtggcaattagcactgggatagggtggctgaacaggatggctcagaggaagacttcattgccatcatcaccagacaacttgcct

SEQ ID NO: 1560 - DNA, 600 bp, Chicken  19866894088172_2
tctacaactgctgttgctgctacagctgccaggtttggaaatgaacaaagtatgcatacgcatgagcgcatgcgtgtgagagacagagagaaatacagcgtgggcactcttggggtcaggagagaccagtaataagaaacacattttacaagcagcaagagaattatttttaccatccacatttacaagtcctcaggcagcgaactgtgttgtttgagtatttttaaggctaattatktatagtatgcagggcttgaacctgcagatcttagtttggcagctcttcaagagatgcactgyagtgtatgcagtggaggggtgagaggcattagatgggcacatggtgtccacagaaggacatcaaaggctttgctggctccagtgaacactcagctgctgtctacagtatcagatattacacaggtgtgaaaaggagagcagttcataaagctgtgtggcaattagcactgggatagggtggctgaacaggatggctcagaggaagacttcattgccatcatcaccagacaacttgcctgatttttaactcagcttttggcatggcactttaaagccttcttttatgggatattccataca

SEQ ID NO: 1561 - DNA, 600 bp, Chicken  19866894088172_3
ggagagcagttcataaagctgtgtggcaattagcactgggatagggtggctgaacaggatggctcagaggaagacttcattgccatcatcaccagacaacttgcctgatttttaactcagcttttggcatggcactttaaagccttcttttatgggatattccatacaaattttatggtgttcccacacaaaccacactgggtttgaatgtttcagcttttagatttcagtactgtgatcctgaatgttatcctcttaagtagaaagggagagcaggagcaatctctgtcaaagttccayccagcaccacatatctttcattgagaaacagaacacagccagctcctttgatcaaggcaatttgggagctgcagcacaacagcaggaggactgggaaccactcaagatttctgagacagaagccaggattttgtgctgcattgagcatgcttagcataagcgtgtactccccaaactggatgatgytaggcagttgagaggatagggatgctggttatgtcaacagcttcacaggggttttgttttgcaaaatactgcttgatgatctgagggcagctgggccctttcagctttcartga

SEQ ID NO: 1562 - DNA, 600 bp, Chicken  19866894088172_4
cacaaaccacactgggtttgaatgtttcagcttttagatttcagtactgtgatcctgaatgttatcctcttaagtagaaagggagagcaggagcaatctctgtcaaagttccayccagcaccacatatctttcattgagaaacagaacacagccagctcctttgatcaaggcaatttgggagctgcagcacaacagcaggaggactgggaaccactcaagatttctgagacagaagccaggattttgtgctgcattgagcatgcttagcataagcgtgtactccccaaactggatgatgytaggcagttgagaggatagggatgctggttatgtcaacagcttcacaggggttttgttttgcaaaatactgcttgatgatctgagggcagctgggccctttcagctttcartgagcttttaataggacaattttcattggcataagcttgtgcacaccacctgcaattgagtacattgctctccctatataattggcatatagaatttgtacccaacagtggggggctgcaaataattgaggtgacttctctccctgtcacagccagtcaagccaagttgttccttttcagttatgaaaa

SEQ ID NO: 1563 - DNA, 600 bp, Chicken  19866894088172_5
cayccagcaccacatatctttcattgagaaacagaacacagccagctcctttgatcaaggcaatttgggagctgcagcacaacagcaggaggactgggaaccactcaagatttctgagacagaagccaggattttgtgctgcattgagcatgcttagcataagcgtgtactccccaaactggatgatgytaggcagttgagaggatagggatgctggttatgtcaacagcttcacaggggttttgttttgcaaaatactgcttgatgatctgagggcagctgggccctttcagctttcartgagcttttaataggacaattttcattggcataagcttgtgcacaccacctgcaattgagtacattgctctccctatataattggcatatagaatttgtacccaacagtggggggctgcaaataattgaggtgacttctctccctgtcacagccagtcaagccaagttgttccttttcagttatgaaaacttaacatatataaaataattcccattaaatcaagctacagaatgagttttgagctcaatcaactatttcttcattctcaataattaggtcagcctcagtaataaagcacc

SEQ ID NO: 1564 - DNA, 600 bp, Chicken  19866894088172_6
gtacttaaagacatcttacattgtttcagtactgcattttctgaacataatttctgccagagcataaacaacagaagaaaaaatgtgaagattacctagtgaacaggtgatttggtttaatgataggcagccttgattctcacatctgagtgcagatgaagagactcatttgtgctgtgggattgttgtattccatctagagccaaaggagctcactgctatggaacttgtagggaccagggaagcccactgattctttcttcccgtaaaaatatgtggagtctgtgggagatgccaacwgatgatcattatcccctggaagaagttggcagaagtttcatggcattttggcttgggcaacaaagatttggtcactttccacacaacatttaagtttgcctgcttacttgtttaggtttaactcaaacatattgagtctgccagctcctttcctttgtctattggaggtttgaggtccggaggtgacctctttcttctacagggcagaggctgaataggaggttgattctcagaactgaagggaacttgctggggatacagccagttaaaaaggcagcctgccaagtaagcggactctca

SEQ ID NO: 1565 - DNA, 600 bp, Chicken  19866894088172_7
ggtttgaggtccggaggtgacctctttcttctacagggcagaggctgaataggaggttgattctcagaactgaagggaacttgctggggatacagccagttaaaaaggcagcctgccaagtaagcggactctcagtgggttgttggatacccagggcagcttgctttctttattcaagttgctggagataacaggatgtttctgtgactcagggtcaggttcccactgcctgcattcatatcactattgatctaagagaactctttaaagccagggtttcctgtgatgatgcgggtccamctggtgactttttcctctcacgtggaaactgtagtcttgaaagatgaagatctttctgggttagtggctagagatgtcttctgcccattcatggacttccaataagctgctggagacttgatgggacaaggaggcagcagttcacggaaacagcttttgggtctaaagcaagaattactgcaacatggttttctgtagtgactgagactcacactgtcttaaacattagagtttagaagtcccatgaacttcaaaagccattatgagaaagaatagcagacatgtgagccatgaatgccc

SEQ ID NO: 1566 - DNA, 600 bp, Chicken  19866894088177_1
gaaaattactctattgggagaacaagaaatacaggtgcataattaaaatagatccctgctcactcatccacctctgtaccctcctgcggagctgggggtacagtttgcattcttttctgctattttcttttaaaaagtaattaccatttgaagatggctgggatcacttcatgcagtcaggtgaatgaatatcttccgtgctgttcagaaggctctcttctgaatttatgggtatgatagaccaatggaagttcctgccagccgtatcatgggagcacagattgagttgagttgagcacrgaccrtgggacccctacagcgtattctgagaacacagaactgcacataagtgcttgcttttaacagtgaccttttcatattttgcaacaaaatgaattacgttaccattttcttaataatcaattatattttacttcatcctctccgtgtytggtttgttgttgaactgatgttcagcgatgaactactgccatttttcctttctttttgctgagaaaagaggaaaaatgaagcacttgtttttcttatatcacaagattgaaaattctttttttcttttagtaattgttatatattcat

SEQ ID NO: 1567 - DNA, 600 bp, Chicken  19866894088177_2
ttactctattgggagaacaagaaatacaggtgcataattaaaatagatccctgctcactcatccacctctgtaccctcctgcggagctgggggtacagtttgcattcttttctgctattttcttttaaaaagtaattaccatttgaagatggctgggatcacttcatgcagtcaggtgaatgaatatcttccgtgctgttcagaaggctctcttctgaatttatgggtatgatagaccaatggaagttcctgccagccgtatcatgggagcacagattgagttgagttgagcacrgaccrtgggacccctacagcgtattctgagaacacagaactgcacataagtgcttgcttttaacagtgaccttttcatattttgcaacaaaatgaattacgttaccattttcttaataatcaattatattttacttcatcctctccgtgtytggtttgttgttgaactgatgttcagcgatgaactactgccatttttcctttctttttgctgagaaaagaggaaaaatgaagcacttgtttttcttatatcacaagattgaaaattctttttttcttttagtaattgttatatattcatgtgcc

SEQ ID NO: 1568 - DNA, 600 bp, Chicken  19866894088177_3
agatggctgggatcacttcatgcagtcaggtgaatgaatatcttccgtgctgttcagaaggctctcttctgaatttatgggtatgatagaccaatggaagttcctgccagccgtatcatgggagcacagattgagttgagttgagcacrgaccrtgggacccctacagcgtattctgagaacacagaactgcacataagtgcttgcttttaacagtgaccttttcatattttgcaacaaaatgaattacgttaccattttcttaataatcaattatattttacttcatcctctccgtgtytggtttgttgttgaactgatgttcagcgatgaactactgccatttttcctttctttttgctgagaaaagaggaaaaatgaagcacttgtttttcttatatcacaagattgaaaattctttttttcttttagtaattgttatatattcatgtgccatctgttttctgttttttcattactttctttgatctcagatctctgtaatgtatgcacttgagaagtttaatatagaaataaatgtttacatatccaaacagaggttaccagtcacatctctacatgccatttaaaaacaataagt

SEQ ID NO: 1569 - DNA, 390 bp, Chicken  19866894088180_1
gcgaggcttttcacagcggctgggacaggaggttgcttaccagctagcagaagctgttggaacagcagtgactttccacaccttggaacacagctggaatgcggccttaaagagaatctgcattataaactgcctctgaagtctttcacctgcctgtgaagcgaatttaaatgacttctgaaagctgcaaaggtagcagtgcatttggattgcaaagcaggatagaagctgtaagcgtcttctcaggctacccatctacatattaaagacataaaaagaactactttgtgtcataaagascagcgccaaaacaaattcaggaagacccatggcaagtgaaatggtggttttgggcagcagtgtcagcgttcaagggttatgtatcataca

SEQ ID NO: 1570 - DNA, 600 bp, Chicken  19866894088183_1
ggttaaacaaaaagatgtggaacaaggaggtggaaaagtgctgtaacgagtcatgcaaggagaaggcaaacactgccattgcacagactctacagaaaaagaagactcttggggcagtggtctaacaggggctgtgtgcatctcactgataatccaacagctccatgaggctgcactggagatgctccctgttggctttttttttggtgtgttgtaccaaactaccattgggtagttggttgagttttgagaagagaagcaaaggggaagagctcccggatttgggaagactttgactcyagtattgtgaccaggcacagacaggtgaatgaaggctgatgttgcagaaggtatcccagccattggtgaggcagatgggaaagctcagcccttgatgaggtggagaaagagatggggaaggctttgcgcagcgtctttagggaggggcagagccactgaaagtcaatataaaaatatccttgaaatatgtcaggtttatggagttcacaccaagtcatcgtagaggtcacgaccttacccatcagatacacaacttgtcaggcctcctgttggatggagagccatcactcacccccrtga

SEQ ID NO: 1571 - DNA, 600 bp, Chicken  19866894088183_2
tcyagtattgtgaccaggcacagacaggtgaatgaaggctgatgttgcagaaggtatcccagccattggtgaggcagatgggaaagctcagcccttgatgaggtggagaaagagatggggaaggctttgcgcagcgtctttagggaggggcagagccactgaaagtcaatataaaaatatccttgaaatatgtcaggtttatggagttcacaccaagtcatcgtagaggtcacgaccttacccatcagatacacaacttgtcaggcctcctgttggatggagagccatcactcacccccrtgagragctccataggygtgagggtctgcgaggtatttgggtgctcacctctacctggtttggagaagagttaaatacctgagtgcctgggatgttgctcctgatccatcacctacagaaaccaaacaaagcctgtccaagtgctgattcttaactacggggcatttgttcaaggaatgacattcaagtaactacagacaaagtgctatagcaacgaaaactgagcagccagtaagagagactccaacacagagtcaatattttgtggagaaaccatgggaaaaatgagaaggatcattc

SEQ ID NO: 1572 - DNA, 600 bp, Chicken  19866894088183_3
tattgtgaccaggcacagacaggtgaatgaaggctgatgttgcagaaggtatcccagccattggtgaggcagatgggaaagctcagcccttgatgaggtggagaaagagatggggaaggctttgcgcagcgtctttagggaggggcagagccactgaaagtcaatataaaaatatccttgaaatatgtcaggtttatggagttcacaccaagtcatcgtagaggtcacgaccttacccatcagatacacaacttgtcaggcctcctgttggatggagagccatcactcacccccrtgagragctccataggygtgagggtctgcgaggtatttgggtgctcacctctacctggtttggagaagagttaaatacctgagtgcctgggatgttgctcctgatccatcacctacagaaaccaaacaaagcctgtccaagtgctgattcttaactacggggcatttgttcaaggaatgacattcaagtaactacagacaaagtgctatagcaacgaaaactgagcagccagtaagagagactccaacacagagtcaatattttgtggagaaaccatgggaaaaatgagaaggatcattccgagc

SEQ ID NO: 1573 - DNA, 600 bp, Chicken  19866894088183_4
gcacagacaggtgaatgaaggctgatgttgcagaaggtatcccagccattggtgaggcagatgggaaagctcagcccttgatgaggtggagaaagagatggggaaggctttgcgcagcgtctttagggaggggcagagccactgaaagtcaatataaaaatatccttgaaatatgtcaggtttatggagttcacaccaagtcatcgtagaggtcacgaccttacccatcagatacacaacttgtcaggcctcctgttggatggagagccatcactcacccccrtgagragctccataggygtgagggtctgcgaggtatttgggtgctcacctctacctggtttggagaagagttaaatacctgagtgcctgggatgttgctcctgatccatcacctacagaaaccaaacaaagcctgtccaagtgctgattcttaactacggggcatttgttcaaggaatgacattcaagtaactacagacaaagtgctatagcaacgaaaactgagcagccagtaagagagactccaacacagagtcaatattttgtggagaaaccatgggaaaaatgagaaggatcattccgagccggagactacaa

SEQ ID NO: 1574 - DNA, 600 bp, Chicken  19866894088183_5
aagagaatcaggaagctgataaatatgccctgagcacaaaagcaattaaattaaagtctttcagctgaatgtagaggctgcctcagcatctgtacaagccactaaggactcacaaaaataagatgaagaaagagagcaggaacaatcatcactttaatttggtcagaagggaataagctgtgaaagcatgggcaggcaaagggagaaaaagaaattaggggaaatacagaaacaacttcactctgttttgatatctaactgaagtccacaagctagagattagaggagtggggaagggcrtcaacggttaaaaggagacctcggtgcttccaaagggagaccacaaacctcctgcagacagtacaagcctgagatctctccttggtgcagaggcatcacttgaaccataagggctgatctcccttccagtagttttcactggagaatcttgacaatggcttcagcactggagtaggacatatggacagctccagattcgcttcagggcagaaagggcacctggacaaccaatttcttttggcagtttagcataacttaggtgacttcgcactcaagagtgcttccatgcccaggccatga

SEQ ID NO: 1575 - DNA, 600 bp, Chicken  19866894088183_6
taatttaacattaaagctactgctttccagaagtctggagtacagcaaaaatatcggtctgcaaaaacgtcaacagcaatcacactgggaatagtccaaaagctctttgattctgtgaaatgcactggaaggaagcaattgttgatccagtctgagggacctcaacaagctggacggatgggccagcaggatcttcatgatgttcaggagaggcaaacaccgtgtcctgcacctggggtgggacagccctgtgcatggggaccggtggctggatgcaatacgcctgcagcaaaggacccrggggtccggctcgacacgttgaccgtgaatcagcagtatgccttagcagtgatgagagccaactgcaaagcgtgctgagttagcaagagcacagtcagcatctggacggaagctgtgtgagcggcagctgagggagctgcggtcattcagcctgcatcaggaaggtcaaaaggggaatctgattgcatctttctgctcctaaataggagttgtagagaagatggagctacactcagacgtgaacaataaagagaaaccaggcaacaagaagaaggtgcaagcaaggaaggtgccagtaga

SEQ ID NO: 1576 - DNA, 600 bp, Chicken  19866894088188_1
aagcagccagcaagcaacctcagcgcgtcagacacctgccctcaccatttccctttctgcccctagctgatgaagcagcccagcatgctgctagctgcacactcacttgtctgacacgcagctcagaacactgctcatttagctaatgaataaagataactgtaaagcatagcctgctatcctagcaaagaaagcacagtaactggttaatacacaggtctccaaaggtcctgctggttctccatctactcccaggctttgattaagagcaaaacagcgacactgcagctagaacagtgymtcctttgttccagatgcaaatacgatcattgcccagtcyatcgctatctctatcaccacaagagtaaactctttgaaggattcctctgaaaacatttggaaaaaattgmacaaaaacacaactgcctgcttggcatgcactgattgagacagggagggaagaaccaaggcagaacgttacaggcccatcgagatacatccagctgttgtatgtgagaatgctcaggtttgttttgcactgtaaaggttctaacggtgtgggggcacgccacgtccagctgcagtgacccacggaactcc

SEQ ID NO: 1577 - DNA, 600 bp, Chicken  19866894088188_2
agcagccagcaagcaacctcagcgcgtcagacacctgccctcaccatttccctttctgcccctagctgatgaagcagcccagcatgctgctagctgcacactcacttgtctgacacgcagctcagaacactgctcatttagctaatgaataaagataactgtaaagcatagcctgctatcctagcaaagaaagcacagtaactggttaatacacaggtctccaaaggtcctgctggttctccatctactcccaggctttgattaagagcaaaacagcgacactgcagctagaacagtgymtcctttgttccagatgcaaatacgatcattgcccagtcyatcgctatctctatcaccacaagagtaaactctttgaaggattcctctgaaaacatttggaaaaaattgmacaaaaacacaactgcctgcttggcatgcactgattgagacagggagggaagaaccaaggcagaacgttacaggcccatcgagatacatccagctgttgtatgtgagaatgctcaggtttgttttgcactgtaaaggttctaacggtgtgggggcacgccacgtccagctgcagtgacccacggaactcca

SEQ ID NO: 1578 - DNA, 600 bp, Chicken  19866894088188_3
ctcaccatttccctttctgcccctagctgatgaagcagcccagcatgctgctagctgcacactcacttgtctgacacgcagctcagaacactgctcatttagctaatgaataaagataactgtaaagcatagcctgctatcctagcaaagaaagcacagtaactggttaatacacaggtctccaaaggtcctgctggttctccatctactcccaggctttgattaagagcaaaacagcgacactgcagctagaacagtgymtcctttgttccagatgcaaatacgatcattgcccagtcyatcgctatctctatcaccacaagagtaaactctttgaaggattcctctgaaaacatttggaaaaaattgmacaaaaacacaactgcctgcttggcatgcactgattgagacagggagggaagaaccaaggcagaacgttacaggcccatcgagatacatccagctgttgtatgtgagaatgctcaggtttgttttgcactgtaaaggttctaacggtgtgggggcacgccacgtccagctgcagtgacccacggaactccaggtagcaccggcaccrtctacacaagttgctgctggcaa

SEQ ID NO: 1579 - DNA, 600 bp, Chicken  19866894088188_4
ctgacacgcagctcagaacactgctcatttagctaatgaataaagataactgtaaagcatagcctgctatcctagcaaagaaagcacagtaactggttaatacacaggtctccaaaggtcctgctggttctccatctactcccaggctttgattaagagcaaaacagcgacactgcagctagaacagtgymtcctttgttccagatgcaaatacgatcattgcccagtcyatcgctatctctatcaccacaagagtaaactctttgaaggattcctctgaaaacatttggaaaaaattgmacaaaaacacaactgcctgcttggcatgcactgattgagacagggagggaagaaccaaggcagaacgttacaggcccatcgagatacatccagctgttgtatgtgagaatgctcaggtttgttttgcactgtaaaggttctaacggtgtgggggcacgccacgtccagctgcagtgacccacggaactccaggtagcaccggcaccrtctacacaagttgctgctggcaaagtggtgctgcaagaaatgcttcgttctgagatgtcacctcgtgaatttgaagacctgcagctcccatca

SEQ ID NO: 1580 - DNA, 600 bp, Chicken  19866894088188_5
caaatacgatcattgcccagtcyatcgctatctctatcaccacaagagtaaactctttgaaggattcctctgaaaacatttggaaaaaattgmacaaaaacacaactgcctgcttggcatgcactgattgagacagggagggaagaaccaaggcagaacgttacaggcccatcgagatacatccagctgttgtatgtgagaatgctcaggtttgttttgcactgtaaaggttctaacggtgtgggggcacgccacgtccagctgcagtgacccacggaactccaggtagcaccggcaccrtctacacaagttgctgctggcaaagtggtgctgcaagaaatgcttcgttctgagatgtcacctcgtgaatttgaagacctgcagctcccatcaaagttctgccaggagaaactgagagacttttggcaacataytgaattatggttcttcatttattatttacggaggcacttaaacactggacagtaatgagagacattctagacaacaaaggtgccacrtgaagaagaatattttccatatatgtcactttaagatacaaattccagtacaacataaacaagcacacgttggtggtac

SEQ ID NO: 1581 - DNA, 600 bp, Chicken  19866894088188_6
agggagggaagaaccaaggcagaacgttacaggcccatcgagatacatccagctgttgtatgtgagaatgctcaggtttgttttgcactgtaaaggttctaacggtgtgggggcacgccacgtccagctgcagtgacccacggaactccaggtagcaccggcaccrtctacacaagttgctgctggcaaagtggtgctgcaagaaatgcttcgttctgagatgtcacctcgtgaatttgaagacctgcagctcccatcaaagttctgccaggagaaactgagagacttttggcaacataytgaattatggttcttcatttattatttacggaggcacttaaacactggacagtaatgagagacattctagacaacaaaggtgccacrtgaagaagaatattttccatatatgtcactttaagatacaaattccagtacaacataaacaagcacacgttggtggtactgctgagcacggccctccttcccagtgcccttccacgctccccccattgagcagtggtgtgcggagctccaactgccagctctgcagcagggggtgagcactggcagcacagcacagtgcatcgagkgcacagc

SEQ ID NO: 1582 - DNA, 600 bp, Chicken  19866894088188_7
ctgtaaaggttctaacggtgtgggggcacgccacgtccagctgcagtgacccacggaactccaggtagcaccggcaccrtctacacaagttgctgctggcaaagtggtgctgcaagaaatgcttcgttctgagatgtcacctcgtgaatttgaagacctgcagctcccatcaaagttctgccaggagaaactgagagacttttggcaacataytgaattatggttcttcatttattatttacggaggcacttaaacactggacagtaatgagagacattctagacaacaaaggtgccacrtgaagaagaatattttccatatatgtcactttaagatacaaattccagtacaacataaacaagcacacgttggtggtactgctgagcacggccctccttcccagtgcccttccacgctccccccattgagcagtggtgtgcggagctccaactgccagctctgcagcagggggtgagcactggcagcacagcacagtgcatcgagkgcacagcgggaagagctgatggcagttcagtgagtgggagcgctgccactctctgccttcctgcccagtaaccatggcccgtgggtgcgcagcg

SEQ ID NO: 1583 - DNA, 600 bp, Chicken  19866894088188_8
aacataytgaattatggttcttcatttattatttacggaggcacttaaacactggacagtaatgagagacattctagacaacaaaggtgccacrtgaagaagaatattttccatatatgtcactttaagatacaaattccagtacaacataaacaagcacacgttggtggtactgctgagcacggccctccttcccagtgcccttccacgctccccccattgagcagtggtgtgcggagctccaactgccagctctgcagcagggggtgagcactggcagcacagcacagtgcatcgagkgcacagcgggaagagctgatggcagttcagtgagtgggagcgctgccactctctgccttcctgcccagtaaccatggcccgtgggtgcgcagcgggcacaacattctgggagaaaaggatgtatttttttgtgatccagatgttacaatgcgggcagctccacccatacctgtgccactttttaacctgtatatggatgtattttccatacctctacattcttctgcaaccacacaaacgcaaactaagaatctaactatcccctgccttaaaggctgctggtgaaacaaaagcgtggct

SEQ ID NO: 1584 - DNA, 600 bp, Chicken  19866894088200_1
tagggagttgctactaacatcatttacaacaagcaaaagagcagcaaacaataaaagtgttcaaacctacaaaaactgaagttgaaatccaactaaactatgggtgctccataattatagaacatctcatgagttacacaacagttttagaacagaataaaaaaggcactaaaagcaaagaaaaactatataataaatttcaagcaagaagacagtatgataactagcacttcagcataggaatagtaatcaagctgaaaaagccattccctttcttattgatcactacagaaaaaaggrgttgacaaatacatcagattagaaaaatttcacttctggttataacttgtaggtgacagatcagtcattatgcatgaagagagcaactgattttgtaacaccagagaaagtattgtattcaaaaatactataacagtttagaattgcctcaatggaaatattggaaataagaaggcagagaagcgtagaaggcagtttaattactatggatattcacaggatggtgtcatgtactaagtaacatcactatttggagaagtaacaaattatgaaccaccatttraaatgttgtccccttct

SEQ ID NO: 1585 - DNA, 600 bp, Chicken  19866894088200_2
cactacagaaaaaaggrgttgacaaatacatcagattagaaaaatttcacttctggttataacttgtaggtgacagatcagtcattatgcatgaagagagcaactgattttgtaacaccagagaaagtattgtattcaaaaatactataacagtttagaattgcctcaatggaaatattggaaataagaaggcagagaagcgtagaaggcagtttaattactatggatattcacaggatggtgtcatgtactaagtaacatcactatttggagaagtaacaaattatgaaccaccatttraaatgttgtccccttcttaakgaatggatatgaaagctcgcagtgcagattttcctctacctgtggtggttttttttttttttttctcctcctgaaggaagttaattagactcatctacgtaaacacagtgttacaattggaaagattaacatgatggaagggagatacaggagtgcagtaggaaagtgactagtttgaacagaacggtgttacaaagaaaaagttctcacctatctctgaagagctcagcttgcaggaaagactccacaaagacaggatctccaatgagagattccttc

SEQ ID NO: 1586 - DNA, 600 bp, Chicken  19866894088200_3
acaaatacatcagattagaaaaatttcacttctggttataacttgtaggtgacagatcagtcattatgcatgaagagagcaactgattttgtaacaccagagaaagtattgtattcaaaaatactataacagtttagaattgcctcaatggaaatattggaaataagaaggcagagaagcgtagaaggcagtttaattactatggatattcacaggatggtgtcatgtactaagtaacatcactatttggagaagtaacaaattatgaaccaccatttraaatgttgtccccttcttaakgaatggatatgaaagctcgcagtgcagattttcctctacctgtggtggttttttttttttttttctcctcctgaaggaagttaattagactcatctacgtaaacacagtgttacaattggaaagattaacatgatggaagggagatacaggagtgcagtaggaaagtgactagtttgaacagaacggtgttacaaagaaaaagttctcacctatctctgaagagctcagcttgcaggaaagactccacaaagacaggatctccaatgagagattccttccccagtgccagtcagcactta

SEQ ID NO: 1587 - DNA, 600 bp, Chicken  19866894088200_4
ctctaaaaggaaataccaggtgaatataaaaacaatgaaaagagatgcatgcctagacatgatgtgatctagtaccttgaattaaagaaagagacagaagtgttagtaagcctcacatttttcatagggtcaaaattctgttgttcattgttttctttgcttttttgttttttctatgtcgctaacatcagtttcttgaagcactcgcagacttctgctttaggcagctaaatctctcattcctccccctcagacactttttcaaacacaaatcaggactgttataaacaggttgtttgyttataatctacctgtatattttgctatgctaattagtctttggagcacatcatgtctactgcatgtttggttcacttcaactacaagtctctgtctcttccaargagactcaaagtttccttaaggtgcttacttaagattgaagtgatgtatgtstaaacctgcgtacccaatcctwttctcaaaatttgtacgttcttgttaactatcccaaaataaatgattaaaaaaaaaaataacaattaaaagccctcagcgtttgagaaaaatttgtctcccaaagggggtattgaatttttc

SEQ ID NO: 1588 - DNA, 600 bp, Chicken  19866894088200_5
agtaagcctcacatttttcatagggtcaaaattctgttgttcattgttttctttgcttttttgttttttctatgtcgctaacatcagtttcttgaagcactcgcagacttctgctttaggcagctaaatctctcattcctccccctcagacactttttcaaacacaaatcaggactgttataaacaggttgtttgyttataatctacctgtatattttgctatgctaattagtctttggagcacatcatgtctactgcatgtttggttcacttcaactacaagtctctgtctcttccaargagactcaaagtttccttaaggtgcttacttaagattgaagtgatgtatgtstaaacctgcgtacccaatcctwttctcaaaatttgtacgttcttgttaactatcccaaaataaatgattaaaaaaaaaaataacaattaaaagccctcagcgtttgagaaaaatttgtctcccaaagggggtattgaatttttcttatctttttatgaacacctatccaagcttcctggcacatacatgtgcagaaaatatttctcattagttactctttcaaaatatttgtctgtatagrcattctt

SEQ ID NO: 1589 - DNA, 600 bp, Chicken  19866894088200_6
ttgcttttttgttttttctatgtcgctaacatcagtttcttgaagcactcgcagacttctgctttaggcagctaaatctctcattcctccccctcagacactttttcaaacacaaatcaggactgttataaacaggttgtttgyttataatctacctgtatattttgctatgctaattagtctttggagcacatcatgtctactgcatgtttggttcacttcaactacaagtctctgtctcttccaargagactcaaagtttccttaaggtgcttacttaagattgaagtgatgtatgtstaaacctgcgtacccaatcctwttctcaaaatttgtacgttcttgttaactatcccaaaataaatgattaaaaaaaaaaataacaattaaaagccctcagcgtttgagaaaaatttgtctcccaaagggggtattgaatttttcttatctttttatgaacacctatccaagcttcctggcacatacatgtgcagaaaatatttctcattagttactctttcaaaatatttgtctgtatagrcattcttcctcctgtccctttccctccccccaaagaagagttagaaatactctttcaac

SEQ ID NO: 1590 - DNA, 600 bp, Chicken  19866894088200_7
tcgctaacatcagtttcttgaagcactcgcagacttctgctttaggcagctaaatctctcattcctccccctcagacactttttcaaacacaaatcaggactgttataaacaggttgtttgyttataatctacctgtatattttgctatgctaattagtctttggagcacatcatgtctactgcatgtttggttcacttcaactacaagtctctgtctcttccaargagactcaaagtttccttaaggtgcttacttaagattgaagtgatgtatgtstaaacctgcgtacccaatcctwttctcaaaatttgtacgttcttgttaactatcccaaaataaatgattaaaaaaaaaaataacaattaaaagccctcagcgtttgagaaaaatttgtctcccaaagggggtattgaatttttcttatctttttatgaacacctatccaagcttcctggcacatacatgtgcagaaaatatttctcattagttactctttcaaaatatttgtctgtatagrcattcttcctcctgtccctttccctccccccaaagaagagttagaaatactctttcaactctcttgaatcttcttccggtt

SEQ ID NO: 1591 - DNA, 600 bp, Chicken  19866894088200_8
ttccaargagactcaaagtttccttaaggtgcttacttaagattgaagtgatgtatgtstaaacctgcgtacccaatcctwttctcaaaatttgtacgttcttgttaactatcccaaaataaatgattaaaaaaaaaaataacaattaaaagccctcagcgtttgagaaaaatttgtctcccaaagggggtattgaatttttcttatctttttatgaacacctatccaagcttcctggcacatacatgtgcagaaaatatttctcattagttactctttcaaaatatttgtctgtatagrcattcttcctcctgtccctttccctccccccaaagaagagttagaaatactctttcaactctcttgaatcttcttccggttttctcttttctttttctttctttttttttttttcccctccatctcccactcaatcagtttctttctcctgcttcccttgcagttttagagatgctttgatgacatgtcaagaacttgcatagaattttcactttcttctttcaatatatgacccagcctgtccatcaggtaatcagataagtcagatggttttctttctttctaggagaatgtaaaggc

SEQ ID NO: 1592 - DNA, 600 bp, Chicken  19866894088204_1
gtagatatttgctcaagaatttctgtgtttcaaggctaaaataacatatgaatattgttcacttgcacaagggcaaaggagtatataacttagtctttgaaaaactatttcaagtcttaatctatgaaatgtattcagatttcctggagactgttaggcatacaaaaaatatggcaataacttccaggatcagttatatcagttacagattaaatgcaggatttataaaatgaaggaagcaaagaaaaaaggatgaagaaatgttcatgcttttcttttgttggtgacccctaggaagtrtgtataaataaaccactgcttttgaacttaagtttctagcggctttggtaacaatagttacattacaaataaatataacatttatgcatattagattaaaattctgcttaaatgccttcagaaagagtgtgatatagtaagaatgtcttgcaaaggcaagttatgtttaatcaagattagcaacgctttcttagaataatttgttttcaggacttaagtaaattatttttgtcttaaagacactgaagtaattaaatatctatttgcttcttattcatgtttaatcttaaattataactt

SEQ ID NO: 1593 - DNA, 599 bp, Chicken  19866894088205_1
  misc_feature (1)..(166): n is any nucleotide
nnnnnnnnnnnnnnnnnnnnnnnnnnnnnnnnnnnnnnnnnnnnnnnnnnnnnnnnnnnnnnnnnnnnnnnnnnnnnnnnnnnnnnnnnnnnnnnnnnnnnnnnnnnnnnnnnnnnnnnnnnnnnnnnnnnnnnnnnnnnnnnnnnnnnnnnnnnnnnnnnnnnnnattctcttataggaatacggttgctagttctgtattctagcatgtgaacttcattagcaattattttatggctcattttaactatgaaaggacactttcactgcattttcttctcctttctgtttttttttttyyccccccagtaacagcaatatggaaattcatcgtgtcagactttcgtagagctctgattcttgtctctttcttactctttactctgttagccaagcaaatgtgatttgggggtcatactgttaatctccttttgcaaagctattctgcatggtgctgctaagctacacatgtctaagcatgaaggtctggaacatacaacaatgatcttgctgtcagaattactaggactcatttctgcaggaaaagttaatgccagcagatcagaaagaccaattgacacacagccaatgcaatatgg

SEQ ID NO: 1594 - DNA, 599 bp, Chicken  19866894088205_2
  misc_feature (1)..(165): n is any nucleotide
nnnnnnnnnnnnnnnnnnnnnnnnnnnnnnnnnnnnnnnnnnnnnnnnnnnnnnnnnnnnnnnnnnnnnnnnnnnnnnnnnnnnnnnnnnnnnnnnnnnnnnnnnnnnnnnnnnnnnnnnnnnnnnnnnnnnnnnnnnnnnnnnnnnnnnnnnnnnnnnnnnnnnattctcttataggaatacggttgctagttctgtattctagcatgtgaacttcattagcaattattttatggctcattttaactatgaaaggacactttcactgcattttcttctcctttctgtttttttttttyyccccccagtaacagcaatatggaaattcatcgtgtcagactttcgtagagctctgattcttgtctctttcttactctttactctgttagccaagcaaatgtgatttgggggtcatactgttaatctccttttgcaaagctattctgcatggtgctgctaagctacacatgtctaagcatgaaggtctggaacatacaacaatgatcttgctgtcagaattactaggactcatttctgcaggaaaagttaatgccagcagatcagaaagaccaattgacacacagccaatgcaatatggc

SEQ ID NO: 1595 - DNA, 600 bp, Chicken  19866894088206_1
gatttcagcttgacgagttcattgtgttttttgaagatcctcttctatatttctccattattaagattattaaggtcagtttttgttcaatttaaaaatttgaccaatgctaattttctggtattcaaaccttgtatcacgcactaaggaaagcatcaagagtgctctttgcctattggaaaaaaagctgataacatatctactgaagacatgaccagatcatgtcccatacatggttgctttacttttgcttgattgctgagagctgaatattttcaagcagatcatattcatgaatgyatcatgcctcactatttcatcrtgccaaacattcattaaagatctacttaaagctcccttcctaatttatattgcttctaygagttgctttgatttgagaaatctcttttgcaaaaggaaagtcatccattgtttggacttcaaacggaaatgtaggtgtttaattggtggatgtggttttcattatactttccatctccaccacaaactcttttcatagattatgacaagcctgttggcagcctgctgcatcagactggaggtagctgacttgataagcatgtcgcccagctgaaggaa

SEQ ID NO: 1596 - DNA, 600 bp, Chicken  19866894088206_2
tgtgttttttgaagatcctcttctatatttctccattattaagattattaaggtcagtttttgttcaatttaaaaatttgaccaatgctaattttctggtattcaaaccttgtatcacgcactaaggaaagcatcaagagtgctctttgcctattggaaaaaaagctgataacatatctactgaagacatgaccagatcatgtcccatacatggttgctttacttttgcttgattgctgagagctgaatattttcaagcagatcatattcatgaatgyatcatgcctcactatttcatcrtgccaaacattcattaaagatctacttaaagctcccttcctaatttatattgcttctaygagttgctttgatttgagaaatctcttttgcaaaaggaaagtcatccattgtttggacttcaaacggaaatgtaggtgtttaattggtggatgtggttttcattatactttccatctccaccacaaactcttttcatagattatgacaagcctgttggcagcctgctgcatcagactggaggtagctgacttgataagcatgtcgcccagctgaaggaaaacatgaattccctccaacttt

SEQ ID NO: 1597 - DNA, 600 bp, Chicken  19866894088206_3
tttgttcaatttaaaaatttgaccaatgctaattttctggtattcaaaccttgtatcacgcactaaggaaagcatcaagagtgctctttgcctattggaaaaaaagctgataacatatctactgaagacatgaccagatcatgtcccatacatggttgctttacttttgcttgattgctgagagctgaatattttcaagcagatcatattcatgaatgyatcatgcctcactatttcatcrtgccaaacattcattaaagatctacttaaagctcccttcctaatttatattgcttctaygagttgctttgatttgagaaatctcttttgcaaaaggaaagtcatccattgtttggacttcaaacggaaatgtaggtgtttaattggtggatgtggttttcattatactttccatctccaccacaaactcttttcatagattatgacaagcctgttggcagcctgctgcatcagactggaggtagctgacttgataagcatgtcgcccagctgaaggaaaacatgaattccctccaactttgctcagaattgctaattagcttaaaggcaatgtcctgaattggcacagaaaaccactga

SEQ ID NO: 1598 - DNA, 600 bp, Chicken  19866894088206_4
cagtccaacgtagtctctggtttcatttctatgcagctgatatcatgatggtaaaggcggcttatttgtcagagaaagcaaaaacagaaatgttttcatttttgtaaaatcagtcgccccatcttgcaggtgtgaggcccttttcctctcaaatgaatgcagaggtgggggtaaaccaagcacttatctgggcagagttgcaatccttctgctgctgtttctcagtggggctcattcctgctctcattcagattaaaaataaataaataaataaaaacaaaaagcttccattaacagaasagaactctgaggataggaacagaaggaaacagaagaaacagaacagaaaggggaggtctcactttaatcattcttggataactctgcactctttttgatattttcctaacttttcagcagtagcatggctagggcaacaaataattctcccactgctcaaaaataatttacctaggaaaacgtttaaatctgcaagaaccaacctgactccgggccccatgaatcctgataaaataactcacacatagaattacagaatcatagaatcactgaggttggaaaagaccactaaggttgtct

SEQ ID NO: 1599 - DNA, 600 bp, Chicken  19866894088206_5
gaacagaaaggggaggtctcactttaatcattcttggataactctgcactctttttgatattttcctaacttttcagcagtagcatggctagggcaacaaataattctcccactgctcaaaaataatttacctaggaaaacgtttaaatctgcaagaaccaacctgactccgggccccatgaatcctgataaaataactcacacatagaattacagaatcatagaatcactgaggttggaaaagaccactaaggttgtctagtccaatcatcagctcatccccaccatgcccactaaccrtgtccctcagtcccacgtatgcatttctggaaaacctcaagccggcactggggagagtggttggctgaactgccaaacttgaaaatactaagtggaaatgaaacaatcccagtttttgcaaaacaaagacttgggaaaagtcattcactgttaacctgcaacactctgttcagtccctgcacccaccggagccctcagagcttggagcgtaaacaaatcagaagaggagaggaaagcatctgcaaaaccactgctacatcaccttccatttcaacattctgtgtcagaaaactgaggctg

SEQ ID NO: 1600 - DNA, 572 bp, Chicken  19866894088208_1
atctagcccaactaccctgcaatgaacagggacacctatagctggatcaggttgctcagagccccatccagcctgaccttggatgtctccagggatggagcatccaccacttctctgggcaacctgttccagtgcttcactactcttactacaaagaaccaacttctttatatccaatctaaatctcccctcttccagtctgaaacccttttcccttgttctatcagaacagaccctgctaaagagtccgtccccttctttctcatagcttctcttataaatctccagtgcagaaaccckacacaacccaactaggtaccaagttgccattgtttcctgggagaaatgcacttatctcgagtttcctcccattgtctaactgaaatgcccaggagtgtgcacaactcaagttatgactactgctttcatgtcagagtctaattacagcaaaaacgaagttctctttgactccttcctttggcaggcacagggtctgtctcccatgagtactgagaacctcgtttttgggtgctggcttctctccatcttcagagtgggattttggcagccag

SEQ ID NO: 1601 - DNA, 600 bp, Chicken  19866894088210_1
gatttctgtaaataatgcaacataggtgttcaaacgtgaactaattgcagtaaaccattctttcatcagctgtgtgaagggaagtcacctcaggtgggctggaaaataaactgtaaatgcttattcaacgcagtaaggaactgttaatgagaaagggatcaaagcacttaactcagaatctatacaaagtaggttacacgacttgcctcacagagatacttccctgcaatacaagtatgttagcataaacagcttgagaaaaggtctttactaacttgtgactggctggaaaagagtcawaggagaagatcaagtcttcccattagcactgtgctcagccgcttctcaaggggacaggatgattgatttcatgcataaagcctggtaagctaagaaataccctatgactttcttctcagatgtaagctatgtgatggctcaacaacagcagacacagagtgaactgggcctttcccattcacgctagagctggagttcacctcagtgtccctacccttggtgtgctttcagcttaagtttgaaactcagcaaaatgatagctggtctgatcccatttacagctgatcagcacaggaggct

SEQ ID NO: 1602 - DNA, 600 bp, Chicken  19866894088211_1
cttaataggtattgaacggttcctgttggtttcatatggaatagcattacccagttgtgtccttacctgaagtaggctgatgctacataaaactgcttagatttctacacaggctctcattcaacctttttaattttctctgagtgattcaactggtggaactggcctaaatgattataggcaagcacatgtaactctttcaaggggctagaagccattgcaaagttatttgtagtgtatgtatgcaaatcaacttcagtttgagatagtatgggagaagttggagggggatttccctgmtttatgtaatctgttgttgctcattagcttcctctattcacatggccaggaggcacaggcatgacaccaccggtaatttctcaaactcaatctgaaagcaaagacaatgygctcagtgaccttcagcagcctcgcaactttcggtaaatcctccagctctggctcaatgatatccggaataaaggtggcctggaggagaagtcagggaacgactcctttgggaagggcttcactcacttactggcatgcttcaaaagtgggtgacagccaggaggatctgtgtgctagcctcagatatga

SEQ ID NO: 1603 - DNA, 600 bp, Chicken  19866894088211_2
aggctctcattcaacctttttaattttctctgagtgattcaactggtggaactggcctaaatgattataggcaagcacatgtaactctttcaaggggctagaagccattgcaaagttatttgtagtgtatgtatgcaaatcaacttcagtttgagatagtatgggagaagttggagggggatttccctgmtttatgtaatctgttgttgctcattagcttcctctattcacatggccaggaggcacaggcatgacaccaccggtaatttctcaaactcaatctgaaagcaaagacaatgygctcagtgaccttcagcagcctcgcaactttcggtaaatcctccagctctggctcaatgatatccggaataaaggtggcctggaggagaagtcagggaacgactcctttgggaagggcttcactcacttactggcatgcttcaaaagtgggtgacagccaggaggatctgtgtgctagcctcagatatgactctgcctaccgcatctctaacttccatttctccagccacaaaaagtgctgcactggccacaggatcygtgccacccaagtggsggctgggaaaagacaagtctcacgtg

SEQ ID NO: 1604 - DNA, 600 bp, Chicken  19866894088211_3
accggtaatttctcaaactcaatctgaaagcaaagacaatgygctcagtgaccttcagcagcctcgcaactttcggtaaatcctccagctctggctcaatgatatccggaataaaggtggcctggaggagaagtcagggaacgactcctttgggaagggcttcactcacttactggcatgcttcaaaagtgggtgacagccaggaggatctgtgtgctagcctcagatatgactctgcctaccgcatctctaacttccatttctccagccacaaaaagtgctgcactggccacaggatcygtgccacccaagtggsggctgggaaaagacaagtctcacgtgctcaggcacatctagcagtgacactygtggcatggacaggctgggcagccagaggccctaaagcatgtcctccttagggaggtggaatgccacggctgcaagcagcccgtggggtgctgtgctgctgagggcagcccgtgctgaggcccaggtgagtggctccgtgccagcctgggtaccagtctctacatggtactctgtgctgaactgattgtggtgttattgtcctatgtgagaagatttataactcagtgccta

SEQ ID NO: 1605 - DNA, 600 bp, Chicken  19866894088211_4
actcaatctgaaagcaaagacaatgygctcagtgaccttcagcagcctcgcaactttcggtaaatcctccagctctggctcaatgatatccggaataaaggtggcctggaggagaagtcagggaacgactcctttgggaagggcttcactcacttactggcatgcttcaaaagtgggtgacagccaggaggatctgtgtgctagcctcagatatgactctgcctaccgcatctctaacttccatttctccagccacaaaaagtgctgcactggccacaggatcygtgccacccaagtggsggctgggaaaagacaagtctcacgtgctcaggcacatctagcagtgacactygtggcatggacaggctgggcagccagaggccctaaagcatgtcctccttagggaggtggaatgccacggctgcaagcagcccgtggggtgctgtgctgctgagggcagcccgtgctgaggcccaggtgagtggctccgtgccagcctgggtaccagtctctacatggtactctgtgctgaactgattgtggtgttattgtcctatgtgagaagatttataactcagtgcctatccagattctgagaaa

SEQ ID NO: 1606 - DNA, 600 bp, Chicken  19866894088211_5
actttcggtaaatcctccagctctggctcaatgatatccggaataaaggtggcctggaggagaagtcagggaacgactcctttgggaagggcttcactcacttactggcatgcttcaaaagtgggtgacagccaggaggatctgtgtgctagcctcagatatgactctgcctaccgcatctctaacttccatttctccagccacaaaaagtgctgcactggccacaggatcygtgccacccaagtggsggctgggaaaagacaagtctcacgtgctcaggcacatctagcagtgacactygtggcatggacaggctgggcagccagaggccctaaagcatgtcctccttagggaggtggaatgccacggctgcaagcagcccgtggggtgctgtgctgctgagggcagcccgtgctgaggcccaggtgagtggctccgtgccagcctgggtaccagtctctacatggtactctgtgctgaactgattgtggtgttattgtcctatgtgagaagatttataactcagtgcctatccagattctgagaaatgggcttaccgaaaaccgctgctaagggaaatacaacaggtgaagtaagcat

SEQ ID NO: 1607 - DNA, 600 bp, Chicken  19866894088217_1
gtcaaattcttaaatgcttaaagacttaagcatcagaaataacataaaactggatcttgctttccttaagcttaaaccacagggactcgcaagagtgttgtaggaaagcaaagaaaggcaggactagaaacaaaaattcttcccattttagatctactgattttcttctttctgcatatatttgtagctcacaggtcttattagagtactcttactcctccacagcttctgactttgcaaacaaagactgtaaactaagtactctgcatccatgctcttttttgagtaggtattgaaatrtaaggccaagacaccaggcatcacagtgtatactctagatacctaaattccttaaaaaaaacttttttcataccccttcctcttccaaaaactaagtgggataggaattagaaaacttcaaactaagtgctggaatgtctgtttttttttagtaacaatattattggttcctcaattagacaactaaactcatattatttataaggaacgttttaggcttttgaaaggaactgtaaaatacacagattattgagcaaggaattaattggtgagatggtgagtaccaggagctgtgagtaa

SEQ ID NO: 1608 - DNA, 600 bp, Chicken  19866894088221_1
gaaataagtcattcagaagttgaagctacagtggacttgtaacaacaatttagaaactttctgtaactgattaaaaagggtaacttaaacagtagtgctgctattagctcatctaaggaaacacaaaccctgaggggaagaaaagccacacaggcagtaagctgatttaagctcatggtggcaaaatacttcacgacttcgacttacactagacaatcttttgcataagaaaatgcctctctcaaattctgggtcagcatacatttgggtgttgataaactatattttttttcccatttygacttattaactgtgcattgtacagcagtagagagaggccattttcttcctgtttaaaataagattaagcaaatttcaaatgcaattaaaggagaaaaaacattcttttatccaatctgttcccaaatttatgagaaagtcttagtcaaatagaagttgcaaatwaaatgcagtccaagcgattatactgttccataaatttctaagaggcagaagttgttcttacctgtaatcacaaccttgccaaggttctagttcagtgttgaaagaattagtttacattcctgctgccaaggagca

SEQ ID NO: 1609 - DNA, 600 bp, Chicken  19866894088221_2
tttaagctcatggtggcaaaatacttcacgacttcgacttacactagacaatcttttgcataagaaaatgcctctctcaaattctgggtcagcatacatttgggtgttgataaactatattttttttcccatttygacttattaactgtgcattgtacagcagtagagagaggccattttcttcctgtttaaaataagattaagcaaatttcaaatgcaattaaaggagaaaaaacattcttttatccaatctgttcccaaatttatgagaaagtcttagtcaaatagaagttgcaaatwaaatgcagtccaagcgattatactgttccataaatttctaagaggcagaagttgttcttacctgtaatcacaaccttgccaaggttctagttcagtgttgaaagaattagtttacattcctgctgccaaggagcacataacagaatgacttgcaaaaccttgagataacagtacgggacacaacatctgctttattttggtatttcctagaaagaaacaaaggaagtagttagctactccagatggtacaaacagatttgtacatgaatttaggaaaaagcagcattcctgaaaaacaga

SEQ ID NO: 1610 - DNA, 600 bp, Chicken  19866894088221_3
agagagccattttgagctaagagtatctttcccctgaatatgcttcatttcactatgttaaaagtgttttcttcagatggaagcaacagccaaaagcatcacaagtaaatcacagagtcatagaatatcccaagttggaagggaccatgaggatcatcaagtccaactcctgtcactgctaagaaattaaaaccaacgttcaacaataagcatgttaaaaaatactataggcaagaaccctgacaaatttgaagatccctaccactttacaggaaagtgagcatctcatactagtctttstgagaactaaatacatactaactaaactcagtagcaaagcactaatgaacctcaagatgaatccaaacactacaagaagcaaaaaccactacaccatccaggtcctttgcaacttcccagactctggtccaagaagcaccagaaatacaatttttattccatttaacaaccagtaacaactctgaccttttaaggacaatcacatcactgctgctttaaaacaaaccagccaacccgctcccttaccaccaataaaaaccaagtgaaatctcatgtgtcatgtttgacctttgtggtatc

SEQ ID NO: 1611 - DNA, 600 bp, Chicken  19866894088224_1
caaaccaatgatgttccacgaacagtatgtagtttaaaatctcttctcacacagaggcttttaataggccctcattgtctggttatacttcatctaaatcaccgatgcagcctcacagctgagatgtcctgtgtgatgttggttgtaactatgctctgtttgtcaaagaaggatagaatgcttgtttaatagtaattgtaaattctcattccttttctgacaacttattactgctcatctaatgggctttctccaacagatctcatttgtataattgcttagcaaagcgaagtcttactragttgtttccttttgatttaataaaacattaatcactgttggaattcatatttggaaagacagtgttcttctggagctaaatagtgtcagttggtgcagcggatcagaaatgtattgctacaggccatcagttctttctgaatttttgttgtggttcctgttcttgcatttggaggaagccctaaaaccagggcattgacttttagagtgaccactcttggtacaagtattctgtgtgaatatatgcttgtgtggtgtaattctcaatgtgtgattcccagtgtgatgcccactgctcta

SEQ ID NO: 1612 - DNA, 600 bp, Chicken  19866894088231_1
tcagcatttcctttggaaacatcagtctgagctttcttttttttctttccccctctattttaacttttctcaagaactacagaactgcatggttctacagacacaacaggcagacggactggaacgtgtctgatggttcagcagttgccactggcattgtcagcagtcccctcaccaacagggactctgaagaccatcgtgagttcagacatcaccaccagcaaacaagttccagctcagcagcagtaataacactgtaccttccaccctgacgtgctcactcactccagcacaatctgrgctgagcaccacacagattagacacgcctgtcagacacrcgagcacacgcagcacttctgtagccctgcaccgtgaggaccagagctctgtcctgctgctgtggggcagcggggctgctggcacacacctgaagcagggggagagatgcacagacatgttcttatggcgcttctcgaagcggttgtacttgcggatgtagtgcaggtagtcccggcggatcacaatggtgcgctgcatcttcatcttggtgaccacacctggggatgagagcagwcagaaggtgaygatgggtgtaagca

SEQ ID NO: 1613 - DNA, 600 bp, Chicken  19866894088231_2
tttttctttccccctctattttaacttttctcaagaactacagaactgcatggttctacagacacaacaggcagacggactggaacgtgtctgatggttcagcagttgccactggcattgtcagcagtcccctcaccaacagggactctgaagaccatcgtgagttcagacatcaccaccagcaaacaagttccagctcagcagcagtaataacactgtaccttccaccctgacgtgctcactcactccagcacaatctgrgctgagcaccacacagattagacacgcctgtcagacacrcgagcacacgcagcacttctgtagccctgcaccgtgaggaccagagctctgtcctgctgctgtggggcagcggggctgctggcacacacctgaagcagggggagagatgcacagacatgttcttatggcgcttctcgaagcggttgtacttgcggatgtagtgcaggtagtcccggcggatcacaatggtgcgctgcatcttcatcttggtgaccacacctggggatgagagcagwcagaaggtgaygatgggtgtaagcattcagtggccrtcagcaaaacatgctggggatctgtttc

SEQ ID NO: 1614 - DNA, 600 bp, Chicken  19866894088231_3
gctcactcactccagcacaatctgrgctgagcaccacacagattagacacgcctgtcagacacrcgagcacacgcagcacttctgtagccctgcaccgtgaggaccagagctctgtcctgctgctgtggggcagcggggctgctggcacacacctgaagcagggggagagatgcacagacatgttcttatggcgcttctcgaagcggttgtacttgcggatgtagtgcaggtagtcccggcggatcacaatggtgcgctgcatcttcatcttggtgaccacacctggggatgagagcagwcagaaggtgaygatgggtgtaagcattcagtggccrtcagcaaaacatgctggggatctgtttctaactactggagaayggagactttcagaggcaccccagatcagcagtgcatagtatttaacacgtgaaggcagtgccccttaattccagtaacttcctagagccaaygctgcctgcactgcactgaaccagcacccacactgcagagaaatgtcaccaacaggtccttgtaccaggcatcagcaaagccatgtggcgttgtcgtcacagccccttcaccatgaggcttggaagacc

SEQ ID NO: 1615 - DNA, 600 bp, Chicken  19866894088231_4
ccagcacaatctgrgctgagcaccacacagattagacacgcctgtcagacacrcgagcacacgcagcacttctgtagccctgcaccgtgaggaccagagctctgtcctgctgctgtggggcagcggggctgctggcacacacctgaagcagggggagagatgcacagacatgttcttatggcgcttctcgaagcggttgtacttgcggatgtagtgcaggtagtcccggcggatcacaatggtgcgctgcatcttcatcttggtgaccacacctggggatgagagcagwcagaaggtgaygatgggtgtaagcattcagtggccrtcagcaaaacatgctggggatctgtttctaactactggagaayggagactttcagaggcaccccagatcagcagtgcatagtatttaacacgtgaaggcagtgccccttaattccagtaacttcctagagccaaygctgcctgcactgcactgaaccagcacccacactgcagagaaatgtcaccaacaggtccttgtaccaggcatcagcaaagccatgtggcgttgtcgtcacagccccttcaccatgaggcttggaagaccatcgtgagaat

SEQ ID NO: 1616 - DNA, 600 bp, Chicken  19866894088231_5
cacagattagacacgcctgtcagacacrcgagcacacgcagcacttctgtagccctgcaccgtgaggaccagagctctgtcctgctgctgtggggcagcggggctgctggcacacacctgaagcagggggagagatgcacagacatgttcttatggcgcttctcgaagcggttgtacttgcggatgtagtgcaggtagtcccggcggatcacaatggtgcgctgcatcttcatcttggtgaccacacctggggatgagagcagwcagaaggtgaygatgggtgtaagcattcagtggccrtcagcaaaacatgctggggatctgtttctaactactggagaayggagactttcagaggcaccccagatcagcagtgcatagtatttaacacgtgaaggcagtgccccttaattccagtaacttcctagagccaaygctgcctgcactgcactgaaccagcacccacactgcagagaaatgtcaccaacaggtccttgtaccaggcatcagcaaagccatgtggcgttgtcgtcacagccccttcaccatgaggcttggaagaccatcgtgagaatggcatcatgtgcagctcaaggaccg

SEQ ID NO: 1617 - DNA, 600 bp, Chicken  19866894088231_6
cttctgtagccctgcaccgtgaggaccagagctctgtcctgctgctgtggggcagcggggctgctggcacacacctgaagcagggggagagatgcacagacatgttcttatggcgcttctcgaagcggttgtacttgcggatgtagtgcaggtagtcccggcggatcacaatggtgcgctgcatcttcatcttggtgaccacacctggggatgagagcagwcagaaggtgaygatgggtgtaagcattcagtggccrtcagcaaaacatgctggggatctgtttctaactactggagaayggagactttcagaggcaccccagatcagcagtgcatagtatttaacacgtgaaggcagtgccccttaattccagtaacttcctagagccaaygctgcctgcactgcactgaaccagcacccacactgcagagaaatgtcaccaacaggtccttgtaccaggcatcagcaaagccatgtggcgttgtcgtcacagccccttcaccatgaggcttggaagaccatcgtgagaatggcatcatgtgcagctcaaggaccgctgccgcgcttcccagcagctccagatcaacacttatgggctc

SEQ ID NO: 1618 - DNA, 600 bp, Chicken  19866894088231_7
tgcacagacatgttcttatggcgcttctcgaagcggttgtacttgcggatgtagtgcaggtagtcccggcggatcacaatggtgcgctgcatcttcatcttggtgaccacacctggggatgagagcagwcagaaggtgaygatgggtgtaagcattcagtggccrtcagcaaaacatgctggggatctgtttctaactactggagaayggagactttcagaggcaccccagatcagcagtgcatagtatttaacacgtgaaggcagtgccccttaattccagtaacttcctagagccaaygctgcctgcactgcactgaaccagcacccacactgcagagaaatgtcaccaacaggtccttgtaccaggcatcagcaaagccatgtggcgttgtcgtcacagccccttcaccatgaggcttggaagaccatcgtgagaatggcatcatgtgcagctcaaggaccgctgccgcgcttcccagcagctccagatcaacacttatgggctctgctgctgcttgaaggtgctgcacaactcacctgagaggattcggccacggatggagacattaccagtgaaggggcacttcttgtcgatgta

SEQ ID NO: 1619 - DNA, 600 bp, Chicken  19866894088233_1
acctgcaaaaagagaattgaatgctaataaaaacttatcaacgctacatttcacattgtatagtcactgaatttggtattttctgagttggttacactagattactttatagtactttgtgattgagcagggagcatgactttttttgaataatttcatttccacggcagggtgacttaaattagtgtctgacatccttctaatacgcttagaaatctttggaacaatagatctgaaatttgagcactttcattctggtagaataagagcacaggggtgaagttggatgggctggatacscaagcattgttctcttgaaaacttatcgaaggtagatcttatcatgtgtgtgaacactgcatatgaatatcagtggatcacatggagaagttatggcccagcagaaactgttgcacctcacagggacagaatgagtccaggacttcacccagtgaagtaatggaatgcatatacttaaatattagacactaacagtggaargatccaacttctgacctgactctctatgttgtaagatttcttttaaatagttattagacctattcaacagctttctttcaaaaacttgcaacctgatgc

SEQ ID NO: 1620 - DNA, 444 bp, Chicken  19866894088233_2
aatacgcttagaaatctttggaacaatagatctgaaatttgagcactttcattctggtagaataagagcacaggggtgaagttggatgggctggatacscaagcattgttctcttgaaaacttatcgaaggtagatcttatcatgtgtgtgaacactgcatatgaatatcagtggatcacatggagaagttatggcccagcagaaactgttgcacctcacagggacagaatgagtccaggacttcacccagtgaagtaatggaatgcatatacttaaatattagacactaacagtggaargatccaacttctgacctgactctctatgttgtaagatttcttttaaatagttattagacctattcaacagctttctttcaaaaacttgcaacctgatgctttacaatgcagagttttagaactctataaaagtataaaaaaaag

SEQ ID NO: 1621 - DNA, 600 bp, Chicken  19866894088236_1
gccctgcagtaaatggcttcatttctactcaaggggaaaatctgttttctgatcataccagagtgtaagattttacattcttcagagaaaaagcacagtgaggttttatgaggggtcagcctcttctatccccctgcacttggcacaaatgccattcacgctagtagtacatcttgttttgtgaaaagaatagcaggcagcgtgtcctgggtagcatgtttgtttgattgacggcaagtattttggatgctgtagttgccttgggacagaatgactgccctgccaatgggaaccttctcyrcrggtgtcaggaggaggtcttattgcctccctgctttccagcccttgcagctcatgtttggagctcgaggagttaaagcaatgcagtttctgtcctgccacactgggtttattctgcaggaccagaggagctgatagagcttggatataatgttagcttgcaggtttatccaacttcatggtcttaayctaagacaggggagctttaggttagatattaggaggaaatttttcacccagagggtggtggagcactgaacaggttgcccaaggaggctgtggatgccccatccctgcagg

SEQ ID NO: 1622 - DNA, 600 bp, Chicken  19866894088236_2
ccctgcagtaaatggcttcatttctactcaaggggaaaatctgttttctgatcataccagagtgtaagattttacattcttcagagaaaaagcacagtgaggttttatgaggggtcagcctcttctatccccctgcacttggcacaaatgccattcacgctagtagtacatcttgttttgtgaaaagaatagcaggcagcgtgtcctgggtagcatgtttgtttgattgacggcaagtattttggatgctgtagttgccttgggacagaatgactgccctgccaatgggaaccttctcyrcrggtgtcaggaggaggtcttattgcctccctgctttccagcccttgcagctcatgtttggagctcgaggagttaaagcaatgcagtttctgtcctgccacactgggtttattctgcaggaccagaggagctgatagagcttggatataatgttagcttgcaggtttatccaacttcatggtcttaayctaagacaggggagctttaggttagatattaggaggaaatttttcacccagagggtggtggagcactgaacaggttgcccaaggaggctgtggatgccccatccctgcaggc

SEQ ID NO: 1623 - DNA, 600 bp, Chicken  19866894088236_3
ctgcagtaaatggcttcatttctactcaaggggaaaatctgttttctgatcataccagagtgtaagattttacattcttcagagaaaaagcacagtgaggttttatgaggggtcagcctcttctatccccctgcacttggcacaaatgccattcacgctagtagtacatcttgttttgtgaaaagaatagcaggcagcgtgtcctgggtagcatgtttgtttgattgacggcaagtattttggatgctgtagttgccttgggacagaatgactgccctgccaatgggaaccttctcyrcrggtgtcaggaggaggtcttattgcctccctgctttccagcccttgcagctcatgtttggagctcgaggagttaaagcaatgcagtttctgtcctgccacactgggtttattctgcaggaccagaggagctgatagagcttggatataatgttagcttgcaggtttatccaacttcatggtcttaayctaagacaggggagctttaggttagatattaggaggaaatttttcacccagagggtggtggagcactgaacaggttgcccaaggaggctgtggatgccccatccctgcaggcat

SEQ ID NO: 1624 - DNA, 600 bp, Chicken  19866894088236_4
atagcaggcagcgtgtcctgggtagcatgtttgtttgattgacggcaagtattttggatgctgtagttgccttgggacagaatgactgccctgccaatgggaaccttctcyrcrggtgtcaggaggaggtcttattgcctccctgctttccagcccttgcagctcatgtttggagctcgaggagttaaagcaatgcagtttctgtcctgccacactgggtttattctgcaggaccagaggagctgatagagcttggatataatgttagcttgcaggtttatccaacttcatggtcttaayctaagacaggggagctttaggttagatattaggaggaaatttttcacccagagggtggtggagcactgaacaggttgcccaaggaggctgtggatgccccatccctgcaggcattcaaggccaggctggatgtggctctgggcagcctggtctgctggttggtgaccctgcacatagcagggtgggggggcagctgaaactagatgatcattgtggtccttttcaacccaggctgttctatgattctatgattcactggtgcccaaatttccattgaacccacctttaatttttgtcttt

SEQ ID NO: 1625 - DNA, 600 bp, Chicken  19866894088240_1
aagatgaggatttactgtaatcactacagcactgggcagtgagttaggttcgttcctgaactgtttcctaagagatgttaaccacctcagctggatgctctttgtagtcgtggtagaggtcagctctgtctctaagcacaaatcagaaaagtaaatctagtctaaacaattctctgtactgttccagaagcaattaaaggctttgtatctttctcccaggtgtgagcagacacttcccacagacagtatgcacagcaagagttcaaaaaacatcaactctgcagaagaaagtcaaaaaamcccactgctttgggcatggaagactgaactggacaaaacaggaacagctcctccaggcactgaccacagyctgtagttagaggaaagtggacaaaaaacgtttcaggctcaattcatcaaactccatcaggctctttcttrcaagggcaatactaacaggtaagatatccacttttagattctctattattttgctaggaataaaaatgcaatgtgctccatcagcataacaccttaattcatgatagagatactggtgtgcaggagactaaaagcattccttcatccctgtgcaatacc

SEQ ID NO: 1626 - DNA, 600 bp, Chicken  19866894088240_2
agagatgttaaccacctcagctggatgctctttgtagtcgtggtagaggtcagctctgtctctaagcacaaatcagaaaagtaaatctagtctaaacaattctctgtactgttccagaagcaattaaaggctttgtatctttctcccaggtgtgagcagacacttcccacagacagtatgcacagcaagagttcaaaaaacatcaactctgcagaagaaagtcaaaaaamcccactgctttgggcatggaagactgaactggacaaaacaggaacagctcctccaggcactgaccacagyctgtagttagaggaaagtggacaaaaaacgtttcaggctcaattcatcaaactccatcaggctctttcttrcaagggcaatactaacaggtaagatatccacttttagattctctattattttgctaggaataaaaatgcaatgtgctccatcagcataacaccttaattcatgatagagatactggtgtgcaggagactaaaagcattccttcatccctgtgcaatacctttgtagacaagcaatgacaggaaaataatacaacagaattgtaaagtgaatgctcatccattttgtaac

SEQ ID NO: 1627 - DNA, 600 bp, Chicken  19866894088240_3
atcagaaaagtaaatctagtctaaacaattctctgtactgttccagaagcaattaaaggctttgtatctttctcccaggtgtgagcagacacttcccacagacagtatgcacagcaagagttcaaaaaacatcaactctgcagaagaaagtcaaaaaamcccactgctttgggcatggaagactgaactggacaaaacaggaacagctcctccaggcactgaccacagyctgtagttagaggaaagtggacaaaaaacgtttcaggctcaattcatcaaactccatcaggctctttcttrcaagggcaatactaacaggtaagatatccacttttagattctctattattttgctaggaataaaaatgcaatgtgctccatcagcataacaccttaattcatgatagagatactggtgtgcaggagactaaaagcattccttcatccctgtgcaatacctttgtagacaagcaatgacaggaaaataatacaacagaattgtaaagtgaatgctcatccattttgtaacaagtatcctacgtacagagcatttggttgtttccttgttcgggagtctccaaaagtggaataataaacata

SEQ ID NO: 1628 - DNA, 600 bp, Chicken  19866894088243_1
catacatttggaaagccaaagggctgagcaagacatggagcttggcaaccacagccttgggactgaagggattggtagggaaaggtcacgagtgttatggggacagggtctggggtcgcttgcatcatgagaggggaatttttggtgccaagtcagggctacagggacagagagggaattccctggatttcaagagccaagatgactgagaagcataacaggacttcatttgaagagctgcttggctggctccagctccctcccaccctatgctgtgtgcagatgtcgctctgttcttgytgtcttgctcagagctggggctgctccccatctcctgtgcagagggcaaggtttttcctcatctctcagctcctccagtggaggaaaagggctcctgcagcacccctttggagttcagccctggccctactcggaggggatgccgggggagaaggaatcccactgctgcctgctgcagccccacatgcatcactttgggaaggaggcagccccacttcccaggcagccctctgccagaagcctttgatcaaggcacagctccctgtgtgctgctctgagcagagcccacgtttcctgtaa

SEQ ID NO: 1629 - DNA, 600 bp, Chicken  19866894088255_1
tgagcctgagtctttagagtgcagctgtactcttgttattaaatatcgcaaaaaaatgtatatgtatatatatctcaataattatcttctgcctaccactataaagatggattttgagctagattcatagaagttcaccccattatcaataagtgacgtagcaaattacactttctactaaatctgaatgacaggtgttctccaaattaaagcctcagagctatatacatatacctatttacgtatacaaatttacatacatttgtgaggggctgtgttagttaaggattaataattgartttacagccataatttataactgagattattctataaaagctgtttttccaaatttcttaggatatacgctcaggttcctggtattgaattcaccacaagaattctagttcctctcggtttatccctttgaaggatgatgagaaattttcagtaggcacctaaacaattggcctacatggtgtacttgaatttccaaaaagcattaaaatttccatcactagtgtttccttttaacattcagctggagataaaggaaaggtctcttttcttttaatttattaaaagaaaggaaacataga

SEQ ID NO: 1630 - DNA, 600 bp, Chicken  19866894088256_1
attctgacaactaaattcatttctcttgactgtttggctaacccgaagttggttactttatttccctgaacaatacattgttcccttcccttctggttcatctactaaaactgcaaattcttcaaggcagagactgtgtaaaacattccccctaccccccaccttttttttaaagttaattgaattttatttatttattcagttgaaataacagaagcttgcctaactcctcttttccagctttctgacttgtgcttgactgctaaagccctcccttactaaactgcaggcagtggaagrgagaaagagagtcctgttctttttttatttgtgccctcaaggttaaccaccctcatcactgagaatatggaaacttagattcacaaaataagcatggaaagaaacaatggaaattacctggtccaccagccctacacaaaacagagacaagcttaaggctaagtcaggcttctctgctttttttccagtcaaattccgaatttctcagaagattttataaactttttgttattgttttttgtttgtttttgctgttgttttctttctggagggggttcttaagtcttattttggcttatc

SEQ ID NO: 1631 - DNA, 600 bp, Chicken  19866894088257_1
aagtgcatacttgtaaaactctgtctcaacactccccccttactgtgagtctgtatgccagctggctcaccttccagcactgctcacagatgtccttgtctccccttacctgtttcctctaagcacactcagcttcttcacaaactactgggattaaatattcaccttgaaataggaaaaaatacagctaaaaatggcagagggaattaagaggggcacagcaatcacagtcttccttatctgattctggattaacaacttctgcagctattttatctgctctcctgcaggagtactcayggaaggatttcttatgccatcagtaaaaacattgtgctccaatatttaatttctgaccttatgtttcattctttaaccacaacatgacagctctgcgtattacaaaggaaaagcaaagatgcatataggttttgaacacatgcagaaatggctccatgcaggatcgaacctattagttctgccgtatctttgaggcctcttaattaattaatgccaaaaacrcaggyraayggacacactttcctcctgtaaacctgcctctgcaccagtagagtccacaaaattctgctcttagtgcga

SEQ ID NO: 1632 - DNA, 600 bp, Chicken  19866894088257_2
aatcacagtcttccttatctgattctggattaacaacttctgcagctattttatctgctctcctgcaggagtactcayggaaggatttcttatgccatcagtaaaaacattgtgctccaatatttaatttctgaccttatgtttcattctttaaccacaacatgacagctctgcgtattacaaaggaaaagcaaagatgcatataggttttgaacacatgcagaaatggctccatgcaggatcgaacctattagttctgccgtatctttgaggcctcttaattaattaatgccaaaaacrcaggyraayggacacactttcctcctgtaaacctgcctctgcaccagtagagtccacaaaattctgctcttagtgcgagggctcctaggaactcaaagcaggatcaagaagtgaaagttacagccttgatcctaagatcctaatgagctaagtgaattattgctacctaagcaaagcagctgtaagagctaatcctgagagtcttcacacacagcctcctccgtcttccagaatttagactaactcattgctgaattacattttcacatgtctagctttacagacagtatacattatgaa

SEQ ID NO: 1633 - DNA, 600 bp, Chicken  19866894088257_3
cagtcttccttatctgattctggattaacaacttctgcagctattttatctgctctcctgcaggagtactcayggaaggatttcttatgccatcagtaaaaacattgtgctccaatatttaatttctgaccttatgtttcattctttaaccacaacatgacagctctgcgtattacaaaggaaaagcaaagatgcatataggttttgaacacatgcagaaatggctccatgcaggatcgaacctattagttctgccgtatctttgaggcctcttaattaattaatgccaaaaacrcaggyraayggacacactttcctcctgtaaacctgcctctgcaccagtagagtccacaaaattctgctcttagtgcgagggctcctaggaactcaaagcaggatcaagaagtgaaagttacagccttgatcctaagatcctaatgagctaagtgaattattgctacctaagcaaagcagctgtaagagctaatcctgagagtcttcacacacagcctcctccgtcttccagaatttagactaactcattgctgaattacattttcacatgtctagctttacagacagtatacattatgaaggcca

SEQ ID NO: 1634 - DNA, 600 bp, Chicken  19866894088257_4
agtcttccttatctgattctggattaacaacttctgcagctattttatctgctctcctgcaggagtactcayggaaggatttcttatgccatcagtaaaaacattgtgctccaatatttaatttctgaccttatgtttcattctttaaccacaacatgacagctctgcgtattacaaaggaaaagcaaagatgcatataggttttgaacacatgcagaaatggctccatgcaggatcgaacctattagttctgccgtatctttgaggcctcttaattaattaatgccaaaaacrcaggyraayggacacactttcctcctgtaaacctgcctctgcaccagtagagtccacaaaattctgctcttagtgcgagggctcctaggaactcaaagcaggatcaagaagtgaaagttacagccttgatcctaagatcctaatgagctaagtgaattattgctacctaagcaaagcagctgtaagagctaatcctgagagtcttcacacacagcctcctccgtcttccagaatttagactaactcattgctgaattacattttcacatgtctagctttacagacagtatacattatgaaggccaa

SEQ ID NO: 1635 - DNA, 600 bp, Chicken  19866894088257_5
cttccttatctgattctggattaacaacttctgcagctattttatctgctctcctgcaggagtactcayggaaggatttcttatgccatcagtaaaaacattgtgctccaatatttaatttctgaccttatgtttcattctttaaccacaacatgacagctctgcgtattacaaaggaaaagcaaagatgcatataggttttgaacacatgcagaaatggctccatgcaggatcgaacctattagttctgccgtatctttgaggcctcttaattaattaatgccaaaaacrcaggyraayggacacactttcctcctgtaaacctgcctctgcaccagtagagtccacaaaattctgctcttagtgcgagggctcctaggaactcaaagcaggatcaagaagtgaaagttacagccttgatcctaagatcctaatgagctaagtgaattattgctacctaagcaaagcagctgtaagagctaatcctgagagtcttcacacacagcctcctccgtcttccagaatttagactaactcattgctgaattacattttcacatgtctagctttacagacagtatacattatgaaggccaacct

SEQ ID NO: 1636 - DNA, 600 bp, Chicken  19866894088264_1
gaagaaaaacacctaggaagtttgtaatacatttccattgcactgcatattcttgatttaaacagagaacatcagtttccattcagaatgcataattttaaacttcctaaaatactgggattttgtactgcacatataatattaaaggttgaatgcaaaaatagttcatttaatcgaatccttatttggagtgcatgattcatttagaaaccattaaaaaatgacaaaaaaataaagtctaaaattactatcatcttcatacatcacttaacagtattagcatacagtcagttcttttcygtacatcagatgagttcatgtttcttcgttccttatatgctttgtcacacaagtggaacgctaaataaatcaaccacttatttgttttactgcataaatctcacagcaataaaatggaattgatcacatcaagaagtttaagatgggtttcagtgaattcttgagatgctgtatattaatcattcaagccaaaattttatttcctcaagggttgtatgtaattgatcttttcccaacattttcctccttcaatacatttttaagtgttaagtattcttatatttgtctgagattataaaa

SEQ ID NO: 1637 - DNA, 600 bp, Chicken  19866894088264_2
gatgagttcatgtttcttcgttccttatatgctttgtcacacaagtggaacgctaaataaatcaaccacttatttgttttactgcataaatctcacagcaataaaatggaattgatcacatcaagaagtttaagatgggtttcagtgaattcttgagatgctgtatattaatcattcaagccaaaattttatttcctcaagggttgtatgtaattgatcttttcccaacattttcctccttcaatacatttttaagtgttaagtattcttatatttgtctgagattataaaaaccattawttttccctagtgctgtgcattacaaaacaaatcaagaaaatctcttaattacttagaaaataaaatacaacaaaattactgggaaatttaaaatagatgaataaatacatcttcagcaacaactaaggcattcttaatttttgcttaaatcaaaatggatgacacagatagagggtccatgaaaatggaaagccatgctggatgtagaatataatgctatcccaatataaggtttaaaagaatgaaaatcaagatagacaactcatccttttcacctaatttatactgtccacaaaataa

SEQ ID NO: 1638 - DNA, 600 bp, Chicken  19866894088264_3
tactattgaaagtaaatcctgtcagattaaggatatagtaactgtttttagtttttattttttggcaacattttgccttgttactatcattttcctgataccaccatgtattacgtaaatacaaaataaagcaaatggatgacactaactgatttcaatagtaaagccagtaccaatctgttaactcttttatgtcaaataataaactgttcatttatagaagtaaagatgtgttttcattatagactatgttagcagagctatgtagttcactcttccccttttttgaactacatatakatgttgctccaaaactaatgcctccyaaattttccatgraaactacagtagatacaaaaagtgcaataacrctttttaatagagcaaattctcagctacaaaacactattattcaacatagccaccaccataagctatgcatttgtaccagaggtaaacaagacctggatgccgtgcttgtaaaaatctgcaccagctgtgcacagccatccagaaagtkacttgtctttcatgtctctgttgtcaccgctgaaacacatcacccactgcctcactgtgctaacaaccactgtttggtct

SEQ ID NO: 1639 - DNA, 600 bp, Chicken  19866894088264_4
ttaaggatatagtaactgtttttagtttttattttttggcaacattttgccttgttactatcattttcctgataccaccatgtattacgtaaatacaaaataaagcaaatggatgacactaactgatttcaatagtaaagccagtaccaatctgttaactcttttatgtcaaataataaactgttcatttatagaagtaaagatgtgttttcattatagactatgttagcagagctatgtagttcactcttccccttttttgaactacatatakatgttgctccaaaactaatgcctccyaaattttccatgraaactacagtagatacaaaaagtgcaataacrctttttaatagagcaaattctcagctacaaaacactattattcaacatagccaccaccataagctatgcatttgtaccagaggtaaacaagacctggatgccgtgcttgtaaaaatctgcaccagctgtgcacagccatccagaaagtkacttgtctttcatgtctctgttgtcaccgctgaaacacatcacccactgcctcactgtgctaacaaccactgtttggtcttcataaacattcagcaaacatcaatg

SEQ ID NO: 1640 - DNA, 600 bp, Chicken  19866894088264_5
aactgtttttagtttttattttttggcaacattttgccttgttactatcattttcctgataccaccatgtattacgtaaatacaaaataaagcaaatggatgacactaactgatttcaatagtaaagccagtaccaatctgttaactcttttatgtcaaataataaactgttcatttatagaagtaaagatgtgttttcattatagactatgttagcagagctatgtagttcactcttccccttttttgaactacatatakatgttgctccaaaactaatgcctccyaaattttccatgraaactacagtagatacaaaaagtgcaataacrctttttaatagagcaaattctcagctacaaaacactattattcaacatagccaccaccataagctatgcatttgtaccagaggtaaacaagacctggatgccgtgcttgtaaaaatctgcaccagctgtgcacagccatccagaaagtkacttgtctttcatgtctctgttgtcaccgctgaaacacatcacccactgcctcactgtgctaacaaccactgtttggtcttcataaacattcagcaaacatcaatgaatgtcaatgaat

SEQ ID NO: 1641 - DNA, 600 bp, Chicken  19866894088264_6
tttgccttgttactatcattttcctgataccaccatgtattacgtaaatacaaaataaagcaaatggatgacactaactgatttcaatagtaaagccagtaccaatctgttaactcttttatgtcaaataataaactgttcatttatagaagtaaagatgtgttttcattatagactatgttagcagagctatgtagttcactcttccccttttttgaactacatatakatgttgctccaaaactaatgcctccyaaattttccatgraaactacagtagatacaaaaagtgcaataacrctttttaatagagcaaattctcagctacaaaacactattattcaacatagccaccaccataagctatgcatttgtaccagaggtaaacaagacctggatgccgtgcttgtaaaaatctgcaccagctgtgcacagccatccagaaagtkacttgtctttcatgtctctgttgtcaccgctgaaacacatcacccactgcctcactgtgctaacaaccactgtttggtcttcataaacattcagcaaacatcaatgaatgtcaatgaatttgcaatttttttcacatggaagatttcagtt

SEQ ID NO: 1642 - DNA, 600 bp, Chicken  19866894088264_7
aagtaaagatgtgttttcattatagactatgttagcagagctatgtagttcactcttccccttttttgaactacatatakatgttgctccaaaactaatgcctccyaaattttccatgraaactacagtagatacaaaaagtgcaataacrctttttaatagagcaaattctcagctacaaaacactattattcaacatagccaccaccataagctatgcatttgtaccagaggtaaacaagacctggatgccgtgcttgtaaaaatctgcaccagctgtgcacagccatccagaaagtkacttgtctttcatgtctctgttgtcaccgctgaaacacatcacccactgcctcactgtgctaacaaccactgtttggtcttcataaacattcagcaaacatcaatgaatgtcaatgaatttgcaatttttttcacatggaagatttcagttgtacaacttttttttatacacacttccatgtcagataccattttgtcaggctgcccctctgctgccatctgttgcatggcaacaaaatgtaacaaaatattagcgggaatactgtcacactatcaacatccacctctgagatcacagac

SEQ ID NO: 1643 - DNA, 599 bp, Chicken  19866894088272_1
  misc_feature (1)..(108): n is any nucleotide
nnnnnnnnnnnnnnnnnnnnnnnnnnnnnnnnnnnnnnnnnnnnnnnnnnnnnnnnnnnnnnnnnnnnnnnnnnnnnnnnnnnnnnnnnnnnnnnnnnnnnnnnnnnntatagggtaacgatgaaataagcccctaataatttcgcttggctacgtctctctgatttcattgttgtcgggctgcagcacgctactgcaatctaaagtaatttgagaaaaagagtatccttaagaagaagcaaatcagcattgggaagtaataataaagttaagaaagaagtggtcatgcttctgagcttygtgttttctttgcacgacagatgctatcggcaaacatgatcatgatttaagttacatttattctaccaaagtgaaatgcatttctctttaataattctattcccatttctaatcctgaaaggttcttcagtttattatttctctgtctgatagagaaatatataatcaaatccatgctgtagcattttcattcagccttgatacatcatactgtattctattctacaactgatagatagaattcacttactgaactcattttttttcagattctgatattaggacaagggggaatggtt

SEQ ID NO: 1644 - DNA, 599 bp, Chicken  19866894088281_1
  misc_feature (1)..(154): n is any nucleotide
nnnnnnnnnnnnnnnnnnnnnnnnnnnnnnnnnnnnnnnnnnnnnnnnnnnnnnnnnnnnnnnnnnnnnnnnnnnnnnnnnnnnnnnnnnnnnnnnnnnnnnnnnnnnnnnnnnnnnnnnnnnnnnnnnnnnnnnnnnnnnnnnnnnnnnnnnnctgatggaagtcgacccaccagcagcacagcctgccagccccccactgtgggcagcccgcccagcactgtgggcacagcggcggtccaggcgcccatctccttaccccctgtgctgcatctgcacccagaattaactcagaggccrttaattaacagctataacagcggagaactctcccgccagcattgctcaagtatcaacatctcctcctgagcaatacagggcctcttcggagatcagtcctgcaggagctgtgtgccggtgctggacttcctgattctgtagctccttctggcctttagttttgtcttagwgttagatgcggattactttaggattttaggaattttaggatttaaaagccttaagttctgtgttggtgttagacacagacacgggttactttaggattttagtggtagatgtcaccacccgactggaac

SEQ ID NO: 1645 - DNA, 600 bp, Chicken  19866894088281_2
caccagcagcacagcctgccagccccccactgtgggcagcccgcccagcactgtgggcacagcggcggtccaggcgcccatctccttaccccctgtgctgcatctgcacccagaattaactcagaggccrttaattaacagctataacagcggagaactctcccgccagcattgctcaagtatcaacatctcctcctgagcaatacagggcctcttcggagatcagtcctgcaggagctgtgtgccggtgctggacttcctgattctgtagctccttctggcctttagttttgtcttagwgttagatgcggattactttaggattttaggaattttaggatttaaaagccttaagttctgtgttggtgttagacacagacacgggttactttaggattttagtggtagatgtcaccacccgactggaacgtgcagacagcacagtcttgcactcaggtgcaaggaatgcaccgggcaggaatcagcagcagcagaaacaagaaggacagtaattgtaacagagttctgttggcatgtctggtgtattgcatttcccttttgtgacatccttgagcaatcctggcaggagagttctccctt

SEQ ID NO: 1646 - DNA, 600 bp, Chicken  19866894088281_3
gggcaatattggccccactcacaacttcgagccccctcactacgatggcatcgagtgcctggccatccagggagacgtcctcttcagtggctccagggacaacggcattaagaagtgggatctggagcagcaggaacttctccaggtcaggaggggagcatacggggtaacgcggagcagagcaggattgctgctgtgggtctgggggaaggctgagggacctggtccaggtcctgctgtcctgggagggcagccagttcctggggatctggcagtgtgtgtgtgccaagtggctctgcrtgcctataggtgcgtactgaagggcacccagaactgccagttccccctgggacgtgggcttgcagcatcagttgctgaaaataggatccaggccctaagtcttgagtccagctcggtggttcggatcgaccccgggggcagcggtgatgatctgcagctgagtgcgtgaggctgactgtgatctctgctctgcccmcatacctacagcaaatcccaaatgcgcacaaagactgggtttgtgccctggccttcatccccggccgccccatggtgctgagtgcctgccgaggaggtgtgatc

SEQ ID NO: 1647 - DNA, 600 bp, Chicken  19866894088281_4
tgggtctgggggaaggctgagggacctggtccaggtcctgctgtcctgggagggcagccagttcctggggatctggcagtgtgtgtgtgccaagtggctctgcrtgcctataggtgcgtactgaagggcacccagaactgccagttccccctgggacgtgggcttgcagcatcagttgctgaaaataggatccaggccctaagtcttgagtccagctcggtggttcggatcgaccccgggggcagcggtgatgatctgcagctgagtgcgtgaggctgactgtgatctctgctctgcccmcatacctacagcaaatcccaaatgcgcacaaagactgggtttgtgccctggccttcatccccggccgccccatggtgctgagtgcctgccgaggaggtgtgatcaaagtctggaacgtggataacttcaccccggttggggagatcaaggggcaygacagccccatcaaygccatctgcaccaactccaagcacatcttcactgcctccaggtgagcctcaggcttggtgctccccagagcccccgggaagtggggagggccctgggttgacctgtcatccctgggcctgggtgggtttg

SEQ ID NO: 1648 - DNA, 600 bp, Chicken  19866894088281_5
acgtgggcttgcagcatcagttgctgaaaataggatccaggccctaagtcttgagtccagctcggtggttcggatcgaccccgggggcagcggtgatgatctgcagctgagtgcgtgaggctgactgtgatctctgctctgcccmcatacctacagcaaatcccaaatgcgcacaaagactgggtttgtgccctggccttcatccccggccgccccatggtgctgagtgcctgccgaggaggtgtgatcaaagtctggaacgtggataacttcaccccggttggggagatcaaggggcaygacagccccatcaaygccatctgcaccaactccaagcacatcttcactgcctccaggtgagcctcaggcttggtgctccccagagcccccgggaagtggggagggccctgggttgacctgtcatccctgggcctgggtgggtttgcactgagcggggcagggagcctggagggagaaaagggcggggggggatcttgcagctttctggtccctccgtgcctccatctcatcttgctgtcttagtctgtcccctgcccgctctctgggatatccccacgcagggacccctcttccctgggg

SEQ ID NO: 1649 - DNA, 600 bp, Chicken  19866894088281_6
atcagttgctgaaaataggatccaggccctaagtcttgagtccagctcggtggttcggatcgaccccgggggcagcggtgatgatctgcagctgagtgcgtgaggctgactgtgatctctgctctgcccmcatacctacagcaaatcccaaatgcgcacaaagactgggtttgtgccctggccttcatccccggccgccccatggtgctgagtgcctgccgaggaggtgtgatcaaagtctggaacgtggataacttcaccccggttggggagatcaaggggcaygacagccccatcaaygccatctgcaccaactccaagcacatcttcactgcctccaggtgagcctcaggcttggtgctccccagagcccccgggaagtggggagggccctgggttgacctgtcatccctgggcctgggtgggtttgcactgagcggggcagggagcctggagggagaaaagggcggggggggatcttgcagctttctggtccctccgtgcctccatctcatcttgctgtcttagtctgtcccctgcccgctctctgggatatccccacgcagggacccctcttccctggggctgggcgtcccctgc

SEQ ID NO: 1650 - DNA, 600 bp, Chicken  19866894088283_1
tctgcaagcaaaaaagcatcaaatgaaacagcaagccaaagcacaatcaagtgagaggagaaaataaaattacatctcatttgccaaaggctaactgcaggcacacaatcgttaaacatttcttagctattggaatcagtatttcttcaggcagaaaatacaacgagaagaaaaagtacaatcattaattctatctttgaattaaagcaagcatttcacaagtaaaaagtgggataaagaaaccccctgaaagggaggatctgaagagactacagtactggcagagcagtccttgaacamacacactatatgaggcagatcttcattttcaaaggaagccatgcaaggcctccccatgtcccagtgctcctcatgagtcaggtcagaagctcccaggcacagtcagcaaggcactgccagtagcttgcagctgctccagcaaacccattacccaaactatcacatcttagctttaagacattcaacacggaacagtgatgtttttcctcaaactctgaactcaaaaagttgctacatcatcatctcgggtgttcattttccaagttagattcacttgcactcaaaagcagagggaataaa

SEQ ID NO: 1651 - DNA, 600 bp, Chicken  19866894088283_2
catgtcccagtgctcctcatgagtcaggtcagaagctcccaggcacagtcagcaaggcactgccagtagcttgcagctgctccagcaaacccattacccaaactatcacatcttagctttaagacattcaacacggaacagtgatgtttttcctcaaactctgaactcaaaaagttgctacatcatcatctcgggtgttcattttccaagttagattcacttgcactcaaaagcagagggaataaacatgcttgcttattttatcctcgacttcagcactaccttgatctaaattcaaaygatagcacttcagcctaacaaaacctttgttccaaaacaaaggtgtratgcttcaaatgaaggtcataactatttgcctgtctctaacctcaattcaatattttctccatgcgatttgaaaagatcagaacaaaggttctagggtatatcattaaaaaaaaatgccagacatcacaaacagacatctgccctttacaaaacctacctaatcttcacttgtgtacaataatatattaaggaattaatactctatgatagccaaaacataatcccaccttaattgtttgactataatctgaa

SEQ ID NO: 1652 - DNA, 600 bp, Chicken  19866894088283_3
gtcagcaaggcactgccagtagcttgcagctgctccagcaaacccattacccaaactatcacatcttagctttaagacattcaacacggaacagtgatgtttttcctcaaactctgaactcaaaaagttgctacatcatcatctcgggtgttcattttccaagttagattcacttgcactcaaaagcagagggaataaacatgcttgcttattttatcctcgacttcagcactaccttgatctaaattcaaaygatagcacttcagcctaacaaaacctttgttccaaaacaaaggtgtratgcttcaaatgaaggtcataactatttgcctgtctctaacctcaattcaatattttctccatgcgatttgaaaagatcagaacaaaggttctagggtatatcattaaaaaaaaatgccagacatcacaaacagacatctgccctttacaaaacctacctaatcttcacttgtgtacaataatatattaaggaattaatactctatgatagccaaaacataatcccaccttaattgtttgactataatctgaaaatatttgcccagaaccaaaagcaaaggaaagaataaacgaaaattg

SEQ ID NO: 1653 - DNA, 600 bp, Chicken  19866894088283_4
caaactctgaactcaaaaagttgctacatcatcatctcgggtgttcattttccaagttagattcacttgcactcaaaagcagagggaataaacatgcttgcttattttatcctcgacttcagcactaccttgatctaaattcaaaygatagcacttcagcctaacaaaacctttgttccaaaacaaaggtgtratgcttcaaatgaaggtcataactatttgcctgtctctaacctcaattcaatattttctccatgcgatttgaaaagatcagaacaaaggttctagggtatatcattraaaaaaaatgccagacatcacaaacagacatctgccctttacaaaacctacctaatcttcacttgtgtacaataatatattaaggaattaatactctatgatagccaaaacataatcccaccttaattgtttgactataatctgaaaatatttgcccagaaccaaaagcaaaggaaagaataaacgaaaattggattcattctttccctgaaaaagtttacttaaatgtcatcaaaattgcttagtgcagtgaagataaaacaccaactcctcccaaattagtaaaacaatcaagtatca

SEQ ID NO: 1654 - DNA, 600 bp, Chicken  19866894088283_5
aaacctacctaatcttcacttgtgtacaataatatattaaggaattaatactctatgatagccaaaacataatcccaccttaattgtttgactataatctgaaaatatttgcccagaaccaaaagcaaaggaaagaataaacgaaaattggattcattctttccctgaaaaagtttacttaaatgtcatcaaaattgcttagtgcagtgaagataaaacaccaactcctcccaaattagtaaaacaatcaagtatcacaattttgagtaattagcctcattaacattccttagagactgrtytgattcagtcaaacacatgctttcttcttgcaaagcttgtttttttcaccccaaaggaaaactctaaacaagtaccagagatagctttaagatgctaaaatggagcattcactaacttccacccagagagtaaaagggtaccattaatatgcaatagacttcaattaagcccagattaaaaaacaacatctgacaaaaaccttatgcatacgtgatagacactgtattgaactcgggagactaaagaaagggaagctgtcatggagcaagcaatcacattatatccagccctgccaaa

SEQ ID NO: 1655 - DNA, 600 bp, Chicken  19866894088283_6
acctacctaatcttcacttgtgtacaataatatattaaggaattaatactctatgatagccaaaacataatcccaccttaattgtttgactataatctgaaaatatttgcccagaaccaaaagcaaaggaaagaataaacgaaaattggattcattctttccctgaaaaagtttacttaaatgtcatcaaaattgcttagtgcagtgaagataaaacaccaactcctcccaaattagtaaaacaatcaagtatcacaattttgagtaattagcctcattaacattccttagagactgrtytgattcagtcaaacacatgctttcttcttgcaaagcttgtttttttcaccccaaaggaaaactctaaacaagtaccagagatagctttaagatgctaaaatggagcattcactaacttccacccagagagtaaaagggtaccattaatatgcaatagacttcaattaagcccagattaaaaaacaacatctgacaaaaaccttatgcatacgtgatagacactgtattgaactcgggagactaaagaaagggaagctgtcatggagcaagcaatcacattatatccagccctgccaaaaa

SEQ ID NO: 1656 - DNA, 599 bp, Chicken  19866894088284_1
  misc_feature (1)..(36): n is any nucleotide
nnnnnnnnnnnnnnnnnnnnnnnnnnnnnnnnnnnntagtacagaccctggtggtaatacataggcatctgccacctctggtggacaccaagccaaggagtgctactccttgaacccagcactcaagacaaatatttttaccactccaacagctaaatcatctagccactctccttcagcttcagaacaagtatgcagtgacagattgtatctgaagtctaaataaatcaaggcatatgacatctagtgctctctccttatccacatagtcagacctttcatcacaaagggcaattgggytggataagcctgatttgtgctttaccaagctgatcattccaatttcttgaaacagaatttattggatctgataccagcctttggctttccattaacacagttctgagaggcagcaaatttaatcagtgacccattgcaaagagaatgcctggaaacctcacctctcttctccaaaagcatttgtatttgtctctatcccatgtggttatcaattgaactaattaagacttttacacttctgaagtctcttctgttgtctgtgcagacttattaagtaccaccaaaygtaagctttcaaa

SEQ ID NO: 1657 - DNA, 600 bp, Chicken  19866894088284_2
aagggcaattgggytggataagcctgatttgtgctttaccaagctgatcattccaatttcttgaaacagaatttattggatctgataccagcctttggctttccattaacacagttctgagaggcagcaaatttaatcagtgacccattgcaaagagaatgcctggaaacctcacctctcttctccaaaagcatttgtatttgtctctatcccatgtggttatcaattgaactaattaagacttttacacttctgaagtctcttctgttgtctgtgcagacttattaagtaccaccaaaygtaagctttcaaactcatgagaagttacagatgaaggtgttcactactgttaaaataagcactataacaacttcaggaatatagtttcttaacaccctaaaaacactgggaaaggtcatagcacataagagaatgagaatttaatgaatctcactgacagcaccctttccggtccatttcctggatgcatgtgatcgccatttcatttcagactctgacagcaacatatggcgacgtacatgaaagaggcaaacatcctcctttcccacctttctcctgcaccagtgattcaggccccga

SEQ ID NO: 1658 - DNA, 512 bp, Chicken  19866894088285_1
tattaatcattaagatccttttatgagaaaatatccagaagcaggactcagccacaagacaaacccacatgaaactttagtcccttacttccagctctcatacattgccactcatcattcctttaaggtactgtgtttcttaacaccaagacattggaaagtgtgtaggtgaaaagaaatttaaaacaacaacaaaaaatctcatttaaaaagtatctttgtctttcgtttggagttaaatgcctttccacagtggactggaggcttaaaacatttcttctgagatttttatcaagatgycatgttaatttacagcactaaatttttatatctgtctgcctgttggtttgtctaggtgtaatagtcatttatgtgcctacatgaaatgttgcaatacttgtgtttccactaccaaatctaccaccataaaatccagcgagtattgacaatcctagatagaaagttcaaaaagtcagaattctgtcaaaaagtgagatatgagctctcacgaa

SEQ ID NO: 1659 - DNA, 600 bp, Chicken  19866894088286_1
aacactgcaaaataattatgaggcatcaactgcattttaaattagtagaaagactggcaagcatgcagtgtaagttgtttaaaacagaatcttgtgaacacaagacaacttactctgcgtcatcagacacagcagttctggggccgaatctacaagaccaaatataaaattagagcgttgataaacacattatatattaattgcaactggacccataagatctggttaacattcccttgaacatccaacctgtcctggtaaagcaaaccaaaagagaacgaaccataatgttcagaaatkatctgttcaacacacagcacttaccttattaatcatccgaaggtcaaactgccccaaaacatcatccatccctccctgcctaatacccccattayaaaaatgtgggtgtagaaaatagttattgaaaatagacaacatattgacatttaaattaaagtgccacatatgtgatgaatggagacaaaacttaatggttacattgcacagcagtgctcaaatcaacattaccataggatttcctgtttttgtttgttttggtgcagctgaaaaaaggtaccggcaaaacacaagtcagtgtca

SEQ ID NO: 1660 - DNA, 600 bp, Chicken  19866894088286_2
gaacacaagacaacttactctgcgtcatcagacacagcagttctggggccgaatctacaagaccaaatataaaattagagcgttgataaacacattatatattaattgcaactggacccataagatctggttaacattcccttgaacatccaacctgtcctggtaaagcaaaccaaaagagaacgaaccataatgttcagaaatkatctgttcaacacacagcacttaccttattaatcatccgaaggtcaaactgccccaaaacatcatccatccctccctgcctaatacccccattayaaaaatgtgggtgtagaaaatagttattgaaaatagacaacatattgacatttaaattaaagtgccacatatgtgatgaatggagacaaaacttaatggttacattgcacagcagtgctcaaatcaacattaccataggatttcctgtttttgtttgttttggtgcagctgaaaaaaggtaccggcaaaacacaagtcagtgtcattcactggagtgactgtcttgtttagagtcatgcaaatgacgtgtccgtatctgggatttatcataaaacaacatcaaatacaaaagtygacact

SEQ ID NO: 1661 - DNA, 600 bp, Chicken  19866894088286_3
cattayaaaaatgtgggtgtagaaaatagttattgaaaatagacaacatattgacatttaaattaaagtgccacatatgtgatgaatggagacaaaacttaatggttacattgcacagcagtgctcaaatcaacattaccataggatttcctgtttttgtttgttttggtgcagctgaaaaaaggtaccggcaaaacacaagtcagtgtcattcactggagtgactgtcttgtttagagtcatgcaaatgacgtgtccgtatctgggatttatcataaaacaacatcaaatacaaaagtygacactgcaacattttctgatcacaaagaagcaagacatgcatctctagagatgctcagcagagtccagctgaacctctgctactcataagcgatttctgtatgcgcgtaaatattgcaatcaaatatttgctctcattagttgtagaaaagaaaacgttacacaaatactctttttgtttcttagaaatgtgtacagacatacagtattttagtctggactgaaaacacaccaggcaatgcaaaatcggaattctgaagtgcacacacagtagaagagcaaaggggtgatcaagctgcg

SEQ ID NO: 1662 - DNA, 600 bp, Chicken  19866894088287_1
aggctctcaagcttattgcctggccgctagttctttacttaactctgccataatggctttaatagcccgggagggagctgaggtgaaagtcctattaaaaaatgtatttccgaatttaattgaggctccatctgtggggaaagacagaggagaggtcgctccacaagagagccatgaaaaaagagctctctcctcctccacctccgccttccctccttgcttctatcctcgctggtttgtgcctggcagcaaatctcaccccaactggtggccatggggacacgggacatccatgggatytcctaggggagaccaccagtccactgggaycacctgcagcatagggagggtgcaccccagtttgtgatgcatgtcttcttggaagtcccctttgcaattgtccatgggaaccaccagcatgtgcaggcagctcagccatccataccagggagcagcacctcattgcacccaggctggccagaggtatcaataggtggtttgatctgtctctcctgccatccatctcaccttcatgtgtcccttctgtaatccatcagtctgtctaacagtatccactgacttctatacacctgggcacat

SEQ ID NO: 1663 - DNA, 600 bp, Chicken  19866894088287_2
ttctttacttaactctgccataatggctttaatagcccgggagggagctgaggtgaaagtcctattaaaaaatgtatttccgaatttaattgaggctccatctgtggggaaagacagaggagaggtcgctccacaagagagccatgaaaaaagagctctctcctcctccacctccgccttccctccttgcttctatcctcgctggtttgtgcctggcagcaaatctcaccccaactggtggccatggggacacgggacatccatgggatytcctaggggagaccaccagtccactgggaycacctgcagcatagggagggtgcaccccagtttgtgatgcatgtcttcttggaagtcccctttgcaattgtccatgggaaccaccagcatgtgcaggcagctcagccatccataccagggagcagcacctcattgcacccaggctggccagaggtatcaataggtggtttgatctgtctctcctgccatccatctcaccttcatgtgtcccttctgtaatccatcagtctgtctaacagtatccactgacttctatacacctgggcacatatatatgtatgcatagaatcatagaattgt

SEQ ID NO: 1664 - DNA, 543 bp, Chicken  19866894088290_1
cgggcagaaattggttgcagaattagtcctgccagctgtattcccaacaaagcaaaaattgtctcaggagcgaggctaggggatcgcacacttaaaccttacctgtcataatgttccctagagctgatactacgatatttactgtattggcatgctgtcttttctgttttactgttgcacgattgcattataatgtgtactgttgacaggactaagctcaggtcaaactgtgtgcagaggtaactatggccttgatggctgcatggtgaatccagaggaaattactggatgccaaacgasttattccatgcttatttcagattaaataagactcaaatctggccttcgaattgtgttatttctctaattcagctgggtcatatttataaactaatgcagtggtcagcgtgctccaataatgccagcactcagtcccagcacttgcaaaayattggatgtatatatcrgcacttctcacgtttgctgactgcgggacaaataggtttcgtattgggacatcaaaatctgcttcagcaactggat

SEQ ID NO: 1665 - DNA, 393 bp, Chicken  19866894088290_2
catgctgtcttttctgttttactgttgcacgattgcattataatgtgtactgttgacaggactaagctcaggtcaaactgtgtgcagaggtaactatggccttgatggctgcatggtgaatccagaggaaattactggatgccaaacgasttattccatgcttatttcagattaaataagactcaaatctggccttcgaattgtgttatttctctaattcagctgggtcatatttataaactaatgcagtggtcagcgtgctccaataatgccagcactcagtcccagcacttgcaaaayattggatgtatatatcrgcacttctcacgtttgctgactgcgggacaaataggtttcgtattgggacatcaaaatctgcttcagcaactggat

SEQ ID NO: 1666 - DNA, 376 bp, Chicken  19866894088290_3
tttactgttgcacgattgcattataatgtgtactgttgacaggactaagctcaggtcaaactgtgtgcagaggtaactatggccttgatggctgcatggtgaatccagaggaaattactggatgccaaacgasttattccatgcttatttcagattaaataagactcaaatctggccttcgaattgtgttatttctctaattcagctgggtcatatttataaactaatgcagtggtcagcgtgctccaataatgccagcactcagtcccagcacttgcaaaayattggatgtatatatcrgcacttctcacgtttgctgactgcgggacaaataggtttcgtattgggacatcaaaatctgcttcagcaactggat

SEQ ID NO: 1667 - DNA, 600 bp, Chicken  19866894088292_1
cgggcagaaattggttgcagaattagtcctgccagctgtattcccaacaaagcaaaaattgtctcaggagcgaggctaggggatcgcacacttaaaccttacctgtcataatgttccctagagctgatactacgatatttactgtattggcatgctgtcttttctgttttactgttgcacgattgcattataatgtgtactgttgacaggactaagctcaggtcaaactgtgtgcagaggtaactatggccttgatggctgcatggtgaatccagaggaaattactggatgccaaacgasttattccatgcttatttcagattaaataagactcaaatctggccttcgaattgtgttatttctctaattcagctgggtcatatttataaactaatgcagtggtcagcgtgctccaataatgccagcactcagtcccagcacttgcaaaayattggatgtatatatcggcacttctcacgtttgctgactgygggacaaataggtttcgtattgggacatcaaaatctgcttcagcaactggatgcatgacaaagccatgttataaacggggtactgattatagcattgaaacatgtcgct

SEQ ID NO: 1668 - DNA, 600 bp, Chicken  19866894088292_2
catgctgtcttttctgttttactgttgcacgattgcattataatgtgtactgttgacaggactaagctcaggtcaaactgtgtgcagaggtaactatggccttgatggctgcatggtgaatccagaggaaattactggatgccaaacgasttattccatgcttatttcagattaaataagactcaaatctggccttcgaattgtgttatttctctaattcagctgggtcatatttataaactaatgcagtggtcagcgtgctccaataatgccagcactcagtcccagcacttgcaaaayattggatgtatatatcggcacttctcacgtttgctgactgygggacaaataggtttcgtattgggacatcaaaatctgcttcagcaactggatgcatgacaaagccatgttataaacggggtactgattatagcattgaaacatgtcgcttcagcacgtggtagatttggatgtgtaagtagataaacttatggttggtctaaggcttgatttcagcatggagaaggttgtcagtgtatttgcgctaattaaggaaaggcacgggacgctcctttacactgtaggtacagccagagttca

SEQ ID NO: 1669 - DNA, 600 bp, Chicken  19866894088292_3
aatgtgtactgttgacaggactaagctcaggtcaaactgtgtgcagaggtaactatggccttgatggctgcatggtgaatccagaggaaattactggatgccaaacgasttattccatgcttatttcagattaaataagactcaaatctggccttcgaattgtgttatttctctaattcagctgggtcatatttataaactaatgcagtggtcagcgtgctccaataatgccagcactcagtcccagcacttgcaaaayattggatgtatatatcggcacttctcacgtttgctgactgygggacaaataggtttcgtattgggacatcaaaatctgcttcagcaactggatgcatgacaaagccatgttataaacggggtactgattatagcattgaaacatgtcgcttcagcacgtggtagatttggatgtgtaagtagataaacttatggttggtctaaggcttgatttcagcatggagaaggttgtcagtgtatttgcgctaattaaggaaaggcacgggacgctcctttacactgtaggtacagccagagttcaggaaataccactgcttcccagtggttttctaaaccagccag

SEQ ID NO: 1670 - DNA, 599 bp, Chicken  19866894088306_1
  misc_feature (1)..(48): n is any nucleotide
nnnnnnnnnnnnnnnnnnnnnnnnnnnnnnnnnnnnnnnnnnnnnnnntgcaactgttcacattagatttcccagaaatgagtccttctggcttttactgttgagtgatcgtgtgtgccgttgttggttccttcccttgtacaggaaggcccttttttatgtcagttccattttttctgaattgagtacaagagaggcacagttgttttgagctcaagcttgagatgaacctttttgttcttctcttgtatcagctgtgactgctttgtggggatgggagggtacagggagcataggaakgcattgcagttggttggactgaaataccatcctgtgtgctgtatcaggaagcaaacggcttgggcactaatgcaggggtgagtgcagctgagcagcctgtggggcaactcagggagagggttctctgggtkcagttggagcaggggctggatcatgcccagggtacacctccaaagtcaaactacactgtgggagctgctgcctttgatgcttgcagagcgtgtgggttccccaggctctgccagctcctggttttctcttcagcttttcctagtggaagcctccttgcagccctgagc

SEQ ID NO: 1671 - DNA, 600 bp, Chicken  19866894088306_2
ttcccttgtacaggaaggcccttttttatgtcagttccattttttctgaattgagtacaagagaggcacagttgttttgagctcaagcttgagatgaacctttttgttcttctcttgtatcagctgtgactgctttgtggggatgggagggtacagggagcataggaakgcattgcagttggttggactgaaataccatcctgtgtgctgtatcaggaagcaaacggcttgggcactaatgcaggggtgagtgcagctgagcagcctgtggggcaactcagggagagggttctctgggtkcagttggagcaggggctggatcatgcccagggtacacctccaaagtcaaactacactgtgggagctgctgcctttgatgcttgcagagcgtgtgggttccccaggctctgccagctcctggttttctcttcagcttttcctagtggaagcctccttgcagccctgagctcagcacttggccaacaagggcagcttttcagaaggggcatgctttgtaaagtgtgcttattctgtcttctgagttgttagggtttagttggaagcacactgcacttctaaatagtgtgtttgcgagtgtgt

SEQ ID NO: 1672 - DNA, 600 bp, Chicken  19866894088307_1
aacttctacttgagaaggaagaaactcacagccttcaagactgaggagagagcctgccaggacagaagagcactccaaagtggacctccactgttggcactgcctaatattgtgtaaaatttgtgagacagagaaaagggaatggaattctccagcaatacatgctcattcagtgatggaacataaattcaagctccttttgctcatatagattaaaacgttcattctcttctgctgacaactacgtcattgccacaaaaactgtggcttggacacccaccttggaaagttaaaggtgtragctcagggcttgttaatttgaaggaaagtcatatccttgcatactggcaactgccttaaaccagtagataaaaggaagaacccctgccagatttgttgatttsgtactggaaaagaataagttcattcattaatttccaaacaagttttcctccattctaaactgtgagttgcaaaggtggggaaggacatttcctccctccaatctcttgctttggttttgaccgcagtgaagaatctgtattgactggaacaaacacagacttccaccacagaaaaatcagtttcatgaatttggct

SEQ ID NO: 1673 - DNA, 600 bp, Chicken  19866894088307_2
taatattgtgtaaaatttgtgagacagagaaaagggaatggaattctccagcaatacatgctcattcagtgatggaacataaattcaagctccttttgctcatatagattaaaacgttcattctcttctgctgacaactacgtcattgccacaaaaactgtggcttggacacccaccttggaaagttaaaggtgtragctcagggcttgttaatttgaaggaaagtcatatccttgcatactggcaactgccttaaaccagtagataaaaggaagaacccctgccagatttgttgatttsgtactggaaaagaataagttcattcattaatttccaaacaagttttcctccattctaaactgtgagttgcaaaggtggggaaggacatttcctccctccaatctcttgctttggttttgaccgcagtgaagaatctgtattgactggaacaaacacagacttccaccacagaaaaatcagtttcatgaatttggctcacaacaagattttccttgacaataaaagttacatatatmtaayatgtagctctaaattgccatkaaagaacagtataaaagctaccaagtaataaattacagc

SEQ ID NO: 1674 - DNA, 600 bp, Chicken  19866894088307_3
catactggcaactgccttaaaccagtagataaaaggaagaacccctgccagatttgttgatttsgtactggaaaagaataagttcattcattaatttccaaacaagttttcctccattctaaactgtgagttgcaaaggtggggaaggacatttcctccctccaatctcttgctttggttttgaccgcagtgaagaatctgtattgactggaacaaacacagacttccaccacagaaaaatcagtttcatgaatttggctcacaacaagattttccttgacaataaaagttacatatatmtaayatgtagctctaaattgccatkaaagaacagtataaaagctaccaagtaataaattacagctatgcacaatttgcattttcctctcctcactgtcctaagctccggggtttctttattacctcccatttagagctgcctgaaaccccttttttccaaagtggttttcctctgtcttctaaaagtgctcagagtatttttgtgtccctggacacaattaccattgtactcctctgtatttcaaacctgagctgccatgataaacggaaaacaagtgatcctcttacctcttcctttag

SEQ ID NO: 1675 - DNA, 600 bp, Chicken  19866894088307_4
ctggcaactgccttaaaccagtagataaaaggaagaacccctgccagatttgttgatttsgtactggaaaagaataagttcattcattaatttccaaacaagttttcctccattctaaactgtgagttgcaaaggtggggaaggacatttcctccctccaatctcttgctttggttttgaccgcagtgaagaatctgtattgactggaacaaacacagacttccaccacagaaaaatcagtttcatgaatttggctcacaacaagattttccttgacaataaaagttacatatatmtaayatgtagctctaaattgccatkaaagaacagtataaaagctaccaagtaataaattacagctatgcacaatttgcattttcctctcctcactgtcctaagctccggggtttctttattacctcccatttagagctgcctgaaaccccttttttccaaagtggttttcctctgtcttctaaaagtgctcagagtatttttgtgtccctggacacaattaccattgtactcctctgtatttcaaacctgagctgccatgataaacggaaaacaagtgatcctcttacctcttcctttagccac

SEQ ID NO: 1676 - DNA, 600 bp, Chicken  19866894088307_5
tagataaaaggaagaacccctgccagatttgttgatttsgtactggaaaagaataagttcattcattaatttccaaacaagttttcctccattctaaactgtgagttgcaaaggtggggaaggacatttcctccctccaatctcttgctttggttttgaccgcagtgaagaatctgtattgactggaacaaacacagacttccaccacagaaaaatcagtttcatgaatttggctcacaacaagattttccttgacaataaaagttacatatatmtaayatgtagctctaaattgccatkaaagaacagtataaaagctaccaagtaataaattacagctatgcacaatttgcattttcctctcctcactgtcctaagctccggggtttctttattacctcccatttagagctgcctgaaaccccttttttccaaagtggttttcctctgtcttctaaaagtgctcagagtatttttgtgtccctggacacaattaccattgtactcctctgtatttcaaacctgagctgccatgataaacggaaaacaagtgatcctcttacctcttcctttagccactcattctcttcaatttctctg

SEQ ID NO: 1677 - DNA, 600 bp, Chicken  19866894088308_1
ataggataatatttggtcttcaaacagtacttttaagagcagttttcttattagactaataccagccccagaaatgctgtgtccataattaaggtggctgtggaggcagggacttggcaagatgtgtacccagggatctgttgctagattcaataacaagcaagtctttcaggtattctatgtacagataattaaggacacaacagtaggacagaattttgttcaaggtacatggttcatgactgttttcttacaatcctttgataaaataagtgattatcaagataaagaagtggtatwaatcctgtataactgaaagtgagggtacaaagtaaaggaaaaactgaagtagtagttagatcaaaacacggcaaggaatcacagaaaacatctacaaaaggagaaaaacacttgctgggtttaagcgaattgttagtttgtcagggatcagttttggaaaagtgctattgaattgtttttctcatttrtactaaagaatagctacaaatacatgaagtactaaatgctatttttataatgaatttgatagatrtgctcatgaaactttgtgatggtagttaggaatcattgtcaatatag

SEQ ID NO: 1678 - DNA, 600 bp, Chicken  19866894088308_2
taattaaggacacaacagtaggacagaattttgttcaaggtacatggttcatgactgttttcttacaatcctttgataaaataagtgattatcaagataaagaagtggtatwaatcctgtataactgaaagtgagggtacaaagtaaaggaaaaactgaagtagtagttagatcaaaacacggcaaggaatcacagaaaacatctacaaaaggagaaaaacacttgctgggtttaagcgaattgttagtttgtcagggatcagttttggaaaagtgctattgaattgtttttctcatttrtactaaagaatagctacaaatacatgaagtactaaatgctatttttataatgaatttgatagatrtgctcatgaaactttgtgatggtagttaggaatcattgtcaatatagaactgtgctactcatgaggtagaactggatgacctagcgaactcgaatgatagtaataaaaagaaatctaataataccaagagtaaggtcattctcttagggactactctcttgaacttggatatctaatagatgctcatcagttgtaaatggcagagcaagacctcggttcttggatctgttcatca

SEQ ID NO: 1679 - DNA, 600 bp, Chicken  19866894088308_3
caatcctttgataaaataagtgattatcaagataaagaagtggtatwaatcctgtataactgaaagtgagggtacaaagtaaaggaaaaactgaagtagtagttagatcaaaacacggcaaggaatcacagaaaacatctacaaaaggagaaaaacacttgctgggtttaagcgaattgttagtttgtcagggatcagttttggaaaagtgctattgaattgtttttctcatttrtactaaagaatagctacaaatacatgaagtactaaatgctatttttataatgaatttgatagatrtgctcatgaaactttgtgatggtagttaggaatcattgtcaatatagaactgtgctactcatgaggtagaactggatgacctagcgaactcgaatgatagtaataaaaagaaatctaataataccaagagtaaggtcattctcttagggactactctcttgaacttggatatctaatagatgctcatcagttgtaaatggcagagcaagacctcggttcttggatctgttcatcacaggatgatgaaccaatgatctgatgaccctggaaaatagaaatgtattagcagtaaaagccagg

SEQ ID NO: 1680 - DNA, 600 bp, Chicken  19866894088308_4
agaactggatgacctagcgaactcgaatgatagtaataaaaagaaatctaataataccaagagtaaggtcattctcttagggactactctcttgaacttggatatctaatagatgctcatcagttgtaaatggcagagcaagacctcggttcttggatctgttcatcacaggatgatgaaccaatgatctgatgaccctggaaaatagaaatgtattagcagtaaaagccaggtgaaatatttctaaaagccagcaggcttttacacacccccttacagtacaaaaactatagaattttytctccctaacagtgacatttctctagggcrgggtgagtgattagttaatgaagwagtgtcatctgaaagaatatgcaaattgttcaagacagataaattcacatgggaccaggtttagataggagtcaccagggaacagagaccatatctttaatggatactagacatgcttgaaataagtcctcagaagggaaataagtcctcagaagggaaataagtgaaataagtcctcagaagggaaataagtactcttcataaacatagcaaaaaattaaatacacaaaaaaacctatttaaatg

SEQ ID NO: 1681 - DNA, 600 bp, Chicken  19866894088308_5
tagtaataaaaagaaatctaataataccaagagtaaggtcattctcttagggactactctcttgaacttggatatctaatagatgctcatcagttgtaaatggcagagcaagacctcggttcttggatctgttcatcacaggatgatgaaccaatgatctgatgaccctggaaaatagaaatgtattagcagtaaaagccaggtgaaatatttctaaaagccagcaggcttttacacacccccttacagtacaaaaactatagaattttytctccctaacagtgacatttctctagggcrgggtgagtgattagttaatgaagwagtgtcatctgaaagaatatgcaaattgttcaagacagataaattcacatgggaccaggtttagataggagtcaccagggaacagagaccatatctttaatggatactagacatgcttgaaataagtcctcagaagggaaataagtcctcagaagggaaataagtgaaataagtcctcagaagggaaataagtactcttcataaacatagcaaaaaattaaatacacaaaaaaacctatttaaatgaagatcaatgttatcaccaaagaaagtggt

SEQ ID NO: 1682 - DNA, 600 bp, Chicken  19866894088308_6
taccaagagtaaggtcattctcttagggactactctcttgaacttggatatctaatagatgctcatcagttgtaaatggcagagcaagacctcggttcttggatctgttcatcacaggatgatgaaccaatgatctgatgaccctggaaaatagaaatgtattagcagtaaaagccaggtgaaatatttctaaaagccagcaggcttttacacacccccttacagtacaaaaactatagaattttytctccctaacagtgacatttctctagggcrgggtgagtgattagttaatgaagwagtgtcatctgaaagaatatgcaaattgttcaagacagataaattcacatgggaccaggtttagataggagtcaccagggaacagagaccatatctttaatggatactagacatgcttgaaataagtcctcagaagggaaataagtcctcagaagggaaataagtgaaataagtcctcagaagggaaataagtactcttcataaacatagcaaaaaattaaatacacaaaaaaacctatttaaatgaagatcaatgttatcaccaaagaaagtggttttcatgtgctctaggagacttag

SEQ ID NO: 1683 - DNA, 600 bp, Chicken  19866894088317_1
aggggaaggctggacacatgcccaagcacacacatggacatctgttctttcatttgctcttgacaagagatttggctctccgatgccaaataaatctttggaaaagctctcataaggatccaactcctgcaacaaggcacgaaacgttaatgttacaagactctctgtacctctccaggggacactgagagggtgctggtgaaagcaacatggggaaagctccttgaacttttccttggggtcagcattgtctagggcagctgggcagccctgtactaacccaaaccctgcttgcagaayagtggcaattcacctataaaaaggtgatactccctttgtacctgctcacatctccctgaaattccctcggtcaaatcacagcagagagccctaataaggaaaaactgttccttctgagtctcagcagaccaagtatagagatatttgcctgtgctcataaaaaaaacaaggaatgtttaatttaattgcctctacttttcagcctgcttcaacgacacaactcattacaytatacttcagatatrggctttggggagatttaattcttatctttagattagctgataacacaaataagcc

SEQ ID NO: 1684 - DNA, 415 bp, Chicken  19866894088317_2
tttccttggggtcagcattgtctagggcagctgggcagccctgtactaacccaaaccctgcttgcagaayagtggcaattcacctataaaaaggtgatactccctttgtacctgctcacatctccctgaaattccctcggtcaaatcacagcagagagccctaataaggaaaaactgttccttctgagtctcagcagaccaagtatagagatatttgcctgtgctcataaaaaaaacaaggaatgtttaatttaattgcctctacttttcagcctgcttcaacgacacaactcattacaytatacttcagatatrggctttggggagatttaattcttatctttagattagctgataacacaaataagcctggctgatttattgaacagcactgtgcctttgataatagtatttg

SEQ ID NO: 1685 - DNA, 400 bp, Chicken  19866894088317_3
cattgtctagggcagctgggcagccctgtactaacccaaaccctgcttgcagaayagtggcaattcacctataaaaaggtgatactccctttgtacctgctcacatctccctgaaattccctcggtcaaatcacagcagagagccctaataaggaaaaactgttccttctgagtctcagcagaccaagtatagagatatttgcctgtgctcataaaaaaaacaaggaatgtttaatttaattgcctctacttttcagcctgcttcaacgacacaactcattacaytatacttcagatatrggctttggggagatttaattcttatctttagattagctgataacacaaataagcctggctgatttattgaacagcactgtgcctttgataatagtatttg

SEQ ID NO: 1686 - DNA, 600 bp, Chicken  19866894088318_1
agtggtgtttcttttgttttgctttacttgcagggttacaccaagtctattgacatctggtcagtaggctgtattctggcagagatgctctccaacagacccatctttccaggaaaacactaccttgaccagcttaaccatatccttggtaagttctacgtaatgaagtaacatttcctcatccatccacttctcttcatcttttctaccagattgaccaatctgggtcacccgtttttttcttttaattttgtagttcctttagtctatacgtagtcctttagtctaatccatgctaaygtacattttgtttatttacaaagggaaaaaaaaaacacaacaccttgttagtaagggtttctaaacattctgtggtattccatgctcttagaacacgtggtgtggattcttctttgcagcagttttaatgttggcttttgggaaacgtgatgtgattgctataatgtgactttcataggagtgcagtactgtttgttgttttatttttataggtatacttggatccccttcccaagaagatttgaattgtataataaatttaaaagccagaaactatttgctttccctaccacacaaaaa

SEQ ID NO: 1687 - DNA, 600 bp, Chicken  19866894088318_2
cattctgtggtattccatgctcttagaacacgtggtgtggattcttctttgcagcagttttaatgttggcttttgggaaacgtgatgtgattgctataatgtgactttcataggagtgcagtactgtttgttgttttatttttataggtatacttggatccccttcccaagaagatttgaattgtataataaatttaaaagccagaaactatttgctttccctaccacacaaaaataaggtaccatggaacaggctgtttcccaatgctgaccccaaaggtattttatgctctattacaytgtatcagattttcaaaagtrgaaatgagcaccaaaatcagtgtcagtatgggattttttttggaaccaccttaacaatttatttgagttgcagttagaacatcggggtcccttagaacacctgtatcagtcagatgtgagatcgtaaaccagcatgaaactcctctttcattcttaaacaagtcaaaaattgtgttatggcctttaacttctttgtaaaagatgggaatcccagctgttgttgttgccttacaaagtgtagttcattcagatactcagcgttggcattggacatttaca

SEQ ID NO: 1688 - DNA, 600 bp, Chicken  19866894088318_3
cttagaacacgtggtgtggattcttctttgcagcagttttaatgttggcttttgggaaacgtgatgtgattgctataatgtgactttcataggagtgcagtactgtttgttgttttatttttataggtatacttggatccccttcccaagaagatttgaattgtataataaatttaaaagccagaaactatttgctttccctaccacacaaaaataaggtaccatggaacaggctgtttcccaatgctgaccccaaaggtattttatgctctattacaytgtatcagattttcaaaagtrgaaatgagcaccaaaatcagtgtcagtatgggattttttttggaaccaccttaacaatttatttgagttgcagttagaacatcggggtcccttagaacacctgtatcagtcagatgtgagatcgtaaaccagcatgaaactcctctttcattcttaaacaagtcaaaaattgtgttatggcctttaacttctttgtaaaagatgggaatcccagctgttgttgttgccttacaaagtgtagttcattcagatactcagcgttggcattggacatttacagttttcgttatataactgcca

SEQ ID NO: 1689 - DNA, 600 bp, Chicken  19866894088323_1
ctcagaactcctgccctgcctcagcaccaaccagcacctccctcaccacgctgctttcccactccatgggcagcatggggaccacacagcccccatccgccccggggtgttccctgggtgctgctcattgaatgggctggaagggaacctgaagatcatcccattccgcccaatgccacgtccttcaaaggcagcattaattcatgactggaagtacccttcattcatcgctgcatcgtgtagctctgaggacagacagacagctataatgcttgattgtgggggcccatatgtgccttkttakagaaggccgggtctcgggaggctcaagtcattatggtcatctgccagttcagcctgatttactgaaccttaccatgggttttccttctctttgtcttagggattctctccacaaaagcccagaatttcatgactctgacatctgaacagctgaaaatggacaatgtgatatggatgtgttcagctcaatgctcagcacctactcctgtacttcagcaccctgcacgtgtcgttccaacagaactctcagaaatagtttaatataccaataaaaagttgcagtgcctgaggaagcat

SEQ ID NO: 1690 - DNA, 600 bp, Chicken  19866894088323_2
gaactcctgccctgcctcagcaccaaccagcacctccctcaccacgctgctttcccactccatgggcagcatggggaccacacagcccccatccgccccggggtgttccctgggtgctgctcattgaatgggctggaagggaacctgaagatcatcccattccgcccaatgccacgtccttcaaaggcagcattaattcatgactggaagtacccttcattcatcgctgcatcgtgtagctctgaggacagacagacagctataatgcttgattgtgggggcccatatgtgccttkttakagaaggccgggtctcgggaggctcaagtcattatggtcatctgccagttcagcctgatttactgaaccttaccatgggttttccttctctttgtcttagggattctctccacaaaagcccagaatttcatgactctgacatctgaacagctgaaaatggacaatgtgatatggatgtgttcagctcaatgctcagcacctactcctgtacttcagcaccctgcacgtgtcgttccaacagaactctcagaaatagtttaatataccaataaaaagttgcagtgcctgaggaagcattaaa

SEQ ID NO: 1691 - DNA, 599 bp, Chicken  19866894088324_1
  misc_feature (1)..(100): n is any nucleotide
nnnnnnnnnnnnnnnnnnnnnnnnnnnnnnnnnnnnnnnnnnnnnnnnnnnnnnnnnnnnnnnnnnnnnnnnnnnnnnnnnnnnnnnnnnnnnnnnnnnnccgctgcaacctgaagtctcccctcacaatattcagagccaaagatcagaatttcacacagagcagaattagccctttaataagggagtctgtggactagtataaagcagtggtcatatggcttttgggaattgcctccaaaatttggtgtcactacaccatccatatcaaggagttacatgttgtttcagacacaaatycccatttttgcattattaaaaaatatattaagtgagatagccactttgaaggccattattaagttgctagatgttctatgytctttggggaacatgaataaattcttatcttcagatctcactgaagagtgttcatccttttcttgaaacctatttacacgtgtgatggttttgcaattgcacagaagcaaaccttttctggtaccaattgcaacaaatttaactcacagactcacttatgtatcttagacattccaastgaggtcttaacactcttattgtcttatgagtgctgaact

SEQ ID NO: 1692 - DNA, 599 bp, Chicken  19866894088324_2
  misc_feature (1)..(19): n is any nucleotide
nnnnnnnnnnnnnnnnnnnccgctgcaacctgaagtctcccctcacaatattcagagccaaagatcagaatttcacacagagcagaattagccctttaataagggagtctgtggactagtataaagcagtggtcatatggcttttgggaattgcctccaaaatttggtgtcactacaccatccatatcaaggagttacatgttgtttcagacacaaatycccatttttgcattattaaaaaatatattaagtgagatagccactttgaaggccattattaagttgctagatgttctatgytctttggggaacatgaataaattcttatcttcagatctcactgaagagtgttcatccttttcttgaaacctatttacacgtgtgatggttttgcaattgcacagaagcaaaccttttctggtaccaattgcaacaaatttaactcacagactcacttatgtatcttagacattccaastgaggtcttaacactcttattgtcttatgagtgctgaacttattctgccaaactcccattatccccagtgaaaatttgtccaaaatgaaatggaaagaaaaaaagattatgttctatgttt

SEQ ID NO: 1693 - DNA, 600 bp, Chicken  19866894088324_3
catccatatcaaggagttacatgttgtttcagacacaaatycccatttttgcattattaaaaaatatattaagtgagatagccactttgaaggccattattaagttgctagatgttctatgytctttggggaacatgaataaattcttatcttcagatctcactgaagagtgttcatccttttcttgaaacctatttacacgtgtgatggttttgcaattgcacagaagcaaaccttttctggtaccaattgcaacaaatttaactcacagactcacttatgtatcttagacattccaastgaggtcttaacactcttattgtcttatgagtgctgaacttattctgccaaactcccattatccccagtgaaaatttgtccaaaatgaaatggaaagaaaaaaagattatgttctatgtttggaagaaaaaatgaactgtcttggtagctgccacaattatgtgccagaaattgctgtgtgggattttaaaaggtgcttacttttggcctctgttcccagtgaaatcagtcagtgattaaacttccattgacctcagtgggaacagatttaaactaacattaagcattataaaattcaaa

SEQ ID NO: 1694 - DNA, 600 bp, Chicken  19866894088327_1
catactaaaggaatattaaataatcccaagtgatggtcaagtcctatttctcttttgaactgttttagttgtatacagttatacggaatcctcatctgctgtatcatcagataccaataaagacatcacttcatcattttttttccagaaatatctaatttaagttatatgtagcctattcttcaaaattccagagtaacagtatgcttaagtatgttgtaccatcaccatttcttacagaagcataactgaacattttgttttttagtagctagttgcaaccctagcaatctgcaacasttctgaaaaaacattgggaaccaaacaaatacaactggtacacaaataaakccagctattatataaaagacatagactgtactgataggctttgtttcagaagaaaatttaaagaagaaaataaatctgattagaaattcatcatacttaccattgctatagttatagtgaaccctctgtccacatggtggctttggaagagacactggggtctcctctgcaatgaaattgtataatctgcattctacaaacagttgttgtattgtattatcttctacaattcgtgactcggtaagacca

SEQ ID NO: 1695 - DNA, 600 bp, Chicken  19866894088327_2
cttttgaactgttttagttgtatacagttatacggaatcctcatctgctgtatcatcagataccaataaagacatcacttcatcattttttttccagaaatatctaatttaagttatatgtagcctattcttcaaaattccagagtaacagtatgcttaagtatgttgtaccatcaccatttcttacagaagcataactgaacattttgttttttagtagctagttgcaaccctagcaatctgcaacasttctgaaaaaacattgggaaccaaacaaatacaactggtacacaaataaakccagctattatataaaagacatagactgtactgataggctttgtttcagaagaaaatttaaagaagaaaataaatctgattagaaattcatcatacttaccattgctatagttatagtgaaccctctgtccacatggtggctttggaagagacactggggtctcctctgcaatgaaattgtataatctgcattctacaaacagttgttgtattgtattatcttctacaattcgtgactcggtaagaccaagcgatataatttcaatccggattttttcagttgcctatttaaagataaac

SEQ ID NO: 1696 - DNA, 471 bp, Chicken  19866894088327_3
gatataatttcaatccggattttttcagttgcctatttaaagataaaccacaaatacgaattatctttcatttcttgaagtgttaactaaaacacataaacatacatgtgtaaaacatcgggtgtcttgtataaacactgactgattgattttgacatggacacaatgagattctaaagccccagggtttgaagttgagagtattgctgcaactgatactgatttacaagtggtgttctctgctagagaaggataagctagggctatcttaatacattaatggtatctgaactacactayatactacagatttcagttgtcattatttctaactgtaaagcaaagtcatctgcatcttgttcctatagccaccaaataggctcagtaatacgagttctcccagtgaaggagaacttttaggcttaggtgcctactaaaggctgtactacaattagttcaataaaaacacat

SEQ ID NO: 1697 - DNA, 600 bp, Chicken  19866894088336_1
ttcaaaattgatttccacttttacaaacaaatataatgggaacatgagggggaaaaaaaatcttgggccgtgatgaattagggctgtcaggtgcttccaagtctcctttgtttttgttttactgcccgttaggttctttgtttttccagcagctgggaatagtgcccctgcccacacactccatggctaccatcataggatatgtccatcacctgatgtcatcactgagttatccctgctctccatcactatgatgcaaacagccactgtgaccagactgctctatcccttgataccggratgcagccgatcacatggagatggagcacgtcccacactgctggctacctgccttctgcagccacccttcatgtccttggacttacctcagatcttttctactctgctcttcctgttctcttttgcccttttaactgattattgaaatggtttcccagccctcactgttctgacaaattagtctaggccatcagcagggcactttgatccccactgcacctcagtgccacatcaccttggttctgtagcggtattgcccttgagtctcatctccatgtcacttaacccagtaacagcacc

SEQ ID NO: 1698 - DNA, 600 bp, Chicken  19866894088337_1
tcagtacattaggttcctaacatccatatactcagattattagctactgtgactgctcattgtgcaacttttacatgtagcacacacagcaaggctgcttggcttctttcactgtatgtgttctttttttccttcacaaaaaacaacaacaacaacaaaaaacaaaacaaaaaacccagccatcttgtcattgccacaatgggaggtgacagtaaacgccacactcagggtgtgataacccaagagcagccccagcccatgagggatactggtgcttctgtaacgagcacagtgcaagargcagtagtttgacacacagccctatgtgtctgttattctaccttgtcagaaaagagtaattagagaataactccctgttgccttcaattctctcctgccacccccactggtcccyatccatcatcatgaagacttctcttggtgattcattatgwgaaggctgcctttccaggggaggcaccgagaggaattttccatttctctctctgttccctttgcatggcagcaatctgctttcattacaagcctaggatgccaatggcagtggcttcgggcatctgctaataaggagcaagcaat

SEQ ID NO: 1699 - DNA, 600 bp, Chicken  19866894088337_2
atgtgttctttttttccttcacaaaaaacaacaacaacaacaaaaaacaaaacaaaaaacccagccatcttgtcattgccacaatgggaggtgacagtaaacgccacactcagggtgtgataacccaagagcagccccagcccatgagggatactggtgcttctgtaacgagcacagtgcaagargcagtagtttgacacacagccctatgtgtctgttattctaccttgtcagaaaagagtaattagagaataactccctgttgccttcaattctctcctgccacccccactggtcccyatccatcatcatgaagacttctcttggtgattcattatgwgaaggctgcctttccaggggaggcaccgagaggaattttccatttctctctctgttccctttgcatggcagcaatctgctttcattacaagcctaggatgccaatggcagtggcttcgggcatctgctaataaggagcaagcaatttccaggagtaggtcacacaatcagagcattaaaaactctttgagaaagaaaacctctcacatgcttccaacagggaaggtgagcaaaaaccaagagcccatgaaaagttaaatt

SEQ ID NO: 1700 - DNA, 600 bp, Chicken  19866894088337_3
caaaaaacaaaacaaaaaacccagccatcttgtcattgccacaatgggaggtgacagtaaacgccacactcagggtgtgataacccaagagcagccccagcccatgagggatactggtgcttctgtaacgagcacagtgcaagargcagtagtttgacacacagccctatgtgtctgttattctaccttgtcagaaaagagtaattagagaataactccctgttgccttcaattctctcctgccacccccactggtcccyatccatcatcatgaagacttctcttggtgattcattatgwgaaggctgcctttccaggggaggcaccgagaggaattttccatttctctctctgttccctttgcatggcagcaatctgctttcattacaagcctaggatgccaatggcagtggcttcgggcatctgctaataaggagcaagcaatttccaggagtaggtcacacaatcagagcattaaaaactctttgagaaagaaaacctctcacatgcttccaacagggaaggtgagcaaaaaccaagagcccatgaaaagttaaattaaatcctggagggtgagtgggcaggcccatagtgcgtcac

SEQ ID NO: 1701 - DNA, 600 bp, Chicken  19866894088341_1
gatgatgagagaggaattttggtgcttatttaatgtcactcagtagaatttcatgatttatacttaggcctgaaagtcccacgtcaagcaatatttcggtcattcagcctgactttttctcatcacttccccctgttccttttccatggttatttatcgaagagctgcatcctgctgactgatgtactgagaagaatgttactgatgttggagcttgtgcaattctgtctttgtgttggggcagggcaaaagatttggaacttcataaagggaagcctttagaagttcagtttttagacrtaaactgaaggagagcaagtgtaagcattttgtaatgagatcagtggaagaactccattgtccgaagcttttgtttaacttgtttagccaagtgaagctggatgggtgtatttagatatgctcagtgcttagacccccccagtgctgcttgtgtactgaaacgggctgatcccatacctgtccctgccagcctgagagatggttttgccacagttcatagagagaaagaactgaaggtgctgtgagctaactgggaacttgccaaatattgagcagaatgggaagcaggatcctccatcc

SEQ ID NO: 1702 - DNA, 600 bp, Chicken  19866894088341_2
gcctaccaaatctcaatgatagttaggttttctatttagtaaagcagatgttttagaagttttgttgttgtaaaaggtgggctctcttattcttagagaatcattacttaagtatttacgccaatgtgtcttagtgtttgatctgtcctagatgaaatgtttgctttgtcttaaaatacacagcatttaagtggtactatttcagatcttgatggagatgcaaatgtggaagagcaatacatgacggaataccattttggaaggcaaacagaaaccatcacatgcttcagagaaatcacrgtcgcttcaacataaggatcttagcaatgtgctggaagatgraatgtaagtggcaagtcaacattttcacagagatttgtttcactttttagtatargacttagagattacttgtcagctgtgatagcttggaaggtcagttacagtgaaggatttatacattgaaagcagtagtagtttttcagaggtaatgttttaattttatttcaaatattgggtgaaagcaactccaaagaattaactacaataaaccattgctgtgttcaagacagtaatgtaaggagttttatttatttattt

SEQ ID NO: 1703 - DNA, 600 bp, Chicken  19866894088341_3
agcagatgttttagaagttttgttgttgtaaaaggtgggctctcttattcttagagaatcattacttaagtatttacgccaatgtgtcttagtgtttgatctgtcctagatgaaatgtttgctttgtcttaaaatacacagcatttaagtggtactatttcagatcttgatggagatgcaaatgtggaagagcaatacatgacggaataccattttggaaggcaaacagaaaccatcacatgcttcagagaaatcacrgtcgcttcaacataaggatcttagcaatgtgctggaagatgraatgtaagtggcaagtcaacattttcacagagatttgtttcactttttagtatargacttagagattacttgtcagctgtgatagcttggaaggtcagttacagtgaaggatttatacattgaaagcagtagtagtttttcagaggtaatgttttaattttatttcaaatattgggtgaaagcaactccaaagaattaactacaataaaccattgctgtgttcaagacagtaatgtaaggagttttatttatttatttatttttatagttgctaatagcaacttatgtggcggacataag

SEQ ID NO: 1704 - DNA, 590 bp, Chicken  19866894088341_4
gaatcattacttaagtatttacgccaatgtgtcttagtgtttgatctgtcctagatgaaatgtttgctttgtcttaaaatacacagcatttaagtggtactatttcagatcttgatggagatgcaaatgtggaagagcaatacatgacggaataccattttggaaggcaaacagaaaccatcacatgcttcagagaaatcacrgtcgcttcaacataaggatcttagcaatgtgctggaagatgraatgtaagtggcaagtcaacattttcacagagatttgtttcactttttagtatargacttagagattacttgtcagctgtgatagcttggaaggtcagttacagtgaaggatttatacattgaaagcagtagtagtttttcagaggtaatgttttaattttatttcaaatattgggtgaaagcaactccaaagaattaactacaataaaccattgctgtgttcaagacagtaatgtaaggagttttatttatttatttatttttatagttgctaatagcaacttatgtggcggacataagtgcagcaatttaaaaggacactgtggtaatgtgaatttcttcaag

SEQ ID NO: 1705 - DNA, 600 bp, Chicken  19866894088343_1
gaaagatccatttcagttgaattttgtaccaaagagacaaacctttaaattagaagacatgagtttaattggcttgggttgaaattaccagaatgaaataatttgctgtttctaaataaacattccaataaacgccttgttccctgaaaaattttgcttttccagcttccatcttgactcaccttggggaaaaacagttgaatcatctctagccattgcagagcagtaccagcatccaagtctattagctgctcatagtgcttgaaggagtaaatttcaagggatgtggggggtctggtwtgattccaaatctcagcactgaagatctagcatgtgaaggcctytgtagtaactgtggtcatgaataataagctctgtgtcagttaagcatagctgyttaacagccaggttggattctagaccttcaagcctgagcagcccagagcctgctaaattaaatgtgcttagacactgcagcatcgtgtggggtccgatagaaacatgatagataaaacccagcatgccagttggaggatgctcaggggctgtatagattctttaacgtacgcaaggaaacctcaatactttcctgttgacagg

SEQ ID NO: 1706 - DNA, 600 bp, Chicken  19866894088343_2
ttaaattagaagacatgagtttaattggcttgggttgaaattaccagaatgaaataatttgctgtttctaaataaacattccaataaacgccttgttccctgaaaaattttgcttttccagcttccatcttgactcaccttggggaaaaacagttgaatcatctctagccattgcagagcagtaccagcatccaagtctattagctgctcatagtgcttgaaggagtaaatttcaagggatgtggggggtctggtwtgattccaaatctcagcactgaagatctagcatgtgaaggcctytgtagtaactgtggtcatgaataataagctctgtgtcagttaagcatagctgyttaacagccaggttggattctagaccttcaagcctgagcagcccagagcctgctaaattaaatgtgcttagacactgcagcatcgtgtggggtccgatagaaacatgatagataaaacccagcatgccagttggaggatgctcaggggctgtatagattctttaacgtacgcaaggaaacctcaatactttcctgttgacaggaaagttctgcacaactccaagtctgttttgatgtctgaatgtaa

SEQ ID NO: 1707 - DNA, 600 bp, Chicken  19866894088343_3
ataatttgctgtttctaaataaacattccaataaacgccttgttccctgaaaaattttgcttttccagcttccatcttgactcaccttggggaaaaacagttgaatcatctctagccattgcagagcagtaccagcatccaagtctattagctgctcatagtgcttgaaggagtaaatttcaagggatgtggggggtctggtwtgattccaaatctcagcactgaagatctagcatgtgaaggcctytgtagtaactgtggtcatgaataataagctctgtgtcagttaagcatagctgyttaacagccaggttggattctagaccttcaagcctgagcagcccagagcctgctaaattaaatgtgcttagacactgcagcatcgtgtggggtccgatagaaacatgatagataaaacccagcatgccagttggaggatgctcaggggctgtatagattctttaacgtacgcaaggaaacctcaatactttcctgttgacaggaaagttctgcacaactccaagtctgttttgatgtctgaatgtaaaaatctcttaaaacaaatatatgaaacatgctacgctggagagagacaaatct

SEQ ID NO: 1708 - DNA, 600 bp, Chicken  19866894088347_1
tggcagaggctgaaagctctcttctttcaacatgagctgtcattagtcccatctccaggcagctcagtaggttctcatgggtctgggaatagaagagcagcaaatagatttggctgatggtaaacagtctttacagggggtttctggtcaccagaaattatctgcctagatgttgcagaatgaaatggaagcagcgctcatttagatagacagttatcagtggcagagtgtaactgcttccttttattttaccagacctttcctcataatctgtctcacatgctgctttcttggttcttmgaaaagcccttcagattccaccagcatggaatcaacacagcaggatttggcttcaacactgtagcagatgtacctgagtgggatgtatcccatccgcatggagaccacccagaggtggacctgaggctgtcatacaccaagacaaaagaaggacaactgtggggagagacrcacaaagtctcagagatcttccccagcagccctctgtatctttaatcttcagttcwcagtgtggygtagttgggaactctgaagatatgttggctcgctggcatggaggaagagcatttggggaatgtc

SEQ ID NO: 1709 - DNA, 600 bp, Chicken  19866894088347_2
gttgcagaatgaaatggaagcagcgctcatttagatagacagttatcagtggcagagtgtaactgcttccttttattttaccagacctttcctcataatctgtctcacatgctgctttcttggttcttmgaaaagcccttcagattccaccagcatggaatcaacacagcaggatttggcttcaacactgtagcagatgtacctgagtgggatgtatcccatccgcatggagaccacccagaggtggacctgaggctgtcatacaccaagacaaaagaaggacaactgtggggagagacrcacaaagtctcagagatcttccccagcagccctctgtatctttaatcttcagttcwcagtgtggygtagttgggaactctgaagatatgttggctcgctggcatggaggaagagcatttggggaatgtctatcttgcttgagctggctttgatgattcacagaataacaaagggctgaacttcaggcactgttgctctcctcctgttcagttcttattcaagggttgcaagagaagtgtggcctgaaagatgttttgtgtgtggtctcaagatcgtattgcctaatggtaatgcagtaag

SEQ ID NO: 1710 - DNA, 600 bp, Chicken  19866894088347_3
gtgtaactgcttccttttattttaccagacctttcctcataatctgtctcacatgctgctttcttggttcttmgaaaagcccttcagattccaccagcatggaatcaacacagcaggatttggcttcaacactgtagcagatgtacctgagtgggatgtatcccatccgcatggagaccacccagaggtggacctgaggctgtcatacaccaagacaaaagaaggacaactgtggggagagacrcacaaagtctcagagatcttccccagcagccctctgtatctttaatcttcagttcwcagtgtggygtagttgggaactctgaagatatgttggctcgctggcatggaggaagagcatttggggaatgtctatcttgcttgagctggctttgatgattcacagaataacaaagggctgaacttcaggcactgttgctctcctcctgttcagttcttattcaagggttgcaagagaagtgtggcctgaaagatgttttgtgtgtggtctcaagatcgtattgcctaatggtaatgcagtaagattytgttctgccccataggactctgtctctcccaaagaaacaccacagtcttgga

SEQ ID NO: 1711 - DNA, 600 bp, Chicken  19866894088347_4
cttccttttattttaccagacctttcctcataatctgtctcacatgctgctttcttggttcttmgaaaagcccttcagattccaccagcatggaatcaacacagcaggatttggcttcaacactgtagcagatgtacctgagtgggatgtatcccatccgcatggagaccacccagaggtggacctgaggctgtcatacaccaagacaaaagaaggacaactgtggggagagacrcacaaagtctcagagatcttccccagcagccctctgtatctttaatcttcagttcwcagtgtggygtagttgggaactctgaagatatgttggctcgctggcatggaggaagagcatttggggaatgtctatcttgcttgagctggctttgatgattcacagaataacaaagggctgaacttcaggcactgttgctctcctcctgttcagttcttattcaagggttgcaagagaagtgtggcctgaaagatgttttgtgtgtggtctcaagatcgtattgcctaatggtaatgcagtaagattytgttctgccccataggactctgtctctcccaaagaaacaccacagtcttggatcctgatgt

SEQ ID NO: 1712 - DNA, 600 bp, Chicken  19866894088347_5
aagtctcagagatcttccccagcagccctctgtatctttaatcttcagttcwcagtgtggygtagttgggaactctgaagatatgttggctcgctggcatggaggaagagcatttggggaatgtctatcttgcttgagctggctttgatgattcacagaataacaaagggctgaacttcaggcactgttgctctcctcctgttcagttcttattcaagggttgcaagagaagtgtggcctgaaagatgttttgtgtgtggtctcaagatcgtattgcctaatggtaatgcagtaagattytgttctgccccataggactctgtctctcccaaagaaacaccacagtcttggatcctgatgtgatgacgtaaagtggccaaactcagtaacagagagaactggatccttccatggtcttaaccaccgctgagggcatgtctgaaggtttgtaatgggttatagtggagcaacctctttggactattatgacacagtgtgattcagagaagcccttgggctgccttaagttacttatgagaccctactgttgtctgttagccctggagcttaaaaaaatagagcagttctatgcagtcattt

SEQ ID NO: 1713 - DNA, 600 bp, Chicken  19866894088355_1
cactcaccccttgacttcctcagcaccctgtcctattaaaatgcaaatttattacaggagacggtaaaagttgataatagctacatttctctgcaagtctaataagcacagggcatcatttctattggttaccttctttgttacttgtaacaagcaggaatacaaatgaatgctggtttttcttacagaaaagcttctttttcaaataacatttcatatatacccacacaaattaaaaatctaaggctaaaattagtactgtttaaataaaggttaaaaacccatatatcagcatcccayaacatttcatacagcttttggccaccgcgttccaagcacccaagtgatcagaaggcagatgctccttgtccaaactcatgcctgaagcctatttctgaagaaacatttggaaggrcctattttctattgagccacgtactcaataaaaataaattaacagtaataattaccaagtgcaaccagccccraactatcacatattctttttacgtaataaaattagattttccatggcaaaggcttgcttcagtggttttgattgcatgagcacttgaatacaaatgaaacctctagagttca

SEQ ID NO: 1714 - DNA, 600 bp, Chicken  19866894088355_2
tcatttctattggttaccttctttgttacttgtaacaagcaggaatacaaatgaatgctggtttttcttacagaaaagcttctttttcaaataacatttcatatatacccacacaaattaaaaatctaaggctaaaattagtactgtttaaataaaggttaaaaacccatatatcagcatcccayaacatttcatacagcttttggccaccgcgttccaagcacccaagtgatcagaaggcagatgctccttgtccaaactcatgcctgaagcctatttctgaagaaacatttggaaggrcctattttctattgagccacgtactcaataaaaataaattaacagtaataattaccaagtgcaaccagccccraactatcacatattctttttacgtaataaaattagattttccatggcaaaggcttgcttcagtggttttgattgcatgagcacttgaatacaaatgaaacctctagagttcaggttyagtgcaagagctctgtgtggctacgtgttctcctctgctccagctcgcgttattcatctataggccacatgctcagaacacccacactgaaatgaactgatgcggcacca

SEQ ID NO: 1715 - DNA, 600 bp, Chicken  19866894088355_3
aaaagcttctttttcaaataacatttcatatatacccacacaaattaaaaatctaaggctaaaattagtactgtttaaataaaggttaaaaacccatatatcagcatcccayaacatttcatacagcttttggccaccgcgttccaagcacccaagtgatcagaaggcagatgctccttgtccaaactcatgcctgaagcctatttctgaagaaacatttggaaggrcctattttctattgagccacgtactcaataaaaataaattaacagtaataattaccaagtgcaaccagccccraactatcacatattctttttacgtaataaaattagattttccatggcaaaggcttgcttcagtggttttgattgcatgagcacttgaatacaaatgaaacctctagagttcaggttyagtgcaagagctctgtgtggctacgtgttctcctctgctccagctcgcgttattcatctataggccacatgctcagaacacccacactgaaatgaactgatgcggcaccaagctcggggtccacacgcactcatctaaaccacaacagcagctgaactgctgcaagaacataaagaagcttaa

SEQ ID NO: 1716 - DNA, 600 bp, Chicken  19866894088355_4
ttcatacagcttttggccaccgcgttccaagcacccaagtgatcagaaggcagatgctccttgtccaaactcatgcctgaagcctatttctgaagaaacatttggaaggrcctattttctattgagccacgtactcaataaaaataaattaacagtaataattaccaagtgcaaccagccccraactatcacatattctttttacgtaataaaattagattttccatggcaaaggcttgcttcagtggttttgattgcatgagcacttgaatacaaatgaaacctctagagttcaggttyagtgcaagagctctgtgtggctacgtgttctcctctgctccagctcgcgttattcatctataggccacatgctcagaacacccacactgaaatgaactgatgcggcaccaagctcggggtccacacgcactcatctaaaccacaacagcagctgaactgctgcaagaacataaagaagcttaacctcaaactgccacaggggcaaatcctatttctgtagccctgcagctcagagaacgtttccatcagcagaattacgggttttttgttgtcctaaggaaagatgggagtgggaagggc

SEQ ID NO: 1717 - DNA, 600 bp, Chicken  19866894088357_1
acccccaagccctaccttcacttcttcctccagggtcaggttcctctccaggctgcattctaccatatccatggtcactggcaacttcttgggaatctccgtgcatcgccggatcagcacaggattgcagccattcaggaactggtagccaaacatgaaatcttctttccagtgctgcatcacatactctaaagaaaaacaagtctgcagcatcaatatcaccgtatttctgatttctgtttctctcccagctcttttgctatactgcaataaaacattcaacttctatgaaaaagatgytctccatctgcagaccacctccttatgtcttccaagatagtcttcaatcttagagtctccaaactcttggggtttattatacagacagacaagycccaaaacagtggcacaggcaggggaagggaaatacccaaggtgggaagggaaagaacagcagtgactggagctgggtgcgaggtacctggggaacgatgttgattttgggcttctcactaatgctgttcactggctgtatttttttttcctgtttatttttcaattgttaatgcaaagcagattaacaactattctaaataaaac

SEQ ID NO: 1718 - DNA, 600 bp, Chicken  19866894088357_2
atctccgtgcatcgccggatcagcacaggattgcagccattcaggaactggtagccaaacatgaaatcttctttccagtgctgcatcacatactctaaagaaaaacaagtctgcagcatcaatatcaccgtatttctgatttctgtttctctcccagctcttttgctatactgcaataaaacattcaacttctatgaaaaagatgytctccatctgcagaccacctccttatgtcttccaagatagtcttcaatcttagagtctccaaactcttggggtttattatacagacagacaagycccaaaacagtggcacaggcaggggaagggaaatacccaaggtgggaagggaaagaacagcagtgactggagctgggtgcgaggtacctggggaacgatgttgattttgggcttctcactaatgctgttcactggctgtatttttttttcctgtttatttttcaattgttaatgcaaagcagattaacaactattctaaataaaacactagttttggggactccatctccttattacatctttagtagtactgcatgttttccacactgcagttctccgcttcctaatgtcattattgcc

SEQ ID NO: 1719 - DNA, 600 bp, Chicken  19866894088357_3
acagtggcacaggcaggggaagggaaatacccaaggtgggaagggaaagaacagcagtgactggagctgggtgcgaggtacctggggaacgatgttgattttgggcttctcactaatgctgttcactggctgtatttttttttcctgtttatttttcaattgttaatgcaaagcagattaacaactattctaaataaaacactagttttggggactccatctccttattacatctttagtagtactgcatgttttccacactgcagttctccgcttcctaatgtcattattgccacttcrawctacaagttgagagtcagaaaacacacgattaaaggaaaacaaaatcccaccgatgctgacagggaagccgcatgactgaaaaacgtgaacttgcttctgccaaggcttaccaataatcagattgagaggtgcactcacatggctgagatccattcttatggtttaaaactcacagaaccggagctctcctcatgggtatagaaatattatcaatgaaattaaatgtagattatatctaatcctcgtactttagcaaacaaccttattaaatgtaacaaattgatgtcattagttttt

SEQ ID NO: 1720 - DNA, 600 bp, Chicken  19866894088357_4
agtggcacaggcaggggaagggaaatacccaaggtgggaagggaaagaacagcagtgactggagctgggtgcgaggtacctggggaacgatgttgattttgggcttctcactaatgctgttcactggctgtatttttttttcctgtttatttttcaattgttaatgcaaagcagattaacaactattctaaataaaacactagttttggggactccatctccttattacatctttagtagtactgcatgttttccacactgcagttctccgcttcctaatgtcattattgccacttcrawctacaagttgagagtcagaaaacacacgattaaaggaaaacaaaatcccaccgatgctgacagggaagccgcatgactgaaaaacgtgaacttgcttctgccaaggcttaccaataatcagattgagaggtgcactcacatggctgagatccattcttatggtttaaaactcacagaaccggagctctcctcatgggtatagaaatattatcaatgaaattaaatgtagattatatctaatcctcgtactttagcaaacaaccttattaaatgtaacaaattgatgtcattagtttttaa

SEQ ID NO: 1721 - DNA, 599 bp, Chicken  19866894088358_1
  misc_feature (1)..(53): n is any nucleotide
nnnnnnnnnnnnnnnnnnnnnnnnnnnnnnnnnnnnnnnnnnnnnnnnnnnnnggcctatgctgtattttggcccatcttggccttttcatcgagctttctaacagaccaacgaggtgtcgggatggggaagctggcaagtgtgtgcctccagcaggtgctggggctgctgcttgtagttgaggcttcatttgagtctgaaatccagcaaatgatcagcctggctaattgctgcttctcttcccaagttgagctgttatcatgtcttggcactgtgagtttctgcaatagctggtgagcrctcaggataaggctctgtgtaaatgtatgctcctttctcctctgtggtagagataatgggtgtgaagagctatcctggtgtttgttgtgcaagcacccgctgtgcacatttttggtcagtaccaacctctccattcagaactgggatagaagctgcttatttagcttatttctcttctcagatggcaagggaaatagcaagacacagatcgagagaaatccctactgagatggtgactggactcgaggcaggttaagtcatcaaacaatgggtggatatagaagtagcacccaacaatc

SEQ ID NO: 1722 - DNA, 600 bp, Chicken  19866894088365_1
tggggggcagctcctttgcactgaatgagggcaggatgctgagcctgtgctttaataaatattcgacacaaatccttttgaagacatggaaaggcaaaggttccatcattcaattggctttctagatggtcggtgctgggttcattttagttcagtgcttttaatttttctgtgaaaattgattcatacgtcgtatccactttatcagtaagttacaaaagagaaattcatcaaatctcactttattgcacttttcttctccctctttgcctaccacactttcttcagcagatgtttttwgcagagaaaaatccactttgatttttccttcccctcaaacttgtttatctttgcccggtgctcctgaaagcacgctgctttgtcagtacctcagtattcaggctgcttctgcagactgatctctatgtaaactcacaataattggcctccaacagccagttcagtgggagtctgacatctgaatgctaatgctggaataaaaaggttaatgacaacgttaactaagactcatttgttataacaataagtaagctgatttggctttatttgattttacatcaaagagttgccaataaaaag

SEQ ID NO: 1723 - DNA, 600 bp, Chicken  19866894088367_1
gggttcactcaggagtaccactgccatgcagagcttctcataagacagggggaatcgtggcatcccaaaacactgctggaatgaagcttcagaaaggagtaggtctgagcacagaagacacaaatgctaaggtacaaaagagggatttgcaaggtgtgctttttccataaaccaggaaaataaataattacccctcactgtgatgcattcctgcctgtcatgtggtttaggggcctttggtggcatattcctgtgagtgaagtttactttttctctgaagatctggaggctgaaaagagyatcctggctcattgggaatggcacaaagccaataagcatcattaataaaacagggtggtggaaaggagaggagctgtacttgagcactgaggatagytggcacacaagctccttgtggcatgaaggggaatgggattaaacaagctcctggtctcaccttagacactcactgctgactctgtgacccagatgggtctgtgcaagtgacactgagatggagacagagggggagagaaaaaacacccctgcaagaccccaggttctcacttggatgtcagcaaagactggtgctaatgcctg

SEQ ID NO: 1724 - DNA, 600 bp, Chicken  19866894088367_2
agtaggtctgagcacagaagacacaaatgctaaggtacaaaagagggatttgcaaggtgtgctttttccataaaccaggaaaataaataattacccctcactgtgatgcattcctgcctgtcatgtggtttaggggcctttggtggcatattcctgtgagtgaagtttactttttctctgaagatctggaggctgaaaagagyatcctggctcattgggaatggcacaaagccaataagcatcattaataaaacagggtggtggaaaggagaggagctgtacttgagcactgaggatagytggcacacaagctccttgtggcatgaaggggaatgggattaaacaagctcctggtctcaccttagacactcactgctgactctgtgacccagatgggtctgtgcaagtgacactgagatggagacagagggggagagaaaaaacacccctgcaagaccccaggttctcacttggatgtcagcaaagactggtgctaatgcctgttctgttttcttgcagcagaggtggacacaatgttctcagtgccagcagtgggtggtggagcatgcatcagggagctcccagcatggtgccctgggt

SEQ ID NO: 1725 - DNA, 599 bp, Chicken  19866894088369_1
  misc_feature (1)..(189): n is any nucleotide
nnnnnnnnnnnnnnnnnnnnnnnnnnnnnnnnnnnnnnnnnnnnnnnnnnnnnnnnnnnnnnnnnnnnnnnnnnnnnnnnnnnnnnnnnnnnnnnnnnnnnnnnnnnnnnnnnnnnnnnnnnnnnnnnnnnnnnnnnnnnnnnnnnnnnnnnnnnnnnnnnnnnnnnnnnnnnnnnnnnnnnnnnnnnnctgaagggttaatttactgaagctgaattgatagagtcttccagagctgggtctcctcataactgtgattgggaaaagagctggggaacggctggaacgtgtgttatcttyttcctctktgggtgtcggatcattaagtgctgcacgctgggtgctggggaaggtggctggctgcagtctgtccccttttcctgcgttacaaagacgtggcactgctgtgttttcttactgcatgggatcaggtgatgcagtggttcaggggaactgtccgttgcagcacagactgctttgttcatcagctctagtcttgccttgctcttcaggtgagctcccctcttaaatcatctccttcctctctgagtgagtacgaagttctgcccaatggctgcgaagctcactgggaagtggtg

SEQ ID NO: 1726 - DNA, 599 bp, Chicken  19866894088369_2
  misc_feature (1)..(181): n is any nucleotide
nnnnnnnnnnnnnnnnnnnnnnnnnnnnnnnnnnnnnnnnnnnnnnnnnnnnnnnnnnnnnnnnnnnnnnnnnnnnnnnnnnnnnnnnnnnnnnnnnnnnnnnnnnnnnnnnnnnnnnnnnnnnnnnnnnnnnnnnnnnnnnnnnnnnnnnnnnnnnnnnnnnnnnnnnnnnnnnnnnnnnctgaagggttaatttactgaagctgaattgatagagtcttccagagctgggtctcctcataactgtgattgggaaaagagctggggaacggctggaacgtgtgttatcttyttcctctktgggtgtcggatcattaagtgctgcacgctgggtgctggggaaggtggctggctgcagtctgtccccttttcctgcgttacaaagacgtggcactgctgtgttttcttactgcatgggatcaggtgatgcagtggttcaggggaactgtccgttgcagcacagactgctttgttcatcagctctagtcttgccttgctcttcaggtgagctcccctcttaaatcatctccttcctctctgagtgagtacgaagttctgcccaatggctgcgaagctcactgggaagtggtggagcgaat

SEQ ID NO: 1727 - DNA, 394 bp, Chicken  19866894088369_3
tcctctctgagtgagtacgaagttctgcccaatggctgcgaagctcactgggaagtggtggagcgaatccttttcatctatgccaagctgaaccccgggatagcctacgttcaggggatgaatgaaatagtggggcccctttactacacctttgctacagatcctaacagcgagtggaaaggtgagaggctcttctggacgctgggtaggggctgttgtgctgcatgctctctgtgtgaaggagggtttcaggatggaggctctaagcaattcagtttggattgaccaggaaataaccamacaaaccccccaraccagcaagtgcagcaagagatgtgcatttctgagagcacagcrgacagacagaggctgaatgggctgggagtgctgaggg

SEQ ID NO: 1728 - DNA, 381 bp, Chicken  19866894088369_4
agtacgaagttctgcccaatggctgcgaagctcactgggaagtggtggagcgaatccttttcatctatgccaagctgaaccccgggatagcctacgttcaggggatgaatgaaatagtggggcccctttactacacctttgctacagatcctaacagcgagtggaaaggtgagaggctcttctggacgctgggtaggggctgttgtgctgcatgctctctgtgtgaaggagggtttcaggatggaggctctaagcaattcagtttggattgaccaggaaataaccamacaaaccccccaraccagcaagtgcagcaagagatgtgcatttctgagagcacagcrgacagacagaggctgaatgggctgggagtgctgaggg

SEQ ID NO: 1729 - DNA, 337 bp, Chicken  19866894088369_5
gtggagcgaatccttttcatctatgccaagctgaaccccgggatagcctacgttcaggggatgaatgaaatagtggggcccctttactacacctttgctacagatcctaacagcgagtggaaaggtgagaggctcttctggacgctgggtaggggctgttgtgctgcatgctctctgtgtgaaggagggtttcaggatggaggctctaagcaattcagtttggattgaccaggaaataaccamacaaaccccccaraccagcaagtgcagcaagagatgtgcatttctgagagcacagcrgacagacagaggctgaatgggctgggagtgctgaggg

SEQ ID NO: 1730 - DNA, 600 bp, Chicken  19866894088371_1
agccggtcaactgatgtggcttaataaaccagttatatccacacatagtgcttaacggaatactatggaagagctctagaattatatctgggagctagatatgagagaagccatctatgagaacactttggagagtcctgacttggtcacatttactgtgggaatgagagactacaggaagctccttcccatcactgtgggacacttataacaatcaacagacttctcagttagtggccaatcttgaagaaaccaagtgcctaagtgcacaatattcaagcaatacagaaaaagtattasttatctcaggaagtccaagcctgaagataccctccggattctacagtcaaggtctgtgagagtttctcgtgggcaaatatggaatcacctcatatgggctggggtacaacttaataagactgaaaaacaacctgaccatgatgtcctcctaaacctgtgaaggtaattgaatgaaaaacaaaactttacaactttttccactagaacagaaggtatcaggactgtggataaaattcctccactggtttggaggctagaaggatgtccttatgccatctaagaaatgttagccccctcaag

SEQ ID NO: 1731 - DNA, 599 bp, Chicken  19866894088374_1
  misc_feature (1)..(12): n is any nucleotide
nnnnnnnnnnnnggctgtgattctaaaagactgcccaaacgtcatttcctccaactgagccttttgaatatctggacacataacgtgcactgctgcatattattttccagattcatatacatactgaaacaccagttcctgttattttactgggtgagatacttgggtaactgaagggctatgcccttgaatctagcaatcaagccattatgaagctgaagtcattgcacaacagcagcatgagtcctggagaagatctgaaacgatttacaaagatttaacattaagtaaccacagccrcattcgacctccctgatcttatttcatacttactgctgctaaactgaacgagaacgatacagcatttactaacttgcagtgtgacagccttgatatgcagaaagggtgattcacagcagatttttgagtagagagggcatcctcctaagtgtcttgtactcatttactgtgggcagttaatgaactgagcacccctccctgtcatttgcactcacctcccagtctttccccactgcaccatcgcacccgttggaagaaaggcactgggccatgtctgcagtwtctcacatccaggtgca

SEQ ID NO: 1732 - DNA, 600 bp, Chicken  19866894088374_2
attaagtaaccacagccrcattcgacctccctgatcttatttcatacttactgctgctaaactgaacgagaacgatacagcatttactaacttgcagtgtgacagccttgatatgcagaaagggtgattcacagcagatttttgagtagagagggcatcctcctaagtgtcttgtactcatttactgtgggcagttaatgaactgagcacccctccctgtcatttgcactcacctcccagtctttccccactgcaccatcgcacccgttggaagaaaggcactgggccatgtctgcagtwtctcacatccaggtgcagagataaatgctgtaacgctgtgccgtgggaggtgggccaaatcacagcctgacacaaaaagtaccactgtcatcatgcaaccaaaacaacagtgtgtccccagacaggccagaaagcaccagctaccctcaaagccttaaccacactcatgtgggttgcctccttaccccaaggccaaaccagatgccaaaagtatgatatactgcctaaagaacgtgccttaagtagaatacgactcattgctggaatctgctcaggttgcaggcacacaatcaagtgcaa

SEQ ID NO: 1733 - DNA, 600 bp, Chicken  19866894088377_1
taggcatcctgttccagtgcctcaccaccacgtgagtaaaaaaaattccacctaacatctcagctgaatctcccctcttttagtttgaaaaaaaattccgcttgtcctcttaccaagagataatataaacagtccatcttcctcttgtttataagctcctttcaagtcctgggaggccacagtggggtctccctggagcctcttcttccagctccagacctggatgcagtactccagttatggcctcaaagggacattgtagaggaggacagtcatctccatcttttgatgcagcccgcratactgttggttttccaggctgcaagagcacactgctggctcatgtccagattttcatccaccaggagccccaagttttcctctacagggctgcattcagtgagttcttctccctgtctgtagagttatctggaattgggtcaacccaggtacaatatcttgcacttggtgttgttaaacctcattagttttacatggtccacttctcaagcctgtccaggtctctccaaatggcatctgttgtatcaactgcatcactcagcttagtgtcatcagcaagcttacccaagatgcactcat

SEQ ID NO: 1734 - DNA, 599 bp, Chicken  19866894088391_1
  misc_feature (1)..(40): n is any nucleotide
nnnnnnnnnnnnnnnnnnnnnnnnnnnnnnnnnnnnnnnntgcttgggagatgctgagctccaggtgatgcagagtttccagtcctgttcactgagggaagaacagctgggtggcccgggcacgagctctgcatcacttgtggtgcttgcagctgtggctgtatggggtgtcctgcagccaggttcaggcaggctctccctctgcctttttcagccttcgactggatgcagcatgcagaaccagcccaagacagggagcctgcgggatacttctgagtctctctcactctcatgttatartacacagctgccaaggggaaaaacagccggactccccgcaggtttctagcccacagcaccgtggccgcagacgacgggccccacgactgctgcggctgcggccggcgctgctcggggtcctgctgctgttcccatccccgtgccacatgtctacggctggctgccggccaccgcctcgcaggcagtgagtgcagctgggcttccagccctggtgctgccaagtgtctgcctggagccaggcccttcgcctgcccacagcgggatgccacactgccccrtgctgcatgaccgagcggctt

SEQ ID NO: 1735 - DNA, 600 bp, Chicken  19866894088391_2
ctctctcactctcatgttatartacacagctgccaaggggaaaaacagccggactccccgcaggtttctagcccacagcaccgtggccgcagacgacgggccccacgactgctgcggctgcggccggcgctgctcggggtcctgctgctgttcccatccccgtgccacatgtctacggctggctgccggccaccgcctcgcaggcagtgagtgcagctgggcttccagccctggtgctgccaagtgtctgcctggagccaggcccttcgcctgcccacagcgggatgccacactgccccrtgctgcatgaccgagcggctttcgggcccatgatgctcttctttcctgcttgtctcttttctccgcctttgtacagtcagagattgaaccttttaaaggctccttctcgttgtctggaaggttcctcagtgctgtgtccccatttgatttccgcaggcggtgcagcctcygaccgccgtttgaatgtacaaggcatcccggcacacgagcgctcgcatccatctcttgtccgtgtttttgaaattgagattctgcctccctgcatgatcagatcttttatttctgattaaagctgtcaaa

SEQ ID NO: 1736 - DNA, 512 bp, Chicken  19866894088391_3
gtctacggctggctgccggccaccgcctcgcaggcagtgagtgcagctgggcttccagccctggtgctgccaagtgtctgcctggagccaggcccttcgcctgcccacagcgggatgccacactgccccrtgctgcatgaccgagcggctttcgggcccatgatgctcttctttcctgcttgtctcttttctccgcctttgtacagtcagagattgaaccttttaaaggctccttctcgttgtctggaaggttcctcagtgctgtgtccccatttgatttccgcaggcggtgcagcctcygaccgccgtttgaatgtacaaggcatcccggcacacgagcgctcgcatccatctcttgtccgtgtttttgaaattgagattctgcctccctgcatgatcagatcttttatttctgattaaagctgtcaaaggaacagctttccgcctgctgaaaattcagattaaaaagacaaaaaatccacgtcgggcaaagaagtaacaatagcattttc

SEQ ID NO: 1737 - DNA, 600 bp, Chicken  19866894088395_1
acatgtgactgctgcagcctctattagcactaggtttcatgcactgcattttaccacagatgatattgctaacggaactgctactgcacaaacccattagcttcaaagaatctgtggagtccttaattctgttgcctctcattgtttcctgatgctgtaagactgtgctgtagttttgtccttacatttgtagtatgcattactggctttttcagtatgttgtatgagcgtatgtgcagtcactggatttcagtcgtgctctacatagatgtagaaattcacagcttgcacttgtcacayttcaaggtgcctcattactgtcgtacatgcttgccttccaagatttggtagtgtgtattgataagaacttctttacagtgggatgctgcttttaaaggaaaatagccttggcaaatatattttacagaggttattactgacagaatgttatttcttgggtcatgtaaatgactatctggaaagttcctaaaccttacaaatttgtaatttctgtgacttacacaagacaaaacccagcccattagaaacacaaaataaacagaacagattgcatgacagaagtaattggtaacaacctac

SEQ ID NO: 1738 - DNA, 600 bp, Chicken  19866894088402_1
cctggccctcttcctttggttgctctcatgctgggagcaaagcagaggaaccccacaaggtgtagtgctcacccttgcacagccccagagggtgaggtaaaaggacgggatgcggtcgacaggaagaaatgcagcctgccttccagctgaccttcaggcttttacaagcttagagggaaagttacagaattgttaacagctattttattatgcttacagatcgtgcaagctgtgttttattggaactggggcttggcagtttctgcatctggctgtgatgcaagcagaggctgcggcccygctggcgttaaccccctggtgccagcgcttcagtggggcagagtgagctgcctcaccgcgaggggctgcactgcacaacggcgatgtgaagctggggctttctggccaagagatttggtacagggcaacactttctgggcacagcatcacgtactaacgcatttctcattgctgcccagggaagaggtgctgtcaccgtccctgggggcgttaaatgtgtagatgtggcacagagggatatggttggtgggtgtagtggggatgggtgatggttggactcaacgatcctagtggtctttt

SEQ ID NO: 1739 - DNA, 600 bp, Chicken  19866894088404_1
atcatttaatcattttaaattgctgaactggagattttccaaatttctctagtttgaagtcacaaaaattttaaccatgtcccagagcaccctcttcatatattctctccctgagtatatatgttaatgtgcattaattatactctgtctaagtactgtacatgtctctgacatgaggattctacattacagtgaaggattattatactttctaggcccactgcagctacagaaccttcaatcactttaatatattttataacaagtagcatttaattaacagtacatctactgtccaaktgagggatccggtcttgcacaggtttaggcacacacttaatttcgtgcactatgaacagctctgtggttgttttattaaagaacaggattctcagacactactgtgtgacacaactggcaagtgcagagatctgagagaggaacagaactatggctacgaaaataaaatagtttggacaggatcaggagactaattctgcatttgcccacatttaattttttaaatagaacagatctgcttgtagatactaatttctttgggtacctgacttttttaatatgctttaagtagctcttgca

SEQ ID NO: 1740 - DNA, 600 bp, Chicken  19866894088405_1
cactccaatgaaagccagttcagacaagagatggtagaaatggaactacagacagccttggcccaaacaattcagtgtggtcaaggcagtgacactcagaacaatctgaggtcaaaggagaatggactccaagatgaaggatctctcgaacttcatatgagaggttcctgcttctcagtccacctctagaacctctgcatttcctgattcgtgcagatttgggatcaataatatctgatttttcctgaaccctgagtttgttattttttagtgtttgcagtactagaggggcgtttacargcaggagggagaccgactttttacatagtctaatactattagtgataagaatgaggaacggtattaaactagaagaggggagatttaggttagatgttaaggaataattctttactcagagtgtggtgaggcactggcacaggctgccctgagaagctgtgggtgccccatccctgaagtcattcaagactaggttggatggggccctgggcaatctgatctggagggtgttgctttctggaggaggcacaacaggagggtggcaacactgcgcatagtaggggattgaaactagatgaa

SEQ ID NO: 1741 - DNA, 600 bp, Chicken  19866894088409_1
caaataactggatgggagagaaaacagactagtttgctctagctttttttcctgcttataagcattactgaccttctatttgagaaaaggaaggtaaacatgtcagagttacccagacagaggtctgtgccatcatttagagctcaatatcacattaatggtttagcatttgacgcaaatggcagggaaagacatttcaagcaatgagtaaggaaaaggcaagaatgactcctaaatcaataattaagtttatgataattaaagtagactaactggttaatattgacagggcctactccrtgcagtctagagatgctaaaacatttggaaaaatttgaaaaacacaatataaaaaaattgaaaaatacatgcctatttcagttaaaaaaattgttgtagttttaagaagctaaaactgttgtatattcagaaggggaacatgtgaccgtatgatggattcctgctataccaggactgtaaatggacagcctttgattaaatctacacactgtataacatcattcattagatatgtaccaatgacaaatctgacttttatctcattctcagtttcactgacggtgaattttcctctgcctt

SEQ ID NO: 1742 - DNA, 599 bp, Chicken  19866894088412_1
  misc_feature (1)..(36): n is any nucleotide
nnnnnnnnnnnnnnnnnnnnnnnnnnnnnnnnnnnnaggcttaaataaagaataggaaataccactcttttgcaaaatttttatgttcagaagagaacaagcctataatttccctacgtggcttccttgaaggcaatgcagatctctatcctttaagcaccttgtataagatgaagcccatcaggtgggtgctctggtgcagcaccagcaatggatgtggggcagctgcatccctgtctgaggggcacgtcccaagcctgggcaaaaatgaggtttccctcaccacattcctgcagtatyggccccgtgtgccagcacatgggcagaggctgtgtttactacgtggttatcagcagggtgatgccggctccaggagccgtttctcggccgtgacgccgtctgccttcccatcgaagattaagaaactgccgctaacccagcggcttcctccctcgcgtggccttccaggttcggggcactgcaagccctgcaccaagaactccccgattgcttcagcaggggtggacagaygtcagccacaggcctttctgctgcttattccctgggaaagccaagaaaatctgctgagagcaagtgcc

SEQ ID NO: 1743 - DNA, 600 bp, Chicken  19866894088412_2
ccctgtctgaggggcacgtcccaagcctgggcaaaaatgaggtttccctcaccacattcctgcagtatyggccccgtgtgccagcacatgggcagaggctgtgtttactacgtggttatcagcagggtgatgccggctccaggagccgtttctcggccgtgacgccgtctgccttcccatcgaagattaagaaactgccgctaacccagcggcttcctccctcgcgtggccttccaggttcggggcactgcaagccctgcaccaagaactccccgattgcttcagcaggggtggacagaygtcagccacaggcctttctgctgcttattccctgggaaagccaagaaaatctgctgagagcaagtgccctgttgcaggctgtgtgttaaatgctgctcgatctccgccggccgcgcaagtgactgagataagggctgaccttgcrtgcagcaagccatttcctggccgaggtggggagaggcaggcggtgtgaaccaccaaacccaaaaaatagtagttctttcattgcacagtaaccgagaggagccggtcagcaaagctgaacaacgcggttctgcctttctggcagctttgcccagc

SEQ ID NO: 1744 - DNA, 600 bp, Chicken  19866894088412_3
ccgtttctcggccgtgacgccgtctgccttcccatcgaagattaagaaactgccgctaacccagcggcttcctccctcgcgtggccttccaggttcggggcactgcaagccctgcaccaagaactccccgattgcttcagcaggggtggacagaygtcagccacaggcctttctgctgcttattccctgggaaagccaagaaaatctgctgagagcaagtgccctgttgcaggctgtgtgttaaatgctgctcgatctccgccggccgcgcaagtgactgagataagggctgaccttgcrtgcagcaagccatttcctggccgaggtggggagaggcaggcggtgtgaaccaccaaacccaaaaaatagtagttctttcattgcacagtaaccgagaggagccggtcagcaaagctgaacaacgcggttctgcctttctggcagctttgcccagcttccagcagccaggttgctctgacctctgaggctcttgatggtttccatcttccaccaccttcttgcaggcccacagctccagcttagctcacgctgagacatctcagacacagaacctgccttctctcttcaccatttccttca

SEQ ID NO: 1745 - DNA, 600 bp, Chicken  19866894088415_1
catataaatggcgcaagaatgacattcctccatccctcaccactgagtcactgattcccaccttttgactggagaatggacacacgctctcttctcaccctgtattttctaagtcctgacctcattaatgcctacacaacatttagggtaatgtggtaaataccaagtatggcctttgtatgaaagtgagtctccatgcctatctgtcctggtcaatgtcatttctgtttcccggtccccatcatttactagccctacacatgcttcctgctgcatgagctagactccctggctggactmtgtctccataatgcactgcagtcatcaaattgccatgatgcatcctggcagtgcagacagcgtggagactacgatgtggtaagtaagggtcatgtaatgtggccacggggccaagaggcccgagagcacctgagactggaagcgcaggaagccttctccatgaggcattagagatactcatgcagccacactgtttaatactacctctcccaaaatgaaatatgtaatctcaaggtcagtgtgaatgaaaagtcacagcagggtcaaactgccagcttgttcagactgaaagaaaaaaag

SEQ ID NO: 1746 - DNA, 600 bp, Chicken  19866894088418_1
aagacagaacacgtaaatcaggtgcttaattacctctgcaccacaccagcagcactgagcacttgccgtgtgcgcacttgcagtgcagaaagcagaaaccttctgctgtgaagggaatggaagcagtctctctgacttatgttccacctttccactcactgattacctggaaggtgattcatgctttcctgggaagcatttaagcatcaccttgagccaattttctttgttaatgggttaattgtgttaccctctggttctcaggaaggggcaaggaaaaaaaaacataaaacagtgctsctacatttattggaacagtatagaagccaagttgtgaggtgacgggacagcatgtcacaatcccactgcagagcgtcccacagcatgcacagggcaagcagcatttgattgcaagagcagttccagaaagccttacaacatgagtgaatgatcaccccaagactaaagtcagaagctacacactgctcaaagctatgcctctgtttttgaagcactcaatatggaacccttctctggcatggcaggaaatgccagttcctgagatgccctggaaggtgtcccagcagcaaaggaagcagc

SEQ ID NO: 1747 - DNA, 599 bp, Chicken  19866894088420_1
  misc_feature (1)..(129): n is any nucleotide
nnnnnnnnnnnnnnnnnnnnnnnnnnnnnnnnnnnnnnnnnnnnnnnnnnnnnnnnnnnnnnnnnnnnnnnnnnnnnnnnnnnnnnnnnnnnnnnnnnnnnnnnnnnnnnnnnnnnnnnnnnnnnnnnntgacatccaagttcaacccactgtagatacttaagacagacatggcaggagtgatcccaggtcatttttttgtttgtgcccccctattcacatttgaaaccacctgaatcctcccccacctccttcgtcttttcctaccacaagctgaaatccagtgccaaagacaaaggytggatgggttttaagaggcagaacagagcacttctctatcacagccataccagctcattctgcaacccgctctccttcagcagggcagcaaaacacggtatagtaacacattgcaataccttctgccatcatacagcatttccctccatgtataattactgcatttcaggacaaacctaccttctcagtctaagaaggtctaagcagagtaagagatactgtcaaggaactttatcactgaagcaaatagcacagggctttacagkggtgctcagatcaggtttctgctcagaaacagg

SEQ ID NO: 1748 - DNA, 600 bp, Chicken  19866894088420_2
ccacaagctgaaatccagtgccaaagacaaaggytggatgggttttaagaggcagaacagagcacttctctatcacagccataccagctcattctgcaacccgctctccttcagcagggcagcaaaacacggtatagtaacacattgcaataccttctgccatcatacagcatttccctccatgtataattactgcatttcaggacaaacctaccttctcagtctaagaaggtctaagcagagtaagagatactgtcaaggaactttatcactgaagcaaatagcacagggctttacagkggtgctcagatcaggtttctgctcagaaacaggcagacaagctgtacttgaagagctaaatccttccagtgctcctactgcactttaaaaaccaaactacwgctgcagttggtgtctgtgtgagcagtacagctacgttagccacactgacagctcagctcctgaagcctgtgccaggcaaggagaggagctgagctaacacagggggaattgcacacccactttagaaaccaagtgcctgaaattacagaaggaaaaaataaaaaccttcagaaaattggtctagagaagttatttagg

SEQ ID NO: 1749 - DNA, 543 bp, Chicken  19866894088420_3
cgctctccttcagcagggcagcaaaacacggtatagtaacacattgcaataccttctgccatcatacagcatttccctccatgtataattactgcatttcaggacaaacctaccttctcagtctaagaaggtctaagcagagtaagagatactgtcaaggaactttatcactgaagcaaatagcacagggctttacagkggtgctcagatcaggtttctgctcagaaacaggcagacaagctgtacttgaagagctaaatccttccagtgctcctactgcactttaaaaaccaaactacwgctgcagttggtgtctgtgtgagcagtacagctacgttagccacactgacagctcagctcctgaagcctgtgccaggcaaggagaggagctgagctaacacagggggaattgcacacccactttagaaaccaagtgcctgaaattacagaaggaaaaaataaaaaccttcagaaaattggtctagagaagttatttaggtaagaattcccttggaagtcttgacccgtggaggagtgagggag

SEQ ID NO: 1750 - DNA, 600 bp, Chicken  19866894088423_1
gcgaggcactcaggtgcttcggcactgcactttggcaaacccactgctcagctccgggagcggtgccggggaggggtcggtgcccaacacagagccggaagggactgaaccacggagcgccctgcgggctccggagcccacatcgcctccaagaccgcgcagccacccgcagccaacatccaaggaagaaaagggcacacgtagaggtaacgttcccttcagccaccgctcaccttggccggagcagagagaagaggtcacacatcacccaacggtgctgctccgactgccccctcctcrttccctccctgcagcccccggctctggcagcagcaccacggcggagcagctcccggtgcctctcaccgaatcccccgaacccccccaggtcagggctccacgctgtcccactgcagaccccacagcacccagcaccactgggaaccatagaaccaccgaggctggaagaagccccagcaccgcctgacatcagcgcccgtcccagcgctgccgcacactcccacgagcactgctggcgatgtggtctacaaaccaacacagtcgacgaagtctgtggccaacgcagtctatggtcaacac

SEQ ID NO: 1751 - DNA, 600 bp, Chicken  19866894088423_2
agtcgacgaagtctgtggccaacgcagtctatggtcaacacggcctacagtcagatatggcctactgtcaacgtggtctacagccaaagcagtttatgtttaacgcactctacggtcaacgtaacctacggtcaacagtgtcgaccgtcagccacggcctacagtcagtgcggcctacagccaacgcagtttatggctatgaccatcgatggtcaatgtgacaatgtacagtcaatgcggcctatggtcaatatggtctacagccaacacggtctacggtcaacacagtccacggtgaasgcggtctccagtgaaagtggtccgtggtgaacgcggtcgatgcccaatgcggcctgcggtcgatgtggtctttgggcagcgtgctccgaggccgatgcggtgtgtggtcgacagccaacgcggcctacgctcaacgcagtctctggccaacccaaaccgaaggcacggagctcaagctgagctcccgcagtgcctccaagacaaaacagagccccccacaaccaaacctccccaccgaccacactctacagccrcgctgacccaaatatgcggagcagagctgtggcccggtgcccacag

SEQ ID NO: 1752 - DNA, 600 bp, Chicken  19866894088423_3
ggtctacagccaacacggtctacggtcaacacagtccacggtgaasgcggtctccagtgaaagtggtccgtggtgaacgcggtcgatgcccaatgcggcctgcggtcgatgtggtctttgggcagcgtgctccgaggccgatgcggtgtgtggtcgacagccaacgcggcctacgctcaacgcagtctctggccaacccaaaccgaaggcacggagctcaagctgagctcccgcagtgcctccaagacaaaacagagccccccacaaccaaacctccccaccgaccacactctacagccrcgctgacccaaatatgcggagcagagctgtggcccggtgcccacagagccctccagcacctccaagggcatctcctgttggtggcaccgcgctgcgtgggggcacacgggaggctccccaygcccaggcccagagctctcccccacttcccacttccagaggtgggaaccacaccggcccaccaggaaggaccggagcgctccgtcggaccacgaagcgccgaaagcrcgaagaaaactccgctgtgccaccgctccaaaccttcacccaactttcatttccatggcacttctcccccct

SEQ ID NO: 1753 - DNA, 600 bp, Chicken  19866894088423_4
gcagcgtgctccgaggccgatgcggtgtgtggtcgacagccaacgcggcctacgctcaacgcagtctctggccaacccaaaccgaaggcacggagctcaagctgagctcccgcagtgcctccaagacaaaacagagccccccacaaccaaacctccccaccgaccacactctacagccrcgctgacccaaatatgcggagcagagctgtggcccggtgcccacagagccctccagcacctccaagggcatctcctgttggtggcaccgcgctgcgtgggggcacacgggaggctccccaygcccaggcccagagctctcccccacttcccacttccagaggtgggaaccacaccggcccaccaggaaggaccggagcgctccgtcggaccacgaagcgccgaaagcrcgaagaaaactccgctgtgccaccgctccaaaccttcacccaactttcatttccatggcacttctcccccctttcccaaggtgtgaacgaggtgaggaatccgtaccccccaaccacgcgctgcccgtcaccggatcgcagtgggggggtccgtggggtgcggcgatctcccccactctgccaggggctctgc

SEQ ID NO: 1754 - DNA, 600 bp, Chicken  19866894088423_5
tcccgcagtgcctccaagacaaaacagagccccccacaaccaaacctccccaccgaccacactctacagccrcgctgacccaaatatgcggagcagagctgtggcccggtgcccacagagccctccagcacctccaagggcatctcctgttggtggcaccgcgctgcgtgggggcacacgggaggctccccaygcccaggcccagagctctcccccacttcccacttccagaggtgggaaccacaccggcccaccaggaaggaccggagcgctccgtcggaccacgaagcgccgaaagcrcgaagaaaactccgctgtgccaccgctccaaaccttcacccaactttcatttccatggcacttctcccccctttcccaaggtgtgaacgaggtgaggaatccgtaccccccaaccacgcgctgcccgtcaccggatcgcagtgggggggtccgtggggtgcggcgatctcccccactctgccaggggctctgcggcagcgtgggatgcatcccctggtgtggggcacggcctgacccggcccttaacgcttcccagatgtgggaaaaccctcacgcacacaaaagatggtggaaggaacc

SEQ ID NO: 1755 - DNA, 599 bp, Chicken  19866894088424_1
  misc_feature (1)..(29): n is any nucleotide
nnnnnnnnnnnnnnnnnnnnnnnnnnnnnctttgggatttggggtttggggaaaccctgcctggggacagctctgtgggatgctcccatctcacttcaccatctgtaccatgccaatagccccagtttggatctaggctcctccccagccctcctgggccccccatcccgatgtccccgaggcaggaaccgcttgtccccatacagatttattgtgctaggattacattgctggtgcagccagggaaggaagggtgaaggtagctcgaaatagggcacaaaccagctgtgccccagcccrtacaggtcctcgtcctgcggggaccccacgccccaggactctgcagcccactyaagagccagggaccagccctgtgcaccccaaaaagcatgaggctggggagatctggaccccctagggtccttcctgccctgtacccagaggctggcagtgggagcaggagatgctcttggagctgggaggggttcctccatcccagtgccatcagcatggccccaagactgtgtcatgggccaggaggaccaagggggacctggcggtcctggggggcctctcaagccagggtcccctttgggacc

SEQ ID NO: 1756 - DNA, 600 bp, Chicken  19866894088424_2
accctgcctggggacagctctgtgggatgctcccatctcacttcaccatctgtaccatgccaatagccccagtttggatctaggctcctccccagccctcctgggccccccatcccgatgtccccgaggcaggaaccgcttgtccccatacagatttattgtgctaggattacattgctggtgcagccagggaaggaagggtgaaggtagctcgaaatagggcacaaaccagctgtgccccagcccrtacaggtcctcgtcctgcggggaccccacgccccaggactctgcagcccactyaagagccagggaccagccctgtgcaccccaaaaagcatgaggctggggagatctggaccccctagggtccttcctgccctgtacccagaggctggcagtgggagcaggagatgctcttggagctgggaggggttcctccatcccagtgccatcagcatggccccaagactgtgtcatgggccaggaggaccaagggggacctggcggtcctggggggcctctcaagccagggtcccctttgggacccatggggccaatctgtcccacagccccagggttcccagggagccccagttttcc

SEQ ID NO: 1757 - DNA, 600 bp, Chicken  19866894088426_1
ggagaacgtagctgcctcatcaaaaactggttaagctaataaaaaaggtatggggggtgtacactggaattcctcaaaaatccctccgaatatttgctttattacatttcagatggattccttttaaagttctctgcttgactgcccagagcatttctttcctcttgtcccttaaataatggttcagatctgaagctcatgccttgggagtcctttttttttttttttttttcttcctgacggagcatgtgaagacaaacaactgcctagtattagcttcttatctttgtcttgtaaaaytcctccaggaaagctaattagaatgtataagactgagaaaagaagcaccagaaaaggaaaggaaaaagagacctcaaaacccacaggcagacagaggaaagtcctggtctttacagttcctgtctacaactggagatgcctggaatatgttttcgagtgtaatccatggctgtatgattcactgcttggaggggaggttcagctctcagggtggtagagtgtcctcagcctcctcatgcccaggacagagctgcttggcttgctggtaataaagcagtgctcaggaatctcaatctttcc

SEQ ID NO: 1758 - DNA, 600 bp, Chicken  19866894088427_1
aaactcagaagtgctgttttccagtaccatttcattcatcacttatttctagaataatagtctgttgtgtaataatcagcatttcaaaggtgtcactacttaagcccacaaaatcattgaatacttttaaacatccacttacacatttacagtacttgtaacagtcacagcattctacacagagtctcagcattatctactactgtcttccttccctttcaggcaccatggtgagtgttctcattctcccatctgagaatagccagaggggctccatcggctgttccagaagactgtatrggaggagtaagaatgagaataaggatagactaaagtaagttttccagtggtctttgctggtttaaagactgccagcattactgcattttggcaaacatagtttgagagcataaaatattttgataggttaggaggcctgtgggatctggggattatgaaccaggaaaaaaggaaaatgtgcctgctctagttcaagagatgtagctttccaaggggaaggtttatgtttcaagctgtggaaatacataaaggcataaccaagtacatccagacacttctagaacctgtccttgtccagtg

SEQ ID NO: 1759 - DNA, 600 bp, Chicken  19866894088432_1
ctccttactttcaactatgaacaaataaactctggatgtataaagtcatatagggaaagggacgtaagtattaaaatatattcatatttcttcctcttcagttcaggaagagttgtaggcagtacagtgaagataatcattcagtagctcctgtactaaggcatgctttctatcaaacattatgaaactaaactaagttccatttcttgctttatattactcatcatcagaatgaggaaagcaataccataattaaacaaaaatgacaaaaactaaggtaggctatatatgtatataatkcyttttacataggagaaacaacacatcgccatgtattattaacctagatccaaaataaagctacaacatttgaggaaaatgcaaracaggataagagtaagatatctgctgctaaagggatttcaaaacaaagaccgcrgagtctcaccatcaattaccccagcagtccagtgagaatttcagaattatctaaaaactttgttatctgattagatgctttttcagggacagaatatagaaaaaccaagacaaacttttctttcacttcagtttaagatctcagcttaatacactaagaaa

SEQ ID NO: 1760 - DNA, 600 bp, Chicken  19866894088432_2
ccttactttcaactatgaacaaataaactctggatgtataaagtcatatagggaaagggacgtaagtattaaaatatattcatatttcttcctcttcagttcaggaagagttgtaggcagtacagtgaagataatcattcagtagctcctgtactaaggcatgctttctatcaaacattatgaaactaaactaagttccatttcttgctttatattactcatcatcagaatgaggaaagcaataccataattaaacaaaaatgacaaaaactaaggtaggctatatatgtatataatkcyttttacataggagaaacaacacatcgccatgtattattaacctagatccaaaataaagctacaacatttgaggaaaatgcaaracaggataagagtaagatatctgctgctaaagggatttcaaaacaaagaccgcrgagtctcaccatcaattaccccagcagtccagtgagaatttcagaattatctaaaaactttgttatctgattagatgctttttcagggacagaatatagaaaaaccaagacaaacttttctttcacttcagtttaagatctcagcttaatacactaagaaatc

SEQ ID NO: 1761 - DNA, 600 bp, Chicken  19866894088432_3
atttcttcctcttcagttcaggaagagttgtaggcagtacagtgaagataatcattcagtagctcctgtactaaggcatgctttctatcaaacattatgaaactaaactaagttccatttcttgctttatattactcatcatcagaatgaggaaagcaataccataattaaacaaaaatgacaaaaactaaggtaggctatatatgtatataatkcyttttacataggagaaacaacacatcgccatgtattattaacctagatccaaaataaagctacaacatttgaggaaaatgcaaracaggataagagtaagatatctgctgctaaagggatttcaaaacaaagaccgcrgagtctcaccatcaattaccccagcagtccagtgagaatttcagaattatctaaaaactttgttatctgattagatgctttttcagggacagaatatagaaaaaccaagacaaacttttctttcacttcagtttaagatctcagcttaatacactaagaaatcaaaacaacagcaaattcttttcagagatacacaactgctggacaatataatgcaaccattttagttcagtgctgccaaatcac

SEQ ID NO: 1762 - DNA, 600 bp, Chicken  19866894088432_4
ttcagtagctcctgtactaaggcatgctttctatcaaacattatgaaactaaactaagttccatttcttgctttatattactcatcatcagaatgaggaaagcaataccataattaaacaaaaatgacaaaaactaaggtaggctatatatgtatataatkcyttttacataggagaaacaacacatcgccatgtattattaacctagatccaaaataaagctacaacatttgaggaaaatgcaaracaggataagagtaagatatctgctgctaaagggatttcaaaacaaagaccgcrgagtctcaccatcaattaccccagcagtccagtgagaatttcagaattatctaaaaactttgttatctgattagatgctttttcagggacagaatatagaaaaaccaagacaaacttttctttcacttcagtttaagatctcagcttaatacactaagaaatcaaaacaacagcaaattcttttcagagatacacaactgctggacaatataatgcaaccattttagttcagtgctgccaaatcactttttagcttttccatcaattccttcctcctcagcccaagtgtttatgcttcta

SEQ ID NO: 1763 - DNA, 367 bp, Chicken  19866894088432_5
cagcttaatacactaagaaatcaaaacaacagcaaattcttttcagagatacacaactgctggacaatataatgcaaccattttagttcagtgctgccaaatcactttttagcttttccatcaattccttcctcctcagcccaagtgtttatgcttctaaactcatacattgtctcttagcatgcagtaatttgaataagcaggacagttatatccgcacaaactgtccacaataggcaggcaacattccttcaggtctgcttttattcactttatgtctagccccctcccccacccccmaaaaaataaaaatcccctaaccattagaacttcaaaatgttattagcagaaataccctacaagaata

SEQ ID NO: 1764 - DNA, 599 bp, Chicken  19866894088436_1
  misc_feature (1)..(48): n is any nucleotide
nnnnnnnnnnnnnnnnnnnnnnnnnnnnnnnnnnnnnnnnnnnnnnnntgtcttggaaaccaaggagatgagcagctggaacagtgcctacaacatccagtgacttagcaagactggcaaagccagcaatgaagtctttcaagggaaatgcaaggcatgaggccccgcagcggtgcgtgtctgtgagagaactgatgctgacctctgaagctttgctgagcaatccccatcagcactccagtgcccagtaaagcatgtcatatcctcatatacagtttaataagggaatgtggcggttartgtaagtgaaagggaaaggtagcagtccaggcacttccctcctagcctcaccccaggcatcctctggctgcttagcatgcctttgttgtcatcctttccagccttgccctctgcaaaatcacaggattcactgttctttgagacttaaaattgtcttatctgcagtgctgcaggctttgaggagtaaggaaagcccagcacagatggtgtgttcactagaggattcatcttctccccacgtggccaaccatcggcagtcagcactgagcaacagggtgattcttactatatcagtgagt

SEQ ID NO: 1765 - DNA, 600 bp, Chicken  19866894088438_1
tgtactcctccaggtggcagtgaatagctggaatcacagctcctaggggcatcattgaaaatcctgtcacaaatatatgggtcatgtgtctgcacaaaactaacatttttttggcttggcagactgcctgcttgcctgcccactgagcaaagaaatttgggagcctttgaggctcagtctgtgcgtggaaattttgatgacctgacagtgaccaggcttttgttgcaccaattaaaaatcttcttaacagctttttgacattgatgacttgaactgaagacaagcgctgagtcttgtacsgaagagcaagagtgatacacgtatcggctttgccaccacatcgcggccccgcagctggctgcagagcctgccaagcggccagcagctgctgctgctgcaggagaaaatgttttctacagctgagcagctggggcctgtgactgccatgcaaaggccggaaataatagttcaaaatggtgagtgatggatcactgggaattgggcattaaaaattttggttgtgaaacacaagagaaatgtttaatcaaagacaaatggactggaaaacactaagtggtgatttatttgaaataataggag

SEQ ID NO: 1766 - DNA, 547 bp, Chicken  19866894088438_2
gccggaaataatagttcaaaatggtgagtgatggatcactgggaattgggcattaaaaattttggttgtgaaacacaagagaaatgtttaatcaaagacaaatggactggaaaacactaagtggtgatttatttgaaataataggagttaggaaaagtgaattacatcaaggattttgtttagctgcctgcaagagtaaaggttaggttgggagactgctccccagcaaatttatttgctgttaatgtgccagtgaaccaaaggaatcttgaaaaagatcgatctcacctattctttcakcgataaacggaagaaactgctgtgatgcagtcttaaacatccaaaagatatctaagacatctgctgccaaaaaaaggtttttaagaaatatgctcratgtctgtttycaggcccaaattttggtgcctaaagccatattctgtgtccaaaagtagaataattgcaccgtctaaaacatttaaaaataaatcctccaaacagctctttattaggctcttaaacatggatttaacaattgaattctaga

SEQ ID NO: 1767 - DNA, 451 bp, Chicken  19866894088438_3
gacaaatggactggaaaacactaagtggtgatttatttgaaataataggagttaggaaaagtgaattacatcaaggattttgtttagctgcctgcaagagtaaaggttaggttgggagactgctccccagcaaatttatttgctgttaatgtgccagtgaaccaaaggaatcttgaaaaagatcgatctcacctattctttcakcgataaacggaagaaactgctgtgatgcagtcttaaacatccaaaagatatctaagacatctgctgccaaaaaaaggtttttaagaaatatgctcratgtctgtttycaggcccaaattttggtgcctaaagccatattctgtgtccaaaagtagaataattgcaccgtctaaaacatttaaaaataaatcctccaaacagctctttattaggctcttaaacatggatttaacaattgaattctaga

SEQ ID NO: 1768 - DNA, 440 bp, Chicken  19866894088438_4
tggaaaacactaagtggtgatttatttgaaataataggagttaggaaaagtgaattacatcaaggattttgtttagctgcctgcaagagtaaaggttaggttgggagactgctccccagcaaatttatttgctgttaatgtgccagtgaaccaaaggaatcttgaaaaagatcgatctcacctattctttcakcgataaacggaagaaactgctgtgatgcagtcttaaacatccaaaagatatctaagacatctgctgccaaaaaaaggtttttaagaaatatgctcratgtctgtttycaggcccaaattttggtgcctaaagccatattctgtgtccaaaagtagaataattgcaccgtctaaaacatttaaaaataaatcctccaaacagctctttattaggctcttaaacatggatttaacaattgaattctaga

SEQ ID NO: 1769 - DNA, 600 bp, Chicken  19866894088439_1
ccttgcacttcaaatctctgtctaagccttgcaatttgggcttttccagcaaaagatgcaaagaagaaacctctgctcatccctgtcctagatgtactaattgcctctgagacgacttcaccaagagagaaaaagacagacgccataagtgaaaagccctcattctgatttctgcagacctttcaggtctttacacatacttttcccactgctttgagcagccactgtcacatcaaagttcataacatcaaagttggtagcagagctatccacccaggagctaataattcacgtctctcrcagccaggaagtaatttgggctttaacctccccgttctgggacccatgttaacaagccactcttctcagatccctccttgtgtatcaaagctgactccctttcctgggaaaaaggccacagccagtcaaagacgcaccaagaggaaataagtcatgaaacccatggcatccccaaaacccacgttccgtgttcaagggctgttctgacctcgcctgtgctggcttcctttgctggccctgaaggcacacgcgcaggaaggaggcactgcctgcccttcacaggagggattgtggcagagg

SEQ ID NO: 1770 - DNA, 599 bp, Chicken  19866894088442_1
  misc_feature (1)..(9): n is any nucleotide
nnnnnnnnncagtggctgctgatgggctctgcttggctttccctaggagctgtgctcactgagctggatggaccaagcaaggttcctttgtgctgaacctttcaaaccatgtagaccaagggcccttccagtatgccctgcaggcaccctacaggtcttctccatacaaagctcctagggttccaatggacttgtctcctcccagttagtattctcatacaaaagatgtctgtggccaagctgggttcagaaccacattctacacaaagccattaatagaggcaaatgtgtaatatacartatcttcgtaagacttgtgttgtgctaatgctgaagggcaggagctgcattgtactcgctgctgtgcaaatgtaaaacataaagagcattctctgctccagaaaacttgtgtctgctgagacagaacgagagcagggaagcataaccaggctatgggattgggctgtggcatggccatgcaacaaggtcccctgcaagggcagcctctgctcaactctggcagctgcagtggggacagtcagatggtgcttaattaatgtgacatacatcaccaatattgktttattttctttattgct

SEQ ID NO: 1771 - DNA, 600 bp, Chicken  19866894088442_2
gcaaatgtgtaatatacartatcttcgtaagacttgtgttgtgctaatgctgaagggcaggagctgcattgtactcgctgctgtgcaaatgtaaaacataaagagcattctctgctccagaaaacttgtgtctgctgagacagaacgagagcagggaagcataaccaggctatgggattgggctgtggcatggccatgcaacaaggtcccctgcaagggcagcctctgctcaactctggcagctgcagtggggacagtcagatggtgcttaattaatgtgacatacatcaccaatattgktttattttctttattgctggaacagaatttgccaaagtgactttctactctgagaaatgggcaagcaaggaaagctattggtggagataagtgtttagagagaggtttgtttgctcatgtattgtgtccaaagtgcaaaggagtctttctcttcagtgygtcccttgttggcctgttctctaacaacrtaaatgtgtgttcaggaaaaataaagctgttctttaaagggtgatgaaagatgaagaagggaattgcttttctaaccttaaaaacatgggatacagctcacatctggcttta

SEQ ID NO: 1772 - DNA, 600 bp, Chicken  19866894088442_3
cataaccaggctatgggattgggctgtggcatggccatgcaacaaggtcccctgcaagggcagcctctgctcaactctggcagctgcagtggggacagtcagatggtgcttaattaatgtgacatacatcaccaatattgktttattttctttattgctggaacagaatttgccaaagtgactttctactctgagaaatgggcaagcaaggaaagctattggtggagataagtgtttagagagaggtttgtttgctcatgtattgtgtccaaagtgcaaaggagtctttctcttcagtgygtcccttgttggcctgttctctaacaacrtaaatgtgtgttcaggaaaaataaagctgttctttaaagggtgatgaaagatgaagaagggaattgcttttctaaccttaaaaacatgggatacagctcacatctggctttactagaagtgtaacaacagtcacaccaakgggctgggagtgatccaatgagcaaaaccttctatgtgtggtgaggggacagctcccatctaggagttggggctacctgggctgagctaacctctcaaactgcagtgacttcccagcaggtcactgcttcc

SEQ ID NO: 1773 - DNA, 600 bp, Chicken  19866894088442_4
catggccatgcaacaaggtcccctgcaagggcagcctctgctcaactctggcagctgcagtggggacagtcagatggtgcttaattaatgtgacatacatcaccaatattgktttattttctttattgctggaacagaatttgccaaagtgactttctactctgagaaatgggcaagcaaggaaagctattggtggagataagtgtttagagagaggtttgtttgctcatgtattgtgtccaaagtgcaaaggagtctttctcttcagtgygtcccttgttggcctgttctctaacaacrtaaatgtgtgttcaggaaaaataaagctgttctttaaagggtgatgaaagatgaagaagggaattgcttttctaaccttaaaaacatgggatacagctcacatctggctttactagaagtgtaacaacagtcacaccaakgggctgggagtgatccaatgagcaaaaccttctatgtgtggtgaggggacagctcccatctaggagttggggctacctgggctgagctaacctctcaaactgcagtgacttcccagcaggtcactgcttccccagagtggttacagctcccagtgtctga

SEQ ID NO: 1774 - DNA, 600 bp, Chicken  19866894088442_5
ttgccaaagtgactttctactctgagaaatgggcaagcaaggaaagctattggtggagataagtgtttagagagaggtttgtttgctcatgtattgtgtccaaagtgcaaaggagtctttctcttcagtgygtcccttgttggcctgttctctaacaacrtaaatgtgtgttcaggaaaaataaagctgttctttaaagggtgatgaaagatgaagaagggaattgcttttctaaccttaaaaacatgggatacagctcacatctggctttactagaagtgtaacaacagtcacaccaakgggctgggagtgatccaatgagcaaaaccttctatgtgtggtgaggggacagctcccatctaggagttggggctacctgggctgagctaacctctcaaactgcagtgacttcccagcaggtcactgcttccccagagtggttacagctcccagtgtctgatctcttcccgtgatctgaggtttgtacaccccagatgtttcccctgggctctagcaatccagccaaaccacccacatctccatctttcgacagccatccaggaaatgcacttactcaactctcccagtgtacttgaaggg

SEQ ID NO: 1775 - DNA, 600 bp, Chicken  19866894088445_1
tatgcagttcatgagtatggacaggtaagtgcagatggacacagggaacagggaaaaagccaacagaagagtcattggctgggagaaagaagtaagaacaactatatcacataagaaaagaccaggggatgggaaattaattagtcagactgcgatgatcaagtcgtattgccacagcactttgcttagaggaagattaactatggtttgtctggcatttcatcccctccagctctttgtgctgttatgtgctttgagctctaaaagaagtgttaagatttacagcaggaaaaacgcagmgtgtcacttttgagccagctcaagtgaaaaacagaacagatcttcagacttgaaaagtgactgcaactcaaaaagggtctgcaaagccagacacctctggagggatgtggagtgttgaatggagcagtttccttacagttgtcagcaaaaccaccatctgagagggagagagagagagagagaagagggagaaagaaaaaaaagaaagaaagaagagggaccatcttcacccttacagcctggcaaatgggaagtggcatttgcaaagagctgagtgtcatgaagttgacctcactgctg

SEQ ID NO: 1776 - DNA, 600 bp, Chicken  19866894088446_1
tttcagccaaacctatccagcttttggttggagaagtggaggggaaaacagcttgaagtgactttttcctgttgcaccggctgtgagctgtgcttgaattctgcagaacgtagcagcttgagccaaaccaggaaacgtcttgggtgttttgtgtgcactcatctttgatgttctgggatttggggcttctgtggtgtgttttggatatgagcccaggtgaaaatgccctggaaaaggggtgtacctggcaggtgaggttctggcagcccctttctatcctgggccttctcactcaggtcmttctatgggagcagygtgctcttcggggcagtactgcagagctgctctgatgaatcttttctgttggcaattcaaagccttggggttttgtttgggttttagtgcgttcttgtgtcagccgacatctgcttggatgttttctattaacatccctttaattttgggatatgctttgcttaattgaaactttgaagctacagaaagatattttgagcaaacctgttcttccttatgctaatgtaaatgcagaataaatacatactgtgaccaatgctggtaataagttgtctttgttgaaga

SEQ ID NO: 1777 - DNA, 600 bp, Chicken  19866894088446_2
tccagcttttggttggagaagtggaggggaaaacagcttgaagtgactttttcctgttgcaccggctgtgagctgtgcttgaattctgcagaacgtagcagcttgagccaaaccaggaaacgtcttgggtgttttgtgtgcactcatctttgatgttctgggatttggggcttctgtggtgtgttttggatatgagcccaggtgaaaatgccctggaaaaggggtgtacctggcaggtgaggttctggcagcccctttctatcctgggccttctcactcaggtcmttctatgggagcagygtgctcttcggggcagtactgcagagctgctctgatgaatcttttctgttggcaattcaaagccttggggttttgtttgggttttagtgcgttcttgtgtcagccgacatctgcttggatgttttctattaacatccctttaattttgggatatgctttgcttaattgaaactttgaagctacagaaagatattttgagcaaacctgttcttccttatgctaatgtaaatgcagaataaatacatactgtgaccaatgctggtaataagttgtctttgttgaagagtccacgatttgaaa

SEQ ID NO: 1778 - DNA, 599 bp, Chicken  19866894088450_1
  misc_feature (1)..(99): n is any nucleotide
nnnnnnnnnnnnnnnnnnnnnnnnnnnnnnnnnnnnnnnnnnnnnnnnnnnnnnnnnnnnnnnnnnnnnnnnnnnnnnnnnnnnnnnnnnnnnnnnnnnagctgcttctgactgcccgtttttagaaaagcagatgaatatcaaaaaccttcttcatgaggggattgtggccgtcgttgcttaagagctgggtctggaaagcaatgagagcatttactctgcagcaacgttgtgcccaaaggtgaaaatggcagagacaattttgcgccattaatcagatcaattcttaacccagatgtrgagcagagccttcagtaaaaatataaccagaaagcacgacaatcagtacarcttacagtatttggccagaggctactttaagagaagggaataaaaccatgttgccactgttgcatcactaattgcaaaacaaagttaggttttggacagtgctctgtaaaatattcacccatggtccagatatgctttaaataaaacaggcagttgccaacataatgcactgttttctctgttttgcttgatragcctccagaagtggtttatttamgatccacatgttttaattgaaattatttatg

SEQ ID NO: 1779 - DNA, 599 bp, Chicken  19866894088450_2
  misc_feature (1)..(48): n is any nucleotide
nnnnnnnnnnnnnnnnnnnnnnnnnnnnnnnnnnnnnnnnnnnnnnnnagctgcttctgactgcccgtttttagaaaagcagatgaatatcaaaaaccttcttcatgaggggattgtggccgtcgttgcttaagagctgggtctggaaagcaatgagagcatttactctgcagcaacgttgtgcccaaaggtgaaaatggcagagacaattttgcgccattaatcagatcaattcttaacccagatgtrgagcagagccttcagtaaaaatataaccagaaagcacgacaatcagtacarcttacagtatttggccagaggctactttaagagaagggaataaaaccatgttgccactgttgcatcactaattgcaaaacaaagttaggttttggacagtgctctgtaaaatattcacccatggtccagatatgctttaaataaaacaggcagttgccaacataatgcactgttttctctgttttgcttgatragcctccagaagtggtttatttamgatccacatgttttaattgaaattatttatgctgtcagtaagaacagcatcagcacttttgctgcagcacacatcggtgtgg

SEQ ID NO: 1780 - DNA, 600 bp, Chicken  19866894088450_3
aaaatggcagagacaattttgcgccattaatcagatcaattcttaacccagatgtrgagcagagccttcagtaaaaatataaccagaaagcacgacaatcagtacarcttacagtatttggccagaggctactttaagagaagggaataaaaccatgttgccactgttgcatcactaattgcaaaacaaagttaggttttggacagtgctctgtaaaatattcacccatggtccagatatgctttaaataaaacaggcagttgccaacataatgcactgttttctctgttttgcttgatragcctccagaagtggtttatttamgatccacatgttttaattgaaattatttatgctgtcagtaagaacagcatcagcacttttgctgcagcacacatcggtgtggtaacactgcatgtctgtaaaagcaaagcagaagcccattaaaacagaagggaatgcagcctatcctgtggtttgaaaatcacattgttttgtggttcagctatattaaaaaagaggtaactgtggaagtaaaacaagctttaactcttgcatctaattcctgctgctgctgccaaactgcagtggagcagatgg

SEQ ID NO: 1781 - DNA, 600 bp, Chicken  19866894088450_4
cattaatcagatcaattcttaacccagatgtrgagcagagccttcagtaaaaatataaccagaaagcacgacaatcagtacarcttacagtatttggccagaggctactttaagagaagggaataaaaccatgttgccactgttgcatcactaattgcaaaacaaagttaggttttggacagtgctctgtaaaatattcacccatggtccagatatgctttaaataaaacaggcagttgccaacataatgcactgttttctctgttttgcttgatragcctccagaagtggtttatttamgatccacatgttttaattgaaattatttatgctgtcagtaagaacagcatcagcacttttgctgcagcacacatcggtgtggtaacactgcatgtctgtaaaagcaaagcagaagcccattaaaacagaagggaatgcagcctatcctgtggtttgaaaatcacattgttttgtggttcagctatattaaaaaagaggtaactgtggaagtaaaacaagctttaactcttgcatctaattcctgctgctgctgccaaactgcagtggagcagatggaagcaccagaatggcctctttgct

SEQ ID NO: 1782 - DNA, 600 bp, Chicken  19866894088450_5
cacattgttttgtggttcagctatattaaaaaagaggtaactgtggaagtaaaacaagctttaactcttgcatctaattcctgctgctgctgccaaactgcagtggagcagatggaagcaccagaatggcctctttgctctgtaacagaagcacaggatatgatctgttttgtgttgttcggtacatctgaaaacaaaattttggtggtgcatactctgaaatacagagctgttcttgcaacaccacacaaagcacactgctctggaggaactcatgagctgagttcctccaacttcgakgaagagcttttctggaccagtacgtcagtacttggttgcctgcctgggcttctctccatcacagaggctctgattcttccagatgtcagtgtctgccacaaatgtgaatcactacatggaggggaagacctctaccagaggcactggttctatttggactgtcaagtacagctggaatgcctcagccccagagacatccatgtacagcaatatacagaaattgaaatccaagcaatcaatggtagaaagcagtgactgttcaaagcatgccagaccttcatttccctttccactggtccc

SEQ ID NO: 1783 - DNA, 600 bp, Chicken  19866894088450_6
ctatttggactgtcaagtacagctggaatgcctcagccccagagacatccatgtacagcaatatacagaaattgaaatccaagcaatcaatggtagaaagcagtgactgttcaaagcatgccagaccttcatttccctttccactggtccctcctttctatacggtggtttccttttctcctattttgctaatgtgtacaatcacgacataatatccacataattttctctggtcttgcatttttgaaggaattaggagacattgcataattgcttggcaagcccatgaaacattccatrcaatctgtcagtctaaaagaatggatcactgaaagcaacaggcacacagaaacacagcatgctgttctagggcacttttgatttcaaagctgaccttgaaactctgagtgaaaaaagagatggtgtccaggaccgtcaggcacacttcggtggctatgttgccctccagcaaggcctggtgcacaatatctgcttctgaggtgcctgcatctgcagatggaaaggaaatcaggaggaaatggtgctcagcactctggctcccaccaaatctaaatgctgatacagatgaggatgcaccct

SEQ ID NO: 1784 - DNA, 410 bp, Chicken  19866894088451_1
tataggaccttgagaggatatctagtacaatctttaacacagaacagggtggagagtgaagacagatgtgtttacttggtttccacaatccaactgaatgaggaaaatttccaagaactatgacctccctgggcaggctgtcctcacagagcagactcttttccttattttcctattattatttccccattatttccttattttctttgagcatgtcttgtttcatttcattaccagtgtctcttattcttctgtccacccttttaaagaaagtggatctatcttcttggtagcctcttmtcaagcaatagaaagctgtttttgtcttttctcttgtttgaataagagccattccttcaggctctcctcacaggacaagtgttccagcccccagcagtcttggtggacct

SEQ ID NO: 1785 - DNA, 600 bp, Chicken  19866894088456_1
aatgtttcatctaattcatctgaggggaggaaaggccagtttcatcagaaaatctatcagctactcaagagaaacatcatacttctgatttttaaattcatcttgatctgcgttctactgagatgtgctctttgcccacatcaatgaatactggttagcatggttgccatatcttctcagggacaactcacaggacacacagtgcaatgtctagggagagaaaggaaggaagaaaagaaggaaggaagggagaaaggtgtagggttgcttgacctagatgggtcctatctctgcattgcytgaaggggctgggttgggcatgcagttatttccagggggtgccagttgtggatacttcctcctgctcttgggggctgcattgccctttgccatcatggccagcataatgggttagacctctcagctgcttgtaagctgccatggtgcagccactcagattttgctgggtgagccttgctgctgacaccagacagtgaggtgtatttttcccatatttcacaaaacagatgaccttgaactgctcacaacctcagtgggaattcccattatatcttgcactggcagaagtgataatagtaa

SEQ ID NO: 1786 - DNA, 600 bp, Chicken  19866894088457_1
tctgaatctgctattaacagaaaagtaaaaacatttgttgagataatatatgttattaacaatttattttcccataatcattcctattctcaaatatcttagagcatttataaagtagcatatataactatattttgactttaaccataaaaatatctctgtttcacaaagaaactttaattttggttgagagaataatgtttttgttaattaactaaataatttaattgattagtcttagttttcccagccaaggtatttaacttcagcataacacacagtttgcttatagtttttaaraattagttatggtagagaaaaatgcatgtaataaaatgcttgtttccacaaaatttctgtaggaactcaaaatatgttttgtttatgcaataagaataaccttgatttatgaagaaaaaagatgaagattcctttttcagttgcaaagaattgtggccaaattcactgcgactgcagggtgtgtccacagtgtcagcccaacacacacaccacacacacacaaaagtgttctgtattaaaattgtgcacatctaaaaccgaaaccatgtgcatgttattcttcactcagaacagccattt

SEQ ID NO: 1787 - DNA, 600 bp, Chicken  19866894088464_1
gggaaacagctcgacagtcatcagttcctctgtttgtcaagggaatttctttgctccttggcaaagtgcctgctctgcatttattccctttgtctggatttctttcactttcaatgaaattttcagcacaaaaggatctcatcctctcaaagaaaatcacagttaaatatggcactgctagaactgatttctgaaattatcttcttccccctcatcctccctccaaacaccattttattctcctacaagcatagtggatcaagaggaggcgacagcaaggacaaccagggatttctctgsaatttctagctttctgacactatgactgtgggacaaagaggcccctgaggccatttcrtttttttcctcatagaaggcactgacaaaggtccctatgcctccctaaaggctctgttgttttccattcccaacaagccatgaagcgcacagccttatgtgtcttggtgaagccacttagtttgtacagrgtactttgtgtggtttgtaattttgcagccctgcagtattctaaatgatgattaagtactaaaacaaagagattatagttttcatgtgctaaaatgaaattgttctattcat

SEQ ID NO: 1788 - DNA, 600 bp, Chicken  19866894088464_2
tggcaaagtgcctgctctgcatttattccctttgtctggatttctttcactttcaatgaaattttcagcacaaaaggatctcatcctctcaaagaaaatcacagttaaatatggcactgctagaactgatttctgaaattatcttcttccccctcatcctccctccaaacaccattttattctcctacaagcatagtggatcaagaggaggcgacagcaaggacaaccagggatttctctgsaatttctagctttctgacactatgactgtgggacaaagaggcccctgaggccatttcrtttttttcctcatagaaggcactgacaaaggtccctatgcctccctaaaggctctgttgttttccattcccaacaagccatgaagcgcacagccttatgtgtcttggtgaagccacttagtttgtacagrgtactttgtgtggtttgtaattttgcagccctgcagtattctaaatgatgattaagtactaaaacaaagagattatagttttcatgtgctaaaatgaaattgttctattcattaatgccattcctaaattattttctttgcaaggaagaaaaagcctcccctcaaatctc

SEQ ID NO: 1789 - DNA, 600 bp, Chicken  19866894088464_3
ttctgaaattatcttcttccccctcatcctccctccaaacaccattttattctcctacaagcatagtggatcaagaggaggcgacagcaaggacaaccagggatttctctgsaatttctagctttctgacactatgactgtgggacaaagaggcccctgaggccatttcrtttttttcctcatagaaggcactgacaaaggtccctatgcctccctaaaggctctgttgttttccattcccaacaagccatgaagcgcacagccttatgtgtcttggtgaagccacttagtttgtacagrgtactttgtgtggtttgtaattttgcagccctgcagtattctaaatgatgattaagtactaaaacaaagagattatagttttcatgtgctaaaatgaaattgttctattcattaatgccattcctaaattattttctttgcaaggaagaaaaagcctcccctcaaatctccacttaacctcccaccatttttcaacatttcaccttctcagagcaaacacagtcgatgatcacggaagtattgcttttacttgagattactcctaatttacaatcatatagctattagagctattagcgg

SEQ ID NO: 1790 - DNA, 599 bp, Chicken  19866894088474_1
  misc_feature (1)..(55): n is any nucleotide
nnnnnnnnnnnnnnnnnnnnnnnnnnnnnnnnnnnnnnnnnnnnnnnnnnnnnnnctttgttactggtccagtacttatcaaaacgaacgtgcaccataagtctgtatgtaggtattgatatagacgtggttatatcaatatttatatgaagacggccgccgccgcggggtgctacgtggagtgtggtacagtggtgtggatgatcaggagggagagcggttgctggaaaagccaatcagaaatccgggaaggtcgcagtaaccatgtcagatgattactgaggtttttttgttttgggkttttttttttttttttttttctataatactaaaattgtgattataagaaatagtccaaatgtttctgagaaattttcattgtgtatatagataatacagaatttcatggtgatatctgaaatgtaaatattgtacaatattgtcatgtacaagcgtacctaatgcacactttatcttttattgtacaaaaaaatagtgtacaaaattctttgstttctattgagtacacatacaagagactaccagtgtaaagtgataaataaaaatacagcctaaatgcttttatatgataatgtaaa

SEQ ID NO: 1791 - DNA, 599 bp, Chicken  19866894088474_2
  misc_feature (1)..(54): n is any nucleotide
nnnnnnnnnnnnnnnnnnnnnnnnnnnnnnnnnnnnnnnnnnnnnnnnnnnnnnctttgttactggtccagtacttatcaaaacgaacgtgcaccataagtctgtatgtaggtattgatatagacgtggttatatcaatatttatatgaagacggccgccgccgcggggtgctacgtggagtgtggtacagtggtgtggatgatcaggagggagagcggttgctggaaaagccaatcagaaatccgggaaggtcgcagtaaccatgtcagatgattactgaggtttttttgttttgggkktttttttttttttttttttctataatactaaaattgtgattataagaaatagtccaaatgtttctgagaaattttcattgtgtatatagataatacagaatttcatggtgatatctgaaatgtaaatattgtacaatattgtcatgtacaagcgtacctaatgcacactttatcttttattgtacaaaaaaatagtgtacaaaattctttgstttctattgagtacacatacaagagactaccagtgtaaagtgataaataaaaatacagcctaaatgcttttatatgataatgtaaaa

SEQ ID NO: 1792 - DNA, 599 bp, Chicken  19866894088474_3
  misc_feature (1)..(53): n is any nucleotide
nnnnnnnnnnnnnnnnnnnnnnnnnnnnnnnnnnnnnnnnnnnnnnnnnnnnnctttgttactggtccagtacttatcaaaacgaacgtgcaccataagtctgtatgtaggtattgatatagacgtggttatatcaatatttatatgaagacggccgccgccgcggggtgctacgtggagtgtggtacagtggtgtggatgatcaggagggagagcggttgctggaaaagccaatcagaaatccgggaaggtcgcagtaaccatgtcagatgattactgaggtttttttgttttgggktkttttttttttttttttttctataatactaaaattgtgattataagaaatagtccaaatgtttctgagaaattttcattgtgtatatagataatacagaatttcatggtgatatctgaaatgtaaatattgtacaatattgtcatgtacaagcgtacctaatgcacactttatcttttattgtacaaaaaaatagtgtacaaaattctttgstttctattgagtacacatacaagagactaccagtgtaaagtgataaataaaaatacagcctaaatgcttttatatgataatgtaaaag

SEQ ID NO: 1793 - DNA, 599 bp, Chicken  19866894088474_4
  misc_feature (1)..(52): n is any nucleotide
nnnnnnnnnnnnnnnnnnnnnnnnnnnnnnnnnnnnnnnnnnnnnnnnnnnnctttgttactggtccagtacttatcaaaacgaacgtgcaccataagtctgtatgtaggtattgatatagacgtggttatatcaatatttatatgaagacggccgccgccgcggggtgctacgtggagtgtggtacagtggtgtggatgatcaggagggagagcggttgctggaaaagccaatcagaaatccgggaaggtcgcagtaaccatgtcagatgattactgaggtttttttgttttgggkttktttttttttttttttttctataatactaaaattgtgattataagaaatagtccaaatgtttctgagaaattttcattgtgtatatagataatacagaatttcatggtgatatctgaaatgtaaatattgtacaatattgtcatgtacaagcgtacctaatgcacactttatcttttattgtacaaaaaaatagtgtacaaaattctttgstttctattgagtacacatacaagagactaccagtgtaaagtgataaataaaaatacagcctaaatgcttttatatgataatgtaaaaga

SEQ ID NO: 1794 - DNA, 600 bp, Chicken  19866894088474_5
agagcggttgctggaaaagccaatcagaaatccgggaaggtcgcagtaaccatgtcagatgattactgaggtttttttgttttgggkttttttttttttttttttttctataatactaaaattgtgattataagaaatagtccaaatgtttctgagaaattttcattgtgtatatagataatacagaatttcatggtgatatctgaaatgtaaatattgtacaatattgtcatgtacaagcgtacctaatgcacactttatcttttattgtacaaaaaaatagtgtacaaaattctttgstttctattgagtacacatacaagagactaccagtgtaaagtgataaataaaaatacagcctaaatgcttttatatgataatgtaaaagatgctgtttttgtatttaacagcagagagaaggcatgattatgtaataccttaattatgacatacacttcacgccactgagtgtccatttatcctgtctgtttggaatgaaccttgcctggaagtactgtactccatttcaggtctctgtaggagagtgcaaccttgcagattcctaacgggacgtgggatcacagctctaagtaatgattc

SEQ ID NO: 1795 - DNA, 600 bp, Chicken  19866894088475_1
ccaccatgcccactgaccacgtccctcagtgccacatccctacggctcttgaatacctccatggacagtgactccaccacctccctgggcagctgtgccactgcagcactgctcctgagaagaaattcttcctaacatccaacctgaaccacccctggtgcagtttaaggccattacctcttgtccattgtgtgcagagcgctgtagccacactcaggttcaatactcaggttcgtttccctgtgaaattcagcaaagcctgtttttatttagtttttttcattaactgcttctggtcastacttcaaaaatgtttgaggaatgaaaagtgaggaggaattgagtatctttggtgcaaagcagctctggccatgggctctgagctttggcaggggcaaggtgggaaaggagaggggattaacaggacagcagcaagatctgctgattgaatagagcttttccagcccaggactacaggtccagagcacaaacctccttctgtatgctgtttttagctgctgcaaatgtttgcatagccaggctgaaatgcagtaggaagactgttttgtctgctcttgcttcctcctcttcctctgttgc

SEQ ID NO: 1796 - DNA, 600 bp, Chicken  19866894088476_1
gttcatttaccccattcttatgtgcagcatactggaaattttttctttagataaaaatcctgcagagaaaatgcttatgaagatttacaggcttagagctactacacacccttgtgtccttgagaacattgcttcagtatagccaggcaccttcttttttgttctcagttcagaagggccaagtacatggttgcactgaaactatcatagaattaccaaggttggaaaagacctccaagatcatccagcccaaccatccacctaccaccaatatttccccactaaaacatgtcccacatmtaaacatttctcaaacacctacagggatggtgactcaaccactccctgggcagcccatttcagtacctgatcattctttcagagaataattttttcatarcattcaacctatgtgcccttgcctctttgtttatatggaaactcaccctttttttcctaattagcatctatttgattcaaagtctcaacactagaggaaaaaatgtatgcatttttgtggggtttttgttttgtttttgttaaagacactctgcccaaattaaatgcagactaagaatgagatgtggaagcaggccctga

SEQ ID NO: 1797 - DNA, 578 bp, Chicken  19866894088476_2
actacacacccttgtgtccttgagaacattgcttcagtatagccaggcaccttcttttttgttctcagttcagaagggccaagtacatggttgcactgaaactatcatagaattaccaaggttggaaaagacctccaagatcatccagcccaaccatccacctaccaccaatatttccccactaaaacatgtcccacatmtaaacatttctcaaacacctacagggatggtgactcaaccactccctgggcagcccatttcagtacctgatcattctttcagagaataattttttcatarcattcaacctatgtgcccttgcctctttgtttatatggaaactcaccctttttttcctaattagcatctatttgattcaaagtctcaacactagaggaaaaaatgtatgcatttttgtggggtttttgttttgtttttgttaaagacactctgcccaaattaaatgcagactaagaatgagatgtggaagcaggccctgaggtttccaaataatcctctggggggggtggggaggggaagtctgctttctgtttctaagattagaaaacaaaagacag

SEQ ID NO: 1798 - DNA, 600 bp, Chicken  19866894088478_1
tgaggaatttgcatcagcagccaagtgaagacagctaggattaaccagatgtccaccaactcaaataaatccactcatcaggattttgcagagggtacagacactttaatttgccaattcaacaaattatgcttttatgatacaactagttagtttccacgtagtcatcctgttgccagttgtgtctcttgtaaacagcgtagacttttattgtataaattcccgattgctattttgcaaagaaaaccctggaagacatgtttaggaatcaccttgcagtagacaaaggatagctattargatgtactaaaccagtgagagagcaggctgctggcaacaatttattttacctcagggcattttggatgactcagtcttctattaaatactgagtgtgaaccatcaaaacagatgctgtctggcagatatgtctcactgtagtactgttccaggactcacctactgaatgagcatcatctagcagactgttttacagcaggtaaccaactaactctatttcaaaccagatgaaagcaatagacttaacccactcatcaattccagtagattcctctcatctacattgtactcatacattat

SEQ ID NO: 1799 - DNA, 600 bp, Chicken  19866894088478_2
agttcttattttcttccataaccacttacactactactattactgccatgagtatgaagcagttcttgtgaggactaaggcccacatctgtatttaactaaatgattctgccaccccaaacagcttaaaaactagcctaattgcttttcagaagatattgatggaagaggaaatgcctagatttagtgcttttattcactgggaagagaaagcgacatgaagatccattgctcttctgctatagtgtcaggcttgagcagtttttcagcaggcagcaagaagatagccactatcatcttrctgttttgatccataccttgccaccaaagaaaagtgaggactgtgttcacttgctttcatttatgaaaatgccctcctcaaggtagatggagagtataggttatctttttcctttgttttgctctcatggctgccatgcttctataactgctgctgtgacagttccaaagtcagcacaatgtcatcctgatgaggatgagatgaatccctgcagagaccacgaagatttggctgtgtgcaattgcatttgaagggactcctggagtgagattctggcttcaaatgctctgacaaggtgct

SEQ ID NO: 1800 - DNA, 600 bp, Chicken  19866894088480_1
aaatacaccatctacaagactccaaaatctttgttctccctccacctatggcgaatgcacactcaagaactagctctggcacccggtctccccaaaaggatgtccagcagtgcacaggcatcatcatcagctcaacttctaggagtgcagctggtggtcaagagccaaaaccactcggagcactctctctcttcgtgcctcctctgggcactgctcgctggttacttgacacgcagcacaagcaggaatacctgcggccacccatggaagtaaaacccccaccatcccaacacaacacarttgcatgcagccctacagmggtgagcagcctgcagcagcagtgctgggaggggggcacactcaaaggcagcaagtcacacacagggcagggaggtggcggtcgccccacaaaaactcccagctctgcactcctctgtacagggatcctcctttccctggcacatgcacaaaaaaataaacaactcctcctctgagtcagggacaaaatagaaagagaggccaatccaagaagtggcaacctccagaatcgggagcttccctgcagcacccctatgggaggggagggcagacagagggcac

SEQ ID NO: 1801 - DNA, 600 bp, Chicken  19866894088480_2
ctccaaaatctttgttctccctccacctatggcgaatgcacactcaagaactagctctggcacccggtctccccaaaaggatgtccagcagtgcacaggcatcatcatcagctcaacttctaggagtgcagctggtggtcaagagccaaaaccactcggagcactctctctcttcgtgcctcctctgggcactgctcgctggttacttgacacgcagcacaagcaggaatacctgcggccacccatggaagtaaaacccccaccatcccaacacaacacarttgcatgcagccctacagmggtgagcagcctgcagcagcagtgctgggaggggggcacactcaaaggcagcaagtcacacacagggcagggaggtggcggtcgccccacaaaaactcccagctctgcactcctctgtacagggatcctcctttccctggcacatgcacaaaaaaataaacaactcctcctctgagtcagggacaaaatagaaagagaggccaatccaagaagtggcaacctccagaatcgggagcttccctgcagcacccctatgggaggggagggcagacagagggcacacggccacagggaagtctg

SEQ ID NO: 1802 - DNA, 600 bp, Chicken  19866894088480_3
tctgcactcctctgtacagggatcctcctttccctggcacatgcacaaaaaaataaacaactcctcctctgagtcagggacaaaatagaaagagaggccaatccaagaagtggcaacctccagaatcgggagcttccctgcagcacccctatgggaggggagggcagacagagggcacacggccacagggaagtctggagggacgcagggaccaggcctacctgatggggcagtgacaccagtgtgaccccagcagtaggcgttgagaagctgattgcccctcacaagagcagagccccrgcccggggctggcagcaygcagtagggcccagctccagcacaggggcagcccgtgctgcagtgccccaccagccccagggcagccactgctgcacgtgccccgagcacggctgtgcagccgcagagccagcacgccagctgcgagacaaacactgtgctccttccccaccaaaaagcccgaggcctcctgcgtgtacgctaaccacaagcctttgagaggctcgtgtatttacaaaccgaggcatgttgaaatcaaaggggataccatatgacataattcacattaaaatgtcaatgggc

SEQ ID NO: 1803 - DNA, 600 bp, Chicken  19866894088480_4
gggatcctcctttccctggcacatgcacaaaaaaataaacaactcctcctctgagtcagggacaaaatagaaagagaggccaatccaagaagtggcaacctccagaatcgggagcttccctgcagcacccctatgggaggggagggcagacagagggcacacggccacagggaagtctggagggacgcagggaccaggcctacctgatggggcagtgacaccagtgtgaccccagcagtaggcgttgagaagctgattgcccctcacaagagcagagccccrgcccggggctggcagcaygcagtagggcccagctccagcacaggggcagcccgtgctgcagtgccccaccagccccagggcagccactgctgcacgtgccccgagcacggctgtgcagccgcagagccagcacgccagctgcgagacaaacactgtgctccttccccaccaaaaagcccgaggcctcctgcgtgtacgctaaccacaagcctttgagaggctcgtgtatttacaaaccgaggcatgttgaaatcaaaggggataccatatgacataattcacattaaaatgtcaatgggctgacaatttatagagctg

SEQ ID NO: 1804 - DNA, 600 bp, Chicken  19866894088482_1
ctctgtgttttcaacactccagttacttccgtcagttttgtaatggcaatctcttgtgatcgaacgttcacttcctcaggttgctctgtgacttgaaaaagagaggctactacttggttaatttccatcgtgctctcaaccgaaatattcagggctgtcttagccaggctttccctcaactgagccttggatatctggagagtcggtgcagcttcaatgtagtttaggacagaggctgcaaggtaagccaaataacccgcattaaaatagtctccggtctggagataagctgtcatgggygcacttgaaccactcacggaggcaagcagatcatggaacacarcagccagtggtcgacttttcactgggttctgtgctctgacatgcagactcagttgggtaaatgcccccagagaatcacacacttgaacrtacagtgtcagcgtatacctccragagggtacaccgactgggaggagggatggaggcattctaggctgatagccaaagtacagaattgtgccaaacgtgttgtcctccaccgagttaattttggcagttttggatacgtcggaagccactatgactttgtatgtcaga

SEQ ID NO: 1805 - DNA, 600 bp, Chicken  19866894088482_2
tggcaatctcttgtgatcgaacgttcacttcctcaggttgctctgtgacttgaaaaagagaggctactacttggttaatttccatcgtgctctcaaccgaaatattcagggctgtcttagccaggctttccctcaactgagccttggatatctggagagtcggtgcagcttcaatgtagtttaggacagaggctgcaaggtaagccaaataacccgcattaaaatagtctccggtctggagataagctgtcatgggygcacttgaaccactcacggaggcaagcagatcatggaacacarcagccagtggtcgacttttcactgggttctgtgctctgacatgcagactcagttgggtaaatgcccccagagaatcacacacttgaacrtacagtgtcagcgtatacctccragagggtacaccgactgggaggagggatggaggcattctaggctgatagccaaagtacagaattgtgccaaacgtgttgtcctccaccgagttaattttggcagttttggatacgtcggaagccactatgactttgtatgtcagaggtaagttgctgtcagaaaacccactgcactggacaacaaatt

SEQ ID NO: 1806 - DNA, 600 bp, Chicken  19866894088482_3
ctctcaaccgaaatattcagggctgtcttagccaggctttccctcaactgagccttggatatctggagagtcggtgcagcttcaatgtagtttaggacagaggctgcaaggtaagccaaataacccgcattaaaatagtctccggtctggagataagctgtcatgggygcacttgaaccactcacggaggcaagcagatcatggaacacarcagccagtggtcgacttttcactgggttctgtgctctgacatgcagactcagttgggtaaatgcccccagagaatcacacacttgaacrtacagtgtcagcgtatacctccragagggtacaccgactgggaggagggatggaggcattctaggctgatagccaaagtacagaattgtgccaaacgtgttgtcctccaccgagttaattttggcagttttggatacgtcggaagccactatgactttgtatgtcagaggtaagttgctgtcagaaaacccactgcactggacaacaaatttggtcaggaaagccgtaccccggtgggggctgatgctacacttgccagccctgggtggagaatttactttaaatgcatatctgtagagc

SEQ ID NO: 1807 - DNA, 600 bp, Chicken  19866894088482_4
tgtcttagccaggctttccctcaactgagccttggatatctggagagtcggtgcagcttcaatgtagtttaggacagaggctgcaaggtaagccaaataacccgcattaaaatagtctccggtctggagataagctgtcatgggygcacttgaaccactcacggaggcaagcagatcatggaacacarcagccagtggtcgacttttcactgggttctgtgctctgacatgcagactcagttgggtaaatgcccccagagaatcacacacttgaacrtacagtgtcagcgtatacctccragagggtacaccgactgggaggagggatggaggcattctaggctgatagccaaagtacagaattgtgccaaacgtgttgtcctccaccgagttaattttggcagttttggatacgtcggaagccactatgactttgtatgtcagaggtaagttgctgtcagaaaacccactgcactggacaacaaatttggtcaggaaagccgtaccccggtgggggctgatgctacacttgccagccctgggtggagaatttactttaaatgcatatctgtagagcgatgacctaccgccccaggtagt

SEQ ID NO: 1808 - DNA, 600 bp, Chicken  19866894088482_5
ctacacttgccagccctgggtggagaatttactttaaatgcatatctgtagagcgatgacctaccgccccaggtagtcacttttagtagcagtatgtacgattgatctgcagtactggtaaaagtcagagcatgtatagaaaggtaagcaccggacctgcccgttgaggttctggaagaccagtcaaagctaatttctgtagaattttccagccagagcgaccagtggtacactggctggctgcttgttcgacagttgaggcatttgcctgacaacgtaaacctctccgtcggaattacrgtgctgccacagttctcaaggcacgccacatccagaagaggcgagaagccagactgcacgcttacgctttggtcggcatagctctttcttcggtccttctgaatgactaaacgaaagtggtagacagcrtttcctgggagggattcyggtgctaccacttgaacagctcctgaaggcgtcagccacctcaaatccctctgggctggatgacatttatttcccgcaccgatcctcatgctctcatagtccgacagctttttagtgcagtaccaagtaaacgtgattccctttagtcgttcc

SEQ ID NO: 1809 - DNA, 600 bp, Chicken  19866894088482_6
gcatgtatagaaaggtaagcaccggacctgcccgttgaggttctggaagaccagtcaaagctaatttctgtagaattttccagccagagcgaccagtggtacactggctggctgcttgttcgacagttgaggcatttgcctgacaacgtaaacctctccgtcggaattacrgtgctgccacagttctcaaggcacgccacatccagaagaggcgagaagccagactgcacgcttacgctttggtcggcatagctctttcttcggtccttctgaatgactaaacgaaagtggtagacagcrtttcctgggagggattcyggtgctaccacttgaacagctcctgaaggcgtcagccacctcaaatccctctgggctggatgacatttatttcccgcaccgatcctcatgctctcatagtccgacagctttttagtgcagtaccaagtaaacgtgattccctttagtcgttccgctgaatcggggtcataggacacagagccatcaagagtccaattatcaaaaaagctcactgtgcggaagacgcctcctgcaatacttgccacgagattagttctctctatctcgagaaaaattctgtct

SEQ ID NO: 1810 - DNA, 600 bp, Chicken  19866894088482_7
gcaccggacctgcccgttgaggttctggaagaccagtcaaagctaatttctgtagaattttccagccagagcgaccagtggtacactggctggctgcttgttcgacagttgaggcatttgcctgacaacgtaaacctctccgtcggaattacrgtgctgccacagttctcaaggcacgccacatccagaagaggcgagaagccagactgcacgcttacgctttggtcggcatagctctttcttcggtccttctgaatgactaaacgaaagtggtagacagcrtttcctgggagggattcyggtgctaccacttgaacagctcctgaaggcgtcagccacctcaaatccctctgggctggatgacatttatttcccgcaccgatcctcatgctctcatagtccgacagctttttagtgcagtaccaagtaaacgtgattccctttagtcgttccgctgaatcggggtcataggacacagagccatcaagagtccaattatcaaaaaagctcactgtgcggaagacgcctcctgcaatacttgccacgagattagttctctctatctcgagaaaaattctgtctgtcttgctgaaggatctt

SEQ ID NO: 1811 - DNA, 600 bp, Chicken  19866894088485_1
aaagcgattgtgatcatttaaacaaaagaaatgcagtttttagaggacttagaccaactcattataggtggtaattaagtaaatagcagatctagcagttgctctttcttgtattttctagtagacaattacaccattttttacagcccaggcactgcagacctttatagtcctaaggaggtacttcatttggaggggacccaaattcaagactcatctgttgaagacgggctgcccaggaaggtggtggaatcaccatccctgggtggtgttcaagaaacattaagatgctgtagtaarggacatggtttagtgggggaatattggtggtagggggacagttggactggatgatctcggaggtcttttccaaccttggtgactctatgattctatgaatgtaagacaaaataaaatcattcactgcatcccatggcaacgttcagggatacgagaagaaaattaatgtgtactaaggctaagccctgttaatgttgctgcagtggtgactagtgtggtttggaaaacactgtcactacagctacaaagaaacctgacggcagaatggcagacatcagactccacacacgatgcaacatt

SEQ ID NO: 1812 - DNA, 600 bp, Chicken  19866894088486_1
gctcacctgcagccccttcttgctctaccagacactacagaatgaacaccctgaaggctggcaggtttttctggttttgtttttacgtctcaaagctctctggttcatgcagagaaagttgcctctaaataaatccatgtatggacacgagtcctccggagcgacagacacccaatttccctccagcctcagagccttgtgttccaacacaagggaaagaaaagatcctattccctacctatgaccgaagttgcacaccgcttaaatgttgatctgtcatgaggacgcttagaatgacgyaacccaacagagctgcctgacaattggacggctgtcccgcacttgtagcgatgccaatggatgcagacagcagacttcttagcctccagctgagaagattaaatccttaacagcgtggatctcttctcccccttctccctcctgctcccctctcccatgcagcgtaacaaaggaaccccaacaatatacctaaaagggatatttgattttccggcattgctcatgcacaaaacaggctgggctttcagcgccacaaacagctatcatcttacagagctgcctgaatgcaagcaggcaaac

SEQ ID NO: 1813 - DNA, 600 bp, Chicken  19866894088488_1
gagctggcatctctctgttgggcccacgcaggcaggtcagtttacacacagcattggtttaagtaacacggtgtggctgcagttcctccattcctcagttctgaacaggtgcagatttaccataagtgtctgaaatctgagccagaaggacagcctttggacagacatcaggacagaaggcacagtttgatacttcacttgatattacattccagcatttatgaagagggatcactttcaaatcaaaccttcaagacagtgttctaaactaaataatcttactaatctcagtgctttccycagaataagtactgtcagtacatacatatcattactactgctggccaaaaccacagaatcacaggagctggaaaggacctcaaagagatcattgagtccaacacccctgctaaagcaggtatgctacaacaggcctcacaggtaggcatccagccaggccttgaatatctccatagaaggagactccacaacctctttgggtgatctgtcccagcgctccatcaccctgactataaagaagttcttccacatgtcagtatggaacttcctgtgttcaagttttaggccattattccttgt

SEQ ID NO: 1814 - DNA, 600 bp, Chicken  19866894088491_1
ccttttggtagcattactggtacagcttttccagtaccagtggcacttgaacagctgatggttcttgtattggtgacaggatgcaactgcgggatctgtactcattacccaaggtcagtgttgtgctgtctgggtagagcagtacctgctgagtcccttctctgatctgcctccctgcaaagtgctggcccctgctctctccttctcaggggagttgtcactcagatggtttctgaagagatcactaagagcagtggcactgtggaactgtcactgagcagtagcttgcaccagctggtraatgcctctccataaatagcctcaatttgccagtaagtgaactacgtttctggaaatggctgtaaaacaatgaattattttacatagctttcttcacaggagcctgggcatccagtgccccagagaccacgacagtgcctgcttgtggcaggctccagctctcacttggtctgggtcagctggacctttctccctccccactacctctcctgcaaagcaggcacggtaacacatcactcttttggtgtagaggtcttggattctgcaaccaccttggtaagcacattggtggttgagatg

SEQ ID NO: 1815 - DNA, 599 bp, Chicken  19866894088499_1
  misc_feature (1)..(171): n is any nucleotide
nnnnnnnnnnnnnnnnnnnnnnnnnnnnnnnnnnnnnnnnnnnnnnnnnnnnnnnnnnnnnnnnnnnnnnnnnnnnnnnnnnnnnnnnnnnnnnnnnnnnnnnnnnnnnnnnnnnnnnnnnnnnnnnnnnnnnnnnnnnnnnnnnnnnnnnnnnnnnnnnnnnnnnnnnnnaatgatcttttctcatttacatgccatattgttctccaacttcaatcttataaaccaagccaaagatcttaatccaaaccgcagtaatgctgttttgtacatcactatatgaattactacaataccacrgacaaattgatcttatgcatttttgttacttccagatgcaaggtaataaaaaaatatgtatgaaagaattyctctttaattatacagccagattacaaaactctgcatttcataatgaggttatttaaattcaaaaatatatggctcttttcctaaggacatacagaccagtgcgagcataaatataacaagacaaatacgtaccacatcagatctttcagaccttacccatcatcaacatctttatgtatttctggaaaaccaggtcttagacaaactaggtactaagtgttttctca

SEQ ID NO: 1816 - DNA, 599 bp, Chicken  19866894088499_2
  misc_feature (1)..(100): n is any nucleotide
nnnnnnnnnnnnnnnnnnnnnnnnnnnnnnnnnnnnnnnnnnnnnnnnnnnnnnnnnnnnnnnnnnnnnnnnnnnnnnnnnnnnnnnnnnnnnnnnnnnnaatgatcttttctcatttacatgccatattgttctccaacttcaatcttataaaccaagccaaagatcttaatccaaaccgcagtaatgctgttttgtacatcactatatgaattactacaataccacrgacaaattgatcttatgcatttttgttacttccagatgcaaggtaataaaaaaatatgtatgaaagaattyctctttaattatacagccagattacaaaactctgcatttcataatgaggttatttaaattcaaaaatatatggctcttttcctaaggacatacagaccagtgcgagcataaatataacaagacaaatacgtaccacatcagatctttcagaccttacccatcatcaacatctttatgtatttctggaaaaccaggtcttagacaaactaggtactaagtgttttctcacccaaattccctgaagagcccaaactgtgtgatttagtactgatacacacctccgaatgtctgaaatgcaa

SEQ ID NO: 1817 - DNA, 600 bp, Chicken  19866894088499_3
agaccagtgcgagcataaatataacaagacaaatacgtaccacatcagatctttcagaccttacccatcatcaacatctttatgtatttctggaaaaccaggtcttagacaaactaggtactaagtgttttctcacccaaattccctgaagagcccaaactgtgtgatttagtactgatacacacctccgaatgtctgaaatgcaaattagcccaactcacgttcctccaagaaacagacatataccagctactgcgctttgctgcatagatatctaattctgtatcatgctagcaaaarggagagtttgtttgagctaaatggaaatgagatgagggtttgagtggataggggattttttttttttcctataaagtatccctttgtcgttaaagaatatataatcttcaaattctaaaaaatctaggaaatcaggaatggaactttacagcaagacatggaaatgtgtgatatgaaaccagaagcatttacctgaatggcagctcagcaagaacaactggttacataaacataactctggaaaagagaagaaaggagctaaagatggagaaacctctgttgttcagcgatcagaaacga

SEQ ID NO: 1818 - DNA, 600 bp, Chicken  19866894088500_1
gccaaagtgtgagtttaaaactggtggttatactctaaccctcatgcagggctcactcattctgcaacttctggcttttttcagattaacttcttccaagtaatttaaattaagtccaaaaaggtgctcatattagatgaagttcgcatgcaaggaattacacttgcctacgctgcagtggtagtacttgaatgcatcagtaacttcactgaagatcactgcatcctgatggaagtttgttctgtgcttaagggtttgcagaaatgtgtaaatccttcctaaacttgcaatttctatcayttgttcttgtaatgtatcgatggactgtgctatgctatgtggtattttgttagcatctctgtgaagtttgtaaatcatccacaggttacttaggaacttcagtctgttccatcttcactgtttgtctgattagtggcaacgtatgcattgcttacaacttcatgaaaatgacattttataatcactgatactctgaattttagttttgatgtatcggtggtggtgggtggtggagagggaaacttgtgggaaatattactcaatgtatgagtctggttttttaatccagaagtgcagatt

SEQ ID NO: 1819 - DNA, 600 bp, Chicken  19866894088502_1
attcttccctcagcctgggggtcatggccatcagcagctatttattagctgcattgattgagaagaacagcctttaaatggaaataaattgaattctatggcaaagcggattccatacagcctattaatgtaagacagggaggcttagctgttttattttgtatttgttcccctcctcggcttttagctattctcaggctcccagacacttcccatctcttccatcagccataccctcctaaccatgagcacccccttgcctacaattgcaagtatgaagatgacagagatctggagacwcggatgaccccactgaggctccaaatcatgtcctcagagtccagcagaggaaggagatgtgatggagagcaagatgagatgcccacatacatgcacaacagaaacaagacgggagcagaccctgtccactctctctggggcatttttattttatttttgccttctgcgctgtttagagattgtcttttccactctctgtcagctccagaatacatttcatggtacttgccttcattccagagtttaattgcttgagattgttacttgtaggctgttaatttattaaaaccagatctcccg

SEQ ID NO: 1820 - DNA, 599 bp, Chicken  19866894088503_1
  misc_feature (1)..(198): n is any nucleotide
nnnnnnnnnnnnnnnnnnnnnnnnnnnnnnnnnnnnnnnnnnnnnnnnnnnnnnnnnnnnnnnnnnnnnnnnnnnnnnnnnnnnnnnnnnnnnnnnnnnnnnnnnnnnnnnnnnnnnnnnnnnnnnnnnnnnnnnnnnnnnnnnnnnnnnnnnnnnnnnnnnnnnnnnnnnnnnnnnnnnnnnnnnnnnnnnnnnnnnaaatgatggtaggctttgagaactttcttagttttctgccggctcttacctggttgcttcttggctgttaaagcatccagtcatattatgcagttgcctacrgactttcatgtaatctcgatttgtaataaatkatattgaaactataactccacatctgagttagccttataagcagcacaggaaactaaaaagtaacgtagatctactgtgaatcaaacttaacacaacaccctagcacttttcgcaagagaaaagtcctactctttgaccacccctaattctgtagtctgaaggatgtccttctggccttatttttgtctttttgtgtgctttattttattctcctacattactttttgggcagtataaaaggcaaagtcctttaggtgccgtaacac

SEQ ID NO: 1821 - DNA, 599 bp, Chicken  19866894088503_2
  misc_feature (1)..(166): n is any nucleotide
nnnnnnnnnnnnnnnnnnnnnnnnnnnnnnnnnnnnnnnnnnnnnnnnnnnnnnnnnnnnnnnnnnnnnnnnnnnnnnnnnnnnnnnnnnnnnnnnnnnnnnnnnnnnnnnnnnnnnnnnnnnnnnnnnnnnnnnnnnnnnnnnnnnnnnnnnnnnnnnnnnnnnnaaatgatggtaggctttgagaactttcttagttttctgccggctcttacctggttgcttcttggctgttaaagcatccagtcatattatgcagttgcctacrgactttcatgtaatctcgatttgtaataaatkatattgaaactataactccacatctgagttagccttataagcagcacaggaaactaaaaagtaacgtagatctactgtgaatcaaacttaacacaacaccctagcacttttcgcaagagaaaagtcctactctttgaccacccctaattctgtagtctgaaggatgtccttctggccttatttttgtctttttgtgtgctttattttattctcctacattactttttgggcagtataaaaggcaaagtcctttaggtgccgtaacactgttatctyttcactaatgaagagtggcagtt

SEQ ID NO: 1822 - DNA, 600 bp, Chicken  19866894088503_3
tgtaatctcgatttgtaataaatkatattgaaactataactccacatctgagttagccttataagcagcacaggaaactaaaaagtaacgtagatctactgtgaatcaaacttaacacaacaccctagcacttttcgcaagagaaaagtcctactctttgaccacccctaattctgtagtctgaaggatgtccttctggccttatttttgtctttttgtgtgctttattttattctcctacattactttttgggcagtataaaaggcaaagtcctttaggtgccgtaacactgttatctyttcactaatgaagagtggcagttgttagaaagctgctctaaactcccatttgggcacagtgaacagcagaaaatgcttcaactctaagcattgctcatggcatcctcatggcttgagcagggaataaaatgacctctacagacaaggattattttttgttatttgtggctttccccgtaaagtcagtggatattgagcataacatccatggctgcagactaaggtggccttgaaggagagataatggccaggtacagctggcagtcatttactttcagtcactcagcatgtgagagctga

SEQ ID NO: 1823 - DNA, 599 bp, Chicken  19866894088504_1
  misc_feature (1)..(123): n is any nucleotide
nnnnnnnnnnnnnnnnnnnnnnnnnnnnnnnnnnnnnnnnnnnnnnnnnnnnnnnnnnnnnnnnnnnnnnnnnnnnnnnnnnnnnnnnnnnnnnnnnnnnnnnnnnnnnnnnnnnnnnnnnnntcttttgagttactgaagctcattgaaaaccaaagcgtggcagaaacagtgagggcggttcagattttaaacatgaatattcttagatgcataggattagggtatggtgctttgttgtaaattaaatactgctctcatgatttaaataaataggtaaatcagtttttaaaaagttgkaaaatcttcttaattggactatattcttttattgaatggtagtgtaaaaagaaacagcgtgtgcattcttgacagctattaatattactgctgagtctggttccttggcatgaatactgaattggaacttgtgacctacattatggtcctggattaaaaccttgcttagaacaagccacagatgtcatctgaaatgtttgtcttgaacaatcagtaagaaataaaatctgactttaactttccatggcaatggtattaatttgtcattttgtttcaacttgtgtgcaaggttaacatta

SEQ ID NO: 1824 - DNA, 600 bp, Chicken  19866894088508_1
gtccaacatgggggcttggtggaagccatcagctcagcagcatgacccagggacagcctccgctccctcccagcatcacctttggtacaacaccaaaccttatccttgggaactgcactgtgcctgccaggaaagccacgtgcaaggttctctcagcccatagcacagcacacctcaactccacggttacccagaggaggaaatgtcacctgcagggctgcaggcagctttccccaggcttgggcaagcagcacccaaggacatggtggctcccacggtctcagccttgctgctagtttrcagatgtgagcactgatattggatagcacacagccaaccctcccaaatcctggcgacacccagcctccagcagagctgggaagctggaaggcagtgaagttttaaacccactcctcccaccagcccagccccatttggcttcatctcccttatccccagccaggactgttgggttatccctgctgcctccagacaaaatatggccacctggcactgctcagaggccagggatgctgtgacacccatggatgctgcggggacacagggatgctcccacaaaggacccatcatcttactggt

SEQ ID NO: 1825 - DNA, 600 bp, Chicken  19866894088511_1
ggagaagcaccttggatgcacatcctggatgcaaacagtagctgagttcatagcacattagcagagcaactgacacagcagaatgacacgggggcaactccatgtttgtgcacttcaataagctgattatcaacagaaggtttcctcctctaatgttcccagtctttgctgccacgctggagaggactgagctaatgaagacctcctcctgtgagcaacatgaggaactgttccttctgtatcacaccgagaagaacatagaccagaaaaagcattctttgctggcaatagatgagtgaygctgaggtactgctattagcagcagaaagatgcttttctcccwcagccttcctcagccttatgttcccatagcacttcagcaaagggtgctggggtgtctggatagtaaatgagacaggggttgtgctgtctgaagataaattggtacctccactagtgtgtgtgagtgactttgtcttctttgggtttgtcttctaacttaccaaacagagaccagagataacgatgaccttacaaacctgccctgcttcccctcccagrccctcctgaacgaatcccttgatcccttcccctgcaatg

SEQ ID NO: 1826 - DNA, 600 bp, Chicken  19866894088511_2
gagttcatagcacattagcagagcaactgacacagcagaatgacacgggggcaactccatgtttgtgcacttcaataagctgattatcaacagaaggtttcctcctctaatgttcccagtctttgctgccacgctggagaggactgagctaatgaagacctcctcctgtgagcaacatgaggaactgttccttctgtatcacaccgagaagaacatagaccagaaaaagcattctttgctggcaatagatgagtgaygctgaggtactgctattagcagcagaaagatgcttttctcccwcagccttcctcagccttatgttcccatagcacttcagcaaagggtgctggggtgtctggatagtaaatgagacaggggttgtgctgtctgaagataaattggtacctccactagtgtgtgtgagtgactttgtcttctttgggtttgtcttctaacttaccaaacagagaccagagataacgatgaccttacaaacctgccctgcttcccctcccagrccctcctgaacgaatcccttgatcccttcccctgcaatgagctcaacacgaagataaatgttctggcagtgatgcgcagtat

SEQ ID NO: 1827 - DNA, 600 bp, Chicken  19866894088511_3
accagaaaaagcattctttgctggcaatagatgagtgaygctgaggtactgctattagcagcagaaagatgcttttctcccwcagccttcctcagccttatgttcccatagcacttcagcaaagggtgctggggtgtctggatagtaaatgagacaggggttgtgctgtctgaagataaattggtacctccactagtgtgtgtgagtgactttgtcttctttgggtttgtcttctaacttaccaaacagagaccagagataacgatgaccttacaaacctgccctgcttcccctcccagrccctcctgaacgaatcccttgatcccttcccctgcaatgagctcaacacgaagataaatgttctggcagtgatgcgcagtattatttttggcatttgaagggtctcaagctagataagggaagactgaaaggaagacagagctgttttgttaygttttgctttcttttccaaatgcaaaagaccaaattccgatcacacatttgaacacgcagccctttccttttctggattagcgatttctgattttcaccacattggctgattctgaggctttatttcaagcccggcacattcagagc

SEQ ID NO: 1828 - DNA, 600 bp, Chicken  19866894088511_4
acaggggttgtgctgtctgaagataaattggtacctccactagtgtgtgtgagtgactttgtcttctttgggtttgtcttctaacttaccaaacagagaccagagataacgatgaccttacaaacctgccctgcttcccctcccagrccctcctgaacgaatcccttgatcccttcccctgcaatgagctcaacacgaagataaatgttctggcagtgatgcgcagtattatttttggcatttgaagggtctcaagctagataagggaagactgaaaggaagacagagctgttttgttaygttttgctttcttttccaaatgcaaaagaccaaattccgatcacacatttgaacacgcagccctttccttttctggattagcgatttctgattttcaccacattggctgattctgaggctttatttcaagcccggcacattcagagcccggatgaaatcgcacaataacggagctgagagacaaaggcatgcaaaggcagcgccaactctatggctcctgcccaaacaaagggctaatttggtttcagacaccgtttgctgcaggaatgataagattaacacctgatatcaagggaaacg

SEQ ID NO: 1829 - DNA, 599 bp, Chicken  19866894088516_1
  misc_feature (1)..(67): n is any nucleotide
nnnnnnnnnnnnnnnnnnnnnnnnnnnnnnnnnnnnnnnnnnnnnnnnnnnnnnnnnnnnnnnnnnnttactgtgtgagcagtcaattaacaagataaaatctgcaagaatgccttaaaggtgaaatgtgagaacttttaataaaaaagaaaagaaaatcctttttggacctcaaaatcattatcagagtatacaaacaaagatccttcattactgttttgtcgaggctgaattgtgtgctcaccctcagcagaggtgatgaagcttatgtgggacagagtgctgggagggcaggctcaragtgcactctcagtatggacactctacaaagcccaactctaaactcgccttgtgtatttgggcactggaaatgacctcctcaacttaygttttttgctaaggagaaagacgtttttgtctcgagaatggtattgagagctcaaaatgcaaatacgcagaaagcacaggtggtaagaggccccattcttctaggaacagtgacagcctggtgctttcagtgcctgtgtggcaattgaaatgcaggtacttgccatcagtgattgctgaacatctgtaaggtgctgaatgcctggtaatcc

SEQ ID NO: 1830 - DNA, 600 bp, Chicken  19866894088516_2
aacaagataaaatctgcaagaatgccttaaaggtgaaatgtgagaacttttaataaaaaagaaaagaaaatcctttttggacctcaaaatcattatcagagtatacaaacaaagatccttcattactgttttgtcgaggctgaattgtgtgctcaccctcagcagaggtgatgaagcttatgtgggacagagtgctgggagggcaggctcaragtgcactctcagtatggacactctacaaagcccaactctaaactcgccttgtgtatttgggcactggaaatgacctcctcaacttaygttttttgctaaggagaaagacgtttttgtctcgagaatggtattgagagctcaaaatgcaaatacgcagaaagcacaggtggtaagaggccccattcttctaggaacagtgacagcctggtgctttcagtgcctgtgtggcaattgaaatgcaggtacttgccatcagtgattgctgaacatctgtaaggtgctgaatgcctggtaatccacctagtgagcctgaagtcatgccactggcagtgctttccttatttatgtgtttggttttattttaaatacagctcatataattgtttc

SEQ ID NO: 1831 - DNA, 600 bp, Chicken  19866894088516_3
tgagagctcaaaatgcaaatacgcagaaagcacaggtggtaagaggccccattcttctaggaacagtgacagcctggtgctttcagtgcctgtgtggcaattgaaatgcaggtacttgccatcagtgattgctgaacatctgtaaggtgctgaatgcctggtaatccacctagtgagcctgaagtcatgccactggcagtgctttccttatttatgtgtttggttttattttaaatacagctcatataattgtttcagaggttgttttcccagcctagtctgctgaaaaaatgctacttrgaagcttgagtttaatctaatctgaacaatctggcagtttatatctaaacaacgtgtacaacacaccaaacgttcacgcatgatttcagtgatatgattttaacttatcttttagatgagtatgaagcctgttttctgaagaaacaaggaggtttaattcctcatcaagtgtgatcttaaggtttatcctcctgtatttcagtgctgttgccttttagagagagaggcgacagaggtgaacactgcttggatgtatttacagagatgggccagggtgatgcaggctcaagccctgagggc

SEQ ID NO: 1832 - DNA, 600 bp, Chicken  19866894088523_1
cagtaccatgaacaatgttctcggccggagagcagtgccagcactttgtcttaatagaacggaaagccgagacgcacggtgcaaaaatccgagctggcagcaggcagcggcttcaacatacattgaaaaccatccatgaaagagcacagttaaaccaagagaaagagcccggaggtatatttagacaaacaaaaaaagagcaagaacaggggggaaaaaaaaagtttctccatggctttaatagggtacatttttcccggtctgtatttcacttgggtttgttttactggtttatgtttrtcatgagcacatgcactgcaaaaacatgcatgtgcacagggttgcaaggaaaatgctggttttgtacacgtgggacccattttggctcagggtcctgtggcaatgggtgctgtgtgwgtgtcaaaccagacccaggaggcattttgggtctgaacsccgggggaaggctctgcagaagcagaattgtttgcctgtttctctttttgagacaataaactctactctgatggctgtcaccattgccaggagcgatggagctctgctcatatgagtttctggacatcactgggggtttgggta

SEQ ID NO: 1833 - DNA, 600 bp, Chicken  19866894088523_2
atacattgaaaaccatccatgaaagagcacagttaaaccaagagaaagagcccggaggtatatttagacaaacaaaaaaagagcaagaacaggggggaaaaaaaaagtttctccatggctttaatagggtacatttttcccggtctgtatttcacttgggtttgttttactggtttatgtttrtcatgagcacatgcactgcaaaaacatgcatgtgcacagggttgcaaggaaaatgctggttttgtacacgtgggacccattttggctcagggtcctgtggcaatgggtgctgtgtgwgtgtcaaaccagacccaggaggcattttgggtctgaacsccgggggaaggctctgcagaagcagaattgtttgcctgtttctctttttgagacaataaactctactctgatggctgtcaccattgccaggagcgatggagctctgctcatatgagtttctggacatcactgggggtttgggtaggggtggatgtcgaacagacccatgaatatttatttgtgtgcagtaccttgcatgctcagagcattgttgcttttgctgagctggtctactgctagctcttctttttgcctttgttt

SEQ ID NO: 1834 - DNA, 600 bp, Chicken  19866894088523_3
aagagaaagagcccggaggtatatttagacaaacaaaaaaagagcaagaacaggggggaaaaaaaaagtttctccatggctttaatagggtacatttttcccggtctgtatttcacttgggtttgttttactggtttatgtttrtcatgagcacatgcactgcaaaaacatgcatgtgcacagggttgcaaggaaaatgctggttttgtacacgtgggacccattttggctcagggtcctgtggcaatgggtgctgtgtgwgtgtcaaaccagacccaggaggcattttgggtctgaacsccgggggaaggctctgcagaagcagaattgtttgcctgtttctctttttgagacaataaactctactctgatggctgtcaccattgccaggagcgatggagctctgctcatatgagtttctggacatcactgggggtttgggtaggggtggatgtcgaacagacccatgaatatttatttgtgtgcagtaccttgcatgctcagagcattgttgcttttgctgagctggtctactgctagctcttctttttgcctttgtttttcaggcctcctccacccacccctcacaaagctggagcc

SEQ ID NO: 1835 - DNA, 599 bp, Chicken  19866894088537_1
  misc_feature (1)..(99): n is any nucleotide
nnnnnnnnnnnnnnnnnnnnnnnnnnnnnnnnnnnnnnnnnnnnnnnnnnnnnnnnnnnnnnnnnnnnnnnnnnnnnnnnnnnnnnnnnnnnnnnnnnnatcagaggacatctgcggcctcaaagcagagtcccagcagcccaccgccatcaggatgtgccctgtaccctgtagggctgatcagaggtgttataacaaggcaaaagtactaattaaaacctattcagcagccatgcatttgtctgagagttcctggtctcgtggcagtgacagcctggcacagcagttggcgcagcagtyggtgtgggcmgggcgagcaggagggcagagcatcgctccccactgtggagatcagctcacccatcagctgcctcccaaacaacacatctggatgcggtctctacgaggctgaaagctcttccccaaatcaatgcaggtctccagagtgtgcgcaccccagaacgtgcccatgcaggtctgcagcagctggaagtgcctgagcctgcacccaggtcatagcctagggcaaggtggtcagctccacgcctccagacccccttcagataaatcgagagaagggtggctgtcgtaggggcctc

SEQ ID NO: 1836 - DNA, 599 bp, Chicken  19866894088537_2
  misc_feature (1)..(89): n is any nucleotide
nnnnnnnnnnnnnnnnnnnnnnnnnnnnnnnnnnnnnnnnnnnnnnnnnnnnnnnnnnnnnnnnnnnnnnnnnnnnnnnnnnnnnnnnnatcagaggacatctgcggcctcaaagcagagtcccagcagcccaccgccatcaggatgtgccctgtaccctgtagggctgatcagaggtgttataacaaggcaaaagtactaattaaaacctattcagcagccatgcatttgtctgagagttcctggtctcgtggcagtgacagcctggcacagcagttggcgcagcagtyggtgtgggcmgggcgagcaggagggcagagcatcgctccccactgtggagatcagctcacccatcagctgcctcccaaacaacacatctggatgcggtctctacgaggctgaaagctcttccccaaatcaatgcaggtctccagagtgtgcgcaccccagaacgtgcccatgcaggtctgcagcagctggaagtgcctgagcctgcacccaggtcatagcctagggcaaggtggtcagctccacgcctccagacccccttcagataaatcgagagaagggtggctgtcgtaggggcctccttctgaggg

SEQ ID NO: 1837 - DNA, 600 bp, Chicken  19866894088557_1
ttctggatctgcagcattgcattttaatgagctaatttgtaagttgattttaatgagttcatttaaattcctgtacagaagcttaacctctgcaggtatagctccctcactccttctggtttataatgcaaggcttttaacagtgcaattggtttcttgctcttcggggatttacttacaaagtgatatatcaaactccagttaaatctttaggggaaagcagctgcttcagcacctctgtacaacgcatttcctccaggatctccaagatggcggccacccctgtgtgagctgctatgrggaacagcaaaagactggtaaacccctgagctcaaaatgtccckcactgagcccgtgggatctgcagaccgtkyttcagctttgagatctgttagaaggggacaattttctttcacctgttcattgcaccttaataagaagcatcagtttttcagcatttctgcacaggcagccaggcccactctgaagctgagtgggcaatgcacagcaggaaggtgccatctgtgacaagagacagctcttgttggcagagcgtgcaaaggagtttcttcttcaaagcctaaaaataacttatgtaca

SEQ ID NO: 1838 - DNA, 600 bp, Chicken  19866894088557_2
tgattttaatgagttcatttaaattcctgtacagaagcttaacctctgcaggtatagctccctcactccttctggtttataatgcaaggcttttaacagtgcaattggtttcttgctcttcggggatttacttacaaagtgatatatcaaactccagttaaatctttaggggaaagcagctgcttcagcacctctgtacaacgcatttcctccaggatctccaagatggcggccacccctgtgtgagctgctatgrggaacagcaaaagactggtaaacccctgagctcaaaatgtccckcactgagcccgtgggatctgcagaccgtkyttcagctttgagatctgttagaaggggacaattttctttcacctgttcattgcaccttaataagaagcatcagtttttcagcatttctgcacaggcagccaggcccactctgaagctgagtgggcaatgcacagcaggaaggtgccatctgtgacaagagacagctcttgttggcagagcgtgcaaaggagtttcttcttcaaagcctaaaaataacttatgtacagccaggcagaaggatcacataatacaagccacagtattagagga

SEQ ID NO: 1839 - DNA, 600 bp, Chicken  19866894088557_3
tacagaagcttaacctctgcaggtatagctccctcactccttctggtttataatgcaaggcttttaacagtgcaattggtttcttgctcttcggggatttacttacaaagtgatatatcaaactccagttaaatctttaggggaaagcagctgcttcagcacctctgtacaacgcatttcctccaggatctccaagatggcggccacccctgtgtgagctgctatgrggaacagcaaaagactggtaaacccctgagctcaaaatgtccckcactgagcccgtgggatctgcagaccgtkyttcagctttgagatctgttagaaggggacaattttctttcacctgttcattgcaccttaataagaagcatcagtttttcagcatttctgcacaggcagccaggcccactctgaagctgagtgggcaatgcacagcaggaaggtgccatctgtgacaagagacagctcttgttggcagagcgtgcaaaggagtttcttcttcaaagcctaaaaataacttatgtacagccaggcagaaggatcacataatacaagccacagtattagaggaatctttcaaagacttgaagtggaactaca

SEQ ID NO: 1840 - DNA, 600 bp, Chicken  19866894088557_4
acagaagcttaacctctgcaggtatagctccctcactccttctggtttataatgcaaggcttttaacagtgcaattggtttcttgctcttcggggatttacttacaaagtgatatatcaaactccagttaaatctttaggggaaagcagctgcttcagcacctctgtacaacgcatttcctccaggatctccaagatggcggccacccctgtgtgagctgctatgrggaacagcaaaagactggtaaacccctgagctcaaaatgtccckcactgagcccgtgggatctgcagaccgtkyttcagctttgagatctgttagaaggggacaattttctttcacctgttcattgcaccttaataagaagcatcagtttttcagcatttctgcacaggcagccaggcccactctgaagctgagtgggcaatgcacagcaggaaggtgccatctgtgacaagagacagctcttgttggcagagcgtgcaaaggagtttcttcttcaaagcctaaaaataacttatgtacagccaggcagaaggatcacataatacaagccacagtattagaggaatctttcaaagacttgaagtggaactacag

SEQ ID NO: 1841 - DNA, 600 bp, Chicken  19866894088557_5
caaagcctaaaaataacttatgtacagccaggcagaaggatcacataatacaagccacagtattagaggaatctttcaaagacttgaagtggaactacagccattcccctagaaagataatctgctttagatttagaaacctcagcagtgggagatctaccacagctgctgttcagctggttagttattcttgttatctgtttcccgtacgtgatctgcaattagctagcttcagctgctgctgctgcatgccagcctgctggcttacagagctatccacaaccagaaggctgcttgtaygtagctgtctcaaaaacaaagatacagtgtgagattcgagtctgctttctggaagaccaggttccttccatttggggatggggaagcacggagaaattgccacaatactgttaggatacgaggctgccacttctaggttgctgctttgactctaaaagcaacagatgtgctccagttgggtggatgccaaatgcatgcacagagccaaaggtgtgacctcaaagtctggtacaaaaacagacttctgccataccttccacttaaatcatctcgatccatgaaagcagagaggcttcccaa

SEQ ID NO: 1842 - DNA, 600 bp, Chicken  19866894088557_6
ttctggaagaccaggttccttccatttggggatggggaagcacggagaaattgccacaatactgttaggatacgaggctgccacttctaggttgctgctttgactctaaaagcaacagatgtgctccagttgggtggatgccaaatgcatgcacagagccaaaggtgtgacctcaaagtctggtacaaaaacagacttctgccataccttccacttaaatcatctcgatccatgaaagcagagaggcttcccaaactggcccttaaagattatgtttgaagcttagaaaagacaaagagraaagtaacacactctgaaygcgatttcttatgctgggctgttggccctactgactctctggaaagcagaattaaaccttcctgtgatgtgaaatgagagcagacagacgtgctcttgcagtccttgctgacattcctggtacacagcagtgtgtcaccaccctcaccagagggcagaattggacacacaaagataaattctattcttaacctacgctgtcatactgagctcttgaatgtgttcagcacccacagaaactctcacttctggcttgttttatgcctaccatgaagggaacaa

SEQ ID NO: 1843 - DNA, 592 bp, Chicken  19866894088557_7
ttccatttggggatggggaagcacggagaaattgccacaatactgttaggatacgaggctgccacttctaggttgctgctttgactctaaaagcaacagatgtgctccagttgggtggatgccaaatgcatgcacagagccaaaggtgtgacctcaaagtctggtacaaaaacagacttctgccataccttccacttaaatcatctcgatccatgaaagcagagaggcttcccaaactggcccttaaagattatgtttgaagcttagaaaagacaaagagraaagtaacacactctgaaygcgatttcttatgctgggctgttggccctactgactctctggaaagcagaattaaaccttcctgtgatgtgaaatgagagcagacagacgtgctcttgcagtccttgctgacattcctggtacacagcagtgtgtcaccaccctcaccagagggcagaattggacacacaaagataaattctattcttaacctacgctgtcatactgagctcttgaatgtgttcagcacccacagaaactctcacttctggcttgttttatgcctaccatgaagggaacaacctattgctag

SEQ ID NO: 1844 - DNA, 600 bp, Chicken  19866894088558_1
cccccactttccctagccttcctttgagccctgggatagctatgctttgcaaaggccagtggcattgaagtacttcccactctgctcttcccttcatcacacttgaactggacccacatccctgtgcacatgaagcaagctgaaccttaacacttctttttcctttagaagggaaaaatctgttctctgcaaaccagaaccaaactgtaaaagggctttaaaagagtcatgcaaacctctgctagttgttttgcacttgctttgcaatcttgttggaatatcctcaagcaggacacaaawaacttccaggtgtgttataggctgcttcagaggcacactgctaagcacagtctagaaatcagatccaaggttatgagtgtttgacccctctgctgtaatgtgcacctgcacagcaaagagcagagaagccttgagtgtcttgtgttagtgcatgagtttgttcatcttgcagctcgtgtccctctttcccactaaatgaaaggggggtagggggcagcacagacactgcaggatgggtaaaggccaggaacagaactcatcacaaagaacaagtggcacctttttccttcattctttgtg

SEQ ID NO: 1845 - DNA, 600 bp, Chicken  19866894088560_1
aagcagcctctgcattgccggtctagatgcttacacctgcacagagctgttagtctggaaaagagcacccagaacgtggatgaagggtggctgctttgcttctctttacacttcaacaggtccacacagcctacttttgtaatttctagagcaaccacatcagtaggagatggtttaatggttcaactatcactcagccctcctctgacagcagagcggtgccttaaagcttacacttacctcaaaggttgctttcaggtgcatacaccatttaacctgtgtcttacaaatgaaaggcayaaagagctaaaactcaaggggtgaggaagggcaatgaagatcatgaaggcgagcagccaaaccacttgattagcaagttgcttcaccagcactacaaaaccttctgtaagagtccaatcacagagtggtttgggttggaagggacctccwagcccacccagtcccacccccagccatgggcagggctgcccgccccccagctcaggctgcccagggccccatcttacctggcctggagcactgcagtttctctgggcagctgtgccagggcctcactgccctctcagtaagaggatttcc

SEQ ID NO: 1846 - DNA, 600 bp, Chicken  19866894088560_2
gcaaccacatcagtaggagatggtttaatggttcaactatcactcagccctcctctgacagcagagcggtgccttaaagcttacacttacctcaaaggttgctttcaggtgcatacaccatttaacctgtgtcttacaaatgaaaggcayaaagagctaaaactcaaggggtgaggaagggcaatgaagatcatgaaggcgagcagccaaaccacttgattagcaagttgcttcaccagcactacaaaaccttctgtaagagtccaatcacagagtggtttgggttggaagggacctccwagcccacccagtcccacccccagccatgggcagggctgcccgccccccagctcaggctgcccagggccccatcttacctggcctggagcactgcagtttctctgggcagctgtgccagggcctcactgccctctcagtaagaggatttcctcctgatgtgtaacctaaatctcccttcttttagtttaaagccagatattccctctcgtactatctgtcaggacaagaagtcaaggaagatgatgcagctgcctcaaaccagaagaggctgcacacaagcaaaakycaygtgaactgtgt

SEQ ID NO: 1847 - DNA, 522 bp, Chicken  19866894088560_3
tggaagggacctccwagcccacccagtcccacccccagccatgggcagggctgcccgccccccagctcaggctgcccagggccccatcttacctggcctggagcactgcagtttctctgggcagctgtgccagggcctcactgccctctcagtaagaggatttcctcctgatgtgtaacctaaatctcccttcttttagtttaaagccagatattccctctcgtactatctgtcaggacaagaagtcaaggaagatgatgcagctgcctcaaaccagaagaggctgcacacaagcaaaakycaygtgaactgtgtttcagaaaacagtgtcatttctaatgactcttcatataggcccagtttgcccctcagatgaattactgaatgtttttcaaaggcctgctgcgtttggaatctaggtttgccagtctaggttgcatcatctagctgtgctgcaaatgactcagttcatttcagaaacatttgataaccctcttgtagcagagagctaccttaagtgag

SEQ ID NO: 1848 - DNA, 521 bp, Chicken  19866894088560_4
ggaagggacctccwagcccacccagtcccacccccagccatgggcagggctgcccgccccccagctcaggctgcccagggccccatcttacctggcctggagcactgcagtttctctgggcagctgtgccagggcctcactgccctctcagtaagaggatttcctcctgatgtgtaacctaaatctcccttcttttagtttaaagccagatattccctctcgtactatctgtcaggacaagaagtcaaggaagatgatgcagctgcctcaaaccagaagaggctgcacacaagcaaaakycaygtgaactgtgtttcagaaaacagtgtcatttctaatgactcttcatataggcccagtttgcccctcagatgaattactgaatgtttttcaaaggcctgctgcgtttggaatctaggtttgccagtctaggttgcatcatctagctgtgctgcaaatgactcagttcatttcagaaacatttgataaccctcttgtagcagagagctaccttaagtgag

SEQ ID NO: 1849 - DNA, 518 bp, Chicken  19866894088560_5
agggacctccwagcccacccagtcccacccccagccatgggcagggctgcccgccccccagctcaggctgcccagggccccatcttacctggcctggagcactgcagtttctctgggcagctgtgccagggcctcactgccctctcagtaagaggatttcctcctgatgtgtaacctaaatctcccttcttttagtttaaagccagatattccctctcgtactatctgtcaggacaagaagtcaaggaagatgatgcagctgcctcaaaccagaagaggctgcacacaagcaaaakycaygtgaactgtgtttcagaaaacagtgtcatttctaatgactcttcatataggcccagtttgcccctcagatgaattactgaatgtttttcaaaggcctgctgcgtttggaatctaggtttgccagtctaggttgcatcatctagctgtgctgcaaatgactcagttcatttcagaaacatttgataaccctcttgtagcagagagctaccttaagtgag

SEQ ID NO: 1850 - DNA, 599 bp, Chicken  19866894088563_1
  misc_feature (1)..(101): n is any nucleotide
nnnnnnnnnnnnnnnnnnnnnnnnnnnnnnnnnnnnnnnnnnnnnnnnnnnnnnnnnnnnnnnnnnnnnnnnnnnnnnnnnnnnnnnnnnnnnnnnnnnnnttatatcttgcacatggaacagcagttgtgactcactgtagtcattatctcctatgagtggtaatcccagtctcagagcagcccttcataaagctttctcctccacagagataactgtaaaaaattccaagggatgaactgttcccaggcttcgttcacagttactgggtaggtaggcagactcagcccaagggaccakatacaatgaaaataaagaccttgggctggatttggtggtctttgattagccaggttagagactataagctttacttcactcggtgacacagcttacaagggggaaatgtgtcgcagcattccatagcaattgatgtctcccakgaactgaaaattaagaactagattttactgtaatcaaaatggatggtggcaggggcattcatctgtgagatcaggacaggacagtttcctagttatytggagatactagaaaatatcagagtactagaaaatataagagtactcagatgtactctt

SEQ ID NO: 1851 - DNA, 600 bp, Chicken  19866894088563_2
cattatctcctatgagtggtaatcccagtctcagagcagcccttcataaagctttctcctccacagagataactgtaaaaaattccaagggatgaactgttcccaggcttcgttcacagttactgggtaggtaggcagactcagcccaagggaccakatacaatgaaaataaagaccttgggctggatttggtggtctttgattagccaggttagagactataagctttacttcactcggtgacacagcttacaagggggaaatgtgtcgcagcattccatagcaattgatgtctcccakgaactgaaaattaagaactagattttactgtaatcaaaatggatggtggcaggggcattcatctgtgagatcaggacaggacagtttcctagttatytggagatactagaaaatatcagagtactagaaaatataagagtactcagatgtactcttaaaagcaacctttaatcttaaagaaatcaaaagaccaccacaaaattacctgcaaaatatcaattgtaattaaaaccactttgtttgtcaactctcaaaacattttttctacccatcaggataaattctatcctacttggtttc

SEQ ID NO: 1852 - DNA, 600 bp, Chicken  19866894088563_3
tgttcccaggcttcgttcacagttactgggtaggtaggcagactcagcccaagggaccakatacaatgaaaataaagaccttgggctggatttggtggtctttgattagccaggttagagactataagctttacttcactcggtgacacagcttacaagggggaaatgtgtcgcagcattccatagcaattgatgtctcccakgaactgaaaattaagaactagattttactgtaatcaaaatggatggtggcaggggcattcatctgtgagatcaggacaggacagtttcctagttatytggagatactagaaaatatcagagtactagaaaatataagagtactcagatgtactcttaaaagcaacctttaatcttaaagaaatcaaaagaccaccacaaaattacctgcaaaatatcaattgtaattaaaaccactttgtttgtcaactctcaaaacattttttctacccatcaggataaattctatcctacttggtttcggcttcactcagccgttctttatccataagctggtctcatctgattattctgtgacctctgtgatggaactgttcttagtgaaagattcacaacatg

SEQ ID NO: 1853 - DNA, 600 bp, Chicken  19866894088563_4
gttctgaaatatctcacatccctattaaaacatatggtcatttgtaaatgaagtggctttaatggtacttgaatagtataaacagtattatggctattttcatatctagcatgctttgagtaggtagtacagggccaagctgtgttggatcagctgtcgtattacttagtctagaacacgttttggtgcatttggctcaatgcaaactgtatttcaaaataggctgagtagaaattgtgtattgtaggaatgcctgtggtttcccactgtgattccttctactgctttctttgacctgamgtgtcarttgtgtgtgaaatcaaatctaacacatcacctgaattttcgttgctctcctgagcgtacacagcaaagcaggtacctcgagctgtcctgtgtgctgctgaaggtggtctcagggtagctgctaatgttgcctggaagcttaaaagtaaggcggttattcatttcatccaaaattgtatgctgctttgctggccttcatatatagtgaaggtcatccaagatctraaatactgttaaatcatattacatatgctttctgagtcagtcttgtgttagaatttawtgaattaaagg

SEQ ID NO: 1854 - DNA, 600 bp, Chicken  19866894088563_5
aatatctcacatccctattaaaacatatggtcatttgtaaatgaagtggctttaatggtacttgaatagtataaacagtattatggctattttcatatctagcatgctttgagtaggtagtacagggccaagctgtgttggatcagctgtcgtattacttagtctagaacacgttttggtgcatttggctcaatgcaaactgtatttcaaaataggctgagtagaaattgtgtattgtaggaatgcctgtggtttcccactgtgattccttctactgctttctttgacctgamgtgtcarttgtgtgtgaaatcaaatctaacacatcacctgaattttcgttgctctcctgagcgtacacagcaaagcaggtacctcgagctgtcctgtgtgctgctgaaggtggtctcagggtagctgctaatgttgcctggaagcttaaaagtaaggcggttattcatttcatccaaaattgtatgctgctttgctggccttcatatatagtgaaggtcatccaagatctraaatactgttaaatcatattacatatgctttctgagtcagtcttgtgttagaatttawtgaattaaaggctgtgac

SEQ ID NO: 1855 - DNA, 600 bp, Chicken  19866894088563_6
aaattgtgtattgtaggaatgcctgtggtttcccactgtgattccttctactgctttctttgacctgamgtgtcarttgtgtgtgaaatcaaatctaacacatcacctgaattttcgttgctctcctgagcgtacacagcaaagcaggtacctcgagctgtcctgtgtgctgctgaaggtggtctcagggtagctgctaatgttgcctggaagcttaaaagtaaggcggttattcatttcatccaaaattgtatgctgctttgctggccttcatatatagtgaaggtcatccaagatctraaatactgttaaatcatattacatatgctttctgagtcagtcttgtgttagaatttawtgaattaaaggctgtgacattctcatttattatctttgcactactcctcatatgtagcaccttttatggattcagacctccaagagaatttttgagtgggtattatgtcagtaaaggacatcaacacaacagccccagtgttcattcatagagcactgtgtgtggaatagctgcaagcttccccacagtggcctgcttctctgtttgagctgtgttatgaggaaactgctttcaaagaagag

SEQ ID NO: 1856 - DNA, 600 bp, Chicken  19866894088563_7
tttgacctgamgtgtcarttgtgtgtgaaatcaaatctaacacatcacctgaattttcgttgctctcctgagcgtacacagcaaagcaggtacctcgagctgtcctgtgtgctgctgaaggtggtctcagggtagctgctaatgttgcctggaagcttaaaagtaaggcggttattcatttcatccaaaattgtatgctgctttgctggccttcatatatagtgaaggtcatccaagatctraaatactgttaaatcatattacatatgctttctgagtcagtcttgtgttagaatttawtgaattaaaggctgtgacattctcatttattatctttgcactactcctcatatgtagcaccttttatggattcagacctccaagagaatttttgagtgggtattatgtcagtaaaggacatcaacacaacagccccagtgttcattcatagagcactgtgtgtggaatagctgcaagcttccccacagtggcctgcttctctgtttgagctgtgttatgaggaaactgctttcaaagaagagcctctgataacagtggtacctggtatcacagtgatggggggtggttcttcagtagcag

SEQ ID NO: 1857 - DNA, 599 bp, Chicken  19866894088573_1
  misc_feature (1)..(94): n is any nucleotide
nnnnnnnnnnnnnnnnnnnnnnnnnnnnnnnnnnnnnnnnnnnnnnnnnnnnnnnnnnnnnnnnnnnnnnnnnnnnnnnnnnnnnnnnnnnnnnaaatcttgctttttctcttggaaaataccccattatcccgaaaatcatgcattttctcttcgagaatcccccttttaacccccaaatcatgcgttttctcttggaaaataccccttttaacccccaaatcacccattttcacttgaaaaataccccattacttttaaaatcatgcattttctcttcaagaatcccccttttaaccycaaaatcaagcgttttctcttggaaaatcccccttttaaccacaaaatcttgcattttctcgctaaaaataccccatttttttgaaaatcatgtattttctctgggaatttccccatttaacccccaaatcacccattttctcttcgagaatcccccttttaacccgaaaatcatgcattttctctccaaaaaatacgccatcatcccaaaaatcatgcattttctcttggaaaatcacgcaattaccccaaaatcatgcattttctcttggaaaatcccccattatccccaaaatcac

SEQ ID NO: 1858 - DNA, 526 bp, Chicken  19866894088591_1
taaaagggggattttccaagagaaaacgcttgattttggggttaaaagggggattctcgaagagaaaatgcatgatttgggggttaaaaggggaaattcccagagaaaatacatgattttcaaaataatggaatatttttagcgagaaaatgcatgatttggagttaaaagggggattttccaagagaaaacgcatgattttggggttaaaagggggattctcgaagagaaaatgggtgattttcaaaataatggggtattttccaagagaaaatgcaagattttggggttaaaaggggkattttccaagagaaaatgcgtggttttgtggttaaaaggggtattttccaagagaaaatgcatgattttcgggataatagcgtattttttggagagaaaatgcctgctttgggggtaaatgcatgattttccaagagaaaatgcatgattttcgcgataatggggtattttccaagagaaaatgtgtgattttggggttaaaaggggggttttccaagagaaaacg

SEQ ID NO: 1859 - DNA, 599 bp, Chicken  19866894088600_1
  misc_feature (1)..(60): n is any nucleotide
nnnnnnnnnnnnnnnnnnnnnnnnnnnnnnnnnnnnnnnnnnnnnnnnnnnnnnnnnnnnaaaacttgaatagatttcaagaaacacgatgagctataagcaatatatgatatttgtgttttttctcttaattgaacaacttctgatgaatgttgagaagcaaagaaaattcagattgattaaaaattatcttattttctaggattaaaaatcaaacaaacaataagcacacctttgaaatgcacctttgggagcttcaatacttcattccagtatttcatgcatttattactgaaaatrtgtagctttttcagccaaaatttgcctcttacgatgttccactaatgggaccgttgcacttctgctaggatgaacagtctgctcttaccagtttctctttccccaagtaagtatttatttagtgatcagrcatgccttaacctttcctttyrtaagctaaatagagctccttgagattgtcactgcaagatgtgttttctcatcctttaatcaatcttacaacttacagtcatatccaatttatcaagctctcttttgatgtgtgaacaccaatgctgaaygtaatgttttgccttcag

SEQ ID NO: 1860 - DNA, 600 bp, Chicken  19866894088600_2
attgaacaacttctgatgaatgttgagaagcaaagaaaattcagattgattaaaaattatcttattttctaggattaaaaatcaaacaaacaataagcacacctttgaaatgcacctttgggagcttcaatacttcattccagtatttcatgcatttattactgaaaatrtgtagctttttcagccaaaatttgcctcttacgatgttccactaatgggaccgttgcacttctgctaggatgaacagtctgctcttaccagtttctctttccccaagtaagtatttatttagtgatcagrcatgccttaacctttcctttyrtaagctaaatagagctccttgagattgtcactgcaagatgtgttttctcatcctttaatcaatcttacaacttacagtcatatccaatttatcaagctctcttttgatgtgtgaacaccaatgctgaaygtaatgttttgccttcagtagtggcagtagatgctgtggtaatgtaccttattcagatttcccaatacacacccaaagaatttcagtccctgtaaccgtatagttacttccaagcccacagtgaagttatgatctgccaggatgctcta

SEQ ID NO: 1861 - DNA, 600 bp, Chicken  19866894088600_3
gttgagaagcaaagaaaattcagattgattaaaaattatcttattttctaggattaaaaatcaaacaaacaataagcacacctttgaaatgcacctttgggagcttcaatacttcattccagtatttcatgcatttattactgaaaatrtgtagctttttcagccaaaatttgcctcttacgatgttccactaatgggaccgttgcacttctgctaggatgaacagtctgctcttaccagtttctctttccccaagtaagtatttatttagtgatcagrcatgccttaacctttcctttyrtaagctaaatagagctccttgagattgtcactgcaagatgtgttttctcatcctttaatcaatcttacaacttacagtcatatccaatttatcaagctctcttttgatgtgtgaacaccaatgctgaaygtaatgttttgccttcagtagtggcagtagatgctgtggtaatgtaccttattcagatttcccaatacacacccaaagaatttcagtccctgtaaccgtatagttacttccaagcccacagtgaagttatgatctgccaggatgctctagtcagcctgcgcactttttct

SEQ ID NO: 1862 - DNA, 600 bp, Chicken  19866894088600_4
ttgagaagcaaagaaaattcagattgattaaaaattatcttattttctaggattaaaaatcaaacaaacaataagcacacctttgaaatgcacctttgggagcttcaatacttcattccagtatttcatgcatttattactgaaaatrtgtagctttttcagccaaaatttgcctcttacgatgttccactaatgggaccgttgcacttctgctaggatgaacagtctgctcttaccagtttctctttccccaagtaagtatttatttagtgatcagrcatgccttaacctttcctttyrtaagctaaatagagctccttgagattgtcactgcaagatgtgttttctcatcctttaatcaatcttacaacttacagtcatatccaatttatcaagctctcttttgatgtgtgaacaccaatgctgaaygtaatgttttgccttcagtagtggcagtagatgctgtggtaatgtaccttattcagatttcccaatacacacccaaagaatttcagtccctgtaaccgtatagttacttccaagcccacagtgaagttatgatctgccaggatgctctagtcagcctgcgcactttttctc

SEQ ID NO: 1863 - DNA, 600 bp, Chicken  19866894088600_5
gcatttattactgaaaatrtgtagctttttcagccaaaatttgcctcttacgatgttccactaatgggaccgttgcacttctgctaggatgaacagtctgctcttaccagtttctctttccccaagtaagtatttatttagtgatcagrcatgccttaacctttcctttyrtaagctaaatagagctccttgagattgtcactgcaagatgtgttttctcatcctttaatcaatcttacaacttacagtcatatccaatttatcaagctctcttttgatgtgtgaacaccaatgctgaaygtaatgttttgccttcagtagtggcagtagatgctgtggtaatgtaccttattcagatttcccaatacacacccaaagaatttcagtccctgtaaccgtatagttacttccaagcccacagtgaagttatgatctgccaggatgctctagtcagcctgcgcactttttctctgcatgcctaggacttgctctgttcacctaccaccaggctgatcagctgatgcagcagtcaggattgctgtttttaccgtgctaattcttctcttcttaccatataagtgattcatcagacaacttccc

SEQ ID NO: 1864 - DNA, 600 bp, Chicken  19866894088602_1
ggaagtctgatttttaactctctggttttcttgattttgtttttggtggggtgttatttagggtttgctttttttttccacaaaattaagtttggagccccgagaaatgatgcttcaaaaactagtgctgtatgcaggaagaaaggttttacatcacaaattctgggtttcccatagacattaattttcatactgtcgttttgtgctttgttctgtgtggattcagagtgggcttcttgctatagtataagcactaaacctttcctgctggaattagggttgtcatttaccaatattctrtgtgccttttgcagatttgtctatggctatgcagaaaatctatcaaacatttgtagctttagcagcacaacttcagtccatacatgaaaacgtgaaggtatgttgctttgatgygttccygcgtgtttagtgaaagaactgaagagtcactgttaataactgatagtatatctcaagtatgcttttttctcttaaattgtttttttaaaaatgattgtctgatatgcttggattaaaaggataactttcattcagctgaagtttaatttgaaacgtttgccaatagcgatggtggcaact

SEQ ID NO: 1865 - DNA, 600 bp, Chicken  19866894088602_2
tcaaaaactagtgctgtatgcaggaagaaaggttttacatcacaaattctgggtttcccatagacattaattttcatactgtcgttttgtgctttgttctgtgtggattcagagtgggcttcttgctatagtataagcactaaacctttcctgctggaattagggttgtcatttaccaatattctrtgtgccttttgcagatttgtctatggctatgcagaaaatctatcaaacatttgtagctttagcagcacaacttcagtccatacatgaaaacgtgaaggtatgttgctttgatgygttccygcgtgtttagtgaaagaactgaagagtcactgttaataactgatagtatatctcaagtatgcttttttctcttaaattgtttttttaaaaatgattgtctgatatgcttggattaaaaggataactttcattcagctgaagtttaatttgaaacgtttgccaatagcgatggtggcaactgagctgtcatttaagttgtaaaacgcttttcatgtaaattctttttcatttttaatcagttcttcatttcttttttgagctcgtggatatgttgtgctcgttagtgacatcttg

SEQ ID NO: 1866 - DNA, 600 bp, Chicken  19866894088602_3
actagtgctgtatgcaggaagaaaggttttacatcacaaattctgggtttcccatagacattaattttcatactgtcgttttgtgctttgttctgtgtggattcagagtgggcttcttgctatagtataagcactaaacctttcctgctggaattagggttgtcatttaccaatattctrtgtgccttttgcagatttgtctatggctatgcagaaaatctatcaaacatttgtagctttagcagcacaacttcagtccatacatgaaaacgtgaaggtatgttgctttgatgygttccygcgtgtttagtgaaagaactgaagagtcactgttaataactgatagtatatctcaagtatgcttttttctcttaaattgtttttttaaaaatgattgtctgatatgcttggattaaaaggataactttcattcagctgaagtttaatttgaaacgtttgccaatagcgatggtggcaactgagctgtcatttaagttgtaaaacgcttttcatgtaaattctttttcatttttaatcagttcttcatttcttttttgagctcgtggatatgttgtgctcgttagtgacatcttgatgtca

SEQ ID NO: 1867 - DNA, 599 bp, Chicken  19866894088607_1
  misc_feature (1)..(24): n is any nucleotide
nnnnnnnnnnnnnnnnnnnnnnnncggaaaatcctaaggaattcaagtaactgctatgagccactagtgcattgtttgcaacgcaatatcttaaggcgtttatcaaaagtaaaattaaaagtatgcagtgatcattctctcaagtaaaaccacattttgctaattcagaagctgggttgtcatgttcttcttgctgaattacagaaataactgtttaaaaaagaacctatgtgaaggcatttcttcaattttcattttactttccaaggcttggtaatgttgaaaacaaatacattgttyttacctctgatttgccatcagaaaataaatataaaaatattttcatcattatttctctgtaattagaagagatacaatgttttaatcaagagatgcaacatctccattgtgattcacaagccctgcagagctggttttgttgggcagttatttgaacaaagggattattagtctttcctcccccacaacacataccatgcttagaaaacaaagtcttccaatccataactactagtgagagcaatggttgtctttcaggactttagtttcatttaatttggtttaatttttcatttctt

SEQ ID NO: 1868 - DNA, 600 bp, Chicken  19866894088607_2
ttatttctctgtaattagaagagatacaatgttttaatcaagagatgcaacatctccattgtgattcacaagccctgcagagctggttttgttgggcagttatttgaacaaagggattattagtctttcctcccccacaacacataccatgcttagaaaacaaagtcttccaatccataactactagtgagagcaatggttgtctttcaggactttagtttcatttaatttggtttaatttttcatttctttgaatagacacttatttagacatctatttgtatagatgcccaaacaacygtgaatttactgaattcttgtgcaatatggtattagtttagtacccttacttctgtgattttaaacaagaaagacctaaatgctgcctgcttyacccgcatagctccattgctcatacacccaaccgttagtcttgtcttaattgaaattctccaagaatataggctactcagaaaatcaaattctacaagaactgtgaaatatagaatcttactttttgtctattgttcatattctatgctaaaatggatgaaaaccttcttttactggggggttttctacttcagtcaatcataggtc

SEQ ID NO: 1869 - DNA, 557 bp, Chicken  19866894088607_3
gggcagttatttgaacaaagggattattagtctttcctcccccacaacacataccatgcttagaaaacaaagtcttccaatccataactactagtgagagcaatggttgtctttcaggactttagtttcatttaatttggtttaatttttcatttctttgaatagacacttatttagacatctatttgtatagatgcccaaacaacygtgaatttactgaattcttgtgcaatatggtattagtttagtacccttacttctgtgattttaaacaagaaagacctaaatgctgcctgcttyacccgcatagctccattgctcatacacccaaccgttagtcttgtcttaattgaaattctccaagaatataggctactcagaaaatcaaattctacaagaactgtgaaatatagaatcttactttttgtctattgttcatattctatgctaaaatggatgaaaaccttcttttactggggggttttctacttcagtcaatcataggtctccatagttttgggcttcaggctgatgaaaagtctacacttttttttttt

SEQ ID NO: 1870 - DNA, 600 bp, Chicken  19866894088613_1
ccaggatccatgaaatcaagaggccaaatctatgccaataaactgtttttaaataccctctggagtgcatcaggagggaagacaaacatgtgctgaatttatggaagagcctgcccggaacccaggggactgggtcttttctggggctttccagctttccctgttagtcacttgaagcttctattccaatttaactagctttgcaagcaggttacatgaggtgctgcgaggcagatgctgttaggagagaagagccttcagtccaacatctcccattcagcatcaactaaatggcagcasagccttctccacataccctgccatacagaagctatcaccagtttgctttcaccaagccctggaaatacaatggcagcaaytggaggaagaatggttgctcagtatttatcactgtgtgcactggaaggaacctgatgtagcaagaaagagactgcacaagctgatgcaattcaatgggcaaagccccaaaatcctcagggtttttgttgtgcaaaaaaaaaaaaaaaaaaaaatcaaacaatcaaataattggtggggatgaggaaaactagagaacccagtgccagaggtacacgtgaa

SEQ ID NO: 1871 - DNA, 600 bp, Chicken  19866894088613_2
gacaaacatgtgctgaatttatggaagagcctgcccggaacccaggggactgggtcttttctggggctttccagctttccctgttagtcacttgaagcttctattccaatttaactagctttgcaagcaggttacatgaggtgctgcgaggcagatgctgttaggagagaagagccttcagtccaacatctcccattcagcatcaactaaatggcagcasagccttctccacataccctgccatacagaagctatcaccagtttgctttcaccaagccctggaaatacaatggcagcaaytggaggaagaatggttgctcagtatttatcactgtgtgcactggaaggaacctgatgtagcaagaaagagactgcacaagctgatgcaattcaatgggcaaagccccaaaatcctcagggtttttgttgtgcaaaaaaaaaaaaaaaaaaaaatcaaacaatcaaataattggtggggatgaggaaaactagagaacccagtgccagaggtacacgtgaaagctaggaacactagaaaactcctgaggcagagcagcacccagtggagctgaagcaaattttgctcttcccctccagcgc

SEQ ID NO: 1872 - DNA, 600 bp, Chicken  19866894088613_3
tgcactggaaggaacctgatgtagcaagaaagagactgcacaagctgatgcaattcaatgggcaaagccccaaaatcctcagggtttttgttgtgcaaaaaaaaaaaaaaaaaaaaatcaaacaatcaaataattggtggggatgaggaaaactagagaacccagtgccagaggtacacgtgaaagctaggaacactagaaaactcctgaggcagagcagcacccagtggagctgaagcaaattttgctcttcccctccagcgctctgggcttacactggagaaaaccaaagcagaatckagcacaaaagtacagaaagggaaacaaaattcaggtctccttgggaaaaaaaggaaaggagagagatgcacaacgaaagtcataaacagagccaggaaatgaaatatttccaataccagcaacaagtgtggcaccattgtgaacactgcacaacatctgtcccaaagtgtaggcaggtgctgacaccttcactttgactctgcgtttacatttccacctggtatgaggaccaaaaagacacccacaagggaagggaagtgcttcaccacagtgcatttaattttaatatctggagacaat

SEQ ID NO: 1873 - DNA, 600 bp, Chicken  19866894088613_4
ctcctaatatgcctacgtgtttaaccagttcacctctcaccatctccctactattcccctaaacaaagtgctgcttttatgatttctcataacaaatcaagtagaattaacagcgagtgccatacaaaccttcctcatcacaaactccagctcatgggcctgataggctggattcacagatacctgaagaaggagaaacaagaagggtaatcagagtaaccttacctcgaaaaccctcttccctaacagatactccaacaggaaagttctcccagagacaggtcacagttgaagcctctsctgtcagagacgcagacctaagagctcaccacaaggaactcaygttcactagaaaagctatctgaactcygtgtttgcatgaaagacaagggaaaagatttatgagtcagtcacaacagctttaggaataaaaacagtcctcctttctcccttgcaggcattaaattcaagccagagatactcaaaactgaagggaatcttgggattcttaacaggcaaccagcaaaatatcagcattttcctgtatggctctcaacagaggctgtattgagcactgaagctgagctgaccatcaggttc

SEQ ID NO: 1874 - DNA, 600 bp, Chicken  19866894088613_5
ctccctactattcccctaaacaaagtgctgcttttatgatttctcataacaaatcaagtagaattaacagcgagtgccatacaaaccttcctcatcacaaactccagctcatgggcctgataggctggattcacagatacctgaagaaggagaaacaagaagggtaatcagagtaaccttacctcgaaaaccctcttccctaacagatactccaacaggaaagttctcccagagacaggtcacagttgaagcctctsctgtcagagacgcagacctaagagctcaccacaaggaactcaygttcactagaaaagctatctgaactcygtgtttgcatgaaagacaagggaaaagatttatgagtcagtcacaacagctttaggaataaaaacagtcctcctttctcccttgcaggcattaaattcaagccagagatactcaaaactgaagggaatcttgggattcttaacaggcaaccagcaaaatatcagcattttcctgtatggctctcaacagaggctgtattgagcactgaagctgagctgaccatcaggttcatcctgagccattctcatgcatactattactgttccttagcac

SEQ ID NO: 1875 - DNA, 600 bp, Chicken  19866894088613_6
ctgcttttatgatttctcataacaaatcaagtagaattaacagcgagtgccatacaaaccttcctcatcacaaactccagctcatgggcctgataggctggattcacagatacctgaagaaggagaaacaagaagggtaatcagagtaaccttacctcgaaaaccctcttccctaacagatactccaacaggaaagttctcccagagacaggtcacagttgaagcctctsctgtcagagacgcagacctaagagctcaccacaaggaactcaygttcactagaaaagctatctgaactcygtgtttgcatgaaagacaagggaaaagatttatgagtcagtcacaacagctttaggaataaaaacagtcctcctttctcccttgcaggcattaaattcaagccagagatactcaaaactgaagggaatcttgggattcttaacaggcaaccagcaaaatatcagcattttcctgtatggctctcaacagaggctgtattgagcactgaagctgagctgaccatcaggttcatcctgagccattctcatgcatactattactgttccttagcactgggatgaacagtattgaaaaaaatat

SEQ ID NO: 1876 - DNA, 600 bp, Chicken  19866894088614_1
ctaagataatctcatccagccattcacccaaccccaccatgcccactaaacaagatagaagcaagaggagaaaaggaaatgggagagaaattacagccccaaccatcccacttcagtgcccacagcaaattcaggagaaaacaagccctctgcaggcttggagctcttaccctagctatagagtcatagaatcatagaatcaccaaggctgaaaaagacctccaagatcatctcgttcaaccatccacataccattaatatttcccactgtagcatctctgttagtgtaacatctaaacrttccttgaacacctcctggagcaatgactcaatcacttcccygggcagcctgttccagtgccaagagttgacatgaccaagagttgggatggaaatggttcatttgttgtctttgtacagcatctgaggaagcagagggccaacatccagaggggcaggtaacagtattaacagattcatctttctgttgacatcgacactgacagctgacttcacaactgtgccactcaggctaaaccagtggtaaacccaaaaatgatctggagtcccttatggaataagtctagacagcaccttgaa

SEQ ID NO: 1877 - DNA, 600 bp, Chicken  19866894088614_2
ccactaaacaagatagaagcaagaggagaaaaggaaatgggagagaaattacagccccaaccatcccacttcagtgcccacagcaaattcaggagaaaacaagccctctgcaggcttggagctcttaccctagctatagagtcatagaatcatagaatcaccaaggctgaaaaagacctccaagatcatctcgttcaaccatccacataccattaatatttcccactgtagcatctctgttagtgtaacatctaaacrttccttgaacacctcctggagcaatgactcaatcacttcccygggcagcctgttccagtgccaagagttgacatgaccaagagttgggatggaaatggttcatttgttgtctttgtacagcatctgaggaagcagagggccaacatccagaggggcaggtaacagtattaacagattcatctttctgttgacatcgacactgacagctgacttcacaactgtgccactcaggctaaaccagtggtaaacccaaaaatgatctggagtcccttatggaataagtctagacagcaccttgaactatgactatggagacagaactggtcccagtgagccccaggg

SEQ ID NO: 1878 - DNA, 600 bp, Chicken  19866894088617_1
acagatggaacaaaagggaaagatgtgatggtctgcctaggcctccttccatttggcagtaggagactgagatctgctaaagagtcgaatttgatacttagtctctgataatgagagtttaatatggaatttctctaaaaaaggcttcctcttaggaggcattttcttagaatcatagaatcatagaatcacaaggttggaaaggacctataagatcatctagtccaaccgtcctcccattacctttgctaccacaagccactaaaccatatctcatagctcctcatccagacgcctctkgaacactgccagggatggcaactccaccaactccctgggcaggccattccagtgcctgaccactctgacagaaaaagtttttccttatgtctaacctaaacctcctctgctttgcgaggaggttgtgctcttacttgtggccatttcgttggatcctgtttgctgcctgggagaagaggccaaacccctcctcatcacaacttcccttcaggaagttgtagagtgcaatkaggtcttccctgagcctcctcttctccagacaaaaatcccagctccctcagtcgctcctcataagacttg

SEQ ID NO: 1879 - DNA, 600 bp, Chicken  19866894088617_2
gtcctcccattacctttgctaccacaagccactaaaccatatctcatagctcctcatccagacgcctctkgaacactgccagggatggcaactccaccaactccctgggcaggccattccagtgcctgaccactctgacagaaaaagtttttccttatgtctaacctaaacctcctctgctttgcgaggaggttgtgctcttacttgtggccatttcgttggatcctgtttgctgcctgggagaagaggccaaacccctcctcatcacaacttcccttcaggaagttgtagagtgcaatkaggtcttccctgagcctcctcttctccagacaaaaatcccagctccctcagtcgctcctcataagacttgtgctccagatccctcactggtttcgttgcccttctctggacacagggcctcagtgtcttttttgtagtgaggggcccaaaactgaacacaatactcgaggtgtggcctcaccagtgctaagtatagggggatgattacttccctgctcctgctggccacgctatttctaatgcaggtcaggatggcttttgccctcttggccacctgggcacactgttgtctcatgttca

SEQ ID NO: 1880 - DNA, 600 bp, Chicken  19866894088629_1
tgagacagccccaccaactgcagcaatccctgtgcctgcccagagcaaagatgcctcctgtgctgctcacgctgtagcagccccttaatttgctcgttagcaaagccaggaacaagagggaggcattgaatagcatcccttccccggcacaacctccacgtcctccccccagtctgcctttcacggccctgcacaaaagcttttcagtgttgctcaggtcagagacgggagtccaaggggaagtttggggcttgggctgatggggacaagggctcacgtgtctgcatgcccacagcagartgctgagaaacgccacatcccggcgtgcagaggtgtgggccaccaccagctggggaygcgcagatctcattcccagctgctggcacatcacccctrggtcagcgcagcaggatgctcgcctgcatcccagccccctcagcacgggctgagcaccgacagataccaatggggcaggggatggacagacagacagaagagctgtgagcacgtggggagtgacccacgcatccttgctccgctgagccctgcgcacgtggcgcgttgcgtcagctgcaggcagcatccccagaaggcgagctg

SEQ ID NO: 1881 - DNA, 600 bp, Chicken  19866894088629_2
ctgtgctgctcacgctgtagcagccccttaatttgctcgttagcaaagccaggaacaagagggaggcattgaatagcatcccttccccggcacaacctccacgtcctccccccagtctgcctttcacggccctgcacaaaagcttttcagtgttgctcaggtcagagacgggagtccaaggggaagtttggggcttgggctgatggggacaagggctcacgtgtctgcatgcccacagcagartgctgagaaacgccacatcccggcgtgcagaggtgtgggccaccaccagctggggaygcgcagatctcattcccagctgctggcacatcacccctrggtcagcgcagcaggatgctcgcctgcatcccagccccctcagcacgggctgagcaccgacagataccaatggggcaggggatggacagacagacagaagagctgtgagcacgtggggagtgacccacgcatccttgctccgctgagccctgcgcacgtggcgcgttgcgtcagctgcaggcagcatccccagaaggcgagctgcaatgaatcaccctcactccacgagggacccgcatggatggcagccaggcagaatga

SEQ ID NO: 1882 - DNA, 600 bp, Chicken  19866894088629_3
ttagcaaagccaggaacaagagggaggcattgaatagcatcccttccccggcacaacctccacgtcctccccccagtctgcctttcacggccctgcacaaaagcttttcagtgttgctcaggtcagagacgggagtccaaggggaagtttggggcttgggctgatggggacaagggctcacgtgtctgcatgcccacagcagartgctgagaaacgccacatcccggcgtgcagaggtgtgggccaccaccagctggggaygcgcagatctcattcccagctgctggcacatcacccctrggtcagcgcagcaggatgctcgcctgcatcccagccccctcagcacgggctgagcaccgacagataccaatggggcaggggatggacagacagacagaagagctgtgagcacgtggggagtgacccacgcatccttgctccgctgagccctgcgcacgtggcgcgttgcgtcagctgcaggcagcatccccagaaggcgagctgcaatgaatcaccctcactccacgagggacccgcatggatggcagccaggcagaatgaggaaaccacccaaaatcaagggatcccaggggattccct

SEQ ID NO: 1883 - DNA, 600 bp, Chicken  19866894088630_1
acaggaaccattcaataattgagggaatatttaatgcaggaacaacacatgtatcatccatcagggcaaaccacctgacttttgaaagcttccatacaattcatgaagcatttacccatttagaagaaggccatcttttaggaaagcagatagctggagagctgtgcaatagaaggagcactggcttggaaatgtaactctgtcaaagtgggcagttctgcagcctttaaggggagatacattcttctaaaagttccagataaaagtggggaaaaaattaattaatttaaatgcaaatgytaaaatgcatgttttagttctcacattttacaaatttaagaagcgctgaattttactgacagttttcttggcagtaaatgaattctaaagatgcacatgcaaatatttgtcaaaactgaatttttgattttgcatgcataagaattactccagaagtgctggcatcctcagctgctcacagaataaaactggcatcatgtggcacaactgtccaatcgcagcaagacagtgcatttttaatgattaatccatagagttaaacaaaatatatagtgaaaggaacgttgctgaatatatttg

SEQ ID NO: 1884 - DNA, 600 bp, Chicken  19866894088632_1
acaaaagagaagaactacgtatcccagaggacctcacggtcagagaaggaagacacatcacggaagatacatcatctggttgcgtgcggttcttcttcacttttgcttgctgccagggagagaagtgggtgtgctttccaagccgggtgccttcatcaagtaaggctttcggtttcggaaactctctcactctctctctctctccctctctatcgctctttcgctctctctccctcatttcatttggtttattatccttactcccaattagattgtattgtatcgtgtcatcttgcatcycaacatcatagttagtaaaataagttctccttcttagattgttgccgccgcttcgttttttctcgggaagccaggggggagggggaaccgcaagcctactgccccccctgtcatgggcacagatctatctaggtaactccgtgacagaagtaaaatttgaaggacctagcccaagtgtgaacttaaaccagaacatggtcctacactttcttatttttttgtgccaaacattgctgaggttaacagagaatcgccacaactggtgaccttgtgcttctgtgttgtcatgaataaccgaat

SEQ ID NO: 1885 - DNA, 600 bp, Chicken  19866894088633_1
attgatgttgcattttgacatgaatctcaagtgctctgctgggtacgctcgctgcagtgggagcatgagagtgaagctaatgtgtggcagaagataccatctcacataacaaagcatggggaaggacatgggagagtggtggtgagattggggtgataaaggacacgggctgagcaggaactgcactcaagacttgaaggaggcatgagtgtccccaccatactgcatacagaggggctggcattttggggctcattggagtaaattgcttctgtgtgctttgtggcagaagggaaaggscatgcactgagaaatagtaatattattctggatccggcttctcaaatccatcctgactgtggaccagagcattttgtgcattctgtagtatttaattatctgctgtttttgttgctgttttgtcctctggcttccctacccagctgcattgtcttcttcctccttccatggtcttgaagygctgtttaaaagcgatccatgttagtggggagctgtttgtgtgcacctgaattgcactggattgcctctggctgtttgtgctggtggaactgtgcttatgtttccagactcatgcaaaat

SEQ ID NO: 1886 - DNA, 600 bp, Chicken  19866894088633_2
ctgcactcaagacttgaaggaggcatgagtgtccccaccatactgcatacagaggggctggcattttggggctcattggagtaaattgcttctgtgtgctttgtggcagaagggaaaggscatgcactgagaaatagtaatattattctggatccggcttctcaaatccatcctgactgtggaccagagcattttgtgcattctgtagtatttaattatctgctgtttttgttgctgttttgtcctctggcttccctacccagctgcattgtcttcttcctccttccatggtcttgaagygctgtttaaaagcgatccatgttagtggggagctgtttgtgtgcacctgaattgcactggattgcctctggctgtttgtgctggtggaactgtgcttatgtttccagactcatgcaaaatacctcctttgattyagatgtttaatcttactgcactgatgtcactagaccagtggtatcgtccatctccatctcctatttgttctacagttctgcatgaaattggttggcactccaaactagatgcacatcccaaatttccaagcacctgacagctgcttgtggacttctagaatcaatc

SEQ ID NO: 1887 - DNA, 600 bp, Chicken  19866894088633_3
tagtaatattattctggatccggcttctcaaatccatcctgactgtggaccagagcattttgtgcattctgtagtatttaattatctgctgtttttgttgctgttttgtcctctggcttccctacccagctgcattgtcttcttcctccttccatggtcttgaagygctgtttaaaagcgatccatgttagtggggagctgtttgtgtgcacctgaattgcactggattgcctctggctgtttgtgctggtggaactgtgcttatgtttccagactcatgcaaaatacctcctttgattyagatgtttaatcttactgcactgatgtcactagaccagtggtatcgtccatctccatctcctatttgttctacagttctgcatgaaattggttggcactccaaactagatgcacatcccaaatttccaagcacctgacagctgcttgtggacttctagaatcaatccctcaatctgcatcacctatctacaatgaaaagaaaatgcaatttgcttgagttccagctggcagaacatggcaactttctaatagaaggaaccctgtccattgggttcccatccctggaggtgttawcagcca

SEQ ID NO: 1888 - DNA, 600 bp, Chicken  19866894088633_4
tgattyagatgtttaatcttactgcactgatgtcactagaccagtggtatcgtccatctccatctcctatttgttctacagttctgcatgaaattggttggcactccaaactagatgcacatcccaaatttccaagcacctgacagctgcttgtggacttctagaatcaatccctcaatctgcatcacctatctacaatgaaaagaaaatgcaatttgcttgagttccagctggcagaacatggcaactttctaatagaaggaaccctgtccattgggttcccatccctggaggtgttawcagccaggttggatgggatcctgggcacccagatcgtggtggctggcagccctgcccatggcatggcatgggggttggaacaagatgatctttaaggtccttttcaacctaagctgtttcatgattgtcaggttggcacgttcacactccagacagcagcagccttggccatgagtgcagctgcctctggagaaatgggctgtgagcagcacagcactgactccaaaaagcttctgtctgcaaatcctgtctcacattggtgtaaccatgcaagctgcagggcttgctgtgctgtgtgca

SEQ ID NO: 1889 - DNA, 600 bp, Chicken  19866894088638_1
agtatctcaggcttgctatatgatgcatttcattacaaactctagactgtgagtagtaaagcagtgatatatactgcattattgtgaggggatgagacagacccgtgtgacctaaataaaaacatttttccaggaacaatacaactgttctctgttacttctggcactgcttgtgttttggagataccattttgttgtggactgactcgcgaatgcttaggtgcatttgtgattcatccatcatgtaatcagggatgggaaagccattttgaggaagtgaacttgattcactctctcttytgagtacttgyttaaggtgttctaagatgttatttatttgggaagtacaaacagtacaaactgcwctctggagcctcttctgaaaatgatctcctccaaatgctagctattacaggtgattytttcatttttaattgtgtgcttcttttcttagatccccatttctgccctggtgtcctttgtggaagctctggaggttggatacagtaaacacaaaaatccttatcacaacctaatgcatgctgcagatgtgacacaaacagtccattacctccttttcaagacaggtgttgtggtatg

SEQ ID NO: 1890 - DNA, 600 bp, Chicken  19866894088638_2
cttgctatatgatgcatttcattacaaactctagactgtgagtagtaaagcagtgatatatactgcattattgtgaggggatgagacagacccgtgtgacctaaataaaaacatttttccaggaacaatacaactgttctctgttacttctggcactgcttgtgttttggagataccattttgttgtggactgactcgcgaatgcttaggtgcatttgtgattcatccatcatgtaatcagggatgggaaagccattttgaggaagtgaacttgattcactctctcttytgagtacttgyttaaggtgttctaagatgttatttatttgggaagtacaaacagtacaaactgcwctctggagcctcttctgaaaatgatctcctccaaatgctagctattacaggtgattytttcatttttaattgtgtgcttcttttcttagatccccatttctgccctggtgtcctttgtggaagctctggaggttggatacagtaaacacaaaaatccttatcacaacctaatgcatgctgcagatgtgacacaaacagtccattacctccttttcaagacaggtgttgtggtatgtacaggagttg

SEQ ID NO: 1891 - DNA, 600 bp, Chicken  19866894088638_3
gatatatactgcattattgtgaggggatgagacagacccgtgtgacctaaataaaaacatttttccaggaacaatacaactgttctctgttacttctggcactgcttgtgttttggagataccattttgttgtggactgactcgcgaatgcttaggtgcatttgtgattcatccatcatgtaatcagggatgggaaagccattttgaggaagtgaacttgattcactctctcttytgagtacttgyttaaggtgttctaagatgttatttatttgggaagtacaaacagtacaaactgcwctctggagcctcttctgaaaatgatctcctccaaatgctagctattacaggtgattytttcatttttaattgtgtgcttcttttcttagatccccatttctgccctggtgtcctttgtggaagctctggaggttggatacagtaaacacaaaaatccttatcacaacctaatgcatgctgcagatgtgacacaaacagtccattacctccttttcaagacaggtgttgtggtatgtacaggagttggcatccttaatacataataaaatggcagtagtttttgtttggtaaggaggatac

SEQ ID NO: 1892 - DNA, 600 bp, Chicken  19866894088638_4
catttttccaggaacaatacaactgttctctgttacttctggcactgcttgtgttttggagataccattttgttgtggactgactcgcgaatgcttaggtgcatttgtgattcatccatcatgtaatcagggatgggaaagccattttgaggaagtgaacttgattcactctctcttytgagtacttgyttaaggtgttctaagatgttatttatttgggaagtacaaacagtacaaactgcwctctggagcctcttctgaaaatgatctcctccaaatgctagctattacaggtgattytttcatttttaattgtgtgcttcttttcttagatccccatttctgccctggtgtcctttgtggaagctctggaggttggatacagtaaacacaaaaatccttatcacaacctaatgcatgctgcagatgtgacacaaacagtccattacctccttttcaagacaggtgttgtggtatgtacaggagttggcatccttaatacataataaaatggcagtagtttttgtttggtaaggaggataccattatccacacagaacccatttgtactgtagaaaagatgtagtttgcaatgtctgt

SEQ ID NO: 1893 - DNA, 600 bp, Chicken  19866894088639_1
cagttgaaagacactgctaatgtggatacaagaatacttgagggaatttgcaaaaaagcagggctttccgctgagaggcctgaagcacagaatggtattaaaaatgcatgaggctgagaaacaaaagagacaaagtagaaaagaagatgcagaaggatatggaaccatgaaaagggtaaagaataaaatgagtttaataaagtaagccaggacagagttctgggccatggagctgaatttggatacgaagcagaaagaagtaaaggtgaagaaatggcaagagagattggaggagcctgkcttggctgatgagcgatgagaggtggtgagagcactacaacaacacaactgcaatttctggcagtgaaataggcagacaacgctgaattgcaaatatgcagctcatgaaggctcacaatttgataagaagctgatgacagtgaggattagagaagtttcttgtatgtcaggtgggaagtttttaagagaaaaaggagttgggtgtgaaaagtggaagaaaagttttggacacactgcatgcagtgaggagataagtgaaaataaagacaactgggcaggatagaggaatgaggacacaga

SEQ ID NO: 1894 - DNA, 600 bp, Chicken  19866894088642_1
agagcagccccggtcccccctccccagctcagcagcccagcacctcactcccatttaactctgtgatcgttgaggtcccttctgatccgagccgttctgtgacggtgcagagcacagcgctgtgctggctgtggagcagctcctggctgaaaggggctctgccacaccatgggcctcactgtcctgcccacagcactggaaatacgccgtgagtgggtgcccaggacagggcccagacccagctgttgtatggcaccaacctcccagggctgggagctgcccagggctgggcccagctcmcgtttccccatgacctctccctggcatgcagtggggagcaatgtgctcccagccccactgtctctactccccaggagaygtgctacagccccactgccccccatgtcccagtatgttcatctgcctcagccccagccctgctgcaccccactgggatctggctgtgccgatctggccctggcagctcagccccttctcacagcacctctttaccatccttcagccacagcgtgaccccactgtgtgagcagtgggacagcaggcacacctggcagcggcgcctttkctgacatgtgggaa

SEQ ID NO: 1895 - DNA, 600 bp, Chicken  19866894088642_2
ttctgatccgagccgttctgtgacggtgcagagcacagcgctgtgctggctgtggagcagctcctggctgaaaggggctctgccacaccatgggcctcactgtcctgcccacagcactggaaatacgccgtgagtgggtgcccaggacagggcccagacccagctgttgtatggcaccaacctcccagggctgggagctgcccagggctgggcccagctcmcgtttccccatgacctctccctggcatgcagtggggagcaatgtgctcccagccccactgtctctactccccaggagaygtgctacagccccactgccccccatgtcccagtatgttcatctgcctcagccccagccctgctgcaccccactgggatctggctgtgccgatctggccctggcagctcagccccttctcacagcacctctttaccatccttcagccacagcgtgaccccactgtgtgagcagtgggacagcaggcacacctggcagcggcgcctttkctgacatgtgggaaaggggccgagagctgctgagcacagcagtccccgatgcgctggtatggctctgagtcagccctgtgcctgtcaggagac

SEQ ID NO: 1896 - DNA, 600 bp, Chicken  19866894088642_3
ctgggcccagctcmcgtttccccatgacctctccctggcatgcagtggggagcaatgtgctcccagccccactgtctctactccccaggagaygtgctacagccccactgccccccatgtcccagtatgttcatctgcctcagccccagccctgctgcaccccactgggatctggctgtgccgatctggccctggcagctcagccccttctcacagcacctctttaccatccttcagccacagcgtgaccccactgtgtgagcagtgggacagcaggcacacctggcagcggcgcctttkctgacatgtgggaaaggggccgagagctgctgagcacagcagtccccgatgcgctggtatggctctgagtcagccctgtgcctgtcaggagactgagcatgagaacctgcccggccccctgtcctgctccctgagctgccttaatgccatatctcagcctctccacagcagaagagcctttggcctcactccctgtcactgagtgaggagggggcctccccagaggcggttcatgcagggggatcatcgtgccccaaagcagcagctctgctacacagcggagctgcacagggcaggcgg

SEQ ID NO: 1897 - DNA, 599 bp, Chicken  19866894088647_1
  misc_feature (1)..(51): n is any nucleotide
nnnnnnnnnnnnnnnnnnnnnnnnnnnnnnnnnnnnnnnnnnnnnnnnnnnaatatttcatggtaaacaggatgttgttagaaattatgaaatccaactgaaaagcaaaacatgtctgtgtttgtctgaggagaccattaaagccaataaagaaaaggctcctgaaacagctgcatttcttttactgctgattaaatggggtctggatgccacccgaagctggtggtgggagattgtcacttaatcctttccgactgcagttcttttccagagcatcttacgtgcagcctacatctgaaragcttacgttaaatcttggtggctcacgaaatccactcaactgcctaaaaaagacaaaatcataatcacagaatcataggggctgcaagggacctctggagcccagccagtccaaccccgtgctaaagcaggttccctgcagtgggtggtgtcaatgagggcccagtttccagctgtgtttctttccatttgctcataaagagagagagggctacaaggtccggcctgataaaaggaaagttacgtttcacctgcagcaaagggcggaggaattgttggttctgcctgtcatacctggt

SEQ ID NO: 1898 - DNA, 587 bp, Chicken  19866894088647_2
tggtggctcacgaaatccactcaactgcctaaaaaagacaaaatcataatcacagaatcataggggctgcaagggacctctggagcccagccagtccaaccccgtgctaaagcaggttccctgcagtgggtggtgtcaatgagggcccagtttccagctgtgtttctttccatttgctcataaagagagagagggctacaaggtccggcctgataaaaggaaagttacgtttcacctgcagcaaagggcggaggaattgttggttctgcctgtcatacctggtgttaaatagcagctctygtgttttcatcctccagaaaagtacttatccatcattttaccagaaaggaaatttaacagcaaatattaacattagtccataagaactctttctgctctgtggctaacaggtggacctctgtcaaactggatgtgagaataccttccgtgctgtggtttgttcctttctgaccaaatgaattcacaaacaaagaatttaccaatctttcctatgtgagacatttgcctgagtaaggactgactggtaattgagcttcatagtagaataaagcagggagatgtcacgg

SEQ ID NO: 1899 - DNA, 600 bp, Chicken  19866894088651_1
tgagctatatagataatctcagaactaattagggaggaaatggtggcgggtcatcgcagtaagagatactgaggagatgagtaatccgtgtcagactgctgaggtgtcagatattgggatgcctgtagaagcctctgttacatcatcggtatggaaaatataaactacctaatttgtgctccttgcttggagtcaaacaggttcactgagcggtctgatcactgtatctaaatggagagctttctgattgggctgtactaggcaaaaagaaagtgtctgtctgggaatgtgaagccgtgytccttcaaggtgtggggtcttrcttcttcctcattcttctgcgcatcaaccaaatccactaacaataacttcaacacatcaaaacagatgctcaaaagagtgaagtggaaggactattccattgctaaaatgtacgctttgtagagtaggctgaagggctttgctggatctcagtgacctgctttgagtgacagtggaaaaaaataactcttggcagagtacagtgttagggggaagtggttttagggaatctgcctagaaaacctctgagtggagaacaaacttacgtgttctgtacaa

SEQ ID NO: 1900 - DNA, 600 bp, Chicken  19866894088651_2
aactaattagggaggaaatggtggcgggtcatcgcagtaagagatactgaggagatgagtaatccgtgtcagactgctgaggtgtcagatattgggatgcctgtagaagcctctgttacatcatcggtatggaaaatataaactacctaatttgtgctccttgcttggagtcaaacaggttcactgagcggtctgatcactgtatctaaatggagagctttctgattgggctgtactaggcaaaaagaaagtgtctgtctgggaatgtgaagccgtgytccttcaaggtgtggggtcttrcttcttcctcattcttctgcgcatcaaccaaatccactaacaataacttcaacacatcaaaacagatgctcaaaagagtgaagtggaaggactattccattgctaaaatgtacgctttgtagagtaggctgaagggctttgctggatctcagtgacctgctttgagtgacagtggaaaaaaataactcttggcagagtacagtgttagggggaagtggttttagggaatctgcctagaaaacctctgagtggagaacaaacttacgtgttctgtacaaaaatgccaccagttcttgtttt

SEQ ID NO: 1901 - DNA, 455 bp, Chicken  19866894088651_3
acttcaacacatcaaaacagatgctcaaaagagtgaagtggaaggactattccattgctaaaatgtacgctttgtagagtaggctgaagggctttgctggatctcagtgacctgctttgagtgacagtggaaaaaaataactcttggcagagtacagtgttagggggaagtggttttagggaatctgcctagaaaacctctgagtggagaacaaacttacgtgttctgtacaaaaatgccaccagttcttgttttgtgttcaggggcgatgccactctcgtaaagcaagcttttctcccstcttagagcatgaacttagctttgctttgcagccatttcgttcatcaaattgcagtagttctgggagctggtattgattttgttgctgctgtttaaacaaactgtgtatccaacggagtcaaactgggctttggaactgtgcgagcggtgggttg

SEQ ID NO: 1902 - DNA, 600 bp, Chicken  19866894088652_1
ttctcctctgctggtacaagtctcacatgtcgctcaacctggatgcttcccccacgcatgctttgcagtgctctagacggcactttaaaaacaaaaagcaaaactcccatagtttgtttttcatttgtcacaattgagtaagtcatgaacaggaactgcaactgtttaatgaatttcccttgaccaaggattttctaatatatttccagtaaggcaggaaaaaacccagtcccttattttgagaagggtcatgcacacatgacgttgcatcggtgtagtaatgccaccacattttttctkgttgaagcctggccctctggcatgacctggtgtggaggaagccaggtggagagccaggcttgctgcagccaggctgtgcaacgcaagagcacrcaggtgccaagcacacacaagaaaataaaaccttttgcctttctaaaaataaaagcctgtagacaagaagcgtggttagccagactgcaacacacacacacggtttgtttttcagcattatgaactcagatagcgtttcattgttgaaggaaattaattctcagtgtctgactatttatarcaagaggtagaagcagtgattagttt

SEQ ID NO: 1903 - DNA, 600 bp, Chicken  19866894088652_2
aaaagcaaaactcccatagtttgtttttcatttgtcacaattgagtaagtcatgaacaggaactgcaactgtttaatgaatttcccttgaccaaggattttctaatatatttccagtaaggcaggaaaaaacccagtcccttattttgagaagggtcatgcacacatgacgttgcatcggtgtagtaatgccaccacattttttctkgttgaagcctggccctctggcatgacctggtgtggaggaagccaggtggagagccaggcttgctgcagccaggctgtgcaacgcaagagcacrcaggtgccaagcacacacaagaaaataaaaccttttgcctttctaaaaataaaagcctgtagacaagaagcgtggttagccagactgcaacacacacacacggtttgtttttcagcattatgaactcagatagcgtttcattgttgaaggaaattaattctcagtgtctgactatttatarcaagaggtagaagcagtgattagtttccccaagacactcgccatgcccggttagcacraccataagctctcccagcagctgctgggctgggcacagcgaggaaataaatagctgatctt

SEQ ID NO: 1904 - DNA, 530 bp, Chicken  19866894088652_3
gtagtaatgccaccacattttttctkgttgaagcctggccctctggcatgacctggtgtggaggaagccaggtggagagccaggcttgctgcagccaggctgtgcaacgcaagagcacrcaggtgccaagcacacacaagaaaataaaaccttttgcctttctaaaaataaaagcctgtagacaagaagcgtggttagccagactgcaacacacacacacggtttgtttttcagcattatgaactcagatagcgtttcattgttgaaggaaattaattctcagtgtctgactatttatarcaagaggtagaagcagtgattagtttccccaagacactcgccatgcccggttagcacraccataagctctcccagcagctgctgggctgggcacagcgaggaaataaatagctgatcttaggagtggtgaagctctctacagctctacagtataaactgaatcaggacaataagatactgaatctccacacacttgtcaaaaccagacaatgcaaaaatactttgctgga

SEQ ID NO: 1905 - DNA, 472 bp, Chicken  19866894088652_4
tggaggaagccaggtggagagccaggcttgctgcagccaggctgtgcaacgcaagagcacrcaggtgccaagcacacacaagaaaataaaaccttttgcctttctaaaaataaaagcctgtagacaagaagcgtggttagccagactgcaacacacacacacggtttgtttttcagcattatgaactcagatagcgtttcattgttgaaggaaattaattctcagtgtctgactatttatarcaagaggtagaagcagtgattagtttccccaagacactcgccatgcccggttagcacraccataagctctcccagcagctgctgggctgggcacagcgaggaaataaatagctgatcttaggagtggtgaagctctctacagctctacagtataaactgaatcaggacaataagatactgaatctccacacacttgtcaaaaccagacaatgcaaaaatactttgctgga

SEQ ID NO: 1906 - DNA, 600 bp, Chicken  19866894088655_1
acatttaaactgggtcagctgcagcaccacgattagtagaaatagggccaaaagctgactctggacactgagatactgttcccaattccaaattggaaattttcttgaattaatgtagtcatgaatttttgttaaagtctgctgtgtgtgagaagtctgagatattatacagtggctatcgttctttatcatattgaattctgcattccaactatattacctttaaaatgttgctgacattttgctattccactgtactgatccatacaagttttataccatagtatttaagtccattckggtgcatatagcagtgtaagcagtgccttccatttcttgtttcttctccccttgctttctcagggaagtggattctgttgacagatgtgttggaattttttaagacgaattcaaccagtagatagagactgttaaaagtttgcatcactttgtaggaatatctattggatttgaatagaatctttgagatgtgtggtattccttagtttctgtggagttcaaactactctcctactgacctactaggagtgtcccatctcctgaaggacaatttggtatccagctcttgcacaggaaaag

SEQ ID NO: 1907 - DNA, 599 bp, Chicken  19866894088656_1
  misc_feature (1)..(149): n is any nucleotide
nnnnnnnnnnnnnnnnnnnnnnnnnnnnnnnnnnnnnnnnnnnnnnnnnnnnnnnnnnnnnnnnnnnnnnnnnnnnnnnnnnnnnnnnnnnnnnnnnnnnnnnnnnnnnnnnnnnnnnnnnnnnnnnnnnnnnnnnnnnnnnnnnnnnnaggtgtcccagagccctccatctcttcctatgattcttttttccaggaatacatgctggtctactttgacttttgggctgttggaggaagtctgtgtacaaatgccaacccatttcccacatctgctagcggacgtttcttgatttaattytgtatttgtgtccagcctccacctgatgctcttttggggttaatttggatacagcatacactaacagtcactcaggttaagcctcgtatggtaggttgctcctgataaggtgcaaataccgctgtgctcagcaggtatgactctacaccaagggaagaccactaacaggtgatgtcctttcccaggacactgcagytagtgccacagtttgctcgggttcatgaccccactcagagggttttataggatttttcctaattaatttaagaaaacagattgcaaaattaccttcttattaa

SEQ ID NO: 1908 - DNA, 600 bp, Chicken  19866894088656_2
aatacatgctggtctactttgacttttgggctgttggaggaagtctgtgtacaaatgccaacccatttcccacatctgctagcggacgtttcttgatttaattytgtatttgtgtccagcctccacctgatgctcttttggggttaatttggatacagcatacactaacagtcactcaggttaagcctcgtatggtaggttgctcctgataaggtgcaaataccgctgtgctcagcaggtatgactctacaccaagggaagaccactaacaggtgatgtcctttcccaggacactgcagytagtgccacagtttgctcgggttcatgaccccactcagagggttttataggatttttcctaattaatttaagaaaacagattgcaaaattaccttcttattaaactgctctcactacagaaataaggctgattacctccctgacaaactttaattaggcagctacaataagctgtaataaagaccacaaattaaaaacagattgtattagaggtggctttgtcaaatcctstattaacactgggcaacatacacagtgattaaacgatacagagaaacccttcttttctcctctggtaaa

SEQ ID NO: 1909 - DNA, 600 bp, Chicken  19866894088656_3
tcagcaggtatgactctacaccaagggaagaccactaacaggtgatgtcctttcccaggacactgcagytagtgccacagtttgctcgggttcatgaccccactcagagggttttataggatttttcctaattaatttaagaaaacagattgcaaaattaccttcttattaaactgctctcactacagaaataaggctgattacctccctgacaaactttaattaggcagctacaataagctgtaataaagaccacaaattaaaaacagattgtattagaggtggctttgtcaaatcctstattaacactgggcaacatacacagtgattaaacgatacagagaaacccttcttttctcctctggtaaaaagctctcattcctggaggatgcttctggagtttgtaggagaacctcacattaatacccagcacaataagagtgtttatcagtagtttgtttctatcagcagctcatagcttgtatttttgggagactcagccttcacaatcctctttatctcttctctaaattcatgttgtactacacatgacccaaggttactgcagagcctcggaggagcacaaaagctttattacct

SEQ ID NO: 1910 - DNA, 600 bp, Chicken  19866894088658_1
ctgctgtataaagaagtcagaaatggtacacattgcaaacctgacactgccagggaaaaaggaaaaacaaaaggctcttctaagttgtgttgtgcagcttccagacttggtgtaataaccctataaaacctgtcatttggggaaatgtggttttgtagggatagcagcacagggagctgcatctggaagatagaaaccgaagtgctgtaggagaggatgggtctgtgcctaacagtgtgttcataaaaccctgctctactggagtactttaaaaagtagatctgatacacaagccaaaartccattcccataggagaaatcgtatccaaatgaatagtcagatcgcctccacaagtaatattcagcctaaattgatgtctgcattgcaaagtctgtgctttactcatcttcaggtgtaacctacactcaacaaaacttctggctcgtagaaayaagaacagaatatctctaactccccagagtttctttccttctgtcgcagggcgctgaaggaacccaaagaactgaatttcatttttggtgtgaacattgagcagcgtgagttggatggcatgttcatttataactgcagtcggctga

SEQ ID NO: 1911 - DNA, 600 bp, Chicken  19866894088658_2
tgtagggatagcagcacagggagctgcatctggaagatagaaaccgaagtgctgtaggagaggatgggtctgtgcctaacagtgtgttcataaaaccctgctctactggagtactttaaaaagtagatctgatacacaagccaaaartccattcccataggagaaatcgtatccaaatgaatagtcagatcgcctccacaagtaatattcagcctaaattgatgtctgcattgcaaagtctgtgctttactcatcttcaggtgtaacctacactcaacaaaacttctggctcgtagaaayaagaacagaatatctctaactccccagagtttctttccttctgtcgcagggcgctgaaggaacccaaagaactgaatttcatttttggtgtgaacattgagcagcgtgagttggatggcatgttcatttataactgcagtcggctgataaagatgtatgagaaggtgggcccacagctggagggtggcatgtgagtttttggtgatttttcagcattatttttgcacgttcttacacgtaacttaggccttccaatgagctttttctgcattaatcattcttggtgagcatgagacttcc

SEQ ID NO: 1912 - DNA, 600 bp, Chicken  19866894088664_1
tgatttccagaggtcccttctgatccttccatttctgtgattctaatgcataagcaagcaccaacatattaaatggcatatttttaatatggtatggaaatctacaaagaacaattcagcttcttaaacttgaagtgcctcttaagatgctgttatcccatctcaccttctcttggtttctcaccaagtttcctggaccagaggaatatagagcttccataaggtcctttaacatgtctgttatctgtcagccttgtgtgaatgtatcatttgtcctagggcaatgtcaaatgtcccaakatactyatgaatgcatgacaaaatgagttaaacccctgtagaggtaaatagcatgaattttgcacctaactgtttgaaatacaccctctcaagagatgtaaaacctgaaggatacattaagagtccttttgcacaaattggtagtcttaggaatcctatcattttttgtaagatttgagagtatgtacgttacatttttagattatgccttgcagaaggctctgtgaactccttgaagaagctgttggtatgagtacttaaaatggagaggatacaggtttttttgtttttgttttgttt

SEQ ID NO: 1913 - DNA, 600 bp, Chicken  19866894088664_2
ccagaggtcccttctgatccttccatttctgtgattctaatgcataagcaagcaccaacatattaaatggcatatttttaatatggtatggaaatctacaaagaacaattcagcttcttaaacttgaagtgcctcttaagatgctgttatcccatctcaccttctcttggtttctcaccaagtttcctggaccagaggaatatagagcttccataaggtcctttaacatgtctgttatctgtcagccttgtgtgaatgtatcatttgtcctagggcaatgtcaaatgtcccaakatactyatgaatgcatgacaaaatgagttaaacccctgtagaggtaaatagcatgaattttgcacctaactgtttgaaatacaccctctcaagagatgtaaaacctgaaggatacattaagagtccttttgcacaaattggtagtcttaggaatcctatcattttttgtaagatttgagagtatgtacgttacatttttagattatgccttgcagaaggctctgtgaactccttgaagaagctgttggtatgagtacttaaaatggagaggatacaggtttttttgtttttgttttgttttgtttt

SEQ ID NO: 1914 - DNA, 600 bp, Chicken  19866894088667_1
aaagtagtgtcacaggcacaaagaaaaccagtatatgaaactgaagacttgacaattcattaggtaagatatatacaataattctatatgcatttgaagctgtaaggcgaggctttgtaaaagaaattgatgcagaaaataagttgactgtgtggctggaaactgttttaagaaacaaattctgtaactgtgtgcaaatgtcaaacttcatactgttttcatggctggaaaaccaacttgaaataattcaggtctaagttcctggcattttttcctctgaaatggattttgtataatgcyaataaagcttatttatccactgagattttgaaagaaatagatatgagtaccttatttgttttccttaatactgccatgtctcaataaaagttttaccttgttataatgccaatattgttgtttgtttcaaaactttgagaatctgttgaaataaatgtgacaacttcttcctaaggttggtgcagctgggggagttaccagggtcgtttcccaaactggtaggtgctccatatgtcttcagcagaaattgaaagtatttcagtgtttcaatccactcaactacagttgaaaaatcttgtt

SEQ ID NO: 1915 - DNA, 600 bp, Chicken  19866894088671_1
cctcacaatgtcttctccagttcatacgaagtttcacatggaatgaggatggagttaaactcagtattacacacacacacacacacacacacacacacacactctcacacacacacacacaaaaaccaaacacctgctattttgtttaagcagaagaacagctagactttataaggctagtaaatccctcagtttgtctatcagatttccaatagtaaccggtaccattgctaccacaagctactaaaccatatctcgtagctcctcatccagatgaagctgggggtgctccatatgtaytcagcaaaaattgtaagtatttcagtgcttcaatccatgctagtgtaacagtctcttttacctcagctctatctgcttttgcatgagtgcctgaaatgcatatatgtattcactgtgtcatttggaattgatgtgtataaaaaaaccgaatacttcaccttctcaatatgctattgatgtaaatggcttcaggttagtaggttttctttatatggtgtccatccatcgaggactattattttcaaaattaatattttgattcagccttttaaycaatgtttataatgtatttttcaacat

SEQ ID NO: 1916 - DNA, 600 bp, Chicken  19866894088671_2
atgaagctgggggtgctccatatgtaytcagcaaaaattgtaagtatttcagtgcttcaatccatgctagtgtaacagtctcttttacctcagctctatctgcttttgcatgagtgcctgaaatgcatatatgtattcactgtgtcatttggaattgatgtgtataaaaaaaccgaatacttcaccttctcaatatgctattgatgtaaatggcttcaggttagtaggttttctttatatggtgtccatccatcgaggactattattttcaaaattaatattttgattcagccttttaaycaatgtttataatgtatttttcaacatctgaaaatagcagaattaatgaaacaccattttctgcttaaagagtagagtgactttattaagtacatgaactcaagagattatgcataactattttctcggggtgataaatcctgtccatatattttctgtaatagaacatgaagtgtttcatttaatgtaaatgattccctgaaattattttaaactaaacattcagaactagtctttctttacagagggaacataaaaacttaagagaaacactgagtcctttttgaaagctctacctgt

SEQ ID NO: 1917 - DNA, 600 bp, Chicken  19866894088671_3
atgaaatttctgcttttctttatctttgttctttccccttttgttattctcgctacagtttaatatatgtatatttttaaagccagataattttgtagcatataatatatgctatctctacatcactaaagatgtagaagtagctgaagtttgtctcttgaaccagctgtggcactgcaggattagtgatgggggaagaaatgcactcaagcacataaagttgggagaaagtttcacaatcatttagccacacatctgtacggtgctctggtagtgggacagtttaggctgtagtcaaakactaaacaagaaatctttgtctacatatgtggaaggtttatgctggcttttatgtgagactaactgcacaaatttagcctgtcaaaaatactgaatatactygaattgcagaacaagttctgactggctcagtgttttgtaagcgtgtggctgtagcaccttggattgggtacagcaaggcctgcaccactggagcacagtgtgaggctgcacctgcagcaatactggcaggcactgtgccgagccccttgctgcaccctgctagyaaggagctgttctctgtcwggctgagcaaaggaa

SEQ ID NO: 1918 - DNA, 600 bp, Chicken  19866894088671_4
taatatatgctatctctacatcactaaagatgtagaagtagctgaagtttgtctcttgaaccagctgtggcactgcaggattagtgatgggggaagaaatgcactcaagcacataaagttgggagaaagtttcacaatcatttagccacacatctgtacggtgctctggtagtgggacagtttaggctgtagtcaaakactaaacaagaaatctttgtctacatatgtggaaggtttatgctggcttttatgtgagactaactgcacaaatttagcctgtcaaaaatactgaatatactygaattgcagaacaagttctgactggctcagtgttttgtaagcgtgtggctgtagcaccttggattgggtacagcaaggcctgcaccactggagcacagtgtgaggctgcacctgcagcaatactggcaggcactgtgccgagccccttgctgcaccctgctagyaaggagctgttctctgtcwggctgagcaaaggaacaaagatatgatgtgctggtactgcctgatgaagtgttgttagctgctgtatatgttgctcccaaattacttytccctattcattactacctttgtacgttt

SEQ ID NO: 1919 - DNA, 551 bp, Chicken  19866894088671_5
tctggtagtgggacagtttaggctgtagtcaaakactaaacaagaaatctttgtctacatatgtggaaggtttatgctggcttttatgtgagactaactgcacaaatttagcctgtcaaaaatactgaatatactygaattgcagaacaagttctgactggctcagtgttttgtaagcgtgtggctgtagcaccttggattgggtacagcaaggcctgcaccactggagcacagtgtgaggctgcacctgcagcaatactggcaggcactgtgccgagccccttgctgcaccctgctagyaaggagctgttctctgtcwggctgagcaaaggaacaaagatatgatgtgctggtactgcctgatgaagtgttgttagctgctgtatatgttgctcccaaattacttytccctattcattactacctttgtacgttttgcactgtttactctctggccttccccagcctggcctgtactgtatttttctctgtaccatttccttttaaagttccaaatctgctattgtcttcatcagtcttatccagtcatt

SEQ ID NO: 1920 - DNA, 532 bp, Chicken  19866894088671_6
aggctgtagtcaaakactaaacaagaaatctttgtctacatatgtggaaggtttatgctggcttttatgtgagactaactgcacaaatttagcctgtcaaaaatactgaatatactygaattgcagaacaagttctgactggctcagtgttttgtaagcgtgtggctgtagcaccttggattgggtacagcaaggcctgcaccactggagcacagtgtgaggctgcacctgcagcaatactggcaggcactgtgccgagccccttgctgcaccctgctagyaaggagctgttctctgtcwggctgagcaaaggaacaaagatatgatgtgctggtactgcctgatgaagtgttgttagctgctgtatatgttgctcccaaattacttytccctattcattactacctttgtacgttttgcactgtttactctctggccttccccagcctggcctgtactgtatttttctctgtaccatttccttttaaagttccaaatctgctattgtcttcatcagtcttatccagtcatt

SEQ ID NO: 1921 - DNA, 444 bp, Chicken  19866894088671_7
ttagcctgtcaaaaatactgaatatactygaattgcagaacaagttctgactggctcagtgttttgtaagcgtgtggctgtagcaccttggattgggtacagcaaggcctgcaccactggagcacagtgtgaggctgcacctgcagcaatactggcaggcactgtgccgagccccttgctgcaccctgctagyaaggagctgttctctgtcwggctgagcaaaggaacaaagatatgatgtgctggtactgcctgatgaagtgttgttagctgctgtatatgttgctcccaaattacttytccctattcattactacctttgtacgttttgcactgtttactctctggccttccccagcctggcctgtactgtatttttctctgtaccatttccttttaaagttccaaatctgctattgtcttcatcagtcttatccagtcatt

SEQ ID NO: 1922 - DNA, 600 bp, Chicken  19866894088676_1
taatcctgtgtctgttagcctcaaataaataaggtatttacagtctcattgacctcgaaacaattatttccatccacgcttcctgcctgagcttaggtggtatgagaatccagtgtctttcaaaatccaagggtagatcataaggaaggaagatggtttggatagggatgggttgatggactgtttcgttattaaacactagccaaacagaaacagagaacaaaacagaaaagccagcttcatgttaaaaaatacagaacagaaatagctcatctcctaaattaatttttgttactttaygtaaaatgatagaatttgaactacatcaaggtgctctgaatctgaccagataatcagtttcagaaatagaacagtaattcttccttcaggttgtgtttaactgaatttgcagctggtgttttctccttcctcactgaacctcaaagacataggtttaaatggaaataatgcagtactctaaagtaaattgcatctcctaaaaaaaacagtggcaaatattcatgatggataatagactgaaacagactgcttactataggaaaacgtggactcccaaggtgtggatggtgaaccttatct

SEQ ID NO: 1923 - DNA, 599 bp, Chicken  19866894088678_1
  misc_feature (1)..(93): n is any nucleotide
nnnnnnnnnnnnnnnnnnnnnnnnnnnnnnnnnnnnnnnnnnnnnnnnnnnnnnnnnnnnnnnnnnnnnnnnnnnnnnnnnnnnnnnnnnnnntcatcatcttgcaactaaaaaactagtgtcacttcatggatctcagcccgagagcagcaatgattatttttcctttctctgctgacttcctggtccttgactgctgctggaacaaaactcagcctgttgtggcatcagatctgcttacatcctggggagccagaggtgggagtgaggcactcatgtccccacttcctttcactgatraaagcctcaggataaaatgtcagcaaagctgagtgcttctggatgagctgctcaggcgcacggagctgagttgaagcccagctgcttacctctccctgcagcagagctggctgtgcttgctctgggaagaggagaggtgtcagaagctgtcgatgctgacaagccacaatgctaaagcagaagtgttaatgtgtttctgcagccacaccttaccctcataacgcagcatcacttctgcctacagatgcttctaacatgcacctcggaacttatggggaattcataactaataacagcag

SEQ ID NO: 1924 - DNA, 599 bp, Chicken  19866894088679_1
  misc_feature (1)..(169): n is any nucleotide
nnnnnnnnnnnnnnnnnnnnnnnnnnnnnnnnnnnnnnnnnnnnnnnnnnnnnnnnnnnnnnnnnnnnnnnnnnnnnnnnnnnnnnnnnnnnnnnnnnnnnnnnnnnnnnnnnnnnnnnnnnnnnnnnnnnnnnnnnnnnnnnnnnnnnnnnnnnnnnnnnnnnnnnnnccctggggaatcacactgtgcttccccttgcccatgcctttcagtgtctttatcagggaacttcctcttaccggtcacatgaaaaataccaaacactgtccaaagctgagatgacatcaaagagggcattyaaagggcctgcctaaagacagctgaaggccttgctgcaagctgcagtgcaggagcacccacaacagacgagcacagtggtgcttgggccagaaacaatgtgatgagagcagcaggcccagggatraggctgcgtgcttctcaccaaggggtgtgcctggagaagaacacatttgtaactacacttgggtattcactctttcaaaaagtactttgagaaaatactcaaaagaatacaaaagcataatcatggtgcattgcaatttatatgtgcgtgtatttttgtttccactagaagaat

SEQ ID NO: 1925 - DNA, 599 bp, Chicken  19866894088679_2
  misc_feature (1)..(44): n is any nucleotide
nnnnnnnnnnnnnnnnnnnnnnnnnnnnnnnnnnnnnnnnnnnnccctggggaatcacactgtgcttccccttgcccatgcctttcagtgtctttatcagggaacttcctcttaccggtcacatgaaaaataccaaacactgtccaaagctgagatgacatcaaagagggcattyaaagggcctgcctaaagacagctgaaggccttgctgcaagctgcagtgcaggagcacccacaacagacgagcacagtggtgcttgggccagaaacaatgtgatgagagcagcaggcccagggatraggctgcgtgcttctcaccaaggggtgtgcctggagaagaacacatttgtaactacacttgggtattcactctttcaaaaagtactttgagaaaatactcaaaagaatacaaaagcataatcatggtgcattgcaatttatatgtgcgtgtatttttgtttccactagaagaattcagcaccaacatagacagattgcatgcattttaagggcttgggcttactgtttgacttgtttcaccacaaagcrtgcatccatgaacaatgcaaggatatttttccattgaactgatgacattt

SEQ ID NO: 1926 - DNA, 600 bp, Chicken  19866894088679_3
agtggtgcttgggccagaaacaatgtgatgagagcagcaggcccagggatraggctgcgtgcttctcaccaaggggtgtgcctggagaagaacacatttgtaactacacttgggtattcactctttcaaaaagtactttgagaaaatactcaaaagaatacaaaagcataatcatggtgcattgcaatttatatgtgcgtgtatttttgtttccactagaagaattcagcaccaacatagacagattgcatgcattttaagggcttgggcttactgtttgacttgtttcaccacaaagcrtgcatccatgaacaatgcaaggatatttttccattgaactgatgacatttatcaaccacaagactgaggatactttgtgtctccgtgtacaccaatgacattggaaagttagttaaatttagcacttaaaagtcttcttgcttgaactttaaaatgcatttccctttatctgtatttgctaccactttgcagctttttacagatgtttcagagtctgctgaacaagtctcgtttcatacacttaaaccactttagctggtcttgggattttgccctggagattttcttgcaacccatttt

SEQ ID NO: 1927 - DNA, 599 bp, Chicken  19866894088682_1
  misc_feature (1)..(169): n is any nucleotide
nnnnnnnnnnnnnnnnnnnnnnnnnnnnnnnnnnnnnnnnnnnnnnnnnnnnnnnnnnnnnnnnnnnnnnnnnnnnnnnnnnnnnnnnnnnnnnnnnnnnnnnnnnnnnnnnnnnnnnnnnnnnnnnnnnnnnnnnnnnnnnnnnnnnnnnnnnnnnnnnnnnnnnnnnctccgcattcctgcactgctgctgcggggcagccgaaaagcctcgtgtggaaatctctgcgggtcacaaacacggagcagagccgagcggccaaagctcagcgctcatagggaccctcccagagccccccraccccacagacagcaccgtgttggggggagggattcgttattctccttccaaataaaaaggctccaccaaaagcttttcgctcagcccgagaggacggcgaagccataaaactcctccctgttttacaaccaagctgcagggttgggttttttggtggttttggttgtttcgggtttttcttttgctaaggaatgcaacgacggaactctgggggttcagtggtgggagatcccccactgctgcgtgcggacggagccacggacggaacttttgcagagctcacaataatgtttttaca

SEQ ID NO: 1928 - DNA, 600 bp, Chicken  19866894088682_2
caccgtgttggggggagggattcgttattctccttccaaataaaaaggctccaccaaaagcttttcgctcagcccgagaggacggcgaagccataaaactcctccctgttttacaaccaagctgcagggttgggttttttggtggttttggttgtttcgggtttttcttttgctaaggaatgcaacgacggaactctgggggttcagtggtgggagatcccccactgctgcgtgcggacggagccacggacggaacttttgcagagctcacaataatgtttttacatccattctgttccyggtcctacataaatccgtggggggaggaaaaagcaaaaaaagcaaaaaaagcaaaaaccaaaccgacccaaaagcaccggaaaaaaaaaaaagacaccggaaaaacaaaaagaaaaaataaaacaacaatttctgaaacgcttcttaaaaagagagagaaagaaacgaatgggtccacagcagacagccagaaaacctgcactgccccacgcacggctttgcccgtggaaccctccggaccgatgcagcccctgtgtgcagtgtgggggtggagatccccgctgcgccccccccaaccct

SEQ ID NO: 1929 - DNA, 600 bp, Chicken  19866894088683_1
taactgtttttgctgagatttttctaaaaacttttaatatagactatatattgtatataactttttttatataaaaatgcttaaaaacagatatattttttaaaaactgtagctgttaatcagagaaatatgactattgtaaaattaatgatattgactttagttcccataatttaggaacaatcttctgaaagttcattaggccagtcagagatgaaaggaaactttaaaaatcactaaaaagaaaaaaagaaatcaatgctttttcttccctctcccacagtctttcatttctgtcawaagtacctgcagggctggatccaaaactctttgaagatatgaagtgtgaatataaaccttttgtttgggccctctggatgttctttgtgctccagatttagatgctcaccgtagctatacaatgcagagtggctacatctggtgtttgcaagaagctgactcgtgtccttatgtttctgtgtcttttatgtttaacttcttgcttaaggactaaagaaggtgtctttcccttgacttcaaatgtgagtaagtgtgagcaaatgcgagtaaagastgatgtaagaagagattattattatc

SEQ ID NO: 1930 - DNA, 492 bp, Chicken  19866894088683_2
ctcccacagtctttcatttctgtcawaagtacctgcagggctggatccaaaactctttgaagatatgaagtgtgaatataaaccttttgtttgggccctctggatgttctttgtgctccagatttagatgctcaccgtagctatacaatgcagagtggctacatctggtgtttgcaagaagctgactcgtgtccttatgtttctgtgtcttttatgtttaacttcttgcttaaggactaaagaaggtgtctttcccttgacttcaaatgtgagtaagtgtgagcaaatgcgagtaaagastgatgtaagaagagattattattatccatagtaactgtcaaggaagaagaaaagatctaataatcctcagcattaggatttacaaaacaaatgagagacttgaagaaaagcctgaaaatccacagttggggaaataaaagcatgatccttgatgcagacagaaacacttacttgcccgcagcttttcaattg

SEQ ID NO: 1931 - DNA, 600 bp, Chicken  19866894088688_1
ggaaaacttcctctcacgcagcttccaaatttacatagagctcaaatagccctgggacaaacttaaattttggcttccaggaggttcagtggacttgctcagcaaggtgcattcagcttattataatcactgtcattttatgaatggctgttttttttccagtctggcactttgtgttactgtaatactcttttggatggccttgatacgcatttgaaaattttgaagataggaacaatcaaaatgaagttatttttatgtatggaatgaaagtaaggttggcattttagagacaagacrtaagaagtctgaactcaagctaaacaaaacaaaaagtgtatccaagtgaccaataaatatttatggcttcctacatttggtcatgatcactacttcagctctagaagtgtctttcctggtctagtgtacaatacaagacacagttaaatgaccttcataatctctgaatatgacgcagagaccattgcagatattggaaatgtagaacagtttgattttatttttcttaagagtgattaatttgactccagcactaatcgtttgattgtatagctaaataaaaaaacctctgtaatccaa

SEQ ID NO: 1932 - DNA, 600 bp, Chicken  19866894088690_1
ctgacttgttgctgtctcatctcaattatgtgcacagccatcggcagctcgggcagaccccgtgcttgggtaggtagtgctccttcccgttgccttcaggtggcatttgcactcatagtcgtacttcaaaccccaaatcatcgcgggatattctggggagaaaactctgcattcactcatgtagtggaagacaaacatcactggggcaagtagggagcgagtgttagtttcaccaaatggtgaagccctgtgttcaaggtgacactgccagctgcttgcatgcctgctgccttgctgggmacagctctgcttcccatgcagcccctcctgggtcatactcagctgccgggacacctactgtagtgtaagaggctcccgctgctgttactgctgggagcatagaaaggcacagtaggatcagcgcttacagggtcacgctgcagtaagtaaggctggaagtttctgggggagaacagatgggggaatgactgagtgaggacagggcagcaggtgtggggaaggaggggaaatggaatactggggagaaagatttaacgatcacctacacctggggctttgtgcctcctcggcagcagagcg

SEQ ID NO: 1933 - DNA, 600 bp, Chicken  19866894088691_1
cctaaatctcaagctccagtgagaggtactgagttattttcagaattttggggatagccatttttagttgtactcataattaacagaccactcgtctcagagtctcaaggattaaactttctggatgttcagtgttggtgagcaaagcaaggaagtgatgttttgattgcatgtctcaacagaagtagcagtgagtgccagctgctagcacactacagtttattgaaggccaaaatgtactcagaaacggtatgtctgtgaaatactgcatcagctactaaatataacaaacaagacatygtcttgcaaggcaagaacaagccaggggtgtgcaggttcaccgctggcatcctgcttctgattgtccgaggcacatgtacaacagcatctcatttggaatggatagaatgtaatgcaaacatgrctcaagactcagtcctctctgttggatacttacgtgcagtgtttctcacagaccttgtctgcactggcaccttaactgactgaagcagagaaagaaggcagggttcttctgtttaaagaggaactttgataaaatggacagttatgacttctgatgtggagtgaatcagttgacga

SEQ ID NO: 1934 - DNA, 600 bp, Chicken  19866894088691_2
atgttcagtgttggtgagcaaagcaaggaagtgatgttttgattgcatgtctcaacagaagtagcagtgagtgccagctgctagcacactacagtttattgaaggccaaaatgtactcagaaacggtatgtctgtgaaatactgcatcagctactaaatataacaaacaagacatygtcttgcaaggcaagaacaagccaggggtgtgcaggttcaccgctggcatcctgcttctgattgtccgaggcacatgtacaacagcatctcatttggaatggatagaatgtaatgcaaacatgrctcaagactcagtcctctctgttggatacttacgtgcagtgtttctcacagaccttgtctgcactggcaccttaactgactgaagcagagaaagaaggcagggttcttctgtttaaagaggaactttgataaaatggacagttatgacttctgatgtggagtgaatcagttgacgagagctatgtcctaatgctttgtaagtgctcatcgtatatcttcatctaattaattcttctgggctgcagtgttatactttctgctatatttccagtggtagtagtatatccagcacagcaaaat

SEQ ID NO: 1935 - DNA, 600 bp, Chicken  19866894088696_1
gaatgagaaaagactgaaaaagatcaataggtcaaatatgagcttttatgaaattctgacagtagaaaagcattaacagtaggcacttctgcttcaactgcaggaaaaaaaaaatgtaattttcctccatatccaagttttatagttttaaccaagccagtaaaatctatttttatatacataaaagaattacataaagaaataagtgttatttaaggactatttgtacagttctaacatttcccatgacttcagtccagtactgtagcacttgccaatgccaggaactgggatttagaraggaacaaaacatactttataaagaaatcagtcataaaaacagatagagttcttctgagaaggattttggtatgtctcctattaaaatcctacgccccaccatttacagctgcagtgagtcagagatgggaactgggcaaggcagacttcacagagtgaaaaatgactcaccagaatctgcttagactgaattccctagtccttgtagtaagaaacaatagttagggagatacagaggtgatcaaatgaagaaacgtttgccccaatgtgatgactttttcctttatcatctgccttagt

SEQ ID NO: 1936 - DNA, 600 bp, Chicken  19866894088699_1
gtgtaaagggcaaacacatcaaacctgccagaacaaaggctgtacacgtggggctggggagatggaaagcccaaatcagggagtgtgagatatctgctcattagcctaaaaactgagacttgccacgggaagcaaataatttgtcatagatatgctgcacaagaatgtatttaaatgatgaagctgctgcacatggcttgaaacaggatttggctttgtaacctgagtcagtttccatactgactgcattaattatttgaatgagaggcacgaccaataggtaggatcatcagtttactyggagcttttgaacagtgcccagaaaggcrgtggtgtcccatccctgcagacacccgaggtcagggatggggctctgagcacctggtggggctgtgggtgttcctgttcactgcagggggtgggaccaggtggcctgtgaggatctcktccaactcaaacagttctatggtactatggtttttattccagagccatgtaaccaagagctgatgtaccatggctaagattgggttatctctgtaaagcttttaaaatgctaacagaaggattctgctttaaatctgattttcacaccctaac

SEQ ID NO: 1937 - DNA, 600 bp, Chicken  19866894088699_2
agaacaaaggctgtacacgtggggctggggagatggaaagcccaaatcagggagtgtgagatatctgctcattagcctaaaaactgagacttgccacgggaagcaaataatttgtcatagatatgctgcacaagaatgtatttaaatgatgaagctgctgcacatggcttgaaacaggatttggctttgtaacctgagtcagtttccatactgactgcattaattatttgaatgagaggcacgaccaataggtaggatcatcagtttactyggagcttttgaacagtgcccagaaaggcrgtggtgtcccatccctgcagacacccgaggtcagggatggggctctgagcacctggtggggctgtgggtgttcctgttcactgcagggggtgggaccaggtggcctgtgaggatctcktccaactcaaacagttctatggtactatggtttttattccagagccatgtaaccaagagctgatgtaccatggctaagattgggttatctctgtaaagcttttaaaatgctaacagaaggattctgctttaaatctgattttcacaccctaaccctttatgcagacaagtttaacagatgtg

SEQ ID NO: 1938 - DNA, 600 bp, Chicken  19866894088699_3
agatatgctgcacaagaatgtatttaaatgatgaagctgctgcacatggcttgaaacaggatttggctttgtaacctgagtcagtttccatactgactgcattaattatttgaatgagaggcacgaccaataggtaggatcatcagtttactyggagcttttgaacagtgcccagaaaggcrgtggtgtcccatccctgcagacacccgaggtcagggatggggctctgagcacctggtggggctgtgggtgttcctgttcactgcagggggtgggaccaggtggcctgtgaggatctcktccaactcaaacagttctatggtactatggtttttattccagagccatgtaaccaagagctgatgtaccatggctaagattgggttatctctgtaaagcttttaaaatgctaacagaaggattctgctttaaatctgattttcacaccctaaccctttatgcagacaagtttaacagatgtgcaacactgtgggcccagggcgtaacaccaaatgttgtgctgtgctagatctgctctgcaggaaagaagaaaaaagtggatgatgatagctgtgttgcatccatgggtgttcatatttc

SEQ ID NO: 1939 - DNA, 600 bp, Chicken  19866894088699_4
gttagaaatagtgcagactccttttaataatttgctattccagttttaattggaaaagtcagggctggttcttgcttggctcctgtctaacagagcctgaccctgcttcacagagggcaatccaaactgtgcagttgcactgacatcgcatttaaatctggtgctgcactgtaattgattttgcactgcgcacagagtgtcaattaaatacagcgtaggggtatgaaggggacacatctgagccctctgcctggctctgccctcacagaacggagcagtgctgctgctggaaggagctgyctcgtgcagacacagcacacatcccatccacgtgagctcctyggaacgatggatttcatagaactaaaacagcaacaactattttgctgaacccttttggatgaggtataaatgtagtttacggtgcacgattgactcagccaaatgaccccacctggcagcttctgtgatggcagtgggggtggggggcatctttgatgctacatcattatccatatgtaccaaagtaaaggttcagagcagagctgcaatgttatttgaattgctgaggttatgaagaaatataaaagtgataagtgc

SEQ ID NO: 1940 - DNA, 600 bp, Chicken  19866894088699_5
gttttaattggaaaagtcagggctggttcttgcttggctcctgtctaacagagcctgaccctgcttcacagagggcaatccaaactgtgcagttgcactgacatcgcatttaaatctggtgctgcactgtaattgattttgcactgcgcacagagtgtcaattaaatacagcgtaggggtatgaaggggacacatctgagccctctgcctggctctgccctcacagaacggagcagtgctgctgctggaaggagctgyctcgtgcagacacagcacacatcccatccacgtgagctcctyggaacgatggatttcatagaactaaaacagcaacaactattttgctgaacccttttggatgaggtataaatgtagtttacggtgcacgattgactcagccaaatgaccccacctggcagcttctgtgatggcagtgggggtggggggcatctttgatgctacatcattatccatatgtaccaaagtaaaggttcagagcagagctgcaatgttatttgaattgctgaggttatgaagaaatataaaagtgataagtgccaagtaaatgttaatagacaagattgtctgctggtgatggtg

SEQ ID NO: 1941 - DNA, 380 bp, Chicken  19866894088699_6
actattttgctgaacccttttggatgaggtataaatgtagtttacggtgcacgattgactcagccaaatgaccccacctggcagcttctgtgatggcagtgggggtggggggcatctttgatgctacatcattatccatatgtaccaaagtaaaggttcagagcagagctgcaatgttatttgaattgctgaggttatgaagaaatataaaagtgataagtgccaagtaaatgttaatagacaagattgtctgctggtgatggtggaaagggagtacccattaagtagaaaaaagaaatyraaaccctaagaaagctgctttccttcttgtcataatgaccaatggtcttagcaggattcctaatggctactttacattc

SEQ ID NO: 1942 - DNA, 379 bp, Chicken  19866894088699_7
ctattttgctgaacccttttggatgaggtataaatgtagtttacggtgcacgattgactcagccaaatgaccccacctggcagcttctgtgatggcagtgggggtggggggcatctttgatgctacatcattatccatatgtaccaaagtaaaggttcagagcagagctgcaatgttatttgaattgctgaggttatgaagaaatataaaagtgataagtgccaagtaaatgttaatagacaagattgtctgctggtgatggtggaaagggagtacccattaagtagaaaaaagaaatyraaaccctaagaaagctgctttccttcttgtcataatgaccaatggtcttagcaggattcctaatggctactttacattc

SEQ ID NO: 1943 - DNA, 600 bp, Chicken  19866894088700_1
attaaaggtagctatgtttaaactaccaatcaaatttctggtcagttcattcctagaagcaaggaagtagcactacagcacagcaacatatgcctataacttccaaggaggagggaaagacagatgagaagaaagtaagttgaaggaagtaagatcccaattttcagagaatttagaatatctcaagtttatttgctctggatgacaaaattctgtcgatactggaaattttttcaaaaggcagaacacaccgaaagaatggatggaataaaatattttgcgtcgtacagtctcagtgtygcactcaataaaggttrgtttaagatgactgctctgtgaagtcaacagacatttcaatgaatagtaaaaggactggtggtgtctctagcatatggcacttcttagaactgttaaggaaggcctgatcttgtaattcagtgggcagaaaagcarctgaagctaagtggtccaaaggctttcagctccctgcccacttcccatctgttccaaaaaaatcaggactcagcagagaatacaccrcagaataatcatgtaactgatcatacaaaattacgtgctgcctcccctattctggttgca

SEQ ID NO: 1944 - DNA, 600 bp, Chicken  19866894088700_2
ttaaactaccaatcaaatttctggtcagttcattcctagaagcaaggaagtagcactacagcacagcaacatatgcctataacttccaaggaggagggaaagacagatgagaagaaagtaagttgaaggaagtaagatcccaattttcagagaatttagaatatctcaagtttatttgctctggatgacaaaattctgtcgatactggaaattttttcaaaaggcagaacacaccgaaagaatggatggaataaaatattttgcgtcgtacagtctcagtgtygcactcaataaaggttrgtttaagatgactgctctgtgaagtcaacagacatttcaatgaatagtaaaaggactggtggtgtctctagcatatggcacttcttagaactgttaaggaaggcctgatcttgtaattcagtgggcagaaaagcarctgaagctaagtggtccaaaggctttcagctccctgcccacttcccatctgttccaaaaaaatcaggactcagcagagaatacaccrcagaataatcatgtaactgatcatacaaaattacgtgctgcctcccctattctggttgcaaaacctttgagaaagca

SEQ ID NO: 1945 - DNA, 600 bp, Chicken  19866894088700_3
atcccaattttcagagaatttagaatatctcaagtttatttgctctggatgacaaaattctgtcgatactggaaattttttcaaaaggcagaacacaccgaaagaatggatggaataaaatattttgcgtcgtacagtctcagtgtygcactcaataaaggttrgtttaagatgactgctctgtgaagtcaacagacatttcaatgaatagtaaaaggactggtggtgtctctagcatatggcacttcttagaactgttaaggaaggcctgatcttgtaattcagtgggcagaaaagcarctgaagctaagtggtccaaaggctttcagctccctgcccacttcccatctgttccaaaaaaatcaggactcagcagagaatacaccrcagaataatcatgtaactgatcatacaaaattacgtgctgcctcccctattctggttgcaaaacctttgagaaagcatagcagatgctgaacaggtaatggaaagggacaatcaaaaatgttggcagaactgtagaagccttaatgtgattgccgacaacattacagctgtaaaacctataaagacaggcgtaattagatctcacattccagg

SEQ ID NO: 1946 - DNA, 600 bp, Chicken  19866894088700_4
gcagaacacaccgaaagaatggatggaataaaatattttgcgtcgtacagtctcagtgtygcactcaataaaggttrgtttaagatgactgctctgtgaagtcaacagacatttcaatgaatagtaaaaggactggtggtgtctctagcatatggcacttcttagaactgttaaggaaggcctgatcttgtaattcagtgggcagaaaagcarctgaagctaagtggtccaaaggctttcagctccctgcccacttcccatctgttccaaaaaaatcaggactcagcagagaatacaccrcagaataatcatgtaactgatcatacaaaattacgtgctgcctcccctattctggttgcaaaacctttgagaaagcatagcagatgctgaacaggtaatggaaagggacaatcaaaaatgttggcagaactgtagaagccttaatgtgattgccgacaacattacagctgtaaaacctataaagacaggcgtaattagatctcacattccaggcagaaagctgagtcctgcgccacctaaagtgatgcttacctcagttctcttcagcggtagttagtcatgccttggctaggtcaactt

SEQ ID NO: 1947 - DNA, 600 bp, Chicken  19866894088700_5
ccaaaggctcaggaaggcttgcgccctctatacatagcagctgttcttcagcctaaaccagtgtcatagcctcaccaaagcctccagctcccactatagtgtgaaacttggacaagttccaccagggcctggggacttaagtcctcagacctaaaagactccaaacacttccacatggctgtgaagtatggccaacagtttggtggtcacttctggctgttgctgcaggaattgtgttctaatacatctttctatatgttgctagctgtgctgtgcccaagctttgactgcctgtttatsattcattgaccatggagctggagctctcctttggttcctcccgaagaccacgcactccatcttacccctcacagttgctcagtgtaactgctggcagagcaaatgaagcatctccaaagcaaaaaaaaccaaacaatgctaatgttgtagaaagaagtcagtggctcaccacagctttacaggatcaatggctttgcattgctatcattcacctttcacctgcaaccatatttcagagggactaratggcttgcaactttggtaatcagttctggagcttttcaccctgaggttaccagt

SEQ ID NO: 1948 - DNA, 600 bp, Chicken  19866894088700_6
atctttctatatgttgctagctgtgctgtgcccaagctttgactgcctgtttatsattcattgaccatggagctggagctctcctttggttcctcccgaagaccacgcactccatcttacccctcacagttgctcagtgtaactgctggcagagcaaatgaagcatctccaaagcaaaaaaaaccaaacaatgctaatgttgtagaaagaagtcagtggctcaccacagctttacaggatcaatggctttgcattgctatcattcacctttcacctgcaaccatatttcagagggactaratggcttgcaactttggtaatcagttctggagcttttcaccctgaggttaccagttaactgtctccctcggttaagactgaaagttgcccataggtgcaggacaattctcttaacccgtttcactggtataaaaatttcttaacagcattgttagggtgcactgagagtcaggctatttccctagagaggccaggagcaaagggcagccacagcacctgatgggcagtgagcttatcagccaggcagtctccagcgttggacacaagcaagcagagaagggtggtgacagcaacaggccc

SEQ ID NO: 1949 - DNA, 600 bp, Chicken  19866894088703_1
agggacagggtgagctgctgccagtggtgccacagaaccccacacggtggggatccatgcagaccccatgcagggagcctataaggacagcacgtgcagggctgatgcccatggggccagaggatgctcttgacttcctgtgctgagggcttgcaggtgcttcctcacatgtctgcacctgcctcacgaactcgtggctgcactgggagctgctgaaaatcaaaaatgctaaatcgctacaagcaatagcaaaaagagtgacccctccgaaggtgagggtgaatcacacgcccagccccrctgctagacacctgagaacccactcggcactctctgcstgatrtaaacgaaactggggaccaaattcagcgcaccgagtttcaccctgtcactgctgctgcgagacacttacagtaatgccagaagggaaagcatggaaggaaattctgattgaagcaggggcaccccccggcgtggcacacagcagcccccactgtattcaggagggatttgaagtgagatctcacgcacggcactgcagagccatccggctgtgtcacggtgtttgttttcctccatctcagagctgcatctcgggca

SEQ ID NO: 1950 - DNA, 600 bp, Chicken  19866894088703_2
cccacacggtggggatccatgcagaccccatgcagggagcctataaggacagcacgtgcagggctgatgcccatggggccagaggatgctcttgacttcctgtgctgagggcttgcaggtgcttcctcacatgtctgcacctgcctcacgaactcgtggctgcactgggagctgctgaaaatcaaaaatgctaaatcgctacaagcaatagcaaaaagagtgacccctccgaaggtgagggtgaatcacacgcccagccccrctgctagacacctgagaacccactcggcactctctgcstgatrtaaacgaaactggggaccaaattcagcgcaccgagtttcaccctgtcactgctgctgcgagacacttacagtaatgccagaagggaaagcatggaaggaaattctgattgaagcaggggcaccccccggcgtggcacacagcagcccccactgtattcaggagggatttgaagtgagatctcacgcacggcactgcagagccatccggctgtgtcacggtgtttgttttcctccatctcagagctgcatctcgggcagtcaaacacagctccaaagagctctgaggtcctgataa

SEQ ID NO: 1951 - DNA, 600 bp, Chicken  19866894088703_3
acggtggggatccatgcagaccccatgcagggagcctataaggacagcacgtgcagggctgatgcccatggggccagaggatgctcttgacttcctgtgctgagggcttgcaggtgcttcctcacatgtctgcacctgcctcacgaactcgtggctgcactgggagctgctgaaaatcaaaaatgctaaatcgctacaagcaatagcaaaaagagtgacccctccgaaggtgagggtgaatcacacgcccagccccrctgctagacacctgagaacccactcggcactctctgcstgatrtaaacgaaactggggaccaaattcagcgcaccgagtttcaccctgtcactgctgctgcgagacacttacagtaatgccagaagggaaagcatggaaggaaattctgattgaagcaggggcaccccccggcgtggcacacagcagcccccactgtattcaggagggatttgaagtgagatctcacgcacggcactgcagagccatccggctgtgtcacggtgtttgttttcctccatctcagagctgcatctcgggcagtcaaacacagctccaaagagctctgaggtcctgataagagcc

SEQ ID NO: 1952 - DNA, 600 bp, Chicken  19866894088706_1
catactcaaagacttccaaagaagcgagaactttaataaacaaattagtgatgaaggtaaaatggttgcaaagaccatggaatagttactaccaatgttctctttagataactgatcaaaatcaactgtattctcatttactgaagtaaatggatttgagaatgacgagagcaaaagattatcagttttcagtagaatgctattgatagctgacattatcctttacttacccagtgtcccacagtgaataaaatctgccgctccaaggagcgatatagcctgaaaatgagaagagagggraaaaaaaacacttttgctgcctatgtatttaaatgcaataaatttctctacacctttaaatgatagcaaaaaactaattaccaaaagaaatttcattaaatgcgtagaatatgtgaacttggcctactgcagtaggtagcttaggaagtctaccaatcatgaacccagttttagttatgagatcacactgggctagttcagtatcaagagatacgcacctccagaagtcaaggtgatgcaaaataattaaaacatttctcaaagaatgactgatagcaacctatgttttgtaaagaagta

SEQ ID NO: 1953 - DNA, 599 bp, Chicken  19866894088707_1
  misc_feature (1)..(143): n is any nucleotide
nnnnnnnnnnnnnnnnnnnnnnnnnnnnnnnnnnnnnnnnnnnnnnnnnnnnnnnnnnnnnnnnnnnnnnnnnnnnnnnnnnnnnnnnnnnnnnnnnnnnnnnnnnnnnnnnnnnnnnnnnnnnnnnnnnnnnnnnnnnnnnnactgtttgttcatgattgttttctcggtattgcagttttggaggggctcaaatctgatatccatccataaacttcagaaaatacactaaaggtttttgcttactgtctttccagtatgccctttttcaagtaatactgttatattgcagtgacccgytatgtgtggcacaggggaatttcactgtagggtaatagagactccaatatctgaggttaataaaaaargctcatattccatgttctgtgctttccttgtatttctgaacttgcataggtttgtggaatgcrttttcagatgccataggaatgaggaaaactttggatataatcatttcctccattcattgcttttatttttttaagcatatgttagcagaaagaataagtgcaactattttgaagtgtaattcaataagcatttttctctttgcaatactttatacatggggtgaagaa

SEQ ID NO: 1954 - DNA, 599 bp, Chicken  19866894088707_2
  misc_feature (1)..(75): n is any nucleotide
nnnnnnnnnnnnnnnnnnnnnnnnnnnnnnnnnnnnnnnnnnnnnnnnnnnnnnnnnnnnnnnnnnnnnnnnnnnactgtttgttcatgattgttttctcggtattgcagttttggaggggctcaaatctgatatccatccataaacttcagaaaatacactaaaggtttttgcttactgtctttccagtatgccctttttcaagtaatactgttatattgcagtgacccgytatgtgtggcacaggggaatttcactgtagggtaatagagactccaatatctgaggttaataaaaaargctcatattccatgttctgtgctttccttgtatttctgaacttgcataggtttgtggaatgcrttttcagatgccataggaatgaggaaaactttggatataatcatttcctccattcattgcttttatttttttaagcatatgttagcagaaagaataagtgcaactattttgaagtgtaattcaataagcatttttctctttgcaatactttatacatggggtgaagaatagctctggtgttagttctgtcagagagggaarctttcctttttcttaagcgtcttttcaaatgcgct

SEQ ID NO: 1955 - DNA, 599 bp, Chicken  19866894088707_3
  misc_feature (1)..(12): n is any nucleotide
nnnnnnnnnnnnactgtttgttcatgattgttttctcggtattgcagttttggaggggctcaaatctgatatccatccataaacttcagaaaatacactaaaggtttttgcttactgtctttccagtatgccctttttcaagtaatactgttatattgcagtgacccgytatgtgtggcacaggggaatttcactgtagggtaatagagactccaatatctgaggttaataaaaaargctcatattccatgttctgtgctttccttgtatttctgaacttgcataggtttgtggaatgcrttttcagatgccataggaatgaggaaaactttggatataatcatttcctccattcattgcttttatttttttaagcatatgttagcagaaagaataagtgcaactattttgaagtgtaattcaataagcatttttctctttgcaatactttatacatggggtgaagaatagctctggtgttagttctgtcagagagggaarctttcctttttcttaagcgtcttttcaaatgcgctcaagtacaataaaggacaagtaaagaacaactygtgtagtaattatgtggccttggttttata

SEQ ID NO: 1956 - DNA, 573 bp, Chicken  19866894088707_4
taatagagactccaatatctgaggttaataaaaaargctcatattccatgttctgtgctttccttgtatttctgaacttgcataggtttgtggaatgcrttttcagatgccataggaatgaggaaaactttggatataatcatttcctccattcattgcttttatttttttaagcatatgttagcagaaagaataagtgcaactattttgaagtgtaattcaataagcatttttctctttgcaatactttatacatggggtgaagaatagctctggtgttagttctgtcagagagggaarctttcctttttcttaagcgtcttttcaaatgcgctcaagtacaataaaggacaagtaaagaacaactygtgtagtaattatgtggccttggttttataccaaattttatctttggtcttaaatagttgttccttctggcacataatctcaatattcaagcgagttctaggaagttaaggcaaatattcagattaattacccaccaactttgttatgaaatgtttgcaatagttcatcagatactacgtggtataataacttccattttctcct

SEQ ID NO: 1957 - DNA, 505 bp, Chicken  19866894088707_5
tttctgaacttgcataggtttgtggaatgcrttttcagatgccataggaatgaggaaaactttggatataatcatttcctccattcattgcttttatttttttaagcatatgttagcagaaagaataagtgcaactattttgaagtgtaattcaataagcatttttctctttgcaatactttatacatggggtgaagaatagctctggtgttagttctgtcagagagggaarctttcctttttcttaagcgtcttttcaaatgcgctcaagtacaataaaggacaagtaaagaacaactygtgtagtaattatgtggccttggttttataccaaattttatctttggtcttaaatagttgttccttctggcacataatctcaatattcaagcgagttctaggaagttaaggcaaatattcagattaattacccaccaactttgttatgaaatgtttgcaatagttcatcagatactacgtggtataataacttccattttctcct

SEQ ID NO: 1958 - DNA, 600 bp, Chicken  19866894088711_1
acctcttctccatcacctcccgcagctcttggatctcctgacgccgcttcagctccttcatttcatcaaaacgtttcagctgttctctcgccatgtcgtacgctgccctcaccagctgctcctgctgctcctgccgctgccggagcctctcctgcaggatgcacaggtgccagaagcaccacaatgtagcacccgaatccaccagaaggaaacacagacaaagctgtccggagacagcaacgtggtccatgcgatgctgtcccacaccaacgtcccagacagtggtttaggatcagtcaygcttttgtttctatttacccttcctttcatcctgtatatctcttcgtacatctgaatgcagccttcaacttttgccattttagatacaggaggtatcggaaggacttcttgattcacttccagcacacygggatcactgcttccctgcaaggccagcatacaggtagaatcagtgactgaatacaggatcagaaactcacggaggaaacctcttcaactgcacattattcatggaaaaacagacaaatgagccaaccaacgtgcaatgcgtacagcgggtaaataggagcggcagcctca

SEQ ID NO: 1959 - DNA, 536 bp, Chicken  19866894088711_2
cctgccgctgccggagcctctcctgcaggatgcacaggtgccagaagcaccacaatgtagcacccgaatccaccagaaggaaacacagacaaagctgtccggagacagcaacgtggtccatgcgatgctgtcccacaccaacgtcccagacagtggtttaggatcagtcaygcttttgtttctatttacccttcctttcatcctgtatatctcttcgtacatctgaatgcagccttcaacttttgccattttagatacaggaggtatcggaaggacttcttgattcacttccagcacacygggatcactgcttccctgcaaggccagcatacaggtagaatcagtgactgaatacaggatcagaaactcacggaggaaacctcttcaactgcacattattcatggaaaaacagacaaatgagccaaccaacgtgcaatgcgtacagcgggtaaataggagcggcagcctcacagctctcagctgtctcccagcagctccatcaggctgggataatcgctattcccaatcactacaa

SEQ ID NO: 1960 - DNA, 600 bp, Chicken  19866894088714_1
cttatatctgaaaggcatccctaaatcgcacagattctgacgtaaccattacagttaagcgtttctgttcatgggcacgtaaatccagataggtttaatttaagcagaatgtccggcactttctcaggcatcacaataaatagccgtgagtctcttgaggtaccatgcaagtgctcacggatctgcacatgcatcaaagaaacaaatgtgggtgagtcgaaataggtacagtacaaagcatggaaccataagtttcagattaaacagaggtgtctctgtgatacagtgtttctctactaytttgactgmgagagaaaatcactgattaagagtaaaaggtcccacagaaaactttgcagaaaactgtgcatccttcctgctccttctttgccactaggtctgcctataaaatctgccgtaaattctctctgaactcagattttactgtcgtagaaaacccaagatttgtgtcaggatatggggtgcatcccacatagtgtatcaccagcactgaccttctcctgacatcccatctatttgcccgagtattaaaatcatgaaatgttcaagtgttccctggatccttctgcagagacttac

SEQ ID NO: 1961 - DNA, 600 bp, Chicken  19866894088714_2
gaaaggcatccctaaatcgcacagattctgacgtaaccattacagttaagcgtttctgttcatgggcacgtaaatccagataggtttaatttaagcagaatgtccggcactttctcaggcatcacaataaatagccgtgagtctcttgaggtaccatgcaagtgctcacggatctgcacatgcatcaaagaaacaaatgtgggtgagtcgaaataggtacagtacaaagcatggaaccataagtttcagattaaacagaggtgtctctgtgatacagtgtttctctactaytttgactgmgagagaaaatcactgattaagagtaaaaggtcccacagaaaactttgcagaaaactgtgcatccttcctgctccttctttgccactaggtctgcctataaaatctgccgtaaattctctctgaactcagattttactgtcgtagaaaacccaagatttgtgtcaggatatggggtgcatcccacatagtgtatcaccagcactgaccttctcctgacatcccatctatttgcccgagtattaaaatcatgaaatgttcaagtgttccctggatccttctgcagagacttacagttgggat

SEQ ID NO: 1962 - DNA, 600 bp, Chicken  19866894088716_1
cctcaaagacgttctcagacgtgctggctatcagcttgtgcgccgctgggcagtgcttgttggccaggtccccgaacgtcatgcaggaggcctggtgggccaggaaggactggtcgatgtagctggtgtgaggggcattgctggcgatgaggcgggagatgttctcgaagcactgagcctcatcctcactgtagtgcagcagcagagccaccagcgagggcagcgcggggctgtaggtgatgtcagggaacaggttgccaatgcagatgaggatcttcttcagcgccgcgaccccgtgcrggttgaggcagtacgtgggcagggagcaccccccaaggaagtcgggcagcgggtgggagctggcgccgtgctttccaaagagcctcgtggccacatccccatacaccagggcatcgggtgtgacgaggcggcaggcgacacgctggcacagccgctggtaagctgcagccctcagcgtgcggctggcggcccagcagccctcccttgccagcttcttcagctccttggggggccggctgagcgtgtcctcgggcggatctgcctgctgctccacctctgccgtctggtcccagtccatga

SEQ ID NO: 1963 - DNA, 599 bp, Chicken  19866894088720_1
  misc_feature (1)..(38): n is any nucleotide
nnnnnnnnnnnnnnnnnnnnnnnnnnnnnnnnnnnnnnacttacagctgcaaatgaagagcgttaagcctttttattctaacataaacagcccagccacagagagccctgaagtggtgacagtgcaccgaagcattcaacatctgctcgagatgtgtgtgcaatgcacactgagtgagggacctccgcagcaccttggaggtgggcagggctgcagtgtgagcaccagggcaggtgcttctcctctcttttttccccctctggcaaagggcacccaaacaaatcacagctcctccctctyggtctttccaaatcaccaaaaccccacaagaaaagccggcttgagcaaagttggctgcggtcctcctgcgaatctcactgcaggaggtgcagatgggaaatgaggaagcgtgcagaaatctgaatgctattaaacagacgttgggaaaaggtaatcctgcactgcttccccgggacagcacacrgtgaggacacactcagaccacgatgcrctttcctaacaygagagcagagattcacctgctgcattcaggaaagggaccaagatccttcccttgcgatgctcccctgctctctgca

SEQ ID NO: 1964 - DNA, 600 bp, Chicken  19866894088720_2
ccgcagcaccttggaggtgggcagggctgcagtgtgagcaccagggcaggtgcttctcctctcttttttccccctctggcaaagggcacccaaacaaatcacagctcctccctctyggtctttccaaatcaccaaaaccccacaagaaaagccggcttgagcaaagttggctgcggtcctcctgcgaatctcactgcaggaggtgcagatgggaaatgaggaagcgtgcagaaatctgaatgctattaaacagacgttgggaaaaggtaatcctgcactgcttccccgggacagcacacrgtgaggacacactcagaccacgatgcrctttcctaacaygagagcagagattcacctgctgcattcaggaaagggaccaagatccttcccttgcgatgctcccctgctctctgcagggcagcagcaaccagctttgctcctaattacacattcccaggctcagggctgctgaaggcagcacaaccccaagtaccctttgcacccagcatgctgcaaagccacaaggccctgtgcaaacacctcccagcactccacagacctgtatttctgctccccagcaccttccccacaatgctataa

SEQ ID NO: 1965 - DNA, 600 bp, Chicken  19866894088720_3
tgcagtgtgagcaccagggcaggtgcttctcctctcttttttccccctctggcaaagggcacccaaacaaatcacagctcctccctctyggtctttccaaatcaccaaaaccccacaagaaaagccggcttgagcaaagttggctgcggtcctcctgcgaatctcactgcaggaggtgcagatgggaaatgaggaagcgtgcagaaatctgaatgctattaaacagacgttgggaaaaggtaatcctgcactgcttccccgggacagcacacrgtgaggacacactcagaccacgatgcrctttcctaacaygagagcagagattcacctgctgcattcaggaaagggaccaagatccttcccttgcgatgctcccctgctctctgcagggcagcagcaaccagctttgctcctaattacacattcccaggctcagggctgctgaaggcagcacaaccccaagtaccctttgcacccagcatgctgcaaagccacaaggccctgtgcaaacacctcccagcactccacagacctgtatttctgctccccagcaccttccccacaatgctataatccccatcaggccctacgtgattgtaa

SEQ ID NO: 1966 - DNA, 600 bp, Chicken  19866894088720_4
accagggcaggtgcttctcctctcttttttccccctctggcaaagggcacccaaacaaatcacagctcctccctctyggtctttccaaatcaccaaaaccccacaagaaaagccggcttgagcaaagttggctgcggtcctcctgcgaatctcactgcaggaggtgcagatgggaaatgaggaagcgtgcagaaatctgaatgctattaaacagacgttgggaaaaggtaatcctgcactgcttccccgggacagcacacrgtgaggacacactcagaccacgatgcrctttcctaacaygagagcagagattcacctgctgcattcaggaaagggaccaagatccttcccttgcgatgctcccctgctctctgcagggcagcagcaaccagctttgctcctaattacacattcccaggctcagggctgctgaaggcagcacaaccccaagtaccctttgcacccagcatgctgcaaagccacaaggccctgtgcaaacacctcccagcactccacagacctgtatttctgctccccagcaccttccccacaatgctataatccccatcaggccctacgtgattgtaaaggatttacttc

SEQ ID NO: 1967 - DNA, 600 bp, Chicken  19866894088721_1
agggcaggtggatgctctgcactgctgtgacgttagtccatagcatgatttctgctcctctggggctggatgtcagggcagtgttgatgcatcctacttgtgatgttaccaaagtcttcatagaatcacagaatggtttgggttggaagagaccttaaagcccactcagttccacccccctgccatgggcagggctgccaccccccagctcaggctgcccagggccccatccaagctggacttaaacctccagggatggggcaaccgcaactccctgggcaacctgtgccaatgccttamtacactctgaataaagaatttcctcttaatatctaatctaaatctcttctcttttagtttaaaacctatcactgcccacgtaaaaccttctcctggttgagagcttgattttcagccggttatgagtcaagaaggacacacggtgttggctgcccagggaggcggtggagtgaccatccatggaggtgtttaagaaacacttagacgttgtactaagggacayggtttagtgaggaagtacagacggyagcaggatagatgggccagatgatcttggaggtcttttccaaccttggtgac

SEQ ID NO: 1968 - DNA, 600 bp, Chicken  19866894088721_2
gccccatccaagctggacttaaacctccagggatggggcaaccgcaactccctgggcaacctgtgccaatgccttamtacactctgaataaagaatttcctcttaatatctaatctaaatctcttctcttttagtttaaaacctatcactgcccacgtaaaaccttctcctggttgagagcttgattttcagccggttatgagtcaagaaggacacacggtgttggctgcccagggaggcggtggagtgaccatccatggaggtgtttaagaaacacttagacgttgtactaagggacayggtttagtgaggaagtacagacggyagcaggatagatgggccagatgatcttggaggtcttttccaaccttggtgactctatgactcaaagcactgtagggctgagcaagacaggagcaaagagaaacaaaggcacttctgttctcattatcacgygcagcaagagaagaccccgactcatgtaagccacaccttgccaagccagatccctayaaagaagatcagacttttttcctcctgtctcctgtccatccctccacgtgaaataaaaacccttcactcatagaaggggattgcatg

SEQ ID NO: 1969 - DNA, 600 bp, Chicken  19866894088721_3
tccagggatggggcaaccgcaactccctgggcaacctgtgccaatgccttamtacactctgaataaagaatttcctcttaatatctaatctaaatctcttctcttttagtttaaaacctatcactgcccacgtaaaaccttctcctggttgagagcttgattttcagccggttatgagtcaagaaggacacacggtgttggctgcccagggaggcggtggagtgaccatccatggaggtgtttaagaaacacttagacgttgtactaagggacayggtttagtgaggaagtacagacggyagcaggatagatgggccagatgatcttggaggtcttttccaaccttggtgactctatgactcaaagcactgtagggctgagcaagacaggagcaaagagaaacaaaggcacttctgttctcattatcacgygcagcaagagaagaccccgactcatgtaagccacaccttgccaagccagatccctayaaagaagatcagacttttttcctcctgtctcctgtccatccctccacgtgaaataaaaacccttcactcatagaaggggattgcatgctgaagatcttacctaaccagctgt

SEQ ID NO: 1970 - DNA, 591 bp, Chicken  19866894088721_4
gtaaaaccttctcctggttgagagcttgattttcagccggttatgagtcaagaaggacacacggtgttggctgcccagggaggcggtggagtgaccatccatggaggtgtttaagaaacacttagacgttgtactaagggacayggtttagtgaggaagtacagacggyagcaggatagatgggccagatgatcttggaggtcttttccaaccttggtgactctatgactcaaagcactgtagggctgagcaagacaggagcaaagagaaacaaaggcacttctgttctcattatcacgygcagcaagagaagaccccgactcatgtaagccacaccttgccaagccagatccctayaaagaagatcagacttttttcctcctgtctcctgtccatccctccacgtgaaataaaaacccttcactcatagaaggggattgcatgctgaagatcttacctaaccagctgttatcggactactctcagggtacacgaacttgcctcacatcaccgctttgcgaggaggttattgggatttccaataaaactctgtgtcgcttctgaagagaaattctgcacttgtgcctgatg

SEQ ID NO: 1971 - DNA, 534 bp, Chicken  19866894088721_5
cacacggtgttggctgcccagggaggcggtggagtgaccatccatggaggtgtttaagaaacacttagacgttgtactaagggacayggtttagtgaggaagtacagacggyagcaggatagatgggccagatgatcttggaggtcttttccaaccttggtgactctatgactcaaagcactgtagggctgagcaagacaggagcaaagagaaacaaaggcacttctgttctcattatcacgygcagcaagagaagaccccgactcatgtaagccacaccttgccaagccagatccctayaaagaagatcagacttttttcctcctgtctcctgtccatccctccacgtgaaataaaaacccttcactcatagaaggggattgcatgctgaagatcttacctaaccagctgttatcggactactctcagggtacacgaacttgcctcacatcaccgctttgcgaggaggttattgggatttccaataaaactctgtgtcgcttctgaagagaaattctgcacttgtgcctgatg

SEQ ID NO: 1972 - DNA, 600 bp, Chicken  19866894088725_1
tttgtatttcttgtgtctgaatatttttgagctcagaaacaagaggggacagcacagggtgtgaggttacagggcaggcttgatagcctgtgcatatcttgtgcttccccaagaatgctccattattccccagcaatgtgaggatcgggtgagcctcccatagtgcttcctacctgatcagaggcttgaacagaatcagaagggtcttgatgaacatggttggatgcacaatatacaaggctttgatgttcttcttgtatctgccaagagaagctaagtgaggatgaactgtgctttaaratgggggaccaaccttttcrcaagattaagacattctagatgctctgttccttttgcattctgcctcaccactccccagtcacacgtgggctctgcttttccatgcttcatactcatgtcaggatgcccagcagcctaagggcacactctattccaagattattccaattattccaagatttgcccaggagcagtgaccagcctcaccaggaaataacaattataccacagagctgacacactcgcactggttcctggttctgttccttgcctgttatcctaaaaagtgcaatttcagaa

SEQ ID NO: 1973 - DNA, 600 bp, Chicken  19866894088725_2
atatttttgagctcagaaacaagaggggacagcacagggtgtgaggttacagggcaggcttgatagcctgtgcatatcttgtgcttccccaagaatgctccattattccccagcaatgtgaggatcgggtgagcctcccatagtgcttcctacctgatcagaggcttgaacagaatcagaagggtcttgatgaacatggttggatgcacaatatacaaggctttgatgttcttcttgtatctgccaagagaagctaagtgaggatgaactgtgctttaaratgggggaccaaccttttcrcaagattaagacattctagatgctctgttccttttgcattctgcctcaccactccccagtcacacgtgggctctgcttttccatgcttcatactcatgtcaggatgcccagcagcctaagggcacactctattccaagattattccaattattccaagatttgcccaggagcagtgaccagcctcaccaggaaataacaattataccacagagctgacacactcgcactggttcctggttctgttccttgcctgttatcctaaaaagtgcaatttcagaaggagctgtgcatcccacaat

SEQ ID NO: 1974 - DNA, 600 bp, Chicken  19866894088729_1
tagaaccttaccttacaattgcctttaacataatcaggtaaaagcaattaagagcatttatgtgcaaaatccaaaatctgtgatgtgttgtaaaggtttataaaggcagaagtgacaaagacagaaagaaaaccatttgttccaagaacaaatccttaaatcctcctcccctgccttcataagctgataagctgcagatccactcttaacctacttgatcaggactcgatcccctctgcacactcctgcccttggacagtatttgcaggcagaataaccacacaggctctttagctttasctttgtttaggttttggctggagcctgcctcagattcacgtcttgcacttctcccatcttgacccygctttcagtaatgatggattcctattcaagarctggtttcaaacttcatttactgaaatcatgactgtttttggaaatattacaaatttgcctccctcccttcacatatctgcagttgcattttactcgagatttttttttcccttgagaataacagtaaatcgaacacttaaatagcattcttcattcacaatatgccttgctagcgttaatatgattagctaacattattct

SEQ ID NO: 1975 - DNA, 600 bp, Chicken  19866894088729_2
aaatccaaaatctgtgatgtgttgtaaaggtttataaaggcagaagtgacaaagacagaaagaaaaccatttgttccaagaacaaatccttaaatcctcctcccctgccttcataagctgataagctgcagatccactcttaacctacttgatcaggactcgatcccctctgcacactcctgcccttggacagtatttgcaggcagaataaccacacaggctctttagctttasctttgtttaggttttggctggagcctgcctcagattcacgtcttgcacttctcccatcttgacccygctttcagtaatgatggattcctattcaagarctggtttcaaacttcatttactgaaatcatgactgtttttggaaatattacaaatttgcctccctcccttcacatatctgcagttgcattttactcgagatttttttttcccttgagaataacagtaaatcgaacacttaaatagcattcttcattcacaatatgccttgctagcgttaatatgattagctaacattattctcactcctcctctccccagaattgcctaaaacagacaaaacaatgctccaaggaagtgttagagtca

SEQ ID NO: 1976 - DNA, 600 bp, Chicken  19866894088729_3
tataaaggcagaagtgacaaagacagaaagaaaaccatttgttccaagaacaaatccttaaatcctcctcccctgccttcataagctgataagctgcagatccactcttaacctacttgatcaggactcgatcccctctgcacactcctgcccttggacagtatttgcaggcagaataaccacacaggctctttagctttasctttgtttaggttttggctggagcctgcctcagattcacgtcttgcacttctcccatcttgacccygctttcagtaatgatggattcctattcaagarctggtttcaaacttcatttactgaaatcatgactgtttttggaaatattacaaatttgcctccctcccttcacatatctgcagttgcattttactcgagatttttttttcccttgagaataacagtaaatcgaacacttaaatagcattcttcattcacaatatgccttgctagcgttaatatgattagctaacattattctcactcctcctctccccagaattgcctaaaacagacaaaacaatgctccaaggaagtgttagagtcagtggcacccagtctgaatgccgctccctctct

SEQ ID NO: 1977 - DNA, 600 bp, Chicken  19866894088729_4
ccactcttaacctacttgatcaggactcgatcccctctgcacactcctgcccttggacagtatttgcaggcagaataaccacacaggctctttagctttasctttgtttaggttttggctggagcctgcctcagattcacgtcttgcacttctcccatcttgacccygctttcagtaatgatggattcctattcaagarctggtttcaaacttcatttactgaaatcatgactgtttttggaaatattacaaatttgcctccctcccttcacatatctgcagttgcattttactcgagarttttttttcccttgagaataacagtaaatcgaacacttaaatagcattcttcattcacaatatgccttgctagcgttaatatgattagctaacattattctcactcctcctctccccagaattgcctaaaacagacaaaacaatgctccaaggaagtgttagagtcagtggcacccagtctgaatgccgctccctctctgaaacaagcaatacctgatgccccccacaaagtcctattattgcagctgcaattttgtaaacacctttttttttaataactgcttttgttctttatcatcc

SEQ ID NO: 1978 - DNA, 599 bp, Chicken  19866894088730_1
  misc_feature (1)..(200): n is any nucleotide
nnnnnnnnnnnnnnnnnnnnnnnnnnnnnnnnnnnnnnnnnnnnnnnnnnnnnnnnnnnnnnnnnnnnnnnnnnnnnnnnnnnnnnnnnnnnnnnnnnnnnnnnnnnnnnnnnnnnnnnnnnnnnnnnnnnnnnnnnnnnnnnnnnnnnnnnnnnnnnnnnnnnnnnnnnnnnnnnnnnnnnnnnnnnnnnnnnnnnnnntgctttgttttagaagtgagattaagagtaatcttttttagaaatatacccaagcttagtctaaaaaatccaaatgaatgaagtctgcagtcttctatgrtaaagtccttccacgccttattaccctcccagcttaggaaatgcttcttattcagtttaggtttgacttggtcaaaatctgtctcctcattactgtgtatcattatgattttgtcaacaagtctgaaagttgattgtcttggaggagtgaagctctcacagtcgtttactgataaaaacccagtctttgttgtagctgggacctgagccattaattgtttcagaaattagggttgtgtcctgagaatgactctggaakttgatgggaaaccaccagataaatttgaatatagaatgatg

SEQ ID NO: 1979 - DNA, 600 bp, Chicken  19866894088730_2
gtctaaaaaatccaaatgaatgaagtctgcagtcttctatgrtaaagtccttccacgccttattaccctcccagcttaggaaatgcttcttattcagtttaggtttgacttggtcaaaatctgtctcctcattactgtgtatcattatgattttgtcaacaagtctgaaagttgattgtcttggaggagtgaagctctcacagtcgtttactgataaaaacccagtctttgttgtagctgggacctgagccattaattgtttcagaaattagggttgtgtcctgagaatgactctggaakttgatgggaaaccaccagataaatttgaatatagaatgatgtacatatggtagcctgagccatagagataacatatgtctcctttctataccatctggagcctgagtataatatattcatttagttaaagacacwtaaaccacagacacccagattcagagagagactggactttgcccctacctgacaggaaaggattacttttgtaggacaggttctgacactaacagtgcctggtccaaggagctcaacacggtttggattcatcttcagaccaggattctcctccaggaggacgtt

SEQ ID NO: 1980 - DNA, 600 bp, Chicken  19866894088730_3
tgtgtatcattatgattttgtcaacaagtctgaaagttgattgtcttggaggagtgaagctctcacagtcgtttactgataaaaacccagtctttgttgtagctgggacctgagccattaattgtttcagaaattagggttgtgtcctgagaatgactctggaakttgatgggaaaccaccagataaatttgaatatagaatgatgtacatatggtagcctgagccatagagataacatatgtctcctttctataccatctggagcctgagtataatatattcatttagttaaagacacwtaaaccacagacacccagattcagagagagactggactttgcccctacctgacaggaaaggattacttttgtaggacaggttctgacactaacagtgcctggtccaaggagctcaacacggtttggattcatcttcagaccaggattctcctccaggaggacgtttgtccaagtccatccacgtaagagtggccatttttgaggaggttgactctgacttttccacaggagcctcatggtggagagttaaattttgactctccaaccccacctacctccttccttcaagtggagttcctc

SEQ ID NO: 1981 - DNA, 600 bp, Chicken  19866894088730_4
aaggattacttttgtaggacaggttctgacactaacagtgcctggtccaaggagctcaacacggtttggattcatcttcagaccaggattctcctccaggaggacgtttgtccaagtccatccacgtaagagtggccatttttgaggaggttgactctgacttttccacaggagcctcatggtggagagttaaattttgactctccaaccccacctacctccttccttcaagtggagttcctcttcatggtcaacccaattgagctgaacctgagcacgttcatctagagaagtgagcaraaaccagggcaggagctgagatgcaaagggcagtagggcagagagaaggtggctgatgcaattttagaactgagatggtaaaaatacctatgcgatcattttacagtattagggaatatcgagtggaagaaaatgtgtccatagggagaaacctgcagagccatcgacagagggagggagaagagattaaaccagaaaataacctgaaagctaggaatggcttctgactgttgatctctctgaatggtctctgactcaggcttccatgcaagcactgcggtttttaactaactccaaggt

SEQ ID NO: 1982 - DNA, 600 bp, Chicken  19866894088733_1
tgaagttctcatgttcctcatccttttaacttctataagtctagttttaatgatcagggaaatttgtgaatgtattttcactggagtgcttctccagaagtaatgcatgtgatatcagaggtggatgttggtgctatggcagtagaggcagaacctttccgctaatattctgtcacattttgttgctgtgcagcagatggcagcagaggggcagtctgacaaaatggtgtcggacatggaagtgagtatgaaacaaagatgcgtaattaaatttttctgtgtgcaaaaaatgacacccaytgacattcatcaatgctttctgaatgtttatggagaccaaatagtggatgtgagcacagtgaagtggtgggtggtgcatttcagaagtggtgacagcaacatgaaagacgagccatgatctaaatggtcatgcacaactgttacaccatgaaatgaagagcacctcaatcaactcatccacacgtcatcacctgactgcgaccaagggactgtatgcagagctaaatattggcttcagtatgttgtaaatgttgttggcagtgttggattatcacaaagtttgcaccaggagggcttcat

SEQ ID NO: 1983 - DNA, 599 bp, Chicken  19866894088744_1
  misc_feature (1)..(139): n is any nucleotide
nnnnnnnnnnnnnnnnnnnnnnnnnnnnnnnnnnnnnnnnnnnnnnnnnnnnnnnnnnnnnnnnnnnnnnnnnnnnnnnnnnnnnnnnnnnnnnnnnnnnnnnnnnnnnnnnnnnnnnnnnnnnnnnnnnnnnnnnnnnaaaacgttagctgtgaattgagcagtttgtgtgtctgctggtaaattataatttgagtgattggacctaataattatggactcatcatcatcatcttgtcagtcagatgtaaattactctataatggatttccattttgaaaagctgtgtttccgagtgcraatatattttagagttaaaatttaacacccttattccctcctgtctttaaaacctttatggttataactctcctccttgtgtgaccaagcaagttaaaaacagatctttgctccagcgaagctgctctcagactgtatttttcttgttatttcttttctgtctcagtgttcattcccacagactagtgcagccgctcagcrtgrcagcacttattcacccccaaagtcgctgctgctyataggcttcagggttgctgctgaagagcatggaagagcagaagacctcgcatccgcttagg

SEQ ID NO: 1984 - DNA, 600 bp, Chicken  19866894088744_2
ggacctaataattatggactcatcatcatcatcttgtcagtcagatgtaaattactctataatggatttccattttgaaaagctgtgtttccgagtgcraatatattttagagttaaaatttaacacccttattccctcctgtctttaaaacctttatggttataactctcctccttgtgtgaccaagcaagttaaaaacagatctttgctccagcgaagctgctctcagactgtatttttcttgttatttcttttctgtctcagtgttcattcccacagactagtgcagccgctcagcrtgrcagcacttattcacccccaaagtcgctgctgctyataggcttcagggttgctgctgaagagcatggaagagcagaagacctcgcatccgcttaggcatctgttgtgggttcacaagaggcctttgttccctaggatgaagtggggacttctatgcaggtttccttcaggcaggagyagtgtatgtgtgtgtttgcttagggctggctatctcatggctcctctgtgctgaagtttctggggggacctgttcttactcagggagagagtgaaggaagggaaagtagaaaccggggcga

SEQ ID NO: 1985 - DNA, 600 bp, Chicken  19866894088744_3
cctaataattatggactcatcatcatcatcttgtcagtcagatgtaaattactctataatggatttccattttgaaaagctgtgtttccgagtgcraatatattttagagttaaaatttaacacccttattccctcctgtctttaaaacctttatggttataactctcctccttgtgtgaccaagcaagttaaaaacagatctttgctccagcgaagctgctctcagactgtatttttcttgttatttcttttctgtctcagtgttcattcccacagactagtgcagccgctcagcrtgrcagcacttattcacccccaaagtcgctgctgctyataggcttcagggttgctgctgaagagcatggaagagcagaagacctcgcatccgcttaggcatctgttgtgggttcacaagaggcctttgttccctaggatgaagtggggacttctatgcaggtttccttcaggcaggagyagtgtatgtgtgtgtttgcttagggctggctatctcatggctcctctgtgctgaagtttctggggggacctgttcttactcagggagagagtgaaggaagggaaagtagaaaccggggcgaaga

SEQ ID NO: 1986 - DNA, 600 bp, Chicken  19866894088744_4
cagtcagatgtaaattactctataatggatttccattttgaaaagctgtgtttccgagtgcraatatattttagagttaaaatttaacacccttattccctcctgtctttaaaacctttatggttataactctcctccttgtgtgaccaagcaagttaaaaacagatctttgctccagcgaagctgctctcagactgtatttttcttgttatttcttttctgtctcagtgttcattcccacagactagtgcagccgctcagcrtgrcagcacttattcacccccaaagtcgctgctgctyataggcttcagggttgctgctgaagagcatggaagagcagaagacctcgcatccgcttaggcatctgttgtgggttcacaagaggcctttgttccctaggatgaagtggggacttctatgcaggtttccttcaggcaggagyagtgtatgtgtgtgtttgcttagggctggctatctcatggctcctctgtgctgaagtttctggggggacctgttcttactcagggagagagtgaaggaagggaaagtagaaaccggggcgaagagaggaggagagaacttgccaggtggtctttgctt

SEQ ID NO: 1987 - DNA, 600 bp, Chicken  19866894088744_5
gtgaccaagcaagttaaaaacagatctttgctccagcgaagctgctctcagactgtatttttcttgttatttcttttctgtctcagtgttcattcccacagactagtgcagccgctcagcrtgrcagcacttattcacccccaaagtcgctgctgctyataggcttcagggttgctgctgaagagcatggaagagcagaagacctcgcatccgcttaggcatctgttgtgggttcacaagaggcctttgttccctaggatgaagtggggacttctatgcaggtttccttcaggcaggagyagtgtatgtgtgtgtttgcttagggctggctatctcatggctcctctgtgctgaagtttctggggggacctgttcttactcagggagagagtgaaggaagggaaagtagaaaccggggcgaagagaggaggagagaacttgccaggtggtctttgcttgcggtgttgattttttttcccatacccagcaagggcattttatgggggtaatttttaaggagaaaattggatttatagaatcacaggatggctgagtctgtcagggccgtctgggtccctctggctcaacccctgttccagg

SEQ ID NO: 1988 - DNA, 600 bp, Chicken  19866894088746_1
gaaaacctgaaggcagacactctggatacagaggagaaaacacaattacatagtctaagtttattattttaagagagtaggctaagcttattgtgcataactaaatactttcctaaagattattgacatcaaagaggcaagtggaacagtgggtttaaccagaattataaacaaggatacacatctttaaacaaacctataaaggtcaattttttaacttcattcatttgaagaatgttaaatcttagctcttgatgtaaaacattggttgtaggcaatttgagacttgtttgatgaggyaaaaaaaaaaatgcaggagtacagtggcctgctaaatttccagatttatttataggggtccttaatgtgacacaggatgtgactggttagatttcacacgttgtgacttccatatgtatctcctattaaggcaatcaataatgcatacccacaagccatatactataatctcctgcagcacattcagaactttcctgtcagatacctaatatttccagcagtcattttctgaatgtggaactggtcagaaacattctcgtgaaggcggggaacatgatgactgtgggaaaataattgtcc

SEQ ID NO: 1989 - DNA, 600 bp, Chicken  19866894088746_2
aaaacctgaaggcagacactctggatacagaggagaaaacacaattacatagtctaagtttattattttaagagagtaggctaagcttattgtgcataactaaatactttcctaaagattattgacatcaaagaggcaagtggaacagtgggtttaaccagaattataaacaaggatacacatctttaaacaaacctataaaggtcaattttttaacttcattcatttgaagaatgttaaatcttagctcttgatgtaaaacattggttgtaggcaatttgagacttgtttgatgaggayaaaaaaaaaatgcaggagtacagtggcctgctaaatttccagatttatttataggggtccttaatgtgacacaggatgtgactggttagatttcacacgttgtgacttccatatgtatctcctattaaggcaatcaataatgcatacccacaagccatatactataatctcctgcagcacattcagaactttcctgtcagatacctaatatttccagcagtcattttctgaatgtggaactggtcagaaacattctcgtgaaggcggggaacatgatgactgtgggaaaataattgtccc

SEQ ID NO: 1990 - DNA, 600 bp, Chicken  19866894088746_3
aaacctgaaggcagacactctggatacagaggagaaaacacaattacatagtctaagtttattattttaagagagtaggctaagcttattgtgcataactaaatactttcctaaagattattgacatcaaagaggcaagtggaacagtgggtttaaccagaattataaacaaggatacacatctttaaacaaacctataaaggtcaattttttaacttcattcatttgaagaatgttaaatcttagctcttgatgtaaaacattggttgtaggcaatttgagacttgtttgatgaggaayaaaaaaaaatgcaggagtacagtggcctgctaaatttccagatttatttataggggtccttaatgtgacacaggatgtgactggttagatttcacacgttgtgacttccatatgtatctcctattaaggcaatcaataatgcatacccacaagccatatactataatctcctgcagcacattcagaactttcctgtcagatacctaatatttccagcagtcattttctgaatgtggaactggtcagaaacattctcgtgaaggcggggaacatgatgactgtgggaaaataattgtccca

SEQ ID NO: 1991 - DNA, 600 bp, Chicken  19866894088750_1
ccaaccttgcagggttgtccagaacatcctgtagagattttgaggccgaatatactttttattactttctcccatatgggcagttaagttgttcctgtaaacttttacaagttaccatcaaatggacatcagccgcaaacaggtgtggtgcaaaggtggtaagcaaactgattttgagcagcatgtagtacggctgggagctgggagccataggcctcaaagagaaaaaaagcttccttctatgggctgtcagtgatctctgtactctgcacaagatgtttctacatagagaggcaacaygacatgaawatcatgatagcatcttgcatcattgggaaacaacagagctgggattctgcttcatttctcttttcacacttaaactttaatttgggcctgaaaatcagtgtagcacaacatgttagagcattgctgacatatacactgtgagaagaactgcagatgacaactatacttaattccgatttttgttttattaaagatgagtgatattttgaccttccctaggctggtcatttgtcttgcaagatggtggaggtatttgaacccctcagttccatcaggcgcttcacttcttag

SEQ ID NO: 1992 - DNA, 600 bp, Chicken  19866894088750_2
cagggttgtccagaacatcctgtagagattttgaggccgaatatactttttattactttctcccatatgggcagttaagttgttcctgtaaacttttacaagttaccatcaaatggacatcagccgcaaacaggtgtggtgcaaaggtggtaagcaaactgattttgagcagcatgtagtacggctgggagctgggagccataggcctcaaagagaaaaaaagcttccttctatgggctgtcagtgatctctgtactctgcacaagatgtttctacatagagaggcaacaygacatgaawatcatgatagcatcttgcatcattgggaaacaacagagctgggattctgcttcatttctcttttcacacttaaactttaatttgggcctgaaaatcagtgtagcacaacatgttagagcattgctgacatatacactgtgagaagaactgcagatgacaactatacttaattccgatttttgttttattaaagatgagtgatattttgaccttccctaggctggtcatttgtcttgcaagatggtggaggtatttgaacccctcagttccatcaggcgcttcacttcttagtagtaaact

SEQ ID NO: 1993 - DNA, 600 bp, Chicken  19866894088752_1
gagcctggtctatgagcctaattctgcagtgggtggttacatcctatcaagcagattggatttcttgaggcctaaagaaatagtgttggttatcttcccttaagttctccctgttccttaatcactatgacatttttagggtattccttttgctttcactgccttctcttgcttcacctctgatcagactctgataagggtgaagggactcctaagggactctgctcagtcccttcacatttttgcagaatgacctcaataaattctcattctttttggggagaaaatgaggaaaaaccscagacaaagtgaaacactgactgttctgctcagcagccctcgtggcatttggttcccaycactgctgtaatactttggcatgtatggatggtgttgtatttatgcctctccatgcacagccttaaacgtagtaaatctaattattctcgagttctcccttcggaggctctacctcagtgaggtaagatcttgaaagatatgagcgaccagtgacctccaagtttcttgttcttyagaataaactctgcttattcataggtttggggggttttctgtgattctttacacaccgtggatatg

SEQ ID NO: 1994 - DNA, 600 bp, Chicken  19866894088752_2
atttcttgaggcctaaagaaatagtgttggttatcttcccttaagttctccctgttccttaatcactatgacatttttagggtattccttttgctttcactgccttctcttgcttcacctctgatcagactctgataagggtgaagggactcctaagggactctgctcagtcccttcacatttttgcagaatgacctcaataaattctcattctttttggggagaaaatgaggaaaaaccscagacaaagtgaaacactgactgttctgctcagcagccctcgtggcatttggttcccaycactgctgtaatactttggcatgtatggatggtgttgtatttatgcctctccatgcacagccttaaacgtagtaaatctaattattctcgagttctcccttcggaggctctacctcagtgaggtaagatcttgaaagatatgagcgaccagtgacctccaagtttcttgttcttyagaataaactctgcttattcataggtttggggggttttctgtgattctttacacaccgtggatatgctcaggtagcagagtaataaaggactactaatcctattacttagtctttaataactcat

SEQ ID NO: 1995 - DNA, 600 bp, Chicken  19866894088752_3
tcacatttttgcagaatgacctcaataaattctcattctttttggggagaaaatgaggaaaaaccscagacaaagtgaaacactgactgttctgctcagcagccctcgtggcatttggttcccaycactgctgtaatactttggcatgtatggatggtgttgtatttatgcctctccatgcacagccttaaacgtagtaaatctaattattctcgagttctcccttcggaggctctacctcagtgaggtaagatcttgaaagatatgagcgaccagtgacctccaagtttcttgttcttyagaataaactctgcttattcataggtttggggggttttctgtgattctttacacaccgtggatatgctcaggtagcagagtaataaaggactactaatcctattacttagtctttaataactcatgaaataaaactactggaaaatcattctttcatggagagaactgtctcttcccttcctttttaggcaataacccatgatatttgcgactgcaaatgtgggaaatcctactcctttttttttactcaatttttgtttcagtgttgatcatatttttacctaaaactaaatttcatca

SEQ ID NO: 1996 - DNA, 600 bp, Chicken  19866894088757_1
aataaatcttaatattgaataaaagcaaaataaaagaagtgctaagctaaaaataagtattgtgtacatttactgcatccctctgatcaaatgataatccataagaggttgaaacataaattggttataggccaagcaatttcttccttcttgattctgttttccctcacagcgcaccaggaagaataaattatatattcctgcatgaaataatcacctgcatctcaaaaagattatcatttctgccctttgtgggattttcgaggaagctgccctgctctatttcaattataaatttcmcattcaatatagaagctggccacagtgaatatatttaccaaactgcatgttccacagttacaagcctgtgataatgctgaatgtagcatgatcattttctccagtcttccctctacacacaccaataacacactgcaatatttccaagttgtgaaaatatacttgtgcaaaagcaagcttagtggggaatagactgttacaaaatgtaaggtgataaaatgtaagggaaggataacttgagccatcacagtaaaaacaaacaaacaaaacaaaacaaaacaaaacaaaaaaaaacagaga

SEQ ID NO: 1997 - DNA, 600 bp, Chicken  19866894088771_1
ctccttcggcttcgttttttctattttttttttatttgtccctttctgattttctaaccaaagccttttttgtgaacctgagtaattgcaaacgctgtatttatatctcttttttgctctgtaaaagcgtatcaccaaaactgctaaagacactaattttgtgtacgatcctttaactacagactttgtgtttagttttagcagtaagaaaaccacactgatttcttgatctgaaaatgtacatatcaccaaacacctcaagccaaggtgaagcaaagtgtgcatttttgcaagcaagcrcagcaaggtaattctgagtggcagctttcagagacaggcattcaagtgtgatasgtaacaccacgatcctaagtcactgaagagcacagtttgccttccaagtgccagatttattaacctttttttaacctaactcttcagtagagtcagtaccatgcacacgcagtggcagaggcagcatgagcccaaatccataagcactggtgctaatgtgtcctcccctgtagcccgtaggcccttctgtgtaaatatgtaccaatttgaagcttgagctcttgaaccgtacacttcatcctaagg

SEQ ID NO: 1998 - DNA, 600 bp, Chicken  19866894088771_2
taaccaaagccttttttgtgaacctgagtaattgcaaacgctgtatttatatctcttttttgctctgtaaaagcgtatcaccaaaactgctaaagacactaattttgtgtacgatcctttaactacagactttgtgtttagttttagcagtaagaaaaccacactgatttcttgatctgaaaatgtacatatcaccaaacacctcaagccaaggtgaagcaaagtgtgcatttttgcaagcaagcrcagcaaggtaattctgagtggcagctttcagagacaggcattcaagtgtgatasgtaacaccacgatcctaagtcactgaagagcacagtttgccttccaagtgccagatttattaacctttttttaacctaactcttcagtagagtcagtaccatgcacacgcagtggcagaggcagcatgagcccaaatccataagcactggtgctaatgtgtcctcccctgtagcccgtaggcccttctgtgtaaatatgtaccaatttgaagcttgagctcttgaaccgtacacttcatcctaagggcagactgaactcaaactagaacacgatgctgactaatattggggttttgtggg

SEQ ID NO: 1999 - DNA, 600 bp, Chicken  19866894088771_3
agcatgagcccaaatccataagcactggtgctaatgtgtcctcccctgtagcccgtaggcccttctgtgtaaatatgtaccaatttgaagcttgagctcttgaaccgtacacttcatcctaagggcagactgaactcaaactagaacacgatgctgactaatattggggttttgtggggagtctgctggggaaactggactatttttcatgattcagtgttcaaactacgttgaaagtgatacccttggcataatctattgaatcagttacaataaaatctgctgagtatgtttccaacrtttgtgatagagaacatttttaataaacttgccgtttcaaaaccaggctgtctgtgcacttctaccattgrtgccytctttctctgccaaaaagaacagtggaagtgaggaaaccttttcaaatctgggggttgatccagaggttacatactagttcctaccaacacagttgacatattatatgtagctacttgggacatatcagtttcagataacacgtgcctgctattctaatacgctcctcccacctacagcaaaagagaacccagtcaaaaagaacaatgcctacacttgccagaa

SEQ ID NO: 2000 - DNA, 600 bp, Chicken  19866894088771_4
aatatgtaccaatttgaagcttgagctcttgaaccgtacacttcatcctaagggcagactgaactcaaactagaacacgatgctgactaatattggggttttgtggggagtctgctggggaaactggactatttttcatgattcagtgttcaaactacgttgaaagtgatacccttggcataatctattgaatcagttacaataaaatctgctgagtatgtttccaacrtttgtgatagagaacatttttaataaacttgccgtttcaaaaccaggctgtctgtgcacttctaccattgrtgccytctttctctgccaaaaagaacagtggaagtgaggaaaccttttcaaatctgggggttgatccagaggttacatactagttcctaccaacacagttgacatattatatgtagctacttgggacatatcagtttcagataacacgtgcctgctattctaatacgctcctcccacctacagcaaaagagaacccagtcaaaaagaacaatgcctacacttgccagaagcaggaatgattcacgcacatgattaatgcttttcctggcatgtgcatattcagctcttctttgaggggtc

SEQ ID NO: 2001 - DNA, 600 bp, Chicken  19866894088771_5
gtaccaatttgaagcttgagctcttgaaccgtacacttcatcctaagggcagactgaactcaaactagaacacgatgctgactaatattggggttttgtggggagtctgctggggaaactggactatttttcatgattcagtgttcaaactacgttgaaagtgatacccttggcataatctattgaatcagttacaataaaatctgctgagtatgtttccaacrtttgtgatagagaacatttttaataaacttgccgtttcaaaaccaggctgtctgtgcacttctaccattgrtgccytctttctctgccaaaaagaacagtggaagtgaggaaaccttttcaaatctgggggttgatccagaggttacatactagttcctaccaacacagttgacatattatatgtagctacttgggacatatcagtttcagataacacgtgcctgctattctaatacgctcctcccacctacagcaaaagagaacccagtcaaaaagaacaatgcctacacttgccagaagcaggaatgattcacgcacatgattaatgcttttcctggcatgtgcatattcagctcttctttgaggggtccttgt

SEQ ID NO: 2002 - DNA, 600 bp, Chicken  19866894088776_1
aaattaggcaattagacatctaagaacaagaaaatgaacctatgaaataatcctcacaggtatttctggaagcaaaattccaaccaaagaattaatgaggtcagatcttctcaataacagcaaaaaggccactaaattgttgggttttttttttgtacaaaatgttattgccgcctgttctgttaggtggatgatgatacaaatatttgattaatctggaaaagcattgacctaacccagtgattagaagtactgacaaaagcaacgtgtgcaaaatataaataacttcatgaaacaagrgagttaaataaaggtgctggataaatggcctctgaaaatagtatcctgaatgcaaataaaaatttcatcacagccggaagagttgcaggttggccccattgttccaccagtttgcctaaagctcttaaaggggtgttttaaatgtagcatcttttctgtgaaattctcaaaaatatgtacttgaactcaggaattatattcatgaggagctgaagttcatatcgtaaacttgcttgacttaagtcggtcaaccagcatttaaaacttggcaaatattcagtaactagtcttcaggtctgt

SEQ ID NO: 2003 - DNA, 600 bp, Chicken  19866894088776_2
ggttggccccattgttccaccagtttgcctaaagctcttaaaggggtgttttaaatgtagcatcttttctgtgaaattctcaaaaatatgtacttgaactcaggaattatattcatgaggagctgaagttcatatcgtaaacttgcttgacttaagtcggtcaaccagcatttaaaacttggcaaatattcagtaactagtcttcaggtctgtacttgaacgcatgattccaaaaccaagagagctttagtggcctctggggaaccttgtattatgctgtataaaaatacatagtgcttrcctactaattccatatggtaattgtcatactgtacatccttctgagtcaccttcattataattcttccacaatcgtacctcataatgaggaacagtatatcactacggatattggtgaaaagcaaattaagagtcaacagagtgaggagacttttagtcaggagaaagactgtctacagacatctttttaagtacatatagtgcatacacactagttaccaagaagacttttcagtggttacaaaaaaattccataattaaagagaggagaagagagagtattttatatagtcttcatag

SEQ ID NO: 2004 - DNA, 599 bp, Chicken  19866894088779_1
  misc_feature (1)..(75): n is any nucleotide
nnnnnnnnnnnnnnnnnnnnnnnnnnnnnnnnnnnnnnnnnnnnnnnnnnnnnnnnnnnnnnnnnnnnnnnnnnntgggtgcgctggggctgagcgcagcccaccttctgccggcacaccccacagcccccggggtgcagatgcgccagcagctggcagggacacacaggggaaccacttgaaagccatggtaggaacgtgctggtaaaccaaggccactcctctgctcctccagagcactgctctgcatgttatttatagacagtgctccgggtgcccacccaaagggagttcaacccrtaaggtgcacgctctttgcctgctctgccttgcagctcccagcagcctcggccagaactgctccagacccacctgggagctggaatgctcacggcacggcctcacarccygcacagtggggctgctgccttgctctggccacctgcacgcagcacaggaacaaggagatgggcttggagagaggcgcggggactcccagcatatcccaaggactgtggggtgaggatgctccagcaacaatgtgtgccccagcaccaatcaggagcaggttgctgaatgtattccacaagcgtgcgggc

SEQ ID NO: 2005 - DNA, 600 bp, Chicken  19866894088779_2
ctgccggcacaccccacagcccccggggtgcagatgcgccagcagctggcagggacacacaggggaaccacttgaaagccatggtaggaacgtgctggtaaaccaaggccactcctctgctcctccagagcactgctctgcatgttatttatagacagtgctccgggtgcccacccaaagggagttcaacccrtaaggtgcacgctctttgcctgctctgccttgcagctcccagcagcctcggccagaactgctccagacccacctgggagctggaatgctcacggcacggcctcacarccygcacagtggggctgctgccttgctctggccacctgcacgcagcacaggaacaaggagatgggcttggagagaggcgcggggactcccagcatatcccaaggactgtggggtgaggatgctccagcaacaatgtgtgccccagcaccaatcaggagcaggttgctgaatgtattccacaagcgtgcgggcagtggggtggcacggggctcccacagctctcacctcacgctgtgcgtgtcccactgacaccagtgacgggaatagagccctctggaccgtctccccggcacccgcaca

SEQ ID NO: 2006 - DNA, 600 bp, Chicken  19866894088779_3
ccggcacaccccacagcccccggggtgcagatgcgccagcagctggcagggacacacaggggaaccacttgaaagccatggtaggaacgtgctggtaaaccaaggccactcctctgctcctccagagcactgctctgcatgttatttatagacagtgctccgggtgcccacccaaagggagttcaacccrtaaggtgcacgctctttgcctgctctgccttgcagctcccagcagcctcggccagaactgctccagacccacctgggagctggaatgctcacggcacggcctcacarccygcacagtggggctgctgccttgctctggccacctgcacgcagcacaggaacaaggagatgggcttggagagaggcgcggggactcccagcatatcccaaggactgtggggtgaggatgctccagcaacaatgtgtgccccagcaccaatcaggagcaggttgctgaatgtattccacaagcgtgcgggcagtggggtggcacggggctcccacagctctcacctcacgctgtgcgtgtcccactgacaccagtgacgggaatagagccctctggaccgtctccccggcacccgcacatcc

SEQ ID NO: 2007 - DNA, 600 bp, Chicken  19866894088783_1
acagaaaagaaacttctacaaaatagaatgaacctgcatgactcccttggcaaatacaaagcagaatagcatctttataaagaggatagaaagatcagcacaaagacgacaaaaagcatacaagatgcactctcaacaaaatgtggatactgcacaaataatcatttaagaatacagacacttcccctgcatcaacagctccagaagaatcacagcagggaagtgtttgctaatattgcagcaggtgatatctctttcattaaatatttctgtactagtttttattttcttaaaccgcamagaatgtttcaattattgatagcaaaaaatgattttactttctaagaactttagacaactgaaactggagataaaattctaagaattctaagtttatcatctttattctcaatatatttccttacaactttgtcatactacaaatatcatactgtttgggaaagtatagttatattccaaacatctgcagttccaaaaggcagagcagccacatctcattcatttcatttcagcctgctaacggaacgtagacaaactctagaacttaggacttaacttcttctgccttcaggaccacac

SEQ ID NO: 2008 - DNA, 599 bp, Chicken  19866894088792_1
  misc_feature (1)..(128): n is any nucleotide
nnnnnnnnnnnnnnnnnnnnnnnnnnnnnnnnnnnnnnnnnnnnnnnnnnnnnnnnnnnnnnnnnnnnnnnnnnnnnnnnnnnnnnnnnnnnnnnnnnnnnnnnnnnnnnnnnnnnnnnnnnnnnnnncttccccaggtcttcctcatgatgtttgtggtttactttgtggtgtctgagtcactttccatcaagaaagaaggcagggcctacttcaccctgtggggtaactatggccagtgggtcttcatcctcctcaccacctgcacagtggtggtgcacctcagccaagccaccctgrctgaccagcaatggctcaagtacctcaacaaccgcaaggtcttcaccaacttctaccaggtggcctttctcaacacggtcttcagcaccttggctgcctccctcctcttcctcctgattgtgcaggtatggagagggctgggtggatgcagggtatggtcggagatgtgtgctctgttcctgtgccaggttgtcatccctgtatagtccagaagtaaaagcttgcacacagctggttctgctgtgccaggcaatgttaaatgcaaagcagctgctgycacgttctcctacaaccatagc

SEQ ID NO: 2009 - DNA, 600 bp, Chicken  19866894088792_2
gcacctcagccaagccaccctgrctgaccagcaatggctcaagtacctcaacaaccgcaaggtcttcaccaacttctaccaggtggcctttctcaacacggtcttcagcaccttggctgcctccctcctcttcctcctgattgtgcaggtatggagagggctgggtggatgcagggtatggtcggagatgtgtgctctgttcctgtgccaggttgtcatccctgtatagtccagaagtaaaagcttgcacacagctggttctgctgtgccaggcaatgttaaatgcaaagcagctgctgycacgttctcctacaaccatagcaagacagaggtgctggacagtgttgccacacacccgtgtgctcctctgctgcagcattctkagtctctaaagcctctcagcactcagttcccttggagaattgtggctgattggatgattttgtctgcaaggagcccttggactagaatgtcctctgtgctgccagagtttgcatttctcagacacgtttgaaagactctcaagaaccttaagagaaatgtgtaaaaggagggcttagacggaggtgtgggatttgaaggcaggacactcccctgtcc

SEQ ID NO: 2010 - DNA, 600 bp, Chicken  19866894088792_3
tggcctttctcaacacggtcttcagcaccttggctgcctccctcctcttcctcctgattgtgcaggtatggagagggctgggtggatgcagggtatggtcggagatgtgtgctctgttcctgtgccaggttgtcatccctgtatagtccagaagtaaaagcttgcacacagctggttctgctgtgccaggcaatgttaaatgcaaagcagctgctgycacgttctcctacaaccatagcaagacagaggtgctggacagtgttgccacacacccgtgtgctcctctgctgcagcattctkagtctctaaagcctctcagcactcagttcccttggagaattgtggctgattggatgattttgtctgcaaggagcccttggactagaatgtcctctgtgctgccagagtttgcatttctcagacacgtttgaaagactctcaagaaccttaagagaaatgtgtaaaaggagggcttagacggaggtgtgggatttgaaggcaggacactcccctgtcctgagctcttgggctctggtttagcgcttgtacaggacttaaggtgtgctgccttcccattggaggtctgcaggtgcagtctga

SEQ ID NO: 2011 - DNA, 600 bp, Chicken  19866894088793_1
tccaaagcagttattgcagagttacccctaaaatagctcaatacagggcatgaaattttaataattgataaccttaatgggagttaccttcttaaatacaagcttagttatcaatttaagtatgtaaatttagtgctttgtgtcagaagcacctgcgttttagttctgccatctttatggaacttgtgaatcatactgaaatctttaggtggtgtgtcagtgaagaatgttattacttctagcacttaacacattaccttttgtcatttttatttactgggaatactgcagagctacacrtcctccttttcagccttctagaacagggagacttgttggagagtatatgcggttttggttatttatattgtttttcacaaagacaagttgtattaagaggcttattgcactgtccrtatgtaaagatgatctccaggctccaacattgaatggcttgactttgtgctggaagtgcaaggtgtattcagatagactgcacctacttttctacttacatacaaaacacatcttgatatctctgtgaggatgaaaatgaagtgtttcgactctgcaaaacaaagtaaataggacagaaattat

SEQ ID NO: 2012 - DNA, 600 bp, Chicken  19866894088793_2
taagtatgtaaatttagtgctttgtgtcagaagcacctgcgttttagttctgccatctttatggaacttgtgaatcatactgaaatctttaggtggtgtgtcagtgaagaatgttattacttctagcacttaacacattaccttttgtcatttttatttactgggaatactgcagagctacacrtcctccttttcagccttctagaacagggagacttgttggagagtatatgcggttttggttatttatattgtttttcacaaagacaagttgtattaagaggcttattgcactgtccrtatgtaaagatgatctccaggctccaacattgaatggcttgactttgtgctggaagtgcaaggtgtattcagatagactgcacctacttttctacttacatacaaaacacatcttgatatctctgtgaggatgaaaatgaagtgtttcgactctgcaaaacaaagtaaataggacagaaattattgaaatccatagtgtttgggaatatcttgcaataagctatgggagatgttcacctgttgtgaaagtacatagatttttttgcttggaaatgcctgaaggagagccatcagtgatgg

SEQ ID NO: 2013 - DNA, 599 bp, Chicken  19866894088796_1
  misc_feature (1)..(16): n is any nucleotide
nnnnnnnnnnnnnnnnattaatcggaaagaaaaaaaatcagaacaccaatccatgacttattagtaagtttaagcatactacttaagagtctacacccaaaggataagttttaaataataggttgtatgaacagaaggaaatcagtgcaaactcttccactttctcaaaggacttcaaccacagccattcgaactctcaatccagcactgcctttgtttacccaggaatgccaagggaggctgtagagcaaaagcagcagctcctccgcagatcaacaaagccatgccatggcctaagckgtcacaacttccagggcgtgcatcagtcccatcgcatcaatgtaaggcatcactgacaaatcttgtatactcrtacatacatgtgaaggaatgcaatcaaagccagagttaaaaatagatggttctgaagtatttgaatgactccggtgcctcaagacamcacagwcagacctacacgttccccatcactctgagaacactgaaccttcttcacactgttttttaaatggtgaattctcggaaaggagccaaataaatacgagcgtttgcgactcagaatcgattgtttttattatcac

SEQ ID NO: 2014 - DNA, 600 bp, Chicken  19866894088796_2
gcatactacttaagagtctacacccaaaggataagttttaaataataggttgtatgaacagaaggaaatcagtgcaaactcttccactttctcaaaggacttcaaccacagccattcgaactctcaatccagcactgcctttgtttacccaggaatgccaagggaggctgtagagcaaaagcagcagctcctccgcagatcaacaaagccatgccatggcctaagckgtcacaacttccagggcgtgcatcagtcccatcgcatcaatgtaaggcatcactgacaaatcttgtatactcrtacatacatgtgaaggaatgcaatcaaagccagagttaaaaatagatggttctgaagtatttgaatgactccggtgcctcaagacamcacagwcagacctacacgttccccatcactctgagaacactgaaccttcttcacactgttttttaaatggtgaattctcggaaaggagccaaataaatacgagcgtttgcgactcagaatcgattgtttttattatcaccttaatacagacaccatcacayccgtaacaacargtcggtaagcagttactcaaatcgagtacttcacaagaag

SEQ ID NO: 2015 - DNA, 600 bp, Chicken  19866894088796_3
tttctcaaaggacttcaaccacagccattcgaactctcaatccagcactgcctttgtttacccaggaatgccaagggaggctgtagagcaaaagcagcagctcctccgcagatcaacaaagccatgccatggcctaagckgtcacaacttccagggcgtgcatcagtcccatcgcatcaatgtaaggcatcactgacaaatcttgtatactcrtacatacatgtgaaggaatgcaatcaaagccagagttaaaaatagatggttctgaagtatttgaatgactccggtgcctcaagacamcacagwcagacctacacgttccccatcactctgagaacactgaaccttcttcacactgttttttaaatggtgaattctcggaaaggagccaaataaatacgagcgtttgcgactcagaatcgattgtttttattatcaccttaatacagacaccatcacayccgtaacaacargtcggtaagcagttactcaaatcgagtacttcacaagaaggaaaatgaaggcttattgacctttattgcgatacctgcatcgtaacaacccgtttcttccctcaggtctgctctggagacgcgctcg

SEQ ID NO: 2016 - DNA, 600 bp, Chicken  19866894088796_4
aaaggacttcaaccacagccattcgaactctcaatccagcactgcctttgtttacccaggaatgccaagggaggctgtagagcaaaagcagcagctcctccgcagatcaacaaagccatgccatggcctaagckgtcacaacttccagggcgtgcatcagtcccatcgcatcaatgtaaggcatcactgacaaatcttgtatactcrtacatacatgtgaaggaatgcaatcaaagccagagttaaaaatagatggttctgaagtatttgaatgactccggtgcctcaagacamcacagwcagacctacacgttccccatcactctgagaacactgaaccttcttcacactgttttttaaatggtgaattctcggaaaggagccaaataaatacgagcgtttgcgactcagaatcgattgtttttattatcaccttaatacagacaccatcacayccgtaacaacargtcggtaagcagttactcaaatcgagtacttcacaagaaggaaaatgaaggcttattgacctttattgcgatacctgcatcgtaacaacccgtttcttccctcaggtctgctctggagacgcgctcgccgtct

SEQ ID NO: 2017 - DNA, 600 bp, Chicken  19866894088796_5
atcagtcccatcgcatcaatgtaaggcatcactgacaaatcttgtatactcrtacatacatgtgaaggaatgcaatcaaagccagagttaaaaatagatggttctgaagtatttgaatgactccggtgcctcaagacamcacagwcagacctacacgttccccatcactctgagaacactgaaccttcttcacactgttttttaaatggtgaattctcggaaaggagccaaataaatacgagcgtttgcgactcagaatcgattgtttttattatcaccttaatacagacaccatcacayccgtaacaacargtcggtaagcagttactcaaatcgagtacttcacaagaaggaaaatgaaggcttattgacctttattgcgatacctgcatcgtaacaacccgtttcttccctcaggtctgctctggagacgcgctcgccgtctccttgctgagctcctaccccacgtccttcctctcctttatcccgactgcttcgctctctctgaccccgctccggtacctctcagccccgctgcaycccccgcagtgcagccccgtgctcggaaagccgcgccgtgcctcccacccgccagcgccc

SEQ ID NO: 2018 - DNA, 600 bp, Chicken  19866894088796_6
gcatcaatgtaaggcatcactgacaaatcttgtatactcrtacatacatgtgaaggaatgcaatcaaagccagagttaaaaatagatggttctgaagtatttgaatgactccggtgcctcaagacamcacagwcagacctacacgttccccatcactctgagaacactgaaccttcttcacactgttttttaaatggtgaattctcggaaaggagccaaataaatacgagcgtttgcgactcagaatcgattgtttttattatcaccttaatacagacaccatcacayccgtaacaacargtcggtaagcagttactcaaatcgagtacttcacaagaaggaaaatgaaggcttattgacctttattgcgatacctgcatcgtaacaacccgtttcttccctcaggtctgctctggagacgcgctcgccgtctccttgctgagctcctaccccacgtccttcctctcctttatcccgactgcttcgctctctctgaccccgctccggtacctctcagccccgctgcaycccccgcagtgcagccccgtgctcggaaagccgcgccgtgcctcccacccgccagcgccccgcgctcccccg

SEQ ID NO: 2019 - DNA, 600 bp, Chicken  19866894088796_7
agcgtttgcgactcagaatcgattgtttttattatcaccttaatacagacaccatcacayccgtaacaacargtcggtaagcagttactcaaatcgagtacttcacaagaaggaaaatgaaggcttattgacctttattgcgatacctgcatcgtaacaacccgtttcttccctcaggtctgctctggagacgcgctcgccgtctccttgctgagctcctaccccacgtccttcctctcctttatcccgactgcttcgctctctctgaccccgctccggtacctctcagccccgctgcaycccccgcagtgcagccccgtgctcggaaagccgcgccgtgcctcccacccgccagcgccccgcgctcccccgcctcacagccacgcttcaaagcgcgccgcgagtccgcacctcggcagcgcaggaagaagccaccctcggcaacgccgcggcgttccgctcggggctcttttcttcccctccccgcaccacgacgcagacgcgccgtgccaagacggcgacccccggggctcctccgccggtccccgcttgactttcgacacagttcggggcgggccccgagcgcggggccgcggggct

SEQ ID NO: 2020 - DNA, 526 bp, Chicken  19866894088796_8
gcagtgcagccccgtgctcggaaagccgcgccgtgcctcccacccgccagcgccccgcgctcccccgcctcacagccacgcttcaaagcgcgccgcgagtccgcacctcggcagcgcaggaagaagccaccctcggcaacgccgcggcgttccgctcggggctcttttcttcccctccccgcaccacgacgcagacgcgccgtgccaagacggcgacccccggggctcctccgccggtccccgcttgactttcgacacagttcggggcgggccccgagcgcggggccgcggggctccccytgctcgggcagcgctaccgcctgctcgcctcggcccgggctgcgctggaagccggccgcggggcagccagctcgacgctttttttgttccccctccactccctcctctttaaaaggcggccccggccccatccccgacgctgtcagcgaggccgactgccccggctctccccctccccgcgcacacggagcgcggcgcgaggccccgggggctccttcagccgccc

SEQ ID NO: 2021 - DNA, 600 bp, Chicken  19866894088798_1
ccagatctggacttattcttgcctggatatccaacacaaaaaccatcttgaagacagcccctggactacatggccctttgatccagcccagtgcaactgctcctaaggccttctgaaggtataagttaaagcacatggtgacctctctccaagaaagtcttgtaaatcttgtcaggtagctgctggcatctgcggttgtctaacacctttaaaagtctgactcagggatactttcccactagcaaacagggaagataagcatgatgagctagaatgtagtcaaaacacatgaagttcacmaaccagaagactgttcctcatcaagcagttgtgtgctgtagtcacaaatgttatgtcaaaggcatttgaacttaaaaacaggttttttggtgggttatttagatggcaattgaatacatcacaatmtagtaggactgttttataaagtacaacattaccatttgctccttaggtaggtccttagtgatggtacatttgcatttatccagctaaataaggcagctgctttttgagcacrtaagagcttgctctcttgctccaactgtaatttctattatcatcatctgtctggaaatcctt

SEQ ID NO: 2022 - DNA, 600 bp, Chicken  19866894088798_2
taaagcacatggtgacctctctccaagaaagtcttgtaaatcttgtcaggtagctgctggcatctgcggttgtctaacacctttaaaagtctgactcagggatactttcccactagcaaacagggaagataagcatgatgagctagaatgtagtcaaaacacatgaagttcacmaaccagaagactgttcctcatcaagcagttgtgtgctgtagtcacaaatgttatgtcaaaggcatttgaacttaaaaacaggttttttggtgggttatttagatggcaattgaatacatcacaatmtagtaggactgttttataaagtacaacattaccatttgctccttaggtaggtccttagtgatggtacatttgcatttatccagctaaataaggcagctgctttttgagcacrtaagagcttgctctcttgctccaactgtaatttctattatcatcatctgtctggaaatccttattttaatacatgcaaagaactcaacatgttttatctcccaagacaaaatatatctcttggcatgattcttacatagttcattagarttatgctgtgaagagaacagttgtcctcattttatgtag

SEQ ID NO: 2023 - DNA, 600 bp, Chicken  19866894088798_3
ctagcaaacagggaagataagcatgatgagctagaatgtagtcaaaacacatgaagttcacmaaccagaagactgttcctcatcaagcagttgtgtgctgtagtcacaaatgttatgtcaaaggcatttgaacttaaaaacaggttttttggtgggttatttagatggcaattgaatacatcacaatmtagtaggactgttttataaagtacaacattaccatttgctccttaggtaggtccttagtgatggtacatttgcatttatccagctaaataaggcagctgctttttgagcacrtaagagcttgctctcttgctccaactgtaatttctattatcatcatctgtctggaaatccttattttaatacatgcaaagaactcaacatgttttatctcccaagacaaaatatatctcttggcatgattcttacatagttcattagarttatgctgtgaagagaacagttgtcctcattttatgtaggacagagctgctctcaaggcatcagccaagacagtgcagtgggaaacttgagctacctaacaggaagttcagaagtgacactgtattgatgtggttacacggtaaggccaga

SEQ ID NO: 2024 - DNA, 600 bp, Chicken  19866894088798_4
tggtgggttatttagatggcaattgaatacatcacaatmtagtaggactgttttataaagtacaacattaccatttgctccttaggtaggtccttagtgatggtacatttgcatttatccagctaaataaggcagctgctttttgagcacrtaagagcttgctctcttgctccaactgtaatttctattatcatcatctgtctggaaatccttattttaatacatgcaaagaactcaacatgttttatctcccaagacaaaatatatctcttggcatgattcttacatagttcattagarttatgctgtgaagagaacagttgtcctcattttatgtaggacagagctgctctcaaggcatcagccaagacagtgcagtgggaaacttgagctacctaacaggaagttcagaagtgacactgtattgatgtggttacacggtaaggccagattaatgaacacccaggagttcaactttgtaggacaccatccctgcaaagcacaaaccagcataaaggttcccatacgactttctacactgcaggaggaaacaggcagagccaagtcatgctggagtgggcagtgtgaatgcagacacca

SEQ ID NO: 2025 - DNA, 599 bp, Chicken  19866894088801_1
  misc_feature (1)..(73): n is any nucleotide
nnnnnnnnnnnnnnnnnnnnnnnnnnnnnnnnnnnnnnnnnnnnnnnnnnnnnnnnnnnnnnnnnnnnnnnnntgcctcctcctgtgagaagactttactaagcactcagtgctaggagtgctgtttcagattggaatccaaacctgctgcactgatggacaccgttgccttagcccatgctgccatcttccggcagcctgaggccaccacagcacagctgtccccatcggggtggcatgctgcagggacagccacaggttggacacccaatggttggccaacgtttggacatccctggygtccagtcctgccatgccaatgcatccaaagcagcaacgactttgcaaagcagctccatcctcccttaccctcgaccctaccatgtacttgctggtatcttgtagagctgtgtaccccctcccagcctaccacattcccagggaaccactgccatcagtatcaaggagctatggggagaaaaacaaatacacaaagcacagccaagcctccagcactgctgcaacccccagattgtcctaccattgtgatccccctaccatcgtgatccccaggctccagatatcagatttgacgctgt

SEQ ID NO: 2026 - DNA, 484 bp, Chicken  19866894088801_2
ccaagcctccagcactgctgcaacccccagattgtcctaccattgtgatccccctaccatcgtgatccccaggctccagatatcagatttgacgctgtaccccttctggttcaactccgggttaattctttcaggctgcaaagagatgtaaagcagttaagaaagagggatggatgcagtgtgatgcctgcacccagggctcgctgacctcagaggggtctttcagagatgtcaggccagggccacgtagcccatgctgcagcttgctcccttggccatcctggcaccagatgcagcccracatccttgttggtaggggcagcagtgaaataggtcaccagaaacacatggtacctgcaccaggggatgggggtgatgcagctgacgcagcacatctggcacaaaaaggcctcagttcctcaaggactgtgctcactctgtgcatccactccacagaaagcaagtctaaaaggaatgttttcct

SEQ ID NO: 2027 - DNA, 484 bp, Chicken  19866894088807_1
ctgacagacacaaaaggaggttgtggtgaggtaggggttggccttcattttccctaagtagctagggatagaatgagaggggatggctttaagttgcaccaggggaggttcaagttgggtattaggaaaaatgccttctcagaaagagtggtgaggcaatggcacaggctgcacagggagtggtggggtcaccgtttctggaggtgtttaagaaaagggcagatgtgaatggaaggcaggcattccctgatgtttttggtgggttactcccaggcactacaagacctgatgtccaactcwgagtctagctctgagtccatgatccacttcagctttggtgggaattttagaagcckgaataaacagttgttttgtccttccccaaaccccagcgtgttggatacagtgatctgcagacatctgtgacaagctgctgaacaattacacaacatctgggctttccccaccctacatatagagacaa

SEQ ID NO: 2028 - DNA, 428 bp, Chicken  19866894088807_2
agtagctagggatagaatgagaggggatggctttaagttgcaccaggggaggttcaagttgggtattaggaaaaatgccttctcagaaagagtggtgaggcaatggcacaggctgcacagggagtggtggggtcaccgtttctggaggtgtttaagaaaagggcagatgtgaatggaaggcaggcattccctgatgtttttggtgggttactcccaggcactacaagacctgatgtccaactcwgagtctagctctgagtccatgatccacttcagctttggtgggaattttagaagcckgaataaacagttgttttgtccttccccaaaccccagcgtgttggatacagtgatctgcagacatctgtgacaagctgctgaacaattacacaacatctgggctttccccaccctacatatagagacaa

SEQ ID NO: 2029 - DNA, 600 bp, Chicken  19866894088811_1
ggggaggagaacccacagaactcaccttctcctcaatgacacatctgtccttgagccactggttcagtatttcatccttaaatgcaccagtgttgccaactgtactctgctgaattttggcaatcgttgtagcatctttcacaatttcaatcattcctagcagaaaacaaaggataaactagaatttaaattaaatttatatcaaagcatataaaatacaccaaataatattttaaactgtgctttttgaaccttttgcataatttcaatagcttgtgagcatccatttattttacaagmaacaatggctcctgcccactcycagctgaagccagtcagagcccttaacaacactagtgtgtaaatacaacctctgaaaaccaccaccgaattgaatagtgttgcactttggtttgtgtttgttgggttgttgtttgtctctcaggagtgargtttctcctgcctgtgctcacaaatctccctctgctggtgaacagcttcttgactccagggaagcagagctgttacaggmgacatcttctgcttctctttgcattttcaagttctcccagcatagctgtgtagtttagcactgtgaaa

SEQ ID NO: 2030 - DNA, 600 bp, Chicken  19866894088811_2
caccttctcctcaatgacacatctgtccttgagccactggttcagtatttcatccttaaatgcaccagtgttgccaactgtactctgctgaattttggcaatcgttgtagcatctttcacaatttcaatcattcctagcagaaaacaaaggataaactagaatttaaattaaatttatatcaaagcatataaaatacaccaaataatattttaaactgtgctttttgaaccttttgcataatttcaatagcttgtgagcatccatttattttacaagmaacaatggctcctgcccactcycagctgaagccagtcagagcccttaacaacactagtgtgtaaatacaacctctgaaaaccaccaccgaattgaatagtgttgcactttggtttgtgtttgttgggttgttgtttgtctctcaggagtgargtttctcctgcctgtgctcacaaatctccctctgctggtgaacagcttcttgactccagggaagcagagctgttacaggmgacatcttctgcttctctttgcattttcaagttctcccagcatagctgtgtagtttagcactgtgaaaagtctacagattttagagcgga

SEQ ID NO: 2031 - DNA, 571 bp, Chicken  19866894088811_3
attcctagcagaaaacaaaggataaactagaatttaaattaaatttatatcaaagcatataaaatacaccaaataatattttaaactgtgctttttgaaccttttgcataatttcaatagcttgtgagcatccatttattttacaagmaacaatggctcctgcccactcycagctgaagccagtcagagcccttaacaacactagtgtgtaaatacaacctctgaaaaccaccaccgaattgaatagtgttgcactttggtttgtgtttgttgggttgttgtttgtctctcaggagtgargtttctcctgcctgtgctcacaaatctccctctgctggtgaacagcttcttgactccagggaagcagagctgttacaggmgacatcttctgcttctctttgcattttcaagttctcccagcatagctgtgtagtttagcactgtgaaaagtctacagattttagagcggatgctaatgacaaccgtttactgatcattctctgctgtagagctaaaacagcagtacaaaacctagacagaatgttgtacagcttattctgcctaagcaaat

SEQ ID NO: 2032 - DNA, 491 bp, Chicken  19866894088811_4
ttaaactgtgctttttgaaccttttgcataatttcaatagcttgtgagcatccatttattttacaagmaacaatggctcctgcccactcycagctgaagccagtcagagcccttaacaacactagtgtgtaaatacaacctctgaaaaccaccaccgaattgaatagtgttgcactttggtttgtgtttgttgggttgttgtttgtctctcaggagtgargtttctcctgcctgtgctcacaaatctccctctgctggtgaacagcttcttgactccagggaagcagagctgttacaggmgacatcttctgcttctctttgcattttcaagttctcccagcatagctgtgtagtttagcactgtgaaaagtctacagattttagagcggatgctaatgacaaccgtttactgatcattctctgctgtagagctaaaacagcagtacaaaacctagacagaatgttgtacagcttattctgcctaagcaaat

SEQ ID NO: 2033 - DNA, 600 bp, Chicken  19866894088815_1
ggagcatggtttagtgctgggccttggtaggtcgggttgatggttggacttggtggtctcgaaggtctttcacaacctaagtgattctgtgactgttgtgttttgtctgcctgtagtcctctttgtgtagctgaccctcgttcatcagaatcctcctgggagcagttaagtgtattcccaagcaggaaggaagtgctctgatgtttataccatgaaacttgaagaaatcttagttttagtaacttctgttacaactttgttctccccattcccagcagtgctgttctccctcctggtgtkgtggtcatcctgaaggtgtcccatgagggatcctgggggaatccttccgctgtgaaatggctcttgcacatttctagcagtgaaagatttaacagagtctttcccagttatttccctggaagggcacatagcatatgttttccacaaattgaaaatgaatacttgttttaaatagtagtaatgcaacaattataaaactaatagttttacagttgtcttgcaaaatagtgacttcacagtgagctttgcatgctttggtggttacttggaatacttgttaaccctggatgtttcttgcag

SEQ ID NO: 2034 - DNA, 599 bp, Chicken  19866894088819_1
  misc_feature (1)..(87): n is any nucleotide
nnnnnnnnnnnnnnnnnnnnnnnnnnnnnnnnnnnnnnnnnnnnnnnnnnnnnnnnnnnnnnnnnnnnnnnnnnnnnnnnnnnnnnngttttcaaagctccaggctaaattttatttgtcttttcttccaggtaaatcccaatataaaaggtcaagacaggggtttgctggtttagcaatgtagtggctcgaggctggaatataattcctgttctatgtattctgtgagtttgattcatcttcgtgctactccattaagtctgaattccattaaataacacagttgtgatcttggcccayttgtttggcttaaggagttactactacrtaaagagtgcagagaggaaatagagtccttatttgagatttacagcagtagcaatttaaagcaaaatttagtttaaaaaatctactggtcctcgctgcttttcatcaaggtgcctgcagctagtgcagctatttgacattctcaggctgtaaagccccagtaatgctaatagattttgcagttgtgctctttgcattactcttccagctggattctccaagcagctccaagtatccgtaggtgctgtgttggatttagccttcttttaact

SEQ ID NO: 2035 - DNA, 599 bp, Chicken  19866894088819_2
  misc_feature (1)..(59): n is any nucleotide
nnnnnnnnnnnnnnnnnnnnnnnnnnnnnnnnnnnnnnnnnnnnnnnnnnnnnnnnnnngttttcaaagctccaggctaaattttatttgtcttttcttccaggtaaatcccaatataaaaggtcaagacaggggtttgctggtttagcaatgtagtggctcgaggctggaatataattcctgttctatgtattctgtgagtttgattcatcttcgtgctactccattaagtctgaattccattaaataacacagttgtgatcttggcccayttgtttggcttaaggagttactactacrtaaagagtgcagagaggaaatagagtccttatttgagatttacagcagtagcaatttaaagcaaaatttagtttaaaaaatctactggtcctcgctgcttttcatcaaggtgcctgcagctagtgcagctatttgacattctcaggctgtaaagccccagtaatgctaatagattttgcagttgtgctctttgcattactcttccagctggattctccaagcagctccaagtatccgtaggtgctgtgttggatttagccttcttttaacttgctgtggcatattggtgtcagtgtggg

SEQ ID NO: 2036 - DNA, 600 bp, Chicken  19866894088819_3
aaaatctactggtcctcgctgcttttcatcaaggtgcctgcagctagtgcagctatttgacattctcaggctgtaaagccccagtaatgctaatagattttgcagttgtgctctttgcattactcttccagctggattctccaagcagctccaagtatccgtaggtgctgtgttggatttagccttcttttaacttgctgtggcatattggtgtcagtgtgggattgcaggctggttgttctgagacatattctcttgccttcctaagagatgtgcttacgaagggcttgcacacctggrtctctgtatagtcaagctcctattctatagccagccatkaaatctgggagcacagtcctgtcracagaaaagtgtccaaatcacaactgctaattaagagttcccataattttgggaagcgtgaattgtcctgcaaactcaagtatatggccgtgaaaatactcatgcaaaggcttacagtattgcaacgatagaaaaataatgaggaaaagcaagtttatttggaggcccagactcagtttacaggtaatgttgttgtctccaatagctctgaagctgaaactcagaggagttcaggaa

SEQ ID NO: 2037 - DNA, 600 bp, Chicken  19866894088819_4
gcagctagtgcagctatttgacattctcaggctgtaaagccccagtaatgctaatagattttgcagttgtgctctttgcattactcttccagctggattctccaagcagctccaagtatccgtaggtgctgtgttggatttagccttcttttaacttgctgtggcatattggtgtcagtgtgggattgcaggctggttgttctgagacatattctcttgccttcctaagagatgtgcttacgaagggcttgcacacctggrtctctgtatagtcaagctcctattctatagccagccatkaaatctgggagcacagtcctgtcracagaaaagtgtccaaatcacaactgctaattaagagttcccataattttgggaagcgtgaattgtcctgcaaactcaagtatatggccgtgaaaatactcatgcaaaggcttacagtattgcaacgatagaaaaataatgaggaaaagcaagtttatttggaggcccagactcagtttacaggtaatgttgttgtctccaatagctctgaagctgaaactcagaggagttcaggaagcacatcgtggtggtaactggcttctgcagtgctcagat

SEQ ID NO: 2038 - DNA, 600 bp, Chicken  19866894088819_5
tctcaggctgtaaagccccagtaatgctaatagattttgcagttgtgctctttgcattactcttccagctggattctccaagcagctccaagtatccgtaggtgctgtgttggatttagccttcttttaacttgctgtggcatattggtgtcagtgtgggattgcaggctggttgttctgagacatattctcttgccttcctaagagatgtgcttacgaagggcttgcacacctggrtctctgtatagtcaagctcctattctatagccagccatkaaatctgggagcacagtcctgtcracagaaaagtgtccaaatcacaactgctaattaagagttcccataattttgggaagcgtgaattgtcctgcaaactcaagtatatggccgtgaaaatactcatgcaaaggcttacagtattgcaacgatagaaaaataatgaggaaaagcaagtttatttggaggcccagactcagtttacaggtaatgttgttgtctccaatagctctgaagctgaaactcagaggagttcaggaagcacatcgtggtggtaactggcttctgcagtgctcagatgggacagatgtggtacaggttttc

SEQ ID NO: 2039 - DNA, 600 bp, Chicken  19866894088821_1
tgactcccagtaggaaaaacgctcccagggcatttctgcagccctatcccgtgccgtgagccgggctcagccctgggacgcagcccctccccacacgtcccggccccacgcggggcggaggagaagcagccggtgagagccctgggccaaaagtctgtttgctgccggctcacacccacaagtcactgccgacagacggaagcggggcatggctgcgtgacacacgctctgcttctgctcccagtggctcccagtggctcccagtgctcctgggctgcgggaatggggaacatcgcgtgygtcccgcaggcgcccggggggttccggcactccttcaggaggaaaccttcaytgaagaaagagtgagtaacgagtgctttcgttgggaacggggtcggtgctgagctctgcttgggaatcccaaagggtgttccagcagcaatgggggggttgtggggttttgagcggtgccacggcagctgcaggcgcctggggagggatcgtagcgctgtgccggagtgctgcagcctcactgccccgaggaacagagtgatttatttcactggggttgggaaatatcacctccccaccgtggggcac

SEQ ID NO: 2040 - DNA, 600 bp, Chicken  19866894088821_2
gccgtgagccgggctcagccctgggacgcagcccctccccacacgtcccggccccacgcggggcggaggagaagcagccggtgagagccctgggccaaaagtctgtttgctgccggctcacacccacaagtcactgccgacagacggaagcggggcatggctgcgtgacacacgctctgcttctgctcccagtggctcccagtggctcccagtgctcctgggctgcgggaatggggaacatcgcgtgygtcccgcaggcgcccggggggttccggcactccttcaggaggaaaccttcaytgaagaaagagtgagtaacgagtgctttcgttgggaacggggtcggtgctgagctctgcttgggaatcccaaagggtgttccagcagcaatgggggggttgtggggttttgagcggtgccacggcagctgcaggcgcctggggagggatcgtagcgctgtgccggagtgctgcagcctcactgccccgaggaacagagtgatttatttcactggggttgggaaatatcacctccccaccgtggggcacagagctgagtgctcagcattcctttgtttggtatttcatttgtgctgcccta

SEQ ID NO: 2041 - DNA, 600 bp, Chicken  19866894088823_1
tatatcttgagttaagtattgaaacctttgtattttaagcctgttcatgggccaaaagaggcagttaaaactcattactgatatactgtatgacagtttagagttttaaaagagatgactgaactcagatgagggaactacttaaattgatccagatatcaacaaaataaccaatataaagacatcagtgagtcatatcagagaagactgaagctgttcatgaaacatgaagactaaaattcgggagatttctgcaaatacaagaatgaagaaggaagcctgctgccagtgcagaaacargatgctaggaaaagttatgaaacttcactgaggctattcaagacaccagcatataggcagccacttcagcataagaaaatcagagcttttgggaagtaaagacatgaactggggaatctactcaaaaccttctaatcctaaagatctagaatggcttctgttggctaagycatacattttcacttgatgtccctgtttgttacaatccagttttcctcaattacatgaaacagtcctacaagtctgaaaacagcctaataacgtgcaaacaacgtgtctgtgacagtaaggctagtcaaa

SEQ ID NO: 2042 - DNA, 600 bp, Chicken  19866894088823_2
ccaatataaagacatcagtgagtcatatcagagaagactgaagctgttcatgaaacatgaagactaaaattcgggagatttctgcaaatacaagaatgaagaaggaagcctgctgccagtgcagaaacargatgctaggaaaagttatgaaacttcactgaggctattcaagacaccagcatataggcagccacttcagcataagaaaatcagagcttttgggaagtaaagacatgaactggggaatctactcaaaaccttctaatcctaaagatctagaatggcttctgttggctaagycatacattttcacttgatgtccctgtttgttacaatccagttttcctcaattacatgaaacagtcctacaagtctgaaaacagcctaataacgtgcaaacaacgtgtctgtgacagtaaggctagtcaaaagcactgggttgacaagaagtcattggtatttttccaggtccaatctttctttttaatgtatcctgtttaagtgaaagcattttagaactgttttttgaaaacatactgttgtaaaaccaccaagggatttttttatgaatagatgtgctttgtttctagcaataattaa

SEQ ID NO: 2043 - DNA, 600 bp, Chicken  19866894088825_1
ttttataatgtgaggcacgaaatcattggacacctgcccatacaccaaatctgttatggtaggaattgaatccaggaactatatcttgcttctctttacaactgcacaaatgcagggcatctttatacccttagttaagaaaaacatttccttcctacttcttgtggcacttactcaggcaaaagtgatttttacaccaaacccttgtcactcaaaaatgtattagaatgcattgctattacactggagtctgcttatttttttctttttaacacaatacagcctggatccctggctggkgtgctgaggatttgtaagtaattagaaataaatagatcttgctcattttggcccacatayggttttacttaagtcttttgcctgctgcctaattgctgtatgtgccatgcttagaatatggagaagtcatgctggtgatggaaccgaaagccccggttytgtgcatcctgtcagcactccagaaagatatgaaaaaccgaagaagtagttgcgtagttacaatcagtgcagttgctaaaattaagacggttctttctgtaattcgtcagtttaacctaatatcagcgtggtcactttgat

SEQ ID NO: 2044 - DNA, 600 bp, Chicken  19866894088825_2
aggaattgaatccaggaactatatcttgcttctctttacaactgcacaaatgcagggcatctttatacccttagttaagaaaaacatttccttcctacttcttgtggcacttactcaggcaaaagtgatttttacaccaaacccttgtcactcaaaaatgtattagaatgcattgctattacactggagtctgcttatttttttctttttaacacaatacagcctggatccctggctggkgtgctgaggatttgtaagtaattagaaataaatagatcttgctcattttggcccacatayggttttacttaagtcttttgcctgctgcctaattgctgtatgtgccatgcttagaatatggagaagtcatgctggtgatggaaccgaaagccccggttytgtgcatcctgtcagcactccagaaagatatgaaaaaccgaagaagtagttgcgtagttacaatcagtgcagttgctaaaattaagacggttctttctgtaattcgtcagtttaacctaatatcagcgtggtcactttgatcttccagcagctgcaaacttataggtgactctacagtttcagaagagaggtcaggaagtc

SEQ ID NO: 2045 - DNA, 600 bp, Chicken  19866894088825_3
tcttgtggcacttactcaggcaaaagtgatttttacaccaaacccttgtcactcaaaaatgtattagaatgcattgctattacactggagtctgcttatttttttctttttaacacaatacagcctggatccctggctggkgtgctgaggatttgtaagtaattagaaataaatagatcttgctcattttggcccacatayggttttacttaagtcttttgcctgctgcctaattgctgtatgtgccatgcttagaatatggagaagtcatgctggtgatggaaccgaaagccccggttytgtgcatcctgtcagcactccagaaagatatgaaaaaccgaagaagtagttgcgtagttacaatcagtgcagttgctaaaattaagacggttctttctgtaattcgtcagtttaacctaatatcagcgtggtcactttgatcttccagcagctgcaaacttataggtgactctacagtttcagaagagaggtcaggaagtcctttttgtgcagctgaatcaagcggaaagttctgaaatctcagtctcacacgccagcaaaacaccaccaccaacacagcaagacatcgtaatcctcctg

SEQ ID NO: 2046 - DNA, 600 bp, Chicken  19866894088830_1
acgaagctagacataaatagaattccagcaattttaaaataaatgaaatgtaaatccctaaatgccatttgttctctctggatgtatttctttgcgtttgtaaaaagatcatgtacacggttttgtcatttaactgctagttaaatgtgccagaaaaagaaagctgaagaattaaatttcattataattaacagaacaaatataattagaattttagtagtgcaagttgccatgctccttcaggtgtcctggtagtattttgagttagataacttttcaactcttcgtttcttagctgcwgaggagctgctcccacacaccgcrgatgtgtccaaacacgctgtctttgccatgcaagaatgaattcacaaggacttgtaattgtatcagaactgattttatgccaaacagccaaccattattaatgacttcgagtcattacagtccaacatggatatgtcctggatttctggtgcctgggatattttccagctcaaattaatggtttctgagtgatgcgaaaaactgaaggtttgtgagttgctgtatgcaatccatgttcttttctatacacttctgattcatctccgatgctgtgtc

SEQ ID NO: 2047 - DNA, 600 bp, Chicken  19866894088830_2
ccagcaattttaaaataaatgaaatgtaaatccctaaatgccatttgttctctctggatgtatttctttgcgtttgtaaaaagatcatgtacacggttttgtcatttaactgctagttaaatgtgccagaaaaagaaagctgaagaattaaatttcattataattaacagaacaaatataattagaattttagtagtgcaagttgccatgctccttcaggtgtcctggtagtattttgagttagataacttttcaactcttcgtttcttagctgcwgaggagctgctcccacacaccgcrgatgtgtccaaacacgctgtctttgccatgcaagaatgaattcacaaggacttgtaattgtatcagaactgattttatgccaaacagccaaccattattaatgacttcgagtcattacagtccaacatggatatgtcctggatttctggtgcctgggatattttccagctcaaattaatggtttctgagtgatgcgaaaaactgaaggtttgtgagttgctgtatgcaatccatgttcttttctatacacttctgattcatctccgatgctgtgtcttttcatctttctcagtgatacat

SEQ ID NO: 2048 - DNA, 600 bp, Chicken  19866894088835_1
cagaacaaagagataggctttatcaactacttgcaaatctcacttgcttgacaggacagaagggataactctagttggacaaagcaacaaactgaattcagattacaaagtatgtatgaacaaaggaaacaaatgggggtacctactgggagggatgagttccttttaagcaactgaggagaagagaagaatgtgaaccctgagtacctttgataccataagatggtagatcaggaactctaagactcaagctggagtgttagaaaacagacattctttgatagagctggatgcatgggrgcaatcctcctatcacacatagcttacacaaaagatcttcagttcatatacacagaggtctgttacatatgcagaagtttcccagaagtatgttacagattcagagactgtttctaaacaggctctcctatttcyttggtacaaagactcaacagagcttacttgtctccttggttcagagacacagctcttcctgttacctaaacacaaatcgcagggcaggggtatccatcagtgatcactaggcaagcttaacaatactattgtaacttgtatcaccttagccagtgggaaggctgg

SEQ ID NO: 2049 - DNA, 600 bp, Chicken  19866894088835_2
ggggtacctactgggagggatgagttccttttaagcaactgaggagaagagaagaatgtgaaccctgagtacctttgataccataagatggtagatcaggaactctaagactcaagctggagtgttagaaaacagacattctttgatagagctggatgcatgggrgcaatcctcctatcacacatagcttacacaaaagatcttcagttcatatacacagaggtctgttacatatgcagaagtttcccagaagtatgttacagattcagagactgtttctaaacaggctctcctatttcyttggtacaaagactcaacagagcttacttgtctccttggttcagagacacagctcttcctgttacctaaacacaaatcgcagggcaggggtatccatcagtgatcactaggcaagcttaacaatactattgtaacttgtatcaccttagccagtgggaaggctggaagagctcgctagttttgggatacagggataaaagaggggctctgtcactcaatactttgagagaccccacagggcatgtcccagtggactctccctttattcaaataaagccccaggctcctttgtctgatcat

SEQ ID NO: 2050 - DNA, 600 bp, Chicken  19866894088836_1
gccagaagtgctgaatcctgaagaaatctgggtgtcttaaagaggatgatgctaatggaggatgctccattgcatgtgaagcagcattgcagaagttgtgaatgccagaagcctggtgccttagccaagaaactggacagtaggaagctaatgatctagaaattgctgccactaagtcatttcaaggcaatggagtgggatgaagttggtgttggttcttaacttagggcctgactttcagaaaaatgaagagtagctgtctcctgtgcagcaagtcttctaaagagtatggaaactagsaagcaaaaaggcagttgcttgaaatcactggtatttcagaaatatggaatgagtgtgagcattcaggaatcaataagatttgaagttaccgtagaatcatagtatcatagaatggtttgggttagaagggaccttaaggattgtctgattccaaccccctgccatgggctggttgccccccaccagattaggttgcccagggccacatccaacctggccttgagtacctccagggatggggcacccacagcaaggctacctctgctcctctctgtccttccaactacctgaaaagctgtt

SEQ ID NO: 2051 - DNA, 600 bp, Chicken  19866894088837_1
ttcttccacttctgtgcatgcattgcaaatagaaaggtaagatctgtgatttcaaacccaaatttcattttgacagcacttttaatcttcctttcttagctgtactctgcaggccagcacaattgttgttacctactttcattttggcaacaggaaaatagctgcagttccatcgaatgacctttttgttttaaattaaataggatgtcagccaaaatcctatcttatttttgtcctgttaataaaaggcctgcaacagtttagacatttaggacatgaagtagacataaaataaaaaamatttggggaaattaataattgaaaggcaattcaaaatyggaatcagcttttgattatttcttgaacatgatcttaatgtaaaaatagccaagtttttgatacaggaattgtagatgcatagcgcrgactgctcgtattccttctccctgatgaatgtttccacatatttggctgcctagtaaggatgagtggccaacatgccattttacagactgcagtcatatgtatgacaaatgatgagatgacaagacactgaaagagccatatcaccgggaaggcttgtaagaaggcctctgagtg

SEQ ID NO: 2052 - DNA, 600 bp, Chicken  19866894088837_2
aagatctgtgatttcaaacccaaatttcattttgacagcacttttaatcttcctttcttagctgtactctgcaggccagcacaattgttgttacctactttcattttggcaacaggaaaatagctgcagttccatcgaatgacctttttgttttaaattaaataggatgtcagccaaaatcctatcttatttttgtcctgttaataaaaggcctgcaacagtttagacatttaggacatgaagtagacataaaataaaaaamatttggggaaattaataattgaaaggcaattcaaaatyggaatcagcttttgattatttcttgaacatgatcttaatgtaaaaatagccaagtttttgatacaggaattgtagatgcatagcgcrgactgctcgtattccttctccctgatgaatgtttccacatatttggctgcctagtaaggatgagtggccaacatgccattttacagactgcagtcatatgtatgacaaatgatgagatgacaagacactgaaagagccatatcaccgggaaggcttgtaagaaggcctctgagtgttgaacagtaccagaaaccacaagctccctgcctacag

SEQ ID NO: 2053 - DNA, 600 bp, Chicken  19866894088837_3
ttgttacctactttcattttggcaacaggaaaatagctgcagttccatcgaatgacctttttgttttaaattaaataggatgtcagccaaaatcctatcttatttttgtcctgttaataaaaggcctgcaacagtttagacatttaggacatgaagtagacataaaataaaaaamatttggggaaattaataattgaaaggcaattcaaaatyggaatcagcttttgattatttcttgaacatgatcttaatgtaaaaatagccaagtttttgatacaggaattgtagatgcatagcgcrgactgctcgtattccttctccctgatgaatgtttccacatatttggctgcctagtaaggatgagtggccaacatgccattttacagactgcagtcatatgtatgacaaatgatgagatgacaagacactgaaagagccatatcaccgggaaggcttgtaagaaggcctctgagtgttgaacagtaccagaaaccacaagctccctgcctacagcttattaccttaggccttgctttaaatatctgatggtttctgttccatggacctcggagggaggaagatgtcggtagtgcgtgggag

SEQ ID NO: 2054 - DNA, 600 bp, Chicken  19866894088837_4
aaatatctgatggtttctgttccatggacctcggagggaggaagatgtcggtagtgcgtgggaggctgctgaacagggagaactgaaagaatctttgcagtgccatgttgttgtcctgactgcagggatgtgatgcacccacagagcctctgtgagctcagcgttgttgttcacagcactctgtttggatctcagcagtttggactcaaggactttttgtgggaccttggtttggtttctacactgagattggttcaggaaacaacattttgctttgatttattttaagtatttattttstgaggaggtatagatagttactgcgttataatagcatgaagtatggtgttgaagcagtcgagaaactgcttgttcattattccttctttcaaaaattcaattaaatagttatgcgacagctctttccctagtgagaaatgtgttcagtattgtacttcttaaaataaactattattagttgtctaaatgccaattgctttgaggcataacatacacaaataatgaagaaaactatttgatttgacagtgctgtaagaaactcagttccaggttacttaatcctattcttctcatccccag

SEQ ID NO: 2055 - DNA, 600 bp, Chicken  19866894088841_1
ggtcggtaccttcatcccgctccccgtgtccctgcaagggctgcggggtgcaactcctactctgctccccaggagagggcaccagccgcctggggaaagctgcacgcattgcactgcggcggtgcctcggtcacacacggcctcgagcgatcgcacgggacagggtctgcgggggctgggcacagcaaagggcccccacccgctgcaaggctgtcccctgcttatccccgcagatgcgggggggacgcatgatgtgggagccaccagaaagtgacacccagctggtgctgtcccaggctyggcgggcaccttgagctcagccttaatggttaataggggccagggccaggcgtggggctgtgccaaggcagtggarcagggccggggggccgtagccacacrtcctgtcctgaatacccccaacataygctgtgcatggggaaactgtgccccggcaatgggtctgcagcccctccragacgcagcatggggccctgctgtggaatgtcaccaaccccagccttgaccccacctctcgccccatgccagctgccccggactttcctccctttggcgtcacggctgttccctggctgcagc

SEQ ID NO: 2056 - DNA, 600 bp, Chicken  19866894088841_2
gggcaccagccgcctggggaaagctgcacgcattgcactgcggcggtgcctcggtcacacacggcctcgagcgatcgcacgggacagggtctgcgggggctgggcacagcaaagggcccccacccgctgcaaggctgtcccctgcttatccccgcagatgcgggggggacgcatgatgtgggagccaccagaaagtgacacccagctggtgctgtcccaggctyggcgggcaccttgagctcagccttaatggttaataggggccagggccaggcgtggggctgtgccaaggcagtggarcagggccggggggccgtagccacacrtcctgtcctgaatacccccaacataygctgtgcatggggaaactgtgccccggcaatgggtctgcagcccctccragacgcagcatggggccctgctgtggaatgtcaccaaccccagccttgaccccacctctcgccccatgccagctgccccggactttcctccctttggcgtcacggctgttccctggctgcagctgcggcggggtgtgcatggtgctggggtgcacacggcctgcagtgagtgtgccctgcgctggccgcatcgtgaggt

SEQ ID NO: 2057 - DNA, 600 bp, Chicken  19866894088841_3
cacgcattgcactgcggcggtgcctcggtcacacacggcctcgagcgatcgcacgggacagggtctgcgggggctgggcacagcaaagggcccccacccgctgcaaggctgtcccctgcttatccccgcagatgcgggggggacgcatgatgtgggagccaccagaaagtgacacccagctggtgctgtcccaggctyggcgggcaccttgagctcagccttaatggttaataggggccagggccaggcgtggggctgtgccaaggcagtggarcagggccggggggccgtagccacacrtcctgtcctgaatacccccaacataygctgtgcatggggaaactgtgccccggcaatgggtctgcagcccctccragacgcagcatggggccctgctgtggaatgtcaccaaccccagccttgaccccacctctcgccccatgccagctgccccggactttcctccctttggcgtcacggctgttccctggctgcagctgcggcggggtgtgcatggtgctggggtgcacacggcctgcagtgagtgtgccctgcgctggccgcatcgtgaggtgttgcgtccatgacaaagggacaccc

SEQ ID NO: 2058 - DNA, 600 bp, Chicken  19866894088841_4
ggtcacacacggcctcgagcgatcgcacgggacagggtctgcgggggctgggcacagcaaagggcccccacccgctgcaaggctgtcccctgcttatccccgcagatgcgggggggacgcatgatgtgggagccaccagaaagtgacacccagctggtgctgtcccaggctyggcgggcaccttgagctcagccttaatggttaataggggccagggccaggcgtggggctgtgccaaggcagtggarcagggccggggggccgtagccacacrtcctgtcctgaatacccccaacataygctgtgcatggggaaactgtgccccggcaatgggtctgcagcccctccragacgcagcatggggccctgctgtggaatgtcaccaaccccagccttgaccccacctctcgccccatgccagctgccccggactttcctccctttggcgtcacggctgttccctggctgcagctgcggcggggtgtgcatggtgctggggtgcacacggcctgcagtgagtgtgccctgcgctggccgcatcgtgaggtgttgcgtccatgacaaagggacaccctctgttcttccctatcccctgcacca

SEQ ID NO: 2059 - DNA, 600 bp, Chicken  19866894088841_5
gggcacagcaaagggcccccacccgctgcaaggctgtcccctgcttatccccgcagatgcgggggggacgcatgatgtgggagccaccagaaagtgacacccagctggtgctgtcccaggctyggcgggcaccttgagctcagccttaatggttaataggggccagggccaggcgtggggctgtgccaaggcagtggarcagggccggggggccgtagccacacrtcctgtcctgaatacccccaacataygctgtgcatggggaaactgtgccccggcaatgggtctgcagcccctccragacgcagcatggggccctgctgtggaatgtcaccaaccccagccttgaccccacctctcgccccatgccagctgccccggactttcctccctttggcgtcacggctgttccctggctgcagctgcggcggggtgtgcatggtgctggggtgcacacggcctgcagtgagtgtgccctgcgctggccgcatcgtgaggtgttgcgtccatgacaaagggacaccctctgttcttccctatcccctgcaccacgttcccatgctgtcccctccaggcccggcgctttcctcacgaggtcac

SEQ ID NO: 2060 - DNA, 600 bp, Chicken  19866894088845_1
taaagaaagcactgaggacctcagccttctccttatcctcagtggtcacattccccgccgcatcaagtaaaggatggaaattctctttggttcttctcttaccattgatatatttgtaaaaggatttcttattgtcttttactgcagtggccaatctgagttcaagtcaggcttttgccttcctaacttcctccctgcataccttagcaacttccttgtaatctccccaagtcgcctgtcccttcctccagaggacataaactctctttttcttccgaagtctcaacaatagttcacggytcatccacaccggtcttctttccctacggcttgccttacgtcactcagggacagcctgttcttgtgcctttaagatatccatcttgaggagcgtccaggcttactggaccccttcacccttaaagagcaactcccaagggacccgtgctacaagcatcctgaacaggtcaaagtctgccctctggacgttcaagacagcagttttgctagtcacccttctgacatctccaagaatagagaattctacagtttcatggtcactctgcccaagacagtccccagccttcacatctcccagca

SEQ ID NO: 2061 - DNA, 600 bp, Chicken  19866894088845_2
tctagaaacctcctggactgcttcctctgcactgcattatatttccaacatatatcaggggaagttgaactctcccacaagaacaagtgctggagattgtgcgacttccgcaagctgctcatagaatgccccatccatctcttcatcctgattaggtggtctgtagcagacccccaccaagatgtcacccctacaggccttcccctgatccttacccatagacactcaactttatcattcccaacccaaagctcttcaacatcaaaacactctttgatctaaagggccacaccaccgccyttccttcctcgtctatcccttctgaagagcttgtagccatccatcacagcgctccagtcatgggagtggtcccaccatgtttcagtaatagcaactaggtcatagttagcgtgtcacacagtcgcttccagctcctcctgcttgtcgtccatgatgcatgcattggtgtagatgcacttcagccaagtcatctgcctcacccccagctcaagcattgttcccctaggctcatcacttgtgagccctgttttgtcctcttccccccatcctagattgtttatgtagagaaaaaaggttgca

SEQ ID NO: 2062 - DNA, 600 bp, Chicken  19866894088847_1
gcccacagagaaataagtgccccttaggacagggttcaagtataggagtagtttagtctgtcttgtgtctgagaagacaggaatttaacaagaaaatcatataggtttttacagttgactgagattcaaatccagggattgaagatggaaagttattgttatgactcatgcaaaccagaagagagagggctttgctgtattttagagaggtgaggtgagttttgttttgtataaaccaacattagtcatgtacttctataaataacgtgcttccctgtcatcccagcccaggattatccrtgtgtcctggagacaggcagacacctgggagacaatttcaatgagcagaactattctgcagttgtgagaagtgtttattatgctaaatcattgcttctcacttcatttcacgtaatcataacttctgtggcattcccatctttgaccttcagtatagattggaggacgcagctgaaatcaagcgcattatttgttatggtttggccttctccaattaagggatttttttttttctctttgaagttcttactcacttttcgtttgttcagtatttcagtattaccgcctcttaagacaatg

SEQ ID NO: 2063 - DNA, 599 bp, Chicken  19866894088853_1
  misc_feature (1)..(101): n is any nucleotide
nnnnnnnnnnnnnnnnnnnnnnnnnnnnnnnnnnnnnnnnnnnnnnnnnnnnnnnnnnnnnnnnnnnnnnnnnnnnnnnnnnnnnnnnnnnnnnnnnnnnncagcctgttccagtgcttccccactctttcagagaagaatttttccctaatattcaatctgaaccacgctgtaaagcacccatcctaaaaacacagcacaggatgacattgcttattagccagaagtacctaatgaattatgtgctgttcgttttgcttttgtcattgtttgctgaaaaaattactaattatgcctaaygtttyttggtattttgtgagagtaattaggctttatctgtttctgcagtttcagcatggartacttcacattgtcagggtttggcagtgagtaggaaccagtctgctgttctgaagacaaattcttgcttattacagatgtatatgggggatmcctccatctctgttttgcttcagcgagtgtagacctcgcatctatctggctactgtagaaaacagatttccagtatgtacattctagctaaggtttgttttgtacctataaacatgaccaccaaaacattggtgttacagaasaac

SEQ ID NO: 2064 - DNA, 599 bp, Chicken  19866894088853_2
  misc_feature (1)..(96): n is any nucleotide
nnnnnnnnnnnnnnnnnnnnnnnnnnnnnnnnnnnnnnnnnnnnnnnnnnnnnnnnnnnnnnnnnnnnnnnnnnnnnnnnnnnnnnnnnnnnnnnncagcctgttccagtgcttccccactctttcagagaagaatttttccctaatattcaatctgaaccacgctgtaaagcacccatcctaaaaacacagcacaggatgacattgcttattagccagaagtacctaatgaattatgtgctgttcgttttgcttttgtcattgtttgctgaaaaaattactaattatgcctaaygtttyttggtattttgtgagagtaattaggctttatctgtttctgcagtttcagcatggartacttcacattgtcagggtttggcagtgagtaggaaccagtctgctgttctgaagacaaattcttgcttattacagatgtatatgggggatmcctccatctctgttttgcttcagcgagtgtagacctcgcatctatctggctactgtagaaaacagatttccagtatgtacattctagctaaggtttgttttgtacctataaacatgaccaccaaaacattggtgttacagaasaactgttg

SEQ ID NO: 2065 - DNA, 599 bp, Chicken  19866894088853_3
  misc_feature (1)..(40): n is any nucleotide
nnnnnnnnnnnnnnnnnnnnnnnnnnnnnnnnnnnnnnnncagcctgttccagtgcttccccactctttcagagaagaatttttccctaatattcaatctgaaccacgctgtaaagcacccatcctaaaaacacagcacaggatgacattgcttattagccagaagtacctaatgaattatgtgctgttcgttttgcttttgtcattgtttgctgaaaaaattactaattatgcctaaygtttyttggtattttgtgagagtaattaggctttatctgtttctgcagtttcagcatggartacttcacattgtcagggtttggcagtgagtaggaaccagtctgctgttctgaagacaaattcttgcttattacagatgtatatgggggatmcctccatctctgttttgcttcagcgagtgtagacctcgcatctatctggctactgtagaaaacagatttccagtatgtacattctagctaaggtttgttttgtacctataaacatgaccaccaaaacattggtgttacagaasaactgttgtttttctttggtaagtaacagatctaaacgtctatccttagcctgtgtgctccatt

SEQ ID NO: 2066 - DNA, 600 bp, Chicken  19866894088853_4
ttcaatctgaaccacgctgtaaagcacccatcctaaaaacacagcacaggatgacattgcttattagccagaagtacctaatgaattatgtgctgttcgttttgcttttgtcattgtttgctgaaaaaattactaattatgcctaaygtttyttggtattttgtgagagtaattaggctttatctgtttctgcagtttcagcatggartacttcacattgtcagggtttggcagtgagtaggaaccagtctgctgttctgaagacaaattcttgcttattacagatgtatatgggggatmcctccatctctgttttgcttcagcgagtgtagacctcgcatctatctggctactgtagaaaacagatttccagtatgtacattctagctaaggtttgttttgtacctataaacatgaccaccaaaacattggtgttacagaasaactgttgtttttctttggtaagtaacagatctaaacgtctatccttagcctgtgtgctccattgaagtgatttcagttgagcaaacctgttggatcatactggaactttgtcatgtttcgtgtttgaagcactacatgtaaaatttctatactccc

SEQ ID NO: 2067 - DNA, 600 bp, Chicken  19866894088853_5
taaygtttyttggtattttgtgagagtaattaggctttatctgtttctgcagtttcagcatggartacttcacattgtcagggtttggcagtgagtaggaaccagtctgctgttctgaagacaaattcttgcttattacagatgtatatgggggatmcctccatctctgttttgcttcagcgagtgtagacctcgcatctatctggctactgtagaaaacagatttccagtatgtacattctagctaaggtttgttttgtacctataaacatgaccaccaaaacattggtgttacagaasaactgttgtttttctttggtaagtaacagatctaaacgtctatccttagcctgtgtgctccattgaagtgatttcagttgagcaaacctgttggatcatactggaactttgtcatgtttcgtgtttgaagcactacatgtaaaatttctatactccctgtagctcagctctttttaacgatacccatatggctgatgctgctttttaacgtactrcagctgtaacctttcaagtagctgaatagttattattaaaaagatcagcaccatttttctataggaatctttgtgacatccattg

SEQ ID NO: 2068 - DNA, 600 bp, Chicken  19866894088853_6
aaaacagatttccagtatgtacattctagctaaggtttgttttgtacctataaacatgaccaccaaaacattggtgttacagaasaactgttgtttttctttggtaagtaacagatctaaacgtctatccttagcctgtgtgctccattgaagtgatttcagttgagcaaacctgttggatcatactggaactttgtcatgtttcgtgtttgaagcactacatgtaaaatttctatactccctgtagctcagctctttttaacgatacccatatggctgatgctgctttttaacgtactrcagctgtaacctttcaagtagctgaatagttattattaaaaagatcagcaccatttttctataggaatctttgtgacatccattggaaccttctgctgctccctggtcatcatttagataagccaaagagtacatcttccaatgtagtggcttgtctcgtcttgaaacttacaccacagctttattggaaataccacggtcacattgcactgtgtggagcttctcctgttggcaggaatagaacaaaaggcaagcatcagtttttaagatccttctctcctccttgaggccgcaaggagt

SEQ ID NO: 2069 - DNA, 599 bp, Chicken  19866894088860_1
  misc_feature (1)..(69): n is any nucleotide
nnnnnnnnnnnnnnnnnnnnnnnnnnnnnnnnnnnnnnnnnnnnnnnnnnnnnnnnnnnnnnnnnnnnnctggagggggagtgagctggtgctgaagatggctggaggaacagcagcaacaaatgccagaaagctctggacaggtcaagaggagagaacagctcaagggcagctcacatctgagtcttggtgtccactgacctagtcaccgtgactccacaaagctgtcgagtaagagaagtgcagacatctgtttacaagaaatgctgacattccctaagcttgatagtttactggggrtttttttttatgatattatttcatgttcttgtgtgtgtgttggatatgtaccatacataattaaaaaaaacttaatggttgtcctccatccaagctcattttcctgaggttgacttagcaggactgccaactgtggaaaaaaaagaaaaagggaaaaaaagacagttgtattaaatcatagaatcataaaagttggaaaagaccactgagatcatctagttcaactaccaacccattgccaccatgcccactgaccatgcccctcagtagcacatactcatatttcttgaacatctcca

SEQ ID NO: 2070 - DNA, 600 bp, Chicken  19866894088863_1
atcaactctggcaaaaagaatgtgttttccagcgatttgcttctacacttctgaagttacttactaacaataaagtaacattcaataaaatgacattaagatttaaaagaaataaaagcttctttggttttagcagatagaagacgtgagtatctgctattctaatttggaaaaattcacagtttaactgaagaaaatgttgctgtgcagcatttacactgttgagatgcctagaaaactaagtacaagggcagcataatactacttttttaagctctaaacactataaagatgtattcrgtattaataaataaataaatgtattttttgtcatcagaccactgtaacttctcaggcttataaaatattcttggtggtgaaygtgtgtttatgaattgatgcaatcatacatggctggttaaactctttgaagatgtgcatttcacatgtatcatcataattaagtaataagtaatatcatataagcaatatcataaaatataaatattaaaatgaacagttggcaaacagaacccttaacatgaacgctgccctaaaaaatgaacgtaaaggacattgaggtaaattgggtctcataaa

SEQ ID NO: 2071 - DNA, 600 bp, Chicken  19866894088863_2
caataaaatgacattaagatttaaaagaaataaaagcttctttggttttagcagatagaagacgtgagtatctgctattctaatttggaaaaattcacagtttaactgaagaaaatgttgctgtgcagcatttacactgttgagatgcctagaaaactaagtacaagggcagcataatactacttttttaagctctaaacactataaagatgtattcrgtattaataaataaataaatgtattttttgtcatcagaccactgtaacttctcaggcttataaaatattcttggtggtgaaygtgtgtttatgaattgatgcaatcatacatggctggttaaactctttgaagatgtgcatttcacatgtatcatcataattaagtaataagtaatatcatataagcaatatcataaaatataaatattaaaatgaacagttggcaaacagaacccttaacatgaacgctgccctaaaaaatgaacgtaaaggacattgaggtaaattgggtctcataaaatgcacatcaactggtaaaaatactgcaaatttgaaattgtccataccattttcaggaataaagttaaattattatgcttct

SEQ ID NO: 2072 - DNA, 599 bp, Chicken  19866894088869_1
  misc_feature (1)..(231): n is any nucleotide
nnnnnnnnnnnnnnnnnnnnnnnnnnnnnnnnnnnnnnnnnnnnnnnnnnnnnnnnnnnnnnnnnnnnnnnnnnnnnnnnnnnnnnnnnnnnnnnnnnnnnnnnnnnnnnnnnnnnnnnnnnnnnnnnnnnnnnnnnnnnnnnnnnnnnnnnnnnnnnnnnnnnnnnnnnnnnnnnnnnnnnnnnnnnnnnnnnnnnnnnnnnnnnnnnnnnnnnnnnnnnnnnnnnnnnnctgctgttgcattcctgcccatgccagcagcccagctgctggggcaccgcctgcagtggctgtaaggcrttgcaggacggccttcagagcagcggtgctctttgagtcacacctccacactcccacacatgaagcgaggaagcaaacagaacaggagaaaaagcagtaataaaccaatgtcccggtcctaaattgctgtggcagcgctgctggggctgacctgtggttggcattctgctttcagaaaggctgagcgagcctttggttccgaaaggtagagaaccacagtgcatggcgtagaaggcaacatggaggtgtgtttcctgttctgtctgtataaccgtatttttctctccctgaccttccct

SEQ ID NO: 2073 - DNA, 600 bp, Chicken  19866894088876_1
tttaccagttcttaccatagaatcataggatcattaaaactggaaaagaacactaagaccatctagttcgactgtcaacatccccatcacacccattagaccatgttcctcagtgccacctctatccttttgttgaacacctccagggatggatcagtgctgcatggcaataccatcacatgtcagatgggtgcaaatctccaccttaggacctggaatagcattaggtggctgcttctcagacagatagggtgcagaacatcattgaccgttgttcagaacaacagctagtgtgcctgraaaaggctccatctatccagctctacttacagatacctggcaccaggtaaataaaaaatgaaaccattggctttgtaagtcattgtacagggctgaccttccaccattaaggagcacagacttggaactcattacatcttggctgatacctacatacagattttccaagcaggtatcaaggtacatgaggtatgggtggtttttaaagcatgtaatgacctgaagtcaaagtggtgtcatgcaaggaagcttttcaccaaaactgaaactgtgagttttttcatttcttaccatttcatc

SEQ ID NO: 2074 - DNA, 600 bp, Chicken  19866894088881_1
tgatttgagaacatcaaatggaagtctctgttcaagtatcaggtattgttagctctgaaacaaaagctattttatattgctgtatcaggagctacttaaagtctcttattctatacaaataaaagagtggtacgtgagtgacattctcttgtcttaatagggtagcctctccgcagtgctggaggagcagcttgtagtgtggaaatgacattagggagcgctgctaacacactgagcagaatgacccattccagaaatgttttgatttagggagtcagagaaccgggaaagagagaagakagatgagaaaagaaagaaaggcaagaagaaggtggtcagggcaggagggaggagaaggagcaaaaaggtggaaggaaggcagagcagggcaggtaacctaaaaaacagacaaggaggtaaaagggcaagaaattataaactggccttttaattaaaataaagtgtcagttgaacgtgtttattgcaaaaagccacacaacttagaaaaacaaggctgtaatgccatcttggggtttctgatgacatctcaatccagcagagctctgctcatttggtttgtgaatgtcaacagaaacccct

SEQ ID NO: 2075 - DNA, 600 bp, Chicken  19866894088881_2
aggctgtaatgccatcttggggtttctgatgacatctcaatccagcagagctctgctcatttggtttgtgaatgtcaacagaaaccccttgattccaattgagactcacagctacctttcattgattccgtattatttcaacagtggaaaaatagcacctttattttcacagccaaagtatctcacactgtgatagaaatgtacatgtgcttattgaatatcatctctgttcatttttacctaacttctttgttgtcactatggattagaaagatacgcgttcttttgcagctatcacgygaaagacaatttgtcaaatatactgtagtccaagacttcactgggctaagagatacaggctattctgtccagctgtcttccgctgtttattactttaagctcactttatcggtataaaaattaccccaaacaagcctcttattgagccttctgagttgtatgcatttctcttgtatttcacagacagaataatcaagctggagtaaaatctgttttgtgaaatgattaagaatatgcatcatttattcatgagtatgcatgaaggtctgagtccaaccttgtagcatgcagaaagtctcc

SEQ ID NO: 2076 - DNA, 600 bp, Chicken  19866894088882_1
aatctgaaggcacaagcaggaaaatgagcacataaaactgcagtctggggtttggtaatgacacgaccaggatctgttggaaagacacaaagttaaacctcaaaaaaacagagacaaattacttaatttccatacaagttctcctcttccagagtggatggacacttcaaaagggaaaaagatacagcaagaattgtttttctctcttacaaatcaagctgtttgaggcatttacataaacaggatgtaaatgccaagcacagaagtgccataaagttttactttagcctctgagagcayaaaacctcaagagagtgctggcactgagctgatgtacacckagaaaataaatgctgcatttcattcagacactgagagggctgcagggcggcaggcagcagagctcagggggacccccagyacccatcactgccttggggtaagggttacctctgacttctgtcagcgtgcaagtgaagtgtcctgccctggagccccagatgctgagatatggggctctgaatgcaygtggggcactgaacgcccaatgcttcacccacagagctctgtaaccagctactttcaaactccagcctattg

SEQ ID NO: 2077 - DNA, 600 bp, Chicken  19866894088882_2
agtctggggtttggtaatgacacgaccaggatctgttggaaagacacaaagttaaacctcaaaaaaacagagacaaattacttaatttccatacaagttctcctcttccagagtggatggacacttcaaaagggaaaaagatacagcaagaattgtttttctctcttacaaatcaagctgtttgaggcatttacataaacaggatgtaaatgccaagcacagaagtgccataaagttttactttagcctctgagagcayaaaacctcaagagagtgctggcactgagctgatgtacacckagaaaataaatgctgcatttcattcagacactgagagggctgcagggcggcaggcagcagagctcagggggacccccagyacccatcactgccttggggtaagggttacctctgacttctgtcagcgtgcaagtgaagtgtcctgccctggagccccagatgctgagatatggggctctgaatgcaygtggggcactgaacgcccaatgcttcacccacagagctctgtaaccagctactttcaaactccagcctattgcactggtagtgaaagtggtgaaaataaatcaagatcaacca

SEQ ID NO: 2078 - DNA, 600 bp, Chicken  19866894088882_3
cttaatttccatacaagttctcctcttccagagtggatggacacttcaaaagggaaaaagatacagcaagaattgtttttctctcttacaaatcaagctgtttgaggcatttacataaacaggatgtaaatgccaagcacagaagtgccataaagttttactttagcctctgagagcayaaaacctcaagagagtgctggcactgagctgatgtacacckagaaaataaatgctgcatttcattcagacactgagagggctgcagggcggcaggcagcagagctcagggggacccccagyacccatcactgccttggggtaagggttacctctgacttctgtcagcgtgcaagtgaagtgtcctgccctggagccccagatgctgagatatggggctctgaatgcaygtggggcactgaacgcccaatgcttcacccacagagctctgtaaccagctactttcaaactccagcctattgcactggtagtgaaagtggtgaaaataaatcaagatcaaccagcaaaagtgcttaaaagtcatgaaataaagttattgatttccttccctggtgcctattgcgtatttattgcttgcagcca

SEQ ID NO: 2079 - DNA, 600 bp, Chicken  19866894088882_4
catttacataaacaggatgtaaatgccaagcacagaagtgccataaagttttactttagcctctgagagcayaaaacctcaagagagtgctggcactgagctgatgtacacckagaaaataaatgctgcatttcattcagacactgagagggctgcagggcggcaggcagcagagctcagggggacccccagyacccatcactgccttggggtaagggttacctctgacttctgtcagcgtgcaagtgaagtgtcctgccctggagccccagatgctgagatatggggctctgaatgcaygtggggcactgaacgcccaatgcttcacccacagagctctgtaaccagctactttcaaactccagcctattgcactggtagtgaaagtggtgaaaataaatcaagatcaaccagcaaaagtgcttaaaagtcatgaaataaagttattgatttccttccctggtgcctattgcgtatttattgcttgcagccaggtttacgaactactacactgttacacagtgtggcttttgtttcttcttgttctatcttggggccacacttctgtgggtaccacaatcctgcaattcttacactggc

SEQ ID NO: 2080 - DNA, 600 bp, Chicken  19866894088883_1
atatatattcttattgctgatagttagaaaaaaaagataatcccatatgcttattatgtcttctagctcaagaccaaattgtacagaaataaaaccccaggagagctgaattataatttgaaatgttatgcagatagaagcagcacaattagaagtggaggaaatacaaacatgctaaaacagtgaaagcactttaaaaatatgaccaattgtaattgaagtgaaagctgtagaagaaaaaaataagcataacgaatcagaacaatgctaacagtaattaataacacatactatgatgayttttgataagaagtgctttcaaaagctcaaggtccacaggaagccagaaatagtcttttagatgtgtcagggcagcagatgactgcagaatatgcaaatggatttgcactgttaccaggagttaaggtactgatggaataaggggtatttttcctgtaacttctctgggtgagccccttgaatcccagcagagcggaaggggcggctggttgagctccaccatgctgargcttcattagattcaattcattttgttcagcattgcctgtaacccaaactgtagctgggaggaagacctgt

SEQ ID NO: 2081 - DNA, 600 bp, Chicken  19866894088883_2
gtagaagaaaaaaataagcataacgaatcagaacaatgctaacagtaattaataacacatactatgatgayttttgataagaagtgctttcaaaagctcaaggtccacaggaagccagaaatagtcttttagatgtgtcagggcagcagatgactgcagaatatgcaaatggatttgcactgttaccaggagttaaggtactgatggaataaggggtatttttcctgtaacttctctgggtgagccccttgaatcccagcagagcggaaggggcggctggttgagctccaccatgctgargcttcattagattcaattcattttgttcagcattgcctgtaacccaaactgtagctgggaggaagacctgtagtctgagctggttgtcctatgctaggaagaatatgttttgttagatgaggaatgaaagagtgggcctccccattctgctccaatttttcaatacttgcaggtcttgaaaatatgcagtttatgtgcaattcacagggttgcatttgcaaagtgcataacatggacagcagtgggatctagtgggtcaataaagagatgatagaaaccttgtctctgcagagctagact

SEQ ID NO: 2082 - DNA, 600 bp, Chicken  19866894088886_1
tggagttggtgacctagcaggtctttttctttgctagagattaaaccacatctggtagaaaatagattatatgttaattaagtgcacaggtattaatggctttattgtatgactcattaaatactgagttaacctttatatagcttcctgaagttgtctggacaagcatttctattgattcagattgttctgatgcaggttgtacttgagtgtaatgatggagtgtaatggatgaagcctgtataaaataaataaataaataaaatcaaatatccaaggctggtgatgtaataaagatgyatgaaggcagtcaccacaggagctggactaagtcattccgccactagagggcaaaatcattacattgtaatcttcactgcaggtctcrgtgtttttggaaaggtgcaatcagagttggtttttacagtagaaaccgaataagagatcattaagcactccattggcagaggtggtagtaacgaatagttaaggtattgttttttgtaggattgtggtatgcaaacagttactagcaactatatggaaaaagcctatattttattccatggaactgtgaacaaaagtgatggtcatccaagg

SEQ ID NO: 2083 - DNA, 600 bp, Chicken  19866894088886_2
ggtattaatggctttattgtatgactcattaaatactgagttaacctttatatagcttcctgaagttgtctggacaagcatttctattgattcagattgttctgatgcaggttgtacttgagtgtaatgatggagtgtaatggatgaagcctgtataaaataaataaataaataaaatcaaatatccaaggctggtgatgtaataaagatgyatgaaggcagtcaccacaggagctggactaagtcattccgccactagagggcaaaatcattacattgtaatcttcactgcaggtctcrgtgtttttggaaaggtgcaatcagagttggtttttacagtagaaaccgaataagagatcattaagcactccattggcagaggtggtagtaacgaatagttaaggtattgttttttgtaggattgtggtatgcaaacagttactagcaactatatggaaaaagcctatattttattccatggaactgtgaacaaaagtgatggtcatccaaggcattttggctcttaggttcagagcactggcccttcccacccgagatcatgagtatcgataggaggctgcatgtgtggatcaggaacca

SEQ ID NO: 2084 - DNA, 600 bp, Chicken  19866894088895_1
cagcaggggtttcttaagcaagggtaaggaaataaactgggtgatggatattttcatacaaacacatgagactattccttgcaatggagaacatgaacagtttttacagatagaatgctgtgtgtcctggcaagcagtgacactgaaaaggattggaatgtcattggtatgggaaaatatatatcgtatcacctcatagcccattagaaacattatcaaaaagcataggcatttggtgttacctttctataaagcatcactttggctgcaggaagagaggttgatgaccagactttcttraatgrctttgaaaatgaaagtttttggagaagaactggaaggtggtagcccacgtgtggtactggtgggttggtggcacaggaggcagtctggtcagctgtggagctgtgctagagaagaaaagtctgtgacacttgagggatcttttagatgcagatgaatgcagaaaaagatctcatgcgtggaaactgaagccaaagatcgaactagaaggaagacctttggttttgactgcaaggatattaaacctggcagctggcttagcaaggaatatgataaatccactggtacttggaagtg

SEQ ID NO: 2085 - DNA, 600 bp, Chicken  19866894088895_2
ggggtttcttaagcaagggtaaggaaataaactgggtgatggatattttcatacaaacacatgagactattccttgcaatggagaacatgaacagtttttacagatagaatgctgtgtgtcctggcaagcagtgacactgaaaaggattggaatgtcattggtatgggaaaatatatatcgtatcacctcatagcccattagaaacattatcaaaaagcataggcatttggtgttacctttctataaagcatcactttggctgcaggaagagaggttgatgaccagactttcttraatgrctttgaaaatgaaagtttttggagaagaactggaaggtggtagcccacgtgtggtactggtgggttggtggcacaggaggcagtctggtcagctgtggagctgtgctagagaagaaaagtctgtgacacttgagggatcttttagatgcagatgaatgcagaaaaagatctcatgcgtggaaactgaagccaaagatcgaactagaaggaagacctttggttttgactgcaaggatattaaacctggcagctggcttagcaaggaatatgataaatccactggtacttggaagtgtctca

SEQ ID NO: 2086 - DNA, 600 bp, Chicken  19866894088905_1
gtctgcatttaaataaacttgtgccaagatgcttattgatgtaaatgccgtttatgctagacagaatcaaggatttctccatcatctgttgttgccaaaatagccattaatgcagattaggtaattgtttcttttctgggaagagtttatgcaaattgcagttggatatggaaaaccagatatgcttatgggaaaaccaccttgaattagtggagaagcaatgggcgggtttgtgtgggcatgtttccaagcacctttattctcaaatggaaaattaagccctgtctttgtcttactttmatgttgcacatgtagttgaacagagacgcctttaaaacagaaaatgtgacttctattgtgtaaacaggaaatgtttcaagtacataacattttwaaaatttttatttatttactgtgtgcccacttttgtcattcaaggcatggttagagrcgtgctaattcagatctaattttggatataagaatcttgaacacaagtaacagacaagcgatctgtactgttggctgatagttactgtgaagggctggagagtatcaactacttggggaagtgcaggctttcagcccctcagcaatccc

SEQ ID NO: 2087 - DNA, 600 bp, Chicken  19866894088905_2
ccaaaatagccattaatgcagattaggtaattgtttcttttctgggaagagtttatgcaaattgcagttggatatggaaaaccagatatgcttatgggaaaaccaccttgaattagtggagaagcaatgggcgggtttgtgtgggcatgtttccaagcacctttattctcaaatggaaaattaagccctgtctttgtcttactttmatgttgcacatgtagttgaacagagacgcctttaaaacagaaaatgtgacttctattgtgtaaacaggaaatgtttcaagtacataacattttwaaaatttttatttatttactgtgtgcccacttttgtcattcaaggcatggttagagrcgtgctaattcagatctaattttggatataagaatcttgaacacaagtaacagacaagcgatctgtactgttggctgatagttactgtgaagggctggagagtatcaactacttggggaagtgcaggctttcagcccctcagcaatcccttctgactaacaaaacagagtttttaagctctgatacaggtttgttgagaaggtgttactgggaggcagattctcagtgtgaggagatagcacc

SEQ ID NO: 2088 - DNA, 600 bp, Chicken  19866894088905_3
caaattgcagttggatatggaaaaccagatatgcttatgggaaaaccaccttgaattagtggagaagcaatgggcgggtttgtgtgggcatgtttccaagcacctttattctcaaatggaaaattaagccctgtctttgtcttactttmatgttgcacatgtagttgaacagagacgcctttaaaacagaaaatgtgacttctattgtgtaaacaggaaatgtttcaagtacataacattttwaaaatttttatttatttactgtgtgcccacttttgtcattcaaggcatggttagagrcgtgctaattcagatctaattttggatataagaatcttgaacacaagtaacagacaagcgatctgtactgttggctgatagttactgtgaagggctggagagtatcaactacttggggaagtgcaggctttcagcccctcagcaatcccttctgactaacaaaacagagtttttaagctctgatacaggtttgttgagaaggtgttactgggaggcagattctcagtgtgaggagatagcaccaggcaagttccttcaggctacatgcagcacgaacacttgcaggtaacctggaatctt

SEQ ID NO: 2089 - DNA, 600 bp, Chicken  19866894088905_4
gtcctctttttcttttgtcctaagcaaagtgagcgcaccccagaagtagaatgctaagaaatggccttagttataatgttttactgaggtataaatggctgcagaaggcagttgctggacgttagtgagtctcactttctccgtgaaagaaggataattaacgctgctctactttacatagggaataggcaagttaattaaggcaaatagaattatttaaattcaaatgagtatttaaaaaaacatttcctcaggtgagatccattaattcaagtgttttgggtcagagtgaaatagtgygggcagaaacaggagcagagaaacatcctgtttccattaaggccttgtatcaggtgggcatgcaactggcaattgcctcaggagggtccgggaaatcagcccagcatttactgactgctgggagtggatggtcaacaaggggtatctgcctattagaatgcttttgtgttgcagtcaaaaacattcttctgcttacgatgtgcactgaacgttgttggaaagcattgatcatgacagctgcaggagctcaatattcatatgaggctgcaatacctgcccaaaaagaggagtaaatctgtg

SEQ ID NO: 2090 - DNA, 600 bp, Chicken  19866894088906_1
tttttagagtgtatctgaacagctgcaagtagtgatgacataaatgaaagttcatgtcaacttaagcagaacgagatggaagacattctattcatccagttttagcttatcggtgcacagtcattaaatacgaatattatctcaagacccataataaatgcagaacaaaccgtgccagctacaggcgtcatcagataggaaactttctacggcactctgatgtgcagaggtaaattattctggaatattaaacgtttcattagttctcagcttcgagatatggctttaaaagtggccagrctcacagaaaaaaaatcgttattactaaatgcaacacttacaaatcggcatttatgaaattcagagactgccactgttaaatagcctcagaagtctttgtataggtgtcatcatttctgtgartctgaaaagtcattgcttatttgcataatggcattcacatcattgttgaaagcttaggattgacttaatgaaagtggcaacgagcaaagaaaaatgcttttgcactgaatttaaataagtaaatcctgaatttaagtattcttttctattttcctagcacaaggcatacagaaaatg

SEQ ID NO: 2091 - DNA, 600 bp, Chicken  19866894088906_2
ttaaatacgaatattatctcaagacccataataaatgcagaacaaaccgtgccagctacaggcgtcatcagataggaaactttctacggcactctgatgtgcagaggtaaattattctggaatattaaacgtttcattagttctcagcttcgagatatggctttaaaagtggccagrctcacagaaaaaaaatcgttattactaaatgcaacacttacaaatcggcatttatgaaattcagagactgccactgttaaatagcctcagaagtctttgtataggtgtcatcatttctgtgartctgaaaagtcattgcttatttgcataatggcattcacatcattgttgaaagcttaggattgacttaatgaaagtggcaacgagcaaagaaaaatgcttttgcactgaatttaaataagtaaatcctgaatttaagtattcttttctattttcctagcacaaggcatacagaaaatgttgactacgacctgwccttggcaccaatgggcttcatgttagtgaaggcagttaatggtgttggctcaggtacccaactgttcaggtgtcagtaagcagattactttaatctactaatcaaca

SEQ ID NO: 2092 - DNA, 600 bp, Chicken  19866894088906_3
tcgttattactaaatgcaacacttacaaatcggcatttatgaaattcagagactgccactgttaaatagcctcagaagtctttgtataggtgtcatcatttctgtgartctgaaaagtcattgcttatttgcataatggcattcacatcattgttgaaagcttaggattgacttaatgaaagtggcaacgagcaaagaaaaatgcttttgcactgaatttaaataagtaaatcctgaatttaagtattcttttctattttcctagcacaaggcatacagaaaatgttgactacgacctgwccttggcaccaatgggcttcatgttagtgaaggcagttaatggtgttggctcaggtacccaactgttcaggtgtcagtaagcagattactttaatctactaatcaacacatgcatttacatggaaagaaagaagcactggaaaattaggttagtatcatttgcataatgtgaaataacctatttacagtgatggaaaacaaagaggagtagaagtagataggaatctaccacacatggctgtcagaaacattgccttcaaggtgtgtggttttgctaaaagcaatgaaatttaaagtaaa

SEQ ID NO: 2093 - DNA, 600 bp, Chicken  19866894088908_1
aggctgcggtgaaacaaagaggacagtaagtttttaaaagctgaatattttgtaaatgttcagagacacagagaaaagtcaacaggtgccagaaccaaagttaactgaatttgacagaggccttcttcttcaaagtgcaaaatttatgtttgtgggaaatagcactaaaaaaagaccaccaacaacagaacaggaaagagaatgcagtttatttcacatgttaatatgcctctttctgggttcccacctgcctttgtttttgcatatgtagctcactggattttatcagtggccctttgrgtgggatgtctccaagcccactgtgaaaacctcccacccagtctggaggagtttgggagtacctccttatgagaaaagaagtagggtgggtccagctatggaaaatcctcacatggggcaaagaagcatttcccagctatagtactgattccatcttgctggtctgtgaagcccagtagccttgtcagctgggacaaggcagccctcctcgctccctgtcagaggctgggaagggcctggcatggttggatctgggattagccctctagaccattgtgacagctgttcagacaccacctg

SEQ ID NO: 2094 - DNA, 572 bp, Chicken  19866894088908_2
ggaaaatcctcacatggggcaaagaagcatttcccagctatagtactgattccatcttgctggtctgtgaagcccagtagccttgtcagctgggacaaggcagccctcctcgctccctgtcagaggctgggaagggcctggcatggttggatctgggattagccctctagaccattgtgacagctgttcagacaccacctgcagaattcagttccccctggtattgctaagtagcctctggcaagccaagctggcaagcctgaagtggcagtggtaagcagcccactgaaacgtgaattsacccaggctcaagaccagaccgaccaagtgcaacagccagcaaagagcaattgctcagctaatgagctctgctgtgatgtgaaagcatgttcttatgccaaggaaatcaacaggagggtgcaaacgcaacagaaaatgaaagatttgcaagcatcaatacttcagggcttggatggcttgtttccccagcaggatgtgtattggtgttctcactggactgcatgaacacaaggtgcctttcctgtgtgctactatacaaatatatggcagac

SEQ ID NO: 2095 - DNA, 600 bp, Chicken  19866894088912_1
tctacggacgacccgggacacgtgccaaagataggcattccgcagggagccagaagggacagaagggaggaaaaaaatcacgttttcaactcaaggaaaaggaattcagcacggggagaacgacagacgtgttctccaacacaaatgggagcgaccagccaaggaggagcatcctccagagcgcggacaagggaggacgtctcagaaacacgggtaagagcagctgcagcgtgcaatgggcagcgcggggccggccgcccaaggagaccttgagtggagtcaacacaagacaacctctcmtctgcaccggttcagctygaaacgacattaaacggctgtaattaaactcacagaaccccttggagaatgcaactagggcatgctttcgtgtaccctcagagcaggaggaactaccggagcccttctgtcccctcactccttccattggcactgcagggcgagccaaccygggagcacatctgtgcttaaaaccagtgctgtgggtttcttccctgcctggaagggttttagcccacagcagctcccggatcgggttcaccaggagggagagagggcgcagcctggcacagaatccgttta

SEQ ID NO: 2096 - DNA, 600 bp, Chicken  19866894088912_2
cacgtgccaaagataggcattccgcagggagccagaagggacagaagggaggaaaaaaatcacgttttcaactcaaggaaaaggaattcagcacggggagaacgacagacgtgttctccaacacaaatgggagcgaccagccaaggaggagcatcctccagagcgcggacaagggaggacgtctcagaaacacgggtaagagcagctgcagcgtgcaatgggcagcgcggggccggccgcccaaggagaccttgagtggagtcaacacaagacaacctctcmtctgcaccggttcagctygaaacgacattaaacggctgtaattaaactcacagaaccccttggagaatgcaactagggcatgctttcgtgtaccctcagagcaggaggaactaccggagcccttctgtcccctcactccttccattggcactgcagggcgagccaaccygggagcacatctgtgcttaaaaccagtgctgtgggtttcttccctgcctggaagggttttagcccacagcagctcccggatcgggttcaccaggagggagagagggcgcagcctggcacagaatccgtttaatccagcacctctgccaa

SEQ ID NO: 2097 - DNA, 600 bp, Chicken  19866894088912_3
catcctccagagcgcggacaagggaggacgtctcagaaacacgggtaagagcagctgcagcgtgcaatgggcagcgcggggccggccgcccaaggagaccttgagtggagtcaacacaagacaacctctcmtctgcaccggttcagctygaaacgacattaaacggctgtaattaaactcacagaaccccttggagaatgcaactagggcatgctttcgtgtaccctcagagcaggaggaactaccggagcccttctgtcccctcactccttccattggcactgcagggcgagccaaccygggagcacatctgtgcttaaaaccagtgctgtgggtttcttccctgcctggaagggttttagcccacagcagctcccggatcgggttcaccaggagggagagagggcgcagcctggcacagaatccgtttaatccagcacctctgccaagagaagcgtatatgaaaccacagccttattttgatgtagctaaataggtgcccagccaattctaattaactccgaagaaaatgagtttagaatgaaataagaccatcaacatcccattctgcttggagagaagcttgttgcgtgataccaa

SEQ ID NO: 2098 - DNA, 599 bp, Chicken  19866894088913_1
  misc_feature (1)..(16): n is any nucleotide
nnnnnnnnnnnnnnnntgtgataggtttctggggacatttcaggcacatttcctctgcctgttaatgatgtgagaagccttcctaacataaattttgcccaagtgtttaatggactcaggaagcggcagcttgtggtgagccttctggtgagcagctctggtgctgcctggtgttgctgggctatatagagtaattcacacctaaaacatctttgctttgggtcactcagggctgattagtgtgaaataattcaagtggtaaagtagacacatcacatcttgcctttccctgggcagccrggcctgatgggtggcaaccctgcccatggcagggggttggagctcaatgacctttaaggccccttccaacctgaaccactctgtgattctacgatttccactcctgatgggtgtattttttggatgttcttttggttttcttcctgctcagcaaatgacatacacatacatygctatgcacattctctctgctctctaccagcagtgtcatttcattttttgcttttttttgagaactagaaagtccacttccatccaaagggacaatgttcaaayatgtttttgccattaataagggc

SEQ ID NO: 2099 - DNA, 600 bp, Chicken  19866894088913_2
gttgctgggctatatagagtaattcacacctaaaacatctttgctttgggtcactcagggctgattagtgtgaaataattcaagtggtaaagtagacacatcacatcttgcctttccctgggcagccrggcctgatgggtggcaaccctgcccatggcagggggttggagctcaatgacctttaaggccccttccaacctgaaccactctgtgattctacgatttccactcctgatgggtgtattttttggatgttcttttggttttcttcctgctcagcaaatgacatacacatacatygctatgcacattctctctgctctctaccagcagtgtcatttcattttttgcttttttttgagaactagaaagtccacttccatccaaagggacaatgttcaaayatgtttttgccattaataagggcatcattactgtgcatttttccagtagctgcaatcagctctcacactgcttaaaaagccttacacaaaatatgtgagataattaacattttacccacagtgaggttggagaaattgaggttttcctgggccacctcggtggtaaaggacacagctcagcactgccttgtgccag

SEQ ID NO: 2100 - DNA, 600 bp, Chicken  19866894088913_3
atcttgcctttccctgggcagccrggcctgatgggtggcaaccctgcccatggcagggggttggagctcaatgacctttaaggccccttccaacctgaaccactctgtgattctacgatttccactcctgatgggtgtattttttggatgttcttttggttttcttcctgctcagcaaatgacatacacatacatygctatgcacattctctctgctctctaccagcagtgtcatttcattttttgcttttttttgagaactagaaagtccacttccatccaaagggacaatgttcaaayatgtttttgccattaataagggcatcattactgtgcatttttccagtagctgcaatcagctctcacactgcttaaaaagccttacacaaaatatgtgagataattaacattttacccacagtgaggttggagaaattgaggttttcctgggccacctcggtggtaaaggacacagctcagcactgccttgtgccagggcatcctgacctgcctggagcctgacaggattaaactaagaagctttccatttccagtcttttgctcatctaatggcctggactcttacaggaagctgtttca

SEQ ID NO: 2101 - DNA, 600 bp, Chicken  19866894088915_1
actgttgttcctgctctgctgctgacaaagggactattgtctgcatagcacaatgcaatgccaaagatagctgagtttgctttgaaaaaggaaccttactggttgtgtgtagtttctcctgaatgattgtttctgatacccactgtaactctcttatagcttgatttttctgcttagcactgtagtggaggtgtacttggagcccatactagttaaacctgtatcttggctagtgaaatacccctgcattcacattgatacagacttggaggttgatattcagttagcagatatagttgmatttataatgaaatcagcgtacaagagaattaaagagggagtggtatgtgatttcattggcttgaacacgttaactcagctttgcatggcaactttagcaaactgccagattgcttacaagccagagaacttctatagaataacttaatgtatttgacagtgttgcaatatgcaatgattttgttcctgtagctgagactttatcttgccacagtgccagtgattattattcatctcttctcgtgcataaggccagaccttctgtctaacacagatccctgcaaccttcaagagcttgtc

SEQ ID NO: 2102 - DNA, 600 bp, Chicken  19866894088918_1
gtttgctcctctttgatatagcatgtttctttcttatctttacaatttgaaacatacatgccaatgtttatattaatatgtattttgagatacatgcacatggacacacatacattgtgaatctgcttgagttctgtggccttgacttattagtgcacagacagtgacaatttctgagattaagagcagaatacacactatctctgtatacccagcataaatgacaggtcacggatttataatcaagtagaagcttactattttctatcaccttccatatttaactgacaaaatcatgcractaaagtggaaaataaatgaaaacaaatatagaatgtctgatactaatggatgcagtctgtttgagccttctgtttctgttctgctgccagaagccaccaaaaaaattccttagttgcctttctttctttttctttctccttgaagacaatacggaacacacgttaatagtttgaccggcaaactgattcactgcacatcttatctttggatgttttcctgcatttctacattttgatgtgtttttactggttttaattatatcagctttaatttcagcacttcaacagaaaatgggga

SEQ ID NO: 2103 - DNA, 600 bp, Chicken  19866894088920_1
aaacgatcactgatcactgaatgagcttcggcatacaatgctatgcgtttctgagatctataccctgatggaattctatggtggtttatacagtctcagcgttttcttgttttgtgactggccccattttgttgaaataggttaggtatgtaggagggaaatctttaagaatgaagtaaaaaaaaaagttcccttaatgttttaagtaaagaaaagtctaataattttttatattctaacatgctctagctgaacttatggagcacagagactgaacaagcaatgcatcaaaaaacttayttaatgtcctagaaaatgtattgcacattcatttctgtcccacatacaaaacctgccaaagttatttctgtatttactagcaatttttattatatatatcttaatatttaatactatatcttaatcttaatatattaaaaattcatttagattcatttagaaccacaatcatcttcccattttgctttaggagtttgtcatcaatacaaaagttgtattaatataagtcagcaagatatgactaggggtactaagtatttatattcctgcttactctacaggcctattacatgttaaaat

SEQ ID NO: 2104 - DNA, 599 bp, Chicken  19866894088921_1
  misc_feature (1)..(92): n is any nucleotide
nnnnnnnnnnnnnnnnnnnnnnnnnnnnnnnnnnnnnnnnnnnnnnnnnnnnnnnnnnnnnnnnnnnnnnnnnnnnnnnnnnnnnnnnnnnnatttttcattgttccttagtaatttcctcagtttgtttgtttgtttgtttttttaatacagacactgtagactctttttttatcctttctacattataatcaccagtaaagatccatctcctagaataaacacattgaaaatatattcagcaatttttcctatcactgcaatcttggcagaacgcagattaaaaaaaattcaattcgkagaaggtgaaggtgatgctgatcaatcagtggaagcaaattgacaaaatgagaatgctagtttttcaaatggcgtagtgagtcacagtactgctgctatgtcatggagacactggttttctctgtacaactggaagttatttcttttaagtggtacaaactwctgagactatcagataggatggtgctgccataatatcggacaaacatggatttttttwaatttttttttttatgtgagggctgctctgaaattaatgcctactgttttctaatgttagttcacagtgttagaggtgg

SEQ ID NO: 2105 - DNA, 600 bp, Chicken  19866894088921_2
actctttttttatcctttctacattataatcaccagtaaagatccatctcctagaataaacacattgaaaatatattcagcaatttttcctatcactgcaatcttggcagaacgcagattaaaaaaaattcaattcgkagaaggtgaaggtgatgctgatcaatcagtggaagcaaattgacaaaatgagaatgctagtttttcaaatggcgtagtgagtcacagtactgctgctatgtcatggagacactggttttctctgtacaactggaagttatttcttttaagtggtacaaactwctgagactatcagataggatggtgctgccataatatcggacaaacatggatttttttwaatttttttttttatgtgagggctgctctgaaattaatgcctactgttttctaatgttagttcacagtgttagaggtggatactgctggtacagcagtagagattaaacctctcccccttaattttgcattatattttgttgccatgtgagatatggcagcagacaggcagtctgacaaactggtgtctgacatgaaggtgactatgaagcaaatgcgtgtagctgaatgcacattctttga

SEQ ID NO: 2106 - DNA, 600 bp, Chicken  19866894088921_3
aacacattgaaaatatattcagcaatttttcctatcactgcaatcttggcagaacgcagattaaaaaaaattcaattcgkagaaggtgaaggtgatgctgatcaatcagtggaagcaaattgacaaaatgagaatgctagtttttcaaatggcgtagtgagtcacagtactgctgctatgtcatggagacactggttttctctgtacaactggaagttatttcttttaagtggtacaaactwctgagactatcagataggatggtgctgccataatatcggacaaacatggatttttttwaatttttttttttatgtgagggctgctctgaaattaatgcctactgttttctaatgttagttcacagtgttagaggtggatactgctggtacagcagtagagattaaacctctcccccttaattttgcattatattttgttgccatgtgagatatggcagcagacaggcagtctgacaaactggtgtctgacatgaaggtgactatgaagcaaatgcgtgtagctgaatgcacattctttgaagtttactgaatgtttatggcaaccaaacaggggatgcaagcacagtgaggtggtggg

SEQ ID NO: 2107 - DNA, 600 bp, Chicken  19866894088921_4
cacattgaaaatatattcagcaatttttcctatcactgcaatcttggcagaacgcagattaaaaaaaattcaattcgkagaaggtgaaggtgatgctgatcaatcagtggaagcaaattgacaaaatgagaatgctagtttttcaaatggcgtagtgagtcacagtactgctgctatgtcatggagacactggttttctctgtacaactggaagttatttcttttaagtggtacaaactwctgagactatcagataggatggtgctgccataatatcggacaaacatggatttttttwawtttttttttttatgtgagggctgctctgaaattaatgcctactgttttctaatgttagttcacagtgttagaggtggatactgctggtacagcagtagagattaaacctctcccccttaattttgcattatattttgttgccatgtgagatatggcagcagacaggcagtctgacaaactggtgtctgacatgaaggtgactatgaagcaaatgcgtgtagctgaatgcacattctttgaagtttactgaatgtttatggcaaccaaacaggggatgcaagcacagtgaggtggtgggtg

SEQ ID NO: 2108 - DNA, 600 bp, Chicken  19866894088921_5
acattgaaaatatattcagcaatttttcctatcactgcaatcttggcagaacgcagattaaaaaaaattcaattcgkagaaggtgaaggtgatgctgatcaatcagtggaagcaaattgacaaaatgagaatgctagtttttcaaatggcgtagtgagtcacagtactgctgctatgtcatggagacactggttttctctgtacaactggaagttatttcttttaagtggtacaaactwctgagactatcagataggatggtgctgccataatatcggacaaacatggatttttttwaawttttttttttatgtgagggctgctctgaaattaatgcctactgttttctaatgttagttcacagtgttagaggtggatactgctggtacagcagtagagattaaacctctcccccttaattttgcattatattttgttgccatgtgagatatggcagcagacaggcagtctgacaaactggtgtctgacatgaaggtgactatgaagcaaatgcgtgtagctgaatgcacattctttgaagtttactgaatgtttatggcaaccaaacaggggatgcaagcacagtgaggtggtgggtgg

SEQ ID NO: 2109 - DNA, 600 bp, Chicken  19866894088923_1
ggttaaaaaaacttcaattagagacaatcgctcgctgtgttttgctgcctcgcactcgttcggcccggagccaggcagcagcaggatttaggggcctgaggacaaacatcagctggaggatgctcagctgggctcatggggctgtgggaggctgtaattggagagcttcaggcagcgcttcgggagcggccgtgccgcacaagcgaggtgctgctcgcctcgtgttaggccagccgtgcagggcaggacccttggaagagtgatgaacagctcaacaaatgggcaaaatgcttgaaaggrggggggwggggggatgggaaaggacaggcttgtctaattagaaaagaggtttgcacttagtcacccagcacagcgcccggggctgtaactccagacactgctgtgcaaaggctgacagctctctcagacacaccgagctgtcagcctgggctttgtaaccacagagcttccacggggaaaaacaacctctgtgctcatcaccagcagcagaggagagcccttctacacctaaacacgtcttccaacagtgagacccaccgaacacagctccagtccagcacagcagtcctcaggcacttc

SEQ ID NO: 2110 - DNA, 600 bp, Chicken  19866894088923_2
aaaacttcaattagagacaatcgctcgctgtgttttgctgcctcgcactcgttcggcccggagccaggcagcagcaggatttaggggcctgaggacaaacatcagctggaggatgctcagctgggctcatggggctgtgggaggctgtaattggagagcttcaggcagcgcttcgggagcggccgtgccgcacaagcgaggtgctgctcgcctcgtgttaggccagccgtgcagggcaggacccttggaagagtgatgaacagctcaacaaatgggcaaaatgcttgaaaggrggggggwggggggatgggaaaggacaggcttgtctaattagaaaagaggtttgcacttagtcacccagcacagcgcccggggctgtaactccagacactgctgtgcaaaggctgacagctctctcagacacaccgagctgtcagcctgggctttgtaaccacagagcttccacggggaaaaacaacctctgtgctcatcaccagcagcagaggagagcccttctacacctaaacacgtcttccaacagtgagacccaccgaacacagctccagtccagcacagcagtcctcaggcacttcggggcca

SEQ ID NO: 2111 - DNA, 600 bp, Chicken  19866894088931_1
tagcaccacatgattccagtcaatataattattacggtttctaataaaaagccagcacttgcttggttacataatactatcattttgtagacaacagaactgtgactgtgttataaaacattttattttggctatgattccatgaacaactttctcactttgcttctcttaagtttatggaagcagagtgagtccggtactgacagcctagaaggaaacaggtactcattttgtgtaactatctgtgtacaatttaagtgaagtgaggaatatatggccatctttacagttgccatcacrttgtgttgggtaccaccgatggaggaaatcagtgctttgttccactcagtgttttgttccacctctccatccttgtgacactttttcccatattgaattatactagagttattgttagttttgtattgctacttacaagctttccatacacattttcatatatgtttccagataatgtaccattaaaagactttcaatgtctactatmgttcttcttgatgcctgacaattttatatcatccttattcatgaggaacaattcacctcacagttcaggacaaggagtatgcccaccatacc

SEQ ID NO: 2112 - DNA, 534 bp, Chicken  19866894088931_2
tagaaggaaacaggtactcattttgtgtaactatctgtgtacaatttaagtgaagtgaggaatatatggccatctttacagttgccatcacrttgtgttgggtaccaccgatggaggaaatcagtgctttgttccactcagtgttttgttccacctctccatccttgtgacactttttcccatattgaattatactagagttattgttagttttgtattgctacttacaagctttccatacacattttcatatatgtttccagataatgtaccattaaaagactttcaatgtctactatmgttcttcttgatgcctgacaattttatatcatccttattcatgaggaacaattcacctcacagttcaggacaaggagtatgcccaccataccctgactattgaatacacaagttcttgcctgtctcaatctaaactagttaaaaggaactgtggagttttcaagctattgcctctgtgaattcctgcaatagttactgcacattagcacataagataatcatagtcttgcaaat

SEQ ID NO: 2113 - DNA, 600 bp, Chicken  19866894088932_1
ttaattcagccaccacaagtttacagctggactaagtggaattacagcatataaacctgaaaatctatctgcagggatccagctaagccctggagagagacaagtccagcaatacaaatccaaggaattttggaagtcaatccattaggattactaggcctttgattttggaagtcataggctcaaaaaatggaggcaatgaactctcaatcttcctgtattttagcctattttcagaggacttactgaccccatttcttttctattaaaacataccagtaaacatagatagaactatamaatttttccactgcatttgcaatagaggaagacggaaaaatatatattttcccaatatcattgttatcatcatccttaaaatttcttatatattttctttgtacttggaggtgtcaataagcaaactggccatcttccttctcagctaaaaaccactctccttctctttaaagttcaggtttatttttggtatgctgtgctctaactgaactacaaactgtgtcccagaggtgaagaaatctctgtgccccctgcagacagggattatattctcaatgggcagtctcttatttaagcctt

SEQ ID NO: 2114 - DNA, 600 bp, Chicken  19866894088934_1
agttttcaaactctgcaaatgtagggttgatgtttctaactggacactgcctactgactattatgctatagtgcttggtttaaaacttggtgaatttagggcttttgaaggctgacagcctgacagcactttcagctacagtccactcaccataggacaacaggagcactgttcttcctcccactgttccttcagtaggcctcaaattgggtgacagaattatcacagctccatgtgtaggcactcctccggtatttttggatctctgctcttactgaaacatgtagcactaaataaagwctacaaacattacttaagaaaaccacacttctacaataaatctaacattttttttcccttaggaaattatcagctcttcagtagttaggagtaatgtagaggtagagcttktatgcaggtttatttactgcagtgaagtacacayccatcgtacaaagcaaataagcattcaggtcagagcaatgacaatgagacttcactttcctgccatcacagagaaataccataacacagtgacacactgacaggctatgaagactcacttgtgttcctaccaaagggattattttgctacccctc

SEQ ID NO: 2115 - DNA, 600 bp, Chicken  19866894088934_2
ctgacagcctgacagcactttcagctacagtccactcaccataggacaacaggagcactgttcttcctcccactgttccttcagtaggcctcaaattgggtgacagaattatcacagctccatgtgtaggcactcctccggtatttttggatctctgctcttactgaaacatgtagcactaaataaagwctacaaacattacttaagaaaaccacacttctacaataaatctaacattttttttcccttaggaaattatcagctcttcagtagttaggagtaatgtagaggtagagcttktatgcaggtttatttactgcagtgaagtacacayccatcgtacaaagcaaataagcattcaggtcagagcaatgacaatgagacttcactttcctgccatcacagagaaataccataacacagtgacacactgacaggctatgaagactcacttgtgttcctaccaaagggattattttgctacccctcccaagagttacagtgtctgacctctgataataaaacgaaagtggctttttgtggttgctggtacctagagctatacaagatgtgaaggaggatgggtgtggtttgttttcc

SEQ ID NO: 2116 - DNA, 600 bp, Chicken  19866894088934_3
ctcaccataggacaacaggagcactgttcttcctcccactgttccttcagtaggcctcaaattgggtgacagaattatcacagctccatgtgtaggcactcctccggtatttttggatctctgctcttactgaaacatgtagcactaaataaagwctacaaacattacttaagaaaaccacacttctacaataaatctaacattttttttcccttaggaaattatcagctcttcagtagttaggagtaatgtagaggtagagcttktatgcaggtttatttactgcagtgaagtacacayccatcgtacaaagcaaataagcattcaggtcagagcaatgacaatgagacttcactttcctgccatcacagagaaataccataacacagtgacacactgacaggctatgaagactcacttgtgttcctaccaaagggattattttgctacccctcccaagagttacagtgtctgacctctgataataaaacgaaagtggctttttgtggttgctggtacctagagctatacaagatgtgaaggaggatgggtgtggtttgttttccatgacatggcagttttgatccatgaaaatcacaa

SEQ ID NO: 2117 - DNA, 600 bp, Chicken  19866894088934_4
tagcttgctctgactgtctttgtgcaatcatttatgaacagggactccttaggaatacttctggtttccatccccctcttggctcagaagtacttcctgcagtaatctccaacttttcagggacttccttcagaagaacatttgactactcaggctttgcaccatgtatagacaaactaatccaaactccagaagcactggctctgctagctctacatcttctcattatagcctaaatcccagttcattactctgtgagacctggcaaatggagaaagttctgaccaagacctatagaargaactccaggaaagcaccakggtgttgcagataatagtgcagtagacataatcattcttatcactgtaaatactaaactcagacatatgataacrtgactgtygcgttcttgtgacatcctggtgtcagtgggactcatcaaaatcagagcaagaccaactccctcagcctttctttttaggagaggtgctctatccctctggccatcttcatggcctcctgtggacctgctccagcaactccacatcttggtctgggagcaccaggcttgaatacaatactgcaggtggggccttctca

SEQ ID NO: 2118 - DNA, 600 bp, Chicken  19866894088934_5
tgtgcaatcatttatgaacagggactccttaggaatacttctggtttccatccccctcttggctcagaagtacttcctgcagtaatctccaacttttcagggacttccttcagaagaacatttgactactcaggctttgcaccatgtatagacaaactaatccaaactccagaagcactggctctgctagctctacatcttctcattatagcctaaatcccagttcattactctgtgagacctggcaaatggagaaagttctgaccaagacctatagaargaactccaggaaagcaccakggtgttgcagataatagtgcagtagacataatcattcttatcactgtaaatactaaactcagacatatgataacrtgactgtygcgttcttgtgacatcctggtgtcagtgggactcatcaaaatcagagcaagaccaactccctcagcctttctttttaggagaggtgctctatccctctggccatcttcatggcctcctgtggacctgctccagcaactccacatcttggtctgggagcaccaggcttgaatacaatactgcaggtggggccttctcaagggtggagcagaaggagac

SEQ ID NO: 2119 - DNA, 600 bp, Chicken  19866894088934_6
cctgcagtaatctccaacttttcagggacttccttcagaagaacatttgactactcaggctttgcaccatgtatagacaaactaatccaaactccagaagcactggctctgctagctctacatcttctcattatagcctaaatcccagttcattactctgtgagacctggcaaatggagaaagttctgaccaagacctatagaargaactccaggaaagcaccakggtgttgcagataatagtgcagtagacataatcattcttatcactgtaaatactaaactcagacatatgataacrtgactgtygcgttcttgtgacatcctggtgtcagtgggactcatcaaaatcagagcaagaccaactccctcagcctttctttttaggagaggtgctctatccctctggccatcttcatggcctcctgtggacctgctccagcaactccacatcttggtctgggagcaccaggcttgaatacaatactgcaggtggggccttctcaagggtggagcagaaggagactatcacctcccttgactgtgcttctttttatgctctttaggatatgattggctgtaagaacacactggaaaacaa

SEQ ID NO: 2120 - DNA, 600 bp, Chicken  19866894088934_7
aatctccaacttttcagggacttccttcagaagaacatttgactactcaggctttgcaccatgtatagacaaactaatccaaactccagaagcactggctctgctagctctacatcttctcattatagcctaaatcccagttcattactctgtgagacctggcaaatggagaaagttctgaccaagacctatagaargaactccaggaaagcaccakggtgttgcagataatagtgcagtagacataatcattcttatcactgtaaatactaaactcagacatatgataacrtgactgtygcgttcttgtgacatcctggtgtcagtgggactcatcaaaatcagagcaagaccaactccctcagcctttctttttaggagaggtgctctatccctctggccatcttcatggcctcctgtggacctgctccagcaactccacatcttggtctgggagcaccaggcttgaatacaatactgcaggtggggccttctcaagggtggagcagaaggagactatcacctcccttgactgtgcttctttttatgctctttaggatatgattggctgtaagaacacactggaaaacaaagtcttaa

SEQ ID NO: 2121 - DNA, 600 bp, Chicken  19866894088934_8
tccagcaactccacatcttggtctgggagcaccaggcttgaatacaatactgcaggtggggccttctcaagggtggagcagaaggagactatcacctcccttgactgtgcttctttttatgctctttaggatatgattggctgtaagaacacactggaaaacaaagtcttaatcaaggaataaactgctgttcaggtaagaagtagtttagaataatgaatggcttattcacattgggcatgcttttctatctcattgtggtcctaggtaattgtattgtagtgaggtggcaagaagtgrcaagatcagaatraaacctaatttacctacttcaaagaagtccagattctctgcatctgaacaatttagtttggttttctcatctgtcattgacattagtagatcaagaccataaaagttattttcccataactcattagaacgtattaagaaaaagctaataggaagcaagtgaaaatagtatattttcccttgtgtgcatttggcgctaataaaatttccattctctacaaggattaaataacaccagaaaaggatgagaaacatcaaatccagaaaaatggtaacagcgacaagaac

SEQ ID NO: 2122 - DNA, 600 bp, Chicken  19866894088934_9
catcttggtctgggagcaccaggcttgaatacaatactgcaggtggggccttctcaagggtggagcagaaggagactatcacctcccttgactgtgcttctttttatgctctttaggatatgattggctgtaagaacacactggaaaacaaagtcttaatcaaggaataaactgctgttcaggtaagaagtagtttagaataatgaatggcttattcacattgggcatgcttttctatctcattgtggtcctaggtaattgtattgtagtgaggtggcaagaagtgrcaagatcagaatraaacctaatttacctacttcaaagaagtccagattctctgcatctgaacaatttagtttggttttctcatctgtcattgacattagtagatcaagaccataaaagttattttcccataactcattagaacgtattaagaaaaagctaataggaagcaagtgaaaatagtatattttcccttgtgtgcatttggcgctaataaaatttccattctctacaaggattaaataacaccagaaaaggatgagaaacatcaaatccagaaaaatggtaacagcgacaagaacaaaaacaaacaaa

SEQ ID NO: 2123 - DNA, 600 bp, Chicken  19866894088938_1
tttttgaagtataattgttccttttcaccggtttctttggctccagtgtgactttgaagccagcgcttcttagcgctacacagagatttctatggccaaacgtattgataaagggctgaaacctctgctgatgcagtgtggagactacatttatctgtcaatgggagtccataagcaatgaatctttcttgctgctggaagtcagagaattcttagctgctagaagagactggactcaagcacttcttgcagtaggtaagaagtatggttgtgcagtttaaaaacatatgtgaaagtgtygtgtgtttggaggaacaagccatgcacttgggaatagctgaaggaactggacaaggagagattttaccattcaagtcatttaggttcagcacttatgaagaggttttacaacatgaacaactgtgtcaaagaaagggaacactgtttctagctaggtagctagaaaatcttaccctgggtgttgtatatggagacctcaccagctcactgcctgtagaaacaagtttttgtctggaaaaagaacagtgttctcccttcttaatgtatatttcacatactaaactgatttcttccataaaa

SEQ ID NO: 2124 - DNA, 585 bp, Chicken  19866894088938_2
tcttccataaaactgaataaattctatttcactagctttgaaaggaatagagtacagttagtgacagagaagttgctttggcattcaacatttatttgtcatcagctactgccatattaaattgttccatttacaagctaccatacttcctttttcctgagtgcctgatgctctgtctagttgtggaaaatgaagctcagttgtttatgacctgtgttgcacttcattactagccttcaacaagtgtacaagttccggaatgagaataaagcttcactggtggtgacacagcatgaggcraaatataatgcatattactgttgcacacctgtgctgcttttcccttgcttattgagatcaaagtttgccttgctagcagacaaaatagatatggcttaaagagccaatattctcttattgacatacccttgatcatattaacattaatgagcaatatggacatatattgacaagtgagtagacacttaagtaagcacataacctcgggaacaaaggtcatttttatggagtcatttttctgaccttaacactgacactgtctgccacagcattctcctggggaag

SEQ ID NO: 2125 - DNA, 599 bp, Chicken  19866894088939_1
  misc_feature (1)..(207): n is any nucleotide
nnnnnnnnnnnnnnnnnnnnnnnnnnnnnnnnnnnnnnnnnnnnnnnnnnnnnnnnnnnnnnnnnnnnnnnnnnnnnnnnnnnnnnnnnnnnnnnnnnnnnnnnnnnnnnnnnnnnnnnnnnnnnnnnnnnnnnnnnnnnnnnnnnnnnnnnnnnnnnnnnnnnnnnnnnnnnnnnnnnnnnnnnnnnnnnnnnnnnnnnnnnnnnnacccaccaccaatatgcccactaaccgtgtcccacagtgctacatctacccaaacctctgcaaactgtttgctactgcaaacctccctgaaamacttctgtgaggagtctgttcctttctgcctggcacaggtccaggcagagccaggggctccctcctgatcacccagccattgcaggacatcttcacttgctctacctactcgtgtgtctgggagaaccacagttggcagccagtgggtgtcatcagagcagtcccccaccttcgtggtagctgctgggtaaggaaacacagagcaaaacagttccaaaagagctcctttggggttggatgctcagctgatatcagctggcaccactaggccgaaaccaggagagctgccccacagcgtc

SEQ ID NO: 2126 - DNA, 600 bp, Chicken  19866894088942_1
tattcttatggcatgtgcatgcctcttctgccatcccaaaatacattcatgaaaggtgaatcagacctcagtgagatccttgaccccttaacagaatagattcaagcatcatttggagagactaagccagcaaacatcacaaaatgctatctagcatcttccctgtgctgcagtgacacctgcttttgttgaatacttttccctcccacaaattagaccttatcgcccccctctcctttttatcgtcatcagtgatcaaagtaatatcttgggcaatggtaaaacagaaccagctcctgktgtcttttctcagatcgttccctgctctgggcaggctggctgcaggacccatgcagagaccaaaagaatggtcagaatccatttgccttgttgctcattggcaggttacgtgctctctgtcattaaaccctcctttaatgtggtcctgatccagcattactggcacaaacagaaggtctccctatgctatttacatgacacgtgagatacgtgacccaaattaatatataaatatatataataggattaatctaaaaccggaaaaggaaatctccatttgcagccaaattgtttgtggtt

SEQ ID NO: 2127 - DNA, 600 bp, Chicken  19866894088943_1
gtaaaatatttaaaattaataaaattcaaaataattaaactgaaatggaaatgtttcacagcagagtataacaagaggcagttacaaagatctatcttcttgacaagagcttataaaattattaccctctcatactgaaggatacttaagagagttgcgtctgacttcttaaaaccaatcaaacttgagatggtaggactgaaagtagaatgggaacagaacatcatttctgaagcattgttaactgctaaggtttcgagttctctcaaattcattttgatgacagcacaccaattacaraagacaaagatcagtccagtaatgtttttgcacaccaaatatattattactgtagaaaaaaaaaaccacatttcatacttaaaaatatatatattttgcagcttaaatttaaatttaggttaaatccttctaatgtgtttaatgtttatccattaaacatgataaatacacacacccaaacaaacaaaattccaaaacataattaactgagcctatagaactaagtggaggaaaaaagatcatagaatcatagaatcgcctgggttgaaaaggactataatgatcatttagcttcaacac

SEQ ID NO: 2128 - DNA, 600 bp, Chicken  19866894088946_1
gccgttcagggtgggttgtcagaccctgtggtttcggtgtgtgttgtagggattccttagggggtgcgttctgcagtttctcagtgcgagggggaggtttttcggtgagccgtgaaggctgcggcctgggtacgtgtgctcggttttgtatttacttttctggagaagctccagtgaaactcttctctgagtaactccagaggcctcctgcacagcctgagcaaatggaattcccacaacagacactccgaatcttatttttatttttttttaataaccgccacttaataaaaggctgcygctgcatacactcactccttactcattcagaatgtatttgattataccaaactgcagagtgtagatgacaggagaacattgcaatttgcaatgggggggttggtatttcattcttactgtgacctgtgaaggacccagagaggccgactgctgaagggcaatccatgggactcgctcagaagaagaattaatgacgaggaagccctgggctgtgagaagattattttcttttattaagttatactaggcaaacatgtgcacagacatgactgacccactccaaagtccatctgcattcac

SEQ ID NO: 2129 - DNA, 600 bp, Chicken  19866894088946_2
tataccaaactgcagagtgtagatgacaggagaacattgcaatttgcaatgggggggttggtatttcattcttactgtgacctgtgaaggacccagagaggccgactgctgaagggcaatccatgggactcgctcagaagaagaattaatgacgaggaagccctgggctgtgagaagattattttcttttattaagttatactaggcaaacatgtgcacagacatgactgacccactccaaagtccatctgcattcacaaaccctggctgagctctggattaagtcccaagtctctgagraggacaggggagttgatctttgggactgcatgtgcctgaccccgtggagctgggctctggtgagagtggggctgtggaggaggcagcgagcagcatggcgtggtcacatccctccctctaagcgtgcactttctgaaatgttgaggttggaaagccattgaaaatgtctagaatggcaaatataaatagtaaatgttgctctctactgttatcagttagtatgtcctgcctcaccgctgccagctatgagaaatctcactttctttgtagcagtcactttctgcagagcacatatacgtg

SEQ ID NO: 2130 - DNA, 600 bp, Chicken  19866894088946_3
ggcacagcaagaggataaactgcgtggtccatagaggaagccaagaacttaaactggttcctgaagtagctctgttagggttgtttggtgcacaacacctgatgtcatatggagttgttgtagaacagtgtgtgccaggagggatgttatggtttaggcattgtattcctcatggattgcgtgtgaatgacaaagcagagttttcaccttaagcctctaaatgacttagatgattttttaaaagaaagtaatgctagttttcagggaaaacgcaatcaaacgttgacttgccaaaagtcrtgagcagattagtagaaggaaaagagcaataagtaaacatgtccattgggcaatgtaattttaaagcaaataaatatgatccatgagttatattttggaatcgggaatatttttaaaagttttactggtgtaacatttggtctctcggtgatttcattcagttaattgcagtcaattattttgtgcatctctgtgtcatgggagggtcccctcacagcacagaggctctggtatckctgtgtatcctgacttgccagtaaattttctgagaggataatttggatgggagcacactgcgac

SEQ ID NO: 2131 - DNA, 600 bp, Chicken  19866894088946_4
tttaaaagaaagtaatgctagttttcagggaaaacgcaatcaaacgttgacttgccaaaagtcrtgagcagattagtagaaggaaaagagcaataagtaaacatgtccattgggcaatgtaattttaaagcaaataaatatgatccatgagttatattttggaatcgggaatatttttaaaagttttactggtgtaacatttggtctctcggtgatttcattcagttaattgcagtcaattattttgtgcatctctgtgtcatgggagggtcccctcacagcacagaggctctggtatckctgtgtatcctgacttgccagtaaattttctgagaggataatttggatgggagcacactgcgacagcagaaggcagtgaraagagattattggaagcaaggatgttcactacagggctgttcctggtgtcctgcataactcgtgcttctgggcagcacagcaatccagccagccttagaaatgtgactgaggctgaatatcaggcactgcacaaaaagagctcaggtttactgcagcaggccttagtgatgttctccgagatagctaagcagtctgccagtgaaattttatatcagttat

SEQ ID NO: 2132 - DNA, 600 bp, Chicken  19866894088946_5
aggaaaagagcaataagtaaacatgtccattgggcaatgtaattttaaagcaaataaatatgatccatgagttatattttggaatcgggaatatttttaaaagttttactggtgtaacatttggtctctcggtgatttcattcagttaattgcagtcaattattttgtgcatctctgtgtcatgggagggtcccctcacagcacagaggctctggtatckctgtgtatcctgacttgccagtaaattttctgagaggataatttggatgggagcacactgcgacagcagaaggcagtgaraagagattattggaagcaaggatgttcactacagggctgttcctggtgtcctgcataactcgtgcttctgggcagcacagcaatccagccagccttagaaatgtgactgaggctgaatatcaggcactgcacaaaaagagctcaggtttactgcagcaggccttagtgatgttctccgagatagctaagcagtctgccagtgaaattttatatcagttataaatgttaattaatttataatggtaagaaaagatagctcttcctgaaagaactgcatcaacaagaggacttttaatggaa

SEQ ID NO: 2133 - DNA, 600 bp, Chicken  19866894088946_6
cctgcataactcgtgcttctgggcagcacagcaatccagccagccttagaaatgtgactgaggctgaatatcaggcactgcacaaaaagagctcaggtttactgcagcaggccttagtgatgttctccgagatagctaagcagtctgccagtgaaattttatatcagttataaatgttaattaatttataatggtaagaaaagatagctcttcctgaaagaactgcatcaacaagaggacttttaatggaaatgtgattacaagaatcatgctttttaattcacgtaattgtaccagtcragatttcaggcctagcttgctaaaaatgaaagatagaggagctgaggtttcacatcatgaaagcattcattaggagctaaagccatggagaactgggctggagcagaacagggctgtgaaccaggagatgtggtgccatgtgcagagctgaaatgtgtcagtgtgccaggccagcagaaatgccttcctggrggaaaaggaaagtcaccaaatcctgtatgagattagtgccagtttgaaacagtcttctgcttgctagcctgctggcatgtgacataagcacgtgttggttgtagctgt

SEQ ID NO: 2134 - DNA, 600 bp, Chicken  19866894088946_7
ggtaagaaaagatagctcttcctgaaagaactgcatcaacaagaggacttttaatggaaatgtgattacaagaatcatgctttttaattcacgtaattgtaccagtcragatttcaggcctagcttgctaaaaatgaaagatagaggagctgaggtttcacatcatgaaagcattcattaggagctaaagccatggagaactgggctggagcagaacagggctgtgaaccaggagatgtggtgccatgtgcagagctgaaatgtgtcagtgtgccaggccagcagaaatgccttcctggrggaaaaggaaagtcaccaaatcctgtatgagattagtgccagtttgaaacagtcttctgcttgctagcctgctggcatgtgacataagcacgtgttggttgtagctgtagttagagcatggctaagagtgaaaggacttgactgcataaacagaaacaaaacgtgcgcaacgactgctggtcgaaagaacaaggagaataaaaggtgttttcctcacttgttttaagcagtaacacccggtgtgaaggagggcttgttctttgggagtgcagcccctcctggctgcccacacagtgcctt

SEQ ID NO: 2135 - DNA, 600 bp, Chicken  19866894088950_1
tccggcgtgctgtgagctgggtgagagctcgaccctgctggcacacagcctgcgtttgcatgcggaaggtatcactgggaagtgacattgttggggtgacactgggatgatgtttggggcatttaccttccatattcctgggtggttgttttttttctgaggtggatccatgcatttcccaaagtttggatctaaagactgaaagctgtcctggcagagctggctttgagtactgctgaggaacgacactcagcccagcttggagacagagagcagcacccagtgctgaatccatgcagstgggcagcgccctgacgtgcctgaacacactgatgcatacttctgcaccccttccctgcagacacctctcccttccccttcagtcaccccctccagccyggtgaatccttctaaaaaatggcctttatttgaaactggggcacaagcagctttccccagaagcaatagtttttcttacaaccaataaagcacccagcgagccgatggctggttggaaggcaaaggtcgttccctccacgagatcccagcatgatgaaccagttaagaggaactcaggccaatttatttcttgatagataa

SEQ ID NO: 2136 - DNA, 600 bp, Chicken  19866894088950_2
cactgggatgatgtttggggcatttaccttccatattcctgggtggttgttttttttctgaggtggatccatgcatttcccaaagtttggatctaaagactgaaagctgtcctggcagagctggctttgagtactgctgaggaacgacactcagcccagcttggagacagagagcagcacccagtgctgaatccatgcagstgggcagcgccctgacgtgcctgaacacactgatgcatacttctgcaccccttccctgcagacacctctcccttccccttcagtcaccccctccagccyggtgaatccttctaaaaaatggcctttatttgaaactggggcacaagcagctttccccagaagcaatagtttttcttacaaccaataaagcacccagcgagccgatggctggttggaaggcaaaggtcgttccctccacgagatcccagcatgatgaaccagttaagaggaactcaggccaatttatttcttgatagataacgataggagttttcaccggggatctgtaattttctattgatgaaaatctgccttttctgatttgcagagttatctgtctttctaaacttcagggctctt

SEQ ID NO: 2137 - DNA, 600 bp, Chicken  19866894088953_1
gatggctggttggaaggcaaaggtcgttccctccacgagatcccagcatgatgaaccagttaagaggaactcaggccaatttatttcttgatagataacgataggagttttcaccggggatctgtaattttctattgatgaaaatctgccttttctgatttgcagagttatctgtctttctaaacttcagggctcttgccaaattcgcaggcagccctgtgaaagcgccgtgtcccacaagagccatgtattttaatatgaagtagttttctttgccctggatccaggagtggttctccwtgctgacaacccataaaagacctaatgacccatctgagggacattaacggcgcgctggccattggagacggtgggtttgtttgttttcagccccctgcttgggattgtaatttcgggagaggatctttggggtcgagttgggtcctcagggccttttagcacggtgtaattaaaaatcacaccgaagggtagcttagcccttaatgtttaaagcctggtgtgtcaggtgctgggcagtcaagccttgctcagcagcctgggctggcagctggtttcgcctttccaaccctctgcccacag

SEQ ID NO: 2138 - DNA, 600 bp, Chicken  19866894088956_1
gctcaccaaggttcggctgactgacttacatcaaactcctcatagacataagaaggaactttatgcttcatgacaaagcaggcttagggggtgcagaaccacaggtccagttctcagggcccatacgccaatggacatgggaatcctaaccaggattagcagatggatcaaggcgtttaagactgcatttgcagagctgaataactaaaggaagctcagccatccatagggcatttcaagttctccctcagcaggacaaaaaggcagcaatagggaagggatctcctggcctgacagccrctgccctagcttgaatgctgtgaggctctttcagttctgcagatagtagttctgtaaacaggaattacctttggacccttaaaaaaacctcacgtactatgtcattctggaatggtgctaatctctattgcagaggtcaaagcgagctttctattataagctccgtggaacacacctacttcccagccactcacttgcatggaacaaaatccagccggtcagaatgccctgtgtgtaacaggatgccagagctggagcttgaggcaatgcgggtgaggcactttgaagccatgagacctc

SEQ ID NO: 2139 - DNA, 600 bp, Chicken  19866894088956_2
cactcacaaagtcccaaccttgcagtcacgtggcctggagcaatgccctaaagcacaaacactgatagctggggtgtggtaaagctgggggttagctgaggaccctcagcttctctttctttacacattttctgtgtattttcctaggggtctggagcgcacattgcctgtgatgataaacttatcagcagcagagtgaaacatccgtttcatttgcactgtttacagacagcatatttctctggttggtgagttgggattgagtgaacacggtgaggctgtttttcacctgtccccatyggcrctcctcttarcaccaagctgcacatcagaagatgggggacagatgctgccctggggccttcccctgccctgatgctgaagtcctctacccctgcatgcaccctccccagcccygagccctgrtgatgaggaaaggccgtggcacagtatgyggactccgattacatctccaaacaggaggagcacacaatcggtgggagccgcctgctttctagcccctttgtgctcaggggcagaaatacaaataagcctccatgtctttttcctgcttatgtgaacagagatccgtttttcaat

SEQ ID NO: 2140 - DNA, 600 bp, Chicken  19866894088956_3
cacaaagtcccaaccttgcagtcacgtggcctggagcaatgccctaaagcacaaacactgatagctggggtgtggtaaagctgggggttagctgaggaccctcagcttctctttctttacacattttctgtgtattttcctaggggtctggagcgcacattgcctgtgatgataaacttatcagcagcagagtgaaacatccgtttcatttgcactgtttacagacagcatatttctctggttggtgagttgggattgagtgaacacggtgaggctgtttttcacctgtccccatyggcrctcctcttarcaccaagctgcacatcagaagatgggggacagatgctgccctggggccttcccctgccctgatgctgaagtcctctacccctgcatgcaccctccccagcccygagccctgrtgatgaggaaaggccgtggcacagtatgyggactccgattacatctccaaacaggaggagcacacaatcggtgggagccgcctgctttctagcccctttgtgctcaggggcagaaatacaaataagcctccatgtctttttcctgcttatgtgaacagagatccgtttttcaatagca

SEQ ID NO: 2141 - DNA, 600 bp, Chicken  19866894088956_4
caaccttgcagtcacgtggcctggagcaatgccctaaagcacaaacactgatagctggggtgtggtaaagctgggggttagctgaggaccctcagcttctctttctttacacattttctgtgtattttcctaggggtctggagcgcacattgcctgtgatgataaacttatcagcagcagagtgaaacatccgtttcatttgcactgtttacagacagcatatttctctggttggtgagttgggattgagtgaacacggtgaggctgtttttcacctgtccccatyggcrctcctcttarcaccaagctgcacatcagaagatgggggacagatgctgccctggggccttcccctgccctgatgctgaagtcctctacccctgcatgcaccctccccagcccygagccctgrtgatgaggaaaggccgtggcacagtatgyggactccgattacatctccaaacaggaggagcacacaatcggtgggagccgcctgctttctagcccctttgtgctcaggggcagaaatacaaataagcctccatgtctttttcctgcttatgtgaacagagatccgtttttcaatagcaggccccaaca

SEQ ID NO: 2142 - DNA, 600 bp, Chicken  19866894088956_5
tctttacacattttctgtgtattttcctaggggtctggagcgcacattgcctgtgatgataaacttatcagcagcagagtgaaacatccgtttcatttgcactgtttacagacagcatatttctctggttggtgagttgggattgagtgaacacggtgaggctgtttttcacctgtccccatyggcrctcctcttarcaccaagctgcacatcagaagatgggggacagatgctgccctggggccttcccctgccctgatgctgaagtcctctacccctgcatgcaccctccccagcccygagccctgrtgatgaggaaaggccgtggcacagtatgyggactccgattacatctccaaacaggaggagcacacaatcggtgggagccgcctgctttctagcccctttgtgctcaggggcagaaatacaaataagcctccatgtctttttcctgcttatgtgaacagagatccgtttttcaatagcaggccccaacagataagtatttgctttgcctggtatttattttggtggtgaaggccctttcattggctctcgagacagtaccctgcagcacctgggggtgcaggtagagccatg

SEQ ID NO: 2143 - DNA, 600 bp, Chicken  19866894088956_6
attttctgtgtattttcctaggggtctggagcgcacattgcctgtgatgataaacttatcagcagcagagtgaaacatccgtttcatttgcactgtttacagacagcatatttctctggttggtgagttgggattgagtgaacacggtgaggctgtttttcacctgtccccatyggcrctcctcttarcaccaagctgcacatcagaagatgggggacagatgctgccctggggccttcccctgccctgatgctgaagtcctctacccctgcatgcaccctccccagcccygagccctgrtgatgaggaaaggccgtggcacagtatgyggactccgattacatctccaaacaggaggagcacacaatcggtgggagccgcctgctttctagcccctttgtgctcaggggcagaaatacaaataagcctccatgtctttttcctgcttatgtgaacagagatccgtttttcaatagcaggccccaacagataagtatttgctttgcctggtatttattttggtggtgaaggccctttcattggctctcgagacagtaccctgcagcacctgggggtgcaggtagagccatgatccaggga

SEQ ID NO: 2144 - DNA, 600 bp, Chicken  19866894088956_7
agcgcacattgcctgtgatgataaacttatcagcagcagagtgaaacatccgtttcatttgcactgtttacagacagcatatttctctggttggtgagttgggattgagtgaacacggtgaggctgtttttcacctgtccccatyggcrctcctcttarcaccaagctgcacatcagaagatgggggacagatgctgccctggggccttcccctgccctgatgctgaagtcctctacccctgcatgcaccctccccagcccygagccctgrtgatgaggaaaggccgtggcacagtatgyggactccgattacatctccaaacaggaggagcacacaatcggtgggagccgcctgctttctagcccctttgtgctcaggggcagaaatacaaataagcctccatgtctttttcctgcttatgtgaacagagatccgtttttcaatagcaggccccaacagataagtatttgctttgcctggtatttattttggtggtgaaggccctttcattggctctcgagacagtaccctgcagcacctgggggtgcaggtagagccatgatccagggatgcttccacacctgctgcagtgccacacc

SEQ ID NO: 2145 - DNA, 600 bp, Chicken  19866894088956_8
gcccctttgtgctcaggggcagaaatacaaataagcctccatgtctttttcctgcttatgtgaacagagatccgtttttcaatagcaggccccaacagataagtatttgctttgcctggtatttattttggtggtgaaggccctttcattggctctcgagacagtaccctgcagcacctgggggtgcaggtagagccatgatccagggatgcttccacacctgctgcagtgccacaccatccacatgcagcctgggcacacccagacacggggctgtgcttttgcacaactcagagtcartttgcagagctcagaggtttggctgaagyatcgtgccgtgaccataggatgggtgacacatcccagtgcattctcaactcacttgcttttgtcctcattgtctggcctcatctcttgggttgtctcagggagaatgggaccataaattttatgagcaagttttccctcttaaatgaattacataacacaaccattatgcttgccttgtatcagaaagaccacggagagagaagtggtaggaatggcaacaatcctcccaacaagctgcagcacagcgccggcaccgctggcagcaccgcg

SEQ ID NO: 2146 - DNA, 600 bp, Chicken  19866894088956_9
aataagcctccatgtctttttcctgcttatgtgaacagagatccgtttttcaatagcaggccccaacagataagtatttgctttgcctggtatttattttggtggtgaaggccctttcattggctctcgagacagtaccctgcagcacctgggggtgcaggtagagccatgatccagggatgcttccacacctgctgcagtgccacaccatccacatgcagcctgggcacacccagacacggggctgtgcttttgcacaactcagagtcartttgcagagctcagaggtttggctgaagyatcgtgccgtgaccataggatgggtgacacatcccagtgcattctcaactcacttgcttttgtcctcattgtctggcctcatctcttgggttgtctcagggagaatgggaccataaattttatgagcaagttttccctcttaaatgaattacataacacaaccattatgcttgccttgtatcagaaagaccacggagagagaagtggtaggaatggcaacaatcctcccaacaagctgcagcacagcgccggcaccgctggcagcaccgcgcccagccttcacccgctctgcatgtaaca

SEQ ID NO: 2147 - DNA, 600 bp, Chicken  19866894088963_1
aacagccttttgtatacagtgcactggagtgaaaatagtgttcctttagaacatcttttggtattctgtagaaactccttttgcgtgcctctgccactgtgatcagattcttctaatcagagacagtccgtacagtgccaaatgagcaagaacattgggtacatgcctttaatcttcagagaacaccagtgcgattgcttctagagatgcaggtgactttgcaacgtgtaggagccatctggggctgtgtcacggcaggcatgttcgtaggatctctgggaagggctcctttacataaaygtgcctcaggacttcagaaaaaacaacaaaacaacaacaacaccagtgaagtattggcacttggcgctcattcagcgctgcctgtagtttcaggctaatttgttaggtaaaagatctcatttttggaggacaaggaaagaagcttgttttcatttttcagggcgtttagtgaaagaaaagactgttcttgatgattcagatgttggaacggctcccagtaaagaaaggatgcattgcagggtatggaaaatcttatcaaggacggtgactgtagtgtatgtcttttctgtgtgctgcagg

SEQ ID NO: 2148 - DNA, 600 bp, Chicken  19866894088967_1
gtgacaacatcctcttggacctctccgagccctaaaaaacactcaacatatctgtgaagccaaatccctccaagcccatcccatcatcgttccctgtagttgggggctggaggggatggaccctccccagtggttccacagggatgggagctctttgggagcaccccgagcacctcctgtggctgggctgctcctctctctgcacaccaggtggcaccgggacgtccccatttgtgtcccaggcaccacctgaggtctcgagaaagagcagccgtcgctaagagcacggcaaagcctccyccgtgggttcttttccagaggtgcctttgcccacccgctgcccggctgagggctcccacattgattttccatgcagtgaactcgctgccctgcacyggagcgtatcacttccagacacgcttgattgacaccgagagatgctcggctcaaaggcaaagtaatgtgagcagattagttaatgcttcttgccccagcccttgagagcagggctggaatggcaaggcaggcttaatgggttttgaaggcttttctttttaagatatgaatcaacgaatccrtacggggagcgcggataatgtg

SEQ ID NO: 2149 - DNA, 600 bp, Chicken  19866894088967_2
tagttgggggctggaggggatggaccctccccagtggttccacagggatgggagctctttgggagcaccccgagcacctcctgtggctgggctgctcctctctctgcacaccaggtggcaccgggacgtccccatttgtgtcccaggcaccacctgaggtctcgagaaagagcagccgtcgctaagagcacggcaaagcctccyccgtgggttcttttccagaggtgcctttgcccacccgctgcccggctgagggctcccacattgattttccatgcagtgaactcgctgccctgcacyggagcgtatcacttccagacacgcttgattgacaccgagagatgctcggctcaaaggcaaagtaatgtgagcagattagttaatgcttcttgccccagcccttgagagcagggctggaatggcaaggcaggcttaatgggttttgaaggcttttctttttaagatatgaatcaacgaatccrtacggggagcgcggataatgtgatcggaataagaagcagggctcgtctttgaacctgagcgaggtccctgacagtgtttacttcatgtcctggcaccaaatgcaagatgacatgaata

SEQ ID NO: 2150 - DNA, 600 bp, Chicken  19866894088967_3
taagagcacggcaaagcctccyccgtgggttcttttccagaggtgcctttgcccacccgctgcccggctgagggctcccacattgattttccatgcagtgaactcgctgccctgcacyggagcgtatcacttccagacacgcttgattgacaccgagagatgctcggctcaaaggcaaagtaatgtgagcagattagttaatgcttcttgccccagcccttgagagcagggctggaatggcaaggcaggcttaatgggttttgaaggcttttctttttaagatatgaatcaacgaatccrtacggggagcgcggataatgtgatcggaataagaagcagggctcgtctttgaacctgagcgaggtccctgacagtgtttacttcatgtcctggcaccaaatgcaagatgacatgaatacattagcttgctggctttcctgtgcaacccttgccacagccaggaaaggaaaagagcagcaaagagaatgtgtttggaagtgtcaccttgtttcctataaccctgtcatccccactcactgtctggctgtgacatggggacgatgctcagccggctcctgctgggatcgggatggcgaggag

SEQ ID NO: 2151 - DNA, 600 bp, Chicken  19866894088968_1
tgtgacttccttggatggtcttggaattggcctcaaggcagtgacagcactagacaaaatgctatgttattgtcaactgactgtagaaaagcctaaaatcatgttgtaccgcagacttgatgaagctagagagtgaaaatggaatttaactgcttgattcccaggacacatccagcatctcacgtttgtaaaaagacaaccgtggcacttaacttttctcacattactttcatttctagccctggtcagaagaaaaatgaaacagcaaatatatatttacattaataaaataatccaaakaaatattttcttgttccttttgaactgtaaggagttctccctggttcagtgttttggtccctgttttgcatttggtaggtcagtgcatgtgctgtgttgtttgtattcagttatttatgcctcatccttcagcagatgtagaaggaaggagccaagagttcttaaaacacttwtggaagtgacatatcttcaaataagatatgggtggttgacttgagtgatggagagtctgaactatttcgatgcagatgaccttcctggtgttgataccatctctccttaagtaggactccttgagca

SEQ ID NO: 2152 - DNA, 600 bp, Chicken  19866894088968_2
agcatctcacgtttgtaaaaagacaaccgtggcacttaacttttctcacattactttcatttctagccctggtcagaagaaaaatgaaacagcaaatatatatttacattaataaaataatccaaakaaatattttcttgttccttttgaactgtaaggagttctccctggttcagtgttttggtccctgttttgcatttggtaggtcagtgcatgtgctgtgttgtttgtattcagttatttatgcctcatccttcagcagatgtagaaggaaggagccaagagttcttaaaacacttwtggaagtgacatatcttcaaataagatatgggtggttgacttgagtgatggagagtctgaactatttcgatgcagatgaccttcctggtgttgataccatctctccttaagtaggactccttgagcaatcagagttgaatgttgccatgagagcctcagtcattggacctgtaagttggcatgttgcattaagcaagcttcagtgacttcttggtacgctacaggctagaatttggtgaagtatgattagtagctttttacaaacctctggttggacacccaaaggagaggaataacaca

SEQ ID NO: 2153 - DNA, 594 bp, Chicken  19866894088971_1
ctgaaatatgacagctatttatagaagacatattaaatgtaacataaattgtagaatagaatactggaaatactgccaaggccccaagactattggacatgccctaagtaaaagcatcgggatctttctctaatctaccgaggggggagacaactttctgatggctgttttttgtcaaggtggctcattcagcagactgtgctatttgcaatgtacatatctgatgtgaggataatttagatgatcaacccaaacaatcttctagaacgctgtgaataaatttaagagctttttaaaacrcttgacatttaaatgtaagaaagaagcacaataaaacacatacacaaaacatctgcatcaaaagagcatatacctcatgggggttgtaatctggaggtaacttctccagcatctcatcagcaaggcgctgcaccactgcttctcgggtttcccctcctccagtgctgctgtctttgggctggatgctcactattgtattcagtgtctcatttgcgagattggtttggtaagttatatctgcattagggtgcagtccaaataccttaaagtaaaaggggaaaaaaataggggaaa

SEQ ID NO: 2154 - DNA, 600 bp, Chicken  19866894088977_1
aggagacagaagttggtcacgcattttgagtaaggctcaaaactgcagaaagctgtcacttgctggctttaggaatgagactggagagaataaaatgaccctcaagggcgtatgctgcagtccctatattatctgcttctgttagggatgagagtttttggtgttcctgcctttaagtctgcttttctttcctccttttcctgcaaaaatctcgagcagatcgatcccaccctgcttatcccatagacttgcatccctgctgtacttacagtgcctatagatgtgttttgtatctgttcyttaaagcctgtttttttgtgagattcccacagtaacttgagtagtactttattgcaaaataacaaggcatattaagtttcctctcccttttctctyggataaacaaataataaatgtttgctttgttactttctttttattattattatttctattttttaagaaacagaaatcaaactacattatcagtatgcctcagatgtagacaagttggttgagacactgcttatgttgtaagaactttggctgtttcacaacattataggtgtgcttcacaaatgtgtttttcacttataaaat

SEQ ID NO: 2155 - DNA, 600 bp, Chicken  19866894088977_2
gaccctcaagggcgtatgctgcagtccctatattatctgcttctgttagggatgagagtttttggtgttcctgcctttaagtctgcttttctttcctccttttcctgcaaaaatctcgagcagatcgatcccaccctgcttatcccatagacttgcatccctgctgtacttacagtgcctatagatgtgttttgtatctgttcyttaaagcctgtttttttgtgagattcccacagtaacttgagtagtactttattgcaaaataacaaggcatattaagtttcctctcccttttctctyggataaacaaataataaatgtttgctttgttactttctttttattattattatttctattttttaagaaacagaaatcaaactacattatcagtatgcctcagatgtagacaagttggttgagacactgcttatgttgtaagaactttggctgtttcacaacattataggtgtgcttcacaaatgtgtttttcacttataaaatgccattgtaatgtataccaggaacaataaaaggaaatctacaaacatcgatagagatcagcaagaatcttgcatgggctcgtttgctagcatgtat

SEQ ID NO: 2156 - DNA, 600 bp, Chicken  19866894088977_3
agactcattatggaattagtgcttgtacagtttattaagtatcatcacaattctggtagtgctctcctttaaaaggaaatgtgaaatcaaatccccatttattcgcttttttcagaatccgtgcaatgtgtgcagcagtattttgctcaaagaacttttgttgcacagtttgatagctgcatcctcttattagaaagctacttggtggtttcttttggaaaagcctggttctggccactctgaacaaatctacagagaagtggttaagcagagtggtctcccctttcaggcaagatctgrgctgcatttattccgtgaatgtctgagaaaacacatgtgcaatctgtaaagtgttttgggagccctcaggatgaaaggggtttaattgccatttttttccagtgtttattacaataacatctgatagcagttccttaggttttatttcacaatggttttaaaaggaaatatagattaatggttttctgtaaaggcagtgtccagttagtacgaaatgcagtacttctgtgcacttcagctgttacacattacttgcatcctatttcaattcatgcgttatcagtagaaatcttaaaaatc

SEQ ID NO: 2157 - DNA, 599 bp, Chicken  19866894088982_1
  misc_feature (1)..(18): n is any nucleotide
nnnnnnnnnnnnnnnnnnaagagcaggctcccatgatggccttgcttagctcccagcctagaagtggccatgagtccaaatccacctgtctatctgtcagagctgcagcccctcagccagcacaggggtaaggcccagtacagcactgagatcccaacatcataatatgggacttaaacacttgctggaattaaagtcatttcctttagttgacttgtttcagatcctgatgctatttccatcctcttctcaaagcaaacgtatgtatttagggaaagcttcacagtttaggttgaagasgttacatcaagtgcagccaagcttcagtaaagcaaagcaagatgctctcgttgtgcaagttgcctgctaccacaaaacagcttagggttacaggcagtaaagcagaagcaaagctgtatttcctgattttccagatttacttagagtgatggcagatttctcttcagaaagagcacgagtattttttcatatattttgtgacgactaaagcaacttctatgcagctctcaggattaatagattgtaaagatgtgccacataaagacttagatccctatcattatcttgcatgttccaat

SEQ ID NO: 2158 - DNA, 600 bp, Chicken  19866894088983_1
acaagagcaaacttttttattattattatgaagtgaaagaacaaggcttgtctacttttgagagtagaactgaaaatctgagctctcgtattccggtctcacatccgtcagtaacttgtgatgtgacttgaaacaaaatcacttaacctgtgagtctgtttccctacctgtaaaatggggttgagagtaagagggataccacgagcattaaatatttaatgtttgtaaagtgctttgaagacagagtgccacataaatgcttatcactgtattgaaatgggaggaactggataaccttgygtaggaaaattttgctcgaaactgtaactttgggaatgaagaccaaagagggagaagaaaggacatctgacaaagttgtgtattaataatttcgagtgaaatgcacttgagaatctatctctaaaaatttagaagaggcagtctttgggaccattgaaaataaccttcagaaaagcgtagaattcagtaagtaggcaaagttgaacttgtctgctaaaaataaaaaaagaaaaagaaacttctgaagaaattattctgtttagccccaccacggcaatcaagcctgtaatagggccaata

SEQ ID NO: 2159 - DNA, 599 bp, Chicken  19866894088984_1
  misc_feature (1)..(196): n is any nucleotide
nnnnnnnnnnnnnnnnnnnnnnnnnnnnnnnnnnnnnnnnnnnnnnnnnnnnnnnnnnnnnnnnnnnnnnnnnnnnnnnnnnnnnnnnnnnnnnnnnnnnnnnnnnnnnnnnnnnnnnnnnnnnnnnnnnnnnnnnnnnnnnnnnnnnnnnnnnnnnnnnnnnnnnnnnnnnnnnnnnnnnnnnnnnnnnnnnnnngtgttgtttcttttgcctcgttaaatagaccgccttacaacgtgtctccccatctacaataccacatcacagtgtcatccaaaatatctaaagactactgtggygttacaagcattgtattaacagaatattttttgtaattcttcaaatgaattgcagaatactggtaggttttttttgttgttgttgttcccccctgcagctgtgttgctttatgtattacttttggtggcccagccttcttactcagtgagctgtctcaaaatctgttttgccatgagtcacaaacagatattctgtaagtagtaaggggaaagctttcagtggtacaagcaagagagaatgacaactcccgtgttgtctgagaggtctggactggcgcacagctcaaaaatacagtaca

SEQ ID NO: 2160 - DNA, 513 bp, Chicken  19866894088984_2
ctgtgttgctttatgtattacttttggtggcccagccttcttactcagtgagctgtctcaaaatctgttttgccatgagtcacaaacagatattctgtaagtagtaaggggaaagctttcagtggtacaagcaagagagaatgacaactcccgtgttgtctgagaggtctggactggcgcacagctcaaaaatacagtacagtttcataactgcatagttataacgctgaatccagcagccattctttgctgattctttcaaaaatcagatatttggattaaaataccgtttccagtttwgtgtcgtagccccacgtagagccacaccaactgagagcaattggtcaaagagcacctgcttgttctgtgattaagagagctcagtgtttcctttaacgtgtgattttgctaacaagcattccttttgttgcctataaaaagaatgacttctgctgactctggaagacaggtacttcattaccttgcacacaaataagggagccgagagtgata

SEQ ID NO: 2161 - DNA, 600 bp, Chicken  19866894088985_1
cactgaagaatcatctattaaggcaaacatacgcatgacttacataaaaatccatactacttcccaggctcatgtgagtaacaaacactggaaggaatgtatcaccttccctgccttctgatgggatggttgggtatacatgtatgcacattaatttaaaatgtattttaaaaaaagaatccaccagctgctaattgacaataagtaatagcactcttcaagacaggcataacatttaagaagggcataaaaacacatacagcaacagacaccctttcagcctgtgcattaataacacargctttaccaaactgatagcacagcttgtcagacattttcttctagtttcaaggagaaggattcaggtatatccagaaatactagcagaggctgcaggctcagttatacattttaatagcaggactgcttctcagcccacctcctcttccactcactgcaatgcaccatcctcaggccarttacctatatggaagaataatatcagtgaaatagttgagcatttattaatactcttgttggtgttttctttgctacaagaagttgtaccgagtgcattcttgacttcagcttcgttttcta

SEQ ID NO: 2162 - DNA, 600 bp, Chicken  19866894088985_10
actctgagcatagctatctaaatagataatacccatcttgctttgattctgattatttcatgggggctgggcagaaaacttgaaaaaaacttttaggtttctgtatctgcaggcatctgctgctttgcaaatttggcctcaagccctcagctgcctctccacaaagcactggcaaaggatcctcagacaggaaagcaaaacagagcagycgytttatttatttatttattttgcccatacsgaacagaggtgcagaaaagcagataaatcagcgtaagatgctgaaaggaccatttgatygttttctaatgggtcatgtctaacagccttaagtcttatcctaacagggagaaagactttgagaacacaacgtgtaataactctgagctgatcacgtctcttaaaataaaaacaaatatatataaaaaaaaaaaaaaatcccaggctggatggaaaaacttctagttgaagcagagccaaacccaaaagcatgctggggatgatagaagccaactgtttccaaaatgctgctctgtcagatttataaacatgattataaacattgcttgaccttttcagttcaaaatccatctcctatgc

SEQ ID NO: 2163 - DNA, 600 bp, Chicken  19866894088985_2
tccaccagctgctaattgacaataagtaatagcactcttcaagacaggcataacatttaagaagggcataaaaacacatacagcaacagacaccctttcagcctgtgcattaataacacargctttaccaaactgatagcacagcttgtcagacattttcttctagtttcaaggagaaggattcaggtatatccagaaatactagcagaggctgcaggctcagttatacattttaatagcaggactgcttctcagcccacctcctcttccactcactgcaatgcaccatcctcaggccarttacctatatggaagaataatatcagtgaaatagttgagcatttattaatactcttgttggtgttttctttgctacaagaagttgtaccgagtgcattcttgacttcagcttcgttttctacttttttttacttggataygagccagaaaggcaccttcacggcacagayttccaaagctctctaacatgcaactctgagcatagctatctaaatagataatacccatcttgctttgattctgattatttcatgggggctgggcagaaaacttgaaaaaaacttttaggtttctgtatct

SEQ ID NO: 2164 - DNA, 600 bp, Chicken  19866894088985_3
acagcttgtcagacattttcttctagtttcaaggagaaggattcaggtatatccagaaatactagcagaggctgcaggctcagttatacattttaatagcaggactgcttctcagcccacctcctcttccactcactgcaatgcaccatcctcaggccarttacctatatggaagaataatatcagtgaaatagttgagcatttattaatactcttgttggtgttttctttgctacaagaagttgtaccgagtgcattcttgacttcagcttcgttttctacttttttttacttggataygagccagaaaggcaccttcacggcacagayttccaaagctctctaacatgcaactctgagcatagctatctaaatagataatacccatcttgctttgattctgattatttcatgggggctgggcagaaaacttgaaaaaaacttttaggtttctgtatctgcaggcatctgctgctttgcaaatttggcctcaagccctcagctgcctctccacaaagcactggcaaaggatcctcagacaggaaagcaaaacagagcagycgytttatttatttatttattttgcccatacsgaacaga

SEQ ID NO: 2165 - DNA, 600 bp, Chicken  19866894088985_4
aaggagaaggattcaggtatatccagaaatactagcagaggctgcaggctcagttatacattttaatagcaggactgcttctcagcccacctcctcttccactcactgcaatgcaccatcctcaggccarttacctatatggaagaataatatcagtgaaatagttgagcatttattaatactcttgttggtgttttctttgctacaagaagttgtaccgagtgcattcttgacttcagcttcgttttctacttttttttacttggataygagccagaaaggcaccttcacggcacagayttccaaagctctctaacatgcaactctgagcatagctatctaaatagataatacccatcttgctttgattctgattatttcatgggggctgggcagaaaacttgaaaaaaacttttaggtttctgtatctgcaggcatctgctgctttgcaaatttggcctcaagccctcagctgcctctccacaaagcactggcaaaggatcctcagacaggaaagcaaaacagagcagycgytttatttatttatttattttgcccatacsgaacagaggtgcagaaaagcagataaatcagcgtaag

SEQ ID NO: 2166 - DNA, 600 bp, Chicken  19866894088985_5
gacttcagcttcgttttctacttttttttacttggataygagccagaaaggcaccttcacggcacagayttccaaagctctctaacatgcaactctgagcatagctatctaaatagataatacccatcttgctttgattctgattatttcatgggggctgggcagaaaacttgaaaaaaacttttaggtttctgtatctgcaggcatctgctgctttgcaaatttggcctcaagccctcagctgcctctccacaaagcactggcaaaggatcctcagacaggaaagcaaaacagagcagycgytttatttatttatttattttgcccatacsgaacagaggtgcagaaaagcagataaatcagcgtaagatgctgaaaggaccatttgatygttttctaatgggtcatgtctaacagccttaagtcttatcctaacagggagaaagactttgagaacacaacgtgtaataactctgagctgatcacgtctcttaaaataaaaacaaatatatataaaaaaaaaaaaaaatcccaggctggatggaaaaacttctagttgaagcagagccaaacccaaaagcatgctggggatgatagaag

SEQ ID NO: 2167 - DNA, 600 bp, Chicken  19866894088985_6
cttcagcttcgttttctacttttttttacttggataygagccagaaaggcaccttcacggcacagayttccaaagctctctaacatgcaactctgagcatagctatctaaatagataatacccatcttgctttgattctgattatttcatgggggctgggcagaaaacttgaaaaaaacttttaggtttctgtatctgcaggcatctgctgctttgcaaatttggcctcaagccctcagctgcctctccacaaagcactggcaaaggatcctcagacaggaaagcaaaacagagcagycyytttatttatttatttattttgcccatacsgaacagaggtgcagaaaagcagataaatcagcgtaagatgctgaaaggaccatttgatygttttctaatgggtcatgtctaacagccttaagtcttatcctaacagggagaaagactttgagaacacaacgtgtaataactctgagctgatcacgtctcttaaaataaaaacaaatatatataaaaaaaaaaaaaaatcccaggctggatggaaaaacttctagttgaagcagagccaaacccaaaagcatgctggggatgatagaagcc

SEQ ID NO: 2168 - DNA, 600 bp, Chicken  19866894088985_7; identical to SEQ ID NO: 2167

SEQ ID NO: 2169 - DNA, 600 bp, Chicken  19866894088985_8
ttcagcttcgttttctacttttttttacttggataygagccagaaaggcaccttcacggcacagayttccaaagctctctaacatgcaactctgagcatagctatctaaatagataatacccatcttgctttgattctgattatttcatgggggctgggcagaaaacttgaaaaaaacttttaggtttctgtatctgcaggcatctgctgctttgcaaatttggcctcaagccctcagctgcctctccacaaagcactggcaaaggatcctcagacaggaaagcaaaacagagcagycgytttatttatttatttattttgcccatacsgaacagaggtgcagaaaagcagataaatcagcgtaagatgctgaaaggaccatttgatygttttctaatgggtcatgtctaacagccttaagtcttatcctaacagggagaaagactttgagaacacaacgtgtaataactctgagctgatcacgtctcttaaaataaaaacaaatatatataaaaaaaaaaaaaaatcccaggctggatggaaaaacttctagttgaagcagagccaaacccaaaagcatgctggggatgatagaagcca

SEQ ID NO: 2170 - DNA, 600 bp, Chicken  19866894088985_9
tggataygagccagaaaggcaccttcacggcacagayttccaaagctctctaacatgcaactctgagcatagctatctaaatagataatacccatcttgctttgattctgattatttcatgggggctgggcagaaaacttgaaaaaaacttttaggtttctgtatctgcaggcatctgctgctttgcaaatttggcctcaagccctcagctgcctctccacaaagcactggcaaaggatcctcagacaggaaagcaaaacagagcagycgytttatttatttatttattttgcccatacsgaacagaggtgcagaaaagcagataaatcagcgtaagatgctgaaaggaccatttgatygttttctaatgggtcatgtctaacagccttaagtcttatcctaacagggagaaagactttgagaacacaacgtgtaataactctgagctgatcacgtctcttaaaataaaaacaaatatatataaaaaaaaaaaaaaatcccaggctggatggaaaaacttctagttgaagcagagccaaacccaaaagcatgctggggatgatagaagccaactgtttccaaaatgctgctctgtcagat

SEQ ID NO: 2171 - DNA, 599 bp, Chicken  19866894088988_1
  misc_feature (1)..(28): n is any nucleotide
nnnnnnnnnnnnnnnnnnnnnnnnnnnntcccctgggggaaagtggcctttaggtttatttctgaagcggtggctgtttgagaaggaaggggtctggctgctgtttgccagtactgacagcaacttctcccatggccctgggcagcacacgtgcccttgtgtgcccacgctctgtgcctgtgcagagcagagcctcttccctgccctgtcccactcctgttttgaacctctgtcgtctcacgtgatgtgagcatcattatctggagcagggcaaggcctgggcattgacagagactgcaragaaggaaggaacgtgcagggccagcgtggcatgtacatcttatgtcccttctctagaacttacttctgaaaggcatgtgcagaagagaggaggtttccacactgtgtccctgctggcaccctccaacatggccttctgccatatagccacacagaggttccttctatgtcctgctactgggcaggatgcagccctgctcccagaaggatttcgggtgtcccactcaatcccagctggaagctggggctggcttttctctgcagctgctccatcagggctcctggttttgctatcacaa

SEQ ID NO: 2172 - DNA, 599 bp, Chicken  19866894088991_1
  misc_feature (1)..(181): n is any nucleotide
nnnnnnnnnnnnnnnnnnnnnnnnnnnnnnnnnnnnnnnnnnnnnnnnnnnnnnnnnnnnnnnnnnnnnnnnnnnnnnnnnnnnnnnnnnnnnnnnnnnnnnnnnnnnnnnnnnnnnnnnnnnnnnnnnnnnnnnnnnnnnnnnnnnnnnnnnnnnnnnnnnnnnnnnnnnnnnnnnnnnntgctgaactgggcagctggaaggtatgctcactactcatccagcaaaacagttaaacaaataacagaacaaatggtaaaagcaagcccaacagatccaacaaaacgcacgcaataaatracatcatttaccattgaacagcttcactgtaatagcaagaactaaattttatggcagattcccagaactgcactgcagctacccgagatcactcctgcctgtgccccaactcggtgcctaccggtaccaggatgcagacctggaactgcgggatccatgggagcaatcagcaccgggatgtctcggtcctattattttcactcactcacgatctgaggtgtgatttgcagtttcattttacagatactgaagattcagctctcagctcacagcactgctgaaatgtggcttgtttttaa

SEQ ID NO: 2173 - DNA, 563 bp, Chicken  19866894088991_2
cagctacccgagatcactcctgcctgtgccccaactcggtgcctaccggtaccaggatgcagacctggaactgcgggatccatgggagcaatcagcaccgggatgtctcggtcctattattttcactcactcacgatctgaggtgtgatttgcagtttcattttacagatactgaagattcagctctcagctcacagcactgctgaaatgtggcttgtttttaaactgctactatgtacacatgtaaaatctagattataggtgtatctaaacacaaaacagcaaaaattacacaaatayaacattaaaggatgtgctattttgtgtaagacaacaggcgagcacaccaactgaaatgcagctctgaacaatgtattagctctaaaaacagaacaaaaatcacttatgaagyagcattctctctttcaaaacatttattactattacagatccttaggagtaagaagcaagatgctcttaactaaattcatagctacattaactagagggctggatcttcctttttatatgcacgctcacagtatcagtctctctgtcgccca

SEQ ID NO: 2174 - DNA, 451 bp, Chicken  19866894088991_3
cctattattttcactcactcacgatctgaggtgtgatttgcagtttcattttacagatactgaagattcagctctcagctcacagcactgctgaaatgtggcttgtttttaaactgctactatgtacacatgtaaaatctagattataggtgtatctaaacacaaaacagcaaaaattacacaaatayaacattaaaggatgtgctattttgtgtaagacaacaggcgagcacaccaactgaaatgcagctctgaacaatgtattagctctaaaaacagaacaaaaatcacttatgaagyagcattctctctttcaaaacatttattactattacagatccttaggagtaagaagcaagatgctcttaactaaattcatagctacattaactagagggctggatcttcctttttatatgcacgctcacagtatcagtctctctgtcgccca

SEQ ID NO: 2175 - DNA, 600 bp, Chicken  19866894088999_1
cactgacagcagcagggaccttttccctccagggctgcggtggctctcagccatgcccgcttttggggtcctgtccttgggcccatcccttctcctgcctccgagctgtcacgttcccaaacaaataggaaggaacgaacgcttgcggagtgtcttcattttgaaaagagagctttccttcccttcccggctttttaaaaagtggccaaaaatagcagccacacttgctgctggtattttaatggaggtttggaggaatccgagtcagccggcccagcgctgcctgggctgcacgttacygaggaatttgtttgttttgtaaaccaagttcccctcattcccttccccttccagaccccgcacgtaacataaacctccccggctccatgggagggacacagcccggcacatctggggtgcagtgctgctcccagccatccttctccgcagcgctgacgttttcttgtcctgcacagtgtcagacgtccaacctgccgccccttccccccccaccccgctgagccccacatccaccaaacagtgcttttttgtcccgtggcctctcccacactctgatgtgttttatttcccaccagcaat

SEQ ID NO: 2176 - DNA, 600 bp, Chicken  19866894089006_1
taaaggatctgcagataacaggagttgcaggaaggatgcatggtgcatggagagagcaagagaacgagcaattgtcctgcagatgaggtagagtaatagcacaaacaacacgagatcacctctgggtatcagggttaggtttcaagcagctgggctcatttgtctgtaggtaagatacgaaggcatagaggtaacaagactgagttctggtctgaaaagaaaattaacaggtcatgcccagttttatcacccgaagacttaactgtaatgcctattagacaacttgaactgctgccattyacagaaggcactagaagaaaagctgtaatacctcagggagcctgcaattgttctttccagtaatggcaggttctggaaatgaacagcaaaactctcagtctgtgcatatacatacatgcactctaaaacatgtaacactttgttaacaagagcacacaggcttttttcaaaaccttttccaaggcatgtaacaattccatttatccatgctcgctttttttcwacacatgaaatacagatttagaagcctgtacagaaacaaaaaacctgcagcaatggttctacacctgaaacatacac

SEQ ID NO: 2177 - DNA, 502 bp, Chicken  19866894089006_2
ttaacaggtcatgcccagttttatcacccgaagacttaactgtaatgcctattagacaacttgaactgctgccattyacagaaggcactagaagaaaagctgtaatacctcagggagcctgcaattgttctttccagtaatggcaggttctggaaatgaacagcaaaactctcagtctgtgcatatacatacatgcactctaaaacatgtaacactttgttaacaagagcacacaggcttttttcaaaaccttttccaaggcatgtaacaattccatttatccatgctcgctttttttcwacacatgaaatacagatttagaagcctgtacagaaacaaaaaacctgcagcaatggttctacacctgaaacatacacaaagccatagtaaggatgactgattttacagttggagtaggatctttaaaaagcctattttcaaatagagcatgtatatgcatgtttacatacaccttttcccctaaactaagcactagcaaatt

SEQ ID NO: 2178 - DNA, 600 bp, Chicken  19866894089008_1
tgtcgggaggcacagggacgtgtttagggcaggcgatgagaaaaatccacagcaaatctgctctgatctgcacccgacgtcgtgacccctgggaatcctctctgcctggctggggtcggtgggtttgctccctgctgcttcctatggattcagcgaccttctcgtctccccagagatcagcttaaattgaaacattatcccttacttaaggaagcagaggcctctccctgcgctcggtggcagaagccgtgtgtctccgtccgtctgtccttgccccatcaccagatgggctgctggagstggggatgcagagctctggccctgtgctccctgagcaggagggaaaagcccggattctgaaaggctcccaagggcagttattttagcatagaggggaaattccctcctttggggctgcaaaggggaaaggtttgcctagggagatccgttgtcatgcggcgtgttcctatagccgtagtgccaagccatgcatctgcctttggagtttgggtttcagaagattctgaaaccaaatcatggactgtgtttctctggcatcagtgggtttggtgctgtggtgctgcagggcagccccggtgc

SEQ ID NO: 2179 - DNA, 600 bp, Chicken  19866894089014_1
gagtcttgcaggaaggggacatcggcaggggatggagcacagccacacgccaccagctccctgatggccgtgatcacagttctgtccatggtgggcaattaaagcctgctcatcactcctcctgccagcctattcagttcctttttatttccttcaataaagaagcctaattacctaatgacagatgtgtctgcaggaacagacagttaaagtaaatgctctcaaggaacctgagagcaaaggaaatattggcgagcttcttttctttgcaaaagcccctatggaaatgtccctatgccrtgtgttctggggatttgtttttgtatcaaaagcttgttacccagtcaaayggccttgctgctctccagggctyrtgctgtgaaccacctctgccatctcagctcctttctgtccatttgccatcaccaaaagcaaagacggcaccagtgatygtcagtgggaacacacagtcctttctgttgacatcaagcccctaaaagtgccccaagcccaaggcaaacttgcccacagccctcagcacagcttctggaacacagccatcccctgcctttatcagagggctgggctgcatacaacacc

SEQ ID NO: 2180 - DNA, 600 bp, Chicken  19866894089014_2
caccagctccctgatggccgtgatcacagttctgtccatggtgggcaattaaagcctgctcatcactcctcctgccagcctattcagttcctttttatttccttcaataaagaagcctaattacctaatgacagatgtgtctgcaggaacagacagttaaagtaaatgctctcaaggaacctgagagcaaaggaaatattggcgagcttcttttctttgcaaaagcccctatggaaatgtccctatgccrtgtgttctggggatttgtttttgtatcaaaagcttgttacccagtcaaayggccttgctgctctccagggctyrtgctgtgaaccacctctgccatctcagctcctttctgtccatttgccatcaccaaaagcaaagacggcaccagtgatygtcagtgggaacacacagtcctttctgttgacatcaagcccctaaaagtgccccaagcccaaggcaaacttgcccacagccctcagcacagcttctggaacacagccatcccctgcctttatcagagggctgggctgcatacaacacccagaaatggcttttctccaagtctttctgggccccactgcaaaaataaga

SEQ ID NO: 2181 - DNA, 600 bp, Chicken  19866894089014_3
tcacagttctgtccatggtgggcaattaaagcctgctcatcactcctcctgccagcctattcagttcctttttatttccttcaataaagaagcctaattacctaatgacagatgtgtctgcaggaacagacagttaaagtaaatgctctcaaggaacctgagagcaaaggaaatattggcgagcttcttttctttgcaaaagcccctatggaaatgtccctatgccrtgtgttctggggatttgtttttgtatcaaaagcttgttacccagtcaaayggccttgctgctctccagggctyrtgctgtgaaccacctctgccatctcagctcctttctgtccatttgccatcaccaaaagcaaagacggcaccagtgatygtcagtgggaacacacagtcctttctgttgacatcaagcccctaaaagtgccccaagcccaaggcaaacttgcccacagccctcagcacagcttctggaacacagccatcccctgcctttatcagagggctgggctgcatacaacacccagaaatggcttttctccaagtctttctgggccccactgcaaaaataagaaggtcaaagcccagacacaaaaa

SEQ ID NO: 2182 - DNA, 600 bp, Chicken  19866894089014_4
cacagttctgtccatggtgggcaattaaagcctgctcatcactcctcctgccagcctattcagttcctttttatttccttcaataaagaagcctaattacctaatgacagatgtgtctgcaggaacagacagttaaagtaaatgctctcaaggaacctgagagcaaaggaaatattggcgagcttcttttctttgcaaaagcccctatggaaatgtccctatgccrtgtgttctggggatttgtttttgtatcaaaagcttgttacccagtcaaayggccttgctgctctccagggctyrtgctgtgaaccacctctgccatctcagctcctttctgtccatttgccatcaccaaaagcaaagacggcaccagtgatygtcagtgggaacacacagtcctttctgttgacatcaagcccctaaaagtgccccaagcccaaggcaaacttgcccacagccctcagcacagcttctggaacacagccatcccctgcctttatcagagggctgggctgcatacaacacccagaaatggcttttctccaagtctttctgggccccactgcaaaaataagaaggtcaaagcccagacacaaaaag

SEQ ID NO: 2183 - DNA, 600 bp, Chicken  19866894089014_5
ttcaataaagaagcctaattacctaatgacagatgtgtctgcaggaacagacagttaaagtaaatgctctcaaggaacctgagagcaaaggaaatattggcgagcttcttttctttgcaaaagcccctatggaaatgtccctatgccrtgtgttctggggatttgtttttgtatcaaaagcttgttacccagtcaaayggccttgctgctctccagggctyrtgctgtgaaccacctctgccatctcagctcctttctgtccatttgccatcaccaaaagcaaagacggcaccagtgatygtcagtgggaacacacagtcctttctgttgacatcaagcccctaaaagtgccccaagcccaaggcaaacttgcccacagccctcagcacagcttctggaacacagccatcccctgcctttatcagagggctgggctgcatacaacacccagaaatggcttttctccaagtctttctgggccccactgcaaaaataagaaggtcaaagcccagacacaaaaagggttcagaaagtctaaggaagagctgcaaagttgtgtttagggtcacagaaggctgcccagtggagtcaccatccctg

SEQ ID NO: 2184 - DNA, 599 bp, Chicken  19866894089019_1
  misc_feature (1)..(22): n is any nucleotide
nnnnnnnnnnnnnnnnnnnnnntcattcttttattgcactctactaccttgctaatatagacatagcccatgttcagcagagttggcatcgtactcccaaagtcacggcaataatagcatatctccagtacacaatagggaatggggaagaaatgcagctcatggttgtttttatcacaggggccattggggaaaatctagctaaaggtttctgtacttgggtctttaatgctgggtcccagcttcagttcttacttctgtgctgtgccataaggctgtggcaatgctagaagaacaacsctgtgcactgatgctcctttttgtgctgtggagtcccttctcactgcattatttctcactttttgtctcactttttttgtctccaaagcttcctgaagttaacaatgtagcatttatcaaacaagggttaattgtaaagaatataaatattctaaaagaatactggggaatatataatttaaakggaaaggcaatcgtttccagtggagaagggaggggggaaaaatcaaacagaatgtaaaacttataaagaaaataattcagattttctatttaccatatatgttgttagtagttgt

SEQ ID NO: 2185 - DNA, 600 bp, Chicken  19866894089019_2
cattggggaaaatctagctaaaggtttctgtacttgggtctttaatgctgggtcccagcttcagttcttacttctgtgctgtgccataaggctgtggcaatgctagaagaacaacsctgtgcactgatgctcctttttgtgctgtggagtcccttctcactgcattatttctcactttttgtctcactttttttgtctccaaagcttcctgaagttaacaatgtagcatttatcaaacaagggttaattgtaaagaatataaatattctaaaagaatactggggaatatataatttaaakggaaaggcaatcgtttccagtggagaagggaggggggaaaaatcaaacagaatgtaaaacttataaagaaaataattcagattttctatttaccatatatgttgttagtagttgttatttgcacatcaggtagaaggcaacttatcacaaaaaaaaaaaaatctttttttgtgcacatttccttctcctggattaggtttttattatgcttggcttttgctttcaaaggtgcaaatgtatttgcaaacctattttataaaagcgatatataggacagaatttccccaaagatgctaaaac

SEQ ID NO: 2186 - DNA, 600 bp, Chicken  19866894089021_1
ggaaacggtgagtcagaaatgaagaaataatttaaaagggcagaacatacaaacaacagatccaaatgaaaggacaatggacagtctacgtatcttgaagaacaaagcactggacctttttgtaatgttctgtagtatgaaaccaagaagtcaaacattctgctttatcacgaggaggcactcctcacctgaactaagtcgaacagtggagatagattttgaggagagagcctctgattccatggtagtattcttgggtggaacagatttaggctggtggatggttaatcatttgcttgyttcctgcttgtccctagaactcagtcaacgatctgatcttttaaacactcatagggttgaagatggctgaatctgacagtcaaccaagtctagctttygggtaataagtgctgctgatgcttactgctttttacagatcttctggatgaaacccaagctcaaacaactgctggacatgtccctttcccacaggacaacctacaaatgaagccacagggatgctaacaaggagaatgagttggccaattcagcaactcacacctctgcttctcagagattcagagacaccagtacgaaact

SEQ ID NO: 2187 - DNA, 600 bp, Chicken  19866894089021_2
agaacaaagcactggacctttttgtaatgttctgtagtatgaaaccaagaagtcaaacattctgctttatcacgaggaggcactcctcacctgaactaagtcgaacagtggagatagattttgaggagagagcctctgattccatggtagtattcttgggtggaacagatttaggctggtggatggttaatcatttgcttgyttcctgcttgtccctagaactcagtcaacgatctgatcttttaaacactcatagggttgaagatggctgaatctgacagtcaaccaagtctagctttygggtaataagtgctgctgatgcttactgctttttacagatcttctggatgaaacccaagctcaaacaactgctggacatgtccctttcccacaggacaacctacaaatgaagccacagggatgctaacaaggagaatgagttggccaattcagcaactcacacctctgcttctcagagattcagagacaccagtacgaaactggcagtgtgacctggcaacgcttttaaagtgaaatcaagactcaggaaagatgagcacctctggcagaccattccctcaccaaaagacagggtcagcc

SEQ ID NO: 2188 - DNA, 600 bp, Chicken  19866894089022_1
tgacctaccgaaggaaaggaacctgcttaagcaaaggggctggacgagatgagctccagaggtccccctcaactcctatagttctgtgtttcctattcatactaggattttcttttcctatgatggttgtacagggcgtctgttttaccttattacttattgtattttgcccaggtaaggctctgtaggctttctgtgattaaaaaggtgttgagatgcactttaccaatttttcttaattttcaaaattttcattagttttcaatttgtgcgattcctatgtgctaaatattatccacwactttcacccaacacttcttcattcttcatctcacctgtgaaaatacccgttatcatggaaaccaactcttaaagagtcctttgcttaaagccttcccaagtttgcctctaaaccyctcagaatttcttctgtaacttcagaaagttacatttgacataatgcagatttcctcaacttccacagaaagtatccatgtattgaatgcattactaaagctgacaattcagcatgaagtgaaatgcacgaatggtcccaattacctcagtctctaatgaaatwggaaagttcctttgcttaag

SEQ ID NO: 2189 - DNA, 600 bp, Chicken  19866894089022_2
cctatgatggttgtacagggcgtctgttttaccttattacttattgtattttgcccaggtaaggctctgtaggctttctgtgattaaaaaggtgttgagatgcactttaccaatttttcttaattttcaaaattttcattagttttcaatttgtgcgattcctatgtgctaaatattatccacwactttcacccaacacttcttcattcttcatctcacctgtgaaaatacccgttatcatggaaaccaactcttaaagagtcctttgcttaaagccttcccaagtttgcctctaaaccyctcagaatttcttctgtaacttcagaaagttacatttgacataatgcagatttcctcaacttccacagaaagtatccatgtattgaatgcattactaaagctgacaattcagcatgaagtgaaatgcacgaatggtcccaattacctcagtctctaatgaaatwggaaagttcctttgcttaagcttgttagtatgtatgatctgtgtttttcctctaagtatttttctagcacagatttgctgctcaaaccatcattgttaagcawagataagcagcacagtttgagcaatatgtatgt

SEQ ID NO: 2190 - DNA, 600 bp, Chicken  19866894089022_3
tgtgctaaatattatccacwactttcacccaacacttcttcattcttcatctcacctgtgaaaatacccgttatcatggaaaccaactcttaaagagtcctttgcttaaagccttcccaagtttgcctctaaaccyctcagaatttcttctgtaacttcagaaagttacatttgacataatgcagatttcctcaacttccacagaaagtatccatgtattgaatgcattactaaagctgacaattcagcatgaagtgaaatgcacgaatggtcccaattacctcagtctctaatgaaatwggaaagttcctttgcttaagcttgttagtatgtatgatctgtgtttttcctctaagtatttttctagcacagatttgctgctcaaaccatcattgttaagcawagataagcagcacagtttgagcaatatgtatgttttcccatatataaaccaccatatgccctcttacagatgggaaggaaatgccaaaatcacacagccaagttgccagcaatcggggggcagagcaggtgatgtgccaatatccccagcacacaagcacacctgccacatgccataatgtgcttcagaacatcctg

SEQ ID NO: 2191 - DNA, 502 bp, Chicken  19866894089022_4
gcttaaagccttcccaagtttgcctctaaaccyctcagaatttcttctgtaacttcagaaagttacatttgacataatgcagatttcctcaacttccacagaaagtatccatgtattgaatgcattactaaagctgacaattcagcatgaagtgaaatgcacgaatggtcccaattacctcagtctctaatgaaatwggaaagttcctttgcttaagcttgttagtatgtatgatctgtgtttttcctctaagtatttttctagcacagatttgctgctcaaaccatcattgttaagcawagataagcagcacagtttgagcaatatgtatgttttcccatatataaaccaccatatgccctcttacagatgggaaggaaatgccaaaatcacacagccaagttgccagcaatcggggggcagagcaggtgatgtgccaatatccccagcacacaagcacacctgccacatgccataatgtgcttcagaacatcctgtaagg

SEQ ID NO: 2192 - DNA, 600 bp, Chicken  19866894089034_1
cagaattagcttgagctaaacttggtaaagcagcaaaaatacagaataaaagtttaccagaagcaaatagttcacttttgaaagtgagtttgtttcattagtagcataatttcttgctggaattagtcaggcagattagacaaagaagcatcctacttcacttctccagaaggagcatagtgttctttccttagtatcacttcagtgctttgaggaactgtccattctctagccccactgataaaaggaaacaaggactcagtgtgaaactggatgtaattactctgtgtgtgtttgtcyacatttgcatgtgcaaaagtatgttaattttggtgctctttccatagtaacaagcagatgtgatcaggaggaagaaaggaatggtttctgtcagcttttgcatttgcatgcttttctgcattagaaatgtaaatgtacaaaatgtaggaaaaaagaagcaaaaaatgtgtacatgtaaattcaggattctctctatggattttgctcaagaaacaacttgcacttcctaaatactgttaacgtctttacaagtaacatgaatgcaagattgaagactgttacatttccttacaactgtgc

SEQ ID NO: 2193 - DNA, 599 bp, Chicken  19866894089038_1
  misc_feature (1)..(92): n is any nucleotide
nnnnnnnnnnnnnnnnnnnnnnnnnnnnnnnnnnnnnnnnnnnnnnnnnnnnnnnnnnnnnnnnnnnnnnnnnnnnnnnnnnnnnnnnnnnnggatttttttttggtttcttattcaaggaagagagagggctcacagccctgcagcactgcttccagcacagccccctagctgtagcagtaacttaccctcctccttgcctgaaccttcagtcttcagcaggaacatatctgtatgcagggtgcctttgtcaacatctttcttaactctctgcagagaaaggaaagacagggatgctcrgtgaaacacttacaatggccaaaatgcagaaggcccaactcttcaaggcctagaaagtcactcacaccaaaaggtgtgattctgaactctcaaccccacagataagcctaatcacagcctgaatctgtacactgctgtgctgaacaagcaaayactgtgataggggcaaggagaaaccacacaggcagccttggtgcgagcaccaacccactaggcactacacagctatagtgctgaaaccagggttattttctgtggcaagcagcaaatctgatacccccagagggaatggaggcagc

SEQ ID NO: 2194 - DNA, 600 bp, Chicken  19866894089038_2
tccagcacagccccctagctgtagcagtaacttaccctcctccttgcctgaaccttcagtcttcagcaggaacatatctgtatgcagggtgcctttgtcaacatctttcttaactctctgcagagaaaggaaagacagggatgctcrgtgaaacacttacaatggccaaaatgcagaaggcccaactcttcaaggcctagaaagtcactcacaccaaaaggtgtgattctgaactctcaaccccacagataagcctaatcacagcctgaatctgtacactgctgtgctgaacaagcaaayactgtgataggggcaaggagaaaccacacaggcagccttggtgcgagcaccaacccactaggcactacacagctatagtgctgaaaccagggttattttctgtggcaagcagcaaatctgatacccccagagggaatggaggcagccagaagggacaaatggagacccggtgtcatgtgactctcaaacacgcctcgctcagtcccatcctactaggggagcagtgggagacgtgtaataaaccacaagcaacttctgcctgcaacaaccagagcctccctctgctctccaggctgccac

SEQ ID NO: 2195 - DNA, 600 bp, Chicken  19866894089039_1
agaatttaagcctttctcgtaaaagaaaatagacagcgtggttattagaggctgtagtcagccttttaaatccatgaccaggcaccaaaatgagtaactggaattttttctcaaaagctgaaggtccatctgttcccactgaaaccaatttgtggtcaggtacaaactgagggtttcttgctctaccatgctgggttactaccactgcgggggaatacttggctttaaaataaaattgttgctggtgaaataaaaggaatagttttacaaaatgtaattttgatcccatttgaacagacrgaaataaaatgcccatttctccttaatggaaacagttttcttgagaatgcagtaagcatgctttggatattcatttagagctattttaggtagaagtctgtctgaccactattcagtgttctcaaaagcacaggcaccagatccctgtcctgctggcacatggtgtctctaattaactggaaatgcaacagcaggctctggggagatgaagcagagaagatgcccagaggaaggcacatttccctgtgcacccaatgcacggctccagggcaggtttctgcaggggctggtggggagccc

SEQ ID NO: 2196 - DNA, 599 bp, Chicken  19866894089047_1
  misc_feature (1)..(156): n is any nucleotide
nnnnnnnnnnnnnnnnnnnnnnnnnnnnnnnnnnnnnnnnnnnnnnnnnnnnnnnnnnnnnnnnnnnnnnnnnnnnnnnnnnnnnnnnnnnnnnnnnnnnnnnnnnnnnnnnnnnnnnnnnnnnnnnnnnnnnnnnnnnnnnnnnnnnnnnnnnnnttccaattgcatctgttcttctaaagatgctgtacagattgtcttaaaagtttcatttgaggttcttcatctccagatgttccaggcataaatccgtactaagttaagattaagaattgttactgttttggttgctttgtagtytgtttaggatatcacagtrtggctagtaaggagcaaaaaaaagcatttgttcaattctaytttgggaatatctcatggctattgaaaaaatgttactttttttccctttaatccaggaagtgatttttgttattagagaaagcaaagcaactgacttgtactttttgtttgttttgtgccagctcaccatgccttctcctatgcccgaatatcttaacgttcactatatctgtgagacagcctccaggttgcttttcttgtccatgcactgggcccgttccattccgtctttccaagct

SEQ ID NO: 2197 - DNA, 496 bp, Chicken  19866894089047_10
ccaggaatcttggcagagcgtggatgatgtgtatttacttagatgctaaagccaaatmattctacgttgtttaaaatagtgtattgtgtataattgaaacttctcttctgaagaggagtcaagttctataaaactcaacaacggcaaggggaggaaagcaggtaaatatgatacttcagtgcaaattgctgctgcagaacctgacaatacttagcaaattaacatggtgaacatcactgtacgtttttcaggtttttttgtaacacagatattgcaaagtggtgttgtaacagcaaacakattttctgaaaactaaaagatacaaaagatcagtctgtacaaacagatttaacaggtaaatgagcatagaaaatctgctttaaaaaaaatatatattacttcccaatatacttgtctgaattagcaaagggagggataggctgccacaacacctttggtaatattcaccctgagtgctacaattttgcagtcctag

SEQ ID NO: 2198 - DNA, 599 bp, Chicken  19866894089047_2
  misc_feature (1)..(137): n is any nucleotide
nnnnnnnnnnnnnnnnnnnnnnnnnnnnnnnnnnnnnnnnnnnnnnnnnnnnnnnnnnnnnnnnnnnnnnnnnnnnnnnnnnnnnnnnnnnnnnnnnnnnnnnnnnnnnnnnnnnnnnnnnnnnnnnnnnnnnnnnnttccaattgcatctgttcttctaaagatgctgtacagattgtcttaaaagtttcatttgaggttcttcatctccagatgttccaggcataaatccgtactaagttaagattaagaattgttactgttttggttgctttgtagtytgtttaggatatcacagtrtggctagtaaggagcaaaaaaaagcatttgttcaattctaytttgggaatatctcatggctattgaaaaaatgttactttttttccctttaatccaggaagtgatttttgttattagagaaagcaaagcaactgacttgtactttttgtttgttttgtgccagctcaccatgccttctcctatgcccgaatatcttaacgttcactatatctgtgagacagcctccaggttgcttttcttgtccatgcactgggcccgttccattccgtctttccaagctttagggtaggtgttcaatt

SEQ ID NO: 2199 - DNA, 599 bp, Chicken  19866894089047_3
  misc_feature (1)..(96): n is any nucleotide
nnnnnnnnnnnnnnnnnnnnnnnnnnnnnnnnnnnnnnnnnnnnnnnnnnnnnnnnnnnnnnnnnnnnnnnnnnnnnnnnnnnnnnnnnnnnnnnnttccaattgcatctgttcttctaaagatgctgtacagattgtcttaaaagtttcatttgaggttcttcatctccagatgttccaggcataaatccgtactaagttaagattaagaattgttactgttttggttgctttgtagtytgtttaggatatcacagtrtggctagtaaggagcaaaaaaaagcatttgttcaattctaytttgggaatatctcatggctattgaaaaaatgttactttttttccctttaatccaggaagtgatttttgttattagagaaagcaaagcaactgacttgtactttttgtttgttttgtgccagctcaccatgccttctcctatgcccgaatatcttaacgttcactatatctgtgagacagcctccaggttgcttttcttgtccatgcactgggcccgttccattccgtctttccaagctttagggtaggtgttcaattactctctttgctygtgttgagattcacgctttttgatttgt

SEQ ID NO: 2200 - DNA, 600 bp, Chicken  19866894089047_4
agcaaaaaaaagcatttgttcaattctaytttgggaatatctcatggctattgaaaaaatgttactttttttccctttaatccaggaagtgatttttgttattagagaaagcaaagcaactgacttgtactttttgtttgttttgtgccagctcaccatgccttctcctatgcccgaatatcttaacgttcactatatctgtgagacagcctccaggttgcttttcttgtccatgcactgggcccgttccattccgtctttccaagctttagggtaggtgttcaattactctctttgctygtgttgagattcacgctttttgatttgtttgtactgccatccttgaggactttttaaaatagaaaccagtttattaaaactgttgtattgatcttaaacacaaaggtaaattcactcaatcaaaatgattcccagcttcacttcaaatcaagtacttggttgagtttggaagaaaaaaggagtagattgataatgatgaaatgcctgctcgctgcccttctctaatacattttcagtaaataggacttcctatcacttttgaatagcacctcccgaacttaagatgygtatcagtcacca

SEQ ID NO: 2201 - DNA, 600 bp, Chicken  19866894089047_5
actctctttgctygtgttgagattcacgctttttgatttgtttgtactgccatccttgaggactttttaaaatagaaaccagtttattaaaactgttgtattgatcttaaacacaaaggtaaattcactcaatcaaaatgattcccagcttcacttcaaatcaagtacttggttgagtttggaagaaaaaaggagtagattgataatgatgaaatgcctgctcgctgcccttctctaatacattttcagtaaataggacttcctatcacttttgaatagcacctcccgaacttaagatgygtatcagtcaccaaagagaagctcctttctggagcttcaaatgctgctttctttatgggtgagttagtaataattttgcatttaataaataatacgaacaacatgctgagttaatcctgaatgcttgctgaacctcagttgtttacttgcagagcgttttccaaaaacaaatgatggcaatagccagaaagtaattgttattattctctttacagtttgtgtaacgttctctttttataagcagaatttggtgtatcactaaaaattctgaagccatatgtggtagtacgttgctgatca

SEQ ID NO: 2202 - DNA, 600 bp, Chicken  19866894089047_6
taataattttgcatttaataaataatacgaacaacatgctgagttaatcctgaatgcttgctgaacctcagttgtttacttgcagagcgttttccaaaaacaaatgatggcaatagccagaaagtaattgttattattctctttacagtttgtgtaacgttctctttttataagcagaatttggtgtatcactaaaaattctgaagccatatgtggtagtacgttgctgatcatcatgaaaaaagatatcaagacagcatgaggagaagggatttttattactttcagaaaccatcaagrttgtcatccaataaactgtctgttacaatgtgatatacatctatcagccttgatacaaagggagcayaaaatcatcttgtaggtcaggatcttcaatgttctcctttagtgtagaatcaaaatagcatctgatggtggtagcaaagagaattcctgttcatagtggggrattgtcccctttaccaggaatcttggcagagcgtggatgatgtgtatttacttagatgctaaagccaaatmattctacgttgtttaaaatagtgtattgtgtataattgaaacttctcttctgaagaggag

SEQ ID NO: 2203 - DNA, 600 bp, Chicken  19866894089047_7
tcagttgtttacttgcagagcgttttccaaaaacaaatgatggcaatagccagaaagtaattgttattattctctttacagtttgtgtaacgttctctttttataagcagaatttggtgtatcactaaaaattctgaagccatatgtggtagtacgttgctgatcatcatgaaaaaagatatcaagacagcatgaggagaagggatttttattactttcagaaaccatcaagrttgtcatccaataaactgtctgttacaatgtgatatacatctatcagccttgatacaaagggagcayaaaatcatcttgtaggtcaggatcttcaatgttctcctttagtgtagaatcaaaatagcatctgatggtggtagcaaagagaattcctgttcatagtggggrattgtcccctttaccaggaatcttggcagagcgtggatgatgtgtatttacttagatgctaaagccaaatmattctacgttgtttaaaatagtgtattgtgtataattgaaacttctcttctgaagaggagtcaagttctataaaactcaacaacggcaaggggaggaaagcaggtaaatatgatacttcagtgcaaa

SEQ ID NO: 2204 - DNA, 600 bp, Chicken  19866894089047_8
ataagcagaatttggtgtatcactaaaaattctgaagccatatgtggtagtacgttgctgatcatcatgaaaaaagatatcaagacagcatgaggagaagggatttttattactttcagaaaccatcaagrttgtcatccaataaactgtctgttacaatgtgatatacatctatcagccttgatacaaagggagcayaaaatcatcttgtaggtcaggatcttcaatgttctcctttagtgtagaatcaaaatagcatctgatggtggtagcaaagagaattcctgttcatagtggggrattgtcccctttaccaggaatcttggcagagcgtggatgatgtgtatttacttagatgctaaagccaaatmattctacgttgtttaaaatagtgtattgtgtataattgaaacttctcttctgaagaggagtcaagttctataaaactcaacaacggcaaggggaggaaagcaggtaaatatgatacttcagtgcaaattgctgctgcagaacctgacaatacttagcaaattaacatggtgaacatcactgtacgtttttcaggtttttttgtaacacagatattgcaaagtggtgttg

SEQ ID NO: 2205 - DNA, 600 bp, Chicken  19866894089047_9
aaaagatatcaagacagcatgaggagaagggatttttattactttcagaaaccatcaagrttgtcatccaataaactgtctgttacaatgtgatatacatctatcagccttgatacaaagggagcayaaaatcatcttgtaggtcaggatcttcaatgttctcctttagtgtagaatcaaaatagcatctgatggtggtagcaaagagaattcctgttcatagtggggrattgtcccctttaccaggaatcttggcagagcgtggatgatgtgtatttacttagatgctaaagccaaatmattctacgttgtttaaaatagtgtattgtgtataattgaaacttctcttctgaagaggagtcaagttctataaaactcaacaacggcaaggggaggaaagcaggtaaatatgatacttcagtgcaaattgctgctgcagaacctgacaatacttagcaaattaacatggtgaacatcactgtacgtttttcaggtttttttgtaacacagatattgcaaagtggtgttgtaacagcaaacakattttctgaaaactaaaagatacaaaagatcagtctgtacaaacagatttaacaggta

SEQ ID NO: 2206 - DNA, 600 bp, Chicken  19866894089050_1
ctgctatcagccctgatgcaccagcacccgacacagcatctcagctgagtgtgtgaactttgtacttcatccagtgagcgtgaaagactgggtagctgccagttttccactagtgctatgagtacagactgatagcttttattgcagggctatgagcatccagtgtaaaaactgagggaagagtatttaaacattttgttggggcaattttctactggacagcactatttttggaaaaccaaaggtttttgtgggaatgaaacagtttttattaatttttttttccatcaacaaaacttwgagaattgtctccaagactctctaactgtatccaagagataggaacctatacatttccaaactgtccttcttcaaggagattaactttattttggttgtgtgacaaaacgtcaggctcaacagtagctaaaatggtgttctgaaaccttaggaatgtgctgagggttcaccagtgtttccccgagcaacgccttctgcatctgtttcaaatcaaaaacctgtcctaacccttgtcttctcccagagtctcttatttgtagttttcatgattttgggcacatgccacaccactaacgtttc

SEQ ID NO: 2207 - DNA, 599 bp, Chicken  19866894089051_1
  misc_feature (1)..(146): n is any nucleotide
nnnnnnnnnnnnnnnnnnnnnnnnnnnnnnnnnnnnnnnnnnnnnnnnnnnnnnnnnnnnnnnnnnnnnnnnnnnnnnnnnnnnnnnnnnnnnnnnnnnnnnnnnnnnnnnnnnnnnnnnnnnnnnnnnnnnnnnnnnnnnnnnnnctcatttaatatgagaaaaataaattgctggctgtgatagtgaatgtggttcttactgctgctaacatagactcatccttccaaggctcagcctgattttgggggaggagagaaagctagtggaaacattttgttttaaatctctcacagaacrtccagaacccaagtccccacagtgctgcaatgtaatggtgacaggggactttggattggttgtctgtcactcagccttgtcctacaaagatctgtttgcagaagacagtttcagaattatcttaatcataaatacgatctgcttatggccttgaaacaaaatcttgctgcaaatgagtttaatgggcagatttttctccasytgaagtaaagttttgcctccaacggtcttagtaggttctaaattagtgttcagccttgggtattttctgtgagtatttaatactatgggggaggtaa

SEQ ID NO: 2208 - DNA, 600 bp, Chicken  19866894089051_2
ctgctgctaacatagactcatccttccaaggctcagcctgattttgggggaggagagaaagctagtggaaacattttgttttaaatctctcacagaacrtccagaacccaagtccccacagtgctgcaatgtaatggtgacaggggactttggattggttgtctgtcactcagccttgtcctacaaagatctgtttgcagaagacagtttcagaattatcttaatcataaatacgatctgcttatggccttgaaacaaaatcttgctgcaaatgagtttaatgggcagatttttctccasytgaagtaaagttttgcctccaacggtcttagtaggttctaaattagtgttcagccttgggtattttctgtgagtatttaatactatgggggaggtaaaactgtgaatctactactgatcttaacatgccccatgtcttggacaggtatactctttgctgtgtaaggagctggctggagggccgggcccagarggtggtagtgaatggagttaaatccagctggcaacccgtcatggtgttcctcaggggtcagtactggggtctgtcctgtacaatatctttactgatgacctggatga

SEQ ID NO: 2209 - DNA, 600 bp, Chicken  19866894089051_3
tgctgctaacatagactcatccttccaaggctcagcctgattttgggggaggagagaaagctagtggaaacattttgttttaaatctctcacagaacrtccagaacccaagtccccacagtgctgcaatgtaatggtgacaggggactttggattggttgtctgtcactcagccttgtcctacaaagatctgtttgcagaagacagtttcagaattatcttaatcataaatacgatctgcttatggccttgaaacaaaatcttgctgcaaatgagtttaatgggcagatttttctccasytgaagtaaagttttgcctccaacggtcttagtaggttctaaattagtgttcagccttgggtattttctgtgagtatttaatactatgggggaggtaaaactgtgaatctactactgatcttaacatgccccatgtcttggacaggtatactctttgctgtgtaaggagctggctggagggccgggcccagarggtggtagtgaatggagttaaatccagctggcaacccgtcatggtgttcctcaggggtcagtactggggtctgtcctgtacaatatctttactgatgacctggatgag

SEQ ID NO: 2210 - DNA, 600 bp, Chicken  19866894089051_4
tttgcagaagacagtttcagaattatcttaatcataaatacgatctgcttatggccttgaaacaaaatcttgctgcaaatgagtttaatgggcagatttttctccasytgaagtaaagttttgcctccaacggtcttagtaggttctaaattagtgttcagccttgggtattttctgtgagtatttaatactatgggggaggtaaaactgtgaatctactactgatcttaacatgccccatgtcttggacaggtatactctttgctgtgtaaggagctggctggagggccgggcccagarggtggtagtgaatggagttaaatccagctggcaacccgtcatggtgttcctcaggggtcagtactggggtctgtcctgtacaatatctttactgatgacctggatgagagcactgagtacaccctcagtaagtctgcagatgacaccaggttggctggaagtgtcgatctgtatgggggtagcgaggccctacagagtgatgtggacaggctggatcactgggatgaagccagtgggatgaggttcaacaagatcaagtgctgagtcctgcactttggccacaacaaccccaggcaacgc

SEQ ID NO: 2211 - DNA, 600 bp, Chicken  19866894089054_1
tcttcaggtatcacatttgcattttccttgttctttcaccaaggtgaagtaatcaactcttcagttctaatgaatgtttctttctctttgaagtaatgttgcatcagctgttaataagtgctagctatggaagcaggttgagcgaggtgatcctgcccctctgctctgtgctggcgagacctcatctggagtactgcgtcctgatgtggactcctcagtacaggaaagatgtggacctattagagtgcgtccagaggaaggccacaaaaatgatccaaggggtggaacatcttcactgtsaggacaggctgagagagctggggctggtcagcctggagaaggttcttggtagacctgagagctgcctttcaccatttaaaggagggctgtaagaaagaaggggacagattttttaacaggatctgctgtgacaggacgaggggaaatggtttcaaactaaaggaggggagatttagattgggcataagaaagaagtttcttacagtaagggtggtgaggcagtggaacaggttgcccagagaggtggtggatgccgcatccctggagactctcaggatcaggctggatgaggctctgagc

SEQ ID NO: 2212 - DNA, 599 bp, Chicken  19866894089056_1
  misc_feature (1)..(10): n is any nucleotide
nnnnnnnnnntggtggcaacgaaagttaggatggagtaggcactgttatctgtcaaatttgatacatattacatacatattgttcacatcattatttttaatctctgatctacttaattactaattaaaaacatatacaaatctttactcgtctttgacttaatttatcatagtgagcagtgctaattattggtagaaaattactgcgaattaataaaactactgcataagatggtgtaactaatagcacatgtctgagacagctacagttttgaaaagaagtaagattgtaagttagtrctggtatatactagtatgaaagtttccatagtacctttctgtggtttagtttgttattgccaggactttgtccacaaaatgtcaggagacaaagggatgacaaagaacattaaaattctctgctttgtttttagctcagctcattaatagttgaaaactgttgtcagatagaataatagcatcatagaatggcttaggtaggaagggaccttaaagatcatctagttccaacctccctgccatgggcagggttgccaccctgattccattaagttgcttaatggtctctttgtaggcaa

SEQ ID NO: 2213 - DNA, 600 bp, Chicken  19866894089056_2
tactagtatgaaagtttccatagtacctttctgtggtttagtttgttattgccaggactttgtccacaaaatgtcaggagacaaagggatgacaaagaacattaaaattctctgctttgtttttagctcagctcattaatagttgaaaactgttgtcagatagaataatagcatcatagaatggcttaggtaggaagggaccttaaagatcatctagttccaacctccctgccatgggcagggttgccaccctgattccattaagttgcttaatggtctctttgtaggcaaatattcatyrctcyctgtagtgctcttatgaacaagctcagcagagaggtgagagagtaatagggaaggaaatgagcctatattccaaaatctccttcctccaaaatctctcttttggagcaaagtcaatatattgctgggttgtacatatttcagtttccgtagtcttccatgatggaaagttagtctggacgcattcacttgtaggaggtaagtgtgtaaggagaggaacttctgctttagttttggtctgtgtcctctatgtgatgctttacagtggtgcatcttggttcttgcttgttctttcac

SEQ ID NO: 2214 - DNA, 600 bp, Chicken  19866894089056_3
actagtatgaaagtttccatagtacctttctgtggtttagtttgttattgccaggactttgtccacaaaatgtcaggagacaaagggatgacaaagaacattaaaattctctgctttgtttttagctcagctcattaatagttgaaaactgttgtcagatagaataatagcatcatagaatggcttaggtaggaagggaccttaaagatcatctagttccaacctccctgccatgggcagggttgccaccctgattccattaagttgcttaatggtctctttgtaggcaaatattcatyrctcyctgtagtgctcttatgaacaagctcagcagagaggtgagagagtaatagggaaggaaatgagcctatattccaaaatctccttcctccaaaatctctcttttggagcaaagtcaatatattgctgggttgtacatatttcagtttccgtagtcttccatgatggaaagttagtctggacgcattcacttgtaggaggtaagtgtgtaaggagaggaacttctgctttagttttggtctgtgtcctctatgtgatgctttacagtggtgcatcttggttcttgcttgttctttcaca

SEQ ID NO: 2215 - DNA, 600 bp, Chicken  19866894089056_4
gtatgaaagtttccatagtacctttctgtggtttagtttgttattgccaggactttgtccacaaaatgtcaggagacaaagggatgacaaagaacattaaaattctctgctttgtttttagctcagctcattaatagttgaaaactgttgtcagatagaataatagcatcatagaatggcttaggtaggaagggaccttaaagatcatctagttccaacctccctgccatgggcagggttgccaccctgattccattaagttgcttaatggtctctttgtaggcaaatattcatyrctcyctgtagtgctcttatgaacaagctcagcagagaggtgagagagtaatagggaaggaaatgagcctatattccaaaatctccttcctccaaaatctctcttttggagcaaagtcaatatattgctgggttgtacatatttcagtttccgtagtcttccatgatggaaagttagtctggacgcattcacttgtaggaggtaagtgtgtaaggagaggaacttctgctttagttttggtctgtgtcctctatgtgatgctttacagtggtgcatcttggttcttgcttgttctttcacagtaa

SEQ ID NO: 2216 - DNA, 600 bp, Chicken  19866894089056_5
aactagcaagcaagggaataaattaaaccaattttggacagactctttctctgccaagtgggctgtctggcaaaccaagagtataataaatagggtttgtggctatttacagacttatatattagaaaacagctatgcttcccagtttcattacataacttgagtggtgggttatactcgtgtttctcttagccaaagaaatgcagttctgtactgtaccctacctgccttgtatgcttgcttgatcagtgaaacctcatcacttggttctggaactgcttgtgaagatgatttgagaartctgtatttcatctcagttcatgcgtgctgccattttttttttttaatgtggtctcataccttcttgtttgaaatggcgttattgctgaggccttttgtttgtcttttttcttgttgttttttctttctttttcctgcttgtattgttcagcataaaaaaaaaaaaaagacataagaaaaccgtgtttataataggattgtggaataaccgatccgtcctatgtatttcatcttccatgtgaaactcagtagcacagcaatgccgagctgcatttgcttaacaccaatctttgggttttt

SEQ ID NO: 2217 - DNA, 600 bp, Chicken  19866894089057_1
agctagagactaccagaaccaaaaatgctgtgttattattagttcctttgactttagtggagctatgaaacatggatgcgatccttcacatacaaagtgtatttttttctaacagtaaagctcattcattctgttttccccaacaatttctcatcacgagcaatgcaaataaatgaactataaaacaacttgctgcatactgcagttgaagtacagacacagagagaagtggggtacagcatcagccttcctttttgagtactttaaaagtgctgctgctggtaggacagtatctattcrgattaacagatttcaaaagaaacgtattttgttcttcaaatactgactttttcctttgagtgggcaaactcgactacacttggagtttaagtggggatagtcctatgcagcaaagtctgggctgagcagtgttgtcattccctctgttggtttttaatctcttttttgtgctgagagcagccatctgtccccctccaaacaatgacggaagcagctgtgtgagttgtgcccccaacaacaaaagcccccactacataccagggggctgcaggtcgcagggagctggagggtatcggggtc

SEQ ID NO: 2218 - DNA, 600 bp, Chicken  19866894089059_1
attgcatattcccctccagtcctgatatttccccaaaaattccccgtatgtcattcatagcaaaattacttcattctgttttactgataaacagcatttgtgtctatgtaaaaaaagcagatatctaaagacctctcaacatctatttaggaatgaaaattcatccctgtagccttttctttctcctgagctcagtctaaagtttaaatattggccaagacacaaataaacaaacattagtaaacctgagactggactgccattgctcctcagcagtagagcctgccagtaccagatacrgatccagaggtattgctgggtttgcctcttccagaataaattttccaaggagctacaccctcgtctagctttttcagattttgataatcactgtttatgactgtggctacaatagttgacctaaccagaagtgctaggaatcaaaccacagactttggaaagcaacaggatccataagctacaaagtccgtattttgagagtctatggtatgagaagcccagtgctaagccacacaaatggccatgccaggataattgttcagattctgcaaatcacatccatactgagaagcctgtcta

SEQ ID NO: 2219 - DNA, 600 bp, Chicken  19866894089059_2
ctatataaatagtgataaatttcctaatactactgggcagactcttcctgcaagtacaacgggtgtttatcaatttcccgctgagctagggttgactttcaaatttcctttaatcctattatagtaaacatagtacagctctctggcaaacaagggaaacattcttcatgtaatatcatacccttctttgaaagaaaccttagagatgtccagaaaagaaaaaggctcaacttggaatgacacaacaatcttgtttccaaaaaagcttaagttttataaaatattagattttaatctatwaaaaaaaaaaaaaagaaagaaaaagaaaataatattttattttataaatagaaaattggcaatttctgatactcaatcttatgctygcaaatatcatactttaaagtcagttatctgaaataaaaatattttttggaagctgcatacctgagctgaaggataagtcaactggcattttggtgctagaattcaggaaaaacaaacaaacaaacaaacaaacaaacaacttcagcttgtgaaggtgctttttcaatattacatcaagaaagaacattaagtgcagaggagtttaaaaaatat

SEQ ID NO: 2220 - DNA, 600 bp, Chicken  19866894089059_3
tagggttgactttcaaatttcctttaatcctattatagtaaacatagtacagctctctggcaaacaagggaaacattcttcatgtaatatcatacccttctttgaaagaaaccttagagatgtccagaaaagaaaaaggctcaacttggaatgacacaacaatcttgtttccaaaaaagcttaagttttataaaatattagattttaatctatwaaaaaaaaaaaaaagaaagaaaaagaaaataatattttattttataaatagaaaattggcaatttctgatactcaatcttatgctygcaaatatcatactttaaagtcagttatctgaaataaaaatattttttggaagctgcatacctgagctgaaggataagtcaactggcattttggtgctagaattcaggaaaaacaaacaaacaaacaaacaaacaaacaacttcagcttgtgaaggtgctttttcaatattacatcaagaaagaacattaagtgcagaggagtttaaaaaatataaaaatatgtggataaagaaaaacaaatgggatttgttacagtacaatttgtatttaacatttctcctcatttgggagaaaattat

SEQ ID NO: 2221 - DNA, 600 bp, Chicken  19866894089063_1
gaagaaagaatattttagcccatgtaacaaaaaagaataaatggaacataaaacttatcttcgtcatccaagagtacagctatgataaattagaaaaggaatgggaaaactgtaagtatttagaaatgtaatcttgagtaaatagattgagttcccattgatgcaattacgttgattccaatgaagttaggactacttgatttgcagaagtccattcatagcttctccctgcctaatctcaaaatttataacaaaatttgtctctctattcagtaattattttcctactctgagaatccygtaccgcagtcctaaatcaaggcatccatcagagcgactgaaaattaagagagagaatgtcttcytcaaagacatttcctgctgaattataaacacatccattgtgaggtcacttaagtatcattttgcagagtaagtatcgtttctccagcagagttctatttaacrgtaattgtacatttctgaagacagctgtatggaggaygcttcacarggaaaatgtcttatccatctttttgaagaacactgtatatttgaataccgmatctacaccagactccagcaaaaacagagatacta

SEQ ID NO: 2222 - DNA, 600 bp, Chicken  19866894089063_10
tagaagtcacgtacagagcaaacacagcactagcactgcagtttgcaatactgctccagtccccctctgagtgctgaccatcacctaagaggcaggatttcacagttcctttaaggtctgcagcaggcaagtgagattatcacatctctctacccaagaccctgctgggttcatatattttatggacgagctgaacttctgtggtgtgatagaagggaaagcaaagccaatattctttcaatagcagaagttcagaggagactggaaacagataaagacagaatccaacaaatctttatrggaaaaatctagaggctcaactgtgtagaacagtcatatgacaactacacagtccctttcaacattgcctaatgtacaaaaaatcaaatcaaaagacagaaacaacccacaccttaaaatctgggggaaaaatcctcactagcttagcaacctctacctacgctctgagcatttccacccacctgctgaagaataagtatgcttctctatcccaagaataatatgtcctgctacttaaagcagatcatccacataagctaaytcagctaacttgtcaacacaaacactgtctgcatgaga

SEQ ID NO: 2223 - DNA, 600 bp, Chicken  19866894089063_11
tggaaacagataaagacagaatccaacaaatctttatrggaaaaatctagaggctcaactgtgtagaacagtcatatgacaactacacagtccctttcaacattgcctaatgtacaaaaaatcaaatcaaaagacagaaacaacccacaccttaaaatctgggggaaaaatcctcactagcttagcaacctctacctacgctctgagcatttccacccacctgctgaagaataagtatgcttctctatcccaagaataatatgtcctgctacttaaagcagatcatccacataagctaaytcagctaacttgtcaacacaaacactgtctgcatgagaagaaaatcaaatccaaaatctagcaatctgaggcacaggactgctttgagggaattggagaattaattatggaaactaagtaagtttcctaacctgccctacaaatacccttttaagtcagtaccaaaatccagtactatctcacataatataatttgatgctcgttaactatgatgagaaggtaaaataatgatagcaaagctagactactcttgcaaagtggacaaaaaggcactacttaaattgtacacaaaataagct

SEQ ID NO: 2224 - DNA, 600 bp, Chicken  19866894089063_2
atccaagagtacagctatgataaattagaaaaggaatgggaaaactgtaagtatttagaaatgtaatcttgagtaaatagattgagttcccattgatgcaattacgttgattccaatgaagttaggactacttgatttgcagaagtccattcatagcttctccctgcctaatctcaaaatttataacaaaatttgtctctctattcagtaattattttcctactctgagaatccygtaccgcagtcctaaatcaaggcatccatcagagcgactgaaaattaagagagagaatgtcttcytcaaagacatttcctgctgaattataaacacatccattgtgaggtcacttaagtatcattttgcagagtaagtatcgtttctccagcagagttctatttaacrgtaattgtacatttctgaagacagctgtatggaggaygcttcacarggaaaatgtcttatccatctttttgaagaacactgtatatttgaataccgmatctacaccagactccagcaaaaacagagatactattcctctataccatactgcagcaaaaatagggatattattcctatcaaaccatatgaatgcattt

SEQ ID NO: 2225 - DNA, 600 bp, Chicken  19866894089063_3
acgttgattccaatgaagttaggactacttgatttgcagaagtccattcatagcttctccctgcctaatctcaaaatttataacaaaatttgtctctctattcagtaattattttcctactctgagaatccygtaccgcagtcctaaatcaaggcatccatcagagcgactgaaaattaagagagagaatgtcttcytcaaagacatttcctgctgaattataaacacatccattgtgaggtcacttaagtatcattttgcagagtaagtatcgtttctccagcagagttctatttaacrgtaattgtacatttctgaagacagctgtatggaggaygcttcacarggaaaatgtcttatccatctttttgaagaacactgtatatttgaataccgmatctacaccagactccagcaaaaacagagatactattcctctataccatactgcagcaaaaatagggatattattcctatcaaaccatatgaatgcatttaaactagaatctaagggtccaagaagttgttcctgcgtaacatctgaacgcacacacaaaaaaagtggtaacaaaaacggcagcaggaagaacacagagaagg

SEQ ID NO: 2226 - DNA, 600 bp, Chicken  19866894089063_4
agaagtccattcatagcttctccctgcctaatctcaaaatttataacaaaatttgtctctctattcagtaattattttcctactctgagaatccygtaccgcagtcctaaatcaaggcatccatcagagcgactgaaaattaagagagagaatgtcttcytcaaagacatttcctgctgaattataaacacatccattgtgaggtcacttaagtatcattttgcagagtaagtatcgtttctccagcagagttctatttaacrgtaattgtacatttctgaagacagctgtatggaggaygcttcacarggaaaatgtcttatccatctttttgaagaacactgtatatttgaataccgmatctacaccagactccagcaaaaacagagatactattcctctataccatactgcagcaaaaatagggatattattcctatcaaaccatatgaatgcatttaaactagaatctaagggtccaagaagttgttcctgcgtaacatctgaacgcacacacaaaaaaagtggtaacaaaaacggcagcaggaagaacacagagaaggcaaaatcttgcaaattacttctacttttcactttcta

SEQ ID NO: 2227 - DNA, 600 bp, Chicken  19866894089063_5
ttcatagcttctccctgcctaatctcaaaatttataacaaaatttgtctctctattcagtaattattttcctactctgagaatccygtaccgcagtcctaaatcaaggcatccatcagagcgactgaaaattaagagagagaatgtcttcytcaaagacatttcctgctgaattataaacacatccattgtgaggtcacttaagtatcattttgcagagtaagtatcgtttctccagcagagttctatttaacrgtaattgtacatttctgaagacagctgtatggaggaygcttcacarggaaaatgtcttatccatctttttgaagaacactgtatatttgaataccgmatctacaccagactccagcaaaaacagagatactattcctctataccatactgcagcaaaaatagggatattattcctatcaaaccatatgaatgcatttaaactagaatctaagggtccaagaagttgttcctgcgtaacatctgaacgcacacacaaaaaaagtggtaacaaaaacggcagcaggaagaacacagagaaggcaaaatcttgcaaattacttctacttttcactttctataataaaga

SEQ ID NO: 2228 - DNA, 600 bp, Chicken  19866894089063_6
ctattcagtaattattttcctactctgagaatccygtaccgcagtcctaaatcaaggcatccatcagagcgactgaaaattaagagagagaatgtcttcytcaaagacatttcctgctgaattataaacacatccattgtgaggtcacttaagtatcattttgcagagtaagtatcgtttctccagcagagttctatttaacrgtaattgtacatttctgaagacagctgtatggaggaygcttcacarggaaaatgtcttatccatctttttgaagaacactgtatatttgaataccgmatctacaccagactccagcaaaaacagagatactattcctctataccatactgcagcaaaaatagggatattattcctatcaaaccatatgaatgcatttaaactagaatctaagggtccaagaagttgttcctgcgtaacatctgaacgcacacacaaaaaaagtggtaacaaaaacggcagcaggaagaacacagagaaggcaaaatcttgcaaattacttctacttttcactttctataataaagaagttatgaatggagcaaatttcattttactttaaataaacaagaaggagaa

SEQ ID NO: 2229 - DNA, 600 bp, Chicken  19866894089063_7
gcaaaatcttgcaaattacttctacttttcactttctataataaagaagttatgaatggagcaaatttcattttactttaaataaacaagaaggagaaaccctctgctgtaccatactgaaaagcctcaggcgttagtataacaacacatgccatctatcatttaaatttgtcctttctgcaacagtactgttatatatgtgggagctgatttagaattctggactgcagagtttggatgattccacacacaaacttaaaacagtccttgaaccgatataaagcaagtctatcacacacrcacacaaagctcttccacattgtatcccctagccataccaacttacacataaaacttcagacagaacttcatattaattatggaactatgaggaatacatctcattcttgtgcttacttgacgtttaggagtgtttgttgattgtttggtcaatggtaaggcagacacctgagctccgaagagcacaaggaacaaaagcagcgcaaggtcttcactctccatgtatacctcagcttttcccacacgtatctcacaaactgcagacattcaccttccagaaaaacatgtgctctataggga

SEQ ID NO: 2230 - DNA, 600 bp, Chicken  19866894089063_8
ctgtatggcagcagtaactgttaatgtaataacatcatgatttttaagtgagtcatcacattcctattagtgggcaatgttgtgattcacgcatctcaggaaaccatcactgtattactaactgacctgctgaaatacacaaaaacctcatgaactattgctgctgcttttgttgggtttggaaataagctttctctgaagagacaatgtagggtccagaaagtaaaagtgttcatcttctactgttaagctacaagcaagccacattacaatagtgtttggacttctaaaactcagtaygttattcatctgcatcataatgaagaaaagaggggaactatacaatttaatttgcaccttttaattctaaagtctgaacaataatttcagaagaaattaacttgctgcatgatataatgaagataatcaaatcagagatgatttaataaagccaaagcacacagctttgtattcaagagactcatacataattcataaagttgccacatttgggcattaggtcaaatatattaagtagtagttattctgagaactggctatgaagttaaaaacatcttaagcatgggcagtaatcacaga

SEQ ID NO: 2231 - DNA, 600 bp, Chicken  19866894089063_9
ttaatttgcaccttttaattctaaagtctgaacaataatttcagaagaaattaacttgctgcatgatataatgaagataatcaaatcagagatgatttaataaagccaaagcacacagctttgtattcaagagactcatacataattcataaagttgccacatttgggcattaggtcaaatatattaagtagtagttattctgagaactggctatgaagttaaaaacatcttaagcatgggcagtaatcacagaaaaaatgctatgtttcatgttttaatattataattgaccgtttagyacatggcttgcatgaatctgtagactaaattgctgattggcattttctacacaaacctgcttcgagtcgctcattcagatcacctcattctatcctttccacctccgaaggaaaatacagtgggaaaatacatcgcaaaaatgctgaaatcagcagaaaattcacagggtgatggaattccctttacagtcacacgttacagaggacatgatacaatatcagcccatatattacaattcgagagataacactaatccctaggtgctgctagaagtgctaactcaatgaagctctacttgt

SEQ ID NO: 2232 - DNA, 599 bp, Chicken  19866894089071_1
  misc_feature (1)..(43): n is any nucleotide
nnnnnnnnnnnnnnnnnnnnnnnnnnnnnnnnnnnnnnnnnnnccaggcagtgaaaggcaaggcaaagcaaggcaagtccacgacaaacagggcaaggcttggcaaggccagacaaaacgagggaatgcatggaacgtccaagcaatgcaacacaagacaaaacacggcccggccaggctaggcaacgcaaggcaagacatggccagtcaagggaaggaaagaccaggcaagtcaagcccaagcagtgaaaggcaacgcgaggccaaacaaggtaacacaagtccaggcaaggccaggcmaggcaaggcaagtccagaccagtcacggcaaggaaaggcaaggccagttaagtcaaggaaagacccggcaagtcmagcccaagcagtgaagagcaaggcaaggcaaaacaaggccacacaagtccaggcaaggccagcaaaggcaaggcaagtccagaccagtcacggcaaggcaaggcaaggccagtcaaggcaaggaaagtccaggcatgtccaggccagacaggcaaggcaaggccgggctaggcctggcacgtccaggaaaggccaggcttgtccagaccagtctcagcgaagca

SEQ ID NO: 2233 - DNA, 600 bp, Chicken  19866894089071_2
agtccacgacaaacagggcaaggcttggcaaggccagacaaaacgagggaatgcatggaacgtccaagcaatgcaacacaagacaaaacacggcccggccaggctaggcaacgcaaggcaagacatggccagtcaagggaaggaaagaccaggcaagtcaagcccaagcagtgaaaggcaacgcgaggccaaacaaggtaacacaagtccaggcaaggccaggcmaggcaaggcaagtccagaccagtcacggcaaggaaaggcaaggccagttaagtcaaggaaagacccggcaagtcmagcccaagcagtgaagagcaaggcaaggcaaaacaaggccacacaagtccaggcaaggccagcaaaggcaaggcaagtccagaccagtcacggcaaggcaaggcaaggccagtcaaggcaaggaaagtccaggcatgtccaggccagacaggcaaggcaaggccgggctaggcctggcacgtccaggaaaggccaggcttgtccagaccagtctcagcgaagcaaggcaaggccaggcaaggyaaggcaaaacaaggcaagtccaggcaagtccaggacaggcaaggcaaggccagggaa

SEQ ID NO: 2234 - DNA, 600 bp, Chicken  19866894089071_3
ccagtcacggcaaggaaaggcaaggccagttaagtcaaggaaagacccggcaagtcmagcccaagcagtgaagagcaaggcaaggcaaaacaaggccacacaagtccaggcaaggccagcaaaggcaaggcaagtccagaccagtcacggcaaggcaaggcaaggccagtcaaggcaaggaaagtccaggcatgtccaggccagacaggcaaggcaaggccgggctaggcctggcacgtccaggaaaggccaggcttgtccagaccagtctcagcgaagcaaggcaaggccaggcaaggyaaggcaaaacaaggcaagtccaggcaagtccaggacaggcaaggcaaggccagggaagaaaaggcaatgcaactcaaggccaggaaagggcaggcacgcaacggcaagaccagccaaggcaaggcaagaaggaaaggtaaagcaagaccagacataccaggaaagtcaacgccagaacaggccaggacaagagaggccaggttaaccaacatttgtcaaaaccaatccaggccaaataagccgagtcgaagtacaccaaagcaaggcaagccaaggcaaggtaaggcaaggcatgcccag

SEQ ID NO: 2235 - DNA, 581 bp, Chicken  19866894089081_1
tgttggagatgctgacaaagagccttccatcctgcagccactgggatccacgctgctcccatcccagcaatgggaaggagagcaccaatggccactgagacattgttagagaaaatagcaagatatatatatatataacttttccttgaattgttttacagcattctaaaaaaagagttaccagaatttaagtctgtcctaacacgctttaacagcaacatgaacatcttttacccctatgcttctttctttcaggatcggcccattgatacacccaacaagaattccctgcagcaaaaycatgggcaccatcttcagtggcagaggtctccaggcacaacccacaggacagccagcatgacttytggaaattatctctgcttgctccacctaacaaagaagagatctctcactgccatctcacaccactccagcagctgtccatcaacagacttcaaattctgattcagtttcctgttaacatccaagtgcctaccagctctgtcttctgcaaaaaccggcagctgatgtggcactctgggaaaattaggggactaacacccaatatatgctcccagctc

SEQ ID NO: 2236 - DNA, 516 bp, Chicken  19866894089081_2
agcaatgggaaggagagcaccaatggccactgagacattgttagagaaaatagcaagatatatatatatataacttttccttgaattgttttacagcattctaaaaaaagagttaccagaatttaagtctgtcctaacacgctttaacagcaacatgaacatcttttacccctatgcttctttctttcaggatcggcccattgatacacccaacaagaattccctgcagcaaaaycatgggcaccatcttcagtggcagaggtctccaggcacaacccacaggacagccagcatgacttytggaaattatctctgcttgctccacctaacaaagaagagatctctcactgccatctcacaccactccagcagctgtccatcaacagacttcaaattctgattcagtttcctgttaacatccaagtgcctaccagctctgtcttctgcaaaaaccggcagctgatgtggcactctgggaaaattaggggactaacacccaatatatgctcccagctc

SEQ ID NO: 2237 - DNA, 600 bp, Chicken  19866894089083_1
gaagagaagagtactctgctaatgtgcttctcctcttcagcccctctggtgaggtgaatgctttagctgcacagaaacacatcaaagggtaaaagcaggaaagacaccaacatgagaaatcatgagtcagctggaccgaaccaggaaaccatcagggaggtgggatgcagaagagtttgatgcccttgatttgcagatgacctgaacagaaaggcatatgaaatcctaacctttcagcatcctcatgcagtgcacagattgatgttatttgcatagcgggattatggagaagagttctcrataattaataccctgtctcccatgcacagacatggaagacactgattgtcccacttcttttggcccaagtatttggatccagttttcccctctgtgttttatgtacattgctgagctgctgtctttagcctccctagtggcagcataaaacctttactgggttttacattgcccttctacacgcagaagaactgccgtcttcggcacagatggaatgaagaactcaagatttagcctggcagttttctaatctgcttctgggaccatttagagggaaaggcagcagataaatacacggcg

SEQ ID NO: 2238 - DNA, 600 bp, Chicken  19866894089084_1
ggactggtgtagctccaaccgagcagagccaaagctccctgcagtggagcaggctgccaccaagtgctgatggagatagcagaagtttttgagacgtgcattgtctggccccaaaagccctcctgcaggaaaaaaaagccgatgctgacagtattgttatgtatgacaagctacagtagctgttctagtgctgcgtgcctgaagaagcaaagtttcttcctttcttggctgctctctcagaaatttcctgtttaatgggaaagataatcactttctagaaaagaatcagaccagaactamggatagaawatggttattggtagaaraaaaattctttggtaagtaatagattaattgcaatctcctgaggaaaacaaaggattcgaatttaaaagcagaaaggccacatcaacaatagcgtaattcctttcatgctccagctttataaggaagatacagagagcttcaacaactaaaacacagaccctgaggggcaaagctgggagaaactttggattactgaatggatatggaacacagcttgcacatccattccccatcattttcactgccttttctcagaggtggcagttcctctcc

SEQ ID NO: 2239 - DNA, 600 bp, Chicken  19866894089084_2
tagctccaaccgagcagagccaaagctccctgcagtggagcaggctgccaccaagtgctgatggagatagcagaagtttttgagacgtgcattgtctggccccaaaagccctcctgcaggaaaaaaaagccgatgctgacagtattgttatgtatgacaagctacagtagctgttctagtgctgcgtgcctgaagaagcaaagtttcttcctttcttggctgctctctcagaaatttcctgtttaatgggaaagataatcactttctagaaaagaatcagaccagaactamggatagaawatggttattggtagaaraaaaattctttggtaagtaatagattaattgcaatctcctgaggaaaacaaaggattcgaatttaaaagcagaaaggccacatcaacaatagcgtaattcctttcatgctccagctttataaggaagatacagagagcttcaacaactaaaacacagaccctgaggggcaaagctgggagaaactttggattactgaatggatatggaacacagcttgcacatccattccccatcattttcactgccttttctcagaggtggcagttcctctccacaggaacc

SEQ ID NO: 2240 - DNA, 600 bp, Chicken  19866894089084_3
agccaaagctccctgcagtggagcaggctgccaccaagtgctgatggagatagcagaagtttttgagacgtgcattgtctggccccaaaagccctcctgcaggaaaaaaaagccgatgctgacagtattgttatgtatgacaagctacagtagctgttctagtgctgcgtgcctgaagaagcaaagtttcttcctttcttggctgctctctcagaaatttcctgtttaatgggaaagataatcactttctagaaaagaatcagaccagaactamggatagaawatggttattggtagaaraaaaattctttggtaagtaatagattaattgcaatctcctgaggaaaacaaaggattcgaatttaaaagcagaaaggccacatcaacaatagcgtaattcctttcatgctccagctttataaggaagatacagagagcttcaacaactaaaacacagaccctgaggggcaaagctgggagaaactttggattactgaatggatatggaacacagcttgcacatccattccccatcattttcactgccttttctcagaggtggcagttcctctccacaggaaccgttgctggaaaccccac

SEQ ID NO: 2241 - DNA, 599 bp, Chicken  19866894089086_1
  misc_feature (1)..(89): n is any nucleotide
nnnnnnnnnnnnnnnnnnnnnnnnnnnnnnnnnnnnnnnnnnnnnnnnnnnnnnnnnnnnnnnnnnnnnnnnnnnnnnnnnnnnnnnnnaatttgaatgatctttatggaattacatttttattagtgattaaatcctttttttttttttttaacattgattatttctttccaaaagcaattaagtgatgcatgaaagaaagtaacaattaaaattcaaaaggtgtaatgaataattatgaataatcacactgtaaatcacgtttctgactcagaaatcccttactacagctttgatgamtttttacttcttgtcttgctatcctcatctaggaatgggaataatctgtatctcaaagcattacttgtacaacgtttggtctaagaaatagttaatttctattccaatctactgagaattctgtatttgctgagaatttcttatagtgaagaaaaacaaaacatttaagataaacacatcagtgatctgtgagtgagattgcaaggaatgagttgaggtaaatgtaggaaaaagcagtctcttcctctaaagacttctattaccatttctggggggatagaaaactgtttttgaggaat

SEQ ID NO: 2242 - DNA, 600 bp, Chicken  19866894089087_1
tagactttccatggtagaattttcaggatttcataatggagaagggtgctcagggctatatatatctatatatacatatagatatttttaataaaacaaataaaccatttgctttttattttaaactgcattggctctttttaatatacatttcactggcaccccacctgatcctgaattattagatgttttatttgcaatctgtgcattggaatagagttcttctatactttttattaatcctcgggtgagttgccttcactgcccttgagaaactctaatttcaactgacttaatgtmgggaaattgacacatttggaagctctcctggttccttggctttttgcatattctgcagaggtagcactgtaacaatatacttcgtatgtttggaaaagtgaagttaaatttggaacttgttccaaacatctygttccctctgctcaaacttctgttcaaagttagtatcaaatcaagttgaggtctgctgagtgtggcccatataatgcaataaacaggtttctgttggatttaattaacttgcacagtgaggaatgttttgcagggcaatgtaagtaccctgatataaatatgtaactt

SEQ ID NO: 2243 - DNA, 600 bp, Chicken  19866894089087_2
ggctctttttaatatacatttcactggcaccccacctgatcctgaattattagatgttttatttgcaatctgtgcattggaatagagttcttctatactttttattaatcctcgggtgagttgccttcactgcccttgagaaactctaatttcaactgacttaatgtggggaaattgacacatttggaagctctcctggttccttggctttttgcatattctgcagaggtagcactgtaacaatatacttcgtatgtttggaaaagtgaagttaaatttggaacttgttccaaacatctygttccctctgctcaaacttctgttcaaagttagtatcaaatcaagttgaggtctgctgagtgtggcccatataatgcaataaacaggtttctgttggatttaattaacttgcacagtgaggaatgttttgcagggcaatgtaagtaccctgatataaatatgtaacttcaaaaaatattgttagtactgcagacctgagatcgctatatttttggactcataattcatgaatttggttaacattggttcccaatgacaatgggaaagtcctgcgtggtgtttttatggagtccaagatgg

SEQ ID NO: 2244 - DNA, 600 bp, Chicken  19866894089089_1
aagtcaagataactgcaaaattagcaacacaatagcttatagagcctgcttttgctaacaaaaggcaatcgttaccacctagcatctctgtacagtcctggtaagaaaaggtaattacattttgaaatgaacaaaatagcatggtttcatgaagataacttaaattttgaagttaaggtacttgaacttgaacttctcaataaaaggatagactttctgatgacaccatgatgccaaatgatgccgaaaagtggtctgaagtagagaataggtgctgactgcattactcagtttcttatyttcacatcagtgacttcagtggtattcttaagggagaaatttgtgggcagctttgatgcagggaccctttggggcacaattgctggcaasacagagcaggccattgggtcctgaccctctatgtctgctgaactgtaccactgatcagaaaagacgtggaagaatttcttggaaagtggaatctttcctgaaatgagtctcctatccttcgatgaaaataccatcaagttttaaaatagggcgctggttgatactttgcaatttgaagagtttttgcaagagtttggggatggagatggc

SEQ ID NO: 2245 - DNA, 600 bp, Chicken  19866894089089_2
tacagtcctggtaagaaaaggtaattacattttgaaatgaacaaaatagcatggtttcatgaagataacttaaattttgaagttaaggtacttgaacttgaacttctcaataaaaggatagactttctgatgacaccatgatgccaaatgatgccgaaaagtggtctgaagtagagaataggtgctgactgcattactcagtttcttatyttcacatcagtgacttcagtggtattcttaagggagaaatttgtgggcagctttgatgcagggaccctttggggcacaattgctggcaasacagagcaggccattgggtcctgaccctctatgtctgctgaactgtaccactgatcagaaaagacgtggaagaatttcttggaaagtggaatctttcctgaaatgagtctcctatccttcgatgaaaataccatcaagttttaaaatagggcgctggttgatactttgcaatttgaagagtttttgcaagagtttggggatggagatggcctctcagccccagaggtggtcagaaagctttctgaagcaagatgatacatttgcagttaatgcaatttcttccagggaacagaagcagtt

SEQ ID NO: 2246 - DNA, 600 bp, Chicken  19866894089089_3
tggcagcacatgcccatctgttaaccctacggctaagagtcaggtctgcaaaagtaataaaaagatgcaactcctgttttctaatatgattttcaccccttcagtcaactcaaagagccttttggctgcctgaaatatctaacaatatgagaaacagctaatgaaagcaaggggagagagaaagaaaaacagcagtcaaagggagaaggaggacagggacaagaaaagaaaaagccagcatgttcttacagaactttgggtgggaggtgttgctgttcattttgttgttggaatttttayggagggaggcttttgtggaaagatctctagggaagatcaaatgttattgaggagatgaaaaatagcagtactgattattttaccagtgagtaattagaaacatattttatatattctgatatatgtttaaatgtttttggtagttttattatttttttatggtttttttgttgttgttsttgccatgtgaaagatggtagtagaggggcagtctgacaaaatggtgtctgacatagaagtgcatatgaagcaaagaaagatgtgtcactgaattcctccgtgtggaaaaaatggcaccta

SEQ ID NO: 2247 - DNA, 600 bp, Chicken  19866894089089_4
gaaagaaaaacagcagtcaaagggagaaggaggacagggacaagaaaagaaaaagccagcatgttcttacagaactttgggtgggaggtgttgctgttcattttgttgttggaatttttayggagggaggcttttgtggaaagatctctagggaagatcaaatgttattgaggagatgaaaaatagcagtactgattattttaccagtgagtaattagaaacatattttatatattctgatatatgtttaaatgtttttggtagttttattatttttttatggtttttttgttgttgttsttgccatgtgaaagatggtagtagaggggcagtctgacaaaatggtgtctgacatagaagtgcatatgaagcaaagaaagatgtgtcactgaattcctccgtgtggaaaaaatggcacctattgacattcatcaatacttgctgaacattgatgaagaccagcctgtggatgtgggcacaacaaggctgtgggtggtagcacacagctaccaccagcagtggtgacaacaacagtgggtcacctcctactggtgcaaatttttatgagcttggaatggagcctcttgttcatcactggca

SEQ ID NO: 2248 - DNA, 600 bp, Chicken  19866894089090_1
caggtaagtgattgtgaatctatttcagtggaagccattaagggcactctgacagggaaatgttaattctgataagttactatgcatataaacctgttgatgaggtctaggactaagacttgacctgcacacatctagacttctctctaagaaagagtttagaaagcaaggggttcatttctgaaccttgtgactcagctggagggcttctcccaacaagccgtgtgtcagacttgggcccctatagaaacatgggctgtgagtagtaatgctctggctctgttcatagtgtccttatgwtatgttttttaactggtagtcagttggagcagctatagctaagaaagtttacattgcaaacaggtgaaatggggctttcttgctacacaatgctagtgaagttcagatagcacttaaatagagtaagagcctattttgttgaaccatgtagttctgagccttaagaatagaaagcgataatgaatgtgagtgtatgcaaatgcaggatgtattgtgcacagggccatgtacttgtgttcatctaactgaatatactgtggcaagaatggggtagtaacgtactacagacagtacctggac

SEQ ID NO: 2249 - DNA, 600 bp, Chicken  19866894089116_1
tcagttttcttacttctcctactgttaaagcaaggggtttcaaaaagctttaaaaaagaggtaaagttgctcttaagcatgaagaatgatgtgatccatcccagccccaagcttcactggcttcctgaaatttgcttcacatctctgttattttaggtttggaattggaatatgatcaagtgaacatttggagggagagtaaagtggtacagctgaggttttaaaaagatgcgttgtggcattgctgctagcagtgtatcaatcacatctaattgtagaagagctttaaaaagtccccgyaatactggaactgggagctgaaggctgcattgctcgatgcctaatcgacaaacaagattttttatgagcttgttaattagaaagcacattagtgtttccaagcatgcaatgctggtgttgttttttgttttttctcaagtcttcttgatttgtacaactgggtgtagtgttgaccaagatgtcattaaggatgcgcrggaggaagcgcggttgagatgctgtcagctgggtgccaaagagctgcaggctccgtaatgagacatcttcagcaggcccagaggagtgaagggaaggctgtgc

SEQ ID NO: 2250 - DNA, 600 bp, Chicken  19866894089116_2
agtaaagtggtacagctgaggttttaaaaagatgcgttgtggcattgctgctagcagtgtatcaatcacatctaattgtagaagagctttaaaaagtccccgyaatactggaactgggagctgaaggctgcattgctcgatgcctaatcgacaaacaagattttttatgagcttgttaattagaaagcacattagtgtttccaagcatgcaatgctggtgttgttttttgttttttctcaagtcttcttgatttgtacaactgggtgtagtgttgaccaagatgtcattaaggatgcgcrggaggaagcgcggttgagatgctgtcagctgggtgccaaagagctgcaggctccgtaatgagacatcttcagcaggcccagaggagtgaagggaaggctgtgcttcctacagctccagcaaactgggatttattgcgtttaattgattgctgaggtagggcagaagctgttctggagatttataagactgaactgaaagaccaaggatggaactggggaggaagcggtgcggtgaggcccacacagccccgcgtttggccgcgggctgccgtctcctgtgaccaaacagaacttattctc

SEQ ID NO: 2251 - DNA, 600 bp, Chicken  19866894089116_3
aaactgggatttattgcgtttaattgattgctgaggtagggcagaagctgttctggagatttataagactgaactgaaagaccaaggatggaactggggaggaagcggtgcggtgaggcccacacagccccgcgtttggccgcgggctgccgtctcctgtgaccaaacagaacttattctcagaaaatgaattttagctttccacatcaattttattagcaacttccatcttcgggaacattgcagtctggggaaagtctgcctcacgtccaattgtagtgctcagtgtaatcatttggygttttcttgctcggcagctaatgactaaacatcccgcaaagcgccttggctgcggcctcgaaggtgaaagagacatcagggaacacgctttcttcaggagaattgactgggagaaactggaaaacagagagatccagccacctttcaagcccaaagtggtgagtggggtgatggccgcatccgcccagcacgtgtctgcactcctgggctgggattcatgctgcacatctgggacactctgaaataggagtgcaagaactgctcacttaatagaatttgaagaactgcgttggctgaaac

SEQ ID NO: 2252 - DNA, 600 bp, Chicken  19866894089123_1
cttctggtgcttgtctgccctttgggtctcccatccttacggaacagtttaacaacactgatttgaggtacagcgttgtcattacacagcatggagttgctctgtttgaatgggagtcactgcggtgtaaggactttctctggtgtgagagatttgtaatggtagatgtggctctattggaaatcagtgctcggcatcgttcctgcgattcacagcaactcctaaaattgaataacagatgtgttcctgctatcagcaagccacagttttgggacccaaggcagaggagaagttgagcgrctgccttaatatctggcaggaagtcagtggcatattttttgcttgctggagtttttaaagctctctgcaaagcagacattaaacatactgaggtctgtatttgctaatagtaaaaaagatgagcractcaaaataaatctttggattctttaggagtcatctagtcagctagattattaatatttatatgttatgggcagcttttccaggtgcgtgaaccttagctgactccaagctaggagctcttgccttccttcctgcaggactgaccacagcaggggctgtgcacttcgtgttttt

SEQ ID NO: 2253 - DNA, 589 bp, Chicken  19866894089123_2
tgtaaggactttctctggtgtgagagatttgtaatggtagatgtggctctattggaaatcagtgctcggcatcgttcctgcgattcacagcaactcctaaaattgaataacagatgtgttcctgctatcagcaagccacagttttgggacccaaggcagaggagaagttgagcgrctgccttaatatctggcaggaagtcagtggcatattttttgcttgctggagtttttaaagctctctgcaaagcagacattaaacatactgaggtctgtatttgctaatagtaaaaaagatgagcractcaaaataaatctttggattctttaggagtcatctagtcagctagattattaatatttatatgttatgggcagcttttccaggtgcgtgaaccttagctgactccaagctaggagctcttgccttccttcctgcaggactgaccacagcaggggctgtgcacttcgtgtttttatccaactttgtctcctgcagcagcatcgttaacagtagctcatcagagatgaagtgcagacttctttttcactaacatacagcccttcaaagtatccttctgcagccctttca

SEQ ID NO: 2254 - DNA, 599 bp, Chicken  19866894089124_1
  misc_feature (1)..(106): n is any nucleotide
nnnnnnnnnnnnnnnnnnnnnnnnnnnnnnnnnnnnnnnnnnnnnnnnnnnnnnnnnnnnnnnnnnnnnnnnnnnnnnnnnnnnnnnnnnnnnnnnnnnnnnnnnnaatttaggcagtgtaaccagctggtggctgagctaatggctgctcctcacaataacctcttgcttgaactccagccctttcctgcccttgatccccaggttgcctgcatctgtagcaggttagatggaacccaatcttcttacaaggaaacaatgcatatcactgcaaaagggagcccatggcccatgcaaacracactccacgaggcagaatttttgagtaggtttcctctttgcaatcctggctacacataagccttctaattttccacaaaccctttaaatcacctcccttcaaagcgtgtgagaaagtctgaaagtacagaaaagtttctccatccaactcacttggtggaaacccctaaagcagaaagaaggaaaccagcattcctgccaagagattgggaattttccaattcatgcctttgttgctcccacccatctgcacaagtacaatagcggggccacgtttggctctgcggcaaacacaaatg

SEQ ID NO: 2255 - DNA, 599 bp, Chicken  19866894089126_1
  misc_feature (1)..(165): n is any nucleotide
nnnnnnnnnnnnnnnnnnnnnnnnnnnnnnnnnnnnnnnnnnnnnnnnnnnnnnnnnnnnnnnnnnnnnnnnnnnnnnnnnnnnnnnnnnnnnnnnnnnnnnnnnnnnnnnnnnnnnnnnnnnnnnnnnnnnnnnnnnnnnnnnnnnnnnnnnnnnnnnnnnnnntcaagaggaaaagtattaaattctttattgttatacaacgaagtagctgagcttggaagccagggctcatagatagaggcagatctcctagaccatgctgtaatgctgactgatcctgtcctttcaagtgggtcrcctatcccaagtaatctttagtattcatgctatttccctttgcagcttayctttccatgactggtgaaagagtatgaggtggaaagcgttgtttccttttggggatacttaactgctacaaacagrgaaataccatgagccaaatccttatagtgagtgaaagagacaggaagcagtgctgagttaytctgtcacaagctgttatgcttttacggtacttagcacctccagaggcagtggactaaaagatgttggccagtagggattgctaacttttaaaatgtgtagtgagagctatg

SEQ ID NO: 2256 - DNA, 599 bp, Chicken  19866894089126_2
  misc_feature (1)..(115): n is any nucleotide
nnnnnnnnnnnnnnnnnnnnnnnnnnnnnnnnnnnnnnnnnnnnnnnnnnnnnnnnnnnnnnnnnnnnnnnnnnnnnnnnnnnnnnnnnnnnnnnnnnnnnnnnnnnnnnnnnnntcaagaggaaaagtattaaattctttattgttatacaacgaagtagctgagcttggaagccagggctcatagatagaggcagatctcctagaccatgctgtaatgctgactgatcctgtcctttcaagtgggtcrcctatcccaagtaatctttagtattcatgctatttccctttgcagcttayctttccatgactggtgaaagagtatgaggtggaaagcgttgtttccttttggggatacttaactgctacaaacagrgaaataccatgagccaaatccttatagtgagtgaaagagacaggaagcagtgctgagttaytctgtcacaagctgttatgcttttacggtacttagcacctccagaggcagtggactaaaagatgttggccagtagggattgctaacttttaaaatgtgtagtgagagctatgtgcaagcaaaactcacctttcagcactgtctaatgcagaagaacagactg

SEQ ID NO: 2257 - DNA, 599 bp, Chicken  19866894089126_3
  misc_feature (1)..(39): n is any nucleotide
nnnnnnnnnnnnnnnnnnnnnnnnnnnnnnnnnnnnnnntcaagaggaaaagtattaaattctttattgttatacaacgaagtagctgagcttggaagccagggctcatagatagaggcagatctcctagaccatgctgtaatgctgactgatcctgtcctttcaagtgggtcrcctatcccaagtaatctttagtattcatgctatttccctttgcagcttayctttccatgactggtgaaagagtatgaggtggaaagcgttgtttccttttggggatacttaactgctacaaacagrgaaataccatgagccaaatccttatagtgagtgaaagagacaggaagcagtgctgagttaytctgtcacaagctgttatgcttttacggtacttagcacctccagaggcagtggactaaaagatgttggccagtagggattgctaacttttaaaatgtgtagtgagagctatgtgcaagcaaaactcacctttcagcactgtctaatgcagaagaacagactgttccaagcattaataattggcaacctcttgtgaaatggtaccttcaaagcaaagcatgtttccaggtcatttcatt

SEQ ID NO: 2258 - DNA, 600 bp, Chicken  19866894089126_4
ctttattgttatacaacgaagtagctgagcttggaagccagggctcatagatagaggcagatctcctagaccatgctgtaatgctgactgatcctgtcctttcaagtgggtcrcctatcccaagtaatctttagtattcatgctatttccctttgcagcttayctttccatgactggtgaaagagtatgaggtggaaagcgttgtttccttttggggatacttaactgctacaaacagrgaaataccatgagccaaatccttatagtgagtgaaagagacaggaagcagtgctgagttaytctgtcacaagctgttatgcttttacggtacttagcacctccagaggcagtggactaaaagatgttggccagtagggattgctaacttttaaaatgtgtagtgagagctatgtgcaagcaaaactcacctttcagcactgtctaatgcagaagaacagactgttccaagcattaataattggcaacctcttgtgaaatggtaccttcaaagcaaagcatgtttccaggtcatttcatttcctaacaaaaacttcctgtttatctgttctgtaatgaaacttcaagactggtaggaaagca

SEQ ID NO: 2259 - DNA, 600 bp, Chicken  19866894089127_1
cttaaaaaaagtctgataactcaaagtcagagtaaattcattaacattctgttttatttctgccttatcctctccctttaaggacttgatgattgctaactgatgacctgaattcagcaggtactttatccacagaactggatcagaatgcttagaagggaatattatagttgattgcctaccttctgctacatctgctacttatgatgttgtcatgatcatttaaacaaagaactttgctacctccattactgttcctctttcctcttctagaaaatagataaatgaagggaaaaataygccttttgaacccagagaaaaagttcttcaaatctgtttctcaacctcaattatgctacattattttttttctgtgtaaaatttatttttaagtgaatagaactttttacatgcttcattttacagaaggaatttcatggggaaaactatgatgattatattctatctagtacatttatgtcaacacaacatggtatttttggaattgatgaactacaaaaaatccactttatttctcaggaatcttcatgttagtggaaggattcatagacagcgtttcttgtacactctagcatctca

SEQ ID NO: 2260 - DNA, 600 bp, Chicken  19866894089133_1
caaagaagggacagcatccaactctgggcaggacatggataatagagccaaagggatggtctctgtcatgttctccatcgttcagaagttatagttattattttctctgagacatctgaatttacttttatctgaatggtatccctcaaagtcagtattgcaatttcccctttggtgaatctgagcatgctgtttgttgcagcgtttcttactgataaggtttaaaatatgagataattttaaagtaataccgaagcattttcacctacagaaataggtaaacaaattatttgcaagaasaagaatcaccaagaagtcaggttctgacctgatagcctttttgcagagattctcttctatttctgtgcactgatcaccagccagtgctcttgagtgcgtcttggtcattaggaactgttcttaacttttcygtgctgtaaagaggcaacaggccagttgctgcagactaaaggtctcattgattgcaagagctgtgaaacgcaatacttggaaatctcctgatgctgattaatgtcggggcttgagaaggggcacgtatcagaaatgcacctgccctatctgccgttggcgccttggtgt

SEQ ID NO: 2261 - DNA, 600 bp, Chicken  19866894089133_2
ctgaatggtatccctcaaagtcagtattgcaatttcccctttggtgaatctgagcatgctgtttgttgcagcgtttcttactgataaggtttaaaatatgagataattttaaagtaataccgaagcattttcacctacagaaataggtaaacaaattatttgcaagaasaagaatcaccaagaagtcaggttctgacctgatagcctttttgcagagattctcttctatttctgtgcactgatcaccagccagtgctcttgagtgcgtcttggtcattaggaactgttcttaacttttcygtgctgtaaagaggcaacaggccagttgctgcagactaaaggtctcattgattgcaagagctgtgaaacgcaatacttggaaatctcctgatgctgattaatgtcggggcttgagaaggggcacgtatcagaaatgcacctgccctatctgccgttggcgccttggtgtgtgacatccaggcagatcagattaatctctcttgtcctttcaattacgtgtagcattaattggagatgaaaagtctgtttctagaaagcacagcacatgggaacgttaattgaaagcagttgacctttatg

SEQ ID NO: 2262 - DNA, 600 bp, Chicken  19866894089133_3
ttgattgcaagagctgtgaaacgcaatacttggaaatctcctgatgctgattaatgtcggggcttgagaaggggcacgtatcagaaatgcacctgccctatctgccgttggcgccttggtgtgtgacatccaggcagatcagattaatctctcttgtcctttcaattacgtgtagcattaattggagatgaaaagtctgtttctagaaagcacagcacatgggaacgttaattgaaagcagttgacctttatgtaaagaggatgataaaatttcagtgattttagataaaccagcattcytaactgttgtaacaccaagaamagcacgttaatcaagtcgcattttccagaaagcagtgcatttttcttctccaagtgaaacaartgaacctaattaacaacaatgcttttgattattttttctgtaccgttaattagtcgttagatgttctacaggtaattataccacttagcgtcttaaaacacttgcaaagtctaggcagaaaaagagaattggcaagcacattagatgtgggtcagtcattccattgcttgttttcttttagatgaatattaccttgcagttgagtttagttctat

SEQ ID NO: 2263 - DNA, 600 bp, Chicken  19866894089133_4
gcaatacttggaaatctcctgatgctgattaatgtcggggcttgagaaggggcacgtatcagaaatgcacctgccctatctgccgttggcgccttggtgtgtgacatccaggcagatcagattaatctctcttgtcctttcaattacgtgtagcattaattggagatgaaaagtctgtttctagaaagcacagcacatgggaacgttaattgaaagcagttgacctttatgtaaagaggatgataaaatttcagtgattttagataaaccagcattcytaactgttgtaacaccaagaamagcacgttaatcaagtcgcattttccagaaagcagtgcatttttcttctccaagtgaaacaartgaacctaattaacaacaatgcttttgattattttttctgtaccgttaattagtcgttagatgttctacaggtaattataccacttagcgtcttaaaacacttgcaaagtctaggcagaaaaagagaattggcaagcacattagatgtgggtcagtcattccattgcttgttttcttttagatgaatattaccttgcagttgagtttagttctatgatttttctgtgtgtgcaggca

SEQ ID NO: 2264 - DNA, 600 bp, Chicken  19866894089133_5
aatgcacctgccctatctgccgttggcgccttggtgtgtgacatccaggcagatcagattaatctctcttgtcctttcaattacgtgtagcattaattggagatgaaaagtctgtttctagaaagcacagcacatgggaacgttaattgaaagcagttgacctttatgtaaagaggatgataaaatttcagtgattttagataaaccagcattcytaactgttgtaacaccaagaamagcacgttaatcaagtcgcattttccagaaagcagtgcatttttcttctccaagtgaaacaartgaacctaattaacaacaatgcttttgattattttttctgtaccgttaattagtcgttagatgttctacaggtaattataccacttagcgtcttaaaacacttgcaaagtctaggcagaaaaagagaattggcaagcacattagatgtgggtcagtcattccattgcttgttttcttttagatgaatattaccttgcagttgagtttagttctatgatttttctgtgtgtgcaggcatataaagaaaaatatgggtaattatggcctaagagaatcactggatggttgggtgagaggcaa

SEQ ID NO: 2265 - DNA, 599 bp, Chicken  19866894089140_1
  misc_feature (1)..(130): n is any nucleotide
nnnnnnnnnnnnnnnnnnnnnnnnnnnnnnnnnnnnnnnnnnnnnnnnnnnnnnnnnnnnnnnnnnnnnnnnnnnnnnnnnnnnnnnnnnnnnnnnnnnnnnnnnnnnnnnnnnnnnnnnnnnnnnnnnncaaaccaaaattttctagtgggaagaccgtgtcaggaaagaatgaaaagtcctgatcagtgcagcttcattactattcctattcaattaaaatattattccctttgtttactgcccacttcagtatttcttgcatagtcaatactccctccctcccccccaataaataartaaattccrttttaacattttttcctggaggtgcatggcagcacttctctcagtgcctatcagtattactctttttgagaaattgcatttaattatgtgaaatttcttcagaattcaagagaatttggtatactgcaggctagaaaagaaagcaaaatatctataaaagttttttataaatggcatttgtaaaaatgatatagcgtgttattttatacggtgttgcagttttaaaacctttatattaatttgtcatatactgaattagcaatttaaataaaagggcaacagataattgt

SEQ ID NO: 2266 - DNA, 599 bp, Chicken  19866894089140_2
  misc_feature (1)..(121): n is any nucleotide
nnnnnnnnnnnnnnnnnnnnnnnnnnnnnnnnnnnnnnnnnnnnnnnnnnnnnnnnnnnnnnnnnnnnnnnnnnnnnnnnnnnnnnnnnnnnnnnnnnnnnnnnnnnnnnnnnnnnnnnnncaaaccaaaattttctagtgggaagaccgtgtcaggaaagaatgaaaagtcctgatcagtgcagcttcattactattcctattcaattaaaatattattccctttgtttactgcccacttcagtatttcttgcatagtcaatactccctccctcccccccaataaataartaaattccrttttaacattttttcctggaggtgcatggcagcacttctctcagtgcctatcagtattactctttttgagaaattgcatttaattatgtgaaatttcttcagaattcaagagaatttggtatactgcaggctagaaaagaaagcaaaatatctataaaagttttttataaatggcatttgtaaaaatgatatagcgtgttattttatacggtgttgcagttttaaaacctttatattaatttgtcatatactgaattagcaatttaaataaaagggcaacagataattgtattccttta

SEQ ID NO: 2267 - DNA, 600 bp, Chicken  19866894089141_1
tggccatatgctagaggggaaatgcaacaattttgtgctgtagaacaaaaaacccacacaccaaacaggctgcagactgcagtcttcatctggcatggcatcaatgcttacagcatgcactttaggactgcaatcaatgggaaaacttctgatcgatgctcagaagtttggaaaaacctgatagaaaagttcaggactttctgtttcgtgaggaatttttgtctgcggctgaaacttctgattttcaaaagctgagaagaaatgaagctttcttcttgattttaatgacgctgatttctktgggaacctcaatgagaagagattggtgttgagcatggaaaataacatgtgggttttgcaagtttctgtgaaaggctgtgggaggagaggtgggacggggagaggcagtctgcaggactggaaccrtatgattcacagactggcgcctgggtgagcgtgctggagagttagcatggggggtcagagcaagagctgtgaaaactggaaaccacagtgatagaggacttacagggggcaggagaaggaaaagttgtctgcctgtgtctatgtttgaagmagcttcagtaattgaactccagc

SEQ ID NO: 2268 - DNA, 600 bp, Chicken  19866894089141_2
actgcaatcaatgggaaaacttctgatcgatgctcagaagtttggaaaaacctgatagaaaagttcaggactttctgtttcgtgaggaatttttgtctgcggctgaaacttctgattttcaaaagctgagaagaaatgaagctttcttcttgattttaatgacgctgatttctktgggaacctcaatgagaagagattggtgttgagcatggaaaataacatgtgggttttgcaagtttctgtgaaaggctgtgggaggagaggtgggacggggagaggcagtctgcaggactggaaccrtatgattcacagactggcgcctgggtgagcgtgctggagagttagcatggggggtcagagcaagagctgtgaaaactggaaaccacagtgatagaggacttacagggggcaggagaaggaaaagttgtctgcctgtgtctatgtttgaagmagcttcagtaattgaactccagcattcacctctatagctcttttcggtctggaagtattgagacagaataaaaggagcagatttcgtatgcaccaacttcaatgtgcaagatattaagcctgttggatatgtatttttagaaaactctt

SEQ ID NO: 2269 - DNA, 600 bp, Chicken  19866894089141_3
gattttaatgacgctgatttctktgggaacctcaatgagaagagattggtgttgagcatggaaaataacatgtgggttttgcaagtttctgtgaaaggctgtgggaggagaggtgggacggggagaggcagtctgcaggactggaaccrtatgattcacagactggcgcctgggtgagcgtgctggagagttagcatggggggtcagagcaagagctgtgaaaactggaaaccacagtgatagaggacttacagggggcaggagaaggaaaagttgtctgcctgtgtctatgtttgaagmagcttcagtaattgaactccagcattcacctctatagctcttttcggtctggaagtattgagacagaataaaaggagcagatttcgtatgcaccaacttcaatgtgcaagatattaagcctgttggatatgtatttttagaaaactcttgaataaggtgttggaacatattcacagatacgatttcttgctgcttggaacttggtggtggtggcagggataggatccaggacgttgcttggaaagcatgagcttggacaggtgtcaagtggatgggactgagctccttctgtggtgtgca

SEQ ID NO: 2270 - DNA, 600 bp, Chicken  19866894089142_1
ggtggaaagggagaaaagtcagtcagtgctgtatcacaggagaggagtgatcagaactaattttactgtgttcattcaggagtagattatttaggtaggagctcccataacatataatctaagtagagagctggaaaacaagtatgacagttgtgaattccgttgtgtgttatagcacctttgtctccttgccctgacttgagacttaacacactgcaaaaccaatcttgtcattaatgctagaagcaaatgtctgcaaaaaaacaggattgctacctgcaagacaaatgcatgtaacamatgtcttttggagtgtgagatagaaaggaaacaagctgccctacattttgttcacactttccaggggacgtgttaagcactgacacctctgtaaagtgagaggtatgctgtyccctgtatctgcaacccattgcccatccgcaagcattcctaatgcactcctgctgctgtttcttgaggacttttttttacacgttctttcttggcagtgggcagtcttatagtaactcactcagatgctccaagggaaacacgagctttgcacatggtaataagtgcactcatacactaccraaaaat

SEQ ID NO: 2271 - DNA, 600 bp, Chicken  19866894089142_2
tataatctaagtagagagctggaaaacaagtatgacagttgtgaattccgttgtgtgttatagcacctttgtctccttgccctgacttgagacttaacacactgcaaaaccaatcttgtcattaatgctagaagcaaatgtctgcaaaaaaacaggattgctacctgcaagacaaatgcatgtaacamatgtcttttggagtgtgagatagaaaggaaacaagctgccctacattttgttcacactttccaggggacgtgttaagcactgacacctctgtaaagtgagaggtatgctgtyccctgtatctgcaacccattgcccatccgcaagcattcctaatgcactcctgctgctgtttcttgaggacttttttttacacgttctttcttggcagtgggcagtcttatagtaactcactcagatgctccaagggaaacacgagctttgcacatggtaataagtgcactcatacactaccraaaaatttatggagactgtctttcatacaggaaaaacaagtggcctggccccagctagtgacatcccttccttgtaatttcatgttgaaagctagacccttactgccaagtgctcttc

SEQ ID NO: 2272 - DNA, 600 bp, Chicken  19866894089142_3
taacamatgtcttttggagtgtgagatagaaaggaaacaagctgccctacattttgttcacactttccaggggacgtgttaagcactgacacctctgtaaagtgagaggtatgctgtyccctgtatctgcaacccattgcccatccgcaagcattcctaatgcactcctgctgctgtttcttgaggacttttttttacacgttctttcttggcagtgggcagtcttatagtaactcactcagatgctccaagggaaacacgagctttgcacatggtaataagtgcactcatacactaccraaaaatttatggagactgtctttcatacaggaaaaacaagtggcctggccccagctagtgacatcccttccttgtaatttcatgttgaaagctagacccttactgccaagtgctcttctcatcatcattccagactggcagtgttcatgagacttggcaggagatagcatttgataagaatccttctctgggcgcttcagagagggcactgtcattcattttactcccctgccagttcacaagcatgaagccagaagggcgagtgcaggaggaactgcattcctttcaggctcatgtaac

SEQ ID NO: 2273 - DNA, 600 bp, Chicken  19866894089148_1
acggcatctcgaaagaggtatctcctcggctcgatccttctgttaccatcatgtgcattacattcagtgcaacacacgcacagctgtttgcttcatcccacccacagcaaaggaacagctcgcgtatggccaacgagagctgcacgccacaaaaatcacatacagttacactgaggccgacatcttctgcatgaggctgcttaaagaagaacgcaagaactcctgatacaagagaaacatatccctttagttttcaactttaaaggatcgtgatcagtggaagaaaaggacggatgcctyactctcctcccctctgtctgcaaaacctgttccctcaaggaacgacagtaagactgacacacatyccttcctcaaaagccgctaaaatagctttgccatgggcttcacatggaatttgcaacactgagygcgtctttctggactcatccttctggcacaccgacagtcagggctcctgccacccatcccctccgcgctcttttcgcctaacgctatttactgctgctaccttttcataattaagagcccgtatcaaagcagttgtaacaccattcaaacagagcttttctaaggaatcaa

SEQ ID NO: 2274 - DNA, 600 bp, Chicken  19866894089148_2
agtgcaacacacgcacagctgtttgcttcatcccacccacagcaaaggaacagctcgcgtatggccaacgagagctgcacgccacaaaaatcacatacagttacactgaggccgacatcttctgcatgaggctgcttaaagaagaacgcaagaactcctgatacaagagaaacatatccctttagttttcaactttaaaggatcgtgatcagtggaagaaaaggacggatgcctyactctcctcccctctgtctgcaaaacctgttccctcaaggaacgacagtaagactgacacacatyccttcctcaaaagccgctaaaatagctttgccatgggcttcacatggaatttgcaacactgagygcgtctttctggactcatccttctggcacaccgacagtcagggctcctgccacccatcccctccgcgctcttttcgcctaacgctatttactgctgctaccttttcataattaagagcccgtatcaaagcagttgtaacaccattcaaacagagcttttctaaggaatcaaatctaaatgaaaaggcaaagtatataaatgccccatcttccactgtkcataactgatttgctctg

SEQ ID NO: 2275 - DNA, 600 bp, Chicken  19866894089148_3
ccaacgagagctgcacgccacaaaaatcacatacagttacactgaggccgacatcttctgcatgaggctgcttaaagaagaacgcaagaactcctgatacaagagaaacatatccctttagttttcaactttaaaggatcgtgatcagtggaagaaaaggacggatgcctyactctcctcccctctgtctgcaaaacctgttccctcaaggaacgacagtaagactgacacacatyccttcctcaaaagccgctaaaatagctttgccatgggcttcacatggaatttgcaacactgagygcgtctttctggactcatccttctggcacaccgacagtcagggctcctgccacccatcccctccgcgctcttttcgcctaacgctatttactgctgctaccttttcataattaagagcccgtatcaaagcagttgtaacaccattcaaacagagcttttctaaggaatcaaatctaaatgaaaaggcaaagtatataaatgccccatcttccactgtkcataactgatttgctctgcatttcatccgcagggagaggtacagatwccaaaaracagggaggaaggaccattcacaacagc

SEQ ID NO: 2276 - DNA, 529 bp, Chicken  19866894089148_4
gtaagactgacacacatyccttcctcaaaagccgctaaaatagctttgccatgggcttcacatggaatttgcaacactgagygcgtctttctggactcatccttctggcacaccgacagtcagggctcctgccacccatcccctccgcgctcttttcgcctaacgctatttactgctgctaccttttcataattaagagcccgtatcaaagcagttgtaacaccattcaaacagagcttttctaaggaatcaaatctaaatgaaaaggcaaagtatataaatgccccatcttccactgtkcataactgatttgctctgcatttcatccgcagggagaggtacagatwccaaaaracagggaggaaggaccattcacaacagcagcatcacacagccagcaaggagagctgcacgtgtcttttacatcctaagagcagcctgctgaccacgctctggccattgcagcaggattggtttgtcacaattcgcaggagtgagcgtttaacctaccgactcctgcatcacagca

SEQ ID NO: 2277 - DNA, 482 bp, Chicken  19866894089148_5
gccatgggcttcacatggaatttgcaacactgagygcgtctttctggactcatccttctggcacaccgacagtcagggctcctgccacccatcccctccgcgctcttttcgcctaacgctatttactgctgctaccttttcataattaagagcccgtatcaaagcagttgtaacaccattcaaacagagcttttctaaggaatcaaatctaaatgaaaaggcaaagtatataaatgccccatcttccactgtkcataactgatttgctctgcatttcatccgcagggagaggtacagatwccaaaaracagggaggaaggaccattcacaacagcagcatcacacagccagcaaggagagctgcacgtgtcttttacatcctaagagcagcctgctgaccacgctctggccattgcagcaggattggtttgtcacaattcgcaggagtgagcgtttaacctaccgactcctgcatcacagca

SEQ ID NO: 2278 - DNA, 475 bp, Chicken  19866894089148_6
gcttcacatggaatttgcaacactgagygcgtctttctggactcatccttctggcacaccgacagtcagggctcctgccacccatcccctccgcgctcttttcgcctaacgctatttactgctgctaccttttcataattaagagcccgtatcaaagcagttgtaacaccattcaaacagagcttttctaaggaatcaaatctaaatgaaaaggcaaagtatataaatgccccatcttccactgtkcataactgatttgctctgcatttcatccgcagggagaggtacagatwccaaaaracagggaggaaggaccattcacaacagcagcatcacacagccagcaaggagagctgcacgtgtcttttacatcctaagagcagcctgctgaccacgctctggccattgcagcaggattggtttgtcacaattcgcaggagtgagcgtttaacctaccgactcctgcatcacagca

SEQ ID NO: 2279 - DNA, 600 bp, Chicken  19866894089150_1
agctgaatcttgtggttatgtctcattttagtcaaaatagaagaataagggtaggagacagattatgctaaagcagatactggtaagtatcaaagtgagattaaatgtaaacattagcaaactgtggaagcataaaaaagggaatttaacataatcctttttgaaattataaattaaagatgtttggtcccttctcttctccctctctccccctttcagccactctcttcccttcttatttttattttgacagtaagcctaatggaaaataccaacagctgagctaagttgatgaaacaktggacagcaaagggaaaagatgaaggcagctttgcagattttgcaggttactgcctctgtgacaataacctctttcattccctccaccccctccctctgggggatgttcatctcctactgcctctagttggaaagcagaaacttagcagataaatgggttcaagcatgtgtcccagggagataatagctctgacgttattctaattttctcctagtaaactagggcttggtcctgaaacactctcaggcaaggggcccttacacaaaacaggggtcccattttagctgcagaatattcac

SEQ ID NO: 2280 - DNA, 600 bp, Chicken  19866894089152_1
ctggggccaccaaccatcccagccctggtgcacaggccacactgggcagccctcagtagttgaggcaagggcagcctgtttctcaaataacaaaaggaaaagtgccacgcatagatggcagcccccaagaggcagtgtggcccaggaccctcagctctagcaatccaggtcagctcctcaacgcattctcccttctataaccataacctgacagactggaggattcagtaggcactctgctgaggaagggtgaaaagaagtgccagcctgtgtctatcctcaactccacggagaccagcrttcccgtctcccctaaggatgcattcataatgtgtctagtataagtacttacctacatgtattattctgatgactaaaagtgtgtgtaaaacaaacaaaccaagccaaacattttaaaaaaatcccaaagatttactgaatttacatataagataaataatatcttaagatgtagttttgtaattcatctactaaaataacttcagtctgctgcatgtgtggtatgctttttcattgttgctctccagttttgcaatcccgagatccaaactgaacagccctttttggcaaaatgcttgc

SEQ ID NO: 2281 - DNA, 600 bp, Chicken  19866894089153_1
taaaaatcatatctagaacctctccacataggccatggtgggaagtttgctaaaagcctggcagccctaagctgtatctaattaaatcctagacagtaagcctgctgccagtgatttcaaaattacattctattcacctcttagctgtctgctctgtgcttctcattgacctttcctaatgagataggatctgcaaatattttgatgaatgtgcagaaaattcttctaatgaaaataatgttgcttgagatagttaaaaacttggaagtttcaaccaaaacacagactaattttgaaggytttatttacctgaaagctwactgtacagaccacagaaataccgtacagatactgtacaaacagcaggtcagggctttgacagttggcacctatttgcatcagctgaggtcctgtctcaccacgttagactccaaatrcaagctcatttttatgtgtgtttaaaagataccctttagaagaacctctccccaagatctcacgcaacagagcatcagcaacacctggcaggtgaggagctgagacatgaagagacgtgcccaagggcacagtggaatgccatggaggagttcacaactgaac

SEQ ID NO: 2282 - DNA, 600 bp, Chicken  19866894089153_2
ctctccacataggccatggtgggaagtttgctaaaagcctggcagccctaagctgtatctaattaaatcctagacagtaagcctgctgccagtgatttcaaaattacattctattcacctcttagctgtctgctctgtgcttctcattgacctttcctaatgagataggatctgcaaatattttgatgaatgtgcagaaaattcttctaatgaaaataatgttgcttgagatagttaaaaacttggaagtttcaaccaaaacacagactaattttgaaggytttatttacctgaaagctwactgtacagaccacagaaataccgtacagatactgtacaaacagcaggtcagggctttgacagttggcacctatttgcatcagctgaggtcctgtctcaccacgttagactccaaatrcaagctcatttttatgtgtgtttaaaagataccctttagaagaacctctccccaagatctcacgcaacagagcatcagcaacacctggcaggtgaggagctgagacatgaagagacgtgcccaagggcacagtggaatgccatggaggagttcacaactgaacatccagcacaagaccaccc

SEQ ID NO: 2283 - DNA, 600 bp, Chicken  19866894089153_3
ctcttagctgtctgctctgtgcttctcattgacctttcctaatgagataggatctgcaaatattttgatgaatgtgcagaaaattcttctaatgaaaataatgttgcttgagatagttaaaaacttggaagtttcaaccaaaacacagactaattttgaaggytttatttacctgaaagctwactgtacagaccacagaaataccgtacagatactgtacaaacagcaggtcagggctttgacagttggcacctatttgcatcagctgaggtcctgtctcaccacgttagactccaaatrcaagctcatttttatgtgtgtttaaaagataccctttagaagaacctctccccaagatctcacgcaacagagcatcagcaacacctggcaggtgaggagctgagacatgaagagacgtgcccaagggcacagtggaatgccatggaggagttcacaactgaacatccagcacaagaccaccctgctagccyttaaccagtgctaatgccagctttggcctctcaagctgtcagtctcacaacttccacgtgcactaaaccttcttttttgctgttcctccagtcatcatcactgagcaaa

SEQ ID NO: 2284 - DNA, 600 bp, Chicken  19866894089153_4
accacagaaataccgtacagatactgtacaaacagcaggtcagggctttgacagttggcacctatttgcatcagctgaggtcctgtctcaccacgttagactccaaatrcaagctcatttttatgtgtgtttaaaagataccctttagaagaacctctccccaagatctcacgcaacagagcatcagcaacacctggcaggtgaggagctgagacatgaagagacgtgcccaagggcacagtggaatgccatggaggagttcacaactgaacatccagcacaagaccaccctgctagccyttaaccagtgctaatgccagctttggcctctcaagctgtcagtctcacaacttccacgtgcactaaaccttcttttttgctgttcctccagtcatcatcactgagcaaaaactaaccagtctgcaaagcagctctctggaaacacattcctgtgttgctaaagagtggggcggaagccaatgcctattctaattaatttcattcacaaaacttggatttatttgacacaattttttggcacgctgtcaaatacaacacaaaattacattagtgtcataagaggaaaggattagtccaaag

SEQ ID NO: 2285 - DNA, 600 bp, Chicken  19866894089153_5
tcccctctctctaggaataacccacgttctcttggtcattgagggaaatcactgctcagtgaggatctgagccaaagccttttggagtctgtgggaatctttccaccaatttccatgggctcaaatcagccctgagcctcagatgtcagtcgtactgacatcttcctcccacgcttcagtacttccatgtggtcatttatcaggcagagtgaaagacttttttcccttaaaaacaaaaacaaaaaactgagagcaattggctgctgaaagaaaaacgattttgtagctatggcatgggcrtaagtattctaagatgtatgagtttaattcctgatcttgccagagaggtctttaaatgagctgataagaaccagatttgtctgagaccacaacactggccacgctgcagcagaacagaggcctggatatcccaacatcttctccctcgcagtgcctgaaagcagacacatcacagagacagaagcagaacaaatatacccacaagtccaatgtcctctctgccccaggagtttgcagcactgtggctgcgtaagcaagaggcagcccctgacacaggactggtgttcccaggaggtgttc

SEQ ID NO: 2286 - DNA, 600 bp, Chicken  19866894089155_1
cattcattttaacatcagtgaggaacagtaggcgtctgtaaactttgtttacgtggacgccaactcgatagaatacttcatctgctagaattgttgaggtctacagcaaaactctccctataacatgcatttgcaagtctatttcagagtacaagaggagttttctgtaggtagtgtattacctggaaataatgagatgacagctgatgtttgctggggtcaaaatattagtaaaagcatgtaaaattctagcaaaatgctaggtgttgcagaaaggagagatggtaaacaaaatgaaasgaaaaaagtaataacagtgaaaaagttatgtggggcacaaacagtcctcacattttctgacagtttagctaaatccattgtaatgagaaaagaaagattctgtacaaaatctattctgtttgcaatacttgtccttggatgttgtgaagaaccatttcacatctcagagatgacatccttatatttagggtctaatccaaaaaccatttaagttagtaggctgaaaatgactcaactcagctaggaatgatagcatctgccataagatttgtttcacatctctacagtttcaacagcatt

SEQ ID NO: 2287 - DNA, 600 bp, Chicken  19866894089158_1
cgctgctgcgggtgctctccgtagggccccggttgcctgcactaggcagggccagggaaacggatgcgatactgcggggccgggcactgagatgctgcaagcagccccaggcacgacccagcacagcacagccaaaaaccttgctcgacctccaagcctcgcagagctgctcagcagggtccaggaacgagccagactgagccaggctcggcctgcaacccagtatgagcagtgagggctacgcagtcacagtgcgttgcctggtgatgtcacacagcctgttgctcaggggcatcaccmcgggctgtccgcccacgcagcacccacccatgtttcagatattccctccttttcccgctcctaatttgccgtaccttcccctttgttcctgttcgccgtttaagctctgcagtaacgcacaggcctttctttttctctgattaaaccaactctagttgctcatgtatttcctctgtttcttcagtagcaaactgttgatttttcactaatgtgtaaggcagaaattgggtttggcgttcgggtatgagtgggattcccaaattcctttgggatggctgaaggtgaaataacactcacggt

SEQ ID NO: 2288 - DNA, 600 bp, Chicken  19866894089167_1
ggaggcccggaggctgctgggcctggaagaccccagcgctgcccaggagcaggaggacgggcctgcggccccatccggtcccactgccaccccgcacgggaccatcgcccccagcgccgcgccctcctgcagctccatgtgttccgacacagaggagctccccggcacttccaccggggccctcagcgggggccctggacagccgggtcccgaggcagccggtccctctggccagggccgcagccgcggcccctccactcgcagccggggcacaaagcgctcggctggggggccccggcrccccacaaagaggagggccggcagcgcccaacgtgctcctccgccctgcaagaggcggcccccccagcgccgctagcggggctcccacttcttgccaataaaagataaaaacgtacatgcacgtgttgttcctagagacggctcacccttcacacacacaccctacacatgctgtgccacatgagaaccagttctctcggcacctggtgtggacgtgccaccattcaacccttcccctgggccatgcgtgcagtgtgagctgcagagccactgcgagcgggatcctctgagcggtgggtg

SEQ ID NO: 2289 - DNA, 600 bp, Chicken  19866894089168_1
taaatgataaaaacttagatgcatgtgttgttccttgtacccttctttggatacagttcacccttcacgcactgtgccacagaagagccagttctctgagcacccagtgtccctgaaccaggacaagatacggctcagagctgcgcattcctcgaggagatgctccagcactgacagaaaacaaatcaatacaaaacaaaacatgacaaaataaaacagttatttacctactggtattctctgatctcccctcctttagacatccagacaaagaatgaacactgcagctgctgcagaagyttagagagaataataatgacagtaaggataaccaacaagcaataatcaaccagactttactgcaaggagacacagagcaagaaattggaataatttcagctacattctccatccagtgattcaaagtatgaatcattcactgacgtcttcttggcccacgtactagctcacctatgataagtacatgtagctcacaaagaagtcactgagcttagtcttctagcattactaaagccttccatctggagtttatgggattaatattggagtccttttatgataatgctccaaatgtgtgtg

SEQ ID NO: 2290 - DNA, 600 bp, Chicken  19866894089168_2
caaaatagcccagaattttaaacgcatcatatccagaggtttctctcactttcgattgtacactgaatggctttttataatttctgttacataaggcagttcttgctggccagctctacccttttgcccctcagttaagctcactcttggtccttctgtgcagctgtgcaacgtgcagcttgctgctaatttacacaacacccatcctcccttgacggcccaggaatacagcagtgaagtgccttaatggcagcatcaaatggcctcatgccatgaattttttatttctaaaattgtccytaggatttccatgttttgagaacaaatgtaaaacactggggaaaaaaatggatgaaaacctctttcctaagaataaactatcatccaatycatagtgcatcacaccaatcaattactgacactttctctggcaactaacatggtttcattaccagaatgtccaaatatctgctagtcatcaaggatttttggctgcatagcaacctagagatatagtagtgtgaaatataaagacttgagccattgatggttgatgaaaacgttcataggcaatgcaagctcttagcacgtgtgctgaga

SEQ ID NO: 2291 - DNA, 600 bp, Chicken  19866894089168_3
ataaggcagttcttgctggccagctctacccttttgcccctcagttaagctcactcttggtccttctgtgcagctgtgcaacgtgcagcttgctgctaatttacacaacacccatcctcccttgacggcccaggaatacagcagtgaagtgccttaatggcagcatcaaatggcctcatgccatgaattttttatttctaaaattgtccytaggatttccatgttttgagaacaaatgtaaaacactggggaaaaaaatggatgaaaacctctttcctaagaataaactatcatccaatycatagtgcatcacaccaatcaattactgacactttctctggcaactaacatggtttcattaccagaatgtccaaatatctgctagtcatcaaggatttttggctgcatagcaacctagagatatagtagtgtgaaatataaagacttgagccattgatggttgatgaaaacgttcataggcaatgcaagctcttagcacgtgtgctgagaccttggaaagcctcaagaggattgtgaattgccaccacactaggatttgtgtttgccaaatgtcaatatccagtctttaggcataaaaga

SEQ ID NO: 2292 - DNA, 600 bp, Chicken  19866894089173_1
gaggaaaacaaacctagtttaaaattataatagtgaaaatacaagtcagttgggattgaagctaatacatcacatagatgagtttctgaagaccgaggttcttcctctgatctgccagggagcaaagagaactactctcatgacttccagtcagatttatctttcccaccaaccggaaaacagaaatgcaacagggaagtcttctgggggctgtcgtacatttcatcccttctgagacaggtaaacggaactgtcgacaatccacagaactgcagcattaactttccaactcccagtgcmctgcatgaagttatcacgtggagaaccgataacaaaaaccgtaacatcacgacacacacgcatggataaactgtgcartactatccactaagcacactgccaggggtccggcgtagggggtggaggtcactgtccttcttaatacactttttacaaacgggtgcagtgctctcttttcttgtcagygcggacatcttggctgccattacttttcaagtctgacagagagtggcttgtcaactccatcttccaattccttgaggactctggaatgaatctggttgggccccaggggcctgt

SEQ ID NO: 2293 - DNA, 600 bp, Chicken  19866894089173_2
tgagtttctgaagaccgaggttcttcctctgatctgccagggagcaaagagaactactctcatgacttccagtcagatttatctttcccaccaaccggaaaacagaaatgcaacagggaagtcttctgggggctgtcgtacatttcatcccttctgagacaggtaaacggaactgtcgacaatccacagaactgcagcattaactttccaactcccagtgcmctgcatgaagttatcacgtggagaaccgataacaaaaaccgtaacatcacgacacacacgcatggataaactgtgcartactatccactaagcacactgccaggggtccggcgtagggggtggaggtcactgtccttcttaatacactttttacaaacgggtgcagtgctctcttttcttgtcagygcggacatcttggctgccattacttttcaagtctgacagagagtggcttgtcaactccatcttccaattccttgaggactctggaatgaatctggttgggccccaggggcctgttccaggctcctcgggtggcctcagacttgatcttctttcatgacgagaggaaattgggaccctcggggactgccactg

SEQ ID NO: 2294 - DNA, 501 bp, Chicken  19866894089173_3
tgcaacagggaagtcttctgggggctgtcgtacatttcatcccttctgagacaggtaaacggaactgtcgacaatccacagaactgcagcattaactttccaactcccagtgcmctgcatgaagttatcacgtggagaaccgataacaaaaaccgtaacatcacgacacacacgcatggataaactgtgcartactatccactaagcacactgccaggggtccggcgtagggggtggaggtcactgtccttcttaatacactttttacaaacgggtgcagtgctctcttttcttgtcagygcggacatcttggctgccattacttttcaagtctgacagagagtggcttgtcaactccatcttccaattccttgaggactctggaatgaatctggttgggccccaggggcctgttccaggctcctcgggtggcctcagacttgatcttctttcatgacgagaggaaattgggaccctcggggactgccactgaaaactggt

SEQ ID NO: 2295 - DNA, 600 bp, Chicken  19866894089193_1
taggcaagcatcccccgataccctaatctgctttttttatcctccaccatttattttcctgggggccttgtcagtcgcggctccgccgcttccccgtgccttgcagcgctgcggatccaggagcactaaaaggttccagctcacgctaacgaattccagaaaggccgatcgtttattacgaagccggctcgaaggggcaggtttgggagaaacacgacgaaacgatgaaacgagagagctgaggagatggggagagcggccgcatcccggagacgggcagaggtgagaggaaggggaggyggggagcgcttggaaacccattaaatgagggcttatcatcggcgttatgtaaatcacttcaaatgccttcttttattaaaagtattaagccgcattactgtctgcctttggtctccctaatttggtcgctaatgcctaagacaactgttgaaattaatttgaaattaatgttcctctataattacttaatgaatctcacattcgctgcccttcgctctccgttgacaaaggatctcacccaccgcatggaagaggttggaacactgactgcggtttttaaacggttgctaaattatagtt

SEQ ID NO: 2296 - DNA, 600 bp, Chicken  19866894089194_1
taagtaatcaacaactccgagacagaattagcagggaaggctttgtcattgccagggactggctagcctgtttttgacacagatgtttttcttgttaaggagacaagctagtaaatgacaaggttgtaggacaatgcttggaagcaacattgccactaagcgtttagattataccctatctgatggcaaggcatttttgtcacgcatcagagtacttggctctgtttcctagctgagtttccaggatgcaactgcaacacaatagcatttatttcaagcaggatttctccctactttttkaacttgaggaagacctgatgaaagcaacagttggtctgtacatgctgtgcttacagcaatgcaaaaagcacgattccctgcaccccactgaagcctttttaagagttttcatgcctcctggggagaagaatacaaggtgagtctgtgctctgggctggcagtggcagctccttgtgcccaacttcatggcagtatccctgccccgagtaacttgcacatcaccagcagggcttgggatagatattagagacaatgaatgagtcagaaatctaaatggctgtgctttgcatctttttctcc

SEQ ID NO: 2297 - DNA, 600 bp, Chicken  19866894089196_1
tatctgtaattctagtccaaagtttcaaattgagtcttttctgttcacttctttgggctttgaatgaaggtaattaactaaaagaaatattgtgatagggggaaaaaaaatattaaaatcaaataggatttactgtctggattattttgcttccaatcaggaaatgtgatgctatccaatgccttcattttcttaatattctttgccattttgattttctcatcacagtgaaatggtccacatgatattaatggagcaaaaataaactgcataatttgctattaaagaacaaaacaagaygggaaaatattttaatatataatatgattaattttaacagtgaatttttatagttagcatctctgtaacacatataaatccaattttgcatgttgagttttctgttgaattgtttaaaggatggtattctctttaaatattttccttaagttactcatacacttttaactcagatttaaacaaattctgcttttcttgataatcataaatttaaatgggaaagtctcactaatttacaaaagcacacaaaactttaaagatgcactaaatcattaaaatgtttccagccaaagaaaacat

SEQ ID NO: 2298 - DNA, 599 bp, Chicken  19866894089198_1
  misc_feature (1)..(92): n is any nucleotide
nnnnnnnnnnnnnnnnnnnnnnnnnnnnnnnnnnnnnnnnnnnnnnnnnnnnnnnnnnnnnnnnnnnnnnnnnnnnnnnnnnnnnnnnnnnnctccagagctttaaaagagaaggatatttagcgttgcaataagtctctgtctctgtatgagctgaacgcgcactgttttagtaccaaaaaatttgccgaatccctccattacttaaggtttgtcttctacagatctcagaactcagagaaaacagcagaatgaaaacattcctatttgaacagagcacatttttcagcaccaatcccycagaagatgctcgcttctgttatcacaaatttaaacaacagcaaaaacctcaaacccattcaaacccaaccatgtcaaacctgacaggaaatgacgatgctcataaaagcctcagctttctacagagacatcttgctcgtggaaggtgttaccaactgataacacaagtaatagtcagcattctgcatctatgctgatactcaaagctgctgtcagagctgttccttattgacattgtcatgaatactttgctccctagctaaagatgttattgtcagaaacagctgacaacattccat

SEQ ID NO: 2299 - DNA, 600 bp, Chicken  19866894089206_1
tgcttagaggagtttactattttgaatgcaagcagcattcaaattaaacacaaatttgctgaaaatttgaggtttattgattaaacataattctgtaggatttggggcttacagggagcgtgctatttaaaaattaaaatattttttttatttcttttctgtaggagattcctttactcagtttcgatttgctgaagagaaagattgggatacagaaaacgtatactgtaagcaggtaaccgaattttctatgcagataattgcctggcacaggctatgcagggagttgtgctttcagcmgtgagtggtataacacaataatagcactctttaatttatwgatacgtttattaatttgtttctgatgctggaggctcttgagtcttgtccttttctttcctactgaagaacgttygaggcagcaggctacgtttttaagtaacattaaaggaaaagaatgcaaacctgtccagagaagggcaagtaaggggtagaaatcaccttgctctgctgacatataaggtcagccttccattttcaagtgtattcaggagaacagtttagcaaaaggactgtaagggggacctataggagtatatt

SEQ ID NO: 2300 - DNA, 600 bp, Chicken  19866894089206_2
aaattaaacacaaatttgctgaaaatttgaggtttattgattaaacataattctgtaggatttggggcttacagggagcgtgctatttaaaaattaaaatattttttttatttcttttctgtaggagattcctttactcagtttcgatttgctgaagagaaagattgggatacagaaaacgtatactgtaagcaggtaaccgaattttctatgcagataattgcctggcacaggctatgcagggagttgtgctttcagcmgtgagtggtataacacaataatagcactctttaatttatwgatacgtttattaatttgtttctgatgctggaggctcttgagtcttgtccttttctttcctactgaagaacgttygaggcagcaggctacgtttttaagtaacattaaaggaaaagaatgcaaacctgtccagagaagggcaagtaaggggtagaaatcaccttgctctgctgacatataaggtcagccttccattttcaagtgtattcaggagaacagtttagcaaaaggactgtaagggggacctataggagtatattcacatatttgactgcaaactgtgttttcattaattcaaat

SEQ ID NO: 2301 - DNA, 600 bp, Chicken  19866894089206_3
gagcgtgctatttaaaaattaaaatattttttttatttcttttctgtaggagattcctttactcagtttcgatttgctgaagagaaagattgggatacagaaaacgtatactgtaagcaggtaaccgaattttctatgcagataattgcctggcacaggctatgcagggagttgtgctttcagcmgtgagtggtataacacaataatagcactctttaatttatwgatacgtttattaatttgtttctgatgctggaggctcttgagtcttgtccttttctttcctactgaagaacgttygaggcagcaggctacgtttttaagtaacattaaaggaaaagaatgcaaacctgtccagagaagggcaagtaaggggtagaaatcaccttgctctgctgacatataaggtcagccttccattttcaagtgtattcaggagaacagtttagcaaaaggactgtaagggggacctataggagtatattcacatatttgactgcaaactgtgttttcattaattcaaattaacagtgcatatcctctactggaaacttcagttccaaaatgactgtggaactcaacaaggtttgaatttttttg

SEQ ID NO: 2302 - DNA, 600 bp, Chicken  19866894089207_1
ctctcagcaacaagagaagagaaaggtttcatgtggcctgtatttatctaccctgttctcagcttcagcaacagaaactacagcccagcacgcaatgagccacagtgaagctgctcacaaagaacacgctggagcaacaagtatgcagcgacagcacaacgctcagcaggagacataggaagctccgtgtgctcctacgtatctttataacaacttctcaactcttccacttgttgataaacaaattccagatgctgacagtgccactgaacccaaagttgaaatccaattgactctctmcagtttwagatccactttaggagacggtatcacccacctctcgctggctcccatgcagtagcaccagctatgttgtttctctgtaacagcacagagcttttacaagcttttattgatacagtattttgaatcactccrccttttctgcagagaggactgaagttcagcagaagtaaaacaagcagctgaaccctcctgcatacttgggtccgcgctcttgctctgtgccagacagcaaatcctgaattcatctcatgaagggctgaggtgacccttcctcgtttctgatttgcacttaac

SEQ ID NO: 2303 - DNA, 600 bp, Chicken  19866894089207_2
caacaagagaagagaaaggtttcatgtggcctgtatttatctaccctgttctcagcttcagcaacagaaactacagcccagcacgcaatgagccacagtgaagctgctcacaaagaacacgctggagcaacaagtatgcagcgacagcacaacgctcagcaggagacataggaagctccgtgtgctcctacgtatctttataacaacttctcaactcttccacttgttgataaacaaattccagatgctgacagtgccactgaacccaaagttgaaatccaattgactctctmcagtttwagatccactttaggagacggtatcacccacctctcgctggctcccatgcagtagcaccagctatgttgtttctctgtaacagcacagagcttttacaagcttttattgatacagtattttgaatcactccrccttttctgcagagaggactgaagttcagcagaagtaaaacaagcagctgaaccctcctgcatacttgggtccgcgctcttgctctgtgccagacagcaaatcctgaattcatctcatgaagggctgaggtgacccttcctcgtttctgatttgcacttaaccccattc

SEQ ID NO: 2304 - DNA, 553 bp, Chicken  19866894089207_3
aagtatgcagcgacagcacaacgctcagcaggagacataggaagctccgtgtgctcctacgtatctttataacaacttctcaactcttccacttgttgataaacaaattccagatgctgacagtgccactgaacccaaagttgaaatccaattgactctctmcagtttwagatccactttaggagacggtatcacccacctctcgctggctcccatgcagtagcaccagctatgttgtttctctgtaacagcacagagcttttacaagcttttattgatacagtattttgaatcactccrccttttctgcagagaggactgaagttcagcagaagtaaaacaagcagctgaaccctcctgcatacttgggtccgcgctcttgctctgtgccagacagcaaatcctgaattcatctcatgaagggctgaggtgacccttcctcgtttctgatttgcacttaaccccattcagatggcaacgccatccacccacctgcattttcaagcatagcttcctcacatttcctcctaaatgtctctctaggaaaataaat

SEQ ID NO: 2305 - DNA, 600 bp, Chicken  19866894089208_1
ttccagcactggaaagatacaaagccacgtacagcacaaagaaagaacacagactggcagcactccagcaagaatcctggaacatttcttaacagatggaggcagaggtaaaacactgggctaaaattcagaaaatctgattgagttgtcagcctgacacagctctgtgcatttcacacctcacacctcagcttcccattggtaaaatgggatagagctttcctcctcccattatcgagattgtttctgatgtataacatttattagacttactgttgactgaacttctaagctccaatwaaaaaagatattaataattaaatcacaaatcctaagtaatattagcagtcagtgcaacagttttgtagaagttccccartttagcaggagtttggctaacatagctcatactgccttctactggtaagaagttacagcaattgctcacatggaaggcatgcgctgaaaagatttaaccatggcagcaagatgttaaacacattagagacacgtcagaagcacagggcaactaacccctgaaaacattttatggatcaataaaactaatacagtgaagggatagaaagcccggaaatttac

SEQ ID NO: 2306 - DNA, 600 bp, Chicken  19866894089208_2
gaacatttcttaacagatggaggcagaggtaaaacactgggctaaaattcagaaaatctgattgagttgtcagcctgacacagctctgtgcatttcacacctcacacctcagcttcccattggtaaaatgggatagagctttcctcctcccattatcgagattgtttctgatgtataacatttattagacttactgttgactgaacttctaagctccaatwaaaaaagatattaataattaaatcacaaatcctaagtaatattagcagtcagtgcaacagttttgtagaagttccccartttagcaggagtttggctaacatagctcatactgccttctactggtaagaagttacagcaattgctcacatggaaggcatgcgctgaaaagatttaaccatggcagcaagatgttaaacacattagagacacgtcagaagcacagggcaactaacccctgaaaacattttatggatcaataaaactaatacagtgaagggatagaaagcccggaaatttactcaaccgaaaccatttctacatcacttattgctgtcagcactggcagcattagaggttctggcaatccagccctcacta

SEQ ID NO: 2307 - DNA, 600 bp, Chicken  19866894089215_1
ggtgctagagccaataccttgctctgttgacttcattggttcaggcttacatcttacaaagagactgcttcaagttctgtagggtttaggtctctatcactaagttttatagtatgctacatccttttgtagcctcccattaggtgaaactaagtcttaatgctttgctttgattgtaggtgtttctttatctcttaacctaacaacttctgagttataatttgaatgttattatcatctagttatgtgagccgactgccttggaaagaggaagatatgattttaatgcagatgtgttcrggctcacagaatgggatttggaaggtgctgaatccttgcctgcataaatatttcagatcctgttagctgaataacttactgctattracagtgaaatcaaaggtttatggtagtcctttgtaagtcggttgcaagaaaaatcaaagtacaacaaacacattaccttaaaccagaattttcaaaaccatcacacatacagttgcatataaataagtatgttctaggcatgcagttaagttggctgtgatgcagctaatkaagtgcaagcattgttttctgcatacatcctcccaaacattc

SEQ ID NO: 2308 - DNA, 600 bp, Chicken  19866894089215_2
aggtctctatcactaagttttatagtatgctacatccttttgtagcctcccattaggtgaaactaagtcttaatgctttgctttgattgtaggtgtttctttatctcttaacctaacaacttctgagttataatttgaatgttattatcatctagttatgtgagccgactgccttggaaagaggaagatatgattttaatgcagatgtgttcrggctcacagaatgggatttggaaggtgctgaatccttgcctgcataaatatttcagatcctgttagctgaataacttactgctattracagtgaaatcaaaggtttatggtagtcctttgtaagtcggttgcaagaaaaatcaaagtacaacaaacacattaccttaaaccagaattttcaaaaccatcacacatacagttgcatataaataagtatgttctaggcatgcagttaagttggctgtgatgcagctaatkaagtgcaagcattgttttctgcatacatcctcccaaacattcaaaccttagcatattcttgtgcttacagcagggtcttgaaatagggaggaaaaagttattgcctattaggctcaaaggtaggagagc

SEQ ID NO: 2309 - DNA, 600 bp, Chicken  19866894089215_3
ccttggaaagaggaagatatgattttaatgcagatgtgttcrggctcacagaatgggatttggaaggtgctgaatccttgcctgcataaatatttcagatcctgttagctgaataacttactgctattracagtgaaatcaaaggtttatggtagtcctttgtaagtcggttgcaagaaaaatcaaagtacaacaaacacattaccttaaaccagaattttcaaaaccatcacacatacagttgcatataaataagtatgttctaggcatgcagttaagttggctgtgatgcagctaatkaagtgcaagcattgttttctgcatacatcctcccaaacattcaaaccttagcatattcttgtgcttacagcagggtcttgaaatagggaggaaaaagttattgcctattaggctcaaaggtaggagagcataatattgctataaaactctaaggatattttgatacagaggtgataaaataaaagctgttcgattaattataattttaaatgataaattatagcatatttcttccaacataagcaagtaatggctgttaataaaagttatgcatcattattgctgtttttcatgcttttt

SEQ ID NO: 2310 - DNA, 599 bp, Chicken  19866894089218_1
  misc_feature (1)..(12): n is any nucleotide
nnnnnnnnnnnnactggatttgatcctaaatgctaacaaaattataaggaaggtggttttgtttcaagatctgtctcagagatccaatgtttagtttacggattagaaacctattatattgtcatcattattattatagacacaggttttagtgccgagtgagaagtactggcattcaggtccaagtccaaatttgttcagcaggacaggaattcaggctctctgcttccagaatttggttcagcaaaagcttggatctgaatctgcccctgatgtaactgatgtctagaattacgatcwcttgtagggttggttcttggatcagttccccagatttctgccttgtttgttttcccaggtgtgatgagtacgtcacrcagctggatgagatgcaaaggcagctggcagctgcagaggatgagaagaagaccctaaactctctattgcgcatggctatccagcaaaaacttgcccttacccaacgattggaggatttagagttcgaccatgagcagtcccgacgcagcaaaggcaagcttggaaagagcaagatcggcagccctaaagtaagtgaggaggcatcagccaccgtgccaacc

SEQ ID NO: 2311 - DNA, 600 bp, Chicken  19866894089218_2
agagatccaatgtttagtttacggattagaaacctattatattgtcatcattattattatagacacaggttttagtgccgagtgagaagtactggcattcaggtccaagtccaaatttgttcagcaggacaggaattcaggctctctgcttccagaatttggttcagcaaaagcttggatctgaatctgcccctgatgtaactgatgtctagaattacgatcwcttgtagggttggttcttggatcagttccccagatttctgccttgtttgttttcccaggtgtgatgagtacgtcacrcagctggatgagatgcaaaggcagctggcagctgcagaggatgagaagaagaccctaaactctctattgcgcatggctatccagcaaaaacttgcccttacccaacgattggaggatttagagttcgaccatgagcagtcccgacgcagcaaaggcaagcttggaaagagcaagatcggcagccctaaagtaagtgaggaggcatcagccaccgtgccaaccatagacactttcctcctgcatagtcagggcccacagcaaccaaacttactggtcagcagtggcactcagaggaaaagg

SEQ ID NO: 2312 - DNA, 600 bp, Chicken  19866894089218_3
aacgattggaggatttagagttcgaccatgagcagtcccgacgcagcaaaggcaagcttggaaagagcaagatcggcagccctaaagtaagtgaggaggcatcagccaccgtgccaaccatagacactttcctcctgcatagtcagggcccacagcaaccaaacttactggtcagcagtggcactcagaggaaaaggtatgcatgcagcgatctttatagtacagtgcagtgtccagactttcattaaagtcgttcactgaattgtaaacattatatttttggttttcttttcttttttrtactttgattggggagaaggaggtggggaacatatgaatacggaattcaaagcctggcaacatgtggttctggtccacctactcacaatgttatttcctccttcttaatgcagtgttttgcattatattctgttggtgtctcggtgcrtcttgtgtgtctttaatattagtgtaaatgtattttctttaacaactcttccttaagtttcccttaagattttccataatgagcatctgaaatctaaaatgattgttctgtatgagcatttcagtgcttaacacaaaggaagttgcatctct

SEQ ID NO: 2313 - DNA, 558 bp, Chicken  19866894089218_4
cccacagcaaccaaacttactggtcagcagtggcactcagaggaaaaggtatgcatgcagcgatctttatagtacagtgcagtgtccagactttcattaaagtcgttcactgaattgtaaacattatatttttggttttcttttcttttttrtactttgattggggagaaggaggtggggaacatatgaatacggaattcaaagcctggcaacatgtggttctggtccacctactcacaatgttatttcctccttcttaatgcagtgttttgcattatattctgttggtgtctcggtgcrtcttgtgtgtctttaatattagtgtaaatgtattttctttaacaactcttccttaagtttcccttaagattttccataatgagcatctgaaatctaaaatgattgttctgtatgagcatttcagtgcttaacacaaaggaagttgcatctctttgttaagctctgatgctcacttgctcttcatcaatgcaaaaagaatatggatgtgttcactctgatcaatttttctgcataggagcaagcaacccttttgaaggg

SEQ ID NO: 2314 - DNA, 600 bp, Chicken  19866894089223_1
gagtaaaaaagggaaagcttcagttgaagaaatcttacaaatatgatagaaatgaaagggctggtgtgcatgacctgttctgaagggtagttaaaccaattacacattaagaacatataaaaccaggactagcgctgtccatacagtgaacactgaagttctcgcaactttaaagaaaatattaagtcttcataggtcgagatgtggttcacctcaacaggattcttgtctggcaaaaacaatttgggaaaaataaataaccagttatacacattactgttttaccctgcgcgtacttcrcaacaggatctggtgatatttatttaatggcaagtaatccattgttacacctcagaaacaaaaatggctatgagagaagcacatggagcaacagcagtaccacctcatcatctaattagttttaaaaatcatagaatggtttgggttggaagggaccttttagattattgagtttcaaccccactgctatagaggcaggggcacttcccactagaccaagctgctcaaatccccttccagcctggccttgaatacctccagggaggtggaattcacaacctctctggacaacctgttcca

SEQ ID NO: 2315 - DNA, 600 bp, Chicken  19866894089225_1
ttgtattaaacgtgctttagtgatattggcatgtaaccccttgttattaataggcacaggatacagatacctgttttcatgctcttatgcctccctgcagcatttagctccttctgttctccaggctgaacagccccagctctctcagcctgtcctcgtaggagaggtgttccatcccttagctcatttttgtggccctcctctggacacgcttcaagagctacatgtttctcctgtactgaggactccacatctggacgcagtactccaggtgaggcctcaccagtgcagagcacaggrgcaggatcaccttcctcaccctgctggccacgcttctttagatgcagctttggatacagtaggctttgcaggctgcaagcttaccatccaccagtatcccaaagtcctttttggcaaggctgtgctcaatcctttcatcccccaatataatacatgtccatatacytgtgagttcacatgctgcaatgygttactgtcagaaaggggtaattatttataacctgcawatgaaacgttcaaaacggtggtagtctgaatgagatctcagagctcttgttacrcaggtaatgcagatttctg

SEQ ID NO: 2316 - DNA, 600 bp, Chicken  19866894089225_2
gtgttccatcccttagctcatttttgtggccctcctctggacacgcttcaagagctacatgtttctcctgtactgaggactccacatctggacgcagtactccaggtgaggcctcaccagtgcagagcacaggrgcaggatcaccttcctcaccctgctggccacgcttctttagatgcagctttggatacagtaggctttgcaggctgcaagcttaccatccaccagtatcccaaagtcctttttggcaaggctgtgctcaatcctttcatcccccaatataatacatgtccatatacytgtgagttcacatgctgcaatgygttactgtcagaaaggggtaattatttataacctgcawatgaaacgttcaaaacggtggtagtctgaatgagatctcagagctcttgttacrcaggtaatgcagatttctggtgtttattctcccttggacagaaaccacatagccaactctatgctgcaggtgagagggtgagtttagggctgattgatctgggcactataaaatacatttgtggaaatacccttgacagcatgaactcctacctaatgctttccttggaggtttatggcttgcac

SEQ ID NO: 2317 - DNA, 600 bp, Chicken  19866894089225_3
ttgtggccctcctctggacacgcttcaagagctacatgtttctcctgtactgaggactccacatctggacgcagtactccaggtgaggcctcaccagtgcagagcacaggrgcaggatcaccttcctcaccctgctggccacgcttctttagatgcagctttggatacagtaggctttgcaggctgcaagcttaccatccaccagtatcccaaagtcctttttggcaaggctgtgctcaatcctttcatcccccaatataatacatgtccatatacytgtgagttcacatgctgcaatgygttactgtcagaaaggggtaattatttataacctgcawatgaaacgttcaaaacggtggtagtctgaatgagatctcagagctcttgttacrcaggtaatgcagatttctggtgtttattctcccttggacagaaaccacatagccaactctatgctgcaggtgagagggtgagtttagggctgattgatctgggcactataaaatacatttgtggaaatacccttgacagcatgaactcctacctaatgctttccttggaggtttatggcttgcacatgaaaaactgcaaatccctccc

SEQ ID NO: 2318 - DNA, 600 bp, Chicken  19866894089225_4
tttctcctgtactgaggactccacatctggacgcagtactccaggtgaggcctcaccagtgcagagcacaggrgcaggatcaccttcctcaccctgctggccacgcttctttagatgcagctttggatacagtaggctttgcaggctgcaagcttaccatccaccagtatcccaaagtcctttttggcaaggctgtgctcaatcctttcatcccccaatataatacatgtccatatacytgtgagttcacatgctgcaatgygttactgtcagaaaggggtaattatttataacctgcawatgaaacgttcaaaacggtggtagtctgaatgagatctcagagctcttgttacrcaggtaatgcagatttctggtgtttattctcccttggacagaaaccacatagccaactctatgctgcaggtgagagggtgagtttagggctgattgatctgggcactataaaatacatttgtggaaatacccttgacagcatgaactcctacctaatgctttccttggaggtttatggcttgcacatgaaaaactgcaaatccctcccaaaggcatttttggtcgaattcttggagaacacctaga

SEQ ID NO: 2319 - DNA, 600 bp, Chicken  19866894089225_5
accagtgcagagcacaggrgcaggatcaccttcctcaccctgctggccacgcttctttagatgcagctttggatacagtaggctttgcaggctgcaagcttaccatccaccagtatcccaaagtcctttttggcaaggctgtgctcaatcctttcatcccccaatataatacatgtccatatacytgtgagttcacatgctgcaatgygttactgtcagaaaggggtaattatttataacctgcawatgaaacgttcaaaacggtggtagtctgaatgagatctcagagctcttgttacrcaggtaatgcagatttctggtgtttattctcccttggacagaaaccacatagccaactctatgctgcaggtgagagggtgagtttagggctgattgatctgggcactataaaatacatttgtggaaatacccttgacagcatgaactcctacctaatgctttccttggaggtttatggcttgcacatgaaaaactgcaaatccctcccaaaggcatttttggtcgaattcttggagaacacctagaaaatcaagaatcagaccatcttaatgagatcctgcacagtcgcacagcctgcct

SEQ ID NO: 2320 - DNA, 599 bp, Chicken  19866894089235_1
  misc_feature (1)..(156): n is any nucleotide
nnnnnnnnnnnnnnnnnnnnnnnnnnnnnnnnnnnnnnnnnnnnnnnnnnnnnnnnnnnnnnnnnnnnnnnnnnnnnnnnnnnnnnnnnnnnnnnnnnnnnnnnnnnnnnnnnnnnnnnnnnnnnnnnnnnnnnnnnnnnnnnnnnnnnnnnnnnnatcgctggtggagctcggcacgctgaatggccagctcacagcaaggagaggcttgctgctctgaggagtgaaggtccatctgtcacagaggttgttcccagtttggtccatgaagctgaaatcaaggaagctgtaccccagaargctcctcaaggcagtggcacagtgcctgctgctctggaggacagacacccatctgtaaccgcttcatcccaaaaaccacatctcccttcagtccatgagagtgaaaggcaagaacacacaaaggcatcatttctcagcaaggtgagatccattgtcacgagtggaagcccagaggctgaacagacctcatctgctccattccccgagagtggaagtcaggtattggagcagcacaaggctgcttatccaagtgggaaagtttttgctgctcaggagggtgtgcacccaaatatcttagc

SEQ ID NO: 2321 - DNA, 498 bp, Chicken  19866894089235_2
gtggcacagtgcctgctgctctggaggacagacacccatctgtaaccgcttcatcccaaaaaccacatctcccttcagtccatgagagtgaaaggcaagaacacacaaaggcatcatttctcagcaaggtgagatccattgtcacgagtggaagcccagaggctgaacagacctcatctgctccattccccgagagtggaagtcaggtattggagcagcacaaggctgcttatccaagtgggaaagtttttgctgctcaggagggtgtgcacccaaatatcttagctgctccaccacccraagttcagtctccagcttcagtctatcagctggaatatgaggagcagctgacgttttatggygaggacagagacactgccttgggaagtggaagccatgatgctggaaaacctatgccaccatcactctgcagggatggaagtcaggagctgtcacagcacaggtcttctttttacagtgacgaaggagtctgctgcc

SEQ ID NO: 2322 - DNA, 436 bp, Chicken  19866894089235_3
ccacatctcccttcagtccatgagagtgaaaggcaagaacacacaaaggcatcatttctcagcaaggtgagatccattgtcacgagtggaagcccagaggctgaacagacctcatctgctccattccccgagagtggaagtcaggtattggagcagcacaaggctgcttatccaagtgggaaagtttttgctgctcaggagggtgtgcacccaaatatcttagctgctccaccacccraagttcagtctccagcttcagtctatcagctggaatatgaggagcagctgacgttttatggygaggacagagacactgccttgggaagtggaagccatgatgctggaaaacctatgccaccatcactctgcagggatggaagtcaggagctgtcacagcacaggtcttctttttacagtgacgaaggagtctgctgcc

SEQ ID NO: 2323 - DNA, 600 bp, Chicken  19866894089236_1
ggcagccagagggatccgaagtgttgtccggctataaagctggcttccagttctgtctagactggatgagaaagggtggagggggagagctgtgcttttaaaaacctccacagatggctttacctgcccccttccatttatttccaaggcgcgctgacacgaagtttaagcgaaatttgggaccctcaccgaggtgtcccggccaggatggccccattgtttctacaggtctgtaatggggccaaccaggtcgccctgctgcccccggccggagttgtcccgaagatgcgcggttatcascgagatccccgaggagccgcccgctcgggctcagggaagtgagagagaaaggagtttgatctcacggctcctttcacgccgacaatgagagctctagaaggctcggagcttcgtgcgcscacatcayacagtctgcagcgtggttttactctgaccttcacgttcctacgttcctgaatgatagtccgggagacagcaacccacggcctcccccgcgctctggcttctgctgagctctgatttttttgccaaggcatttctgattataggagaaaaatataccacgggacttctgtcttg

SEQ ID NO: 2324 - DNA, 600 bp, Chicken  19866894089236_2
ttacctgcccccttccatttatttccaaggcgcgctgacacgaagtttaagcgaaatttgggaccctcaccgaggtgtcccggccaggatggccccattgtttctacaggtctgtaatggggccaaccaggtcgccctgctgcccccggccggagttgtcccgaagatgcgcggttatcascgagatccccgaggagccgcccgctcgggctcagggaagtgagagagaaaggagtttgatctcacggctcctttcacgccgacaatgagagctctagaaggctcggagcttcgtgcgcscacatcayacagtctgcagcgtggttttactctgaccttcacgttcctacgttcctgaatgatagtccgggagacagcaacccacggcctcccccgcgctctggcttctgctgagctctgatttttttgccaaggcatttctgattataggagaaaaatataccacgggacttctgtcttggctgcctgcgtatacgtatacatgtgttcctaaaaatgagcaaatgaaagaaagggatgcgaggatccgctgtgcttacaggcagcgccgttctcccccctgcccggctctgtcttcag

SEQ ID NO: 2325 - DNA, 600 bp, Chicken  19866894089236_3
ccccttccatttatttccaaggcgcgctgacacgaagtttaagcgaaatttgggaccctcaccgaggtgtcccggccaggatggccccattgtttctacaggtctgtaatggggccaaccaggtcgccctgctgcccccggccggagttgtcccgaagatgcgcggttatcascgagatccccgaggagccgcccgctcgggctcagggaagtgagagagaaaggagtttgatctcacggctcctttcacgccgacaatgagagctctagaaggctcggagcttcgtgcgcscacatcayacagtctgcagcgtggttttactctgaccttcacgttcctacgttcctgaatgatagtccgggagacagcaacccacggcctcccccgcgctctggcttctgctgagctctgatttttttgccaaggcatttctgattataggagaaaaatataccacgggacttctgtcttggctgcctgcgtatacgtatacatgtgttcctaaaaatgagcaaatgaaagaaagggatgcgaggatccgctgtgcttacaggcagcgccgttctcccccctgcccggctctgtcttcagttgtgacc

SEQ ID NO: 2326 - DNA, 600 bp, Chicken  19866894089237_1
ccagtcttagaaatcctggacatccttcagctcctctctgtgcccaggtgtggtctgtattggtcactgaaccctctgtgggttggacccgaaacccccacaggtgaccaaatgtcacatccccctgtctgtctgtcttacagctgcattgagtgggagagaggggggatgcacccatggggaaggagcagtggccttgtttggacccatggggagatgggaaggagctgtgctcctctttgtatccatgggagatgagaaggagcaatgctcctctttgtaccgtggggaggtgggaargagtaatactcctctctgcacccatgggaagatgggaaggagctgtgctcctctttgcactcatggggaactgcagccacccaacattccccacttcctctcctgttgggttttgctgcaggctgcagatgggcatgctcccacctgctctcttctccttccagcagagtcctgtaagtcgcaatctcaatgtccagggccagcttgacattcagcagctcctggtagtccctcagtagacatgccatcttgtccttggcctgctgcagagctgtctgcaggtccaccagcttctgccgt

SEQ ID NO: 2327 - DNA, 600 bp, Chicken  19866894089239_1
gcgctgaaatgcaggcaggattttctggcaggatgtcttcccatgttggtcacgattaagtagttaaacatacagctggggatggctttccagccaggatggctttcctctctgcggcatttaggggtaaggtagccgtctcctgctgtgagaatgagcaattgcagggaagaaatgaaactcaaaagtcaccagagggtaaatacacagataaagcaggaagctgagggaaaacccactgcagtcagccttcctgcgaggttttcccttgctcccaggctgctgggcacgacgtgctasagacgttgttcagtacgctctgttgcttcaagagcagcccaggtcagccctcccaggcagggcaggatggagagagggaatgcaagagcgtggcacaamtgcacagcctttgtgaagtggccccttgggcctcctagaagtgtctcagctgcaaaacacggcaaacccaatattattgtagagtcacggatgcattaaggttggaaaagacctctaagatcaagtcctaccccgggcccacccgcactgtgtccgctgaccacatccatcagtgccacatccatggttctggaacaccgg

SEQ ID NO: 2328 - DNA, 600 bp, Chicken  19866894089239_2
tggctttcctctctgcggcatttaggggtaaggtagccgtctcctgctgtgagaatgagcaattgcagggaagaaatgaaactcaaaagtcaccagagggtaaatacacagataaagcaggaagctgagggaaaacccactgcagtcagccttcctgcgaggttttcccttgctcccaggctgctgggcacgacgtgctasagacgttgttcagtacgctctgttgcttcaagagcagcccaggtcagccctcccaggcagggcaggatggagagagggaatgcaagagcgtggcacaamtgcacagcctttgtgaagtggccccttgggcctcctagaagtgtctcagctgcaaaacacggcaaacccaatattattgtagagtcacggatgcattaaggttggaaaagacctctaagatcaagtcctaccccgggcccacccgcactgtgtccgctgaccacatccatcagtgccacatccatggttctggaacaccggtatggacaggtttgttcaaggracgtttggacattgtgttgagggacgtggtttagtgagaaccattggtgatgggtgaatggttggactggatgatcc

SEQ ID NO: 2329 - DNA, 600 bp, Chicken  19866894089239_3
ttgcttcaagagcagcccaggtcagccctcccaggcagggcaggatggagagagggaatgcaagagcgtggcacaamtgcacagcctttgtgaagtggccccttgggcctcctagaagtgtctcagctgcaaaacacggcaaacccaatattattgtagagtcacggatgcattaaggttggaaaagacctctaagatcaagtcctaccccgggcccacccgcactgtgtccgctgaccacatccatcagtgccacatccatggttctggaacaccggtatggacaggtttgttcaaggracgtttggacattgtgttgagggacgtggtttagtgagaaccattggtgatgggtgaatggttggactggatgatcctgtgggtcttttccaacctttgtgattctatgattctatgacagtgaccccrccatgccctgggcagctgtgccagtgcatcaccagcctttggagaaaagtttcctaatatccagcctgcaaatgattctagcaacagagtgtctgccaccatctagaagactgtctgaaaaggtgttagatttggtgctcagcactgtgaataataaacttctctgttttt

SEQ ID NO: 2330 - DNA, 600 bp, Chicken  19866894089239_4
caaaacacggcaaacccaatattattgtagagtcacggatgcattaaggttggaaaagacctctaagatcaagtcctaccccgggcccacccgcactgtgtccgctgaccacatccatcagtgccacatccatggttctggaacaccggtatggacaggtttgttcaaggracgtttggacattgtgttgagggacgtggtttagtgagaaccattggtgatgggtgaatggttggactggatgatcctgtgggtcttttccaacctttgtgattctatgattctatgacagtgaccccrccatgccctgggcagctgtgccagtgcatcaccagcctttggagaaaagtttcctaatatccagcctgcaaatgattctagcaacagagtgtctgccaccatctagaagactgtctgaaaaggtgttagatttggtgctcagcactgtgaataataaacttctctgtttttttcactcttcttctcttcccagcaacatcctttcttcaccctgcacgaatccaaagagacagacgtcgcctcttttgtcaaactcatcctgggagactgagaactggactttatatgaattgcccttct

SEQ ID NO: 2331 - DNA, 600 bp, Chicken  19866894089242_1
aggccagcagctgctgctggcatatgaggtatgaattgtaactgctgcaactgcagcaccacacgtcatgtaatgcacacatgatgaacctgtaagagtctcctacagaatatgtaccactcaagtatatttatataacatacacgtaagtacatgcaataccatgtaataggtgtactacatctcaatatgtattactctatgactacagctcacaatacataatcatacacataatcttctagtagctgtatcaatattatgatataataattgatataaattactataaatactgaktgcaataggtaaaccaacacaggtgtgttactattccttggaagtacaacatctagtggtaaagcatctaatggaaattacacagcaggaggggcagagagcacatatttggttttgtttgagcacagaaagtgtttaaacaccaacattatcttcagcttaatggccacatttacctgttctccattctgctctccaaatcctccagttgtattgcagctccgcaaccccttcaacagccaccgctccctccatattttagagctgttttctctcgcaattaactctaacagcttatca

SEQ ID NO: 2332 - DNA, 473 bp, Chicken  19866894089242_2
tgagggaaaggctgttgatgtagtctacctagatttcagcaaagcctttgacactgtctcccacagcactctcctgcaaaagctggcagcccatggcttggacaggtacactcttggctgggtaaggaactggctggagggccgggcccagagagtggtggtgaatggagttaaatccagctgccaactggacacgagtggtgtcccccagcggtcggtgctgcagcctgtcctcttcaatatctttactgatgacttgcatgtgggcattgagtgcaccctcactaagtttgcagatgrcaccaagttggctggaagtgtccatctgcctgcctagcgaggccctacagaaggatctggacaggctggatagctgggctgaagccagtgggatggggtccaacaagatcaaatgccgggtcctgcactttggctgcagcaaccccaggcaacgctacagtgttggggcagag

SEQ ID NO: 2333 - DNA, 600 bp, Chicken  19866894089245_1
cagcagcagctgctggcctccaatacctgcaggctgtaggtaaatatctgttgggagatggcttcactcacacgtgctgcaatttcagctttgctatgggtgtaactttcatgcatctggtcatgaaggtggtgttcaacatgaggatgggttgggatgcttaggtaaccacccacatgtatctctctgtatctctgtgtatgaggaacttcagtcagcctgttgtgataattagaaccacctaccttggtgtttttcagttaaagcaagctggaggacaccatgtcaggtaaggggtaygtgttgattggattgatggcaggcatctgaagcttggcttgtttcttctgtcttgcaattggcatgtgtattgctgatttttggcagtttgcagaatgcctaaataaaagaagactgaaaacccgagtgtggttgataaggtaggggcagtcctctccctttccaatctttaaagtgtgagctgtctggattggctgtgtgcttgcgtcagcaaatgatgcccagatctggctgtgattaaaatgtgctttggctgagtttagaattgcaagtaagaattgcaaaactaagcaggtgtct

SEQ ID NO: 2334 - DNA, 599 bp, Chicken  19866894089281_1
  misc_feature (1)..(69): n is any nucleotide
nnnnnnnnnnnnnnnnnnnnnnnnnnnnnnnnnnnnnnnnnnnnnnnnnnnnnnnnnnnnnnnnnnnnnctggaccttgactgtggactttagaggatatctgttctggttttgagttgttcccctccccaaaaatgttttagtgttaagctgttagtgaaacttcctgaatgtgaaaaggaaacctggcaactgctgtggctgatgaagatgagactttttttttttttttaaatatcagagaggacttttatgatgcccagagtggtaatgttttatctatccatgtgtccattcatscagctaagaacggaaattggaaatgagaataaaattattaataagtgtattatattaatcaaaatgatatagactttgagtaaaacaggatacctggactaactctggttggaacagttctcttgtgttgtgtctgtctccagttttgctaaaacatgagacacagagttacccctgtctcctttggattgcaattaagtcactcttctcrcattatgggtgtatgttccctccggtatcttcygaggacagtataatacgtaacatttgtgtaatagaagagatgagttattgataat

SEQ ID NO: 2335 - DNA, 600 bp, Chicken  19866894089281_2
tgagactttttttttttttttaaatatcagagaggacttttatgatgcccagagtggtaatgttttatctatccatgtgtccattcatscagctaagaacggaaattggaaatgagaataaaattattaataagtgtattatattaatcaaaatgatatagactttgagtaaaacaggatacctggactaactctggttggaacagttctcttgtgttgtgtctgtctccagttttgctaaaacatgagacacagagttacccctgtctcctttggattgcaattaagtcactcttctcrcattatgggtgtatgttccctccggtatcttcygaggacagtataatacgtaacatttgtgtaatagaagagatgagttattgataatagctgaagttagatcaagtagctttttgggtctacaacatgatgttcttttgagagttcaaagagaaaatgttccaatttgtcatccgactagagaaataatggtaattattcttttaacttccactgggactgatatcatgctgcatgagtgctgcataccaaagaaggttgatgtgtgctgtagtgtgagtacctttataatggaatact

SEQ ID NO: 2336 - DNA, 600 bp, Chicken  19866894089281_3
ggacttttatgatgcccagagtggtaatgttttatctatccatgtgtccattcatscagctaagaacggaaattggaaatgagaataaaattattaataagtgtattatattaatcaaaatgatatagactttgagtaaaacaggatacctggactaactctggttggaacagttctcttgtgttgtgtctgtctccagttttgctaaaacatgagacacagagttacccctgtctcctttggattgcaattaagtcactcttctcrcattatgggtgtatgttccctccggtatcttcygaggacagtataatacgtaacatttgtgtaatagaagagatgagttattgataatagctgaagttagatcaagtagctttttgggtctacaacatgatgttcttttgagagttcaaagagaaaatgttccaatttgtcatccgactagagaaataatggtaattattcttttaacttccactgggactgatatcatgctgcatgagtgctgcataccaaagaaggttgatgtgtgctgtagtgtgagtacctttataatggaatactgatgcacctaaaaactattacttttcttttttt

SEQ ID NO: 2337 - DNA, 600 bp, Chicken  19866894089282_1
gaaaaagctatcagcatccactccacccccgagggctgctctgctgcctgcaaaatgatcttggagatcatgcagaaggaggcaaaggacacgaagacgtaaggttttcccctacccttctgtgcatgcaggttgtatccacagccccttgctgggctgttaccatcccagcactcagagctccagtttgcatgtgggagccttgctttgggagaagtgagggactctgagcaaggggacatggtgttcccctgtcactctgcacccaatccctcttctggctgctgtaacctttaattytgttgttttccttttcctctctcaagagctgatgaagtgcctctgaaaatcttggcccataacaactttgtggggcgcctgattggcaaagaagggcggaacttgaagaaagtggagcaggatactgagacaaaaatcaccatctcatcgtaaggctccttgctgtctttgggaaaagcagggcagatctttcccaacctggggcggatggaggtggagaggcacatatgagcagtctcctgtcaaccagctgggaagccagcctgtggcatgagtgctttgatccccaaggctgtcttg

SEQ ID NO: 2338 - DNA, 600 bp, Chicken  19866894089283_1
tgttagtgggaaggaaaggaagctcctcaaaaggaccttgcataatagcgaatgggagatgagaagtgaaaataacagagaagaggaaaacaaaggaagatggacctgcaaggaaaaaaggctaagggcagagcagggataaggcatctctttaactgaccaatacctttgctgctggcagtattccaagagctttataacatacatacagtgaaaatatttttcatattaatacttcacatacatcagctacctcatatctcaggttatattgctcaagttattcccaaaggaatttayctatgtgtaatatgagagaaatatatagttaggaaagaatttctttttactatttatcagcagtgcatattagagaagagctgcagttcaaaaaataggttcttttcagaagtccataagkgaacatgattttctccttcaaatgttgtcggatgttgcattttgttttcattcctttgtaaaggcaatgagtacagtttgaagaaaatatttagagtttaattctaaattgaaaagaactggctgttcatcagtgtagaagaaaaacctctaaatagaatgtgaagtcaggaaaaagac

SEQ ID NO: 2339 - DNA, 600 bp, Chicken  19866894089283_2
ctaagggcagagcagggataaggcatctctttaactgaccaatacctttgctgctggcagtattccaagagctttataacatacatacagtgaaaatatttttcatattaatacttcacatacatcagctacctcatatctcaggttatattgctcaagttattcccaaaggaatttayctatgtgtaatatgagagaaatatatagttaggaaagaatttctttttactatttatcagcagtgcatattagagaagagctgcagttcaaaaaataggttcttttcagaagtccataagkgaacatgattttctccttcaaatgttgtcggatgttgcattttgttttcattcctttgtaaaggcaatgagtacagtttgaagaaaatatttagagtttaattctaaattgaaaagaactggctgttcatcagtgtagaagaaaaacctctaaatagaatgtgaagtcaggaaaaagaccatcaaaacttaaataggaagagctcaaatattttccatctttagaattccttgatgtgtactcagggtttggaagagcagatgaaggaaacgacttttctgaaaggttgcactgcaatga

SEQ ID NO: 2340 - DNA, 600 bp, Chicken  19866894089290_1
catggtctgctggtacaacaggcttctggcttttaaagagagcagaggccaaaaaatgactccaatcattgcaggtttgaatggcacaactccacgtagccgtgcctgaggggcacgcagctccagggagacacaacaagcatctctgtccctcagcctcgcaggctgggatgcgactgtaacccagcaaagcttgcatcttgcctgctggcacatgggatgtgatcgatgagcgctcatttgtattgagctaactcagaactgaaaacctcaacctgcttttatcgtcaagacagagcrttggtgagctgccctcactgcagcgcagtagccctctcaaaargaagccatttttggctgtaattctggaaaccgaaccatgttttgcctgaaactggtacagggctgtcatcctgcaatgccttggcaccatgctgtagggtctctttgttttttgttgctttctatgtatggacaagaaacaactgctggatgtttttcttctcattgtagattttcatgcaaatttctggcagttgccagggttttatttttagaatgcacgtggttatttttagcagtcaattaaagttctcatct

SEQ ID NO: 2341 - DNA, 600 bp, Chicken  19866894089290_2
agaggccaaaaaatgactccaatcattgcaggtttgaatggcacaactccacgtagccgtgcctgaggggcacgcagctccagggagacacaacaagcatctctgtccctcagcctcgcaggctgggatgcgactgtaacccagcaaagcttgcatcttgcctgctggcacatgggatgtgatcgatgagcgctcatttgtattgagctaactcagaactgaaaacctcaacctgcttttatcgtcaagacagagcrttggtgagctgccctcactgcagcgcagtagccctctcaaaargaagccatttttggctgtaattctggaaaccgaaccatgttttgcctgaaactggtacagggctgtcatcctgcaatgccttggcaccatgctgtagggtctctttgttttttgttgctttctatgtatggacaagaaacaactgctggatgtttttcttctcattgtagattttcatgcaaatttctggcagttgccagggttttatttttagaatgcacgtggttatttttagcagtcaattaaagttctcatctataaagtgatggtgctatatcattctttccttgcagtttaact

SEQ ID NO: 2342 - DNA, 599 bp, Chicken  19866894089293_1
  misc_feature (1)..(142): n is any nucleotide
nnnnnnnnnnnnnnnnnnnnnnnnnnnnnnnnnnnnnnnnnnnnnnnnnnnnnnnnnnnnnnnnnnnnnnnnnnnnnnnnnnnnnnnnnnnnnnnnnnnnnnnnnnnnnnnnnnnnnnnnnnnnnnnnnnnnnnnnnnnnnnttatgctctgttgtatgcttccagaagaaaattaaagccttttcttcccatattaactgtttaatcatttaacaaggggtacaacacctccaccacaataataacaatgatgaatgagaggcatcatcagacatggggttcaggaatatatgggaagragagctttcaaaaatgtttggtaagctctcctgaaattgcaagcccagccctcttcctaacattcctcttttctctttcagttttgctcagggcttaacgtaagtgaaacaggttcagttatctgaaggatacaaaggagagattttcccccttcagatgggctgcctggaagcattgcattttgcagttccagtgcagaggaggactatggcctgagcccagttcttcttcctwtttgacctcattttgattttcaggagctacaaaatgttttggagtcccttaggagcagcacgga

SEQ ID NO: 2343 - DNA, 600 bp, Chicken  19866894089293_2
cacaataataacaatgatgaatgagaggcatcatcagacatggggttcaggaatatatgggaagragagctttcaaaaatgtttggtaagctctcctgaaattgcaagcccagccctcttcctaacattcctcttttctctttcagttttgctcagggcttaacgtaagtgaaacaggttcagttatctgaaggatacaaaggagagattttcccccttcagatgggctgcctggaagcattgcattttgcagttccagtgcagaggaggactatggcctgagcccagttcttcttcctwtttgacctcattttgattttcaggagctacaaaatgttttggagtcccttaggagcagcacggaaaagttggagctggagctgagttccctgaaaaaggaaaataagcacctgaaggagctgaatgagtgcagagaggcagaactgcaccagtaagtgtatctacaggaccaattaaaacaggattccrtgtaagcaaacagcttgctgttgtggatttaatttccatttatgaaagtgtggtgtgttttgtcttgctttgaatagattcaaagagcaaattcagaatgtaacctctgaa

SEQ ID NO: 2344 - DNA, 600 bp, Chicken  19866894089293_3
gaaggatacaaaggagagattttcccccttcagatgggctgcctggaagcattgcattttgcagttccagtgcagaggaggactatggcctgagcccagttcttcttcctwtttgacctcattttgattttcaggagctacaaaatgttttggagtcccttaggagcagcacggaaaagttggagctggagctgagttccctgaaaaaggaaaataagcacctgaaggagctgaatgagtgcagagaggcagaactgcaccagtaagtgtatctacaggaccaattaaaacaggattccrtgtaagcaaacagcttgctgttgtggatttaatttccatttatgaaagtgtggtgtgttttgtcttgctttgaatagattcaaagagcaaattcagaatgtaacctctgaaaaggaacgtctggaaaccaaactgaaaacagccctggatcatgtcgatcagctgcaggtacaaaacacatagcttccctcctttgcttttatggaccgtctccggtcagccacaggttctggagatttgcttcatgcagcaaaaggagcctgtgcttctcagtcataactatttgtattcacttgctgc

SEQ ID NO: 2345 - DNA, 600 bp, Chicken  19866894089294_1
ccatataaggagctaataaagttagcagctctccagtttggaggaaaaaagggcaggaggatcagaaaacatccttggggttcataccaaaagtgaaggaaacagccagaggcagcctcccatctaggagcaaacgtggataaatagaaaggcactttacagagcaagccgacagcactgctcatacatttttaacacgtaacataatgttcatgacatttctaacccagtatcttaccccaagtggtggagcttgctaaaaaaatacaagattagatagggaacaaggacagcaacagragctgtgctcgctaaaaccgtaactccctacaatcagtcctggctcagtgagggctctgctttgtgggctcacagcattgcagctgcagagtggggtgggaggcgttacactgctccccacagctggggacaccacgctgaccagacctgcacggattacagcactcacattcacagcacgcagcgattaccctcagtgtccagtaagcatccagcttgctttgctttgtgcacagaaatggtgtgttgctcagacaagagctctcagacactcagggctctgctttgttcaaaccagtc

SEQ ID NO: 2346 - DNA, 600 bp, Chicken  19866894089294_2
catgaggcattttattgacatgcctttcctgctcattgactatatttattaacacaacagtatggaagctgaatatcaaattgccagccaagcttttatctcattttttaagccagcctgaatcgctgtgctaattttattgcttacccattacattttatgcaatggataattttctccgaaaaggaattggtgctttttgatatttgggctcatgtgttgccaagacagaggatactggctaatgtgctgataacgctttgaacatgaagcctgattctgaatcctaagcaacaacaytaagtataggatttgaattaataaagctattgatttcagtccttgccttttacagggtagcgctccaagtcttcacgatgtgttaactctgtccctttgagtcactgcatcagctgtaccaggattctctgactccttttcaagcactgctcccagccagactccatgctgttctcatccacacaacgcaggggatgagagctgctgcaaaataatgccactgtggccaatggctgagcatcagttaccttctgcagcacagcaaacgcagctcaggagctcctggaatttggtttatgc

SEQ ID NO: 2347 - DNA, 590 bp, Chicken  19866894089294_3
gcaaaataatgccactgtggccaatggctgagcatcagttaccttctgcagcacagcaaacgcagctcaggagctcctggaatttggtttatgctgaacccatttgtgtatatatatatatatataaaagcacacttccgttttcaaaatacgttgctacccaaaaatagatgtttcttcaacagcagagcacggagcaattgctaagccatgcaagcaaaacaccatgtacagccagaggactgcaaaagaactcactcttgcttactgcatagtagaattttttggaattaatacctratttttcacccactgtggaaaaaaaaataggaacattacagcgccagcttctgccctggttccttttgcccccaaacatctctgcaatcacatcctgaagtgctgtacctgctagttttttttccaaacatgaagcatttcatcctctaggcagagggcttcagtcttccaggctgtgaaacagaacatttcaggggaataagatgaaaaaaaagaaaagccccccagccccacctgatttgactactgcaaaggatacaaacctcctgggagtggagagatcactgtat

SEQ ID NO: 2348 - DNA, 600 bp, Chicken  19866894089296_1
ctacttaatcaagctgcaccaggaccagactcccctgggtgaaaggtttggactctgctactcttttactcctgcacaaacctttctagggcagtgatgagtctagtcttgagacagaccacaagctatatttgataaaaaaaacagcttaaagagttgagatttactgaaatcagatggaaacaccggcagcagaacaactctgaaagtcatcttcagtgatagacaacatcacagtaaatgacaatatgtattcgttagagtcaggcatccatctgttcattatgaaaaactcttctyrtgaatgagtgtttttggcatttccacaaataaatctgtggtctgctctctgccttttctcatacagaaagtttaggtagtsgttagctgtcacttctgtgatgctgtgttatgttcyaccacccacaagaygacgtaagaacctgaaaagtcaccataaggaaaagaaggtgagaaaggcaaagtcaaagagtaattttaaagaacgtacttctccccactgggtgatactggtgatgatccatgtctttgctacacagctagcttagaagatttgatcatttatggtattccttttga

SEQ ID NO: 2349 - DNA, 600 bp, Chicken  19866894089296_2
tacttaatcaagctgcaccaggaccagactcccctgggtgaaaggtttggactctgctactcttttactcctgcacaaacctttctagggcagtgatgagtctagtcttgagacagaccacaagctatatttgataaaaaaaacagcttaaagagttgagatttactgaaatcagatggaaacaccggcagcagaacaactctgaaagtcatcttcagtgatagacaacatcacagtaaatgacaatatgtattcgttagagtcaggcatccatctgttcattatgaaaaactcttctyrtgaatgagtgtttttggcatttccacaaataaatctgtggtctgctctctgccttttctcatacagaaagtttaggtagtsgttagctgtcacttctgtgatgctgtgttatgttcyaccacccacaagaygacgtaagaacctgaaaagtcaccataaggaaaagaaggtgagaaaggcaaagtcaaagagtaattttaaagaacgtacttctccccactgggtgatactggtgatgatccatgtctttgctacacagctagcttagaagatttgatcatttatggtattccttttgaa

SEQ ID NO: 2350 - DNA, 600 bp, Chicken  19866894089296_3
tttctagggcagtgatgagtctagtcttgagacagaccacaagctatatttgataaaaaaaacagcttaaagagttgagatttactgaaatcagatggaaacaccggcagcagaacaactctgaaagtcatcttcagtgatagacaacatcacagtaaatgacaatatgtattcgttagagtcaggcatccatctgttcattatgaaaaactcttctyrtgaatgagtgtttttggcatttccacaaataaatctgtggtctgctctctgccttttctcatacagaaagtttaggtagtsgttagctgtcacttctgtgatgctgtgttatgttcyaccacccacaagaygacgtaagaacctgaaaagtcaccataaggaaaagaaggtgagaaaggcaaagtcaaagagtaattttaaagaacgtacttctccccactgggtgatactggtgatgatccatgtctttgctacacagctagcttagaagatttgatcatttatggtattccttttgaaaaagytgatctgcattctgagctgacttatctagagctagaaaaatcctaactgaagtaaccaggcttctgacaatactca

SEQ ID NO: 2351 - DNA, 600 bp, Chicken  19866894089296_4
ccacaagctatatttgataaaaaaaacagcttaaagagttgagatttactgaaatcagatggaaacaccggcagcagaacaactctgaaagtcatcttcagtgatagacaacatcacagtaaatgacaatatgtattcgttagagtcaggcatccatctgttcattatgaaaaactcttctyrtgaatgagtgtttttggcatttccacaaataaatctgtggtctgctctctgccttttctcatacagaaagtttaggtagtsgttagctgtcacttctgtgatgctgtgttatgttcyaccacccacaagaygacgtaagaacctgaaaagtcaccataaggaaaagaaggtgagaaaggcaaagtcaaagagtaattttaaagaacgtacttctccccactgggtgatactggtgatgatccatgtctttgctacacagctagcttagaagatttgatcatttatggtattccttttgaaaaagytgatctgcattctgagctgacttatctagagctagaaaaatcctaactgaagtaaccaggcttctgacaatactcaagagcaacgctgctgacaatcagaccttaacaaatc

SEQ ID NO: 2352 - DNA, 600 bp, Chicken  19866894089296_5
tgataaaaaaaacagcttaaagagttgagatttactgaaatcagatggaaacaccggcagcagaacaactctgaaagtcatcttcagtgatagacaacatcacagtaaatgacaatatgtattcgttagagtcaggcatccatctgttcattatgaaaaactcttctyrtgaatgagtgtttttggcatttccacaaataaatctgtggtctgctctctgccttttctcatacagaaagtttaggtagtsgttagctgtcacttctgtgatgctgtgttatgttcyaccacccacaagaygacgtaagaacctgaaaagtcaccataaggaaaagaaggtgagaaaggcaaagtcaaagagtaattttaaagaacgtacttctccccactgggtgatactggtgatgatccatgtctttgctacacagctagcttagaagatttgatcatttatggtattccttttgaaaaagytgatctgcattctgagctgacttatctagagctagaaaaatcctaactgaagtaaccaggcttctgacaatactcaagagcaacgctgctgacaatcagaccttaacaaatcctcagcttctatac

SEQ ID NO: 2353 - DNA, 600 bp, Chicken  19866894089296_6
gagtgtttttggcatttccacaaataaatctgtggtctgctctctgccttttctcatacagaaagtttaggtagtsgttagctgtcacttctgtgatgctgtgttatgttcyaccacccacaagaygacgtaagaacctgaaaagtcaccataaggaaaagaaggtgagaaaggcaaagtcaaagagtaattttaaagaacgtacttctccccactgggtgatactggtgatgatccatgtctttgctacacagctagcttagaagatttgatcatttatggtattccttttgaaaaagytgatctgcattctgagctgacttatctagagctagaaaaatcctaactgaagtaaccaggcttctgacaatactcaagagcaacgctgctgacaatcagaccttaacaaatcctcagcttctatacccagcagttctagagcctggaacccactactggttgtacagcatttgccaccctgcaccctcagcgcagtggaggcaatctccaaatcaaccccagcactaaaaccagactttcaactgctgtatgtatttctctatgcgtctcagttccttcatacagattgatgtggaaatg

SEQ ID NO: 2354 - DNA, 600 bp, Chicken  19866894089298_1
tggctgtttgaaacttgccatgcatttactttgctaactgaaattttacttctggtttagtttcttggtttttttctttttttctttatagtacaaggttggtcaaaagcaagtggaatgaaagaaggtcctaactctttgcaagagcctcaataaggttatagaattttcaggggaagtttcagtttgctttttgtttaatgttattttcctaaatgttcctgagactgaggaaaacgaacctcaatcctttaatgagtgtgggcttcctgagttttccccttccctgcatctgaaatwcctttacctacctctagtcaaaaatggaactgttttgggttttgtggtttcaccatcatttcaggattttattcattgactgatgtttacagtctcccatcaaaggtcaaaaagaatcttttctttctktctgtcttttctgtttttgttttcaaaaacggaagacaggaaattatcttagcagaaaaattacttcttaaattaatcaagctattatgattgagcctgtttgtttggccattaaaaaaaaaaaaaaaaaaraagcagatcagtttttgccaaataaaacactctcagcta

SEQ ID NO: 2355 - DNA, 600 bp, Chicken  19866894089298_2
cctaactctttgcaagagcctcaataaggttatagaattttcaggggaagtttcagtttgctttttgtttaatgttattttcctaaatgttcctgagactgaggaaaacgaacctcaatcctttaatgagtgtgggcttcctgagttttccccttccctgcatctgaaatwcctttacctacctctagtcaaaaatggaactgttttgggttttgtggtttcaccatcatttcaggattttattcattgactgatgtttacagtctcccatcaaaggtcaaaaagaatcttttctttctktctgtcttttctgtttttgttttcaaaaacggaagacaggaaattatcttagcagaaaaattacttcttaaattaatcaagctattatgattgagcctgtttgtttggccattaaaaaaaaaaaaaaaaaaraagcagatcagtttttgccaaataaaacactctcagctatttcaattactgttttaactggccaggcctgccttttagattagcctctaatctgtacaagaatgtagtttggaaaagatgagacatgcacaaactggagactgcattcatcacttcagcacgttctgg

SEQ ID NO: 2356 - DNA, 600 bp, Chicken  19866894089298_3
tgggcttcctgagttttccccttccctgcatctgaaatwcctttacctacctctagtcaaaaatggaactgttttgggttttgtggtttcaccatcatttcaggattttattcattgactgatgtttacagtctcccatcaaaggtcaaaaagaatcttttctttctktctgtcttttctgtttttgttttcaaaaacggaagacaggaaattatcttagcagaaaaattacttcttaaattaatcaagctattatgattgagcctgtttgtttggccattaaaaaaaaaaaaaaaaaaraagcagatcagtttttgccaaataaaacactctcagctatttcaattactgttttaactggccaggcctgccttttagattagcctctaatctgtacaagaatgtagtttggaaaagatgagacatgcacaaactggagactgcattcatcacttcagcacgttctggtccaagtgtcatcccatgacagtgaaagtagcaggtcctgtgtcagcttccttccatagattccatgcaagacacattgcctgcatcattgtaaggaaaaaaaactgaaggtgaaagctgaaaaactctgca

SEQ ID NO: 2357 - DNA, 600 bp, Chicken  19866894089305_1
cagagttttaaagactgccaagctctatgcttcttatcctgacctaatttagatatcttcataagccaatattggggaaaaaggataaagtagaagattctactcatcaagaatgccaaaaatattaagggactcgtattttataatattgtgcatatgaagcaatacattcagactcctttatttcaaagaatcataaatttattatgttaaaagcagaagtttgaactgaaaatgttttcctacaaattctttcatttactgttgagggtttatttggttgtttagtgttggaagcayctctttgttttgaagtgttgatctttcaatgacatgacatgaatacaatatagcctttcacaaataagtcccacgggattctgtaaaaaaatttatgtgatcgaaatgatctatgtatttaaataaaaacaargaactgactgcaacaatagataacagctaaaattgaagataaaacttctgggatgtactggggacaaaatttgaaactacagaggctcacatttgttcttttccttggtatgtgattattcagatagatggaagattttctggaaattctaattctcttcgaaaata

SEQ ID NO: 2358 - DNA, 600 bp, Chicken  19866894089305_2
tcgtattttataatattgtgcatatgaagcaatacattcagactcctttatttcaaagaatcataaatttattatgttaaaagcagaagtttgaactgaaaatgttttcctacaaattctttcatttactgttgagggtttatttggttgtttagtgttggaagcayctctttgttttgaagtgttgatctttcaatgacatgacatgaatacaatatagcctttcacaaataagtcccacgggattctgtaaaaaaatttatgtgatcgaaatgatctatgtatttaaataaaaacaargaactgactgcaacaatagataacagctaaaattgaagataaaacttctgggatgtactggggacaaaatttgaaactacagaggctcacatttgttcttttccttggtatgtgattattcagatagatggaagattttctggaaattctaattctcttcgaaaatattaagaaaatgtctccatccaatggatggattgcttacaaatgtaagaaaatatgcctttatgttgaacctctacccataattaacttgttaactctttatcactgataacttcaaaattaggagttgtaagc

SEQ ID NO: 2359 - DNA, 600 bp, Chicken  19866894089314_1
ccatctgagccaacctctgtggtggcttgagaatacagcacagctttctcagcaccaatgtttctatgctgctgttaatgcagaggagtttgcaaaattgttgtcttagccttcaaagaagataggccccttaccacaggttttaaggtgtcaaagcaaacaatttctgctttctgacctcccatctcactctctttattgctgcttctcagagggacttaacgccgaatacgtgaaaggggagaacatggaagctgtcgtaagcgaggagccccaaggtgagggcctggccacaaaggscatggggtgctctgggagccactccagtgactctgggaaggcactgctcgggttatgctgcagctttttgtgtaatacccactgygatgtttttcctgctttattatacacaaagggaagccacgatgagagaccaagggtcccattctgcaaatggtggcagttgatgttgagctttaatgttttcagccaccagaagtgcctcgcaccagaagtgtgctccttccttcagccacagataaggaaggctgctgtaaaagctgagattggatacaaatgagtggcatttggcacctgttg

SEQ ID NO: 2360 - DNA, 600 bp, Chicken  19866894089314_2
gagtttgcaaaattgttgtcttagccttcaaagaagataggccccttaccacaggttttaaggtgtcaaagcaaacaatttctgctttctgacctcccatctcactctctttattgctgcttctcagagggacttaacgccgaatacgtgaaaggggagaacatggaagctgtcgtaagcgaggagccccaaggtgagggcctggccacaaaggscatggggtgctctgggagccactccagtgactctgggaaggcactgctcgggttatgctgcagctttttgtgtaatacccactgygatgtttttcctgctttattatacacaaagggaagccacgatgagagaccaagggtcccattctgcaaatggtggcagttgatgttgagctttaatgttttcagccaccagaagtgcctcgcaccagaagtgtgctccttccttcagccacagataaggaaggctgctgtaaaagctgagattggatacaaatgagtggcatttggcacctgttgcttgcagtcatgtacaattgtgtactgtcatactaatgacttttactttcttccctagttaaatactcagtactggaaacacagt

SEQ ID NO: 2361 - DNA, 566 bp, Chicken  19866894089315_1
gctgctttggtactgggtcctcttgcctctcccagtgctcagcttggggtctcagtttcctatttaaaagggaatggcagagcaggcaaagacagatttccaagaaaccaagcaatgctatcctaccagagccccactggccacctcccacctcacagcagttttgctgagcagggcacaagagaactggggcctggagctggacccagtgaacctgatgggtcccttccaactggggatactctgtgattctttgcccctctttattcccttggatctgaatggctgcaggatggggaygggagcactaaagcttgtgcaaaccatcactgccttgagccccagctcctggctgagccctaaagccctcctgtgtccccctttcaccacggctctgtcctgcagatcgatcagatgtttgctgccttccctccagacgtctccggcaacctcgactacaaaaacctcgtccacgtcatcacacacggagaggagaaggactaacccatggggttagcactgtggggtcacctctgtgtgggtcactctgcaggtccctttgtccc

SEQ ID NO: 2362 - DNA, 600 bp, Chicken  19866894089316_1
ggatcaacacgccagataagaaacaatttttttggtgacaacttcacccttttgatcaggctgaggcagagttgaggcaggtggtgctacagtgtacctgaatgccttgtgctggagactaagcacatggggtacacagcccttgccttgtctaaggacaccctgaccagcagggcatctctaggagcagaaaggacagaattagtgctggaaatgctcgtgacttcatctatgccttcgctttaccatctgcttccctcaaacctgctatcctagagtcatgtgattgcaagaaaatgyaaaaaaaaagagcaaactgtactatttcatgctttatgaaaggcatttaaagctctgcaagtggctctgcggggagtaaggtacagcaggaagagaagcgtgggtgattccagactcacggtggggtttaacagatttgcttggagctaacaaagaaaatctcatcatcttacacataggattgtgcaggcaatgaaggacttcagagacactccccccttcctcatcctaactccccctccaagtgctagaaccagggcaatacagaaagtagccctgagtggcccagrgaggagagca

SEQ ID NO: 2363 - DNA, 600 bp, Chicken  19866894089316_2
aagaaaatgaaaaaaaaaagagcaaactgtactatttcatgctttatgaaaggcatttaaagctctgcaagtggctctgcggggagtaaggtacagcaggaagagaagcgtgggtgattccagactcacggtggggtttaacagatttgcttggagctaacaaagaaaatctcatcatcttacacataggattgtgcaggcaatgaaggacttcagagacactccccccttcctcatcctaactccccctccaagtgctagaaccagggcaatacagaaagtagccctgagtggcccagrgaggagagcaggggcactccatgctgcacaggcacttccccctctggaaggaataacccatcatatcccattgcttcttccgcctaattttaacagcagatatcctgggatataaggaatgatctgtcaccagtcaggctcagcactgactgatgtcagtgagcactgtgttactccagtaccacgcgtttctgtgtctgcatttagttcttcaggacttaaagagcacatcaggtaggatcttcttgactaggcctcttgacaaagatgcatttcaaaacatgccctgcccaggacttc

SEQ ID NO: 2364 - DNA, 600 bp, Chicken  19866894089320_1
atcagttgtttagcaggcacccgttgtgcctgtgcccacaaatgggtgaaatttgatgctccaaaatttaatcaaatcaaaacatggttaagggtttccttcacgtttactgaagctaatattattcatcaaaatgctgatagaaaaaatggatgcaagtgaagttgctattaattggatggtacaattggtcttgtaatgggataagtttcaaatcagaaataagatcttgagagctcaatggaaaacatctgctcaggtctgagcagtgatcaggaaagcataaatattaaatggcaygacattaatttgctgaatagaggacaacactggaaaatatgacagtgttgttctagagatggtgatgtggcctcaccttgagaggcgtgtttggtttggttaccctaattaaaaaatgatagagcaggaaatagaagaggttcagtgaagggcaacaaacctaatcagaagcatggaaaatacttcagtgagaagatttgcatgcaggcagagactgcaaaggttaggtctgtttattttagggaatacaatacatgagttgttccactgagagacacactatgatggatataaataaaa

SEQ ID NO: 2365 - DNA, 600 bp, Chicken  19866894089323_1
gaagttcacaagtgtcttcattaccaccttactgaagttttcttatgtgtttctagtctacacaccacatgtttcacacagtcatgcaaatctgaaaccaattcagaatggtgaggaaatagggaagtccattcactgcaaagatacatttttcacagaagagccaggctgggtaggaccaaacactgcgggattcttcatgggagtaggggtgggttagaaaccatgaaccttcagttgttcttccttgacaatgccaatctacaggagaaaagcaacaaacttcagtagagcttccaygcggaagatattgtggtattaagtcactgcaatcttctactttgattaaagaaactgaaatacrgtatatactcaagaaagcagtgttgctttctggactgtttccgggccacagagaagaattyactacgcaaaaaataaaatcctgtcagatgttggtcttattgtgtagtcctagcactcagtcttcaatggcttagaacccctgcattgtgatttacatcagtaagatagtggtgacagcttcattctccagagaagcaccagttaaaaaattatggtttgcatcaagcacttgat

SEQ ID NO: 2366 - DNA, 600 bp, Chicken  19866894089323_2
ccacatgtttcacacagtcatgcaaatctgaaaccaattcagaatggtgaggaaatagggaagtccattcactgcaaagatacatttttcacagaagagccaggctgggtaggaccaaacactgcgggattcttcatgggagtaggggtgggttagaaaccatgaaccttcagttgttcttccttgacaatgccaatctacaggagaaaagcaacaaacttcagtagagcttccaygcggaagatattgtggtattaagtcactgcaatcttctactttgattaaagaaactgaaatacrgtatatactcaagaaagcagtgttgctttctggactgtttccgggccacagagaagaattyactacgcaaaaaataaaatcctgtcagatgttggtcttattgtgtagtcctagcactcagtcttcaatggcttagaacccctgcattgtgatttacatcagtaagatagtggtgacagcttcattctccagagaagcaccagttaaaaaattatggtttgcatcaagcacttgatttacaaacgagaacttgagttgcactgccagaaaacaaaaggtacgttgtagcagggtaaatgc

SEQ ID NO: 2367 - DNA, 600 bp, Chicken  19866894089323_3
agtccattcactgcaaagatacatttttcacagaagagccaggctgggtaggaccaaacactgcgggattcttcatgggagtaggggtgggttagaaaccatgaaccttcagttgttcttccttgacaatgccaatctacaggagaaaagcaacaaacttcagtagagcttccaygcggaagatattgtggtattaagtcactgcaatcttctactttgattaaagaaactgaaatacrgtatatactcaagaaagcagtgttgctttctggactgtttccgggccacagagaagaattyactacgcaaaaaataaaatcctgtcagatgttggtcttattgtgtagtcctagcactcagtcttcaatggcttagaacccctgcattgtgatttacatcagtaagatagtggtgacagcttcattctccagagaagcaccagttaaaaaattatggtttgcatcaagcacttgatttacaaacgagaacttgagttgcactgccagaaaacaaaaggtacgttgtagcagggtaaatgcgctctaaagcaacctttttgctcaaggtctactcatcctgcaactgtcattctactttttg

SEQ ID NO: 2368 - DNA, 600 bp, Chicken  19866894089327_1
atcatagaatggcctgggttgaaaaggaccacaacgatcatctagtttcaacccccctgctatgtgcagggtctccagccactaggtcatctagtccaaccttcaaaccactgctactttgtcacctgacactttgtgacttccgccactgccaccaggctgcagatacagccagtgcggtgctgagatattgcagttcacacaacagcttaacctatgatggaggtggcattgcctcccctaccacctcattagtgctgctgaaactccactgctgacagctggatctgtaggactttytactgcatcgatccttgctgctcagaagtttgcaccatagcccccactggcttggaatatatctaggggtgtatatatcatggtggttaggatgaacatcagtgggggaattggggaatactgactcatggattttgaggaaaccacgtagagataaaactccattatagactgtaagcagaaatcagggataaagacaaggaaaaggtgggcaaaaacactgtcaatatgagctacctcttctagttgaaaggcaactttcatataaagaagaaaggggagaagcaactctctctgaat

SEQ ID NO: 2369 - DNA, 600 bp, Chicken  19866894089328_1
aacagcttggattagttgctgagagaaggaaaaacagatgagaggggttactaggctgggatttgtttcccagaagaataaatccagggaattatctgagagagagagattcaggaaagaaattatgcagaattactgtcatcagagcacaaacgagttcccaaacggcttgggaagttaagatcaggacaggaggtgactgcagcttggaaatgcaagacgtggggtaaagagccaaaccttcgagccgcagaaggcagaaagctgaaactgcagcttagtctggaaaaaggatttggrgaagcgaggcaaggcagacctccactgtagcagatgcagcagagcaagcaggggagaaattgggtgtgcagtgttcattatgtttgctctgtaggggtttcagctgggatcccgaggcctgtacggtcgcctatctctttcctcagatgcctgaatctctacatggagccaaaataatgtgtgttgggctggcagcgggcttcttctgctcttcctgtgcatagagatattccctctattgctgtcagccctgtgtttacctgcttaaaacatgaacgcaaacctttgggagctcaagaa

SEQ ID NO: 2370 - DNA, 599 bp, Chicken  19866894089335_1
  misc_feature (1)..(9): n is any nucleotide
nnnnnnnnncagagagagaacacgagctgctggtttgctctgtgcagcagtttccccattgtctaagactgtaacaagtggtgtctgcaaatcagcaagctctgtttgacactatataaatagaaacaagaggctttgggctctaaatcagcattacaccagcgttctgactgctggagacctcccttcctggaaccagtcactgcttcagagatttttcacaacttcaggctgacagctatggcttaacagcacacatacaatgttccagaggtcattaaagactttactgctggtcaytgtagtactgaaacaaaactgtgttttcatggcagtgctcttacctaattacgccagaagtttaatagcaagaagtgcactatgtagatattccaaaatatgtcagtgtaaagatgaggggaaaaaaaaaaaaactatcatcaacaaaattgatgttttaacgaccactggaagtttctgcaacagactctggtcaaattcagtgtaaagtagaaagtgtcctggcactgacatccaagaaacaatcaaacgtttagatcatgttgaagattcatggttaccattgagggcctctcaaa

SEQ ID NO: 2371 - DNA, 600 bp, Chicken  19866894089335_2
gaaacaagaggctttgggctctaaatcagcattacaccagcgttctgactgctggagacctcccttcctggaaccagtcactgcttcagagatttttcacaacttcaggctgacagctatggcttaacagcacacatacaatgttccagaggtcattaaagactttactgctggtcaytgtagtactgaaacaaaactgtgttttcatggcagtgctcttacctaattacgccagaagtttaatagcaagaagtgcactatgtagatattccaaaatatgtcagtgtaaagatgaggggyaaaaaaaaaaaactatcatcaacaaaattgatgttttaacgaccactggaagtttctgcaacagactctggtcaaattcagtgtaaagtagaaagtgtcctggcactgacatccaagaaacaatcaaacgtttagatcatgttgaagattcatggttaccattgagggcctctcaaaaaacgtgactcagaattcaagattgaaaccagattttcctagcagtaacctaaaaagcattactgatgtaaaacctgctcttaaaacaagagaatatcattaaagctggatcaggaaacagga

SEQ ID NO: 2372 - DNA, 453 bp, Chicken  19866894089335_3
attcatggttaccattgagggcctctcaaaaaacgtgactcagaattcaagattgaaaccagattttcctagcagtaacctaaaaagcattactgatgtaaaacctgctcttaaaacaagagaatatcattaaagctggatcaggaaacaggagctgctcatggaacttgaagactgcaaaaaaaaccttcttttattaagttgagaagcgtgacatcacaagtacagcaatattcagttcctgactgttaacgttatcataatatgcagtaagaaaagttctggggaacagatgctaamatcctcagtactgcctatcagactgaccacaaycacaggatggatttgtatttatttatttactacctgcacctccctcacacttctcacttcctttctgagttacaggactaaaaccatgtaaaagcagacaggagaggataacactcacaa

SEQ ID NO: 2373 - DNA, 420 bp, Chicken  19866894089335_4
cgtgactcagaattcaagattgaaaccagattttcctagcagtaacctaaaaagcattactgatgtaaaacctgctcttaaaacaagagaatatcattaaagctggatcaggaaacaggagctgctcatggaacttgaagactgcaaaaaaaaccttcttttattaagttgagaagcgtgacatcacaagtacagcaatattcagttcctgactgttaacgttatcataatatgcagtaagaaaagttctggggaacagatgctaamatcctcagtactgcctatcagactgaccacaaycacaggatggatttgtatttatttatttactacctgcacctccctcacacttctcacttcctttctgagttacaggactaaaaccatgtaaaagcagacaggagaggataacactcacaa

SEQ ID NO: 2374 - DNA, 600 bp, Chicken  19866894089336_1
actgtcctgatcctttaagcaattttgacaactgtgaaggaaaatcaccttttcagaagtaggcattgtgactgctttggttctgagatgagttttattttcctgatcagtaaactgaggtacttctgcttgtacacataaaatggtaatgcatatttttaatagtgtctcactatgtacaactcctatattctctttagttctgaaggagctttgtctgtgggcatttttggctcaacctgtaatggattttgcagtagaaaactgcaagtctcacattactgctagctcaaatggacyctttggctttaattcctcttaatgatagatattgccaaatatttcttcatcattttcttaattatgcaaacataggtttagatgaaagtgatgactgctgacaaatttattaaccaaaccttagcaatttaaaggtaccctttcataaacttttctcttattcttcactggtgcaaaaatgtttgattctgaattaccaagagctgcagagaagatatgactgctggtcataccacaaaatgaaaagaaggagaaacgtagtgagaaagctcaaaatatcactataataaaaactgcata

SEQ ID NO: 2375 - DNA, 599 bp, Chicken  19866894089346_1
  misc_feature (1)..(174): n is any nucleotide
nnnnnnnnnnnnnnnnnnnnnnnnnnnnnnnnnnnnnnnnnnnnnnnnnnnnnnnnnnnnnnnnnnnnnnnnnnnnnnnnnnnnnnnnnnnnnnnnnnnnnnnnnnnnnnnnnnnnnnnnnnnnnnnnnnnnnnnnnnnnnnnnnnnnnnnnnnnnnnnnnnnnnnnnnnnnnntccttgcatgctgaggccttggtgttctgctgtctttgctgcactttctgtagtgttacaccatcattacgcaaagggagcctcaggaacaaggggaggaacatgctggtgtctggacagccctgwgaggtagggagcagcaccccaggagccctgcaaggaccagaaatgtcattcccttcagtctctgtctacaggcaaaccaagcacagcagctaagatgctttttagtgagctgaattaccacatttgcaggcagctttaagcttctgtcttctttatagcatggatttggatcccagacatcctacagtgcccagctcctgctggtgcaaatggagccagctactcctgcccagctccatcagcagtggcctcgggacagttcatctcaaagcagcctgtccccatgacctgtgtgacca

SEQ ID NO: 2376 - DNA, 599 bp, Chicken  19866894089351_1
  misc_feature (1)..(24): n is any nucleotide
nnnnnnnnnnnnnnnnnnnnnnnnaaaactgtaagagctttaaaattaatataatgaatgtctttaataacacatatcattacatagtaaataaagaagcaaataagtaacaggcaaaagtaagtcaaggtcagtgtggatgaaatttcctggtatcctaagcaatttgttaacatcattgacatttttcaaaactgaattttaattaggtttaagtatcaaactcatgaagacattccagaaatatttacattcaatagcttgtgatgtaaataagggataaacatacaatcatgtaasgtaacasagtgtgttatgcagtataattactgtaggtgtcttttatgaaagactatctcttgtgcyttttgccaatagaaataaaataactagaaatactattcaaatatgttttgattttgattgttttgggaagggatgttttttggctttatctagtttgtttgtattttcatttgtttggttgttgtttttttttactttctagatagtatagtgtagcatccaagcacatgatgttgtacttgggtcagggtaatcccaggcatcagtacagactgagagaagaactccttgag

SEQ ID NO: 2377 - DNA, 599 bp, Chicken  19866894089351_2
  misc_feature (1)..(17): n is any nucleotide
nnnnnnnnnnnnnnnnnaaaactgtaagagctttaaaattaatataatgaatgtctttaataacacatatcattacatagtaaataaagaagcaaataagtaacaggcaaaagtaagtcaaggtcagtgtggatgaaatttcctggtatcctaagcaatttgttaacatcattgacatttttcaaaactgaattttaattaggtttaagtatcaaactcatgaagacattccagaaatatttacattcaatagcttgtgatgtaaataagggataaacatacaatcatgtaasgtaacasagtgtgttatgcagtataattactgtaggtgtcttttatgaaagactatctcttgtgcyttttgccaatagaaataaaataactagaaatactattcaaatatgttttgattttgattgttttgggaagggatgttttttggctttatctagtttgtttgtattttcatttgtttggttgttgtttttttttactttctagatagtatagtgtagcatccaagcacatgatgttgtacttgggtcagggtaatcccaggcatcagtacagactgagagaagaactccttgagagcagcc

SEQ ID NO: 2378 - DNA, 600 bp, Chicken  19866894089351_3
ataacacatatcattacatagtaaataaagaagcaaataagtaacaggcaaaagtaagtcaaggtcagtgtggatgaaatttcctggtatcctaagcaatttgttaacatcattgacatttttcaaaactgaattttaattaggtttaagtatcaaactcatgaagacattccagaaatatttacattcaatagcttgtgatgtaaataagggataaacatacaatcatgtaasgtaacasagtgtgttatgcagtataattactgtaggtgtcttttatgaaagactatctcttgtgcyttttgccaatagaaataaaataactagaaatactattcaaatatgttttgattttgattgttttgggaagggatgttttttggctttatctagtttgtttgtattttcatttgtttggttgttgtttttttttactttctagatagtatagtgtagcatccaagcacatgatgttgtacttgggtcagggtaatcccaggcatcagtacagactgagagaagaactccttgagagcagccctaccaagaaggacttgggggtcctggtggacaagaagcttgacatgagccagctatgtg

SEQ ID NO: 2379 - DNA, 600 bp, Chicken  19866894089358_1
ctagcaaaacatgttgcttaaatatttgttaagctttatgcttatggatatttcctgtgaactcaaagaatgttgttcttgatagcttcatagcatcatagaaacttgttgaaaaacttgtagaattggatctgaggtataatgcttggaacatgatcatggatcatctgtattattaattcacatcttttcctctttgaatgcaaaggaactgcctccttaaagctgatgtgatttgctgcagacagagaggaaagccttagcttttgtaactgcctttttccccacatacatgtcttyaactaagtttttatgaaggagtgcacaacttcttytctatgctgttctgaatcccaaattgctcacacaatggcagctcttcctgttctgaacaaggagagaggtctttcccaatggtgcaaatgtacccatgccagcatctctatgtggacaaacagtgtaccttcagtgttttgagctagcgaacaatgtaatagcatctattacctgaaatttcattatttttagttaaccgtgtggaagaaaacaagtggccctgctgtccacacatggcacttctatctgcccaggctgcagccc

SEQ ID NO: 2380 - DNA, 600 bp, Chicken  19866894089358_2
ttatgcttatggatatttcctgtgaactcaaagaatgttgttcttgatagcttcatagcatcatagaaacttgttgaaaaacttgtagaattggatctgaggtataatgcttggaacatgatcatggatcatctgtattattaattcacatcttttcctctttgaatgcaaaggaactgcctccttaaagctgatgtgatttgctgcagacagagaggaaagccttagcttttgtaactgcctttttccccacatacatgtcttyaactaagtttttatgaaggagtgcacaacttcttytctatgctgttctgaatcccaaattgctcacacaatggcagctcttcctgttctgaacaaggagagaggtctttcccaatggtgcaaatgtacccatgccagcatctctatgtggacaaacagtgtaccttcagtgttttgagctagcgaacaatgtaatagcatctattacctgaaatttcattatttttagttaaccgtgtggaagaaaacaagtggccctgctgtccacacatggcacttctatctgcccaggctgcagccctgygcaggtaggcagtggtcactattgggcacatt

SEQ ID NO: 2381 - DNA, 600 bp, Chicken  19866894089358_3
taagtttttatgaaggagtgcacaacttcttytctatgctgttctgaatcccaaattgctcacacaatggcagctcttcctgttctgaacaaggagagaggtctttcccaatggtgcaaatgtacccatgccagcatctctatgtggacaaacagtgtaccttcagtgttttgagctagcgaacaatgtaatagcatctattacctgaaatttcattatttttagttaaccgtgtggaagaaaacaagtggccctgctgtccacacatggcacttctatctgcccaggctgcagccctgygcaggtaggcagtggtcactattgggcacattttccctgttcacattgctttctgctcrtagctctttaacattgttgtggtatggggctagtggaaaaaaaaccaaacctgtaagtcagctacacacggacacaagtgcttccactttcattttttgctcaaaccttgctgtctgcttttccacttaaactgaccagagcactgaatctgygatcacagagcatacctggtaaccacagcaatagtaaagcaatgtgcggaaaatatttcaaatgcttaaatttgctttaacgacatct

SEQ ID NO: 2382 - DNA, 600 bp, Chicken  19866894089358_4
tcacacaatggcagctcttcctgttctgaacaaggagagaggtctttcccaatggtgcaaatgtacccatgccagcatctctatgtggacaaacagtgtaccttcagtgttttgagctagcgaacaatgtaatagcatctattacctgaaatttcattatttttagttaaccgtgtggaagaaaacaagtggccctgctgtccacacatggcacttctatctgcccaggctgcagccctgygcaggtaggcagtggtcactattgggcacattttccctgttcacattgctttctgctcrtagctctttaacattgttgtggtatggggctagtggaaaaaaaaccaaacctgtaagtcagctacacacggacacaagtgcttccactttcattttttgctcaaaccttgctgtctgcttttccacttaaactgaccagagcactgaatctgygatcacagagcatacctggtaaccacagcaatagtaaagcaatgtgcggaaaatatttcaaatgcttaaatttgctttaacgacatctagcaactggaaacaaccaaactctcatgtggatcagtgcgttctttgcagaccataagt

SEQ ID NO: 2383 - DNA, 509 bp, Chicken  19866894089358_5
tcattatttttagttaaccgtgtggaagaaaacaagtggccctgctgtccacacatggcacttctatctgcccaggctgcagccctgygcaggtaggcagtggtcactattgggcacattttccctgttcacattgctttctgctcrtagctctttaacattgttgtggtatggggctagtggaaaaaaaaccaaacctgtaagtcagctacacacggacacaagtgcttccactttcattttttgctcaaaccttgctgtctgcttttccacttaaactgaccagagcactgaatctgygatcacagagcatacctggtaaccacagcaatagtaaagcaatgtgcggaaaatatttcaaatgcttaaatttgctttaacgacatctagcaactggaaacaaccaaactctcatgtggatcagtgcgttctttgcagaccataagttaccattaccccactgcagcgccttgccccgctccctcactctcatccatgtcccatgctgg

SEQ ID NO: 2384 - DNA, 600 bp, Chicken  19866894089359_1
gtgtgagcggatgtgcttcgccctgggaagggtgaagttgggaagccattcgtgtacccctggcactgtggagcttcagatgagactgttgtgactggcagctgtgcctggcactgcctcctggttagcaagacaggagagcaggcaagcactgaagaagcagctctgtttcaggacatgatttcttacttccttctaattcagcctgtgattttattcctcctagctcctctgagagggctgacaattctgtgtttcgagaccgtcctctttctgcagtgccctggcaaacacaccctkcctttctcttctgtcttccattatacttgatctgcttgagcctcccttttcctttctcctcttccctggcaggttctctgcctgcccacaatgctcccagctctcctcctctcctgcgtacagtgctaaccagcactgcaggccacccctctgcgtgctgtgtccctaccatgaaccaggggatggtgatgcagcattgctgaaagcactgggctgtgctgacatgcgcgtgctgaacctcttgttaagtaggagacatggagcaaaaaagctggcagtataacgttgaggagagacagt

SEQ ID NO: 2385 - DNA, 600 bp, Chicken  19866894089360_1
attttaacttttggtaactacttttccaggtataaactttcatggcatagaggacaaaatctatttcctaagaacagtgatacagcctgaaatgtgtcacattggttgaaacacctactttttttagatacttacatttaacctcttcttttgaagaaaaaaagttaccttgttctttcccgtgactttgcatgtcatacttctaagggagtgaacccattctgaactcaatagagtttggtctcttccttctgtagcattaatcttggagacattatgaccaatttaagccgaatgggrgtttctctttctaactacctacttgcwaactgctaaggaaccagcaagrgaaaatgagcactactcacaatagtctccagcttggattgcatgtatcttgaaaacacgagcagcagatgcttgtggaagtgattatgcactcagtcatatgtacatcctcctggctgtcatcaccacttctacacatttgtagtataagaagaaaaccctgggagtttatgggggggagggcggaaaaagaagcacaaagtatatttcagaaggacaaaataatcctagagtttttaaggagctcagcaa

SEQ ID NO: 2386 - DNA, 600 bp, Chicken  19866894089360_2
aggtataaactttcatggcatagaggacaaaatctatttcctaagaacagtgatacagcctgaaatgtgtcacattggttgaaacacctactttttttagatacttacatttaacctcttcttttgaagaaaaaaagttaccttgttctttcccgtgactttgcatgtcatacttctaagggagtgaacccattctgaactcaatagagtttggtctcttccttctgtagcattaatcttggagacattatgaccaatttaagccgaatgggrgtttctctttctaactacctacttgcwaactgctaaggaaccagcaagrgaaaatgagcactactcacaatagtctccagcttggattgcatgtatcttgaaaacacgagcagcagatgcttgtggaagtgattatgcactcagtcatatgtacatcctcctggctgtcatcaccacttctacacatttgtagtataagaagaaaaccctgggagtttatgggggggagggcggaaaaagaagcacaaagtatatttcagaaggacaaaataatcctagagtttttaaggagctcagcaatcactgctgctcaggggcccaagccgg

SEQ ID NO: 2387 - DNA, 600 bp, Chicken  19866894089360_3
gaggacaaaatctatttcctaagaacagtgatacagcctgaaatgtgtcacattggttgaaacacctactttttttagatacttacatttaacctcttcttttgaagaaaaaaagttaccttgttctttcccgtgactttgcatgtcatacttctaagggagtgaacccattctgaactcaatagagtttggtctcttccttctgtagcattaatcttggagacattatgaccaatttaagccgaatgggrgtttctctttctaactacctacttgcwaactgctaaggaaccagcaagrgaaaatgagcactactcacaatagtctccagcttggattgcatgtatcttgaaaacacgagcagcagatgcttgtggaagtgattatgcactcagtcatatgtacatcctcctggctgtcatcaccacttctacacatttgtagtataagaagaaaaccctgggagtttatgggggggagggcggaaaaagaagcacaaagtatatttcagaaggacaaaataatcctagagtttttaaggagctcagcaatcactgctgctcaggggcccaagccggcaagatattcatttatcaaact

SEQ ID NO: 2388 - DNA, 600 bp, Chicken  19866894089372_1
tagaaggctttcatacctactgaacttacagctgtcaggtagcagctgaggtaacctataacactgaaaattaaaggaactatggttaaaagaagtaaaacattttctgtaagtccagctatgcccctttccaaattttctgttagggagaaggcaacatatttctttttttttctgagcaggacacagtgttctctgttcaagggtgtgatctggaaactacgtttacaaactttcactggcagcttaggaaaatataacagcatatttatatttcctcagttcaggtcataacttcaygcttgggcaggtgagttttggagagtttagaaaaaaaaatacagagaacggctggaatccatttcaacaggtaacacaccaaactttctgaaggtgacattgtcccagtaaatctttccaaaagactgagctatttcttattacatcgaagtttttattgttgttattgtttttctcagactgaagaactgaagggtttaataaaatgcccttctccctggagtccttttcctctgaatgttttacctgtacctaagggtctgatgcacagaccaggcacacggtgaaagcattcctgtt

SEQ ID NO: 2389 - DNA, 600 bp, Chicken  19866894089373_1
atagaaatccaaattaaatgtccaaaacaagatcaaatgcatttcggcagatgaaagacaaactctttgaaacaagacaaaatgagggggttaacgaaatgaaagggagaaaggagcattgccaccgacacttgtaatgcagggatacatttgcacggtccctttgaacagcacaattctacaggttgctgcggacagaagcaggagtttcacatctcaggaaaaccagaaagctgcacagattcctctcccactgaataaacaaagctgtgaccaaagggttttgacgttctattttcwaatttcagataggtggaagaagacttctgtattattattttcccgctttggtagaaatgttttctcttttccagtaaataatccaaaatacgcagtcaaggcagtggccgtccagatcccgggccattgcacagcaagacgcccactggaaaggaatgatcggcttcaccggcaaaaaaagtaggtaccaacttcctagcaagtgtcagtattgccttttttggctttttttgaacaatattttctcatgaaagaaccgctttttctgtattttctcaagcacggcctcryggcacctca

SEQ ID NO: 2390 - DNA, 489 bp, Chicken  19866894089373_2
tctattttcwaatttcagataggtggaagaagacttctgtattattattttcccgctttggtagaaatgttttctcttttccagtaaataatccaaaatacgcagtcaaggcagtggccgtccagatcccgggccattgcacagcaagacgcccactggaaaggaatgatcggcttcaccggcaaaaaaagtaggtaccaacttcctagcaagtgtcagtattgccttttttggctttttttgaacaatattttctcatgaaagaaccgctttttctgtattttctcaagcacggcctcryggcacctcaaatttccttttgtggacaaaagtctggctttggaactgagctgcgtccaggtccatcacagaacagacgtatgtgaatttgccgcttgcgtcctttaatgaaggtcaaagcaacgcatgtacttcaaaaacaaagttataaaaatgttaaggaaagtccacacctactcgagccatttg

SEQ ID NO: 2391 - DNA, 488 bp, Chicken  19866894089373_3
ctattttcwaatttcagataggtggaagaagacttctgtattattattttcccgctttggtagaaatgttttctcttttccagtaaataatccaaaatacgcagtcaaggcagtggccgtccagatcccgggccattgcacagcaagacgcccactggaaaggaatgatcggcttcaccggcaaaaaaagtaggtaccaacttcctagcaagtgtcagtattgccttttttggctttttttgaacaatattttctcatgaaagaaccgctttttctgtattttctcaagcacggcctcryggcacctcaaatttccttttgtggacaaaagtctggctttggaactgagctgcgtccaggtccatcacagaacagacgtatgtgaatttgccgcttgcgtcctttaatgaaggtcaaagcaacgcatgtacttcaaaaacaaagttataaaaatgttaaggaaagtccacacctactcgagccatttg

SEQ ID NO: 2392 - DNA, 599 bp, Chicken  19866894089374_1
  misc_feature (1)..(163): n is any nucleotide
nnnnnnnnnnnnnnnnnnnnnnnnnnnnnnnnnnnnnnnnnnnnnnnnnnnnnnnnnnnnnnnnnnnnnnnnnnnnnnnnnnnnnnnnnnnnnnnnnnnnnnnnnnnnnnnnnnnnnnnnnnnnnnnnnnnnnnnnnnnnnnnnnnnnnnnnnnnnnnnnnnnacgcaagtcctggccaacactcaggcaatctccgcagctcccctctcctcacccactctcagagccagcgctggatgccagccagcagtgccagctagctttctgccagcctctgctcacacaccagcagggaaaaygggcaggaacacagtggctttgcagaactagcacatgcacaaaaagaagtcaaatcttaaggggagtggggcagcagagaggattcatgtaaagctactcagctccaacctaaaatgaccataatgttaaatagactttggaaagcagactgcagttgcataggtcacttcaagttcacagaagtcccaaaggggacaacagaggaaactaccatcaccagggaaacatcagctctgaaaggagaacttggtcctcagtgttccccctctctgcatcagacagctacagtccctgcacc

SEQ ID NO: 2393 - DNA, 600 bp, Chicken  19866894089374_2
gcacaaaaagaagtcaaatcttaaggggagtggggcagcagagaggattcatgtaaagctactcagctccaacctaaaatgaccataatgttaaatagactttggaaagcagactgcagttgcataggtcacttcaagttcacagaagtcccaaaggggacaacagaggaaactaccatcaccagggaaacatcagctctgaaaggagaacttggtcctcagtgttccccctctctgcatcagacagctacagtccctgcaccagctgcacacaagtcataaagacagaccacgtctacrccacttagcctagtatgcgaccaaacctactttggcacaacacccagtctctgcctgcttctttaagtcttcaagcccttgttaagaaacctcttcaggcagagctccagaagatcagaggagaagactgaggcatgcttcacacagggccaagctgccaaaatcacactgctgcctggagctcagctcttcacaggcacagaacagctgctgtgaagttataaggctctgcatacccaacagagctctccacctgctcccaaaggggaatagtaggcccgcaagtactctatttccttt

SEQ ID NO: 2394 - DNA, 600 bp, Chicken  19866894089393_1
aactatattggaaaacggcaccttggtttaatgcataactttttaactccctaattggaagagggaaaatacaagttctgaattcccagcaaagcgacgtgcttacgcggctgtgttgcagatcccgctgcacgctctgccatcactgctctgttctctcctaggagcgtgggcctgcacccaattctgttgagttcaaccgcatttccctttagtttctgagcctgagccattcctgtggtgttctgcccacgagcgtgctgctgcaaacccaagagactatttcctagtggttgttaygtgcaagcctgtgccagattggaaaatgcacttggcgttggcagcagctgcctattacaggagaaaaaacatagtctgtgtgtgaatggggaccagaaatcctttacatttgtgaattccttccatctcttcattgctccgctcacagatccatcctgcagaccacgcagtgctcagcttcccttacgcctgggtttattctgccaattgcccgatattgtcagctaattggagtggaaatgatgaatgaaagcgctattattgagttgccaagtctcctcacttggcagctggtgggtg

SEQ ID NO: 2395 - DNA, 600 bp, Chicken  19866894089395_1
accacagcgctgctgttccccatgctttgcttattttaatggtcctttccttctattccaaccaatcacgtttgcagtaatgctgttaataaaacacttgtactttcaaaataattctttggcacggtcccctaacaaaaggtgcacgttatgtcagcagcccattttccaagttcctctgaggtacaccctgaaaaccaaacaaaaacagcaatggagcccaaaacctcaaaggggaaaacgactgcaaaggaaaggggaggtggggaaccccgtccacacacagaggtgaccaaatgrgtwccttttgcttttgccctcatgcaaacacagcacctcccctcgccagctccctgcttttgtgcagcccccaamgccccatctcagcagtgttaccagcactgcacacacccacagccagcgctgcagagcagcgagcagagcagcacgctgtggtttgttgtctttggttgctaaactgcttctgactgcagagcatttgaaaagagaccgacatgaattttaaccacggagagatgagaaatgctcgtcatggacacatctttgttttaatatgcaacttgtcatcggatgcgagaa

SEQ ID NO: 2396 - DNA, 600 bp, Chicken  19866894089395_2
acagcgctgctgttccccatgctttgcttattttaatggtcctttccttctattccaaccaatcacgtttgcagtaatgctgttaataaaacacttgtactttcaaaataattctttggcacggtcccctaacaaaaggtgcacgttatgtcagcagcccattttccaagttcctctgaggtacaccctgaaaaccaaacaaaaacagcaatggagcccaaaacctcaaaggggaaaacgactgcaaaggaaaggggaggtggggaaccccgtccacacacagaggtgaccaaatgrgtwccttttgcttttgccctcatgcaaacacagcacctcccctcgccagctccctgcttttgtgcagcccccaamgccccatctcagcagtgttaccagcactgcacacacccacagccagcgctgcagagcagcgagcagagcagcacgctgtggtttgttgtctttggttgctaaactgcttctgactgcagagcatttgaaaagagaccgacatgaattttaaccacggagagatgagaaatgctcgtcatggacacatctttgttttaatatgcaacttgtcatcggatgcgagaaaca

SEQ ID NO: 2397 - DNA, 600 bp, Chicken  19866894089395_3
agtaatgctgttaataaaacacttgtactttcaaaataattctttggcacggtcccctaacaaaaggtgcacgttatgtcagcagcccattttccaagttcctctgaggtacaccctgaaaaccaaacaaaaacagcaatggagcccaaaacctcaaaggggaaaacgactgcaaaggaaaggggaggtggggaaccccgtccacacacagaggtgaccaaatgrgtwccttttgcttttgccctcatgcaaacacagcacctcccctcgccagctccctgcttttgtgcagcccccaamgccccatctcagcagtgttaccagcactgcacacacccacagccagcgctgcagagcagcgagcagagcagcacgctgtggtttgttgtctttggttgctaaactgcttctgactgcagagcatttgaaaagagaccgacatgaattttaaccacggagagatgagaaatgctcgtcatggacacatctttgttttaatatgcaacttgtcatcggatgcgagaaacagcaggctgtgagagcagctttattccttaccgagcactgtgagcgagtaattgatgtaggcctcctccccca

SEQ ID NO: 2398 - DNA, 600 bp, Chicken  19866894089398_1
cctccaggattgggtgtgggagcaggctagtggcatgcttgggtccctaaggagtaggccatattatatatacacattcctatgctttcccatgactgtcagaaatgctatgagcaattatcaaaggagaatatggcaacatgaaggagtattcctgcttgttgggcagcatctatgttggtatttatatgtacaccctggaaatgttcaaggccaagttggatggggtcctgggcaacctggtttagtgcctgatttagtggttggcaactctgcctgcagcagggggattggaactasgtgatctttgaggtcccttccaactcaaaccattctatgattctatcacatggtcaccatgttgaatgtccctgcatcccaatataaagcccaagtcccagggcagtatgtagtatccaggagtgactcatacaaccactgtgttgcatgtctattcctggcctgatgtaaaacgaacacacggtttctgtgttatcttgacctagactaatgcttctattttggggttttatgtcagaagcacaaaaaatcctggaaatcacggatggaaaagacctatgagatcatcccttccaccca

SEQ ID NO: 2399 - DNA, 599 bp, Chicken  19866894089400_1
  misc_feature (1)..(161): n is any nucleotide
nnnnnnnnnnnnnnnnnnnnnnnnnnnnnnnnnnnnnnnnnnnnnnnnnnnnnnnnnnnnnnnnnnnnnnnnnnnnnnnnnnnnnnnnnnnnnnnnnnnnnnnnnnnnnnnnnnnnnnnnnnnnnnnnnnnnnnnnnnnnnnnnnnnnnnnnnnnnnnnnntggtcataagagaataagactttaaccatcacattcatttatttgctactaagcactgttctacttccatttcttagaccaacctgtaaggtgtcctaaatacgatgccacaaatatttgaacttacaaagcatcctgytaagtaggtgaaagtaagagctgatatatatatttgcttccaggtaaattcctttggaaattgtttrtwacaggttcagagactctgactctgacttttaatatctttaaagacacctggagtttatatttaatacaacattgttgaatacagcaatcattaaataatgtttcctagtgttggaagatttagatcagttgtcaattaaagagcttaaggcagaattgcaggtgctggggaaaagagtactacaatgttttcatgttggcccatcttaggtgcaaagataaatgagtgcc

SEQ ID NO: 2400 - DNA, 599 bp, Chicken  19866894089400_2
  misc_feature (1)..(94): n is any nucleotide
nnnnnnnnnnnnnnnnnnnnnnnnnnnnnnnnnnnnnnnnnnnnnnnnnnnnnnnnnnnnnnnnnnnnnnnnnnnnnnnnnnnnnnnnnnnnnntggtcataagagaataagactttaaccatcacattcatttatttgctactaagcactgttctacttccatttcttagaccaacctgtaaggtgtcctaaatacgatgccacaaatatttgaacttacaaagcatcctgytaagtaggtgaaagtaagagctgatatatatatttgcttccaggtaaattcctttggaaattgtttrtwacaggttcagagactctgactctgacttttaatatctttaaagacacctggagtttatatttaatacaacattgttgaatacagcaatcattaaataatgtttcctagtgttggaagatttagatcagttgtcaattaaagagcttaaggcagaattgcaggtgctggggaaaagagtactacaatgttttcatgttggcccatcttaggtgcaaagataaatgagtgccaagctccctggccacagaaaatggattacagcccacaccgagtttagccctgtaatatgatcaagga

SEQ ID NO: 2401 - DNA, 599 bp, Chicken  19866894089400_3
  misc_feature (1)..(92): n is any nucleotide
nnnnnnnnnnnnnnnnnnnnnnnnnnnnnnnnnnnnnnnnnnnnnnnnnnnnnnnnnnnnnnnnnnnnnnnnnnnnnnnnnnnnnnnnnnnntggtcataagagaataagactttaaccatcacattcatttatttgctactaagcactgttctacttccatttcttagaccaacctgtaaggtgtcctaaatacgatgccacaaatatttgaacttacaaagcatcctgytaagtaggtgaaagtaagagctgatatatatatttgcttccaggtaaattcctttggaaattgtttrtwacaggttcagagactctgactctgacttttaatatctttaaagacacctggagtttatatttaatacaacattgttgaatacagcaatcattaaataatgtttcctagtgttggaagatttagatcagttgtcaattaaagagcttaaggcagaattgcaggtgctggggaaaagagtactacaatgttttcatgttggcccatcttaggtgcaaagataaatgagtgccaagctccctggccacagaaaatggattacagcccacaccgagtttagccctgtaatatgatcaaggatc

SEQ ID NO: 2402 - DNA, 600 bp, Chicken  19866894089402_1
agaggtgtgatagcaggagatgtgaaaaacagaaaaactggtgtcaagtgctgggaatgtttgctaaatatgctcagagaggcttatttcaattcagcttcattttcatcccattaattgaatactgattagcagctaatgcagactgatctcaggcccaaagtacatcttcagctttgtgtgaaaaaggctcagcctgggggctctgaaactgtcctgggctagaaagctgggcattgtaagtggggaaaaaaaaaagaccttcttcagaaacacactccagactggaaccaacatatkaaygyagaagcacactgaaaccacgagaactcatccatgatgtaaaatcttaaaatggactcttggttccttcaagaagcaaaactatattaacagctccaacatgatctggagaagggagaacctaaagtttgagaattatgatcttttaataaccagattttgcagaatggagagttaagccctgaaattttctgctcatggttgaagtaaataagagacactgccatcccttaggattaggaagttgactacacagaagtcaacatagctttagggttttcacactgatgttaaact

SEQ ID NO: 2403 - DNA, 600 bp, Chicken  19866894089402_2
ggtgtgatagcaggagatgtgaaaaacagaaaaactggtgtcaagtgctgggaatgtttgctaaatatgctcagagaggcttatttcaattcagcttcattttcatcccattaattgaatactgattagcagctaatgcagactgatctcaggcccaaagtacatcttcagctttgtgtgaaaaaggctcagcctgggggctctgaaactgtcctgggctagaaagctgggcattgtaagtggggaaaaaaaaaagaccttcttcagaaacacactccagactggaaccaacatatkaaygyagaagcacactgaaaccacgagaactcatccatgatgtaaaatcttaaaatggactcttggttccttcaagaagcaaaactatattaacagctccaacatgatctggagaagggagaacctaaagtttgagaattatgatcttttaataaccagattttgcagaatggagagttaagccctgaaattttctgctcatggttgaagtaaataagagacactgccatcccttaggattaggaagttgactacacagaagtcaacatagctttagggttttcacactgatgttaaacttat

SEQ ID NO: 2404 - DNA, 600 bp, Chicken  19866894089402_3
tgtgatagcaggagatgtgaaaaacagaaaaactggtgtcaagtgctgggaatgtttgctaaatatgctcagagaggcttatttcaattcagcttcattttcatcccattaattgaatactgattagcagctaatgcagactgatctcaggcccaaagtacatcttcagctttgtgtgaaaaaggctcagcctgggggctctgaaactgtcctgggctagaaagctgggcattgtaagtggggaaaaaaaaaagaccttcttcagaaacacactccagactggaaccaacatatkaaygyagaagcacactgaaaccacgagaactcatccatgatgtaaaatcttaaaatggactcttggttccttcaagaagcaaaactatattaacagctccaacatgatctggagaagggagaacctaaagtttgagaattatgatcttttaataaccagattttgcagaatggagagttaagccctgaaattttctgctcatggttgaagtaaataagagacactgccatcccttaggattaggaagttgactacacagaagtcaacatagctttagggttttcacactgatgttaaacttatta

SEQ ID NO: 2405 - DNA, 600 bp, Chicken  19866894089403_1
atctagggcttgaatgcagctagcaatgctcagactgaaatcagaatgttggtgtgctgggaatgcagcaatcaaaaaaacctccaaattgttgcagatctgacatatccatcaatcttcaagcagcaaagtatttaagccatgctgaactcttaagtacatgcagatgattttatgctaatccaaaagaggaatctaattatgctttctgctgctatcatttagagattgtctttatggaatctcttccatttgtccaaattcaatatccaaatgttggatacaagggaaagtactgcraaaggtttgttttgctgatactggattagagtgaggggcatgtgattaaaaacatgttgtgatacataaagtatttgcatcccaccgtgcatatgaatattgtacttaattgagtatggtgaattcataaagcagtgcaatagctgctgaacaggacatgaatctgttgtttatgttcatctttttaagtcattgcaagtcattccacactggaatttaggaaaagaatatctataacagcagtggatacctgccagaattaactatctcggtgtaaggaaccagccccctcccttgcag

SEQ ID NO: 2406 - DNA, 600 bp, Chicken  19866894089413_1
agctcctgctccagcgcttcaaggaagggaggtttggattatgcattccgacatgtaacaaggtccattggcttggaacaagaagtctgccaaaacgtacgggccttggaaggaggagctgaataggagagaaggctgagaccgcctcggtgctgtctctgcaagtgcaaagaatattaacagccctccgtgggaaaaaccagccacctccagccgggaggatggagaatgcaaaccctattcccacgtacgtccttagatctcattttccttggccagatgtatttcccaatggcctcycctagaaagaaaaacctgagcattgtaattacagtgggctgagtcgtgtaactgctgcgtcttgagtaaggattcggcggtcagaatggcacagtctgttgtcagaagtgctgatcccatggccaggaccacatccctgtaattcaggggaggccttttctgacttaggatgaagaaacacgcagtgatgccaccatcagccgagtgtagttaaaaagatagtgcttttgtgagcacatagattgtttaacatctgctgctgcacatgcaagtgctcagaagagtgtttgtgcagagcta

SEQ ID NO: 2407 - DNA, 600 bp, Chicken  19866894089414_1
gtggtaagttaaaacccattaaattgctctgtagttttcttggctgtggttgtttttcttaagtgaaagtaattaaacataaatatttactaatatcccaggctgtgaaactctatagccagtaacaagaacaaggagaaccaacccagcagtggcttcctacactaatatcccacgccggctgaaacattcctgctgacttttcaacaaatagggccagctattgtggattgctttcagggggaattcagaagctgggcagttgaatttatttaaacaagggaaggaaaccgctactcrgatgcatttttttaatacgtrtgtatatatatacaggattaatgcaatgtgcygcaagacaccacaagtaaattagcttttcccatattgatcctccctctaatctgctccaaaaatctgttgatgtcagtaccaaaagtctctctgaattgcatgtgttctgcatcacagtctcgccataagtgagctaaaccacagtggtagcactgctttstcctcctctagccacctcatcccttcactcctaaaccatctccctycagccagcacaagtgatgctgtggccacacagggaaacag

SEQ ID NO: 2408 - DNA, 600 bp, Chicken  19866894089414_2
aattgctctgtagttttcttggctgtggttgtttttcttaagtgaaagtaattaaacataaatatttactaatatcccaggctgtgaaactctatagccagtaacaagaacaaggagaaccaacccagcagtggcttcctacactaatatcccacgccggctgaaacattcctgctgacttttcaacaaatagggccagctattgtggattgctttcagggggaattcagaagctgggcagttgaatttatttaaacaagggaaggaaaccgctactcrgatgcatttttttaatacgtrtgtatatatatacaggattaatgcaatgtgcygcaagacaccacaagtaaattagcttttcccatattgatcctccctctaatctgctccaaaaatctgttgatgtcagtaccaaaagtctctctgaattgcatgtgttctgcatcacagtctcgccataagtgagctaaaccacagtggtagcactgctttstcctcctctagccacctcatcccttcactcctaaaccatctccctycagccagcacaagtgatgctgtggccacacagggaaacagactgaggaaccaatatcagag

SEQ ID NO: 2409 - DNA, 600 bp, Chicken  19866894089414_3
ttttcttaagtgaaagtaattaaacataaatatttactaatatcccaggctgtgaaactctatagccagtaacaagaacaaggagaaccaacccagcagtggcttcctacactaatatcccacgccggctgaaacattcctgctgacttttcaacaaatagggccagctattgtggattgctttcagggggaattcagaagctgggcagttgaatttatttaaacaagggaaggaaaccgctactcrgatgcatttttttaatacgtrtgtatatatatacaggattaatgcaatgtgcygcaagacaccacaagtaaattagcttttcccatattgatcctccctctaatctgctccaaaaatctgttgatgtcagtaccaaaagtctctctgaattgcatgtgttctgcatcacagtctcgccataagtgagctaaaccacagtggtagcactgctttstcctcctctagccacctcatcccttcactcctaaaccatctccctycagccagcacaagtgatgctgtggccacacagggaaacagactgaggaaccaatatcagagatgccaggttagcttaagtattctgttgcagt

SEQ ID NO: 2410 - DNA, 600 bp, Chicken  19866894089414_4
ggccagctattgtggattgctttcagggggaattcagaagctgggcagttgaatttatttaaacaagggaaggaaaccgctactcrgatgcatttttttaatacgtrtgtatatatatacaggattaatgcaatgtgcygcaagacaccacaagtaaattagcttttcccatattgatcctccctctaatctgctccaaaaatctgttgatgtcagtaccaaaagtctctctgaattgcatgtgttctgcatcacagtctcgccataagtgagctaaaccacagtggtagcactgctttstcctcctctagccacctcatcccttcactcctaaaccatctccctycagccagcacaagtgatgctgtggccacacagggaaacagactgaggaaccaatatcagagatgccaggttagcttaagtattctgttgcagtaaagcaaaagcttcctcttgccaagctactggtaagctactgatatggcaaacatccatagaggcagcatagaatcatagaattattaaggttggaaagaccactaggatcatctagtccatcaacctatgcctgggactgttgtaaacaatgtcactcag

SEQ ID NO: 2411 - DNA, 600 bp, Chicken  19866894089414_5
agttgaatttatttaaacaagggaaggaaaccgctactcrgatgcatttttttaatacgtrtgtatatatatacaggattaatgcaatgtgcygcaagacaccacaagtaaattagcttttcccatattgatcctccctctaatctgctccaaaaatctgttgatgtcagtaccaaaagtctctctgaattgcatgtgttctgcatcacagtctcgccataagtgagctaaaccacagtggtagcactgctttstcctcctctagccacctcatcccttcactcctaaaccatctccctycagccagcacaagtgatgctgtggccacacagggaaacagactgaggaaccaatatcagagatgccaggttagcttaagtattctgttgcagtaaagcaaaagcttcctcttgccaagctactggtaagctactgatatggcaaacatccatagaggcagcatagaatcatagaattattaaggttggaaagaccactaggatcatctagtccatcaacctatgcctgggactgttgtaaacaatgtcactcagygatatatctacccttttcttgaaaacctccagggatagtgacttc

SEQ ID NO: 2412 - DNA, 600 bp, Chicken  19866894089414_6
cctcctctagccacctcatcccttcactcctaaaccatctccctycagccagcacaagtgatgctgtggccacacagggaaacagactgaggaaccaatatcagagatgccaggttagcttaagtattctgttgcagtaaagcaaaagcttcctcttgccaagctactggtaagctactgatatggcaaacatccatagaggcagcatagaatcatagaattattaaggttggaaagaccactaggatcatctagtccatcaacctatgcctgggactgttgtaaacaatgtcactcagygatatatctacccttttcttgaaaacctccagggatagtgacttcaccatcaccctggacagcttgttccagtgcctcaccacttctcctgagaaacatttcctaagatccaacctgaacctcccctggcrcaacttgaggccattacctcttatcctatttctgttacgtgggagaagaggctgacctccacctcaccataacctttcaggtagctgtagagtgcagcacagtctccaaatgggtccagcatttctcagctgagggccctccagatatgattttcagaaatgagaatat

SEQ ID NO: 2413 - DNA, 600 bp, Chicken  19866894089414_7
ttgcagtaaagcaaaagcttcctcttgccaagctactggtaagctactgatatggcaaacatccatagaggcagcatagaatcatagaattattaaggttggaaagaccactaggatcatctagtccatcaacctatgcctgggactgttgtaaacaatgtcactcagygatatatctacccttttcttgaaaacctccagggatagtgacttcaccatcaccctggacagcttgttccagtgcctcaccacttctcctgagaaacatttcctaagatccaacctgaacctcccctggcrcaacttgaggccattacctcttatcctatttctgttacgtgggagaagaggctgacctccacctcaccataacctttcaggtagctgtagagtgcagcacagtctccaaatgggtccagcatttctcagctgagggccctccagatatgattttcagaaatgagaatatgggacttagctttgcaatagtactctgtgtgcctgccttctttttactccacttagaactaggaagcctcttgtaactctgtaggactcaaactcagtagaattaagcagagatattatttatacaatgtg

SEQ ID NO: 2414 - DNA, 600 bp, Chicken  19866894089415_1
gtagcctggttgactgctcaaattctttcctcccaggaataatctccttgtaagcagaattgaagcaacttcccttgtatagaggctctgctaaatttcagagcagcaggcaattgctccagcagttggcaaaaccttagagctgaagtgagtcactgctccacacaatccatcccaacaggaatgcaaagcgtcaccggactgagcttccttccctctccacatcagtgtgactgtgctgctcatgctgaactccgagagaaatccatcttatgtttcagcagcaagactataaatgarcagtggaagcagttacagagcacgtgaacttttcaactgccgttggatgagggagcacattgtagatgcagacaccattactctctacaacaacgtattaaaattgcagcactcaaagcaaaccagacaccgctaggaaggcatagtctaggactatgatttctgcagccattccacagcactgaaagacagaaggccaggtcgattcagcacacagccctcatgaaaataaaagttttacatatagtgtgacttttaacagttttacacagcctatgactacacagcctatgactacca

SEQ ID NO: 2415 - DNA, 599 bp, Chicken  19866894089416_1
  misc_feature (1)..(201): n is any nucleotide
nnnnnnnnnnnnnnnnnnnnnnnnnnnnnnnnnnnnnnnnnnnnnnnnnnnnnnnnnnnnnnnnnnnnnnnnnnnnnnnnnnnnnnnnnnnnnnnnnnnnnnnnnnnnnnnnnnnnnnnnnnnnnnnnnnnnnnnnnnnnnnnnnnnnnnnnnnnnnnnnnnnnnnnnnnnnnnnnnnnnnnnnnnnnnnnnnnnnnnnnnttacttaccatgtttttattcacgtgaagcagtgcaaacttttagttagaattctagaatagtgaggaataaggaaaatatatctttcataaataagayatactgttatataactgagagttgaagtttgtataggttattctgacactccccaaattcctcatgctacttgtagtaatgtaygtaaagcttgatctcaagtataratgttgcagtgtttacagtgttttattaattaaaaatttccctttacattatgaaaacttttttcaygtaattagtatcaagaaatacaawaaatatgagagaatgaactaaagtcaaacactcccaatgagaacaatgaatacttttaaatctgtatatatatatatatctttaaaaatgtattttatatg

SEQ ID NO: 2416 - DNA, 599 bp, Chicken  19866894089416_2
  misc_feature (1)..(117): n is any nucleotide
nnnnnnnnnnnnnnnnnnnnnnnnnnnnnnnnnnnnnnnnnnnnnnnnnnnnnnnnnnnnnnnnnnnnnnnnnnnnnnnnnnnnnnnnnnnnnnnnnnnnnnnnnnnnnnnnnnnnnttacttaccatgtttttattcacgtgaagcagtgcaaacttttagttagaattctagaatagtgaggaataaggaaaatatatctttcataaataagayatactgttatataactgagagttgaagtttgtataggttattctgacactccccaaattcctcatgctacttgtagtaatgtaygtaaagcttgatctcaagtataratgttgcagtgtttacagtgttttattaattaaaaatttccctttacattatgaaaacttttttcaygtaattagtatcaagaaatacaawaaatatgagagaatgaactaaagtcaaacactcccaatgagaacaatgaatacttttaaatctgtatatatatatatatctttaaaaatgtattttatatgcaggaatgtgactccacagactacgctggaatttagagtgtggagccatcacactttaaaagcagatgctttattaggaagagc

SEQ ID NO: 2417 - DNA, 599 bp, Chicken  19866894089416_3
  misc_feature (1)..(94): n is any nucleotide
nnnnnnnnnnnnnnnnnnnnnnnnnnnnnnnnnnnnnnnnnnnnnnnnnnnnnnnnnnnnnnnnnnnnnnnnnnnnnnnnnnnnnnnnnnnnnnttacttaccatgtttttattcacgtgaagcagtgcaaacttttagttagaattctagaatagtgaggaataaggaaaatatatctttcataaataagayatactgttatataactgagagttgaagtttgtataggttattctgacactccccaaattcctcatgctacttgtagtaatgtaygtaaagcttgatctcaagtataratgttgcagtgtttacagtgttttattaattaaaaatttccctttacattatgaaaacttttttcaygtaattagtatcaagaaatacaawaaatatgagagaatgaactaaagtcaaacactcccaatgagaacaatgaatacttttaaatctgtatatatatatatatctttaaaaatgtattttatatgcaggaatgtgactccacagactacgctggaatttagagtgtggagccatcacactttaaaagcagatgctttattaggaagagccactgtagacttgagacaagctt

SEQ ID NO: 2418 - DNA, 599 bp, Chicken  19866894089416_4
  misc_feature (1)..(27): n is any nucleotide
nnnnnnnnnnnnnnnnnnnnnnnnnnnttacttaccatgtttttattcacgtgaagcagtgcaaacttttagttagaattctagaatagtgaggaataaggaaaatatatctttcataaataagayatactgttatataactgagagttgaagtttgtataggttattctgacactccccaaattcctcatgctacttgtagtaatgtaygtaaagcttgatctcaagtataratgttgcagtgtttacagtgttttattaattaaaaatttccctttacattatgaaaacttttttcaygtaattagtatcaagaaatacaawaaatatgagagaatgaactaaagtcaaacactcccaatgagaacaatgaatacttttaaatctgtatatatatatatatctttaaaaatgtattttatatgcaggaatgtgactccacagactacgctggaatttagagtgtggagccatcacactttaaaagcagatgctttattaggaagagccactgtagacttgagacaagctttggaaatacacaatagaaaatgtaagttgtcctgaaggatattttaagtagaactgttattactaat

SEQ ID NO: 2419 - DNA, 599 bp, Chicken  19866894089416_5
  misc_feature (1)..(3): n is any nucleotide
nnnttacttaccatgtttttattcacgtgaagcagtgcaaacttttagttagaattctagaatagtgaggaataaggaaaatatatctttcataaataagayatactgttatataactgagagttgaagtttgtataggttattctgacactccccaaattcctcatgctacttgtagtaatgtaygtaaagcttgatctcaagtataratgttgcagtgtttacagtgttttattaattaaaaatttccctttacattatgaaaacttttttcaygtaattagtatcaagaaatacaawaaatatgagagaatgaactaaagtcaaacactcccaatgagaacaatgaatacttttaaatctgtatatatatatatatctttaaaaatgtattttatatgcaggaatgtgactccacagactacgctggaatttagagtgtggagccatcacactttaaaagcagatgctttattaggaagagccactgtagacttgagacaagctttggaaatacacaatagaaaatgtaagttgtcctgaaggatattttaagtagaactgttattactaatctttatatcaaaactgscaaacaa

SEQ ID NO: 2420 - DNA, 600 bp, Chicken  19866894089416_6
aatacaawaaatatgagagaatgaactaaagtcaaacactcccaatgagaacaatgaatacttttaaatctgtatatatatatatatctttaaaaatgtattttatatgcaggaatgtgactccacagactacgctggaatttagagtgtggagccatcacactttaaaagcagatgctttattaggaagagccactgtagacttgagacaagctttggaaatacacaatagaaaatgtaagttgtcctgaaggatattttaagtagaactgttattactaatctttatatcaaaactgscaaacaagctactaactatatgtgtaattacaactgattttcagttggtgtctttacttgtctcttatggccatgtctaactgtgctattgagaacaattgaaacgtaacaatgagatataataattttgaagcaaataccagagtctgagttactactaagtaaaagcagtagtgattaaataaaatgttttgtggcaaactaattcataatttgctagaagatctgttttaaacttgtttttaaaacaaaaaaaagtctaaagttttttttacattktttatgtttttcttctttgga

SEQ ID NO: 2421 - DNA, 600 bp, Chicken  19866894089416_7
taatctttatatcaaaactgscaaacaagctactaactatatgtgtaattacaactgattttcagttggtgtctttacttgtctcttatggccatgtctaactgtgctattgagaacaattgaaacgtaacaatgagatataataattttgaagcaaataccagagtctgagttactactaagtaaaagcagtagtgattaaataaaatgttttgtggcaaactaattcataatttgctagaagatctgttttaaacttgtttttaaaacaaaaaaaagtctaaagttttttttacattktttatgtttttcttctttggataygtatttttccctcataacttaactgtccagagaacaaaccactgataaaagaatcaattgagaacttctttttagtacattagtgattgttgtgttctatgtaacttctaaaatttattgtctttaatagaattaaaacaggtcttctttattttgctttttaatctttttttcacaaatacaagaagatggtgaatccacactttaaattccactccagagtggcagtagaattccagctaaaccagcatttcacacaagttcaatatgcaaact

SEQ ID NO: 2422 - DNA, 600 bp, Chicken  19866894089416_8
acaagctactaactatatgtgtaattacaactgattttcagttggtgtctttacttgtctcttatggccatgtctaactgtgctattgagaacaattgaaacgtaacaatgagatataataattttgaagcaaataccagagtctgagttactactaagtaaaagcagtagtgattaaataaaatgttttgtggcaaactaattcataatttgctagaagatctgttttaaacttgtttttaaaacaaaaaaaagtctaaagttttttttacattktttatgtttttcttctttggataygtatttttccctcataacttaactgtccagagaacaaaccactgataaaagaatcaattgagaacttctttttagtacattagtgattgttgtgttctatgtaacttctaaaatttattgtctttaatagaattaaaacaggtcttctttattttgctttttaatctttttttcacaaatacaagaagatggtgaatccacactttaaattccactccagagtggcagtagaattccagctaaaccagcatttcacacaagttcaatatgcaaacttgaaggctcatttagggaggtgga

SEQ ID NO: 2423 - DNA, 600 bp, Chicken  19866894089418_1
tctcccgtctcttccttggtggggtatgcaaaaacccaagccattacagtcccattacagcagcccccaacccaagcccaaccactaagcagcttttctcccagcaggaacaaggcaagaccaaacaggagtttcatattcgtaattaaacctgaagggaaattcacagtctttgatccttccaggtatatgagctgggccgcttccctgcaattaatctgctctggtgagacagaggtggaccaatggctgcagatgctattagacaaagagctgatcccggttactgctgcagatggmcgaagcagaatcctttctttgcactatcaatttagcagtgttgccaaacccacatcagcttctcagtcaaacatttcatttctcagcagtctgtgcaaagtttgaaggctacagtatgttctgccagcatcctccagcaagctgctttgcattgttttgcttaaatggttacaaaagtgctgtcacagagacactgtcaactgcagcttttgtgtttatttcttctttattttttaaaaattaaaaaaaaagggggggaacaaaaactcctggagttgaaagaactgatttccacttgtt

SEQ ID NO: 2424 - DNA, 600 bp, Chicken  19866894089418_2
atcctttctttgcactatcaatttagcagtgttgccaaacccacatcagcttctcagtcaaacatttcatttctcagcagtctgtgcaaagtttgaaggctacagtatgttctgccagcatcctccagcaagctgctttgcattgttttgcttaaatggttacaaaagtgctgtcacagagacactgtcaactgcagcttttgtgtttatttcttctttattttttaaaaattaaaaaaaaagggggggaacaaaaactcctggagttgaaagaactgatttccacttgttttatcagtycttttcacattcttttggcaaacactggattttcctctctgctattgaatgtgcaagcatattcaatattgaatagaccttgttgacagttttgaacctgttccataagatttcaactgctctgattcatggggacttgcaaagttcctacaacataacaaagtctgtcccgcctcgagcattgttctgcatcaggataatttaaagcctctgctccttcccctatatatatataactcacgggtgggttttctcagagccagcaatagcactttcgtatctgagttgtctgggttactc

SEQ ID NO: 2425 - DNA, 600 bp, Chicken  19866894089419_1
agagatattacggtactgtacagcagctcacacagcacctccccaccttacagcagcatcctggattcttgtagatacacaagtgatggcagattggaggtttttattccaagatttctctgatgaattgaaacacattttgagccttgaataaacatttcctcatacaactggactaccaggcagatatcctcgtttcctcactagtggtggttttatttattttgtcattagcttattgctcatattaacagcacgaaaactaagcaaatatcctctgggtttgctggcaattatgtrtttacaaattgtgctctacagctatcatgtgtttgcacacatacgaagttgtatttctgaaatgatgatgcttgagcactacttacccaagtgtaaaatattccatctgatgatgcagagagatttttggagaagtgctgcctggtctaagttaatcttgaaggcataccagtcacttgaaatcaccagctacaagtttttaagccttctattatctcactccattgtatttctacagctctctagcccaaacgttcactcacaaacacaaggaaggatgagaatttgcaacagcatggg

SEQ ID NO: 2426 - DNA, 600 bp, Chicken  19866894089425_1
acctacttttactgacaattgcaacttttcctcccaaatccatgctggaggtgttgggaacctaacaagtccaaactgttgcatatcaagaaccgtggagatgtggcactgagggacatggctcagtgggcaggtgggagtgggctggggttggacttggtgatctgagaggtcatttccatcctgaatgattctatgattctgtgaacatctcgctgctgaagtgatctgcttcagaaatggagcaacttaatgctgagtatctcagtacggatgagttgagatgataatgcatccttwgtagwaatgctggctgctaacaggaaaaaagaaaagcttaaatttctctgcagggggacgcatgttccaggatggtttgatgcgttcagccaagcaagagcagcatggtctataaatagggaaaatgaccagtcctgcttcaactattttgcctggaaaggttcaagctyggtgacagtgatgtggttggagtgctgagttaattggtaacttgtcttttttcccgttcaaagcaggcagaaaataaatttgtctgacttaataattaagaggaaaaaaaaacaagttaatgacctgttt

SEQ ID NO: 2427 - DNA, 600 bp, Chicken  19866894089425_2
cttttactgacaattgcaacttttcctcccaaatccatgctggaggtgttgggaacctaacaagtccaaactgttgcatatcaagaaccgtggagatgtggcactgagggacatggctcagtgggcaggtgggagtgggctggggttggacttggtgatctgagaggtcatttccatcctgaatgattctatgattctgtgaacatctcgctgctgaagtgatctgcttcagaaatggagcaacttaatgctgagtatctcagtacggatgagttgagatgataatgcatccttwgtagwaatgctggctgctaacaggaaaaaagaaaagcttaaatttctctgcagggggacgcatgttccaggatggtttgatgcgttcagccaagcaagagcagcatggtctataaatagggaaaatgaccagtcctgcttcaactattttgcctggaaaggttcaagctyggtgacagtgatgtggttggagtgctgagttaattggtaacttgtcttttttcccgttcaaagcaggcagaaaataaatttgtctgacttaataattaagaggaaaaaaaaacaagttaatgacctgtttctggc

SEQ ID NO: 2428 - DNA, 600 bp, Chicken  19866894089425_3
ggtcatttccatcctgaatgattctatgattctgtgaacatctcgctgctgaagtgatctgcttcagaaatggagcaacttaatgctgagtatctcagtacggatgagttgagatgataatgcatccttwgtagwaatgctggctgctaacaggaaaaaagaaaagcttaaatttctctgcagggggacgcatgttccaggatggtttgatgcgttcagccaagcaagagcagcatggtctataaatagggaaaatgaccagtcctgcttcaactattttgcctggaaaggttcaagctyggtgacagtgatgtggttggagtgctgagttaattggtaacttgtcttttttcccgttcaaagcaggcagaaaataaatttgtctgacttaataattaagaggaaaaaaaaacaagttaatgacctgtttctggcactgaagagagatgtgtaactgatactgaatattcagtatgtaaatctacatgttataaaagaatcaaacttcctcaaggggaggagaaaaactggtttgatttttaaaaaggactattatatatttccatgcctcctgtcatcttataataacatttcattaaa

SEQ ID NO: 2429 - DNA, 600 bp, Chicken  19866894089425_4
cctgcctccatcttgagctgttgtagaggttccattaggaccaaaggcatggggaagagacatcgagtcaggtgtcccacagtggatccgttcattcctggctcaaggatgcatgtagccatggagctaaaggagggttgtaaaatctcctactcttccctttttgtacccatctccgaattagcagcagcattaaattgcctttgcaacagctgtagttctcgttttgcttctggatgtggtgtaggagatgtttgggtagcacagcaggatgtgagcccagagaaagtgctgagatcsattgatgttgacattagtggagctagttggcagctttgcctggctggagaactgagagcaaaaagagggtaagatgaaaacctctctgaagtgtcagagatgatttttttttttttycctttggtatgtgtggcaataacgacaaattttcacaatgaataaatggtaatcartgcacagatgttcacatagacctgcaagtttctgatttgaggccaagaagagtgttggtacaccccaaactagaatttactgctgaatttaaaactctggtttcccccagaatatcttgttcctagc

SEQ ID NO: 2430 - DNA, 600 bp, Chicken  19866894089425_5
gccatggagctaaaggagggttgtaaaatctcctactcttccctttttgtacccatctccgaattagcagcagcattaaattgcctttgcaacagctgtagttctcgttttgcttctggatgtggtgtaggagatgtttgggtagcacagcaggatgtgagcccagagaaagtgctgagatcsattgatgttgacattagtggagctagttggcagctttgcctggctggagaactgagagcaaaaagagggtaagatgaaaacctctctgaagtgtcagagatgatttttttttttttycctttggtatgtgtggcaataacgacaaattttcacaatgaataaatggtaatcartgcacagatgttcacatagacctgcaagtttctgatttgaggccaagaagagtgttggtacaccccaaactagaatttactgctgaatttaaaactctggtttcccccagaatatcttgttcctagctggtttttttcctgcttctaggtgaggctgaattacatagcatcctaataacatggtagaataataatgtagtaatggtttttgatgaaaggagacatttactagaattagagccct

SEQ ID NO: 2431 - DNA, 600 bp, Chicken  19866894089425_6
ctccgaattagcagcagcattaaattgcctttgcaacagctgtagttctcgttttgcttctggatgtggtgtaggagatgtttgggtagcacagcaggatgtgagcccagagaaagtgctgagatcsattgatgttgacattagtggagctagttggcagctttgcctggctggagaactgagagcaaaaagagggtaagatgaaaacctctctgaagtgtcagagatgatttttttttttttycctttggtatgtgtggcaataacgacaaattttcacaatgaataaatggtaatcartgcacagatgttcacatagacctgcaagtttctgatttgaggccaagaagagtgttggtacaccccaaactagaatttactgctgaatttaaaactctggtttcccccagaatatcttgttcctagctggtttttttcctgcttctaggtgaggctgaattacatagcatcctaataacatggtagaataataatgtagtaatggtttttgatgaaaggagacatttactagaattagagcccttcaaaaggcagctttttgttccctgtaatatttatttcatcattttgtgtgttaca

SEQ ID NO: 2432 - DNA, 600 bp, Chicken  19866894089428_1
ccactgccccatcttggcgtgggaggagcacacaacactgagctgcaggaggaaccggattaattgctgggtaaagtgcaaagaacacaagggaaaggctccagctatccagctccagctgatggaaaagatactgcaagcaacgctgaggcacatgggctgcagcacaaggttccaggatgcagcacagaactcagcatccagccctcagtgtggccaaaaggccttcagcatgaataaagccccgttttgggcttagtactgtgtttgttaaccacacacacatacttctcagtttgrgacaggatctccactctcatttctgtactagcagctcttcctctctccagctgatgtatctgtgctaatctgcagaaaactttcagacttgaaattctgaaagactgcagtaaacgtttccttactcycatcttctcttaactgcttttcaagagaaattttttcttctcttgatttaaaacccatctttggttacagtgcaaactccagcttgtggtccccattctacagttatgaggctgccctggctccragtatttccattgtggcggagctgtatttgccaacatgaagatttgg

SEQ ID NO: 2433 - DNA, 600 bp, Chicken  19866894089428_2
agatactgcaagcaacgctgaggcacatgggctgcagcacaaggttccaggatgcagcacagaactcagcatccagccctcagtgtggccaaaaggccttcagcatgaataaagccccgttttgggcttagtactgtgtttgttaaccacacacacatacttctcagtttgrgacaggatctccactctcatttctgtactagcagctcttcctctctccagctgatgtatctgtgctaatctgcagaaaactttcagacttgaaattctgaaagactgcagtaaacgtttccttactcycatcttctcttaactgcttttcaagagaaattttttcttctcttgatttaaaacccatctttggttacagtgcaaactccagcttgtggtccccattctacagttatgaggctgccctggctccragtatttccattgtggcggagctgtatttgccaacatgaagatttgggattctgtggaggtattcaaattcaattaaattgtatggagttgtcttcctttgcaaccattttggttaagatgtgcatctcgtgatttctgtaatagtagcaagtcaccagttttcccttataagtg

SEQ ID NO: 2434 - DNA, 568 bp, Chicken  19866894089428_3
gcttagtactgtgtttgttaaccacacacacatacttctcagtttgrgacaggatctccactctcatttctgtactagcagctcttcctctctccagctgatgtatctgtgctaatctgcagaaaactttcagacttgaaattctgaaagactgcagtaaacgtttccttactcycatcttctcttaactgcttttcaagagaaattttttcttctcttgatttaaaacccatctttggttacagtgcaaactccagcttgtggtccccattctacagttatgaggctgccctggctccragtatttccattgtggcggagctgtatttgccaacatgaagatttgggattctgtggaggtattcaaattcaattaaattgtatggagttgtcttcctttgcaaccattttggttaagatgtgcatctcgtgatttctgtaatagtagcaagtcaccagttttcccttataagtgaagttggttcacttataaaagatactctccaagtagacatcagtgagcagccagcaggattagtggggcccccttccctctccaacacatttt

SEQ ID NO: 2435 - DNA, 599 bp, Chicken  19866894089431_1
  misc_feature (1)..(125): n is any nucleotide
nnnnnnnnnnnnnnnnnnnnnnnnnnnnnnnnnnnnnnnnnnnnnnnnnnnnnnnnnnnnnnnnnnnnnnnnnnnnnnnnnnnnnnnnnnnnnnnnnnnnnnnnnnnnnnnnnnnnnnnnnnnnnacttgaagatataatatgcaacagcaaaatactggtggatcagtttccattcctgcacttgagagttcaggttgtaagtacattccacccatgtgctgtggattagtaccttcaactggctacttttttgataaactacaaagaaagtcatgataaacaaaaaacattatcctgrcaccaattataagatgctattctagtcattatttataactgtttataggagtggagacttatcttaaaggcgyaagtcaggaggacttgtagataacatgatggctgttttaagactttgaagacatgttcagaatggctcttccagtcttgaattccatagccaaccagactggctggagcatgccctagctcccatttgctgttgacctgagaaattctactcttggaagataaatcatagcaatgaacggggtattgtgagcaaagggaaatgtacccacaagatcttatatcatc

SEQ ID NO: 2436 - DNA, 599 bp, Chicken  19866894089431_2
  misc_feature (1)..(52): n is any nucleotide
nnnnnnnnnnnnnnnnnnnnnnnnnnnnnnnnnnnnnnnnnnnnnnnnnnnnacttgaagatataatatgcaacagcaaaatactggtggatcagtttccattcctgcacttgagagttcaggttgtaagtacattccacccatgtgctgtggattagtaccttcaactggctacttttttgataaactacaaagaaagtcatgataaacaaaaaacattatcctgrcaccaattataagatgctattctagtcattatttataactgtttataggagtggagacttatcttaaaggcgyaagtcaggaggacttgtagataacatgatggctgttttaagactttgaagacatgttcagaatggctcttccagtcttgaattccatagccaaccagactggctggagcatgccctagctcccatttgctgttgacctgagaaattctactcttggaagataaatcatagcaatgaacggggtattgtgagcaaagggaaatgtacccacaagatcttatatcatcagagtcaggacatgtatctgaaccttgaaataaggaaatccactcccaagtcaacattaaagtaccrtagtac

SEQ ID NO: 2437 - DNA, 600 bp, Chicken  19866894089431_3
aaggcgyaagtcaggaggacttgtagataacatgatggctgttttaagactttgaagacatgttcagaatggctcttccagtcttgaattccatagccaaccagactggctggagcatgccctagctcccatttgctgttgacctgagaaattctactcttggaagataaatcatagcaatgaacggggtattgtgagcaaagggaaatgtacccacaagatcttatatcatcagagtcaggacatgtatctgaaccttgaaataaggaaatccactcccaagtcaacattaaagtaccrtagtacagtttttttggtatctaagtactcagctagatttacttgactgtttcattcacctactattcctactcttcattagatagcacagatatacatactccattaaattagtcatgtctctcstgtttcaggatgagtaagtgtgctggatttggaaaccacagcacaagttcgagagctctgcacacctgattctcttatcaaaaactctgagacagactttatcttagtttcatataccttccctgctcttgacataagttgaagctgaatctgcgtatctaggccttatgaaag

SEQ ID NO: 2438 - DNA, 600 bp, Chicken  19866894089431_4
tcccatttgctgttgacctgagaaattctactcttggaagataaatcatagcaatgaacggggtattgtgagcaaagggaaatgtacccacaagatcttatatcatcagagtcaggacatgtatctgaaccttgaaataaggaaatccactcccaagtcaacattaaagtaccrtagtacagtttttttggtatctaagtactcagctagatttacttgactgtttcattcacctactattcctactcttcattagatagcacagatatacatactccattaaattagtcatgtctctcstgtttcaggatgagtaagtgtgctggatttggaaaccacagcacaagttcgagagctctgcacacctgattctcttatcaaaaactctgagacagactttatcttagtttcatataccttccctgctcttgacataagttgaagctgaatctgcgtatctaggccttatgaaagaaatagagcaagtttttctattactaggtattataacatgactgtagtagtcaacaaagaacaatcagagagctcagcggtggttttgaagaatagactgactgttaaaaaattgcaaaaaggcta

SEQ ID NO: 2439 - DNA, 599 bp, Chicken  19866894089436_1
  misc_feature (1)..(77): n is any nucleotide
nnnnnnnnnnnnnnnnnnnnnnnnnnnnnnnnnnnnnnnnnnnnnnnnnnnnnnnnnnnnnnnnnnnnnnnnnnnnnaatttcagtgctatttattttataataaaatcttcccttttcttatccattttactcccataaaggtctcaaacaatatattcagtcctagccaaaaggtcactgttgtcctacaacagagtcctccctccccttcatggcacttctggatgctgtgaatagagctctctttctgaggctgagctctatcagcaggaaggtgcccaggaagcagcaaagtgtyaccctccaccrcctcatacacactcctggaggtcragtacatcacccctgggagctgcataaactgtgcagggaaagggaagaacrgtcacaccagacttcctggtgctgctaggcctcctcatcaaacattccattgcattgtrttgttaattcaaacaaatacggtctccttgacagacaactcctccagacaggtggagttttatattggatttctctgtgtagtttttaatttttatgtttatatgtatgtattttttgctttgtggactctcgatttgataaggggttgatgaa

SEQ ID NO: 2440 - DNA, 599 bp, Chicken  19866894089436_2
  misc_feature (1)..(66): n is any nucleotide
nnnnnnnnnnnnnnnnnnnnnnnnnnnnnnnnnnnnnnnnnnnnnnnnnnnnnnnnnnnnnnnnnnaatttcagtgctatttattttataataaaatcttcccttttcttatccattttactcccataaaggtctcaaacaatatattcagtcctagccaaaaggtcactgttgtcctacaacagagtcctccctccccttcatggcacttctggatgctgtgaatagagctctctttctgaggctgagctctatcagcaggaaggtgcccaggaagcagcaaagtgtyaccctccaccrcctcatacacactcctggaggtcragtacatcacccctgggagctgcataaactgtgcagggaaagggaagaacrgtcacaccagacttcctggtgctgctaggcctcctcatcaaacattccattgcattgtrttgttaattcaaacaaatacggtctccttgacagacaactcctccagacaggtggagttttatattggatttctctgtgtagtttttaatttttatgtttatatgtatgtattttttgctttgtggactctcgatttgataaggggttgatgaaataacacatcc

SEQ ID NO: 2441 - DNA, 599 bp, Chicken  19866894089436_3
  misc_feature (1)..(42): n is any nucleotide
nnnnnnnnnnnnnnnnnnnnnnnnnnnnnnnnnnnnnnnnnnaatttcagtgctatttattttataataaaatcttcccttttcttatccattttactcccataaaggtctcaaacaatatattcagtcctagccaaaaggtcactgttgtcctacaacagagtcctccctccccttcatggcacttctggatgctgtgaatagagctctctttctgaggctgagctctatcagcaggaaggtgcccaggaagcagcaaagtgtyaccctccaccrcctcatacacactcctggaggtcragtacatcacccctgggagctgcataaactgtgcagggaaagggaagaacrgtcacaccagacttcctggtgctgctaggcctcctcatcaaacattccattgcattgtrttgttaattcaaacaaatacggtctccttgacagacaactcctccagacaggtggagttttatattggatttctctgtgtagtttttaatttttatgtttatatgtatgtattttttgctttgtggactctcgatttgataaggggttgatgaaataacacatcctggaatatccagtagtcaaagggc

SEQ ID NO: 2442 - DNA, 600 bp, Chicken  19866894089436_4
gctatttattttataataaaatcttcccttttcttatccattttactcccataaaggtctcaaacaatatattcagtcctagccaaaaggtcactgttgtcctacaacagagtcctccctccccttcatggcacttctggatgctgtgaatagagctctctttctgaggctgagctctatcagcaggaaggtgcccaggaagcagcaaagtgtyaccctccaccrcctcatacacactcctggaggtcragtacatcacccctgggagctgcataaactgtgcagggaaagggaagaacrgtcacaccagacttcctggtgctgctaggcctcctcatcaaacattccattgcattgtrttgttaattcaaacaaatacggtctccttgacagacaactcctccagacaggtggagttttatattggatttctctgtgtagtttttaatttttatgtttatatgtatgtattttttgctttgtggactctcgatttgataaggggttgatgaaataacacatcctggaatatccagtagtcaaagggctgctcttaccaactggagcctgacactcatcatcacaataaatatgtttaat

SEQ ID NO: 2443 - DNA, 600 bp, Chicken  19866894089436_5
tcaaacaatatattcagtcctagccaaaaggtcactgttgtcctacaacagagtcctccctccccttcatggcacttctggatgctgtgaatagagctctctttctgaggctgagctctatcagcaggaaggtgcccaggaagcagcaaagtgtyaccctccaccrcctcatacacactcctggaggtcragtacatcacccctgggagctgcataaactgtgcagggaaagggaagaacrgtcacaccagacttcctggtgctgctaggcctcctcatcaaacattccattgcattgtrttgttaattcaaacaaatacggtctccttgacagacaactcctccagacaggtggagttttatattggatttctctgtgtagtttttaatttttatgtttatatgtatgtattttttgctttgtggactctcgatttgataaggggttgatgaaataacacatcctggaatatccagtagtcaaagggctgctcttaccaactggagcctgacactcatcatcacaataaatatgtttaatcatagctttgtcttacggtattcagtgggagttcttagagtgatgtttgactctgtatg

SEQ ID NO: 2444 - DNA, 600 bp, Chicken  19866894089443_1
gtacctgggaggtgttggttggattggatataagtgctcattctatttcttctccctgtttaggttatgaatacaacgtgaagaaatacggagagtaagtatcattacagaatctactgtctgtgagtagaatacataagaacaaacctattggtcccttgcctctgctgtcattaagagcctgaaacagctgaggatgtgtttagtaagaatacattcacctacagcacagactgatagagtttatttgttttactctctagtcattattagggtaatgttcccaggaaatacatgctygcttcatrgttgaatatcaggaagcaaattccatgctgttaaaatgtagcaggagagaatggcttgtagggatcgtttggcatctctggttataatttgggaactgattcacagatcatgtttatgtgagatgtcgttaggagttagtggtaaaggcataatgcacagatctactgtagaatgctgtgagatggacctaggacaagatggtgtatctggatccctttatgtcttattacccgtagtaaagtggaagaagtgggaaagttccagaacagattggttccccctttttccaga

SEQ ID NO: 2445 - DNA, 600 bp, Chicken  19866894089443_2
gaggtgttggttggattggatataagtgctcattctatttcttctccctgtttaggttatgaatacaacgtgaagaaatacggagagtaagtatcattacagaatctactgtctgtgagtagaatacataagaacaaacctattggtcccttgcctctgctgtcattaagagcctgaaacagctgaggatgtgtttagtaagaatacattcacctacagcacagactgatagagtttatttgttttactctctagtcattattagggtaatgttcccaggaaatacatgctygcttcatrgttgaatatcaggaagcaaattccatgctgttaaaatgtagcaggagagaatggcttgtagggatcgtttggcatctctggttataatttgggaactgattcacagatcatgtttatgtgagatgtcgttaggagttagtggtaaaggcataatgcacagatctactgtagaatgctgtgagatggacctaggacaagatggtgtatctggatccctttatgtcttattacccgtagtaaagtggaagaagtgggaaagttccagaacagattggttccccctttttccagattctggac

SEQ ID NO: 2446 - DNA, 600 bp, Chicken  19866894089443_3
agtgggaaagttccagaacagattggttccccctttttccagattctggacaaatttgtgagggaaaagaagacacagattagccagagatctctcggtgttagtagaaaagacagtaaaagcaagagagaggagaaactgattccctaataagtagtatgatcctctgaaatctgtttgacgggttaagggcaaacacaggaaaaatatccgtgtgcagtggctgccaatactttctccagggaagctttgtagaaacagaaaaggattcttcagggattactgtcaaaatcaccagcrtttaacaaagaattaaatcctytatgagttttktcagctgtcctccagatgtatagccaataaacaatttaaattcttgagaaagctattgtgargggaaaaaaaaatgtaaaaggagccagttactaaaggatgtaccaataaccatttttcacccccattgattttccaggaaggatgtaaaccttaaagaatttacagtcgacacaacagatctgactcagtacaaaagtgaagacatcaggctgggtatgtatcagctagcagccattctccagacctgttcagaacttcttataa

SEQ ID NO: 2447 - DNA, 600 bp, Chicken  19866894089443_4
ttggttccccctttttccagattctggacaaatttgtgagggaaaagaagacacagattagccagagatctctcggtgttagtagaaaagacagtaaaagcaagagagaggagaaactgattccctaataagtagtatgatcctctgaaatctgtttgacgggttaagggcaaacacaggaaaaatatccgtgtgcagtggctgccaatactttctccagggaagctttgtagaaacagaaaaggattcttcagggattactgtcaaaatcaccagcrtttaacaaagaattaaatcctytatgagttttktcagctgtcctccagatgtatagccaataaacaatttaaattcttgagaaagctattgtgargggaaaaaaaaatgtaaaaggagccagttactaaaggatgtaccaataaccatttttcacccccattgattttccaggaaggatgtaaaccttaaagaatttacagtcgacacaacagatctgactcagtacaaaagtgaagacatcaggctgggtatgtatcagctagcagccattctccagacctgttcagaacttcttataactaaggactttctaatgacgtt

SEQ ID NO: 2448 - DNA, 600 bp, Chicken  19866894089443_5
tttttccagattctggacaaatttgtgagggaaaagaagacacagattagccagagatctctcggtgttagtagaaaagacagtaaaagcaagagagaggagaaactgattccctaataagtagtatgatcctctgaaatctgtttgacgggttaagggcaaacacaggaaaaatatccgtgtgcagtggctgccaatactttctccagggaagctttgtagaaacagaaaaggattcttcagggattactgtcaaaatcaccagcrtttaacaaagaattaaatcctytatgagttttktcagctgtcctccagatgtatagccaataaacaatttaaattcttgagaaagctattgtgargggaaaaaaaaatgtaaaaggagccagttactaaaggatgtaccaataaccatttttcacccccattgattttccaggaaggatgtaaaccttaaagaatttacagtcgacacaacagatctgactcagtacaaaagtgaagacatcaggctgggtatgtatcagctagcagccattctccagacctgttcagaacttcttataactaaggactttctaatgacgtttctatgttcac

SEQ ID NO: 2449 - DNA, 590 bp, Chicken  19866894089443_6
cggtgttagtagaaaagacagtaaaagcaagagagaggagaaactgattccctaataagtagtatgatcctctgaaatctgtttgacgggttaagggcaaacacaggaaaaatatccgtgtgcagtggctgccaatactttctccagggaagctttgtagaaacagaaaaggattcttcagggattactgtcaaaatcaccagcrtttaacaaagaattaaatcctytatgagttttktcagctgtcctccagatgtatagccaataaacaatttaaattcttgagaaagctattgtgargggaaaaaaaaatgtaaaaggagccagttactaaaggatgtaccaataaccatttttcacccccattgattttccaggaaggatgtaaaccttaaagaatttacagtcgacacaacagatctgactcagtacaaaagtgaagacatcaggctgggtatgtatcagctagcagccattctccagacctgttcagaacttcttataactaaggactttctaatgacgtttctatgttcacttgtagtaacctaagtttgggctgtaaatgcacacttaggagaatctcaccc

SEQ ID NO: 2450 - DNA, 600 bp, Chicken  19866894089455_1
tggaaaggaaatgtccatctggtggaagaattaagaaagtccctcaggataggcttgcagttcagatcagagctcctcagctatgattccttgagtagcttctctgattgcttgctccagcctagcgtctattttattatgtaaaggaataacttttggaaatagtacctctaggtttttctgtcagtctgttcaatgttaatataactctagacattagaaacatttttttagttgcattaaaataacccaagatctggagattcaggttgttacttacaaaaaggagtaggcaaactrgatctcttctgtggctctgtttaaccggagttctggcagtgagctgatttaacaaacaataagttagatgcattagaggtctgcaagctcatttagcccttcttgtctggccaaagcagtactgacctcagctatttctatctgaatttatagttagttaggtagtgcatttccttgggtttctacctgtcagtctaatrttaggtaatctacttacagatttcagcacactataaaccaaagaattatcatttatcagagttatayttttaaaatgataatgctggatataatattcac

SEQ ID NO: 2451 - DNA, 600 bp, Chicken  19866894089455_2
aatataactctagacattagaaacatttttttagttgcattaaaataacccaagatctggagattcaggttgttacttacaaaaaggagtaggcaaactrgatctcttctgtggctctgtttaaccggagttctggcagtgagctgatttaacaaacaataagttagatgcattagaggtctgcaagctcatttagcccttcttgtctggccaaagcagtactgacctcagctatttctatctgaatttatagttagttaggtagtgcatttccttgggtttctacctgtcagtctaatrttaggtaatctacttacagatttcagcacactataaaccaaagaattatcatttatcagagttatayttttaaaatgataatgctggatataatattcactatttaggatacctctcctgatttgagcactttaaaccacaaaactaaaacatccatatttccagtatatatatttaatcctgctacaaagaaggataataatgttgaatagaagttaatcttttcctatttaaagaatcaaggtttcttagaacaggaaagatcaattttgctcagctcccagtagatgctcataaaca

SEQ ID NO: 2452 - DNA, 600 bp, Chicken  19866894089455_3
ggttgttacttacaaaaaggagtaggcaaactrgatctcttctgtggctctgtttaaccggagttctggcagtgagctgatttaacaaacaataagttagatgcattagaggtctgcaagctcatttagcccttcttgtctggccaaagcagtactgacctcagctatttctatctgaatttatagttagttaggtagtgcatttccttgggtttctacctgtcagtctaatrttaggtaatctacttacagatttcagcacactataaaccaaagaattatcatttatcagagttatayttttaaaatgataatgctggatataatattcactatttaggatacctctcctgatttgagcactttaaaccacaaaactaaaacatccatatttccagtatatatatttaatcctgctacaaagaaggataataatgttgaatagaagttaatcttttcctatttaaagaatcaaggtttcttagaacaggaaagatcaattttgctcagctcccagtagatgctcataaacaagatctttgtgtccactgatctggagaaaaggaagtgtatcaacatcaaggatgaaacattacagct

SEQ ID NO: 2453 - DNA, 600 bp, Chicken  19866894089457_1
tgcactgacaaatgaaaataggtgactaatgtcaattgtcttttgatacttcatactctactctgcttgccaagaatgcctcatgttctgtgatcatttaaaatcctacacactcagaaaagtcactctgtttttcacagagactgattgcagttagctgttaaaagaatacaattttgagcaaatgctcaccgttatttttttatatttacttagtataagaagaaataatgaagtaagactgcaaagaacctcttagtcatatggtctgatctcccctttctcctctgtcattaaatktcatacatgtacaagcactgagggcagtaatctgtacttggctaaaacctgtctttcaggaaggtaattttcctggttggaagatataaaaacattaaaaatttcttattgccctcatgagcttgttccagtgacatactgtcaatttcagaagagaaatagagtgcttcatttgaatttgtctgacttcagcttctatcacagcttcttgttatgctattctctgctagattaaagagctcttcagaatttcatattttttctccatagaggtacttatatgctgtaatcaagtcaatc

SEQ ID NO: 2454 - DNA, 600 bp, Chicken  19866894089459_1
ggtctccgtatcccgtttggccgcgccgtcccgcacagatatgcggccttcgtccgctgtgccgggcccggcggtgctgaagacctccgtccctctgtcgctctggcacagtgcggctgcggcgcgcgttcctttcgtccttccgtctctgagggcctctcggggctgatctcctgcggcagaggcgtttttcagcccataccgagctctcgtgtcttctggactttaaaggtcacgcttggcccgtggcagagcccagttaacgaacttgctagccattgggttggagcaatggctgcycgaggcccttgttagtaatgtggcagtgtgtgagcctccttgagcttggagccggctcgttagctacgggggtctgtcatgggtttgttatttggaagcagtacatcagaagactcgggtgagcctctccctgggctctgtgcagcacaaaggtgcgttccttggggcggcccgtgctggttttggtctgagtcagtagcgaggtgggtccagcagtgagctgacatacttagacttggaaatttacagatcctgcctcgaactgatgcaacatcaaacgtagtgttggtttgcatcatc

SEQ ID NO: 2455 - DNA, 600 bp, Chicken  19866894089461_1
ctctccttgcatctacttgacacttcctatgtgaaacctgccttcttgtcctgagacagaggtgtgaggatgtacatactcatcagaagcaaaatcttaaagacgttaatttaacacacagtgacccagttatctccattttcagagcagtaccacttcagatccatcaagagctttggatcccaccattctcacctggaacgtgatatatttcatcccttacaccaaatgccttcccagaaactgtgtatcacacagaccactcagtgaagagcacaaccacccacttgccagtggggwgatgtttttatacaacatccacttcatctccagcctgtgaatcctgaccctcaagggtaagctaaaataatactgactctcgagctaaaattcataactctcctggctgtgacaaatcacagcctcaacaagagatatttgttttatggcatattacggcttcccttacaatttacctgtccccgaggatcctaaaggcaayagttgtctgtctgtctgtccacccaggaccaaaagccttcccgctcccccttttccagcatcctcctccgctctccagttgccggctcccttaacaca

SEQ ID NO: 2456 - DNA, 600 bp, Chicken  19866894089461_2
gtgatatatttcatcccttacaccaaatgccttcccagaaactgtgtatcacacagaccactcagtgaagagcacaaccacccacttgccagtggggwgatgtttttatacaacatccacttcatctccagcctgtgaatcctgaccctcaagggtaagctaaaataatactgactctcgagctaaaattcataactctcctggctgtgacaaatcacagcctcaacaagagatatttgttttatggcatattacggcttcccttacaatttacctgtccccgaggatcctaaaggcaayagttgtctgtctgtctgtccacccaggaccaaaagccttcccgctcccccttttccagcatcctcctccgctctccagttgccggctcccttaacacagacagctgcagtcatcaaagctgagagctgtatgtggtgtttgtaagccaaggacagatttctctcacgctcctgacgagcgacttacagcggagctcccgaactgttgcccctcttctactatagtagcaaaagcatgtaggtcaagagccatgggatctgctagcaggctgctaccctgactccctcgcctgggttggtg

SEQ ID NO: 2457 - DNA, 600 bp, Chicken  19866894089465_1
agaggactcacttgtacttaaaccagagaacctgcattcaaagatgcaagtctgtgttagttgaagaagttcaaatgctggcaaacaaaaattttgggccagacgtatatttgaaattgcaaagcatgtctatgttgttacacaatagaaagtattaggaaataataagttaaagcactaaaaaacactttagctagactttaaagcctcgataaaattctaatgtcactgaagaaaccaaattgaaggtgacaagaatttctgtaggatctaatcatgcatgcaggaagaaatcttgtraaaataatctgaccagagaaacaagagcttaatggcagttttgatgatctgatgctcaaaaggaatgcctaaaaatttaatgtcattggtgtgaaaccattttcaagtggtttccagttaagatatatatatatatatcatagctaatttgagtgttaaatgtacaggttattaattataattagaaacacttgtcatattccagacagaagattaaggttatttccttgacttgcatggtacattatcctgacattatgcaaaacccgtggtctaaaaaaaaattaaaaaataaaaatg

SEQ ID NO: 2458 - DNA, 600 bp, Chicken  19866894089468_1
atggcttagataagataatttcatcttctgttttatggtcatgagcaacagcttttttaagtatttcggagataccacacctaacagcctcccagctttggtctggttttcttcttatgttatgacatgctgggaagaaattattatgttttaaatgcgaaccttgcagtaaaatattttcatgctaagttaagctatcatcaaaagatactggctgtctagcttaagaagcagtctactgataacagaacaagaaaatggcgttttgtagtgaaaagaaggaattagcaaagtgccacraaagtcagtagagataagcagagcaattgcaccagcccccactacttcactgagaagtgaaagcagagtatacagtatattattctaatgatcatccagcctcaaacacactctcctttcagggaaaaatatgaaaacaaacatacaaacaaaaaaccaaagctattttggccacagaaacattaagacatgggccacggggactgatgtgtaaggaaaagtaatcagataaatagagcttgatctcgagctgatgaactggaagtaacaaattgaaacgagcagaattttactatttta

SEQ ID NO: 2459 - DNA, 600 bp, Chicken  19866894089484_1
tgtagtggatgcagtttcaagttaaggaaatgtgagcaagcttggcctccgtttcatagcaaaatgtgattgggttccagttcttttgaccaagcagaatttttccaggcagcagcactgagtgcgcactgatgagtacatagtacactcttcaccttcttgtttttcttatgttggtgtttgctcttcttgggaccatactgggacattccttattgatgctgggttctgagttgctgcagggaatcaacagtggctgtgaaattcagatagttgtgttgttgccttgcagtgcttagyccatatcttttcaaggatctgtctgcaagtgtctgcttagatttcagatgttcctgggagctacagaagcactttttgtccattgtaatagctacttttctagaatggtcattttacaaaaagagaagggagttggcaatctattctggatttaaggaagtcaaaactcggaattcagaaattccaattcagaggtatcggtagaaaatgtttttcctgggaggaaggaaattagttggtttgtgaagcatcctggatatgttggatgtggctttttgtagtgataatatgggttcagca

SEQ ID NO: 2460 - DNA, 600 bp, Chicken  19866894089491_1
tacttctgctctggatagtgatattgtgttccctggccttccaaaagctactgaaatattaaggattttgtaatagaaatatcagtgtggatggatctttgtgtttcctccctgcggcagtacttgcacaggccccagctctgcaaacacttgtggatcagctttatctgaaggttggccgaattgctcaatgcaaaatgtgcatgcaggagccttgtaggatggacatctgcagattggcagcaatgctttgccacttccggtccctcaaactatcagtttatatttgatcattaagaraatgatagagtaatgccccaggatgtttgtatttctccaccagcctccaccttgcattaaacttatttaacaaatacattattgctggtgtctgcaatacttcatttggaacctcacagtgtgtgaggtacagcaataactgtgttgattaacctaattagtcacacaggttcagattcaattttgctgtttgtttcagagttgaaagggatttttctggctaatacttgactttctcacatgatctgaagaactgcccgtctgctgagacttcctctagcagaaggagtcatagaatta

SEQ ID NO: 2461 - DNA, 599 bp, Chicken  19866894089493_1
  misc_feature (1)..(41): n is any nucleotide
nnnnnnnnnnnnnnnnnnnnnnnnnnnnnnnnnnnnnnnnnctgacaacttcagaccacaaaaggttttggccatgtttttggagtaatgatgcaaactcaaaaagcctggatgctttcctgtgtaacatactctagggaatctgctttagtgagggagttggattagatgatcaccagaggccctttccaagccatgtggttctgcgattctgtgaaatcaaattgcattgtgaaggtctgggttcaggcccttctcccattagttgagaacgcaagtttgaaggaaggaccgttgtcycttgttacagaatcttaatagcaaggctaaaagatatggccacattttcacattaaaattcatcaagcgaacaactataatgtgggtgctcagatagaaagtaygatattcttgcttgtatttaaaccttattagtattttaatggatatttttaaaagccctctctgaatgtcccatatcagaatccttagggtagtttgctgggactgtggagttagaagtgaggagcagaatttaaatctctgtgcctcaggataatttttaatagttaggaaaagtagatatgtagctttacacc

SEQ ID NO: 2462 - DNA, 600 bp, Chicken  19866894089493_2
agcctggatgctttcctgtgtaacatactctagggaatctgctttagtgagggagttggattagatgatcaccagaggccctttccaagccatgtggttctgcgattctgtgaaatcaaattgcattgtgaaggtctgggttcaggcccttctcccattagttgagaacgcaagtttgaaggaaggaccgttgtcycttgttacagaatcttaatagcaaggctaaaagatatggccacattttcacattaaaattcatcaagcgaacaactataatgtgggtgctcagatagaaagtaygatattcttgcttgtatttaaaccttattagtattttaatggatatttttaaaagccctctctgaatgtcccatatcagaatccttagggtagtttgctgggactgtggagttagaagtgaggagcagaatttaaatctctgtgcctcaggataatttttaatagttaggaaaagtagatatgtagctttacaccatctcttcagcaaaaatgttttctttgtcttttctttctattagctgagacctttaggcaaatcagttagccatcttcaatcacattttttttcttttgcttaaa

SEQ ID NO: 2463 - DNA, 599 bp, Chicken  19866894089494_1
  misc_feature (1)..(33): n is any nucleotide
nnnnnnnnnnnnnnnnnnnnnnnnnnnnnnnnncagaactgtgtgtgcccagatttggatgtattgctctgcagagtgcagtacagcaggtctctgatacacagaggtttgagttgaactaggtctttaaagaagctttcatgtgtacttccatcactcaacacattaagcagttgaagttttgattagttgaatatatatgtatatataatacccttttacccagacaaatgtcagggtttacaatatcaccccccacagagctcttatgctgccccagagcagacggtgaacgtgctsgggctgctgcccagacgcctccaccctgccatgtacaggatatacacatatcggatgtgtggttcagttacacctttaaaatgaaagccacagatagctctggtgcttgcagggtgcttggttccatttcaggacggtgtgggttggtagtgtggaattggagctcagtcctggggtgaaccgctggagatgcaggatctgaatccagggrgtctttcgattcagatgttgtcgtgttggggcccgcaatgcacccctgctgtgtgtgggaggcgagcagaggacttgcttgctgtacc

SEQ ID NO: 2464 - DNA, 600 bp, Chicken  19866894089494_2
tacccttttacccagacaaatgtcagggtttacaatatcaccccccacagagctcttatgctgccccagagcagacggtgaacgtgctsgggctgctgcccagacgcctccaccctgccatgtacaggatatacacatatcggatgtgtggttcagttacacctttaaaatgaaagccacagatagctctggtgcttgcagggtgcttggttccatttcaggacggtgtgggttggtagtgtggaattggagctcagtcctggggtgaaccgctggagatgcaggatctgaatccagggrgtctttcgattcagatgttgtcgtgttggggcccgcaatgcacccctgctgtgtgtgggaggcgagcagaggacttgcttgctgtacccctggcacccataagggttggagcacttactgcaggttgaaggatgctgtgtggtgctgagctgtccagagctgtgcccgttccccctcactgcagtgtggaggcgtggggcatcgcctgctctgtgctcacccacctcaagcttggcaggagcttggtgcttgaaagatggctgggttgagcacaaacatcctgttctgggttagaatttc

SEQ ID NO: 2465 - DNA, 599 bp, Chicken  19866894089497_1
  misc_feature (1)..(217): n is any nucleotide
nnnnnnnnnnnnnnnnnnnnnnnnnnnnnnnnnnnnnnnnnnnnnnnnnnnnnnnnnnnnnnnnnnnnnnnnnnnnnnnnnnnnnnnnnnnnnnnnnnnnnnnnnnnnnnnnnnnnnnnnnnnnnnnnnnnnnnnnnnnnnnnnnnnnnnnnnnnnnnnnnnnnnnnnnnnnnnnnnnnnnnnnnnnnnnnnnnnnnnnnnnnnnnnnnnnnnnnnnttaatcttcacagacactccactgctgtttgctcattttgatgtccacagcggggtctgggtgtgcacagggtcagctcctckgtgccacctgtttgctccaagcacctcaaatcccatgcattttgttgctgtagatgcagaggacgaagctgcagctttccagcctcttgctgaattttggaggtttggacctcaaccttgagaacctcttggttctcaagaaggtgtgagccttgcaacccaaccaccgtgaactgacaaacaggtttcacttctttgtcctttatgggcttctgctcgctgctgtttccttgggcctctattcatcatctgtaatatgggcacagtaatgccttctttccacttttcacctgtcctac

SEQ ID NO: 2466 - DNA, 568 bp, Chicken  19866894089508_1
catttccatagaaacagagggagggtaacagcccacttgtttgaactgtcttgtagatttcatctgtgtcagaatgcaagcatataaagcattttaaaatgtgggaaaatcctggggttttgttcttagctttttttctttttttccagaaatgctgaagagaccattagtggctttcttggacactttattctggatgaagagaataaaaatgaaatattttagttcctaaattgactggagagtgaagaggaagaaaaagaggtaaggaggtatggtaggaaaatagttatatatatragaaagtgtttcatacaagttgaaggtagttccaatccaacaagtgctacagytttgctactgtgctgtatatttagtgatttttttttccctaatgggaaattttaggccatctaactcagctttcttctacgattccacactgtaagtttatttcctaactgacagcatggatgtaatttgaatttctgtacactaagccatgacatgattttcaaattggcagtttggctgaagttcagagaaaaatgattaatatagagaaaaa

SEQ ID NO: 2467 - DNA, 515 bp, Chicken  19866894089508_2
tagatttcatctgtgtcagaatgcaagcatataaagcattttaaaatgtgggaaaatcctggggttttgttcttagctttttttctttttttccagaaatgctgaagagaccattagtggctttcttggacactttattctggatgaagagaataaaaatgaaatattttagttcctaaattgactggagagtgaagaggaagaaaaagaggtaaggaggtatggtaggaaaatagttatatatatragaaagtgtttcatacaagttgaaggtagttccaatccaacaagtgctacagytttgctactgtgctgtatatttagtgatttttttttccctaatgggaaattttaggccatctaactcagctttcttctacgattccacactgtaagtttatttcctaactgacagcatggatgtaatttgaatttctgtacactaagccatgacatgattttcaaattggcagtttggctgaagttcagagaaaaatgattaatatagagaaaaa

SEQ ID NO: 2468 - DNA, 600 bp, Chicken  19866894089512_1
caacaaagcagatacgttccctgcagtcccaatggtctgcaggtttatttttggcagattataattaaaatgatcgccgtggctttagagagaagccaccaagggcattgttctggttgaagcacgcgtgcagggatgctgcagggccctgcccttcccccagccacacacactgctgggggcactcggctctcattagtgttcgtgtttctcatcagcaacgtacaacttctggttcctaaccagtccagtcccagaggcagagtaaaaaaagtccttgtgaagatccagaaacacttygtgttcctaagaatatcaaatccaagcacgtgcaaacgctgttcctggttgggtgcgtttcgctccggttcctccacttgtgcagcrgcattctcctgcagacagactccattcctcttccattctcccccttccagtcctctccggagccttgacaagccacccctccatttttgtcctcyacatttttcccctgcacatccttcctgtccttccctcttcctccggcgcgccctgttcctctccagctattttcggaaattgaagatgtcgtgtgttttcacgcctctcctgccttca

SEQ ID NO: 2469 - DNA, 600 bp, Chicken  19866894089512_2
gagagaagccaccaagggcattgttctggttgaagcacgcgtgcagggatgctgcagggccctgcccttcccccagccacacacactgctgggggcactcggctctcattagtgttcgtgtttctcatcagcaacgtacaacttctggttcctaaccagtccagtcccagaggcagagtaaaaaaagtccttgtgaagatccagaaacacttygtgttcctaagaatatcaaatccaagcacgtgcaaacgctgttcctggttgggtgcgtttcgctccggttcctccacttgtgcagcrgcattctcctgcagacagactccattcctcttccattctcccccttccagtcctctccggagccttgacaagccacccctccatttttgtcctcyacatttttcccctgcacatccttcctgtccttccctcttcctccggcgcgccctgttcctctccagctattttcggaaattgaagatgtcgtgtgttttcacgcctctcctgccttcacctcctggcttgggagaagactcctccaccagccccccataggggcagccctcggccgcagggtggtgaccagagcactccactgct

SEQ ID NO: 2470 - DNA, 600 bp, Chicken  19866894089512_3
cactcggctctcattagtgttcgtgtttctcatcagcaacgtacaacttctggttcctaaccagtccagtcccagaggcagagtaaaaaaagtccttgtgaagatccagaaacacttygtgttcctaagaatatcaaatccaagcacgtgcaaacgctgttcctggttgggtgcgtttcgctccggttcctccacttgtgcagcrgcattctcctgcagacagactccattcctcttccattctcccccttccagtcctctccggagccttgacaagccacccctccatttttgtcctcyacatttttcccctgcacatccttcctgtccttccctcttcctccggcgcgccctgttcctctccagctattttcggaaattgaagatgtcgtgtgttttcacgcctctcctgccttcacctcctggcttgggagaagactcctccaccagccccccataggggcagccctcggccgcagggtggtgaccagagcactccactgctgggatgaagccgctgtcccacatccccgtcccrcacagctggcacaggtcatgcagactgcaggggatgcggggcagcaggtggaactgatagag

SEQ ID NO: 2471 - DNA, 600 bp, Chicken  19866894089512_4
cattctcccccttccagtcctctccggagccttgacaagccacccctccatttttgtcctcyacatttttcccctgcacatccttcctgtccttccctcttcctccggcgcgccctgttcctctccagctattttcggaaattgaagatgtcgtgtgttttcacgcctctcctgccttcacctcctggcttgggagaagactcctccaccagccccccataggggcagccctcggccgcagggtggtgaccagagcactccactgctgggatgaagccgctgtcccacatccccgtcccrcacagctggcacaggtcatgcagactgcaggggatgcggggcagcaggtggaactgatagagcaggctcctcgcctagagrggagagagacaaagtcattccctcgtgccagggtgtggatacaaagcactggggttgccatcgggccctgctcagctctgtgagaggagttgaaacttgggacacccctcctgaacagccagctggaggttaaacaggacctggaggcactgccagcaggtgtatttagcaggagctgctctcaacgcgggattcctgccccttggcactgcagtgcct

SEQ ID NO: 2472 - DNA, 600 bp, Chicken  19866894089512_5
ccttcctgtccttccctcttcctccggcgcgccctgttcctctccagctattttcggaaattgaagatgtcgtgtgttttcacgcctctcctgccttcacctcctggcttgggagaagactcctccaccagccccccataggggcagccctcggccgcagggtggtgaccagagcactccactgctgggatgaagccgctgtcccacatccccgtcccrcacagctggcacaggtcatgcagactgcaggggatgcggggcagcaggtggaactgatagagcaggctcctcgcctagagrggagagagacaaagtcattccctcgtgccagggtgtggatacaaagcactggggttgccatcgggccctgctcagctctgtgagaggagttgaaacttgggacacccctcctgaacagccagctggaggttaaacaggacctggaggcactgccagcaggtgtatttagcaggagctgctctcaacgcgggattcctgccccttggcactgcagtgcctacatctgccctgcagcctgggcttggtgctgctgtgtgctggcacgtcccagcagcatcaccctgctcttgcaggctgcag

SEQ ID NO: 2473 - DNA, 600 bp, Chicken  19866894089512_6
gacacccctcctgaacagccagctggaggttaaacaggacctggaggcactgccagcaggtgtatttagcaggagctgctctcaacgcgggattcctgccccttggcactgcagtgcctacatctgccctgcagcctgggcttggtgctgctgtgtgctggcacgtcccagcagcatcaccctgctcttgcaggctgcaggcaagtgggggatataggaggtgcaggagatgaagcaccagtccctggttttctccatgctctgactcatctcgcgggcctgagggcccacctcagcacscagacatttaccttcctgagtacgagttctccattcatgtgcatagccaggttgccaaaatgcagcagcatctgatcagtggccagctgttgttcaatgacatcatccccataaatcaccacaatggccacacagatgaagaggtggaagtagtctgtctgcaaggagaacatgggctgggttacagcaggtggaggctgagctctggctccccaccctccacaagcacgtccygaggagagatttgttgctccttccagttctgcctagtggtgctcatacaggggttgttgtggattc

SEQ ID NO: 2474 - DNA, 600 bp, Chicken  19866894089512_7
gcaccagtccctggttttctccatgctctgactcatctcgcgggcctgagggcccacctcagcacscagacatttaccttcctgagtacgagttctccattcatgtgcatagccaggttgccaaaatgcagcagcatctgatcagtggccagctgttgttcaatgacatcatccccataaatcaccacaatggccacacagatgaagaggtggaagtagtctgtctgcaaggagaacatgggctgggttacagcaggtggaggctgagctctggctccccaccctccacaagcacgtccygaggagagatttgttgctccttccagttctgcctagtggtgctcatacaggggttgttgtggattctgaatcacagctgagtcaaagtctctcacctttaaagtgtgggagtgtggtttggaccacagctttcaaagcagactagtgactctgggaagacactgtccggctgttaaagaggagtctgaatctcagaatggatggtcagcacattctaaaaagcatagacatccccaagctggggagcagcatccatccttttgctctacaggtaaactctggtagttacagactctctga

SEQ ID NO: 2475 - DNA, 600 bp, Chicken  19866894089513_1
cacatgcgcagagcctcagcgtcagggaactcccgtttaaagcagaggaggatccagcggtgacagaagagcatctgcaggccgtcctctcccagtgcagaaaggtgctggtagaagcgtgggtgcatgagccgcagcagctcccgcaggtacatctgcaagagatgcatgtggctgagccactgcctgtgtgccaggacctgcacccccagagcccccccatgtccccagcacaatccaggcccactaacactggtctcagcttcgtcctcccacacagagccccagctcacagccccrgctcacaggcagctccttacgttcagccaggagcaccccaggccactgcagctattccacaaggaaggagggagggtgaaaagaaaaccccaggactgctacgttgtgaaaaggaagacggagagaatcaggctgggcaaagcagcatgcaaccctgagaacagacaggatgtggctatctacagtatttcatttcagcaggggctgtgcaatgtgtgagtgatactaggaagcctggtgctatgggcaccgagcagagcatggttcatacaagaactaattgcaccccacctgcagcac

SEQ ID NO: 2476 - DNA, 599 bp, Chicken  19866894089518_1
  misc_feature (1)..(1): n is any nucleotide
ncttctatgatggagtgatggcttcagtggatgggagaagggtgatggatgtcatctacatggacttctgcaaagcctttaacatgctccctcaccacatccttctctctaaattggagagatgtggatttgaaggatagactgtttgatggattaggagttggctggctggacgcagccaaagggttgtgatcaatggttctgtgtcagggtggaggccggtcacaagggggtctcaggggtcagtcttgggactagtgctcttcaacatctccatcaacgacatagatgatcgcatckagtgcaccctcagcaagtttgcagatggcaccaatatgagcagtgcagtgaatacattggaaggaagggaagccatccagagggacctggacaggcgggagaagtggacccatgaaaaccctaatgaggttcaataaggccaggtacagggtgctgcacttgggtcggggcaatcccaggtatttatacaatctgggggaagatctccttgagagcagccctgcagagaggacctggggggtcctggtggacaagaagctggacatgtggcagcagcgtgcacttgtagcccggaaggc

SEQ ID NO: 2477 - DNA, 515 bp, Chicken  19866894089523_1
atgcaaagtggttgagggaatcacaaaagctccatgttgcctaggaaattctttaaattacttttctcctccaatggtaaaaggacaatatgtagcaaacactactcctttatctcccattcctaatgccttcctaagggctgatctaaagtctcctgaaaccaggagaatgacacctacagatatcagcacattctgtatcagcgtttcttttggacaggaggtatttttctaatgggaatgtaagaaaagtgcaagctttatgaatgaggtaagagaatgaggtatttgattactctragtcagtagcaccagcgtgtgtaggtgggatccaaagccagcctaagcttagtctcccatgcctgacatcattgctccaagatgcaaagaatagctgagcttttaaatgtatgtcttacacacacaagataaaaccaaatagatcatttttgtgaatttatcacagagctaaatgataaagttacagattatgaaggaaactggggccttcctat

SEQ ID NO: 2478 - DNA, 600 bp, Chicken  19866894089529_1
cacagcagatgctctgatgcatcactggtatgctgtcccctgatttgcatggatccttcctcccgtccatctcctctattccccccagttacagaggagctttctggataacacttcagcatgtttgcaccctgcaccacttcctcctaccagcagcagatttgctgaagacaggtggtcacaaggagataggtggaaactcacacagattttgctaagtagatgttctaggaatggtaggatgcttttgagcatctctgcagcagcaaccacagctccactctgttctagacattacasttgataagtgctaccgagccctgatccccaaaacaggttgagttcagttatttgtaaatgtcagtttccactgcaagctttgactggagagttttcgtaatagttgccttttcttccataatagtgatagtttatgagggactggattaataaaaagtgcactttgccaaagtcatctccaaggtgtctcctctgactgcagcaggcatacatcggggctggattttcccctccccactggaaatcccacttttcccaacactgggagacaaattcatactgatgtcaagaagactgttg

SEQ ID NO: 2479 - DNA, 600 bp, Chicken  19866894089536_1
atataagtaagaaataaagtcacatgaaactggagtagctcatttcaaaatcattttaatgactgatccatttgaatttaagcagatgaaggataagctgaagcagggataaactgaaaaggccatgtgcagagtcccttcattatctacgtgcctagaaactgctgtactttatcatctgctgtctctttttgctatctccctctttaattttcctaaatggctggtgcagtgctgttgagataaggtatttaataaggaaaaggatttagatgttcctacaactccagtctaggctcytttttttaaatgtcatcttgatttgtgctttttttcttctctaagtaataggcatagggattatgaaatgaatcaggaagctgaattccactaacaaaatccttgtatccactggtaacataaataacaattggttcgtagtcaaataatcccagagagcaaccgctgtgagaaccttatcttaggtggattacatttaaaataaaaatttcagaagccatgggcctacatgtatttaatttgaaattaagacttctcttaaaatatacaaaaggaaaagaaaaaaaagcgaaataaagc

SEQ ID NO: 2480 - DNA, 600 bp, Chicken  19866894089536_2
tcttaggtggattacatttaaaataaaaatttcagaagccatgggcctacatgtatttaatttgaaattaagacttctcttaaaatatacaaaaggaaaagaaaaaaaagcgaaataaagcatgcatgaacataaagagtcatctgtaaggcatagatatgttctacttccatgtcataaaactcctcctatagccatgccattgaccaacttgagtgttgctgttcagtttctaccctgagagtgtattttcaggaagtagtcctaatgataagccatattctggcatctttgcaagcwctgagtagcaccttccccaagatgtgttctgcacgtgcctagaggatgtccttgcagataagtctgcagtgttaattcaagtcaccagttttgtagttcacagactagtgtgggaaccagattagggctagtctaaagtagcactctcaggttgagtatagcgctgacactagttcatctgcatcagcttctccactctgcactgttgtacagcactacttgcaaacgtggccataatttaagggtgacaggagacaccaagccattatcgtgaggtgtttatattsaaaattgtatgtg

SEQ ID NO: 2481 - DNA, 600 bp, Chicken  19866894089536_3
atctttgcaagcwctgagtagcaccttccccaagatgtgttctgcacgtgcctagaggatgtccttgcagataagtctgcagtgttaattcaagtcaccagttttgtagttcacagactagtgtgggaaccagattagggctagtctaaagtagcactctcaggttgagtatagcgctgacactagttcatctgcatcagcttctccactctgcactgttgtacagcactacttgcaaacgtggccataatttaagggtgacaggagacaccaagccattatcgtgaggtgtttatattsaaaattgtatgtgtagttttaactctagcccctgtgtttacttagcatgttagtcttcaacatcctacttgcatgttgagttggtctgcatgattccttgcctcatgcattgagctgacttttttcgtggtgtaggagacagtagttcattatttcattacctgtttcagaggagcaattgtgtgacttctgtcagctgctcatagaatgcttcatctgtctctcattctggttgggcattctgtaacaggttcccgccaggatgtcaacctttttggccttccctttgatccttagcca

SEQ ID NO: 2482 - DNA, 600 bp, Chicken  19866894089536_4
tagttttaactctagcccctgtgtttacttagcatgttagtcttcaacatcctacttgcatgttgagttggtctgcatgattccttgcctcatgcattgagctgacttttttcgtggtgtaggagacagtagttcattatttcattacctgtttcagaggagcaattgtgtgacttctgtcagctgctcatagaatgcttcatctgtctctcattctggttgggcattctgtaacaggttcccgccaggatgtcaacctttttggccttccctttgatccttagccataaggactcaacrttataatccccaacgttgcattgtacaacatcaaaacactctctaacatagagagccaccccactgcctttccttccttgtgcaatggcttctagttcctcctgtttgttgcccatgctgtgtgcattggtgtagatgcatttcaattggtctcactgccaaccctggtatgctgcccctagaatattctctagcaagctttatctctagttttatccctttctccctttaaacctgttttaaagctctctcattgagtcctgccaactcccaggctataaacttccctctttgacacag

SEQ ID NO: 2483 - DNA, 600 bp, Chicken  19866894089536_5
agtgaagttgggtatagtgagcgtgtttaattactcacatgctcacttgaaactccagaggttgaatctgttaacagatagttgaacttttctggtgtaaagtataagctagaagtgcccagaagataattacttgttgcatatatatggcagatagtactggacagggaagataggattcttgaatgaagttggaaagactgagggagttggtaggtaggtaattattttccaagacactagtgtgagttcaggtcacaggatatagcagcagcatgatggttgattttcttaggctgwgagttgtttgggttaccccgcaaaatgttgtatttcattcctgacatctttgtcaataaccgtctcagaaatttaaattaatgaagtttaatctactgtttttctatagaaacagctctactggcatgtgaaaagcataagcttgcagtagcctgttctggagattctctgcaacctttccttagctagagggaggaaatgagtagatgctgctgctaattcctacatgttataatggaaactttttatttaaactcaacataattggccttctgcttgtggttaatatctgggtcatta

SEQ ID NO: 2484 - DNA, 600 bp, Chicken  19866894089548_1
aagctcaggcttctgcagcagcagctctcctgtcctcagccttagaggaatagcctgctggctctagtagggtttggatgggacccagatgggtgtagcatggccatatgctttgcagtgatgccccagcagtaccagaaatgatcttggcagcaccagcacatctcatttcccaagccaagcacagtggaaggggtcagggctggcacaacagagaagccagcctgtcacgactttggccttatagcagctacctattgctacagcacagcctgggctttcctcctcccatggtcacascagctatggcgtaccttacccgcccctctcccaggtctcaaacctacactgaattcacaggcttatcctccagcctcagctgtctcagcaggcaatgccaccagtcaccaaacggagagggctagaggctcttccttccccctgcaaggaatgggaaggtttccccttttgcaaagatccagggcttagacacagcatgggctagggctgagtgaagcaaacaccaggcaggtttgagaggtgggagggacctgaaagcatgggaaattcagcctagcagcatcactactacagaaatac

SEQ ID NO: 2485 - DNA, 600 bp, Chicken  19866894089548_2
atcctccagcctcagctgtctcagcaggcaatgccaccagtcaccaaacggagagggctagaggctcttccttccccctgcaaggaatgggaaggtttccccttttgcaaagatccagggcttagacacagcatgggctagggctgagtgaagcaaacaccaggcaggtttgagaggtgggagggacctgaaagcatgggaaattcagcctagcagcatcactactacagaaatacatttctaaagtgaggagaaacgtacaatgtaaataaataagtgtgcacatgcattaaaacctayagtaaggcgtaccatctgtgcaaaatgaatagacaccaacctcatcaagcagttggtcaactcttcccaaaatagccgtctccatttggtctgctgagagccaggcagggagctgcgtggatctgtccgcttccaagtgggacacccgggattgcagatcagaggtccgaaagtacagcaggaggctgagcaccagagagagcagggagatgccgggcagccccgagcccaacagcagcgggaggcggcagcatctctccccgtcgccggtcctggggggagccacgcaccccctatcaa

SEQ ID NO: 2486 - DNA, 600 bp, Chicken  19866894089549_1
agttagcacagaaatttgagagctgctaggcacccacagggaaagatctgcgctgcacagaaaaaattgttttgcaaagctatttagacaggaggaggaacattttatctggcaactgagaattctaatcagggagcggagctctctgtgtgcatcacagctggagtattttaaaagcaactggcagtcaaaagcaatccaagcaacacaatcgcatcattaaaaacaagagcacattaaatgtcactttcagacacaaacatggggaacacgagtttcagctccaatcgctccagacgyggcccacagttcatgctgagccacgggcagagtgcacagcgacagcccccagcacgcacccattcccgctcccggtcagcctgtctgtgcgcgcgctgcaactctgscctcacagacagcacagctgtgagcacactgtgcccctgcacccactcccagcacagcacaacagggcggctatgggtcaacctctgcacgggaggcctcatcccagagcaaaagcctgactccttgggctgtgccttcgccatcagtgcagtgcagagctctggccggcgttgggcccgctgggatctctgt

SEQ ID NO: 2487 - DNA, 600 bp, Chicken  19866894089549_2
tctggcaactgagaattctaatcagggagcggagctctctgtgtgcatcacagctggagtattttaaaagcaactggcagtcaaaagcaatccaagcaacacaatcgcatcattaaaaacaagagcacattaaatgtcactttcagacacaaacatggggaacacgagtttcagctccaatcgctccagacgyggcccacagttcatgctgagccacgggcagagtgcacagcgacagcccccagcacgcacccattcccgctcccggtcagcctgtctgtgcgcgcgctgcaactctgscctcacagacagcacagctgtgagcacactgtgcccctgcacccactcccagcacagcacaacagggcggctatgggtcaacctctgcacgggaggcctcatcccagagcaaaagcctgactccttgggctgtgccttcgccatcagtgcagtgcagagctctggccggcgttgggcccgctgggatctctgtggccgcagcacggccccctcccagccaccacctcaccggaatttcactcccaattctctttgttcccagaaaaatgaaactgcctaaaagccccaaatgggcgctct

SEQ ID NO: 2488 - DNA, 600 bp, Chicken  19866894089556_1
gactcactaacagaaattgagacttgggtaaaaacgtacttaggaagtatgggtttaaatcaaatcctgcattttcaaattggagaatatggaatggtagaatcaccaaagttggagaagattccttcaggtcgtccagtccaaccacccatacaccacagtactgcccccaaccacgtccccaagtaccacatctgccctttccttaaacaccaccaggatggtcactgcacgccttcccagggcagtctgtgccagtgcctgactgctctttctgagaggaaagtactcattgaaatmatggcaggttatgaaagrccactggtgtacatctgcagtatagcaaaagtgttgttccagtggatgtctgcatgcagtgctgaatcaaggtgagcagtcactaygggctcttcttgatatatggagatacaaatcaatctgaggcaagactaaaagttgaaggcttctttaatttgtagtgatttgtaatggttacaaacgactgctgcactgctgggcttatcgagggccagaagtaccgtgcctgctgcaggagccctctgcactgtgaagagctgagtgccatgggcagcccagcag

SEQ ID NO: 2489 - DNA, 600 bp, Chicken  19866894089556_2
gagacttgggtaaaaacgtacttaggaagtatgggtttaaatcaaatcctgcattttcaaattggagaatatggaatggtagaatcaccaaagttggagaagattccttcaggtcgtccagtccaaccacccatacaccacagtactgcccccaaccacgtccccaagtaccacatctgccctttccttaaacaccaccaggatggtcactgcacgccttcccagggcagtctgtgccagtgcctgactgctctttctgagaggaaagtactcattgaaatmatggcaggttatgaaagrccactggtgtacatctgcagtatagcaaaagtgttgttccagtggatgtctgcatgcagtgctgaatcaaggtgagcagtcactaygggctcttcttgatatatggagatacaaatcaatctgaggcaagactaaaagttgaaggcttctttaatttgtagtgatttgtaatggttacaaacgactgctgcactgctgggcttatcgagggccagaagtaccgtgcctgctgcaggagccctctgcactgtgaagagctgagtgccatgggcagcccagcaggcagggacagtcagctgt

SEQ ID NO: 2490 - DNA, 600 bp, Chicken  19866894089556_3
accaaagttggagaagattccttcaggtcgtccagtccaaccacccatacaccacagtactgcccccaaccacgtccccaagtaccacatctgccctttccttaaacaccaccaggatggtcactgcacgccttcccagggcagtctgtgccagtgcctgactgctctttctgagaggaaagtactcattgaaatmatggcaggttatgaaagrccactggtgtacatctgcagtatagcaaaagtgttgttccagtggatgtctgcatgcagtgctgaatcaaggtgagcagtcactaygggctcttcttgatatatggagatacaaatcaatctgaggcaagactaaaagttgaaggcttctttaatttgtagtgatttgtaatggttacaaacgactgctgcactgctgggcttatcgagggccagaagtaccgtgcctgctgcaggagccctctgcactgtgaagagctgagtgccatgggcagcccagcaggcagggacagtcagctgtaattgtgtcccgtccattccatgttctctgtgtgcaggaatgagttgctgccagcaccaaacaagcagttttcctcttctgagggc

SEQ ID NO: 2491 - DNA, 599 bp, Chicken  19866894089569_1
  misc_feature (1)..(33): n is any nucleotide
nnnnnnnnnnnnnnnnnnnnnnnnnnnnnnnnnaattcttaaatagtcattactagaaaactaaatgtaactgcctctcaagagaattactgcttaatactattatcttctgtgggcatgtaaagcaagataagtatatagagcaggtgagaatatatatattatgataacttatgtggtttaggcttgttttggaatattgtagcaacttattgctagccaacatcttacatcagtaagaatgtaaaaagtaatgtctggcaatttatgagttcttaataaagcacagtgtttagaagwttaactgttgaagctgttcttgattttgattcagctgatttttgtctgggctcagcactatggcttatccctgtttccctggctccttcagggtctgacagttccaaattcttacttgattggacttaaaaaataaataaataaaaattaggaactgcttaagcagcactgcccctatccgtccccagcccaggtgtgaaattaacattggttcaaaacactggaaattcacacgtgcacacttaaagcacaggttccaggatggacattgcaccacctgtgaattccccaacctaaat

SEQ ID NO: 2492 - DNA, 600 bp, Chicken  19866894089569_2
tagaggtaggttctttcagagtttcacagacacgtggttactaagcacaagataagtaaatttaaaacaactctgccaaaaattaaactggttccacacctataataattactttgatgcttctgaggcatgactgcatttgaagcagaatatattataccacacatcacaattgtccagagctgtcataagccattaagatatacaaagtcacgaccctcagttacacccttagacaatgggtaacacttctttgtgaatgcttctctgtccaagtatctcttgcttgcatgcatcagmtgctctgtgagatacatccctcagctgtggcagctcagcacctttccaccaatttaagtcagctgattgggattgctaaagatagctctcatgtcatactgagctctcaaaagtgttctgaaatgggacatttaaactatttaccacaattctyrttgcagtttaaaagctgcacaatgtttttgaagctttgtgattccagaaatccagtgtctaaatgaaggtctgctgggaaaaaaaaaaatagctgatttgtcacaaaaaaatcaatcttccactgcccaattccgttcttaatga

SEQ ID NO: 2493 - DNA, 600 bp, Chicken  19866894089569_3
ttataccacacatcacaattgtccagagctgtcataagccattaagatatacaaagtcacgaccctcagttacacccttagacaatgggtaacacttctttgtgaatgcttctctgtccaagtatctcttgcttgcatgcatcagmtgctctgtgagatacatccctcagctgtggcagctcagcacctttccaccaatttaagtcagctgattgggattgctaaagatagctctcatgtcatactgagctctcaaaagtgttctgaaatgggacatttaaactatttaccacaattctyrttgcagtttaaaagctgcacaatgtttttgaagctttgtgattccagaaatccagtgtctaaatgaaggtctgctgggaaaaaaaaaaatagctgatttgtcacaaaaaaatcaatcttccactgcccaattccgttcttaatgaatgagacaattcagaaacctatgggaacatgctttattgattcattcacaagtcactcaaacccactgcctcggttccctccgataagacaaaccgcacagcgctcccggtgtactgaattgcaggaaaagccaatgactccacagctgttctg

SEQ ID NO: 2494 - DNA, 600 bp, Chicken  19866894089569_4
tataccacacatcacaattgtccagagctgtcataagccattaagatatacaaagtcacgaccctcagttacacccttagacaatgggtaacacttctttgtgaatgcttctctgtccaagtatctcttgcttgcatgcatcagmtgctctgtgagatacatccctcagctgtggcagctcagcacctttccaccaatttaagtcagctgattgggattgctaaagatagctctcatgtcatactgagctctcaaaagtgttctgaaatgggacatttaaactatttaccacaattctyrttgcagtttaaaagctgcacaatgtttttgaagctttgtgattccagaaatccagtgtctaaatgaaggtctgctgggaaaaaaaaaaatagctgatttgtcacaaaaaaatcaatcttccactgcccaattccgttcttaatgaatgagacaattcagaaacctatgggaacatgctttattgattcattcacaagtcactcaaacccactgcctcggttccctccgataagacaaaccgcacagcgctcccggtgtactgaattgcaggaaaagccaatgactccacagctgttctgc

SEQ ID NO: 2495 - DNA, 600 bp, Chicken  19866894089569_5
gacaatgggtaacacttctttgtgaatgcttctctgtccaagtatctcttgcttgcatgcatcagmtgctctgtgagatacatccctcagctgtggcagctcagcacctttccaccaatttaagtcagctgattgggattgctaaagatagctctcatgtcatactgagctctcaaaagtgttctgaaatgggacatttaaactatttaccacaattctyrttgcagtttaaaagctgcacaatgtttttgaagctttgtgattccagaaatccagtgtctaaatgaaggtctgctgggraaaaaaaaaatagctgatttgtcacaaaaaaatcaatcttccactgcccaattccgttcttaatgaatgagacaattcagaaacctatgggaacatgctttattgattcattcacaagtcactcaaacccactgcctcggttccctccgataagacaaaccgcacagcgctcccggtgtactgaattgcaggaaaagccaatgactccacagctgttctgctggaagtccagtgagactaaacacagccaataaatctaaaygcagcacaccactaggttaatgataaatgtgtgtagaa

SEQ ID NO: 2496 - DNA, 408 bp, Chicken  19866894089569_6
ttccagaaatccagtgtctaaatgaaggtctgctgggaaaaaaaaaaatagctgatttgtcacaaaaaaatcaatcttccactgcccaattccgttcttaatgaatgagacaattcagaaacctatgggaacatgctttattgattcattcacaagtcactcaaacccactgcctcggttccctccgataagacaaaccgcacagcgctcccggtgtactgaattgcaggaaaagccaatgactccacagctgttctgctggaagtccagtgagactaaacacagccaataaatctaaaygcagcacaccactaggttaatgataaatgtgtgtagaagacaaagagacttgcatttcctctttattatcccttcagttgagccactgccttatctgtaatttattta

SEQ ID NO: 2497 - DNA, 600 bp, Chicken  19866894089576_1
tttatccttaccctttgacattaagatagtgatgaattgctggcccctactgtacagcagagctaccactgtaccaattaaagcattctctgcttcttaatgctcagtactgaacttcataaacatctgagaaagctatcctatgaatcacattatattccaagcaacacagttgttttctgaagatggtcatcttctgtcggtagccagtgcccagctcctgctccagaaagtgacatcagaaatgacgctgaggtatcctcatcatttctcagtcttttccagatcaaacctcctackgataggttaataaatatatatttctctgcattcctggtgcttaactccaagtgcttgctttgtgttgcctgcctgtaggttgtgtagcatgatggctttcactccaattccaggcaaagctactggacatttttgctctgttatggtgttacaactttatctccttctggtgcactgataattaagtgacattcattctatatgttttactgacaatttttactacatctgtgggtattgctattctttgcaaactgctttgggggcgggagtcgacagccttgctctggctggtattta

SEQ ID NO: 2498 - DNA, 600 bp, Chicken  19866894089585_1
tacaagaacaacaatttctacctggaagtccttaatttcagcttccttttgacgctgtaaagaaacataaatgttacaaaagataaaacaatctatttttaaataattaaggggagtgtagaagatacaaaaccagaaggttctatatggaaaaataaaataagccttcaaattcatagtatctattttcagtttgtaggggataagtccttagtggatgagaacttaggaaagatttggatttgtgtgcaatagaatgcatatatttgctacaaagaaagttttgccaataataataakaaraaataacaataaaagaacaagaaaaaacaagaasagaaatcacagtatggtttggctagtaggtttctcatttcatgggtgctgaatcagcaagtcagattcctatcattgttttttttttatctgtaacaggagagtaacattttagaggatgcactttcaaaagatctcagtccctaccatttcaggttcaactttgagggactgttggaaccttcctctcctgttcattcctggaattggaagtgctggtcctgagttttcaattgggttttgagttgggaagttttgaaaaac

SEQ ID NO: 2499 - DNA, 600 bp, Chicken  19866894089585_2
aagaacaacaatttctacctggaagtccttaatttcagcttccttttgacgctgtaaagaaacataaatgttacaaaagataaaacaatctatttttaaataattaaggggagtgtagaagatacaaaaccagaaggttctatatggaaaaataaaataagccttcaaattcatagtatctattttcagtttgtaggggataagtccttagtggatgagaacttaggaaagatttggatttgtgtgcaatagaatgcatatatttgctacaaagaaagttttgccaataataataakaaraaataacaataaaagaacaagaaaaaacaagaasagaaatcacagtatggtttggctagtaggtttctcatttcatgggtgctgaatcagcaagtcagattcctatcattgttttttttttatctgtaacaggagagtaacattttagaggatgcactttcaaaagatctcagtccctaccatttcaggttcaactttgagggactgttggaaccttcctctcctgttcattcctggaattggaagtgctggtcctgagttttcaattgggttttgagttgggaagttttgaaaaactar

SEQ ID NO: 2500 - DNA, 600 bp, Chicken  19866894089585_3
tcagcttccttttgacgctgtaaagaaacataaatgttacaaaagataaaacaatctatttttaaataattaaggggagtgtagaagatacaaaaccagaaggttctatatggaaaaataaaataagccttcaaattcatagtatctattttcagtttgtaggggataagtccttagtggatgagaacttaggaaagatttggatttgtgtgcaatagaatgcatatatttgctacaaagaaagttttgccaataataataakaaraaataacaataaaagaacaagaaaaaacaagaasagaaatcacagtatggtttggctagtaggtttctcatttcatgggtgctgaatcagcaagtcagattcctatcattgttttttttttatctgtaacaggagagtaacattttagaggatgcactttcaaaagatctcagtccctaccatttcaggttcaactttgagggactgttggaaccttcctctcctgttcattcctggaattggaagtgctggtcctgagttttcaattgggttttgagttgggaagttttgaaaaactartttgcaagtgtgggtgtgagagtttctcaggtta

SEQ ID NO: 2501 - DNA, 600 bp, Chicken  19866894089585_4
gtgtagaagatacaaaaccagaaggttctatatggaaaaataaaataagccttcaaattcatagtatctattttcagtttgtaggggataagtccttagtggatgagaacttaggaaagatttggatttgtgtgcaatagaatgcatatatttgctacaaagaaagttttgccaataataataakaaraaataacaataaaagaacaagaaaaaacaagaasagaaatcacagtatggtttggctagtaggtttctcatttcatgggtgctgaatcagcaagtcagattcctatcattgstttttttttatctgtaacaggagagtaacattttagaggatgcactttcaaaagatctcagtccctaccatttcaggttcaactttgagggactgttggaaccttcctctcctgttcattcctggaattggaagtgctggtcctgagttttcaattgggttttgagttgggaagttttgaaaaactartttgcaagtgtgggtgtgagagtttctcaggttaaatgctaaatattgtgactgagtgatgaaggaawgtattccttatacaggcacgttgtaaggagtctatgctgctttc

SEQ ID NO: 2502 - DNA, 600 bp, Chicken  19866894089585_5
aaataacaataaaagaacaagaaaaaacaagaasagaaatcacagtatggtttggctagtaggtttctcatttcatgggtgctgaatcagcaagtcagattcctatcattgttttttttttatctgtaacaggagagtaacattttagaggatgcactttcaaaagatctcagtccctaccatttcaggttcaactttgagggactgttggaaccttcctctcctgttcattcctggaattggaagtgctggtcctgagttttcaattgggttttgagttgggaagttttgaaaaactartttgcaagtgtgggtgtgagagtttctcaggttaaatgctaaatattgtgactgagtgatgaaggaawgtattccttatacaggcacgttgtaaggagtctatgctgctttcagaaaataatctggtgaatacgactctttaaaatatttcttaaacaacattcagtaccataaggtgataattaagtgtgttccttgccaaatagtaagctttgtcttttttgttctattttgactggatgaaatatctctgtgttaaatttcctagtgtatgttttacaatttatggaagtctgcaac

SEQ ID NO: 2503 - DNA, 600 bp, Chicken  19866894089585_6
catttcatgggtgctgaatcagcaagtcagattcctatcattgttttttttttatctgtaacaggagagtaacattttagaggatgcactttcaaaagatctcagtccctaccatttcaggttcaactttgagggactgttggaaccttcctctcctgttcattcctggaattggaagtgctggtcctgagttttcaattgggttttgagttgggaagttttgaaaaactartttgcaagtgtgggtgtgagagtttctcaggttaaatgctaaatattgtgactgagtgatgaaggaawgtattccttatacaggcacgttgtaaggagtctatgctgctttcagaaaataatctggtgaatacgactctttaaaatatttcttaaacaacattcagtaccataaggtgataattaagtgtgttccttgccaaatagtaagctttgtcttttttgttctattttgactggatgaaatatctctgtgttaaatttcctagtgtatgttttacaatttatggaagtctgcaactcttagggttggaccttcaataaaatgtgaacgtagctattaaaattccattgtccatggtcttaatt

SEQ ID NO: 2504 - DNA, 600 bp, Chicken  19866894089588_1
gacctcaaaggatcattgagtccaacctccctgttaaagtaggttgcctacagtaggtcacacaggtaggcatttagataggtcctgaatatcttcatagaatgagatatcaccacctctctgggcagcctgttccagtgctctgtcatccttactggaaagaaattcttccatgtgttagtatggaacttcgtgtgttccattttgtgtccattgccccctgtcctgtcacactgggcactactgtaaagagcctggcttcatccattttcctaccacctccctttagatatttataawcattaatcagattccccctcagtcttcatttccccaggctgaacagcccgaggtctctcagcctttcctcatacaggagatgctccaggcccatcatcatccttgtggccctctgctagattccttttaggagatccctgtcatttttgaacgagggagcccagaactgggcacagtattctaaatgtggcctcaccagggcagagtagcagggaaggatcagatcacttcccttgatctgctggccacgctctttttartgcaccccagggtaccattggccttcttggctaccagggc

SEQ ID NO: 2505 - DNA, 498 bp, Chicken  19866894089588_2
tcatccattttcctaccacctccctttagatatttataawcattaatcagattccccctcagtcttcatttccccaggctgaacagcccgaggtctctcagcctttcctcatacaggagatgctccaggcccatcatcatccttgtggccctctgctagattccttttaggagatccctgtcatttttgaacgagggagcccagaactgggcacagtattctaaatgtggcctcaccagggcagagtagcagggaaggatcagatcacttcccttgatctgctggccacgctctttttartgcaccccagggtaccattggccttcttggctaccagggcacgctactcgctcatagccatcctattgtccatgtccagccagttgtctattgccattcctctccacactgcttctggaaatgtgagtgttaaaaggggtgctttctgaagtgtcaatgccagcatcttactaagctgcagtgtgagcaagagtcact

SEQ ID NO: 2506 - DNA, 599 bp, Chicken  19866894089589_1
  misc_feature (1)..(190): n is any nucleotide
nnnnnnnnnnnnnnnnnnnnnnnnnnnnnnnnnnnnnnnnnnnnnnnnnnnnnnnnnnnnnnnnnnnnnnnnnnnnnnnnnnnnnnnnnnnnnnnnnnnnnnnnnnnnnnnnnnnnnnnnnnnnnnnnnnnnnnnnnnnnnnnnnnnnnnnnnnnnnnnnnnnnnnnnnnnnnnnnnnnnnnnnnnnnnncttgtttgtttatttgatgtatgtttgttttaccaactgctgttatacttccgtctcttctggaaattctgctacaacagacagatgtagaactgtaggctgctttaaarcagtatgacctctgaggaacctgtgataaacatatgagacagaaagctgtgagaggtggtcaggggtagggctggtctgaaatgcaaaaarctaagggttagatagaatagcaagtaggtgtaaactcatatgatgtgacaatattgcgtagagaagatctcaatagaaagactagattgcatgtgtagaataaagctccaagtttctagtcaaaccaaatacactcttcacccctttccagtacaacatctgttttttgcttctraagtctagtgtacaaaaccacctattttcctcc

SEQ ID NO: 2507 - DNA, 599 bp, Chicken  19866894089589_2
  misc_feature (1)..(99): n is any nucleotide
nnnnnnnnnnnnnnnnnnnnnnnnnnnnnnnnnnnnnnnnnnnnnnnnnnnnnnnnnnnnnnnnnnnnnnnnnnnnnnnnnnnnnnnnnnnnnnnnnnncttgtttgtttatttgatgtatgtttgttttaccaactgctgttatacttccgtctcttctggaaattctgctacaacagacagatgtagaactgtaggctgctttaaarcagtatgacctctgaggaacctgtgataaacatatgagacagaaagctgtgagaggtggtcaggggtagggctggtctgaaatgcaaaaarctaagggttagatagaatagcaagtaggtgtaaactcatatgatgtgacaatattgcgtagagaagatctcaatagaaagactagattgcatgtgtagaataaagctccaagtttctagtcaaaccaaatacactcttcacccctttccagtacaacatctgttttttgcttctraagtctagtgtacaaaaccacctattttcctccacttctttatgctgttgaggaaaagctgtatcattataagagaaggaaacttcactgttgtgctgtagcgctgcagactgccatgagaaaa

SEQ ID NO: 2508 - DNA, 600 bp, Chicken  19866894089589_3
acagacagatgtagaactgtaggctgctttaaarcagtatgacctctgaggaacctgtgataaacatatgagacagaaagctgtgagaggtggtcaggggtagggctggtctgaaatgcaaaaarctaagggttagatagaatagcaagtaggtgtaaactcatatgatgtgacaatattgcgtagagaagatctcaatagaaagactagattgcatgtgtagaataaagctccaagtttctagtcaaaccaaatacactcttcacccctttccagtacaacatctgttttttgcttctraagtctagtgtacaaaaccacctattttcctccacttctttatgctgttgaggaaaagctgtatcattataagagaaggaaacttcactgttgtgctgtagcgctgcagactgccatgagaaaaggtcttttgtgctggtgcctcaggggaacagccagctcagtatgagctgagggacttctctctgcatcagtacacctacgtttcccttttgccgagtgacagctaggttattctaaattgaacactgacagtgaagcacatacagttgaaaatctgtaaaagatctaaatattcaa

SEQ ID NO: 2509 - DNA, 599 bp, Chicken  19866894089590_1
  misc_feature (1)..(88): n is any nucleotide
nnnnnnnnnnnnnnnnnnnnnnnnnnnnnnnnnnnnnnnnnnnnnnnnnnnnnnnnnnnnnnnnnnnnnnnnnnnnnnnnnnnnnnnncaaaatgcttgtaatctgtttaaccgtggcctcagtcatgtcagcatagcacattatttgtctgtctttgttgtgaactactgaagggaattaagtttctttagtttcttttcccctccagattacatttcagcttgataagtcctctattccctgtcccagcacaactgtgcacggtgacacaacagaaagggtgctgtaagtgaaacatrgagaggtataaattctgcrtgtggggagagggtgataacgtctggctatgcagtaagccagtatttctgctggcactacagcctgaagcactaactccccagaayagaaggggacagctagaatatctttgttgtctgagtgcagttatccacttyacagtgcgtacccacaaactggcaaaactgaagggacagaatgcagcaacatgaagttaggacagacaggaggcagatgctgggagttcctgcagctggcarcatctccgtggggaatcacagccttggatttctggtaagct

SEQ ID NO: 2510 - DNA, 599 bp, Chicken  19866894089590_2
  misc_feature (1)..(69): n is any nucleotide
nnnnnnnnnnnnnnnnnnnnnnnnnnnnnnnnnnnnnnnnnnnnnnnnnnnnnnnnnnnnnnnnnnnnncaaaatgcttgtaatctgtttaaccgtggcctcagtcatgtcagcatagcacattatttgtctgtctttgttgtgaactactgaagggaattaagtttctttagtttcttttcccctccagattacatttcagcttgataagtcctctattccctgtcccagcacaactgtgcacggtgacacaacagaaagggtgctgtaagtgaaacatrgagaggtataaattctgcrtgtggggagagggtgataacgtctggctatgcagtaagccagtatttctgctggcactacagcctgaagcactaactccccagaayagaaggggacagctagaatatctttgttgtctgagtgcagttatccacttyacagtgcgtacccacaaactggcaaaactgaagggacagaatgcagcaacatgaagttaggacagacaggaggcagatgctgggagttcctgcagctggcarcatctccgtggggaatcacagccttggatttctggtaagctgatgaagtaatttatgtgt

SEQ ID NO: 2511 - DNA, 600 bp, Chicken  19866894089590_3
gtttaaccgtggcctcagtcatgtcagcatagcacattatttgtctgtctttgttgtgaactactgaagggaattaagtttctttagtttcttttcccctccagattacatttcagcttgataagtcctctattccctgtcccagcacaactgtgcacggtgacacaacagaaagggtgctgtaagtgaaacatrgagaggtataaattctgcrtgtggggagagggtgataacgtctggctatgcagtaagccagtatttctgctggcactacagcctgaagcactaactccccagaayagaaggggacagctagaatatctttgttgtctgagtgcagttatccacttyacagtgcgtacccacaaactggcaaaactgaagggacagaatgcagcaacatgaagttaggacagacaggaggcagatgctgggagttcctgcagctggcarcatctccgtggggaatcacagccttggatttctggtaagctgatgaagtaatttatgtgtggacttggacagtaattcagcacaaatgaagttgtaggtgtaatgatgttttgaatcaaaacaaaccagttcaaaatttaaatcaat

SEQ ID NO: 2512 - DNA, 600 bp, Chicken  19866894089590_4
tgttgtgaactactgaagggaattaagtttctttagtttcttttcccctccagattacatttcagcttgataagtcctctattccctgtcccagcacaactgtgcacggtgacacaacagaaagggtgctgtaagtgaaacatrgagaggtataaattctgcrtgtggggagagggtgataacgtctggctatgcagtaagccagtatttctgctggcactacagcctgaagcactaactccccagaayagaaggggacagctagaatatctttgttgtctgagtgcagttatccacttyacagtgcgtacccacaaactggcaaaactgaagggacagaatgcagcaacatgaagttaggacagacaggaggcagatgctgggagttcctgcagctggcarcatctccgtggggaatcacagccttggatttctggtaagctgatgaagtaatttatgtgtggacttggacagtaattcagcacaaatgaagttgtaggtgtaatgatgttttgaatcaaaacaaaccagttcaaaatttaaatcaataacaagcccttraagctataattcaggagaggagtagtactggcgtaatgg

SEQ ID NO: 2513 - DNA, 600 bp, Chicken  19866894089590_5
tgcacggtgacacaacagaaagggtgctgtaagtgaaacatrgagaggtataaattctgcrtgtggggagagggtgataacgtctggctatgcagtaagccagtatttctgctggcactacagcctgaagcactaactccccagaayagaaggggacagctagaatatctttgttgtctgagtgcagttatccacttyacagtgcgtacccacaaactggcaaaactgaagggacagaatgcagcaacatgaagttaggacagacaggaggcagatgctgggagttcctgcagctggcarcatctccgtggggaatcacagccttggatttctggtaagctgatgaagtaatttatgtgtggacttggacagtaattcagcacaaatgaagttgtaggtgtaatgatgttttgaatcaaaacaaaccagttcaaaatttaaatcaataacaagcccttraagctataattcaggagaggagtagtactggcgtaatggtctgagcttttgaaatgcagatcagtgaacctctttaaagggcatttgttgggcttcctgtgaaattatatgtggcacttgagatggagctttaatgtaaaa

SEQ ID NO: 2514 - DNA, 499 bp, Chicken  19866894089590_6
ctagaatatctttgttgtctgagtgcagttatccacttyacagtgcgtacccacaaactggcaaaactgaagggacagaatgcagcaacatgaagttaggacagacaggaggcagatgctgggagttcctgcagctggcarcatctccgtggggaatcacagccttggatttctggtaagctgatgaagtaatttatgtgtggacttggacagtaattcagcacaaatgaagttgtaggtgtaatgatgttttgaatcaaaacaaaccagttcaaaatttaaatcaataacaagcccttraagctataattcaggagaggagtagtactggcgtaatggtctgagcttttgaaatgcagatcagtgaacctctttaaagggcatttgttgggcttcctgtgaaattatatgtggcacttgagatggagctttaatgtaaaatgtgcatcggcatatacttagctgtaggtatgtgaattgctcattaaagtcttgctca

SEQ ID NO: 2515 - DNA, 600 bp, Chicken  19866894089594_1
aggtaagataagagatttctggatgctgtgtaaacgtggaaattctgcaaaagtgaccactgccaagcccagagtcaggtgtaccagctgctgtgagtcaatagtaagttcaggaagtttgggatacatttacatggacttaacccacatgtgcactcacaagtcatttgcacagtacctacacaacagataagcagattttgggttttccagactatctctttcatatacctgaatgttgaaagttttgaaagcatgggaaaataattttgtcaattaccatggcaatcaccactgcartatgaacaackacacatcattttgctctttgtgattgtgtcagtcctcactgaagactggcaaatctgtgactttgtgaaggtggatggcacatgttgtaatcagttggcagtctctttttgaaagatgtctggaaacctagatactcgcagcaaaattgaaaggaaattcaaagggcctatgatttcacttactatcagaagtggtaagtaagttctcaccaacagaatattctccatgataaaactttcattttataaactttgtgaaagtttcagacataatctttgtctcatgggg

SEQ ID NO: 2516 - DNA, 600 bp, Chicken  19866894089594_2
gagatttctggatgctgtgtaaacgtggaaattctgcaaaagtgaccactgccaagcccagagtcaggtgtaccagctgctgtgagtcaatagtaagttcaggaagtttgggatacatttacatggacttaacccacatgtgcactcacaagtcatttgcacagtacctacacaacagataagcagattttgggttttccagactatctctttcatatacctgaatgttgaaagttttgaaagcatgggaaaataattttgtcaattaccatggcaatcaccactgcartatgaacaackacacatcattttgctctttgtgattgtgtcagtcctcactgaagactggcaaatctgtgactttgtgaaggtggatggcacatgttgtaatcagttggcagtctctttttgaaagatgtctggaaacctagatactcgcagcaaaattgaaaggaaattcaaagggcctatgatttcacttactatcagaagtggtaagtaagttctcaccaacagaatattctccatgataaaactttcattttataaactttgtgaaagtttcagacataatctttgtctcatggggtcactttgtgc

SEQ ID NO: 2517 - DNA, 600 bp, Chicken  19866894089594_3
tgaagactggcaaatctgtgactttgtgaaggtggatggcacatgttgtaatcagttggcagtctctttttgaaagatgtctggaaacctagatactcgcagcaaaattgaaaggaaattcaaagggcctatgatttcacttactatcagaagtggtaagtaagttctcaccaacagaatattctccatgataaaactttcattttataaactttgtgaaagtttcagacataatctttgtctcatggggtcactttgtgcttaacactacgcatctccatgcagtacacaattcctctragcgtgtaaaacacatacaatacacattaatgtaaaaacagtagttttcctttgagcttacctcagttaagtcaacaaacttgtgtttaaggataggtaaagattcaatggctcgtatttgttgaattaattcatattttttcttaagtttctcttcctcttcttctaaagcttgtcgaagtagttctcgattttcttcgcaaacctcctgaactgaaagaaaagaactaatctctgttagcctgctacatattttaacaagtagtccatctggaggaaaactcacatgcatttgtgaat

SEQ ID NO: 2518 - DNA, 599 bp, Chicken  19866894089596_1
  misc_feature (1)..(168): n is any nucleotide
nnnnnnnnnnnnnnnnnnnnnnnnnnnnnnnnnnnnnnnnnnnnnnnnnnnnnnnnnnnnnnnnnnnnnnnnnnnnnnnnnnnnnnnnnnnnnnnnnnnnnnnnnnnnnnnnnnnnnnnnnnnnnnnnnnnnnnnnnnnnnnnnnnnnnnnnnnnnnnnnnnnnnnnnatagtggtgtgtagagttcattagggtgtcagagatgttcacaaaggactaccaagcatgaaccaagcccattgggaacccatgctcttctggaatgacagacaaagcatttttctgccactgcatgtgtgyatgctgcccaagaatcagtgctgctagtgacaggcctgagtgtctgcagttcagtagttcacagattcaccacatggctgctttattacttaaacttaatagtagttagacacaaaatgtcagtagggaaagawgaggtccctgaaatggagcagggaaaagtcatgacaggtggtrctttctcagcaggtacacttggccacactactcattaagaagagccaaggaatacactgagtttagaagttcactgaggaaggaggaatacacatgatgcacaacaaagcagttgcaatgac

SEQ ID NO: 2519 - DNA, 599 bp, Chicken  19866894089596_2
  misc_feature (1)..(34): n is any nucleotide
nnnnnnnnnnnnnnnnnnnnnnnnnnnnnnnnnnatagtggtgtgtagagttcattagggtgtcagagatgttcacaaaggactaccaagcatgaaccaagcccattgggaacccatgctcttctggaatgacagacaaagcatttttctgccactgcatgtgtgyatgctgcccaagaatcagtgctgctagtgacaggcctgagtgtctgcagttcagtagttcacagattcaccacatggctgctttattacttaaacttaatagtagttagacacaaaatgtcagtagggaaagawgaggtccctgaaatggagcagggaaaagtcatgacaggtggtrctttctcagcaggtacacttggccacactactcattaagaagagccaaggaatacactgagtttagaagttcactgaggaaggaggaatacacatgatgcacaacaaagcagttgcaatgacaagggtgctactgccaaaggtctctgccagtgtagtctatagaaagccatatactaggtcagggggatggaaagcaacatgtcttttctccctcatgttagaaggccagccaagattgtcttcaaagaagacag

SEQ ID NO: 2520 - DNA, 600 bp, Chicken  19866894089596_3
tgtagagttcattagggtgtcagagatgttcacaaaggactaccaagcatgaaccaagcccattgggaacccatgctcttctggaatgacagacaaagcatttttctgccactgcatgtgtgyatgctgcccaagaatcagtgctgctagtgacaggcctgagtgtctgcagttcagtagttcacagattcaccacatggctgctttattacttaaacttaatagtagttagacacaaaatgtcagtagggaaagawgaggtccctgaaatggagcagggaaaagtcatgacaggtggtrctttctcagcaggtacacttggccacactactcattaagaagagccaaggaatacactgagtttagaagttcactgaggaaggaggaatacacatgatgcacaacaaagcagttgcaatgacaagggtgctactgccaaaggtctctgccagtgtagtctatagaaagccatatactaggtcagggggatggaaagcaacatgtcttttctccctcatgttagaaggccagccaagattgtcttcaaagaagacagcaacatattggcatggatgggtacttgcacctcactgcatgagc

SEQ ID NO: 2521 - DNA, 600 bp, Chicken  19866894089598_1
acagaaaccctctctgccgcaagttatgcctggttggctttcacattgactcactgtttgctcattcagcattagagagcccattatttgggcccaggctctaataggtaagggatcagaacaggaggagattttgcgtcagtgtgtgggctgtgaacgcaacgaggtgattaaatagacactggcagcagaagataaagttagcaattatgaggccatttccaggaacagcctgctcagaataaaattattttgctcaaaatcagcaggtaaaagtaaaaaaaaaggctttcaaagagrtctgctgctgccacaagattgggttttctttccctttcctttagagttgccagctaaaaggttgcacagattccctttgcacaaatctcwstgattacatttaatattgttgcccctcttttcagtgytagtagagctcatgcagaagttgggctggagagcgatactgcctgctcacaatgccaaggcagaaggaatagggaactataatggttcttacaccctctcttcctgatgctgtgagcacagcacaaataggcaaccacctacaagtgtattaatactgctctccaccatact

SEQ ID NO: 2522 - DNA, 600 bp, Chicken  19866894089598_2
ggcccaggctctaataggtaagggatcagaacaggaggagattttgcgtcagtgtgtgggctgtgaacgcaacgaggtgattaaatagacactggcagcagaagataaagttagcaattatgaggccatttccaggaacagcctgctcagaataaaattattttgctcaaaatcagcaggtaaaagtaaaaaaaaaggctttcaaagagrtctgctgctgccacaagattgggttttctttccctttcctttagagttgccagctaaaaggttgcacagattccctttgcacaaatctcwstgattacatttaatattgttgcccctcttttcagtgytagtagagctcatgcagaagttgggctggagagcgatactgcctgctcacaatgccaaggcagaaggaatagggaactataatggttcttacaccctctcttcctgatgctgtgagcacagcacaaataggcaaccacctacaagtgtattaatactgctctccaccatacttaggatgaggcgactgaatcctcaccagataatctgcttggtgccagctgtaatggaaaatattgaggaaatgggtaaagaacacagctt

SEQ ID NO: 2523 - DNA, 600 bp, Chicken  19866894089598_3
gcccaggctctaataggtaagggatcagaacaggaggagattttgcgtcagtgtgtgggctgtgaacgcaacgaggtgattaaatagacactggcagcagaagataaagttagcaattatgaggccatttccaggaacagcctgctcagaataaaattattttgctcaaaatcagcaggtaaaagtaaaaaaaaaggctttcaaagagrtctgctgctgccacaagattgggttttctttccctttcctttagagttgccagctaaaaggttgcacagattccctttgcacaaatctcwstgattacatttaatattgttgcccctcttttcagtgytagtagagctcatgcagaagttgggctggagagcgatactgcctgctcacaatgccaaggcagaaggaatagggaactataatggttcttacaccctctcttcctgatgctgtgagcacagcacaaataggcaaccacctacaagtgtattaatactgctctccaccatacttaggatgaggcgactgaatcctcaccagataatctgcttggtgccagctgtaatggaaaatattgaggaaatgggtaaagaacacagcttt

SEQ ID NO: 2524 - DNA, 600 bp, Chicken  19866894089598_4
agattttgcgtcagtgtgtgggctgtgaacgcaacgaggtgattaaatagacactggcagcagaagataaagttagcaattatgaggccatttccaggaacagcctgctcagaataaaattattttgctcaaaatcagcaggtaaaagtaaaaaaaaaggctttcaaagagrtctgctgctgccacaagattgggttttctttccctttcctttagagttgccagctaaaaggttgcacagattccctttgcacaaatctcwstgattacatttaatattgttgcccctcttttcagtgytagtagagctcatgcagaagttgggctggagagcgatactgcctgctcacaatgccaaggcagaaggaatagggaactataatggttcttacaccctctcttcctgatgctgtgagcacagcacaaataggcaaccacctacaagtgtattaatactgctctccaccatacttaggatgaggcgactgaatcctcaccagataatctgcttggtgccagctgtaatggaaaatattgaggaaatgggtaaagaacacagctttcttccctatgggatgccggatccttaagagatgacaa

SEQ ID NO: 2525 - DNA, 600 bp, Chicken  19866894089604_1
tggaaaagaccttaaagatcattgagtccaacccccaacccaaccatactaccctaactctaacaaccctatgctaaatcatggccctgagcaccacattcagacggtttttaaacacatccagggacggtgagtaagtaagtaaagtaaagtaagtaaatactttttcctggataatgaccagggcgatataattcctgaaacctgcagtggagattatttttaaatctgtggtaaatgtattagatctccttgtagtaacagatctccagtagttgcccaggaaggaaaaaaatgcarttataggaaatctgaacaggtaattaggtactagtggagtatttaatacagcctaaatggaggttcagaatattccatgttgataacacgttaaatacttttttttcttctacttctttttttttttctccattagccaaatagattgaagcagtttggtttgacagcaagagcttctgaagagaaagtaccacctgaaaggcccagggttgctttccaaactccagtgtccatgccttctgtctctccagggaatgaagactttcacagagggctagccagctctcttggtgaaatggc

SEQ ID NO: 2526 - DNA, 600 bp, Chicken  19866894089609_1
cctgtatcttgtgggcttagtcaaaacacgcaccaattttgctccctgcaagtcatctttgcaatcatgagtcattgaactgatacaaagattgaacacagctatgaaaacatcttttgacaaatactgttcaaattatgattcatacaggctatagccaatagaataattactattaacatatgtattgtactgttaaaacttggattaaagcacgtcaaggccagtgcagtaattcttgccctatctagtggaaagtccaataaattattttaaggcagtggctagctgagaagaatraagcttgcaaagccagagaattggcatgtacttctgttccccgaaagacagctctgaacctactcagaaacctgaatggcttgagcagtagggcttttttcactgttacctttggcactgacaaaagaaagtcaaagaaggtcaagtggagaagcagaaaggaaaacatggacaagaaaagctggtactgtagaatcaagaaaagccctaaaactgaggaaggaatgggatatcaaagtcctgcctgaaagatcatggtgatgtaagagggaaaactaacttcagttgcttctgtccatc

SEQ ID NO: 2527 - DNA, 600 bp, Chicken  19866894089609_2
tgtgggcttagtcaaaacacgcaccaattttgctccctgcaagtcatctttgcaatcatgagtcattgaactgatacaaagattgaacacagctatgaaaacatcttttgacaaatactgttcaaattatgattcatacaggctatagccaatagaataattactattaacatatgtattgtactgttaaaacttggattaaagcacgtcaaggccagtgcagtaattcttgccctatctagtggaaagtccaataaattattttaaggcagtggctagctgagaagaatraagcttgcraagccagagaattggcatgtacttctgttccccgaaagacagctctgaacctactcagaaacctgaatggcttgagcagtagggcttttttcactgttacctttggcactgacaaaagaaagtcaaagaaggtcaagtggagaagcagaaaggaaaacatggacaagaaaagctggtactgtagaatcaagaaaagccctaaaactgaggaaggaatgggatatcaaagtcctgcctgaaagatcatggtgatgtaagagggaaaactaacttcagttgcttctgtccatctgcatgcaa

SEQ ID NO: 2528 - DNA, 600 bp, Chicken  19866894089609_3
tacacaaagggggatgggtaggacataagattattgatttagcccattttgatttttaacattatactatttaacggaagattaaattcttacaggccaaccactacaaacaaaatacttttaattgaatcttctttagtatgtcatacatatacactggagaaaggagaacggttcaggagtatctgtcacatcaccagctcacctgccagcattttgcaggtattcctggcatttggccacagtcgctgttcacctcccactcatggcccgtcctagataggacaggctccatgctcrgtcccagccagaacactggctcctgcatctcttactcagtagattatcaaaacagctctgtctgtgctgcctcctaccctgccctacacactcagaaagagctcctcagaagtacctgcagtgtaacccattactcccctttgaaaggttttaataatctcttctacaatgcctaccamagctcagcaagggtatctaatattagactgttgacgggttgaggacatcactatgaagatgaacaataatatctctgtttcttcttgcttcctgtcttctctgtctgtctggtcttcctcc

SEQ ID NO: 2529 - DNA, 600 bp, Chicken  19866894089609_4
gagtatctgtcacatcaccagctcacctgccagcattttgcaggtattcctggcatttggccacagtcgctgttcacctcccactcatggcccgtcctagataggacaggctccatgctcrgtcccagccagaacactggctcctgcatctcttactcagtagattatcaaaacagctctgtctgtgctgcctcctaccctgccctacacactcagaaagagctcctcagaagtacctgcagtgtaacccattactcccctttgaaaggttttaataatctcttctacaatgcctaccamagctcagcaagggtatctaatattagactgttgacgggttgaggacatcactatgaagatgaacaataatatctctgtttcttcttgcttcctgtcttctctgtctgtctggtcttcctccctgcagaaactgttttttcactgttggytttggtgggtttttttcctgtctgaatttatacattatctagcaaaataggactaggctctgtaaaaaaggaatcccattgctacagaaaaataaaaagtaaacgcaatattgtgaatttcagtccattttgctaataggttgaaatgact

SEQ ID NO: 2530 - DNA, 600 bp, Chicken  19866894089609_5
ctcttactcagtagattatcaaaacagctctgtctgtgctgcctcctaccctgccctacacactcagaaagagctcctcagaagtacctgcagtgtaacccattactcccctttgaaaggttttaataatctcttctacaatgcctaccamagctcagcaagggtatctaatattagactgttgacgggttgaggacatcactatgaagatgaacaataatatctctgtttcttcttgcttcctgtcttctctgtctgtctggtcttcctccctgcagaaactgttttttcactgttggytttggtgggtttttttcctgtctgaatttatacattatctagcaaaataggactaggctctgtaaaaaaggaatcccattgctacagaaaaataaaaagtaaacgcaatattgtgaatttcagtccattttgctaataggttgaaatgacttgctaaagaaacctcagtgatgacttgcttctccctaacgtccattgcagaggggtgatttttatgagcaaacatcactattttattttctgattaacaagcaccaacaaacaattcacacaaaagaataatacgtaagtgaagttaaa

SEQ ID NO: 2531 - DNA, 600 bp, Chicken  19866894089611_1
ccaaacgagtgatgatgcagtggcacagctgccctggaaggtgggagattcatcatccctgggcctgttcaagagccatggagatgtggcactgagggacatggtcagtgggcatggtggggtgggttggtcatggtgatcttaaagtcttttccaacctcagtgattctatgattctgtgaaggttcatgaggctgagacaccacagccaaggtccccagatccctgtccgtggggaagtgcaaagccacgagggtccctttgtgcagcaccagcactcagagtgcagcaggcagagcrctcacatcactgcagctgccactgttgttcctgcatggccataaggacaaggatttggtattgcccctaagtactggggaaccaacccaaacaggggcctctattgtatgcaaggggatgcaaagacataaagcaataaggaaacctgtcccctgctggtgcagatraggcctttgtgccattcattttcagaatgagaaggtctggaggaygctgcagcacatgaccagaagctacatatctgcagtcagaagccatctggaatggagatcatccttttccatccttttcttccatttc

SEQ ID NO: 2532 - DNA, 600 bp, Chicken  19866894089611_2
tctatgattctgtgaaggttcatgaggctgagacaccacagccaaggtccccagatccctgtccgtggggaagtgcaaagccacgagggtccctttgtgcagcaccagcactcagagtgcagcaggcagagcrctcacatcactgcagctgccactgttgttcctgcatggccataaggacaaggatttggtattgcccctaagtactggggaaccaacccaaacaggggcctctattgtatgcaaggggatgcaaagacataaagcaataaggaaacctgtcccctgctggtgcagatraggcctttgtgccattcattttcagaatgagaaggtctggaggaygctgcagcacatgaccagaagctacatatctgcagtcagaagccatctggaatggagatcatccttttccatccttttcttccatttctgctgctattytgggctttgttttgctcaccccgttgcatctcttgctgaaaggctgcatatccccagcagagccaaatccatgtgctgtcactgccgccagcacagcactgagatgtgtgctgggcaggtggggctgcctgcacygcagtaccaccacaggggctt

SEQ ID NO: 2533 - DNA, 600 bp, Chicken  19866894089611_3
ggtccccagatccctgtccgtggggaagtgcaaagccacgagggtccctttgtgcagcaccagcactcagagtgcagcaggcagagcrctcacatcactgcagctgccactgttgttcctgcatggccataaggacaaggatttggtattgcccctaagtactggggaaccaacccaaacaggggcctctattgtatgcaaggggatgcaaagacataaagcaataaggaaacctgtcccctgctggtgcagatraggcctttgtgccattcattttcagaatgagaaggtctggaggaygctgcagcacatgaccagaagctacatatctgcagtcagaagccatctggaatggagatcatccttttccatccttttcttccatttctgctgctattytgggctttgttttgctcaccccgttgcatctcttgctgaaaggctgcatatccccagcagagccaaatccatgtgctgtcactgccgccagcacagcactgagatgtgtgctgggcaggtggggctgcctgcacygcagtaccaccacaggggcttcaccatagccacagccacgctgggaggacagagcctgggctcact

SEQ ID NO: 2534 - DNA, 600 bp, Chicken  19866894089611_4
gcagctgccactgttgttcctgcatggccataaggacaaggatttggtattgcccctaagtactggggaaccaacccaaacaggggcctctattgtatgcaaggggatgcaaagacataaagcaataaggaaacctgtcccctgctggtgcagatraggcctttgtgccattcattttcagaatgagaaggtctggaggaygctgcagcacatgaccagaagctacatatctgcagtcagaagccatctggaatggagatcatccttttccatccttttcttccatttctgctgctattytgggctttgttttgctcaccccgttgcatctcttgctgaaaggctgcatatccccagcagagccaaatccatgtgctgtcactgccgccagcacagcactgagatgtgtgctgggcaggtggggctgcctgcacygcagtaccaccacaggggcttcaccatagccacagccacgctgggaggacagagcctgggctcactctgtgagctgctcatgcattacccaatggaagcacagagggaagtgcttgagcagaactgacagcaagacaaagcccaggggggctcccagaataatac

SEQ ID NO: 2535 - DNA, 600 bp, Chicken  19866894089611_5
tgtcccctgctggtgcagatraggcctttgtgccattcattttcagaatgagaaggtctggaggaygctgcagcacatgaccagaagctacatatctgcagtcagaagccatctggaatggagatcatccttttccatccttttcttccatttctgctgctattytgggctttgttttgctcaccccgttgcatctcttgctgaaaggctgcatatccccagcagagccaaatccatgtgctgtcactgccgccagcacagcactgagatgtgtgctgggcaggtggggctgcctgcacygcagtaccaccacaggggcttcaccatagccacagccacgctgggaggacagagcctgggctcactctgtgagctgctcatgcattacccaatggaagcacagagggaagtgcttgagcagaactgacagcaagacaaagcccaggggggctcccagaataatacagcacttcccgcagcttacatcagcttgtgcccctaacagcagccctttggcccctaacaaatgcaaaacaaagggctgtgtcggcccatggacatcccacatcccacaaggacagggcacagagcacagtgcaa

SEQ ID NO: 2536 - DNA, 599 bp, Chicken  19866894089616_1
  misc_feature (1)..(99): n is any nucleotide
nnnnnnnnnnnnnnnnnnnnnnnnnnnnnnnnnnnnnnnnnnnnnnnnnnnnnnnnnnnnnnnnnnnnnnnnnnnnnnnnnnnnnnnnnnnnnnnnnnntgattcttttaaactgttcagttacaaagggtgaatacgtccattaacgtccactaagatcgtgaaaacattttgttggtgtcagttgtaggacaattatttttctctggatcgagtcccagttggaagaaaaattcaaagtataaggcaaacagctttttaaacagagacttaatgagttggcctgctgctactaaattwtttttttttccatagcaaatgcaataattcttgttccttaaattctttaataaaatcagaaaattattttgaaaagggataacagggaaaaaaaaatgctggtagactcacaacacaataaatcaatagattagtagatgtttgggttttacttctaaatctctcttgaacaaaatgaggtttcatgaaagtaaattaaaatgttttgcaagatacattttcaagtaaatttttgatcaaaagagagcctgaaaatacaaagtaatacccatcccattagaggactgcaaaaagcagtg

SEQ ID NO: 2537 - DNA, 600 bp, Chicken  19866894089620_1
taaagataaaaagaccacatttcagtgtatggttatcctagcagttcttcctcgttaatagcacttggccaagttgacagacacatccaacgggccacatttgtttaatgtgctgagtgatcagaatctcaaaaggttttaaaataactcacttttcactctgggcagaacagtgggtgagaatacaagaatgcaagcctggtatttggacaggagaacttttaaaagttttcccctgaaattcagcacctcagctctacgctttgtgtcctacagatttccaggcatccagcagccagstttggcagcagttcaggagtattgcctgtgcatgcattctgtcccatcatcctggtcattaatgaaggtgttctacagctttggccccagtattwtgcctcagggtatgccattagtgactggcctccagctggaccttcagctggacttggtgccactcttaacaagattttcagcctggcagttcagacagttttcagtctaactcactttccacttgtctagtctgcagttattatttttttcaatgaggaaattgtgtcaatagccttgctagaatcttaataaagaatatccatt

SEQ ID NO: 2538 - DNA, 600 bp, Chicken  19866894089620_2
cacatttgtttaatgtgctgagtgatcagaatctcaaaaggttttaaaataactcacttttcactctgggcagaacagtgggtgagaatacaagaatgcaagcctggtatttggacaggagaacttttaaaagttttcccctgaaattcagcacctcagctctacgctttgtgtcctacagatttccaggcatccagcagccagstttggcagcagttcaggagtattgcctgtgcatgcattctgtcccatcatcctggtcattaatgaaggtgttctacagctttggccccagtattwtgcctcagggtatgccattagtgactggcctccagctggaccttcagctggacttggtgccactcttaacaagattttcagcctggcagttcagacagttttcagtctaactcactttccacttgtctagtctgcagttattatttttttcaatgaggaaattgtgtcaatagccttgctagaatcttaataaagaatatccattgctctatcttgtccagtcaggcagtcatttaattgtggaaagcaaacaggttcgtcaagcatgatttctccttcataactcaatgctgacttctc

SEQ ID NO: 2539 - DNA, 600 bp, Chicken  19866894089624_1
gtcctggggagtgctttgggaacatgggaagacagaaaggccctgaatagctcaaggcatttgccgctgttacagctcggtgagaggggggcaagaggtgaaatttcacaaccacagagaccacagtgtcagccacagcaccatgaaacacactgaaggtgcaatactgctcacaaagcagttgcttatcctttaagcctaaattcacagccatgggggaagagcccaagcttgaggacgcagctcggcaacaacaggcactttccaagcacagtttgatttgcattccccaggtttctrtagcttaccgagttccaacctgcccacacctcccaaaaggctgcagggccagccagaaaggctgatggtctattgctgccaggtcaagttgtttctccaacccccagagtgtaaaatttcagtgttaatttgcttgagagatacatgggaaggcaaagccattgcagaaggctgtgcatgtgtctgggcatgaaggctgggtgttgggaaggrctggtacccttggggtggtggtgaaatcctcacctaccctgcatgtgcaccactccaggagcagagttaagtcatggaaaaatacca

SEQ ID NO: 2540 - DNA, 600 bp, Chicken  19866894089624_2
tgggggaagagcccaagcttgaggacgcagctcggcaacaacaggcactttccaagcacagtttgatttgcattccccaggtttctrtagcttaccgagttccaacctgcccacacctcccaaaaggctgcagggccagccagaaaggctgatggtctattgctgccaggtcaagttgtttctccaacccccagagtgtaaaatttcagtgttaatttgcttgagagatacatgggaaggcaaagccattgcagaaggctgtgcatgtgtctgggcatgaaggctgggtgttgggaaggrctggtacccttggggtggtggtgaaatcctcacctaccctgcatgtgcaccactccaggagcagagttaagtcatggaaaaataccagccccaaaagctggcagtggatggagagatggggtctgtatggtccgcctctccccactgcactcattttcagtacagaaggcgttcccctctgatcccctctatgcgctcctcaccacacacaggggcctccagccagggaaccacattaatcagcttgcttcaatacacagtgagaggactaagactttatttcaacaatggaattaatct

SEQ ID NO: 2541 - DNA, 600 bp, Chicken  19866894089628_1
tttattccagactaagagacataatggcaagatattattgcatttgtatcagcaggttactgtgtgactaaaaggctgtacccttatttatagctttcaaagctgtgctgaaggatatgtatcgctcttctccctttctggaacgtttcatttgaggcatcaacgtgctgaagtagatcccaactggcagttatcataagtagtctgacagtggcatgaactggttaattttttttttcagtttacacatagcaggcattactttcggagcaacctatttatttccatggagatgacaaygagtgcaaagaatgcaataacactgtttgatagagaaaattttcagctacaaaacactgtttttcaacataggcaccgtaattaggtatgcattttcaccagcagtgaacaagagcctgcatgctgtgcttataaaaaatctgcaccaacggagttgacctgctgttgccactgctgaaatgcaccacccactgcaaacattgagtgtcaatggtgcaagtttttccacatggaggaattcatttccacccctttgcttcatatgcacttccatgtcagacacaatttgatcacactgcc

SEQ ID NO: 2542 - DNA, 600 bp, Chicken  19866894089629_1
gttgaagaatcgttgctaataagaattttctgttggagtaaacacataaaataaatccacagagattaaaagaatattgcaaaacagcatctgtactacagtatgtttttaatgaaaattagaattgaggaaatagtttttctttcagaaaagtcaatatttcctaagacagcagcaggagtcagtacagcctagatgtctagattttgtttgggattgagcttaatcttttaacagagctgaatttaacatttttacttaaaaaaagtgaggaaaaacagtgaaaacaaaaatccccartgctttcatctttcaraatgtttctttggggcaccacaatacctgctgaaacagtacatgtctacacatgtatgtcatcaygttttgagggaatcttgggtttgcagctacttctgtatatggcactggctcctcctttgccagtcttgctctaccaccacaaatctttgctctcagatcaacccatgtctgttttctcatccccccaacactgcaactgttctgtgagctgaaacggaaaacatgcttgtccctaacagctggggcaaggaggagattaggcatcttggtcttgggcac

SEQ ID NO: 2543 - DNA, 600 bp, Chicken  19866894089629_2
taataagaattttctgttggagtaaacacataaaataaatccacagagattaaaagaatattgcaaaacagcatctgtactacagtatgtttttaatgaaaattagaattgaggaaatagtttttctttcagaaaagtcaatatttcctaagacagcagcaggagtcagtacagcctagatgtctagattttgtttgggattgagcttaatcttttaacagagctgaatttaacatttttacttaaaaaaagtgaggaaaaacagtgaaaacaaaaatccccartgctttcatctttcaraatgtttctttggggcaccacaatacctgctgaaacagtacatgtctacacatgtatgtcatcaygttttgagggaatcttgggtttgcagctacttctgtatatggcactggctcctcctttgccagtcttgctctaccaccacaaatctttgctctcagatcaacccatgtctgttttctcatccccccaacactgcaactgttctgtgagctgaaacggaaaacatgcttgtccctaacagctggggcaaggaggagattaggcatcttggtcttgggcactgaaaccaactttgct

SEQ ID NO: 2544 - DNA, 600 bp, Chicken  19866894089629_3
aaacagcatctgtactacagtatgtttttaatgaaaattagaattgaggaaatagtttttctttcagaaaagtcaatatttcctaagacagcagcaggagtcagtacagcctagatgtctagattttgtttgggattgagcttaatcttttaacagagctgaatttaacatttttacttaaaaaaagtgaggaaaaacagtgaaaacaaaaatccccartgctttcatctttcaraatgtttctttggggcaccacaatacctgctgaaacagtacatgtctacacatgtatgtcatcaygttttgagggaatcttgggtttgcagctacttctgtatatggcactggctcctcctttgccagtcttgctctaccaccacaaatctttgctctcagatcaacccatgtctgttttctcatccccccaacactgcaactgttctgtgagctgaaacggaaaacatgcttgtccctaacagctggggcaaggaggagattaggcatcttggtcttgggcactgaaaccaactttgctttggttaatgcaaggtgtttctacatcgagattttcttaatgaatactttgaataaactttggat

SEQ ID NO: 2545 - DNA, 600 bp, Chicken  19866894089631_1
tcatggcaaaaatataaaaacctcattatgctgccagtgtttggagttgctgttgtgatggttgcatggctcatggtctacaatgactgaatcatctcagtattcagtatacctcagttgggctttaggtaactattattcttagaacgtttagtttgtatgcaacagaacttaatgtgcatagattgtgtatgtacactatttgcaaaagaagtgaagaggagggaagaaatgtcaccttttgtgttattacattcacggcacaaaactgaattcagacactgaaaataatagtaaatwttagtcgacactgaagtgctgatgtaatttgtctgagctacattaacgtcggttctattaatatattattacttttccttgtctccatttcactatagtaaaaatagcttagtataaaatgctttcttgaatatttgtttctcataaaatcaatttagtgtatgattaaatagaagtatttataagttagtccttttgttatatcacacaacagtttctgtmcttcacgacacttttatttgtaactactgaggaacttcagatcatttaagttttgagcattctgtggcctctcacatc

SEQ ID NO: 2546 - DNA, 600 bp, Chicken  19866894089631_2
agggaagaaatgtcaccttttgtgttattacattcacggcacaaaactgaattcagacactgaaaataatagtaaatwttagtcgacactgaagtgctgatgtaatttgtctgagctacattaacgtcggttctattaatatattattacttttccttgtctccatttcactatagtaaaaatagcttagtataaaatgctttcttgaatatttgtttctcataaaatcaatttagtgtatgattaaatagaagtatttataagttagtccttttgttatatcacacaacagtttctgtmcttcacgacacttttatttgtaactactgaggaacttcagatcatttaagttttgagcattctgtggcctctcacatcgaaacttttttttagagaaaaatgtgaaatgcctctcaattcaactatagtgtaaataataaaatgggcccccttggagacttttttttaattgctgttgtttttcagggctcggttcctcaaaatcaaatcaactgaaaacttgattcagtgaatggatgcatacactgagcataggtgtgaagtactttcagcatagagggagatgtcttcattgttttc

SEQ ID NO: 2547 - DNA, 600 bp, Chicken  19866894089638_1
agaaagaagtaggctctttagcagtgtcttttgtaatagagtaagaggaaatggtttgaaactgaaagagtggagatttaagttggatgtaagaatttttttttgcagtaagggtggtgagacactggaacacgttgcctgtagaggtgatggaagccacgtctcaaatggagacatttaattttgggctggactgggttctgagcaacctggtttaggtgtaggtgtccctgttcaatgcaggggagttggactagatggcctttaaaggtcccttccaattcaaatgattctatgatsttttttttatttgttttgaatatttggcatatgtagtgagtaggaaccactgaacaactgagaagtccccgtgtgatctggagatctattgaaggttatcggggaaaagataattctgcaaattagactatgcgagtaacaaaataaagatgatgattggatactgtgaagaatatgtcagcaacagccactgaacttcgagtgaggacagagattttagaagtcatttagaagattttagaagtcacttgatttttttttatttagattgatttttcttcactagtaaaatgttgggtt

SEQ ID NO: 2548 - DNA, 600 bp, Chicken  19866894089638_2
ctgaacttcgagtgaggacagagattttagaagtcatttagaagattttagaagtcacttgatttttttttatttagattgatttttcttcactagtaaaatgttgggtttctgtctatagttcctaaaataagtaaataaataatatagaacaaaatccttaggcattcttggaagatgtaacctaataaaccacattcttgcaaaactgaggtcttaacattagtaactgtgcaagtgacagatatctgaggtggcttctttctgctcttgtttgttgagtccgtcctggactgatgygatagttctatgggattgttgcatacygggagtctttatgttctggtaggtagttgcaattttctattaatattaaatactgaatttgctgaaaaatggattcctatacatttcagttttgtagcagtctgattctgttttcatggcagttgtcaggacaacaaaatatcgttttcccttyttttgaatgtcacacctacacaatgaaaatctttggtgtttaatsagcaatgcgttcaagatcacatcgtaaagagacttttttaataaagaggtacaagttcattatatcttttacaa

SEQ ID NO: 2549 - DNA, 600 bp, Chicken  19866894089638_3
tagaagtcatttagaagattttagaagtcacttgatttttttttatttagattgatttttcttcactagtaaaatgttgggtttctgtctatagttcctaaaataagtaaataaataatatagaacaaaatccttaggcattcttggaagatgtaacctaataaaccacattcttgcaaaactgaggtcttaacattagtaactgtgcaagtgacagatatctgaggtggcttctttctgctcttgtttgttgagtccgtcctggactgatgygatagttctatgggattgttgcatacygggagtctttatgttctggtaggtagttgcaattttctattaatattaaatactgaatttgctgaaaaatggattcctatacatttcagttttgtagcagtctgattctgttttcatggcagttgtcaggacaacaaaatatcgttttcccttyttttgaatgtcacacctacacaatgaaaatctttggtgtttaatsagcaatgcgttcaagatcacatcgtaaagagacttttttaataaagaggtacaagttcattatatcttttacaaaacattctagtttgatttccattttat

SEQ ID NO: 2550 - DNA, 600 bp, Chicken  19866894089638_4
aacctaataaaccacattcttgcaaaactgaggtcttaacattagtaactgtgcaagtgacagatatctgaggtggcttctttctgctcttgtttgttgagtccgtcctggactgatgygatagttctatgggattgttgcatacygggagtctttatgttctggtaggtagttgcaattttctattaatattaaatactgaatttgctgaaaaatggattcctatacatttcagttttgtagcagtctgattctgttttcatggcagttgtcaggacaacaaaatatcgttttcccttyttttgaatgtcacacctacacaatgaaaatctttggtgtttaatsagcaatgcgttcaagatcacatcgtaaagagacttttttaataaagaggtacaagttcattatatcttttacaaaacattctagtttgatttccattttatcatgttttaaggtcaaatgtgactttaatgttccataaagagacagagattgataatggggaaagaataaccctctaatgtgatttatatctatggattttatgtcagatatgaaaagttgctgttcaaattgtaaaggaggatccattaaaga

SEQ ID NO: 2551 - DNA, 600 bp, Chicken  19866894089638_5
taactgtgcaagtgacagatatctgaggtggcttctttctgctcttgtttgttgagtccgtcctggactgatgygatagttctatgggattgttgcatacygggagtctttatgttctggtaggtagttgcaattttctattaatattaaatactgaatttgctgaaaaatggattcctatacatttcagttttgtagcagtctgattctgttttcatggcagttgtcaggacaacaaaatatcgttttcccttyttttgaatgtcacacctacacaatgaaaatctttggtgtttaatsagcaatgcgttcaagatcacatcgtaaagagacttttttaataaagaggtacaagttcattatatcttttacaaaacattctagtttgatttccattttatcatgttttaaggtcaaatgtgactttaatgttccataaagagacagagattgataatggggaaagaataaccctctaatgtgatttatatctatggattttatgtcagatatgaaaagttgctgttcaaattgtaaaggaggatccattaaagagcactttaaaacattttactacttagcttaccttgtacacttgtt

SEQ ID NO: 2552 - DNA, 599 bp, Chicken  19866894089640_1
  misc_feature (1)..(63): n is any nucleotide
nnnnnnnnnnnnnnnnnnnnnnnnnnnnnnnnnnnnnnnnnnnnnnnnnnnnnnnnnnnnnnngattgttatgaaacttaatctccagaaaccaaagagaaattatagacattttgtaaggactgagaccactgatctttgatctgttttgatggtcctgattcagaacttcatagctcctgaaataatgcacctaaaggacccttgttcctccttatccagtgctcatttctgaagagttcattcagagccagatttaccttctctcctttcacttcccatgtcatattgttttcccartcgctgttgagggaatgaggaagcatacagctggaaataatggtgcagcaaatctctgtacataatgagcccttctgccatttcagagactagcagtcttcctttctgtagcttctgtgaggaatggcaycccccatctccctgccttgctaaatgtttctgcagcatcagcttgcggcagaactgcagtctggacctctgcttttgcaagatgtacaagtatcctaatcctattgactttccaaccttcaaaaatgcctttcttttacttaatgaccatggtaggaatctttattctt

SEQ ID NO: 2553 - DNA, 600 bp, Chicken  19866894089640_2
actgatctttgatctgttttgatggtcctgattcagaacttcatagctcctgaaataatgcacctaaaggacccttgttcctccttatccagtgctcatttctgaagagttcattcagagccagatttaccttctctcctttcacttcccatgtcatattgttttcccartcgctgttgagggaatgaggaagcatacagctggaaataatggtgcagcaaatctctgtacataatgagcccttctgccatttcagagactagcagtcttcctttctgtagcttctgtgaggaatggcaycccccatctccctgccttgctaaatgtttctgcagcatcagcttgcggcagaactgcagtctggacctctgcttttgcaagatgtacaagtatcctaatcctattgactttccaaccttcaaaaatgcctttcttttacttaatgaccatggtaggaatctttattctttataacacatttttcacaaatccacaccaatgtctggggcaggtgttaccccacaatggattcaactgtgattataaatgtagcaccaaataggtgctagcaacaaagcaactcatgagaaagtatgagga

SEQ ID NO: 2554 - DNA, 599 bp, Chicken  19866894089644_1
  misc_feature (1)..(67): n is any nucleotide
nnnnnnnnnnnnnnnnnnnnnnnnnnnnnnnnnnnnnnnnnnnnnnnnnnnnnnnnnnnnnnnnnnnaagtctatacataaatctgagaagagcagaaatggtgagcagtaagaatgctacagaatacatgagaccattggtctaaaaattaccagtgtgctgtgtatagcagaaaaaatagtaaccataactgcattgctgttttggtctggtttaacatcaagacaagctgcaaatgcatttcaaataacagcatttgatacttaaccctttacatttagaccagcaaacattcattrttttttctcaggtacagatgtcctcaggaatagtggtaaggcaacgcactgtgacagagaaggtgctcggcctggccgaacacgcagtgccagcagggcaggctgtgtggcactgagtgctgctggggagcatatgatggacagactggcagctgcaggcaggacaaaagatggcaagcatgcaccaaggtgttgagctggaagctgaaaatgtggaactgatttgaagaggaggaagttagacatgcacagtctacaaaatgggaactagaagtagtagaaaaacgcaggccttggaa

SEQ ID NO: 2555 - DNA, 599 bp, Chicken  19866894089653_1
  misc_feature (1)..(94): n is any nucleotide
nnnnnnnnnnnnnnnnnnnnnnnnnnnnnnnnnnnnnnnnnnnnnnnnnnnnnnnnnnnnnnnnnnnnnnnnnnnnnnnnnnnnnnnnnnnnnnaatggctgaaataagcttgactgtgaggacttgcagaacaactgcatcacattacaattatgcaaaaatgtcagaccttgcacagtttcagctgtattgtcctttccttccctctcccaaattcctttcctaaaaatggtaggacaacgacatactcagagactgcattttcatacagtccttgcagtgtctgttacgataaacarttaaaacatacagctcctcaacaggctggtgtttgatacagtactgtcacactgtgacaggtaagctgaggtgggattagcaacttcagggttacatgatctagcactgaaacaaccaagactctaaatgaaatttaagagctcaaccataaataaaaatcaatctgaatgttggtgtttttytttttctttgcttttctttccccagacagtgatttattttatgccaaaagggtaattttgatatttaaaatgwcccaaytcacaagaagtgacccycaagaactgattttgctttc

SEQ ID NO: 2556 - DNA, 600 bp, Chicken  19866894089653_2
agctgtattgtcctttccttccctctcccaaattcctttcctaaaaatggtaggacaacgacatactcagagactgcattttcatacagtccttgcagtgtctgttacgataaacarttaaaacatacagctcctcaacaggctggtgtttgatacagtactgtcacactgtgacaggtaagctgaggtgggattagcaacttcagggttacatgatctagcactgaaacaaccaagactctaaatgaaatttaagagctcaaccataaataaaaatcaatctgaatgttggtgtttttytttttctttgcttttctttccccagacagtgatttattttatgccaaaagggtaattttgatatttaaaatgwcccaaytcacaagaagtgacccycaagaactgattttgctttcattttctcctgctgaagttactccttccaccataacccaggtgcacccctctyctgagatggctccttgcgtgcaaacacagagctgtaactgtctcttagctcytgcacagaaaattaaagctctcactgccaaccacagcgccatcccagacatatgtttatataaaagcacctctctcctg

SEQ ID NO: 2557 - DNA, 600 bp, Chicken  19866894089653_3
ctgcattttcatacagtccttgcagtgtctgttacgataaacarttaaaacatacagctcctcaacaggctggtgtttgatacagtactgtcacactgtgacaggtaagctgaggtgggattagcaacttcagggttacatgatctagcactgaaacaaccaagactctaaatgaaatttaagagctcaaccataaataaaaatcaatctgaatgttggtgtttttytttttctttgcttttctttccccagacagtgatttattttatgccaaaagggtaattttgatatttaaaatgwcccaaytcacaagaagtgacccycaagaactgattttgctttcattttctcctgctgaagttactccttccaccataacccaggtgcacccctctyctgagatggctccttgcgtgcaaacacagagctgtaactgtctcttagctcytgcacagaaaattaaagctctcactgccaaccacagcgccatcccagacatatgtttatataaaagcacctctctcctgaaaggatgaagggttgtctctgtcagtgtgcgtgcagaggctttatcaaggcatatgtgatgctcagtaaaac

SEQ ID NO: 2558 - DNA, 600 bp, Chicken  19866894089653_4
tttcatacagtccttgcagtgtctgttacgataaacarttaaaacatacagctcctcaacaggctggtgtttgatacagtactgtcacactgtgacaggtaagctgaggtgggattagcaacttcagggttacatgatctagcactgaaacaaccaagactctaaatgaaatttaagagctcaaccataaataaaaatcaatctgaatgttggtgtttttytttttctttgcttttctttccccagacagtgatttattttatgccaaaagggtaattttgatatttaaaatgwcccaaytcacaagaagtgacccycaagaactgattttgctttcattttctcctgctgaagttactccttccaccataacccaggtgcacccctctyctgagatggctccttgcgtgcaaacacagagctgtaactgtctcttagctcytgcacagaaaattaaagctctcactgccaaccacagcgccatcccagacatatgtttatataaaagcacctctctcctgaaaggatgaagggttgtctctgtcagtgtgcgtgcagaggctttatcaaggcatatgtgatgctcagtaaaacagctgg

SEQ ID NO: 2559 - DNA, 600 bp, Chicken  19866894089653_5
agtgtctgttacgataaacarttaaaacatacagctcctcaacaggctggtgtttgatacagtactgtcacactgtgacaggtaagctgaggtgggattagcaacttcagggttacatgatctagcactgaaacaaccaagactctaaatgaaatttaagagctcaaccataaataaaaatcaatctgaatgttggtgtttttytttttctttgcttttctttccccagacagtgatttattttatgccaaaagggtaattttgatatttaaaatgwcccaaytcacaagaagtgacccycaagaactgattttgctttcattttctcctgctgaagttactccttccaccataacccaggtgcacccctctyctgagatggctccttgcgtgcaaacacagagctgtaactgtctcttagctcytgcacagaaaattaaagctctcactgccaaccacagcgccatcccagacatatgtttatataaaagcacctctctcctgaaaggatgaagggttgtctctgtcagtgtgcgtgcagaggctttatcaaggcatatgtgatgctcagtaaaacagctggacagaaaggagaaagaa

SEQ ID NO: 2560 - DNA, 600 bp, Chicken  19866894089653_6
tgtgacaggtaagctgaggtgggattagcaacttcagggttacatgatctagcactgaaacaaccaagactctaaatgaaatttaagagctcaaccataaataaaaatcaatctgaatgttggtgtttttytttttctttgcttttctttccccagacagtgatttattttatgccaaaagggtaattttgatatttaaaatgwcccaaytcacaagaagtgacccycaagaactgattttgctttcattttctcctgctgaagttactccttccaccataacccaggtgcacccctctyctgagatggctccttgcgtgcaaacacagagctgtaactgtctcttagctcytgcacagaaaattaaagctctcactgccaaccacagcgccatcccagacatatgtttatataaaagcacctctctcctgaaaggatgaagggttgtctctgtcagtgtgcgtgcagaggctttatcaaggcatatgtgatgctcagtaaaacagctggacagaaaggagaaagaaaaggtgaccctaatgttgaaaaaggctacctctgtctgggaatttcaaaatttgatgtgtcaataaccttcaa

SEQ ID NO: 2561 - DNA, 600 bp, Chicken  19866894089653_7
cactgaaacaaccaagactctaaatgaaatttaagagctcaaccataaataaaaatcaatctgaatgttggtgtttttytttttctttgcttttctttccccagacagtgatttattttatgccaaaagggtaattttgatatttaaaatgwcccaaytcacaagaagtgacccycaagaactgattttgctttcattttctcctgctgaagttactccttccaccataacccaggtgcacccctctyctgagatggctccttgcgtgcaaacacagagctgtaactgtctcttagctcytgcacagaaaattaaagctctcactgccaaccacagcgccatcccagacatatgtttatataaaagcacctctctcctgaaaggatgaagggttgtctctgtcagtgtgcgtgcagaggctttatcaaggcatatgtgatgctcagtaaaacagctggacagaaaggagaaagaaaaggtgaccctaatgttgaaaaaggctacctctgtctgggaatttcaaaatttgatgtgtcaataaccttcaaaaccttctgtcccactttagagttggcctgaagtgatggccaaaacaaagtt

SEQ ID NO: 2562 - DNA, 600 bp, Chicken  19866894089656_1
cattacttttcctaaagttttattgaactaaatattgcagtcaatggaaagaatgtattgatagccagtgtcttgtattcttgctttgatgtaaataatgtagacagtgtaaggcttgcagttactcatagacaaggtcattctgctacgtgccttaactacacacatgataacttctattctgtacatctcaaggaggaagcagatcgatgatgttagtttcctcaggttctctgttagacctgttagtagcttgttgtttcctcacaatcacatgaactttttattacatctgcatgwtaaaattaaaatactaaactagatgcagaaaagcgtgaaggacatctatgacccaagaacataattgtcttattgatatataggaagaatacaaattattatttaaagtatacctagaatatgtattattgcaaaataatggttatttatttaacttcattaagaaccttaaaattgagaatacaaagacgatataagagagattatgacctattctttccgtttgtcaagttattctacatgaagttgcctagatagagaggaccttatggaaataccatcaggttgattcagatcatg

SEQ ID NO: 2563 - DNA, 599 bp, Chicken  19866894089658_1
  misc_feature (1)..(151): n is any nucleotide
nnnnnnnnnnnnnnnnnnnnnnnnnnnnnnnnnnnnnnnnnnnnnnnnnnnnnnnnnnnnnnnnnnnnnnnnnnnnnnnnnnnnnnnnnnnnnnnnnnnnnnnnnnnnnnnnnnnnnnnnnnnnnnnnnnnnnnnnnnnnnnnnnnnnnnnactggaatttgactctaagtgcccaggaaatgctcctggattggaagagacacccaattcatggcatactccccagagcctgctgtaatcccccaacagtgtcaggaggaaaccatcctactgagaaggttcctgggatgtgcattaasttccagagtgtgttccatcacccacacatttgtctccttgggctcagatmcaggttagaaatagcacagtcaaggattgtccccttctgttgggtgactgtggagaggttattcccagacagctgtctggggaggccwcaggtatgcctgaccctcatggaaacatgcaatagcagggggttcccagcctacgggtaagcagacgtcacagcagtcaacttgtagccttccataatacacccaaacatggtggccatattcattaaggaattaaccgtagcagcatgtgaaagtagtat

SEQ ID NO: 2564 - DNA, 599 bp, Chicken  19866894089658_2
  misc_feature (1)..(101): n is any nucleotide
nnnnnnnnnnnnnnnnnnnnnnnnnnnnnnnnnnnnnnnnnnnnnnnnnnnnnnnnnnnnnnnnnnnnnnnnnnnnnnnnnnnnnnnnnnnnnnnnnnnnnactggaatttgactctaagtgcccaggaaatgctcctggattggaagagacacccaattcatggcatactccccagagcctgctgtaatcccccaacagtgtcaggaggaaaccatcctactgagaaggttcctgggatgtgcattaasttccagagtgtgttccatcacccacacatttgtctccttgggctcagatmcaggttagaaatagcacagtcaaggattgtccccttctgttgggtgactgtggagaggttattcccagacagctgtctggggaggccwcaggtatgcctgaccctcatggaaacatgcaatagcagggggttcccagcctacgggtaagcagacgtcacagcagtcaacttgtagccttccataatacacccaaacatggtggccatattcattaaggaattaaccgtagcagcatgtgaaagtagtataaaggcactctgagctagcctaactaccagtttagactgacagtgcttaa

SEQ ID NO: 2565 - DNA, 599 bp, Chicken  19866894089658_3
  misc_feature (1)..(13): n is any nucleotide
nnnnnnnnnnnnnactggaatttgactctaagtgcccaggaaatgctcctggattggaagagacacccaattcatggcatactccccagagcctgctgtaatcccccaacagtgtcaggaggaaaccatcctactgagaaggttcctgggatgtgcattaasttccagagtgtgttccatcacccacacatttgtctccttgggctcagatmcaggttagaaatagcacagtcaaggattgtccccttctgttgggtgactgtggagaggttattcccagacagctgtctggggaggccwcaggtatgcctgaccctcatggaaacatgcaatagcagggggttcccagcctacgggtaagcagacgtcacagcagtcaacttgtagccttccataatacacccaaacatggtggccatattcattaaggaattaaccgtagcagcatgtgaaagtagtataaaggcactctgagctagcctaactaccagtttagactgacagtgcttaacgaagtaatcaataacagtatatatatcaatacgtattcagaatatcactggagattcaaagtgattccaggagggcagcagtmtagg

SEQ ID NO: 2566 - DNA, 600 bp, Chicken  19866894089658_4
ggccwcaggtatgcctgaccctcatggaaacatgcaatagcagggggttcccagcctacgggtaagcagacgtcacagcagtcaacttgtagccttccataatacacccaaacatggtggccatattcattaaggaattaaccgtagcagcatgtgaaagtagtataaaggcactctgagctagcctaactaccagtttagactgacagtgcttaacgaagtaatcaataacagtatatatatcaatacgtattcagaatatcactggagattcaaagtgattccaggagggcagcagtmtaggtcagaccaacatcaatggggtcacgttaagaaactgacctcacagagaatgacctcaaaagtatgtataaactgatcacagaagagaccagctatccccaggaatgggaccaaaasagaatcacagtaatggacagagtctctttacaaagctgatctctctatgggctgtggattatcatagggttcaggagtcattatcatagaactccagagttaactcaatgcttgagtgaatcttcatcctctttaaggaggaaaaaaaaaatggggggaaaagaaagaagaaaacaaaca

SEQ ID NO: 2567 - DNA, 600 bp, Chicken  19866894089658_5
ccatattcattaaggaattaaccgtagcagcatgtgaaagtagtataaaggcactctgagctagcctaactaccagtttagactgacagtgcttaacgaagtaatcaataacagtatatatatcaatacgtattcagaatatcactggagattcaaagtgattccaggagggcagcagtmtaggtcagaccaacatcaatggggtcacgttaagaaactgacctcacagagaatgacctcaaaagtatgtataaactgatcacagaagagaccagctatccccaggaatgggaccaaaasagaatcacagtaatggacagagtctctttacaaagctgatctctctatgggctgtggattatcatagggttcaggagtcattatcatagaactccagagttaactcaatgcttgagtgaatcttcatcctctttaaggaggaaaaaaaaaatggggggaaaagaaagaagaaaacaaacaataaagacaggagcatactcagtgttggaagtgtataagagagagggtctccatttgtgcagagctcaagtgctattgataccattgatgcataaatgggcataggacatcatcacaact

SEQ ID NO: 2568 - DNA, 600 bp, Chicken  19866894089659_1
agcttaacagtattgctgcaactggtaacactgggaaaaatttagttgaatgtgaaggtggtcaaacagtggaacaggcttcctagagatgccagggatgccccatgcctgtcagtgttgacaaccgtttggacagtgatttcaagaatatgcttttccttgtgtctgacatcattattatccagtgctaatgatgtcagacaattgaacctgatgatagctgaaggtgccttctagttcctctcctctccactaactctattagcaggaggatggagatgaacagaatctattggttgwcctsaagtggtgatgatgtcctatgcccatttatgcatcaatggtatcaatagcacttgagctctgcacaaatggagaccctctctcttatacacttccaacactgagtatgctcccatctttattgtttgtttgcttctttmttttccccccatttcttttctccttaaagaggatgaagattcactcaagcattgaattaactctggagtgctatgataatgactcctgaaccctatgataatccacagcccataagagagatcagctttgtaaagagactctgtccattactgtgat

SEQ ID NO: 2569 - DNA, 600 bp, Chicken  19866894089659_2
taacagtattgctgcaactggtaacactgggaaaaatttagttgaatgtgaaggtggtcaaacagtggaacaggcttcctagagatgccagggatgccccatgcctgtcagtgttgacaaccgtttggacagtgatttcaagaatatgcttttccttgtgtctgacatcattattatccagtgctaatgatgtcagacaattgaacctgatgatagctgaaggtgccttctagttcctctcctctccactaactctattagcaggaggatggagatgaacagaatctattggttgwcctsaagtggtgatgatgtcctatgcccatttatgcatcaatggtatcaatagcacttgagctctgcacaaatggagaccctctctcttatacacttccaacactgagtatgctcccatctttattgtttgtttgcttctttmttttccccccatttcttttctccttaaagaggatgaagattcactcaagcattgaattaactctggagtgctatgataatgactcctgaaccctatgataatccacagcccataagagagatcagctttgtaaagagactctgtccattactgtgattcts

SEQ ID NO: 2570 - DNA, 600 bp, Chicken  19866894089659_3
aagaatatgcttttccttgtgtctgacatcattattatccagtgctaatgatgtcagacaattgaacctgatgatagctgaaggtgccttctagttcctctcctctccactaactctattagcaggaggatggagatgaacagaatctattggttgwcctsaagtggtgatgatgtcctatgcccatttatgcatcaatggtatcaatagcacttgagctctgcacaaatggagaccctctctcttatacacttccaacactgagtatgctcccatctttattgtttgtttgcttctttmttttccccccatttcttttctccttaaagaggatgaagattcactcaagcattgaattaactctggagtgctatgataatgactcctgaaccctatgataatccacagcccataagagagatcagctttgtaaagagactctgtccattactgtgattctsttttggtcccattcctggggatagctggtctcttctgtgatcagtttatacatactctggaggtcagtctctctgaggtcagtttcttaacgggaccccactgatgttggtctgacctagactgctgccctcctggaat

SEQ ID NO: 2571 - DNA, 600 bp, Chicken  19866894089659_4
aagtggtgatgatgtcctatgcccatttatgcatcaatggtatcaatagcacttgagctctgcacaaatggagaccctctctcttatacacttccaacactgagtatgctcccatctttattgtttgtttgcttctttmttttccccccatttcttttctccttaaagaggatgaagattcactcaagcattgaattaactctggagtgctatgataatgactcctgaaccctatgataatccacagcccataagagagatcagctttgtaaagagactctgtccattactgtgattctsttttggtcccattcctggggatagctggtctcttctgtgatcagtttatacatactctggaggtcagtctctctgaggtcagtttcttaacgggaccccactgatgttggtctgacctagactgctgccctcctggaatcactttgaatctccagtgatactttgaatacgtaatgatatacatattattgataactttgttaaacatatcaacatcagtctaaactggtagttaggctacctcagattgcctttatactacttccacatgttttcttacggctgatttcttactgaata

SEQ ID NO: 2572 - DNA, 600 bp, Chicken  19866894089661_1
gatagttgcagttttttgaacagcttacctctttaactagtaagtcgaaagcactctattgttctgctccctcactggtatggttcagctcttttggctgctcatcaagattcccatgacaatgctgaaaagaatggtgtaactgaaagaaaaatcctatctctaatgttacactgaataagaatcagaaaaagtagtggttgttggggggtttcactcacaaatcattttggaacaaacaagacaaaagagcagatgcaagagtttatctgaaaaagatatactgacaagcagagaagrtacagaaaacatagttttgaatgagaaaaaacatctgacaggtacatatttacattagaattttgagaggtttgtaagaaatagatgccattttaagtaccttatgttatttcatggatattcagaacctattttttagtcaaaatcattcaagtagctcagaaaattttatttgtctgcaccaaactcatgacattactggtagaactaatgaagaataaatctgaaatacagtcaggcatttccttttctggagtaaagttgagatcatttgaaattatgtcataaaaacacaagtct

SEQ ID NO: 2573 - DNA, 600 bp, Chicken  19866894089664_1
gatctctgcttaggtgttggtgctcagtattctgagcatttctctttatgaacttgtagtgatttgagaggatgtgtgatgaaggcttccttgtaacaagtctggctgacatggcaggtagtcactgacacaacttgctgttacctatgggcttcccaactttcttccagaaactgttgcagtcgctcaggatttgtgtagtactctgtgccacatttttgtatgtctttgtgtcttttgcacttgcagataggtgtttacaaggagctggtgtttgggaaaacccagtctcttcaattyatgtttttcatgtcagcactcctgacatgaaaacacaatagaataacgcaggtatatgccaacttttcttagtggtgtttgactcactggaatctatcctgctttgtttttgaagtactgtgataattaagttgtttaatgttgctgtacaagaacagttgattttcttttaatagtgtacttgtttaaacattgatttgctaatttgtatcaaaaatacaagccgttacaataaaactgtgcctctccacttaaaggagactgttataatatagccagcttaactgcagctcctgcaat

SEQ ID NO: 2574 - DNA, 600 bp, Chicken  19866894089665_1
tgttctctctctgtggctgaaccacctttgactctgttgtaaacgccctagttattcacttaggaaaaaaaaaaaaaagagagaattttggaataaataaaaaaaaaattcttaatgattaaatacggatcccaatattttggggattgttttgtgcatgttaggttattcagaaattaataatgactgctccgaatgtgttgcaattaaatcgatgttgaagcgtgttacacttagccctggaagatacattatggtatgtgctaaaaacatgctgcaggcctagacatgctcactacrtgacaaaaaataaagtagtataaaacgtgaattaataaaaagcaacatccaacaacatgttacacttttgaactagcaacactgttcagactcaaaactctacaacttgtttcatgcacttggtagttgttaatggaactttttctagtccttggcacacatttctccttgygctggaagcagaaccgggatctttattacagtttgtaggcatacattaagcaaactctcacatgacaaagggcataaagaaatcaagttacatttgttagaacaacaaacggatattctctaaggctg

SEQ ID NO: 2575 - DNA, 600 bp, Chicken  19866894089665_2
gaaattaataatgactgctccgaatgtgttgcaattaaatcgatgttgaagcgtgttacacttagccctggaagatacattatggtatgtgctaaaaacatgctgcaggcctagacatgctcactacrtgacaaaaaataaagtagtataaaacgtgaattaataaaaagcaacatccaacaacatgttacacttttgaactagcaacactgttcagactcaaaactctacaacttgtttcatgcacttggtagttgttaatggaactttttctagtccttggcacacatttctccttgygctggaagcagaaccgggatctttattacagtttgtaggcatacattaagcaaactctcacatgacaaagggcataaagaaatcaagttacatttgttagaacaacaaacggatattctctaaggctgagcaaactcttcccaccctgtaccccctgccccaaaagaaaagcatgtcattttctaatgctgaataaaatgaagatgagcaatggcagcagcagaaggatgtaacacgatgccatgccttcttacctgacttttggactaaagcaatttacagtggaaaagaaacaggaga

SEQ ID NO: 2576 - DNA, 600 bp, Chicken  19866894089671_1
taattcaggtgcacaatgtaatcctttgaatttcggcattcccagtcagttggatatcaaagcatgggtgaaactaagaaaacttaagcaatttatatccttcttattggtgtgtacctggcagaaacactgtttttacataatttttcccccttgtatttgaggcattgagcaaaacagaattatttgagagcaagactagtggaacacagcggcatgcatgattagtttaataaatgtacaaatgatctctcatttgttatgccattggatctaaccttactgcatgtgtcactcaamagagttgtagtacttccttcagcattcactccttagccgttccctcccttggccccgagtcacatttgcattcagatttagcatcaattcagttcctgtggagtccttgactgcttattactgtctctcagtacatcaaaggaggaggaaataaaaatgaagaaatgctaagatcctccttagcccttggcaagactttcagctgaaaaataatgttacagaaaattcttggtagagaatagaagaaagaaacacttgaaacataattttgctgataaagactctttttctctttcatct

SEQ ID NO: 2577 - DNA, 600 bp, Chicken  19866894089676_1
ccctgtgtttgatccacgactcttgctatccaggaaaatgatgcaaatgtaaatttgaattgaatttgtatatacaagtaaaaaatttaaaatatttcactttttgcattggaaaatgtgcagactaagcttttggtgtgtaattttgtgatatcttgacaaattttataaaaacaacccagaaaaccctccagtaatgttgtattacaagctttgttgttgttgttccaaaagcatgaagaaaacacttgtacagagtctaaggctgtaggcttgcctctggtgggttcttaaaatgcragttttgtgatgatttttcatatgcctgagtttttgttttttgttttttttttccaaagaaaaactgacaggtgagtagaaaatgtggctcaaggcaaagggagggaatgctttacctcttgcaggcwttgtgcagagtgtggccctttattttggtggatgtgagggacacaggtctggcttatagctckccctaccttcaggaatgccctctttgttttctcatggactcaaaccttccctcccactctgacctggcagagtgatagaaagaatggcagctccactgctgctgttcac

SEQ ID NO: 2578 - DNA, 600 bp, Chicken  19866894089676_2
gcttttggtgtgtaattttgtgatatcttgacaaattttataaaaacaacccagaaaaccctccagtaatgttgtattacaagctttgttgttgttgttccaaaagcatgaagaaaacacttgtacagagtctaaggctgtaggcttgcctctggtgggttcttaaaatgcragttttgtgatgatttttcatatgcctgagtttttgttttttgttttttttttccaaagaaaaactgacaggtgagtagaaaatgtggctcaaggcaaagggagggaatgctttacctcttgcaggcwttgtgcagagtgtggccctttattttggtggatgtgagggacacaggtctggcttatagctckccctaccttcaggaatgccctctttgttttctcatggactcaaaccttccctcccactctgacctggcagagtgatagaaagaatggcagctccactgctgctgttcacatgctgagaacacaaacatttagaacaaagccccatgactactggttgagcagtttgttcctctctaaggttcaaagttgttaattacctttccgtaactggcattcctgttgtggagccataaattt

SEQ ID NO: 2579 - DNA, 600 bp, Chicken  19866894089676_3
cagtaatgttgtattacaagctttgttgttgttgttccaaaagcatgaagaaaacacttgtacagagtctaaggctgtaggcttgcctctggtgggttcttaaaatgcragttttgtgatgatttttcatatgcctgagtttttgttttttgttttttttttccaaagaaaaactgacaggtgagtagaaaatgtggctcaaggcaaagggagggaatgctttacctcttgcaggcwttgtgcagagtgtggccctttattttggtggatgtgagggacacaggtctggcttatagctckccctaccttcaggaatgccctctttgttttctcatggactcaaaccttccctcccactctgacctggcagagtgatagaaagaatggcagctccactgctgctgttcacatgctgagaacacaaacatttagaacaaagccccatgactactggttgagcagtttgttcctctctaaggttcaaagttgttaattacctttccgtaactggcattcctgttgtggagccataaatttgtctttgaacagcaaatatatacatccagcatcctttctgctgccttctacatccacttaagg

SEQ ID NO: 2580 - DNA, 599 bp, Chicken  19866894089687_1
  misc_feature (1)..(72): n is any nucleotide
nnnnnnnnnnnnnnnnnnnnnnnnnnnnnnnnnnnnnnnnnnnnnnnnnnnnnnnnnnnnnnnnnnnnnnnnttaaggagttcctgccttccctctttggtagcttgctgctgtcatttagatctcctgctttaccatgccaggacaactgcaaactacatcagtgaactgatctgactcaaaaaataagccacattttctgtcagaatattgttaaagatgaatgtgttccaatgttgatggtactatgtaaacaatactgcctgtagggctgaatatccagccaaaacatagaaaacrtgtttctttatattgtgaaatttctactgcwtttgtataggaataggtgtgaaaacagcacatcagaatagctcctgatttgargcaacacatgacagcaattggttgatagtggatctgggatgtttggttttgaggaaggccatgacagaatttataacctttcttttacaaacaatatttgtacctatcttgtacctacctctcattttcaagagataaactatatcaaagttttgaactttgatggtgattgaatttatacttgaattatacttcaagttttacagagaattcct

SEQ ID NO: 2581 - DNA, 599 bp, Chicken  19866894089687_2
  misc_feature (1)..(41): n is any nucleotide
nnnnnnnnnnnnnnnnnnnnnnnnnnnnnnnnnnnnnnnnnttaaggagttcctgccttccctctttggtagcttgctgctgtcatttagatctcctgctttaccatgccaggacaactgcaaactacatcagtgaactgatctgactcaaaaaataagccacattttctgtcagaatattgttaaagatgaatgtgttccaatgttgatggtactatgtaaacaatactgcctgtagggctgaatatccagccaaaacatagaaaacrtgtttctttatattgtgaaatttctactgcwtttgtataggaataggtgtgaaaacagcacatcagaatagctcctgatttgargcaacacatgacagcaattggttgatagtggatctgggatgtttggttttgaggaaggccatgacagaatttataacctttcttttacaaacaatatttgtacctatcttgtacctacctctcattttcaagagataaactatatcaaagttttgaactttgatggtgattgaatttatacttgaattatacttcaagttttacagagaattcctgtgtaataataaaggaaaagcttcaacttaa

SEQ ID NO: 2582 - DNA, 600 bp, Chicken  19866894089687_3
tgccttccctctttggtagcttgctgctgtcatttagatctcctgctttaccatgccaggacaactgcaaactacatcagtgaactgatctgactcaaaaaataagccacattttctgtcagaatattgttaaagatgaatgtgttccaatgttgatggtactatgtaaacaatactgcctgtagggctgaatatccagccaaaacatagaaaacrtgtttctttatattgtgaaatttctactgcwtttgtataggaataggtgtgaaaacagcacatcagaatagctcctgatttgargcaacacatgacagcaattggttgatagtggatctgggatgtttggttttgaggaaggccatgacagaatttataacctttcttttacaaacaatatttgtacctatcttgtacctacctctcattttcaagagataaactatatcaaagttttgaactttgatggtgattgaatttatacttgaattatacttcaagttttacagagaattcctgtgtaataataaaggaaaagcttcaacttaaatgtccagcatttgagactggctcaaaagtaagattcctatttcatagcccctg

SEQ ID NO: 2583 - DNA, 600 bp, Chicken  19866894089688_1
tccgcgtggtgccgtgggggctcaggatggggccaggcgtctgctgccccccaggcagacacggagctgatggcagaaatccaggcctgcgggtgctcgaggaaccagagctgtgcacaccgcggtttcctggtgggaagccagagctggaataggggctgccctccccgcagtcttacagctgtggtttgtgaacgcagacctggctgaggaaatcctgtggtccccctgcagccaaacgagtccatcaaaagtgggcagggaaaaataccgagcttctgtttctcatttaggtccccrtgctgattctgtgccaggcttggtttgtcagccccgcggtggctcctgttcgccccggagggctccgctggggacagtgacactgatagggacggtggtggctcctgtggtgcctgcaaggaragagtgataccgcttggtgcctggctgtggctggggagtgctttggggtttggggatatgggccaggaatgggacatacatttgttggggttctggggcagtgcggagctctgagcatcaccagcagcagtacccggggcactctctcctgttctgctcctgcctgggaatcacgtt

SEQ ID NO: 2584 - DNA, 600 bp, Chicken  19866894089688_2
ggtttcctggtgggaagccagagctggaataggggctgccctccccgcagtcttacagctgtggtttgtgaacgcagacctggctgaggaaatcctgtggtccccctgcagccaaacgagtccatcaaaagtgggcagggaaaaataccgagcttctgtttctcatttaggtccccrtgctgattctgtgccaggcttggtttgtcagccccgcggtggctcctgttcgccccggagggctccgctggggacagtgacactgatagggacggtggtggctcctgtggtgcctgcaaggaragagtgataccgcttggtgcctggctgtggctggggagtgctttggggtttggggatatgggccaggaatgggacatacatttgttggggttctggggcagtgcggagctctgagcatcaccagcagcagtacccggggcactctctcctgttctgctcctgcctgggaatcacgtttgggagggtgggggcagcaggagccccatgggcctctctggggctggcagtgatgtgggtatagaagtgagggacctgcggctgcctattgcctgcaccagaaccctcagcactttgaggaca

SEQ ID NO: 2585 - DNA, 600 bp, Chicken  19866894089694_1
agtaggactgcagtatctattgaagcagaataacatagaatcatagaatcatagaatcactaaggttggaaaagacccacaggatcatccagtccaaccatccgcccttcatcaatggttctcactaaaccacgtccctcagcacaacatccaaacgctcttcaaacaccaccagggtcggtgactccaccacctctctgggcagcccattccagtgcctgaccaccctttcagagaagtagtatttcctaacatccagcctgaatcttccctgacgcagcttgaagccattccctctcrtcctatcactagtcacccgggagaagaggctgacccccagctaactacaacctcccttcaggtagttatagagagcaataaggtctcccctgagcctcctcttctctagactgaacaatcccagctccttcagccactcttcataaggtctgtgctccagacccctcaccagctttgttgcctttttttttttttttttttttagaacccagctgaaaaacttagcaagaaactgttatcatagactcatcgttatcatagagtcatcatagaactacagaatgacttgaattggaaggg

SEQ ID NO: 2586 - DNA, 597 bp, Chicken  19866894089698_1
catcccagtgccctggctaccaccacagctcttggggacagaacctgtttcatggctaacagaatcacagaatcatctgagttgtatgggacccctgaagaccatatggtcccactccttgcaatgaacagggacacccacagctctatcagtgctcacagccccatcccttgaccttgtctgtctgcagggatggggcaccaccacctcactgggcaacctgtgcggtgcctcactgcccttattgtaaaaatcttctcccttatatccaacctttatctcccctcctagtttgaaacsgtctccccttgtgctatcacagcagaccctgctaaagaatccatccccttctttcttcccagcacacttggcaataggtttaaataagacccacacacagcagacaccttcacttgcagcaccataacacatcctagagcagttactgagcagccagttgctttgaccggccatagggcagaacattgaggcttcagttttgaaatacttttccatattgctgtgtacgccaacatggaaataagttttgaaacgcagtacaaagcaccatcgctgtgaaatcaccccattctttgc

SEQ ID NO: 2587 - DNA, 600 bp, Chicken  19866894089707_1
tcacatcaaggaaaatatactatgcaaaaactgaaatgtaaaaaccttcaacttgaatatttttaatagtacctaaacaaacgttgcagctgcacaagggctggagcaacagagctctcccttcggggctgggtacggccccagggacacggtggatcacagacccacagcacagatgggacggaaggttccccacagccccacggagtgattaaatgactcagcttttcctttaagtggatttggatgtccatcagcttttggtgcaaacctcagcccaacttattttcacccagcagrcagcgctgaggggaatacaagaaacattctgcatgagctgtatgctctctttggctccagtaggtttgcattctcagagaatagcagataacrtttcctttgaggaagggcaggaaataatgaatagagtctacggcaataattaacacagagtctacaagaagamgacaaacgctgaggaaccaacgggttgtaaagtgattcagctttgatttagagctccccagacttcaacatcccacacctgctgccaaccagagcccgttcagctccagtccctcaccttggtgtcactgcctg

SEQ ID NO: 2588 - DNA, 600 bp, Chicken  19866894089707_2
acaagggctggagcaacagagctctcccttcggggctgggtacggccccagggacacggtggatcacagacccacagcacagatgggacggaaggttccccacagccccacggagtgattaaatgactcagcttttcctttaagtggatttggatgtccatcagcttttggtgcaaacctcagcccaacttattttcacccagcagrcagcgctgaggggaatacaagaaacattctgcatgagctgtatgctctctttggctccagtaggtttgcattctcagagaatagcagataacrtttcctttgaggaagggcaggaaataatgaatagagtctacggcaataattaacacagagtctacaagaagamgacaaacgctgaggaaccaacgggttgtaaagtgattcagctttgatttagagctccccagacttcaacatcccacacctgctgccaaccagagcccgttcagctccagtccctcaccttggtgtcactgcctggcgttgcagtcagggccaaaacccggaactgcgtggtgtatctgctcagctccttcacaacctgcagacaggaagggtccacatcaataccca

SEQ ID NO: 2589 - DNA, 600 bp, Chicken  19866894089707_3
acagcacagatgggacggaaggttccccacagccccacggagtgattaaatgactcagcttttcctttaagtggatttggatgtccatcagcttttggtgcaaacctcagcccaacttattttcacccagcagrcagcgctgaggggaatacaagaaacattctgcatgagctgtatgctctctttggctccagtaggtttgcattctcagagaatagcagataacrtttcctttgaggaagggcaggaaataatgaatagagtctacggcaataattaacacagagtctacaagaagamgacaaacgctgaggaaccaacgggttgtaaagtgattcagctttgatttagagctccccagacttcaacatcccacacctgctgccaaccagagcccgttcagctccagtccctcaccttggtgtcactgcctggcgttgcagtcagggccaaaacccggaactgcgtggtgtatctgctcagctccttcacaacctgcagacaggaagggtccacatcaatacccacacaggagatgggcaggagacaaaagctggtgcatgctttggctctgtgacacagcaacgtgtcaaacagcaa

SEQ ID NO: 2590 - DNA, 599 bp, Chicken  19866894089716_1
  misc_feature (1)..(129): n is any nucleotide
nnnnnnnnnnnnnnnnnnnnnnnnnnnnnnnnnnnnnnnnnnnnnnnnnnnnnnnnnnnnnnnnnnnnnnnnnnnnnnnnnnnnnnnnnnnnnnnnnnnnnnnnnnnnnnnnnnnnnnnnnnnnnnnnntgacactgcctgtgagcacggccccgggctccagccccgctctggatcacagaatggtgcctcagcagtggctgccagatgggccctggggtggcacaggcagatgtgggtgcacggaaggacccatgtggcagcagcaggctggccccagggcaggcagcagcaggagakgagcagccctggcacagcgagcggcggcrgctcccaggcccaggctggctctgtgctggggaggagytggctgtgagcctcccagcacagagggaagacaagacaggagccaaagggcagggatcagaggcagcaggacgggctcccgttgcatgggaggctgtgagctcctgccaggatcaaaccctgctgccagccagcacccagcaccgtccccagccgcggtcagagcggacaaatcccatccacatcacctgtgagggagacacgggctggagctggggktgacggcacggggg

SEQ ID NO: 2591 - DNA, 599 bp, Chicken  19866894089716_2
  misc_feature (1)..(100): n is any nucleotide
nnnnnnnnnnnnnnnnnnnnnnnnnnnnnnnnnnnnnnnnnnnnnnnnnnnnnnnnnnnnnnnnnnnnnnnnnnnnnnnnnnnnnnnnnnnnnnnnnnnntgacactgcctgtgagcacggccccgggctccagccccgctctggatcacagaatggtgcctcagcagtggctgccagatgggccctggggtggcacaggcagatgtgggtgcacggaaggacccatgtggcagcagcaggctggccccagggcaggcagcagcaggagakgagcagccctggcacagcgagcggcggcrgctcccaggcccaggctggctctgtgctggggaggagytggctgtgagcctcccagcacagagggaagacaagacaggagccaaagggcagggatcagaggcagcaggacgggctcccgttgcatgggaggctgtgagctcctgccaggatcaaaccctgctgccagccagcacccagcaccgtccccagccgcggtcagagcggacaaatcccatccacatcacctgtgagggagacacgggctggagctggggktgacggcacgggggrcggcacagccgggaccagactgcctggg

SEQ ID NO: 2592 - DNA, 599 bp, Chicken  19866894089716_3
  misc_feature (1)..(62): n is any nucleotide
nnnnnnnnnnnnnnnnnnnnnnnnnnnnnnnnnnnnnnnnnnnnnnnnnnnnnnnnnnnnnntgacactgcctgtgagcacggccccgggctccagccccgctctggatcacagaatggtgcctcagcagtggctgccagatgggccctggggtggcacaggcagatgtgggtgcacggaaggacccatgtggcagcagcaggctggccccagggcaggcagcagcaggagakgagcagccctggcacagcgagcggcggcrgctcccaggcccaggctggctctgtgctggggaggagytggctgtgagcctcccagcacagagggaagacaagacaggagccaaagggcagggatcagaggcagcaggacgggctcccgttgcatgggaggctgtgagctcctgccaggatcaaaccctgctgccagccagcacccagcaccgtccccagccgcggtcagagcggacaaatcccatccacatcacctgtgagggagacacgggctggagctggggktgacggcacgggggrcggcacagccgggaccagactgcctgggagcagacacctgctgggcagccaccaccagcccccgct

SEQ ID NO: 2593 - DNA, 600 bp, Chicken  19866894089716_4
gcagcagcaggagakgagcagccctggcacagcgagcggcggcrgctcccaggcccaggctggctctgtgctggggaggagytggctgtgagcctcccagcacagagggaagacaagacaggagccaaagggcagggatcagaggcagcaggacgggctcccgttgcatgggaggctgtgagctcctgccaggatcaaaccctgctgccagccagcacccagcaccgtccccagccgcggtcagagcggacaaatcccatccacatcacctgtgagggagacacgggctggagctggggktgacggcacgggggrcggcacagccgggaccagactgcctgggagcagacacctgctgggcagccaccaccagcccccgcttcgcccttcctgggrctgctgagacagatgggaatgccgagacagcagtgactcagcagctgagtcatgggtgagccggcaccccaggacggcagtgtgagtcacaagtggcccggaaggatgaccccgacgtgagtgtgatggaggctcagcctcactgtgggcgatccgctgctccggggtcagcagctcagcagcagctctggaaatgcagctctc

SEQ ID NO: 2594 - DNA, 600 bp, Chicken  19866894089716_5
gagcagccctggcacagcgagcggcggcrgctcccaggcccaggctggctctgtgctggggaggagytggctgtgagcctcccagcacagagggaagacaagacaggagccaaagggcagggatcagaggcagcaggacgggctcccgttgcatgggaggctgtgagctcctgccaggatcaaaccctgctgccagccagcacccagcaccgtccccagccgcggtcagagcggacaaatcccatccacatcacctgtgagggagacacgggctggagctggggktgacggcacgggggrcggcacagccgggaccagactgcctgggagcagacacctgctgggcagccaccaccagcccccgcttcgcccttcctgggrctgctgagacagatgggaatgccgagacagcagtgactcagcagctgagtcatgggtgagccggcaccccaggacggcagtgtgagtcacaagtggcccggaaggatgaccccgacgtgagtgtgatggaggctcagcctcactgtgggcgatccgctgctccggggtcagcagctcagcagcagctctggaaatgcagctctccattttgtgtgggca

SEQ ID NO: 2595 - DNA, 600 bp, Chicken  19866894089716_6
ccagcacagagggaagacaagacaggagccaaagggcagggatcagaggcagcaggacgggctcccgttgcatgggaggctgtgagctcctgccaggatcaaaccctgctgccagccagcacccagcaccgtccccagccgcggtcagagcggacaaatcccatccacatcacctgtgagggagacacgggctggagctggggktgacggcacgggggrcggcacagccgggaccagactgcctgggagcagacacctgctgggcagccaccaccagcccccgcttcgcccttcctgggrctgctgagacagatgggaatgccgagacagcagtgactcagcagctgagtcatgggtgagccggcaccccaggacggcagtgtgagtcacaagtggcccggaaggatgaccccgacgtgagtgtgatggaggctcagcctcactgtgggcgatccgctgctccggggtcagcagctcagcagcagctctggaaatgcagctctccattttgtgtgggcacctccccgtccccagcacaccccgcgatgctctgagctgtacgggcctggcagcaatgggatttaccctcacgtcacaagt

SEQ ID NO: 2596 - DNA, 599 bp, Chicken  19866894089718_1
  misc_feature (1)..(16): n is any nucleotide
nnnnnnnnnnnnnnnngctggaagagcactcctatgactgcttatacgctctggatctcagagggctcatgtcttttcaagggtagtgtaggacttgcaattttcttcccaaatgaaagtattttagagagagcttcacaaagatgactctcaaagcagtttctgtatgttgctaatattacctttgatcttgcattctgcctggggacatacaatgaaaccaaagttgaaatatctatacactgtaagtctttggtatatatgttatatagacactatatacctatttttgagtcattycagtaaaaataagacttcaatttttcttcccaatctttgattaaaacaatttaacagatcattctctataatctgaaacagtaaattgaactatgacactaaaaatacgtatgcctactttaaacttgaagtaacatattcagatgagtaacaaaatgaatttatgatctttaatatatatwtttttttaatatttatttatttcagtgtatacacatgcatgatgaagatgccttcatcactttctggaaggaaaaattatcctgcctgcaattaaacaatttcccatcagacaacca

SEQ ID NO: 2597 - DNA, 600 bp, Chicken  19866894089718_2
ctttgatcttgcattctgcctggggacatacaatgaaaccaaagttgaaatatctatacactgtaagtctttggtatatatgttatatagacactatatacctatttttgagtcattycagtaaaaataagacttcaatttttcttcccaatctttgattaaaacaatttaacagatcattctctataatctgaaacagtaaattgaactatgacactaaaaatacgtatgcctactttaaacttgaagtaacatattcagatgagtaacaaaatgaatttatgatctttaatatatatwtttttttaatatttatttatttcagtgtatacacatgcatgatgaagatgccttcatcactttctggaaggaaaaattatcctgcctgcaattaaacaatttcccatcagacaaccaaagcattcatggaattgtagaaatatatagtccttcacaaagaaaatttttactcatattcattctattcactcagccacagtttatctgatttaatttggtgagatctgaaaaygatttcactctttagtgaaatctcagattctgagttacagccttggtagtgaaatgaaacattgaacc

SEQ ID NO: 2598 - DNA, 600 bp, Chicken  19866894089718_3
ctactttaaacttgaagtaacatattcagatgagtaacaaaatgaatttatgatctttaatatatatwtttttttaatatttatttatttcagtgtatacacatgcatgatgaagatgccttcatcactttctggaaggaaaaattatcctgcctgcaattaaacaatttcccatcagacaaccaaagcattcatggaattgtagaaatatatagtccttcacaaagaaaatttttactcatattcattctattcactcagccacagtttatctgatttaatttggtgagatctgaaaaygatttcactctttagtgaaatctcagattctgagttacagccttggtagtgaaatgaaacattgaaccacagtgacagtatagcaactaagtagagcagccataaaattaggttctctttggcagaaattcatgaggatattggtaaaatcaagcattcactctagcacgaacattataagaggacagtataggattaaaatcctgcataactaaaaataaattaactttgtttaaaaaacaatcacaaccttggaaaagttattaattgtagtaacttctgacacctgaaagcaagtgg

SEQ ID NO: 2599 - DNA, 599 bp, Chicken  19866894089722_1
  misc_feature (1)..(7): n is any nucleotide
nnnnnnnagagcttagtgtgtacatgtttctgtttcacagaagtgaactgaagctgtgtcttgttatgctctgaaagaaaaaaaatctgctcatatggcctatctgggttttagatatggtctaatttagtgggagcagtagtttctcatgacttgcaggtggaaagaatgaagtaggaatccaagtggagactgttaagagttgctgtttggttttgttggagacagcattttgtatattgatttattttaagattgaaattctgaatgaagcacatctgtgactctgcaggcagcccytcctttgcagagcctgttaaggaaggtatcactctgaaattcagcaaagaacactgaaaatgaagcaagatgtaggagacagcacactgctttgcacctttttcactgcagcttgctactagctggtatgtgaagcacagatcagttttccagttgtttaggaactttgttgaatgagatagaatgagaacctccagtgttttggaagtgctaacagwtggggcagtatctagggtacatgaagtacctcttctgctgagctttaatcacatcatcctgcacrgctcatattagcagtg

SEQ ID NO: 2600 - DNA, 600 bp, Chicken  19866894089722_2
ttggagacagcattttgtatattgatttattttaagattgaaattctgaatgaagcacatctgtgactctgcaggcagcccytcctttgcagagcctgttaaggaaggtatcactctgaaattcagcaaagaacactgaaaatgaagcaagatgtaggagacagcacactgctttgcacctttttcactgcagcttgctactagctggtatgtgaagcacagatcagttttccagttgtttaggaactttgttgaatgagatagaatgagaacctccagtgttttggaagtgctaacagwtggggcagtatctagggtacatgaagtacctcttctgctgagctttaatcacatcatcctgcacrgctcatattagcagtgactaatggccctgaaaataatagacaaatccattagttacagatcctatttttaatctatgcaaaagtattttgtattttagccaaggagcataatttttgtgttgattccccagagactaaacaagaccagagcccagtgtacttgctgatgccactaaattattactagcattttggccttggtgagctcctgctttctgaaatgatacctatgcat

SEQ ID NO: 2601 - DNA, 600 bp, Chicken  19866894089722_3
actctgcaggcagcccytcctttgcagagcctgttaaggaaggtatcactctgaaattcagcaaagaacactgaaaatgaagcaagatgtaggagacagcacactgctttgcacctttttcactgcagcttgctactagctggtatgtgaagcacagatcagttttccagttgtttaggaactttgttgaatgagatagaatgagaacctccagtgttttggaagtgctaacagwtggggcagtatctagggtacatgaagtacctcttctgctgagctttaatcacatcatcctgcacrgctcatattagcagtgactaatggccctgaaaataatagacaaatccattagttacagatcctatttttaatctatgcaaaagtattttgtattttagccaaggagcataatttttgtgttgattccccagagactaaacaagaccagagcccagtgtacttgctgatgccactaaattattactagcattttggccttggtgagctcctgctttctgaaatgatacctatgcattgctcatcagccttttgtagggggtagtttggataccacgcttctcatctgcagagataggagct

SEQ ID NO: 2602 - DNA, 600 bp, Chicken  19866894089725_1
aacacagtaactcgctgttataatcttatcctttcagccaactgaaatgggaatatctatattcagatcacatcctaccacaggtaacaatgtttgataaagcatcaaaactgtatgcagatacagatattggtatctgtatgctctctttactgtatatcttcagagagccaagtgaaatttgaaaaacttgagtaaatatcaaggcaacaacacttgggcaattatgtctagacatggcagcgagagttcagccataaaaaccttttgtattccttttcattcctaataaaaatgtgragattctttcgcttcaagacttctttatgacttgttcattatgaccaagacaacgtactagcacctccaratgatggtccttgtcccagacgatattgaaagtctatccagacgtcaacattgttctgatgacgtctcagtcagaaggatcatgtacagaagactgcaagatgatatccttccatcatcagaaacatcctagaatcactctccgttttctcagtttacttaacaagagaaatctggggctttttagccaccagatgtcactcagtctttcattcaacctgtcagaggaaa

SEQ ID NO: 2603 - DNA, 600 bp, Chicken  19866894089725_2
catcctaccacaggtaacaatgtttgataaagcatcaaaactgtatgcagatacagatattggtatctgtatgctctctttactgtatatcttcagagagccaagtgaaatttgaaaaacttgagtaaatatcaaggcaacaacacttgggcaattatgtctagacatggcagcgagagttcagccataaaaaccttttgtattccttttcattcctaataaaaatgtgragattctttcgcttcaagacttctttatgacttgttcattatgaccaagacaacgtactagcacctccaratgatggtccttgtcccagacgatattgaaagtctatccagacgtcaacattgttctgatgacgtctcagtcagaaggatcatgtacagaagactgcaagatgatatccttccatcatcagaaacatcctagaatcactctccgttttctcagtttacttaacaagagaaatctggggctttttagccaccagatgtcactcagtctttcattcaacctgtcagaggaaatcagctacaagcagagaattctttcctcagagagataattaatatctccttacaaatagaggaaaaaaac

SEQ ID NO: 2604 - DNA, 600 bp, Chicken  19866894089725_3
cagacgtcaacattgttctgatgacgtctcagtcagaaggatcatgtacagaagactgcaagatgatatccttccatcatcagaaacatcctagaatcactctccgttttctcagtttacttaacaagagaaatctggggctttttagccaccagatgtcactcagtctttcattcaacctgtcagaggaaatcagctacaagcagagaattctttcctcagagagataattaatatctccttacaaatagaggaaaaaaactactacatgcctgagaatatacagtaaaatgacaatcrgtcagagaccatcaactcattttctaacaaattacagcccagattctaatttcatatccttgaaagatgtatcaatagcattagtgggtattagtaagagatggccagactcttctaggcagagaaggagtatgcattctcacattattcaatattgtatcatagaaatatttagattattgtaggcaaaaatattttggaaattttcaaaactattaaaggcagtgtatcactgaaaagtaataaccctttgtctgaaaagtatccttacttctacagaccatgatctctgaagctatg

SEQ ID NO: 2605 - DNA, 600 bp, Chicken  19866894089736_1
agggagctgaaaaatgttcatcagaccaaagcactgatggagggatggcaaaaagagggcttagccttgctgaatgctatacagtcactgaaagattatcttagcaaggtggcagatagaggagataaggtaagacaagaaagatggcttccaccctttaaaaactgcttgactttttttgtacgtatatatgtgtgtatgtgcatacattgtgtatattattacatgtgtttacatatatatgtaggaggaacaagaggactcattctgagatttgaagaggactctcaaatgccttgrgtctgcttaaatttgtagtaatgactcagtartgacatcaaagagtaggccagagagagatcatatagatgtttgtttgttttttttctttgttgttgttttgttttgttttgttttttgttttccccaataaaatccagcgcaggaacatttgaattttgctattgatgggagaggagaacttctggaagtacagagtatgtttgagaaggagagaaacgtgttgcaaattgacctgaagtttcacttctccaatcctgggtctggtgatgaagttgcattagtggaaaaattggtata

SEQ ID NO: 2606 - DNA, 600 bp, Chicken  19866894089736_2
actgatggagggatggcaaaaagagggcttagccttgctgaatgctatacagtcactgaaagattatcttagcaaggtggcagatagaggagataaggtaagacaagaaagatggcttccaccctttaaaaactgcttgactttttttgtacgtatatatgtgtgtatgtgcatacattgtgtatattattacatgtgtttacatatatatgtaggaggaacaagaggactcattctgagatttgaagaggactctcaaatgccttgrgtctgcttaaatttgtagtaatgactcagtartgacatcaaagagtaggccagagagagatcatatagatgtttgtttgttttttttctttgttgttgttttgttttgttttgttttttgttttccccaataaaatccagcgcaggaacatttgaattttgctattgatgggagaggagaacttctggaagtacagagtatgtttgagaaggagagaaacgtgttgcaaattgacctgaagtttcacttctccaatcctgggtctggtgatgaagttgcattagtggaaaaattggtatatgtagtgaaacaacaagttaaaaaggcctctt

SEQ ID NO: 2607 - DNA, 600 bp, Chicken  19866894089737_1
tgatgaaagactcaacatgagctagcaatgtgtgcttgcagcccagaaggccaaccatatcctgggttgtatcatgagaagtgtgaccagcaggtcaagggaggtgattctgcccctctactctgctctcctgagaccctacctgtagtactgcaaccagttctggagctcacaacacaagaaggccatcaagttgttacagtgggttcagaggagggccgtgaagatggtcagagggcttgagcacctcccctgcagtgacaggctgagagagttgaggctcttcagcctggagaagtytccagggggaccttatagcagccttcagtacctgaagggggcctacaggaaagttggagagggactttttataagggcatgtagcaacaggacaaggggaaatggctttaaacaggaagagtgtagatttagactagatattaggaagaaattctttactgtgagggtggtaagacactggaacaggtttcccagagagsttgtggattcctgctccctggaggagttcaaggccaggctggatgggactttgagcaacctggtcgagagggaggtgtctctgactatagcagggggtat

SEQ ID NO: 2608 - DNA, 600 bp, Chicken  19866894089737_2
agtgggttcagaggagggccgtgaagatggtcagagggcttgagcacctcccctgcagtgacaggctgagagagttgaggctcttcagcctggagaagtytccagggggaccttatagcagccttcagtacctgaagggggcctacaggaaagttggagagggactttttataagggcatgtagcaacaggacaaggggaaatggctttaaacaggaagagtgtagatttagactagatattaggaagaaattctttactgtgagggtggtaagacactggaacaggtttcccagagagsttgtggattcctgctccctggaggagttcaaggccaggctggatgggactttgagcaacctggtcgagagggaggtgtctctgactatagcagggggtatggaactagatgatcttaaaggtcasttccaaaccaaaccattctgtaattctatgactccatgaatttatctccatttccttgttttaaagctcattgatgaccatacagtgatgcaagtagaatacaagaaaaaccatgttctcctttacctgggaaatgtaagtaccaaacactggctatttgatttaaacaaataat

SEQ ID NO: 2609 - DNA, 600 bp, Chicken  19866894089737_3
cagtacctgaagggggcctacaggaaagttggagagggactttttataagggcatgtagcaacaggacaaggggaaatggctttaaacaggaagagtgtagatttagactagatattaggaagaaattctttactgtgagggtggtaagacactggaacaggtttcccagagagsttgtggattcctgctccctggaggagttcaaggccaggctggatgggactttgagcaacctggtcgagagggaggtgtctctgactatagcagggggtatggaactagatgatcttaaaggtcasttccaaaccaaaccattctgtaattctatgactccatgaatttatctccatttccttgttttaaagctcattgatgaccatacagtgatgcaagtagaatacaagaaaaaccatgttctcctttacctgggaaatgtaagtaccaaacactggctatttgatttaaacaaataataaagtcagcatgtaatagatgcacctacagtgaggtttcattctctgaagtgcccaaatatattctcctccccatcagctttgccctctactcaataagctgcttattccccaaactatgtaaca

SEQ ID NO: 2610 - DNA, 600 bp, Chicken  19866894089739_1
cagtgagcaacttcgaacatttactcctcttggaccagcacagccagcacctgcagcacatcattcgctggtgagtccagaggttttgttcactttacctatctggacattaacaatcttataatcatttggctcaacaagtcatcttctgtggatggttcctcacataagtgatgtattgtcatttggaattgaatttggtaaatttggccccagattaacccccccccccccttccccaaaatgaggtttttggagatgtagtgtatgtgtagatacttatgcataaattcatagaakaacataatcattttcccattgcagtcagtgaaaacacagtccatgcaattgatggaactaagctttttaatttatcttggagaagacacctctcagatatcaactgaatagctctatacgctttacatatatggaattaccgtagttactgtagtagtaggactgtctgacatggtatatgtatacttcaacatttctggcatctttagcttcagtacaggttgtcttacagtgctgacgctctggaggtcgctttagttaagtagaccaagtatttagcagtagtttctgatctatgtg

SEQ ID NO: 2611 - DNA, 600 bp, Chicken  19866894089739_2
cagtccatgcaattgatggaactaagctttttaatttatcttggagaagacacctctcagatatcaactgaatagctctatacgctttacatatatggaattaccgtagttactgtagtagtaggactgtctgacatggtatatgtatacttcaacatttctggcatctttagcttcagtacaggttgtcttacagtgctgacgctctggaggtcgctttagttaagtagaccaagtatttagcagtagtttctgatctatgtgtgtatgtttttatcagatttgtatattatccagtgrttcgaagaacaacaatttaggttatggttatgagtaaggtaattatatgtcagttaggatgatcttgcygctgagcgtgttaaaatgcatgcatgcacctgtgcttaaggaagctgttatatgccacaagcagattacagaggagttggggtagtacaatgagatcaaaggatagataccaaggatacttaccaaagaaaaagcattctcttactgtttcttccatgctgcatctgttctctttttataaatgggccagggctgtattttctagtagtttattttcacattaggaagttc

SEQ ID NO: 2612 - DNA, 600 bp, Chicken  19866894089739_3
gaatagctctatacgctttacatatatggaattaccgtagttactgtagtagtaggactgtctgacatggtatatgtatacttcaacatttctggcatctttagcttcagtacaggttgtcttacagtgctgacgctctggaggtcgctttagttaagtagaccaagtatttagcagtagtttctgatctatgtgtgtatgtttttatcagatttgtatattatccagtgrttcgaagaacaacaatttaggttatggttatgagtaaggtaattatatgtcagttaggatgatcttgcygctgagcgtgttaaaatgcatgcatgcacctgtgcttaaggaagctgttatatgccacaagcagattacagaggagttggggtagtacaatgagatcaaaggatagataccaaggatacttaccaaagaaaaagcattctcttactgtttcttccatgctgcatctgttctctttttataaatgggccagggctgtattttctagtagtttattttcacattaggaagttcttccttcctttagggagtctctttgtgctcctctcaagggtaaaaaaagaatgctttttaccatagtaa

SEQ ID NO: 2613 - DNA, 600 bp, Chicken  19866894089744_1
aggaggctggagtcaaagaacatgactgacacagattgaatctgaaagcaagaaacagtttttccccagtgaagggagaaataacatctctcctcgtgccagccaccatgtgtaccactggcagagccctttattcagtggctaagctaaggctggctgcaaaccatctggtaacagggcatgagagcagcccccttctctggcccagcagctgcagccaattcaggcccagcagagctcagggaaagaaggaacatgtaacaccctgcaccagagatgctgggccctgctgaaataaamgagtctgtctggtagcccagaacaagccaactatcagtactagacatcagtacttggaactgagtccccagtaaggctttccccagctcaccttggtggttaagagtgcatccacatcctcccaggctcgtagyttggcacgggcagccagggcagtcagtacatactgcttatcaggaatctgcaaggcaaagagctrcactcagagcactagcacagtttagcaggactgtgtggcatggaggagaatggtatctgcctctatcttgtcaaaactcacaacagcagccaggcaaggag

SEQ ID NO: 2614 - DNA, 600 bp, Chicken  19866894089744_2
tcagtggctaagctaaggctggctgcaaaccatctggtaacagggcatgagagcagcccccttctctggcccagcagctgcagccaattcaggcccagcagagctcagggaaagaaggaacatgtaacaccctgcaccagagatgctgggccctgctgaaataaamgagtctgtctggtagcccagaacaagccaactatcagtactagacatcagtacttggaactgagtccccagtaaggctttccccagctcaccttggtggttaagagtgcatccacatcctcccaggctcgtagyttggcacgggcagccagggcagtcagtacatactgcttatcaggaatctgcaaggcaaagagctrcactcagagcactagcacagtttagcaggactgtgtggcatggaggagaatggtatctgcctctatcttgtcaaaactcacaacagcagccaggcaaggaggtgagatactgcgctgaggtcatggccactgagcaggagctggggatttacaggtgatgttacagctagttggcccctgttcagtatacctttctgagcttctgaaacagccctactcaagaagaatgcagttt

SEQ ID NO: 2615 - DNA, 600 bp, Chicken  19866894089744_3
ctggcccagcagctgcagccaattcaggcccagcagagctcagggaaagaaggaacatgtaacaccctgcaccagagatgctgggccctgctgaaataaamgagtctgtctggtagcccagaacaagccaactatcagtactagacatcagtacttggaactgagtccccagtaaggctttccccagctcaccttggtggttaagagtgcatccacatcctcccaggctcgtagyttggcacgggcagccagggcagtcagtacatactgcttatcaggaatctgcaaggcaaagagctrcactcagagcactagcacagtttagcaggactgtgtggcatggaggagaatggtatctgcctctatcttgtcaaaactcacaacagcagccaggcaaggaggtgagatactgcgctgaggtcatggccactgagcaggagctggggatttacaggtgatgttacagctagttggcccctgttcagtatacctttctgagcttctgaaacagccctactcaagaagaatgcagttttccctacattgccccagtgcacaccaccctcaagctccaacgccacgccccgttgctaaatgcag

SEQ ID NO: 2616 - DNA, 600 bp, Chicken  19866894089745_1
attatctgcccacaagcgctcatttatgtctgtttacaaaaaaaatagaaataaagacaggaaaaaaaataaatcatccggaagtgtacgtgacgttattaagcttacagacttactgggggaacctttaaggtggtttatagacactgactgacttgaaagatgccctcagagagcctgcactacacaacctctcagagtgaggaaaatgacaagcattagcaatgtagcagtactcagctacctggttctacatggaaaggcacccatacctcatggaaagagcatctaggaaatgaraagacagtgatgggcagatgcttcttagtataaatactcatttcttttctggtttgtttacaagccagacacaaaaagtaattttttcctctctttcttccattttccaatgaatcagatccatgagccacttgtcccagcaccccatgctccagctttgtcagtacaagcagcttcagaagacacaaaattactgctgctacaaaggaacagagcgcaagaacaccccagatattccctcgtcttacaagtagagcataacttctgcctttgagcaagaaggagagttctaaacaaata

SEQ ID NO: 2617 - DNA, 600 bp, Chicken  19866894089749_1
catggacagtactgggtttccaggtgccacaccggactgcacacacagacaacagagctcccttcaaagcacaagcatggacatttcagccccaggaaaaccaggatgaaaaaagggtaggcataaatgaccttaccggaagagcagtctcacgtctcccagttccttactctttcaggcagaggacaaggatttgcagcaaacacgtcagttcatggccaactgctaggctgcatgagacacacaaagcaacagtggagcagccaccatccatctctactgacagcccctggcttcacytccctgtcctctctcattggaccttgctcaccgcattacttccatgatatcctaccatgatgcagttttttttcacatccatcctggaaactctggtcaaaaattatggagacagaggaccacaccagcaaattcatcacactaccacagacagcactgggtttgcagaagccacrctggaatgagtaactgacaaataagctcctttcaaagcagaaggacggagatttcagccgcaggaaaagcaggctgggatagaaaagggtgacagtgaccattccagcaaagcagtgtcaggtc

SEQ ID NO: 2618 - DNA, 600 bp, Chicken  19866894089749_2
aggcagaggacaaggatttgcagcaaacacgtcagttcatggccaactgctaggctgcatgagacacacaaagcaacagtggagcagccaccatccatctctactgacagcccctggcttcacytccctgtcctctctcattggaccttgctcaccgcattacttccatgatatcctaccatgatgcagttttttttcacatccatcctggaaactctggtcaaaaattatggagacagaggaccacaccagcaaattcatcacactaccacagacagcactgggtttgcagaagccacrctggaatgagtaactgacaaataagctcctttcaaagcagaaggacggagatttcagccgcaggaaaagcaggctgggatagaaaagggtgacagtgaccattccagcaaagcagtgtcaggtctccaatttccttctcccttgacagagcacaagtacttgcaacaaacacgccagtacaatgcatggtcatctgccactctgcaagagacacataaagcaaccacggaggagcagccaccatccgtcatccatcactagggaatgatccaatcctccccgccccaacctcttctctca

SEQ ID NO: 2619 - DNA, 599 bp, Chicken  19866894089750_1
  misc_feature (1)..(62): n is any nucleotide
nnnnnnnnnnnnnnnnnnnnnnnnnnnnnnnnnnnnnnnnnnnnnnnnnnnnnnnnnnnnnncaccagatatgtgccagcataagcacatgctttggcaacataaaccagtttcatatgagactgttcggtgttccaagaaaagcgttataagcagatgttcagtgccttcacagaaagcatcacaagaaaaaagacagaaatgtgttgtgagtataaagaacctgcagtgattgtcagtgctgctccgaataaccattatttgaaaaaacagtgatagaacctcactaagggacacgaygccgttggaycatttcagctccattggagttccttccagtcaaggccgtttgtctgctcccccagacattcagaagggggaaagtgcactgcaggtgctgtaagcactgcttgtggatattttcttgctgacttgaaacaaagtgtgcagccatccctcttgttcttggcagctgactttgtaaaacaggtaactggggaaaccagtatttgctttgtgttcagatgagttaatgagtcaaacatttaggttcgctgtctgtacaacaatgtcctattgattggaacaaagctgatctg

SEQ ID NO: 2620 - DNA, 599 bp, Chicken  19866894089750_2
  misc_feature (1)..(52): n is any nucleotide
nnnnnnnnnnnnnnnnnnnnnnnnnnnnnnnnnnnnnnnnnnnnnnnnnnnncaccagatatgtgccagcataagcacatgctttggcaacataaaccagtttcatatgagactgttcggtgttccaagaaaagcgttataagcagatgttcagtgccttcacagaaagcatcacaagaaaaaagacagaaatgtgttgtgagtataaagaacctgcagtgattgtcagtgctgctccgaataaccattatttgaaaaaacagtgatagaacctcactaagggacacgaygccgttggaycatttcagctccattggagttccttccagtcaaggccgtttgtctgctcccccagacattcagaagggggaaagtgcactgcaggtgctgtaagcactgcttgtggatattttcttgctgacttgaaacaaagtgtgcagccatccctcttgttcttggcagctgactttgtaaaacaggtaactggggaaaccagtatttgctttgtgttcagatgagttaatgagtcaaacatttaggttcgctgtctgtacaacaatgtcctattgattggaacaaagctgatctgtgatcctgag

SEQ ID NO: 2621 - DNA, 600 bp, Chicken  19866894089753_1
cccccacactgacagggagaagctgggacgaggtcagtgctcagggtccccccatcacctacccggggcaaagcaggggcatgggagcagcctgctctgtccaacatggggggcggtatgcccatgacgtaagggtgcacgttgcacccccggggccagcagcgaaggcatttgctgagctctgttggcattccgaggtggggggccggggctgacccgtgccgtggggctctgactgctctcttgcaggatctgcttccccgtccaggtgaaccgactgccgcgggagacgctgctcarcgtcacgctcttcgccgtgcccgtcccccccccggggagctcctccgacaccaacaagcagcggcgggtccctgaggctctgggctgggtcaccactccgctcttcaacttcaggcagtgcgtagggcgtccaaccaccacgggcrccccagggtgggccgtgagggtcccccagggctcagtgtggggacgcagcatcgttgcagcggtgccaccccaaccccaggggagcagccccacaaacagcccccccctttctcctccagggtcctgacctgcgggagaaagcttttgggcttg

SEQ ID NO: 2622 - DNA, 600 bp, Chicken  19866894089753_2
cccccggggccagcagcgaaggcatttgctgagctctgttggcattccgaggtggggggccggggctgacccgtgccgtggggctctgactgctctcttgcaggatctgcttccccgtccaggtgaaccgactgccgcgggagacgctgctcarcgtcacgctcttcgccgtgcccgtcccccccccggggagctcctccgacaccaacaagcagcggcgggtccctgaggctctgggctgggtcaccactccgctcttcaacttcaggcagtgcgtagggcgtccaaccaccacgggcrccccagggtgggccgtgagggtcccccagggctcagtgtggggacgcagcatcgttgcagcggtgccaccccaaccccaggggagcagccccacaaacagcccccccctttctcctccagggtcctgacctgcgggagaaagcttttgggcttgtggccggcgacccaggacaactccagagccagatcgagtgcccccaacttcaaccagcccgacagcgtcatcctgcaggtgggtcccagcagtggggcaccgggggggggggtgctgagcccccgctcactcacccaccctttgtc

SEQ ID NO: 2623 - DNA, 600 bp, Chicken  19866894089756_1
acactcagcaactttctaactcttgcagaaaacagctgtgcaaacacagcaggtcgctgcttcaaagaagagcactccgtttgtttgttttaaaacccttcactttaagaggctgcgatcggagactgtgctgatgaggatcactactgctctcccgttggtgctcagcctggagctggaggtacctgcagtactgaacgcatagcctgggcaatgtgggctgctggggagcacagccatgaccaagcaccaatgcactgtgctgcagaggagcaccctgtgcttggcacaacagcagcrctctgctcctgtctcaaaggtctcttttatggtgtaaagcagagctggaagaggtaactcattcacctccccaggtttcactgcatgctgtgattatcacccaagaacaaactgctcagtgctcccagtgttacctccagagagagtgggcacactcagcgcggcaaatccactcctctgctcttcattatgaagtgatttcactaattgggtgttgtactttcatgtacaattcctcacactcggcaccttcagggagcatgtgctcacccctcagccaagctggctgtaaaaccccaa

SEQ ID NO: 2624 - DNA, 600 bp, Chicken  19866894089757_1
gttgtcttgttgctgttgggtgattgaaggcccagtactggtagttacatgttgggggcttatcttcttttctttttttaaaggagctgatgtaaactgtctttccatttatttgaaccttgaagtaatggtaatgctataacatctgtaacagcgctgtaatgctggagatccttgctatgtcttcattgttgctatttatctcactccagttctcctgactcctaatcatatttcttttcttttccaaatgaaactgatttgtgtaagaaaggcaccgtaaggataacatctgctttyaccctctcccactgtgtagcagccgattattttctttgttttcacttcacagagtattacagatatccagatgatcaatacagaacaccaaacaactattatgactatacaggtgggctcactgaagaggaacagcttgaaagggcagtgctaaacagtctgaatgaaagaggtatgaatttcattacatgtcatctttcaggtcacggttcgtgttgaggtgcaggaacagggaggctgtgttgttcattatttatgttcagggtttggacatcccttcagtagtgaccaaatgtttcc

SEQ ID NO: 2625 - DNA, 600 bp, Chicken  19866894089758_1
ggaaaatatcacagtcagctgtggcagctttacagaggtgcaatccatcggagccggtctggtcagtgggaacttgtcgcataaatcaaacaaatgagagtggagagactccttaacggcggctgcaccgcgttaggctcttaacaacaggttcccttcacagcaaataaatgcaaaacttttagcgtgctgaactcagccacgccgcctcttaacctccctttatttcaatgtcatcactaaatgatttcattgttttcaaagcacaccggttgcttattggtaatgacttcaccgccrcggaataaacatcgcaacgatgactgggaatcgtggaaacacagctcatctataactttattttaggcacttaaattagtatggatcaactcagtcctcctggaataataatttcagcagcagtgtcaaaaagcaaatgagaaataaaatgccttaccccaagtgaaagtcatgggtgctgtccaaccactcctctaaagagccctccagctctccccctccaactggaaatttgtcatggcacacgtcctgcattcaggaaatagatctttacagctctcatgacaatttcctccgttc

SEQ ID NO: 2626 - DNA, 599 bp, Chicken  19866894089767_1
  misc_feature (1)..(92): n is any nucleotide
nnnnnnnnnnnnnnnnnnnnnnnnnnnnnnnnnnnnnnnnnnnnnnnnnnnnnnnnnnnnnnnnnnnnnnnnnnnnnnnnnnnnnnnnnnnncgtggtgcaaaataattgcaaaacatccaatataacttaagatacatcaaagcatgtaacattaaaagaaaatactgttgtggtcagagcatggcaatcagtcaataaaaggaaccagttctgccacacacgagcagcagaataacctgggcatgttattccactgcagaacctggaatttcagctggaacgatgaggttgtaggatraagagtagacaaggtatttctattgcacagaaaatgagttgttccaaaatgaaattaagttcacaatttgagaatgctagacatggttaatgtaatatttctcagatccaatttaggatgcataagttcaagcagtgcrccctgtagcttcagtttagacataaatcagactgcagccattatttcctgtccaataaggtggatcaaatcatgccagaataataaactgtttaatgaaaaaggatgcagagtcaaacaatgatccatatttagcactgatgaacaagaggatgatacca

SEQ ID NO: 2627 - DNA, 600 bp, Chicken  19866894089767_2
caaagcatgtaacattaaaagaaaatactgttgtggtcagagcatggcaatcagtcaataaaaggaaccagttctgccacacacgagcagcagaataacctgggcatgttattccactgcagaacctggaatttcagctggaacgatgaggttgtaggatraagagtagacaaggtatttctattgcacagaaaatgagttgttccaaaatgaaattaagttcacaatttgagaatgctagacatggttaatgtaatatttctcagatccaatttaggatgcataagttcaagcagtgcrccctgtagcttcagtttagacataaatcagactgcagccattatttcctgtccaataaggtggatcaaatcatgccagaataataaactgtttaatgaaaaaggatgcagagtcaaacaatgatccatatttagcactgatgaacaagaggatgataccagtggagcatgaattaacacctgaggcattttacttaacagaaaattgaaaattagaatccttgttttgtgaaagtgaaaacagaaatataaagaaggagatgtgggttaagaaacaagaaacccctacatgacagataga

SEQ ID NO: 2628 - DNA, 469 bp, Chicken  19866894089767_3
ccaataaggtggatcaaatcatgccagaataataaactgtttaatgaaaaaggatgcagagtcaaacaatgatccatatttagcactgatgaacaagaggatgataccagtggagcatgaattaacacctgaggcattttacttaacagaaaattgaaaattagaatccttgttttgtgaaagtgaaaacagaaatataaagaaggagatgtgggttaagaaacaagaaacccctacatgacagatagaaatagactgagcaaaatcctctatggaagcagtttataaaaaaaataccgratattttcttaactgttgtacaacatagaagattctcatagcccttctgggggtttctttttgctcagacagaacacagtttaggggttgctttgcagctgctatttaaaagttctccccttatttcaaaggaccttccttttcctgggatggatgcttcagtcaaaga

SEQ ID NO: 2629 - DNA, 600 bp, Chicken  19866894089773_1
ggcagaactgctgtaataaagggaaggataagagagttggaataacagcagatgcctcagcgaggattcatgtgcagacttggactcgtggaattgtctgcctctgtctcagccaggaaagtggttgctcaaaatgacatcatgggataccctgttaattttgtctctgtgcgtgcttccagatcagatttcactttgcagatccctcagctgttttttaaacctgccaagaaacgtgcacttggagcgagaccagctcgtttctctccttctgccctgggccactgtacctacatctcrtgggagaatccctcgagtctgctgttgcttctgctgcccaacagatgaggcagggctgtaatgtccccagcactatatccgtgcagtgagaacgagatgctagatccagtgtaatgaccagaggggagaaggtgggaagaatgacattgaatttagcttcagggagttgttagatttgactgctgtgaaactccatcctttaccaccgaacttaaactggaaagacttctcctctaaaagggcctatcagttagttatccctggagtcttccccacgtaggctgactactgcctcttctt

SEQ ID NO: 2630 - DNA, 600 bp, Chicken  19866894089777_1
gaaaccctgctcatgctggctcccttcctgcagggcggtccccggggaagattcttccccttatcagcacgcctctcctcagagggccaggccaacgtgcccaagtgcaggggcaggctgtgagcactgagttcccatactgcccatggggaacctctcctgctcaggccaccatatgctacagaaactggctctgagaaaacctcaatgaagcatttcctctcccagatgccaaaggctaattgaccagcacgagacctgctgaacttggtggaaccgaggtggatataatcactcaaragagccaataaccaattatctgaatggcttcagcagtttcaaggtctgcctctttattcaagagcaaaacaaagatcaatttcttaatatgctttgtaatatctgctattccttccctctcattattattattagcattgcagcagtgttttttgtgtataatgaaagagtatgacaagagctggagtggcctgggtggtagagaaggaatgtgtgcatatatatacctacgtcgatgcgtacatacagtgctatgggctcggcccagcccacaagctctggccgtggctgctgccaggc

SEQ ID NO: 2631 - DNA, 600 bp, Chicken  19866894089783_1
agtcatccaaagttttaggagggttagatgggaaagactcaatcacttataagcaaggaaatttttactgcatacttttcatttagactactaatttctattttgttatttcatttttattttaattgttttaattgaagttgaaacaacattgttaactactaactctacatgtcagataatctgtgatcccagaggactcaaaagttccaatacaggtaactgctctgaaaaatgtcttaagactatataccaggcactgtaaagtctggccatttacacagagaaggcttcccaccyctgaataaatggcagctataagctggagcttttgtccacaatggcttttatgctgtaactaaagccatagaatctttagcagatattttatgtacatatagcatagaagggtgccccatggcctagcacaacagagaaaattcaactcatcctctttcaaacaaaaccaaagtaatatcagaaagaaagctaggtgcttgtttgatttttttataagtctgcatagctagcagagaagagattataattctccttggtataatgatgctactgaatattccataggtcaagttgtgtggc

SEQ ID NO: 2632 - DNA, 600 bp, Chicken  19866894089783_2
agagagttgaacatacattggtgcaaggggtagggaggagagagaattataagttatcagtagagtatgagaaatccaaactgcttaaatggaatctataatatgcagggtcagtgtgctacctagtaggactggcatgcctgcatctctttgagttaaccagttaaccaggttggagagagttactctcaaagttagtcaaactatatggaaagttaaaagtgtggggagactcaacagttgttggtaggcatctcacataagcagacattaaacatccttagagcctctatgacttayagataacacccagcaaagataaacttgtacgcagcatgggatatttctatatcaatctccttcaccagctaaaagtaaacactgttcaatccagggataagtgtttgtcaagagaccagcagtcacaaaataattataatcactacagaaaaatggacaagattttcaaatagatatatacaaaacatttacttcctcaagactatggaagtttgggagaatcaataggaagaaaaagtgtaaacagaaaaatatgtgtgaagctgaatataagctatttatcctgtgatgtgtaggtgg

SEQ ID NO: 2633 - DNA, 600 bp, Chicken  19866894089790_1
attatgaaaacagcatcaagagtaatttcagatcatcaatcgaaatattgttaaagtgcatgtatctaaaaataaacattacctaagaacgcgaatcttcccttaatctgatggatgctcagggcaagatctatttacttcaaaccattcatctatgcagctgtcggatgcaagacaaaaatgaaagcaattaacatgaatatcccagtaatgcttcacagtgagaaatgcatactaactggtttctcatgatttccacgtatggtgggattttatattaacaaagaaatgtatgcatayacacacatgcaygtccacgctctacatctttatatgctcctaaacaaaaaaaggaatatctcatmattcactgaaaatttaataaccccaaaccacagctgtactttaacattaagcactgttgaacaactgaatatcttaaatgttcaaatctgttaggaaagcatttcacaaattgtagccagcttttatgcacaggttactttactgctaacactatcatctcgtttacatcattcactgacatcgtacataccgtaattacagacagcagtgacaacaattatgaaacagttttaa

SEQ ID NO: 2634 - DNA, 600 bp, Chicken  19866894089790_2
gcatcaagagtaatttcagatcatcaatcgaaatattgttaaagtgcatgtatctaaaaataaacattacctaagaacgcgaatcttcccttaatctgatggatgctcagggcaagatctatttacttcaaaccattcatctatgcagctgtcggatgcaagacaaaaatgaaagcaattaacatgaatatcccagtaatgcttcacagtgagaaatgcatactaactggtttctcatgatttccacgtatggtgggattttatattaacaaagaaatgtatgcatayacacacatgcaygtccacgctctacatctttatatgctcctaaacaaaaaaaggaatatctcatmattcactgaaaatttaataaccccaaaccacagctgtactttaacattaagcactgttgaacaactgaatatcttaaatgttcaaatctgttaggaaagcatttcacaaattgtagccagcttttatgcacaggttactttactgctaacactatcatctcgtttacatcattcactgacatcgtacataccgtaattacagacagcagtgacaacaattatgaaacagttttaacaagcactcccc

SEQ ID NO: 2635 - DNA, 600 bp, Chicken  19866894089790_3
ctaaaaataaacattacctaagaacgcgaatcttcccttaatctgatggatgctcagggcaagatctatttacttcaaaccattcatctatgcagctgtcggatgcaagacaaaaatgaaagcaattaacatgaatatcccagtaatgcttcacagtgagaaatgcatactaactggtttctcatgatttccacgtatggtgggattttatattaacaaagaaatgtatgcatayacacacatgcaygtccacgctctacatctttatatgctcctaaacaaaaaaaggaatatctcatmattcactgaaaatttaataaccccaaaccacagctgtactttaacattaagcactgttgaacaactgaatatcttaaatgttcaaatctgttaggaaagcatttcacaaattgtagccagcttttatgcacaggttactttactgctaacactatcatctcgtttacatcattcactgacatcgtacataccgtaattacagacagcagtgacaacaattatgaaacagttttaacaagcactcccctcttcagcctaatgctgttagacaaggctattactacaaaagcatgtgcartc

SEQ ID NO: 2636 - DNA, 600 bp, Chicken  19866894089790_4
tmattcactgaaaatttaataaccccaaaccacagctgtactttaacattaagcactgttgaacaactgaatatcttaaatgttcaaatctgttaggaaagcatttcacaaattgtagccagcttttatgcacaggttactttactgctaacactatcatctcgtttacatcattcactgacatcgtacataccgtaattacagacagcagtgacaacaattatgaaacagttttaacaagcactcccctcttcagcctaatgctgttagacaaggctattactacaaaagcatgtgcartccaagcttgagagctgtgatgtccactcctgtagaagtgattttggccttttttttccatgtaagtgggagaagctaactggcgaaaatacagaaagatgccacttaaaaatcatctttagtgtggttactgcttggcttttgtttgtgtgaagtgcaaaaagcaaccaagttttagtgaagttactctacaaaggcaactttcaggacttctaggtatacaccgtgaggaatacttgccctttatgatatatgcagaggcaaggcagccgtgctatagtatctccctgctgcagctct

SEQ ID NO: 2637 - DNA, 599 bp, Chicken  19866894089803_1
  misc_feature (1)..(118): n is any nucleotide
nnnnnnnnnnnnnnnnnnnnnnnnnnnnnnnnnnnnnnnnnnnnnnnnnnnnnnnnnnnnnnnnnnnnnnnnnnnnnnnnnnnnnnnnnnnnnnnnnnnnnnnnnnnnnnnnnnnnnngcacacagaaaagttggggagggatttttaaaaggacatgtacggacaggatgagggaaaatggctttgaagtcatagagagtaggtttagactaggtatgaagaagaaaatctttactgtaggggtggtgagaaactggaagaagttaccaggaggtgtggatgcccccaccctgaaagcrtccaaggccagactggatggggctgtgagcaatctggtctggtgggttgtggccctacttcagcagaagagttggattcagaggatcttgaaggtcccttccaagccagaccattctaggattctaggaaagttgggtaaaggcatgtggtaagatctttgagttggatatatggttgcaactccagatgttccctttgaaagttatttgctaatgtatgtatatgaacagaaaatgaagatgtaggcataaattcatgatttttatttcartcttgaatcctatttccacattccatt

SEQ ID NO: 2638 - DNA, 600 bp, Chicken  19866894089803_2
aggtgtggatgcccccaccctgaaagcrtccaaggccagactggatggggctgtgagcaatctggtctggtgggttgtggccctacttcagcagaagagttggattcagaggatcttgaaggtcccttccaagccagaccattctaggattctaggaaagttgggtaaaggcatgtggtaagatctttgagttggatatatggttgcaactccagatgttccctttgaaagttatttgctaatgtatgtatatgaacagaaaatgaagatgtaggcataaattcatgatttttatttcartcttgaatcctatttccacattccattatcataagtgaaagcataattgcgtactctttgttgctcagagctgtgtgttacgcaagagcagtaaaatgcatgcagtttcttcctctctttttccatattcctgtttgctccgttttcctactgacacatctattcatttayatgtactgccaccccacagaggayaagrgaaggttgggaagacctttgtgcctggcaagatcatggggcggaacatcgtgaaggccgtactgaggcacctggaaaataaggaggaggtgattggtggta

SEQ ID NO: 2639 - DNA, 600 bp, Chicken  19866894089803_3
catgtggtaagatctttgagttggatatatggttgcaactccagatgttccctttgaaagttatttgctaatgtatgtatatgaacagaaaatgaagatgtaggcataaattcatgatttttatttcartcttgaatcctatttccacattccattatcataagtgaaagcataattgcgtactctttgttgctcagagctgtgtgttacgcaagagcagtaaaatgcatgcagtttcttcctctctttttccatattcctgtttgctccgttttcctactgacacatctattcatttayatgtactgccaccccacagaggayaagrgaaggttgggaagacctttgtgcctggcaagatcatggggcggaacatcgtgaaggccgtactgaggcacctggaaaataaggaggaggtgattggtggtaaccgacatggcttcaccaagggcaagtcctgcgtgacaaacttggtgggtttttttgatgaagttacagcatcagtggatgaatgaagagcaactgaaatcttctacctggacttgtgaaaggtttgatatggttcctcatgacatctggtcaccaaattggagaaaaatt

SEQ ID NO: 2640 - DNA, 600 bp, Chicken  19866894089803_4
atatatggttgcaactccagatgttccctttgaaagttatttgctaatgtatgtatatgaacagaaaatgaagatgtaggcataaattcatgatttttatttcartcttgaatcctatttccacattccattatcataagtgaaagcataattgcgtactctttgttgctcagagctgtgtgttacgcaagagcagtaaaatgcatgcagtttcttcctctctttttccatattcctgtttgctccgttttcctactgacacatctattcatttayatgtactgccaccccacagaggayaagrgaaggttgggaagacctttgtgcctggcaagatcatggggcggaacatcgtgaaggccgtactgaggcacctggaaaataaggaggaggtgattggtggtaaccgacatggcttcaccaagggcaagtcctgcgtgacaaacttggtgggtttttttgatgaagttacagcatcagtggatgaatgaagagcaactgaaatcttctacctggacttgtgaaaggtttgatatggttcctcatgacatctggtcaccaaattggagaaaaattgctgtgatggacagaccaccctgt

SEQ ID NO: 2641 - DNA, 600 bp, Chicken  19866894089803_5
atggttgcaactccagatgttccctttgaaagttatttgctaatgtatgtatatgaacagaaaatgaagatgtaggcataaattcatgatttttatttcartcttgaatcctatttccacattccattatcataagtgaaagcataattgcgtactctttgttgctcagagctgtgtgttacgcaagagcagtaaaatgcatgcagtttcttcctctctttttccatattcctgtttgctccgttttcctactgacacatctattcatttayatgtactgccaccccacagaggayaagrgaaggttgggaagacctttgtgcctggcaagatcatggggcggaacatcgtgaaggccgtactgaggcacctggaaaataaggaggaggtgattggtggtaaccgacatggcttcaccaagggcaagtcctgcgtgacaaacttggtgggtttttttgatgaagttacagcatcagtggatgaatgaagagcaactgaaatcttctacctggacttgtgaaaggtttgatatggttcctcatgacatctggtcaccaaattggagaaaaattgctgtgatggacagaccaccctgtgctt

SEQ ID NO: 2642 - DNA, 600 bp, Chicken  19866894089807_1
tcattttagtttgtaatattgtcatggttgtgatgaataatactaattttccttgcattttctaggagctcagtctggtaacaccttgttaaaatgtcttatgacagcacccagaggcttcattgcactaagtgatagacaaacagaaaagagacactccttgtcctcaagttttaacagagaaaagaagtgtagaaaggaagggctgctgagcatattttacagataaaaaactgacgtacagggactttttgaagacatcagaactttgaaacacagaattttcaagtacacttaaaygagtgttcctattctacctatctccaggaagtccgtcctcagtctgccaagagcatatcataacaaactaagaagaactataattttttaggatttgtgactaggagatttttccaaaggctgcaacaaaatttaacatttcccagatcataagtatacaggggacagaggtaagtgtaatgactcagtataatgcaagtaygtaagatgcaaatgaaagaagttatcaacttcaaggagccttattttcccaggattatcacccataatagttgttacaaacttgtttgtttgttttgt

SEQ ID NO: 2643 - DNA, 600 bp, Chicken  19866894089807_2
gggctgctgagcatattttacagataaaaaactgacgtacagggactttttgaagacatcagaactttgaaacacagaattttcaagtacacttaaaygagtgttcctattctacctatctccaggaagtccgtcctcagtctgccaagagcatatcataacaaactaagaagaactataattttttaggatttgtgactaggagatttttccaaaggctgcaacaaaatttaacatttcccagatcataagtatacaggggacagaggtaagtgtaatgactcagtataatgcaagtaygtaagatgcaaatgaaagaagttatcaacttcaaggagccttattttcccaggattatcacccataatagttgttacaaacttgtttgtttgttttgtctgttgggctattttaaaattgcagtcccaaattcagcatctaaagatttgattagtatgaggaaagctgagaatgtcaagttagaaacctagtatatgtggtgttggttttttttttgtttgctttccctaaggactattgaatatatttctcaactaagtcactcaatgcctttaatgacattttctccttacattattc

SEQ ID NO: 2644 - DNA, 599 bp, Chicken  19866894089808_1
  misc_feature (1)..(190): n is any nucleotide
nnnnnnnnnnnnnnnnnnnnnnnnnnnnnnnnnnnnnnnnnnnnnnnnnnnnnnnnnnnnnnnnnnnnnnnnnnnnnnnnnnnnnnnnnnnnnnnnnnnnnnnnnnnnnnnnnnnnnnnnnnnnnnnnnnnnnnnnnnnnnnnnnnnnnnnnnnnnnnnnnnnnnnnnnnnnnnnnnnnnnnnnnnnnnnggaacaagacactgaaactgtcaaagcaaacaaatccaaaaaatacttcagattaaatcaattgagaaaatatagttagatacaaagataccctaattgcaattactacycagtatgatctagataaatattttcccttgctcttagatggagcccaaactgataaggactgataagtatgtagtgttttggtgttatagtagatttacattctctcctcatttcytaataggtttctccaaaatgccattatgatgacttgttgccttctgttgttgytattggacaagttaataatactgtatgtactaattcataattctcatactctaatggatattttcaagtttcaggctaatggaagaatgtgaattatggaagtgtgaactcaggttttattctttcttgc

SEQ ID NO: 2645 - DNA, 599 bp, Chicken  19866894089808_2
  misc_feature (1)..(74): n is any nucleotide
nnnnnnnnnnnnnnnnnnnnnnnnnnnnnnnnnnnnnnnnnnnnnnnnnnnnnnnnnnnnnnnnnnnnnnnnnnggaacaagacactgaaactgtcaaagcaaacaaatccaaaaaatacttcagattaaatcaattgagaaaatatagttagatacaaagataccctaattgcaattactacycagtatgatctagataaatattttcccttgctcttagatggagcccaaactgataaggactgataagtatgtagtgttttggtgttatagtagatttacattctctcctcatttcytaataggtttctccaaaatgccattatgatgacttgttgccttctgttgttgytattggacaagttaataatactgtatgtactaattcataattctcatactctaatggatattttcaagtttcaggctaatggaagaatgtgaattatggaagtgtgaactcaggttttattctttcttgctttacagagacaaaacagcatggcatttaaaaggatatttttttaacaaattctttcactttgaagaaaaaggacaaatctgaatatcgtagtttcctgttttaagattttcataa

SEQ ID NO: 2646 - DNA, 599 bp, Chicken  19866894089808_3
  misc_feature (1)..(21): n is any nucleotide
nnnnnnnnnnnnnnnnnnnnnggaacaagacactgaaactgtcaaagcaaacaaatccaaaaaatacttcagattaaatcaattgagaaaatatagttagatacaaagataccctaattgcaattactacycagtatgatctagataaatattttcccttgctcttagatggagcccaaactgataaggactgataagtatgtagtgttttggtgttatagtagatttacattctctcctcatttcytaataggtttctccaaaatgccattatgatgacttgttgccttctgttgttgytattggacaagttaataatactgtatgtactaattcataattctcatactctaatggatattttcaagtttcaggctaatggaagaatgtgaattatggaagtgtgaactcaggttttattctttcttgctttacagagacaaaacagcatggcatttaaaaggatatttttttaacaaattctttcactttgaagaaaaaggacaaatctgaatatcgtagtttcctgttttaagattttcataatgctcacaaaagcataggatctgctaatgaaaaaagatccattctataacatc

SEQ ID NO: 2647 - DNA, 600 bp, Chicken  19866894089809_1
catcagcctttgggatgagcagatgggaattttggtctctccatggcattgagctaagccagtactaagcaaggttccagaaacaaacaaatacacaaaagcttttcaaaggatttaaaagctcacactcagtgccatgttgaccaggtgataaagcctcttggcctgatctgactatggggcagaagaaggttatatctgttcactgactttcttctttacctatacaagaaatcaagttccattatttttatttgtatttcagtcaagagaagaagaaaagggagaaatctatgattrtgttgattttgaagcagcaatatgtacagacaacttaaagccccttctcaactgggaagcccagagatggcttctgactccctttttcttatgaaattccggaataaggatgctttgttcatgcacaatcaattacaagaacaggactgtgaaatctattggctcaatatcagacaaaaagacatataataaatatatcttctttaaatatataaatgtaaataatatataaaataaatacaaaaatataaataagtatataaatatatcttatatttcatctctttctcatacctcttt

SEQ ID NO: 2648 - DNA, 599 bp, Chicken  19866894089811_1
  misc_feature (1)..(1): n is any nucleotide
nacttatataccatgtaaactttcaaatatgttgaaacgcactgaatcagatcatcattatgctaaaggtcacagcagtacacggctcattccaggaaaagtgtcctccttccctggcctggagttcccctcgctgagtgccagaacacaacgaccccagaggggcacttcagttgatttcccatccttcatcctctggagaggaggagggaatgctgagatcccacacccagcagctggggagaggacaccacagtaccaccttgcagaagcagctcctgcaccaagcttctcatcatyccccaaagctgttgaagtctgcaccaaacccaaacaagcaacaatagcaaatcactcagtgagatatatatatatatatatatatatattttttttttwaaagctgattttccccactcatcccagcacttcagtatgcatgaggaccagccagcagggacagtgcacaccattcagacaaaactattttagcgtcagcaatatccaacataaactttgtgactttgcacaacattcttctacagaataaactcaagctgtctgccagcaataacctatacagtgatgtggtattagca

SEQ ID NO: 2649 - DNA, 600 bp, Chicken  19866894089811_2
attccaggaaaagtgtcctccttccctggcctggagttcccctcgctgagtgccagaacacaacgaccccagaggggcacttcagttgatttcccatccttcatcctctggagaggaggagggaatgctgagatcccacacccagcagctggggagaggacaccacagtaccaccttgcagaagcagctcctgcaccaagcttctcatcatyccccaaagctgttgaagtctgcaccaaacccaaacaagcaacaatagcaaatcactcagtgagatatatatatatatatatatatatyttttttttttwaaagctgattttccccactcatcccagcacttcagtatgcatgaggaccagccagcagggacagtgcacaccattcagacaaaactattttagcgtcagcaatatccaacataaactttgtgactttgcacaacattcttctacagaataaactcaagctgtctgccagcaataacctatacagtgatgtggtattagcagaaacttggaggcttcrgctgggagacaaactgtcaaccaaccgctaattggtttttatgacgtgactcatagtttagcaatttcccag

SEQ ID NO: 2650 - DNA, 600 bp, Chicken  19866894089811_3
agtgtcctccttccctggcctggagttcccctcgctgagtgccagaacacaacgaccccagaggggcacttcagttgatttcccatccttcatcctctggagaggaggagggaatgctgagatcccacacccagcagctggggagaggacaccacagtaccaccttgcagaagcagctcctgcaccaagcttctcatcatyccccaaagctgttgaagtctgcaccaaacccaaacaagcaacaatagcaaatcactcagtgagatatatatatatatatatatatatattttttttttwaaagctgattttccccactcatcccagcacttcagtatgcatgaggaccagccagcagggacagtgcacaccattcagacaaaactattttagcgtcagcaatatccaacataaactttgtgactttgcacaacattcttctacagaataaactcaagctgtctgccagcaataacctatacagtgatgtggtattagcagaaacttggaggcttcrgctgggagacaaactgtcaaccaaccgctaattggtttttatgacgtgactcatagtttagcaatttcccagaatttaatcac

SEQ ID NO: 2651 - DNA, 484 bp, Chicken  19866894089811_4
gtctgcaccaaacccaaacaagcaacaatagcaaatcactcagtgagatatatatatatatatatatatatattttttttttwaaagctgattttccccactcatcccagcacttcagtatgcatgaggaccagccagcagggacagtgcacaccattcagacaaaactattttagcgtcagcaatatccaacataaactttgtgactttgcacaacattcttctacagaataaactcaagctgtctgccagcaataacctatacagtgatgtggtattagcagaaacttggaggcttcrgctgggagacaaactgtcaaccaaccgctaattggtttttatgacgtgactcatagtttagcaatttcccagaatttaatcacagtgcacccagaaagatcaattaaagagcaggctcagagtttgtgagagccctgtgtgaggctggggaaggcaatgacctcagcagttttgccacagaatt

SEQ ID NO: 2652 - DNA, 600 bp, Chicken  19866894089814_1
gtggatctgtttaaaaaatagcaaaattgctgaactttagaagtagcaacaaagatgagcagaataatattttctgtggcacaaataaatacttgtttaatatcctattttttcacactctggacactgtaacaggaaagcacttttgcctaaacagcatgatggacatatggggtaaagtgcaaggtcatccctggcaaaatggctggctgccctcctcaatattctttaaattctacttgctgttgttttggattccagacttaggaagataaaacaataacttgctattccttttgmaaaccacgtggctggcatcctttctggagaccttccataattcagtttgcacaagaagactgtgggacccttagagtaacaaaagttccgaaatgtaatgctttcttcaaggtcaaaataatgaggtttatacatttcctgtgcaactctccagtagaaacaaatagtgtgaaaggcaggagggagagtgaaaaatatccctgggatatacttcatgtgctaaagctattaatgaaatataggtgcctgtgtagctcaggatctctgctcatcagaacaattgtacaaattctctctgac

SEQ ID NO: 2653 - DNA, 600 bp, Chicken  19866894089814_10
wtgtggtggtttctgtgtgaagaaatttttggctttctcatggtcacatttataccttttaagtatgtaacacatacaatctctttgctcctgcaagtgcagcacaacaaacctttcagagcacagggcttagatctgacccgtcaggccttgtsyggtagctgcattactatgcacatatttatgacatagaagagtctgtgtgctttttccgcacatttcacagaagaaggaggcctgctgctggtttcagaacccacactgacctcacagctaaaaccatctctgaagaaaatgttrtatcactgaacatttacactcagctacagcccagaggccctgatcagattctgttctgcagagtcttattttaaagaagttctcaatcctatctcaggtatttttgaatctgaggctgcarggcatatataaaggaaagaagaaaggagaaaacagaggtgcttttcatgtatgaatacactgataaaaaaacctcctcctcagaaattttcttaagaggtagacttcatgtaggcgtcactaccttgagaagctaaactacttcagtgaagagctaaggattaatttctgaaaggttgg

SEQ ID NO: 2654 - DNA, 600 bp, Chicken  19866894089814_11
cacagggcttagatctgacccgtcaggccttgtsyggtagctgcattactatgcacatatttatgacatagaagagtctgtgtgctttttccgcacatttcacagaagaaggaggcctgctgctggtttcagaacccacactgacctcacagctaaaaccatctctgaagaaaatgttrtatcactgaacatttacactcagctacagcccagaggccctgatcagattctgttctgcagagtcttattttaaagaagttctcaatcctatctcaggtatttttgaatctgaggctgcarggcatatataaaggaaagaagaaaggagaaaacagaggtgcttttcatgtatgaatacactgataaaaaaacctcctcctcagaaattttcttaagaggtagacttcatgtaggcgtcactaccttgagaagctaaactacttcagtgaagagctaaggattaatttctgaaaggttgggggtttataacatgatttagaaaaactccaaagaaacgaagagatcctggaaaggcaactataaaggtgctaagtgcagcgggaacagaacacccactgaagaacacctgcagaacagcaa

SEQ ID NO: 2655 - DNA, 600 bp, Chicken  19866894089814_2
aaacaaatagtgtgaaaggcaggagggagagtgaaaaatatccctgggatatacttcatgtgctaaagctattaatgaaatataggtgcctgtgtagctcaggatctctgctcatcagaacaattgtacaaattctctctgactaatgactataaaaggcctgaatctctgtattccctgggcaatttaaaatctgagtttaatacattgcagtttcatttctgaactaatgcagttgtataaaggatgttttgtttaaaagaagattttgctgtggagagtgaagtacagggggtatgrctcmgaatgctrccaatcacagaagatcttagaagagtatggagatgaattttgaaagctgcctgtttaacacagcaacaataarcatttttaattgttattrttatcaagtggagccatacagtctgataagacatgaaatcccactgagtaatttttcaggtaacttcttttagtcttctttttttagaaaaatagtcaaacaaagctcagtagtcctaaatagctcccattagttcagataccaccatgattactgwtgtggtggtttctgtgtgaagaaatttttggctttctcat

SEQ ID NO: 2656 - DNA, 600 bp, Chicken  19866894089814_3
aaatagtgtgaaaggcaggagggagagtgaaaaatatccctgggatatacttcatgtgctaaagctattaatgaaatataggtgcctgtgtagctcaggatctctgctcatcagaacaattgtacaaattctctctgactaatgactataaaaggcctgaatctctgtattccctgggcaatttaaaatctgagtttaatacattgcagtttcatttctgaactaatgcagttgtataaaggatgttttgtttaaaagaagattttgctgtggagagtgaagtacagggggtatgrctcmgaatgctrccaatcacagaagatcttagaagagtatggagatgaattttgaaagctgcctgtttaacacagcaacaataarcatttttaattgttattrttatcaagtggagccatacagtctgataagacatgaaatcccactgagtaatttttcaggtaacttcttttagtcttctttttttagaaaaatagtcaaacaaagctcagtagtcctaaatagctcccattagttcagataccaccatgattactgwtgtggtggtttctgtgtgaagaaatttttggctttctcatggtc

SEQ ID NO: 2657 - DNA, 600 bp, Chicken  19866894089814_4
tgaaaggcaggagggagagtgaaaaatatccctgggatatacttcatgtgctaaagctattaatgaaatataggtgcctgtgtagctcaggatctctgctcatcagaacaattgtacaaattctctctgactaatgactataaaaggcctgaatctctgtattccctgggcaatttaaaatctgagtttaatacattgcagtttcatttctgaactaatgcagttgtataaaggatgttttgtttaaaagaagattttgctgtggagagtgaagtacagggggtatgrctcmgaatgctrccaatcacagaagatcttagaagagtatggagatgaattttgaaagctgcctgtttaacacagcaacaataarcatttttaattgttattrttatcaagtggagccatacagtctgataagacatgaaatcccactgagtaatttttcaggtaacttcttttagtcttctttttttagaaaaatagtcaaacaaagctcagtagtcctaaatagctcccattagttcagataccaccatgattactgwtgtggtggtttctgtgtgaagaaatttttggctttctcatggtcacatttat

SEQ ID NO: 2658 - DNA, 600 bp, Chicken  19866894089814_5
gtgcctgtgtagctcaggatctctgctcatcagaacaattgtacaaattctctctgactaatgactataaaaggcctgaatctctgtattccctgggcaatttaaaatctgagtttaatacattgcagtttcatttctgaactaatgcagttgtataaaggatgttttgtttaaaagaagattttgctgtggagagtgaagtacagggggtatgrctcmgaatgctrccaatcacagaagatcttagaagagtatggagatgaattttgaaagctgcctgtttaacacagcaacaataarcatttttaattgttattrttatcaagtggagccatacagtctgataagacatgaaatcccactgagtaatttttcaggtaacttcttttagtcttctttttttagaaaaatagtcaaacaaagctcagtagtcctaaatagctcccattagttcagataccaccatgattactgwtgtggtggtttctgtgtgaagaaatttttggctttctcatggtcacatttataccttttaagtatgtaacacatacaatctctttgctcctgcaagtgcagcacaacaaacctttcagagcacag

SEQ ID NO: 2659 - DNA, 600 bp, Chicken  19866894089814_6
atctctgctcatcagaacaattgtacaaattctctctgactaatgactataaaaggcctgaatctctgtattccctgggcaatttaaaatctgagtttaatacattgcagtttcatttctgaactaatgcagttgtataaaggatgttttgtttaaaagaagattttgctgtggagagtgaagtacagggggtatgrctcmgaatgctrccaatcacagaagatcttagaagagtatggagatgaattttgaaagctgcctgtttaacacagcaacaataarcatttttaattgttattrttatcaagtggagccatacagtctgataagacatgaaatcccactgagtaatttttcaggtaacttcttttagtcttctttttttagaaaaatagtcaaacaaagctcagtagtcctaaatagctcccattagttcagataccaccatgattactgwtgtggtggtttctgtgtgaagaaatttttggctttctcatggtcacatttataccttttaagtatgtaacacatacaatctctttgctcctgcaagtgcagcacaacaaacctttcagagcacagggcttagatctgacccgt

SEQ ID NO: 2660 - DNA, 600 bp, Chicken  19866894089814_7
agaagattttgctgtggagagtgaagtacagggggtatgrctcmgaatgctrccaatcacagaagatcttagaagagtatggagatgaattttgaaagctgcctgtttaacacagcaacaataarcatttttaattgttattrttatcaagtggagccatacagtctgataagacatgaaatcccactgagtaatttttcaggtaacttcttttagtcttctttttttagaaaaatagtcaaacaaagctcagtagtcctaaatagctcccattagttcagataccaccatgattactgwtgtggtggtttctgtgtgaagaaatttttggctttctcatggtcacatttataccttttaagtatgtaacacatacaatctctttgctcctgcaagtgcagcacaacaaacctttcagagcacagggcttagatctgacccgtcaggccttgtsyggtagctgcattactatgcacatatttatgacatagaagagtctgtgtgctttttccgcacatttcacagaagaaggaggcctgctgctggtttcagaacccacactgacctcacagctaaaaccatctctgaagaaaatgttrt

SEQ ID NO: 2661 - DNA, 600 bp, Chicken  19866894089814_8
agccatacagtctgataagacatgaaatcccactgagtaatttttcaggtaacttcttttagtcttctttttttagaaaaatagtcaaacaaagctcagtagtcctaaatagctcccattagttcagataccaccatgattactgwtgtggtggtttctgtgtgaagaaatttttggctttctcatggtcacatttataccttttaagtatgtaacacatacaatctctttgctcctgcaagtgcagcacaacaaacctttcagagcacagggcttagatctgacccgtcaggccttgtsyggtagctgcattactatgcacatatttatgacatagaagagtctgtgtgctttttccgcacatttcacagaagaaggaggcctgctgctggtttcagaacccacactgacctcacagctaaaaccatctctgaagaaaatgttrtatcactgaacatttacactcagctacagcccagaggccctgatcagattctgttctgcagagtcttattttaaagaagttctcaatcctatctcaggtatttttgaatctgaggctgcarggcatatataaaggaaagaagaaaggagaaaaca

SEQ ID NO: 2662 - DNA, 600 bp, Chicken  19866894089814_9
gccatacagtctgataagacatgaaatcccactgagtaatttttcaggtaacttcttttagtcttctttttttagaaaaatagtcaaacaaagctcagtagtcctaaatagctcccattagttcagataccaccatgattactgwtgtggtggtttctgtgtgaagaaatttttggctttctcatggtcacatttataccttttaagtatgtaacacatacaatctctttgctcctgcaagtgcagcacaacaaacctttcagagcacagggcttagatctgacccgtcaggccttgtsyggtagctgcattactatgcacatatttatgacatagaagagtctgtgtgctttttccgcacatttcacagaagaaggaggcctgctgctggtttcagaacccacactgacctcacagctaaaaccatctctgaagaaaatgttrtatcactgaacatttacactcagctacagcccagaggccctgatcagattctgttctgcagagtcttattttaaagaagttctcaatcctatctcaggtatttttgaatctgaggctgcarggcatatataaaggaaagaagaaaggagaaaacag

SEQ ID NO: 2663 - DNA, 600 bp, Chicken  19866894089816_1
agcaggctgcaaatgtttgaaaacaatgcagtatagtctacagcacagggcatctagcctgataaggaaaaagcaagcagaggaaaataaaaagcaagtgtataaagtagaagcaaagctttactgctctctcacagtaaagctcacctgaaaaaattcttgctgcactgcaatttcagtattacctgtctcatatttttaggaaagctcaacatttcctgattcacttttgttctgtaccgaaatgctagatgagcagcaaatagcttcactgtacttctgacacaacagcaccatgcmctaaatggtcacacacaagtgacagctacaagaatgtttcttctctgaygttttrcccrgtactgcacagagcttcccctcgtctttccagccaacactgaagcttccactttgaacacttctgtaaataccccaaactgtgtacagttacttcagtagagtttgggcaatccaggattcaaactgccccagttagaaccaaatgttgatgccctcactcagtagcaagcatgtgctcaacagtaaattaatgaagtgttctaacccacttaatggattatgagcagttttctagcatat

SEQ ID NO: 2664 - DNA, 600 bp, Chicken  19866894089816_2
gcatctagcctgataaggaaaaagcaagcagaggaaaataaaaagcaagtgtataaagtagaagcaaagctttactgctctctcacagtaaagctcacctgaaaaaattcttgctgcactgcaatttcagtattacctgtctcatatttttaggaaagctcaacatttcctgattcacttttgttctgtaccgaaatgctagatgagcagcaaatagcttcactgtacttctgacacaacagcaccatgcmctaaatggtcacacacaagtgacagctacaagaatgtttcttctctgaygttttrcccrgtactgcacagagcttcccctcgtctttccagccaacactgaagcttccactttgaacacttctgtaaataccccaaactgtgtacagttacttcagtagagtttgggcaatccaggattcaaactgccccagttagaaccaaatgttgatgccctcactcagtagcaagcatgtgctcaacagtaaattaatgaagtgttctaacccacttaatggattatgagcagttttctagcatataaaaagtatggaaagttgtagaatatttgaagacattgactacatgcta

SEQ ID NO: 2665 - DNA, 600 bp, Chicken  19866894089816_3
agcctgataaggaaaaagcaagcagaggaaaataaaaagcaagtgtataaagtagaagcaaagctttactgctctctcacagtaaagctcacctgaaaaaattcttgctgcactgcaatttcagtattacctgtctcatatttttaggaaagctcaacatttcctgattcacttttgttctgtaccgaaatgctagatgagcagcaaatagcttcactgtacttctgacacaacagcaccatgcmctaaatggtcacacacaagtgacagctacaagaatgtttcttctctgaygttttrcccrgtactgcacagagcttcccctcgtctttccagccaacactgaagcttccactttgaacacttctgtaaataccccaaactgtgtacagttacttcagtagagtttgggcaatccaggattcaaactgccccagttagaaccaaatgttgatgccctcactcagtagcaagcatgtgctcaacagtaaattaatgaagtgttctaacccacttaatggattatgagcagttttctagcatataaaaagtatggaaagttgtagaatatttgaagacattgactacatgctaaagcta

SEQ ID NO: 2666 - DNA, 600 bp, Chicken  19866894089816_4
tgataaggaaaaagcaagcagaggaaaataaaaagcaagtgtataaagtagaagcaaagctttactgctctctcacagtaaagctcacctgaaaaaattcttgctgcactgcaatttcagtattacctgtctcatatttttaggaaagctcaacatttcctgattcacttttgttctgtaccgaaatgctagatgagcagcaaatagcttcactgtacttctgacacaacagcaccatgcmctaaatggtcacacacaagtgacagctacaagaatgtttcttctctgaygttttrcccrgtactgcacagagcttcccctcgtctttccagccaacactgaagcttccactttgaacacttctgtaaataccccaaactgtgtacagttacttcagtagagtttgggcaatccaggattcaaactgccccagttagaaccaaatgttgatgccctcactcagtagcaagcatgtgctcaacagtaaattaatgaagtgttctaacccacttaatggattatgagcagttttctagcatataaaaagtatggaaagttgtagaatatttgaagacattgactacatgctaaagctaagta

SEQ ID NO: 2667 - DNA, 599 bp, Chicken  19866894089829_1
  misc_feature (1)..(92): n is any nucleotide
nnnnnnnnnnnnnnnnnnnnnnnnnnnnnnnnnnnnnnnnnnnnnnnnnnnnnnnnnnnnnnnnnnnnnnnnnnnnnnnnnnnnnnnnnnnnagtctgtctcctaaccctgattaaaactaattcctattttttatttaaggtcacagagtatcccattgctaatgggatacaggaataaatgaaatcattcctaagtgtaattagtaagtgacaaaacaacaagagctgtttcgagttaacatctttggctaggagctagattaaccaacacggcattgagaagagagtgagcacacayacggttttggacaaggaaaagagatggagatggttatacagttcaataggtttgagggtatattcccataactagtggttcaggggagaaaaatgcagattacaaaggaaattatgggtatgagaatagaaaaaagacagaatacaatggatatcttgagtcaactcattgaattacacaaggggaatcatctggagacaagtaaatatggacatgaagtaattcaaaccaacgaagggacaaatgtgagattgacagaggcctagatctgtgttaagtactaggttttccaatagtta

SEQ ID NO: 2668 - DNA, 599 bp, Chicken  19866894089830_1
  misc_feature (1)..(198): n is any nucleotide
nnnnnnnnnnnnnnnnnnnnnnnnnnnnnnnnnnnnnnnnnnnnnnnnnnnnnnnnnnnnnnnnnnnnnnnnnnnnnnnnnnnnnnnnnnnnnnnnnnnnnnnnnnnnnnnnnnnnnnnnnnnnnnnnnnnnnnnnnnnnnnnnnnnnnnnnnnnnnnnnnnnnnnnnnnnnnnnnnnnnnnnnnnnnnnnnnnnnnncaccagaaaattctatcaagagagctaactccaacttagttaccataatgcaagagaacaaggccacgaggaaaagattcatcactgataaaatgttaaatrgtataatataagaggaagagatgccatctaaaggaatctggacaagcctgaaaagtaagcctacttgaacttaatgagattcaataaggccaagtacagtgctgcacttagattggaggaatcctagttatatgtacagagtgggagaaaattgcttgagagcagccatgcaaaaaagaattcagcagttgtggtgggtgaaaagcttgacatgagccagcagtctgctcttgcagcccagtaggccagcagatcctggactgcatcaaaagaggccaccaggacragggaaggaattg

SEQ ID NO: 2669 - DNA, 600 bp, Chicken  19866894089830_2
taaaatgttaaatrgtataatataagaggaagagatgccatctaaaggaatctggacaagcctgaaaagtaagcctacttgaacttaatgagattcaataaggccaagtacagtgctgcacttagattggaggaatcctagttatatgtacagagtgggagaaaattgcttgagagcagccatgcaaaaaagaattcagcagttgtggtgggtgaaaagcttgacatgagccagcagtctgctcttgcagcccagtaggccagcagatcctggactgcatcaaaagaggccaccaggacragggaaggaattgtccccctctgctgtgaccacaggagrtcttgtctaaataaaggaaataaactgtcaataatattttgcttctagtacagaattaaagaggtaaaaatactaaccacacacattcatgtataatcaaagtttcccatgtgaaacccatgttttagataattttttggtgattgttcaatattcatttgtacacagtgttaaacaacatcacctctatttttacacatttctaaagctgaaactaacccaacctccaagactcataatagactgtcaggaagcacctag

SEQ ID NO: 2670 - DNA, 600 bp, Chicken  19866894089830_3
atctaaaggaatctggacaagcctgaaaagtaagcctacttgaacttaatgagattcaataaggccaagtacagtgctgcacttagattggaggaatcctagttatatgtacagagtgggagaaaattgcttgagagcagccatgcaaaaaagaattcagcagttgtggtgggtgaaaagcttgacatgagccagcagtctgctcttgcagcccagtaggccagcagatcctggactgcatcaaaagaggccaccaggacragggaaggaattgtccccctctgctgtgaccacaggagrtcttgtctaaataaaggaaataaactgtcaataatattttgcttctagtacagaattaaagaggtaaaaatactaaccacacacattcatgtataatcaaagtttcccatgtgaaacccatgttttagataattttttggtgattgttcaatattcatttgtacacagtgttaaacaacatcacctctatttttacacatttctaaagctgaaactaacccaacctccaagactcataatagactgtcaggaagcacctagtgtcaacttcatttaatgtctaagccttcaatataatta

SEQ ID NO: 2671 - DNA, 599 bp, Chicken  19866894089833_1
  misc_feature (1)..(135): n is any nucleotide
nnnnnnnnnnnnnnnnnnnnnnnnnnnnnnnnnnnnnnnnnnnnnnnnnnnnnnnnnnnnnnnnnnnnnnnnnnnnnnnnnnnnnnnnnnnnnnnnnnnnnnnnnnnnnnnnnnnnnnnnnnnnnnnnnnnnnnntgaaactttcagtagctcagttagaacacttaaagaaaaaaaaaagttgttcatgaacaagaaataaccttaggagtacccaggagcttctcaacagagatgcccccctgagagggcacaaaaagccagaaagattgggtgtagaaagctataataaaggtagcracttttcaagaggtacaatagccagaaaagccacaccacaggtaaagtcaattaagtggaggaagaaagggtaccaaagcagcagaagcctctgaaaagcaagtaactgcaccacgatcccataaaatatttgcagttcctgtaagccatgtaaaaccacatgatcatttgaatgttagyrwagaggcaagttycatgtttggaaaccaagactgtgcatttaccctatgtttttatttctgcttcaaaacactccaatacaacaattgcatcatccaccttctcactgtcaaatatca

SEQ ID NO: 2672 - DNA, 600 bp, Chicken  19866894089833_2
gttgttcatgaacaagaaataaccttaggagtacccaggagcttctcaacagagatgcccccctgagagggcacaaaaagccagaaagattgggtgtagaaagctataataaaggtagcracttttcaagaggtacaatagccagaaaagccacaccacaggtaaagtcaattaagtggaggaagaaagggtaccaaagcagcagaagcctctgaaaagcaagtaactgcaccacgatcccataaaatatttgcagttcctgtaagccatgtaaaaccacatgatcatttgaatgttagyrwagaggcaagttycatgtttggaaaccaagactgtgcatttaccctatgtttttatttctgcttcaaaacactccaatacaacaattgcatcatccaccttctcactgtcaaatatcattgcagcaactacccatcaattatcatcttataaaacctatttagtattcaagattcatcacagagaacaagcatattaatcatataccatcagcaatggccggacaacatatttatcaccttaaatccaaaacgttacgttgtgctgacaacacaagaagctaaaactgaggcagataac

SEQ ID NO: 2673 - DNA, 600 bp, Chicken  19866894089833_3
ttgttcatgaacaagaaataaccttaggagtacccaggagcttctcaacagagatgcccccctgagagggcacaaaaagccagaaagattgggtgtagaaagctataataaaggtagcracttttcaagaggtacaatagccagaaaagccacaccacaggtaaagtcaattaagtggaggaagaaagggtaccaaagcagcagaagcctctgaaaagcaagtaactgcaccacgatcccataaaatatttgcagttcctgtaagccatgtaaaaccacatgatcatttgaatgttagyrwagaggcaagttycatgtttggaaaccaagactgtgcatttaccctatgtttttatttctgcttcaaaacactccaatacaacaattgcatcatccaccttctcactgtcaaatatcattgcagcaactacccatcaattatcatcttataaaacctatttagtattcaagattcatcacagagaacaagcatattaatcatataccatcagcaatggccggacaacatatttatcaccttaaatccaaaacgttacgttgtgctgacaacacaagaagctaaaactgaggcagataacc

SEQ ID NO: 2674 - DNA, 600 bp, Chicken  19866894089833_4
tgttcatgaacaagaaataaccttaggagtacccaggagcttctcaacagagatgcccccctgagagggcacaaaaagccagaaagattgggtgtagaaagctataataaaggtagcracttttcaagaggtacaatagccagaaaagccacaccacaggtaaagtcaattaagtggaggaagaaagggtaccaaagcagcagaagcctctgaaaagcaagtaactgcaccacgatcccataaaatatttgcagttcctgtaagccatgtaaaaccacatgatcatttgaatgttagyrwagaggcaagttycatgtttggaaaccaagactgtgcatttaccctatgtttttatttctgcttcaaaacactccaatacaacaattgcatcatccaccttctcactgtcaaatatcattgcagcaactacccatcaattatcatcttataaaacctatttagtattcaagattcatcacagagaacaagcatattaatcatataccatcagcaatggccggacaacatatttatcaccttaaatccaaaacgttacgttgtgctgacaacacaagaagctaaaactgaggcagataaccc

SEQ ID NO: 2675 - DNA, 600 bp, Chicken  19866894089833_5
agaaataaccttaggagtacccaggagcttctcaacagagatgcccccctgagagggcacaaaaagccagaaagattgggtgtagaaagctataataaaggtagcracttttcaagaggtacaatagccagaaaagccacaccacaggtaaagtcaattaagtggaggaagaaagggtaccaaagcagcagaagcctctgaaaagcaagtaactgcaccacgatcccataaaatatttgcagttcctgtaagccatgtaaaaccacatgatcatttgaatgttagyrwagaggcaagttycatgtttggaaaccaagactgtgcatttaccctatgtttttatttctgcttcaaaacactccaatacaacaattgcatcatccaccttctcactgtcaaatatcattgcagcaactacccatcaattatcatcttataaaacctatttagtattcaagattcatcacagagaacaagcatattaatcatataccatcagcaatggccggacaacatatttatcaccttaaatccaaaacgttacgttgtgctgacaacacaagaagctaaaactgaggcagataacccaaaagggttcct

SEQ ID NO: 2676 - DNA, 600 bp, Chicken  19866894089833_6
aacagagatgcccccctgagagggcacaaaaagccagaaagattgggtgtagaaagctataataaaggtagcracttttcaagaggtacaatagccagaaaagccacaccacaggtaaagtcaattaagtggaggaagaaagggtaccaaagcagcagaagcctctgaaaagcaagtaactgcaccacgatcccataaaatatttgcagttcctgtaagccatgtaaaaccacatgatcatttgaatgttagyrwagaggcaagttycatgtttggaaaccaagactgtgcatttacccyatgtttttatttctgcttcaaaacactccaatacaacaattgcatcatccaccttctcactgtcaaatatcattgcagcaactacccatcaattatcatcttataaaacctatttagtattcaagattcatcacagagaacaagcatattaatcatataccatcagcaatggccggacaacatatttatcaccttaaatccaaaacgttacgttgtgctgacaacacaagaagctaaaactgaggcagataacccaaaagggttcctctgtggaataaaaaattgaattaattcagcaca

SEQ ID NO: 2677 - DNA, 600 bp, Chicken  19866894089833_7
acagagatgcccccctgagagggcacaaaaagccagaaagattgggtgtagaaagctataataaaggtagcracttttcaagaggtacaatagccagaaaagccacaccacaggtaaagtcaattaagtggaggaagaaagggtaccaaagcagcagaagcctctgaaaagcaagtaactgcaccacgatcccataaaatatttgcagttcctgtaagccatgtaaaaccacatgatcatttgaatgttagyrwagaggcaagttycatgtttggaaaccaagactgtgcatttaccctytgtttttatttctgcttcaaaacactccaatacaacaattgcatcatccaccttctcactgtcaaatatcattgcagcaactacccatcaattatcatcttataaaacctatttagtattcaagattcatcacagagaacaagcatattaatcatataccatcagcaatggccggacaacatatttatcaccttaaatccaaaacgttacgttgtgctgacaacacaagaagctaaaactgaggcagataacccaaaagggttcctctgtggaataaaaaattgaattaattcagcacaa

SEQ ID NO: 2678 - DNA, 600 bp, Chicken  19866894089835_1
acagcattagagacaaattatgtgtgctgattaataagtgtgggctaaatgatgtctcggatagtgggtggagcactatgggaaggagggaaagagcagaggaggtgaagccatcctgcctgctggggttgggcagtgggtggtgacaaggtcccagggtatggggatgcagagtggggcaaagaccatctttgagggcacacacttcctgggacagcagtggtggaatcagtggtgagctcaggagctatgttatccctttctttggggaggaggggatttttcattaaaaatcaacawcagcaacaaatgaatgggaaaaaaatgaaaagggaacccttcagggattggatttaacaagttaaatgagagaggtgtggtaagtaasgggcttaagaagtcaatttccatcacagctgggggaaaaaaatactgaccattttacatttctgggctaaaawggaaaagcactcataccaatatgtataataccatacataatggtcatattatacagaaatatctctctctatataaatacatcatatataaaaatatatacataaattcataaatacataaatgaatgttattagcatg

SEQ ID NO: 2679 - DNA, 538 bp, Chicken  19866894089835_2
ggaaagagcagaggaggtgaagccatcctgcctgctggggttgggcagtgggtggtgacaaggtcccagggtatggggatgcagagtggggcaaagaccatctttgagggcacacacttcctgggacagcagtggtggaatcagtggtgagctcaggagctatgttatccctttctttggggaggaggggatttttcattaaaaatcaacawcagcaacaaatgaatgggaaaaaaatgaaaagggaacccttcagggattggatttaacaagttaaatgagagaggtgtggtaagtaasgggcttaagaagtcaatttccatcacagctgggggaaaaaaatactgaccattttacatttctgggctaaaawggaaaagcactcataccaatatgtataataccatacataatggtcatattatacagaaatatctctctctatataaatacatcatatataaaaatatatacataaattcataaatacataaatgaatgttattagcatgttaattttactaaccctttaacctat

SEQ ID NO: 2680 - DNA, 465 bp, Chicken  19866894089835_3
tggggatgcagagtggggcaaagaccatctttgagggcacacacttcctgggacagcagtggtggaatcagtggtgagctcaggagctatgttatccctttctttggggaggaggggatttttcattaaaaatcaacawcagcaacaaatgaatgggaaaaaaatgaaaagggaacccttcagggattggatttaacaagttaaatgagagaggtgtggtaagtaasgggcttaagaagtcaatttccatcacagctgggggaaaaaaatactgaccattttacatttctgggctaaaawggaaaagcactcataccaatatgtataataccatacataatggtcatattatacagaaatatctctctctatataaatacatcatatataaaaatatatacataaattcataaatacataaatgaatgttattagcatgttaattttactaaccctttaacctat

SEQ ID NO: 2681 - DNA, 599 bp, Chicken  19866894089837_1
  misc_feature (1)..(47): n is any nucleotide
nnnnnnnnnnnnnnnnnnnnnnnnnnnnnnnnnnnnnnnnnnnnnnnactacatttttgctaaccttatgttagaaaatacatgtctacattgtcatgtagcaggtggcagacattaatggtaaacattacagccagaataagctgtaaataccagaaataagtcactaggacaccaaaacatgcctgaaagttgctttatttgttcataaggtctgtgcgttacagcaagcttatgtttagctaccgtggacaaaagctcagtctggaagagcattaaatgttaaccacagagatgtayagtgagtagagagcccacatttgtgcacaacacgctgtttttctattgctgcaatctaacatttgaattacagatctttaagatctttctggatgctccacaatgtgtctgcactcttcttcagctgagccacttcatcatccttcagcttttggttgatgacacttgtcaatccagaggcactcaggacacaaggcaggctcaggaagacatcrttctcaatgccatatgtgccctgtcacaaacaaaagagcattacatcactgatgggaatccataactccagagctgcttttgat

SEQ ID NO: 2682 - DNA, 580 bp, Chicken  19866894089837_2
tgtgcgttacagcaagcttatgtttagctaccgtggacaaaagctcagtctggaagagcattaaatgttaaccacagagatgtayagtgagtagagagcccacatttgtgcacaacacgctgtttttctattgctgcaatctaacatttgaattacagatctttaagatctttctggatgctccacaatgtgtctgcactcttcttcagctgagccacttcatcatccttcagcttttggttgatgacacttgtcaatccagaggcactcaggacacaaggcaggctcaggaagacatcrttctcaatgccatatgtgccctgtcacaaacaaaagagcattacatcactgatgggaatccataactccagagctgcttttgatttacgcagcaggaagccttctggcatcagactactacttttcatcctgcagaaagttttcaatctatgtagttgaagataaaatagagttggtttaaagcaaatggcaataataaaattgattatttcataaatcctaactccaaaaaaatctcatttgtatctaacaagtaggctaacaaaactcaaaagctgta

SEQ ID NO: 2683 - DNA, 554 bp, Chicken  19866894089859_1
agcgaggtgatgagctaatgctgttatttttagttcctgcaggttttatccaaggcatgttggtgataaagagctagaaggaatgactgtgctgaatggagaagtaggatgcattatgaatgattttaagttctggttttcgggaatgagagttaggcagttctgagtagtgttgtaattgcaatttcctcattttaaggacaccagttaataggtttgggaatgctgcccacgttcacattttcacagaatatgtcaattggaagagggagcaaagaaatctccctgctggactgggcytgtatgctgtcctgtatctagccatggccagcacgaggagaacatgcaaagaaatgtatgtgagctagatggaggtcatgtgtaggtgtcaatgtaaactctgatccctcagtttaagactgtaacaatgaagttttcttccttccaccaatttgctatttacattgaccactgtaactctgataacgctttggattataaggaggtagaatggaagctcatgttaccatcccattttgcttatttcctttcta

SEQ ID NO: 2684 - DNA, 600 bp, Chicken  19866894089861_1
gcgagaggaaatgagggcgaagatgagcaaagagggagaaggccttgtctgagatgggacaactggccagtcatgaccatgagactattccaccgtttgaattaatttttattttggctgtgtttctttctaatgcctatattctgtgtttattattttgtatttttctatttatttttttacatacattgttcgccttttacattgctttctcctttcagtctgtagttaccagtgcagctgcattataggtaagaaaggaactgggagattaatattaatgtttaatattaataattwaaaaataattttaatatttaatattaacttttcttcattaaaacaaattagaccctgtgcgaagacatgtataagtgcctcttatcgcaggcatcagaggggtcagcatgtacatgaggtactcatctgcttaatcctacaggtgctgcacagacagcagtcccagcctgcaaaggagaattccccaccgagagaagaggctcctcctccacccgctgaggacagttgcgccaaaaagcccagatcccgcaccaagatatccctggaagctctaggtatccttcaaagctttatccacga

SEQ ID NO: 2685 - DNA, 600 bp, Chicken  19866894089861_2
atatccctggaagctctaggtatccttcaaagctttatccacgatgtaggtctctaccctgatcaggaagccattcataccctctctgctcagctggatctccccaaacacaccatcatcaaatttttccagaaccaacgttaccatgtaaagcaccatgggaagctaaaagagcatttgggaacagtggttgatgtggcagagtacaaagatgaggagctgctgacagagtcggaggagaacgacagcgaggagggctcggaggagatgtacaaagtggagcctgaggaggaaaacccygagaaaagcaaggcagctccagcagacatcgaccagagataatgtgagataggaacacagaaagcaatacaatgatccaaggatgttgtttctgttttttttttttctctttctactttttgtttgtttctgttgcgcatgatccatgtgcaaaccgaatgaattcagcattgcccagtcagacatcgccttgacacagacacttgagtgttacacatcctacatgtgactgaagtaatcattgtaatcacataggattatgccttcattaatcttgcacttatgaaagggacatctagc

SEQ ID NO: 2686 - DNA, 600 bp, Chicken  19866894089863_1
aggtctgccttgagaccagtgctcctcaacacctttatcaatgacctggcatactgggattgagtacatcctcaacatgaggatgtttctcactcagagggtgatgatgcactggaacaggttgcccacagaggctgtggatgccccatccttggaggcattccaatacaaggctggatgtggctctgggcagcctggtctagaggttaccaaccctgcccaaggcaggggggttgaaacaagatgacctttgaggtccttttcaacccaggccattctatgtttgctcatgacacaaakctgagtggtatagttgacacagcagaaggaagggatgccatccaaagggaccagcaccagcacgaaaagtgggcccacgtgaacttaatgaggttcaacaataacaagctgaaggtgttacacttcagtcatggcaatcccagatatgtgtacagactgggagaacatactgggagcagcactgaggaggacttcagggtcacggtgaatgaaaagctcaatgcgaggcagcagtgtgcacttgcagcctgaaaggccaacagtaccctgggctacatcaaaacggagtggccagcaagt

SEQ ID NO: 2687 - DNA, 600 bp, Chicken  19866894089867_1
tctcaccttgtagctgttgatgagccagttgggcagagggatgccgtgtgccaagagcttgttgatgacgcagcgatggtacaggctgttctgggacgggtagcgctccaggtaagatgagagcagcctccaggcttcatctgtggcactgcaaggcaatatctctctcagcaccctgccggcatcctctgagagtgcctgcagtgccacagagcatgccatggacctgccctgctgctcaatgtctgccttctacagccacctcgggccctcaacgcagccaccgtgcaggattttagsagcctctggccttccacaagactttagactccggcctttgggagaaagaagcctctcctctgttcctctcccccacagctgaggatctacctggactccttggtggtaaccagcgccgagagctggtttgatgccagccactcccaagcctctgcctgtgctgcctcccctcccagctgcagcttgatgcacctgaaagacagggagcagtgcagacagtgtctctgggagccacaagcagagcccgaggcaggagctggctacgtacttgaacgtgagcccctcaaagacggccgtcag

SEQ ID NO: 2688 - DNA, 600 bp, Chicken  19866894089870_1
tgaggcacagaaagaggttgcccaaagaggtggtggctgtcccatccctggggacattcaaggtcaggctggacggggctctgagcaacctgatctagctgaaggtgtccctgttcattgcaggagagttggactaggtgacctttaagggtcctttccaactcaaacaattatatgattctgcaattctatgattctataattctttgtcaaatagccactggttggttagcactgcatttattccattcaacttttcaatgggaccttaatattttactagaggaagcagaaaagggraaaaaaaagtcctcaaaaagaagaccagagtaataaatcccaaaattactatccataaacttgtatttttaattacaaatgcacaaagagcccagagagaccgataatgaacataaaatatggttgtcatttaaaaaaaaatctctgtcccttctatttcaatttactacactataaatcactgagccacttaatcaaatattcttccactttaattgttttatcttgcttttatgttaaatttcagtaagttatccgggcactagtcttcacattatagaaaaaaatgtcagtggattg

SEQ ID NO: 2689 - DNA, 600 bp, Chicken  19866894089878_1
atgtcatcttaattctctggagcactgagactcctgccatccctatcatcagtctccatttccacaggtttgagactgcatttttgtcacagctatcatcgacataatcctacagtgtgaacagagataagaattaaattagtgagaaggtattataagtggaaaacgggcttgtagcattctacatgaagactgggcactgtttgttttaggtacagtagcaggtttattgcaagatggaggggttagagttggtagctgtaaggcggtttcagtttccttaatgagttcatttccccmcccccccccccttgtatttaattgaggaacccatgaagtatcagtcagtagttgcctttcaacttcattgcttaaatactggaatgcctgaaataaaagctttctactaccagcccttaatcatcctttagttctgtgtaacaaggcagactcttcatgttgttctctcttttaaaagtaatactacctaatgaacaaagatgatctcaaacaagtatttaataatacaacagcactacagctggggattgaaattgtgtgagcttcacgtgagctcatctgttcccatatggcacccaa

SEQ ID NO: 2690 - DNA, 600 bp, Chicken  19866894089884_1
ctacactgcagtgcagtgaactagttttgtcttgcagcctaagagtgctgaacagcacaccaaaatgaagagaattagcagccaaatgcctcctaataccttaaaaatctttccatgctatgaaatgtctctgcagcttgcttactttgtgcaatttctgacttaacaaaaagctgtctggttaacgaagcagtgagtcactacagtgtttctagttatttttcccatccttgtgtttgctgctacagtttgtcaggttgcctgactatgtacctaatgagctgccatgtggactcacgwagcagtgacacctttggctggaagctgaagatgctttggggagcacagcagggaaaaggagcagtgagttgggaaggatatcctaaaatctgttgtatatgcagaaaagcaggaaagtctaatacaaagcagggcatatagttgtgattgcagtggaaacagctggtattttggaggtgaaaaaatcagttttgtgttttgctaaataactgtactgtaatacagcagtacctcttggcagggaaagcaatgtaatgtaaagcactacagcatggtagagcagttggagaactgtcagaa

SEQ ID NO: 2691 - DNA, 599 bp, Chicken  19866894089885_1
  misc_feature (1)..(85): n is any nucleotide
nnnnnnnnnnnnnnnnnnnnnnnnnnnnnnnnnnnnnnnnnnnnnnnnnnnnnnnnnnnnnnnnnnnnnnnnnnnnnnnnnnnnnatgtatttgattttgtgtggctgcaggtacaactcttgaagcaaagacagaaatatttataaatgttatggaacaaaagggtaagtacataaatatcagaaattgatctcagtgtgtttcaaagcagttttgtacctcaatcagaaaaggaaagcccaggaggtgtactcctcctagtgagtgacacaggcaagctggtagcaacagacaaggaraaggctgaggtacttaacaacttttttgtacctaccttctctgataactgctcagaaagcagccctcaaacatttgattgggtaggagtggattgaagaagcaatgtccctcccactgtaagcagtgatcttcaatgaagtctgttggtcccgatgagatgcatccaagagtcctgagatagttagctgatgtagtcaccaaggcaatctaaatggtatttcaaaagtcatggcaaacaggtgaagttattggtgactgggaaaaaaggtaacatcacactcatttttaaaaagggtaa

SEQ ID NO: 2692 - DNA, 600 bp, Chicken  19866894089885_2
caattacattgacagtggggtcaagtgcactcccagcaagtttgctgatgacaccaatctgtggggtgtggaaaacacaaccggacaggataccatcgaaagggacttagacaggcttgaacagtgggcccaggtgaacctcatgaggttctacaaatccaaatgcaaggtcttggcacataggtcaaggcagccctcactaccaatacaagctgttatacacgtattatgtttacaacaaacacagaaaatgctctttttttttttttttttaatgcagatgtatgactttaaccactkttatttatcttgatccttttttatattatactaccaaacctatcattctttgtgtgaagtattactgaactttgtatttttatttaaggaatagtattgtttggacagaggagtcgtttttagattatttatacaatttttcaagaacattttggattgaatgttatccaactatgtgcttagagtataacttcatatattctcttatatatctctttgtccaaggggtatacatatccacatgtttcaaggtattcacatttaaactcttaggacaaagaatttatttttccatagtga

SEQ ID NO: 2693 - DNA, 570 bp, Chicken  19866894089892_1
aggacagatatactgacttgagtggaagcactacatgtgtactgcctgaaaatcaaatgcatcaactggtgggttgggtttttttttttgtttgtttgtttgttttggagtcaggatgtgtatcctgaaggcttcagttacggaggctgagatcttcatatttctatataaaacttgttctgtttttcctgtatgtctaaggggagaaagagggaaacttctactggcactcttctctattaccgttttactccctcaggctttggacttacagctttaacttctactcttcttgcttawgatgtgtttatgtgctcaggatttacaatgttctccgtaagtgcctggtgtccaatgttctcgcttttgcaaacaggcgttcaggtgtcttctgttggtctcacgcagtagggtaaatttgccttgagaaaagtaagaaagtgattattggaaaattcagctgtctgataatgctagctgtgagtaggtgtgttacaggtttcttctccctggaatttcattcccaaatgcacttatataagtattccttctaggattacggctgcaacg

SEQ ID NO: 2694 - DNA, 600 bp, Chicken  19866894089893_1
agggagattttagtgcactgttccaaaagaacagaaagtagaaatactcaacatctgcaagcaaaagccatgtaacttctataaactgtgtgcggtcctgttggttacacacacacaccacacacagtccttaccaagaggattatctgcaccattatggcttctctctggagctgatggagggttaccttatgtatcatatccactgtttattccagatataacagaattcttcaaagtagatatcaaagaattgcaaagaaatacagtcagcaaggaaaaatatgttgcagaacttgyagtttcataatacctctttccaagactctggtcatctggggcaactatgttttgctttctttaaggagaacctccttaaaagattagtaactaatattaaaagatacctcagagacaatgaaattttaagccatatttttcttatgaagttatacatttttccatttaggaagcaaaaacacaagatagctgatgwatatgatcagttttggcctggacaratggaagcagaaaggaaaaagcccagcacttgctcactttgagctacagagatgyccaattccaatagttccagtactc

SEQ ID NO: 2695 - DNA, 600 bp, Chicken  19866894089893_2
tcatatccactgtttattccagatataacagaattcttcaaagtagatatcaaagaattgcaaagaaatacagtcagcaaggaaaaatatgttgcagaacttgyagtttcataatacctctttccaagactctggtcatctggggcaactatgttttgctttctttaaggagaacctccttaaaagattagtaactaatattaaaagatacctcagagacaatgaaattttaagccatatttttcttatgaagttatacatttttccatttaggaagcaaaaacacaagatagctgatgwatatgatcagttttggcctggacaratggaagcagaaaggaaaaagcccagcacttgctcactttgagctacagagatgyccaattccaatagttccagtactctcacattttgcactactattcagaggagatgcacttatcagaatttgtcttgtaaaattactgatgagttcccacgcttactaatattcagaggatatacatgcatgtgccagaagaccaatcaccaatgaggcatcgtctgctctggctgctagcgacgaagtggcaagcacagtaaaaataactcagaattata

SEQ ID NO: 2696 - DNA, 600 bp, Chicken  19866894089893_3
taacagaattcttcaaagtagatatcaaagaattgcaaagaaatacagtcagcaaggaaaaatatgttgcagaacttgyagtttcataatacctctttccaagactctggtcatctggggcaactatgttttgctttctttaaggagaacctccttaaaagattagtaactaatattaaaagatacctcagagacaatgaaattttaagccatatttttcttatgaagttatacatttttccatttaggaagcaaaaacacaagatagctgatgwatatgatcagttttggcctggacaratggaagcagaaaggaaaaagcccagcacttgctcactttgagctacagagatgyccaattccaatagttccagtactctcacattttgcactactattcagaggagatgcacttatcagaatttgtcttgtaaaattactgatgagttcccacgcttactaatattcagaggatatacatgcatgtgccagaagaccaatcaccaatgaggcatcgtctgctctggctgctagcgacgaagtggcaagcacagtaaaaataactcagaattataattgagtttgtgattattcagccag

SEQ ID NO: 2697 - DNA, 600 bp, Chicken  19866894089893_4
ggaaaaatatgttgcagaacttgyagtttcataatacctctttccaagactctggtcatctggggcaactatgttttgctttctttaaggagaacctccttaaaagattagtaactaatattaaaagatacctcagagacaatgaaattttaagccatatttttcttatgaagttatacatttttccatttaggaagcaaaaacacaagatagctgatgwatatgatcagttttggcctggacaratggaagcagaaaggaaaaagcccagcacttgctcactttgagctacagagatgyccaattccaatagttccagtactctcacattttgcactactattcagaggagatgcacttatcagaatttgtcttgtaaaattactgatgagttcccacgcttactaatattcagaggatatacatgcatgtgccagaagaccaatcaccaatgaggcatcgtctgctctggctgctagcgacgaagtggcaagcacagtaaaaataactcagaattataattgagtttgtgattattcagccagcatttcatttaagatgcttgcagcaggtcattttaagttgtccaaaatacacagt

SEQ ID NO: 2698 - DNA, 600 bp, Chicken  19866894089893_5
cgcttactaatattcagaggatatacatgcatgtgccagaagaccaatcaccaatgaggcatcgtctgctctggctgctagcgacgaagtggcaagcacagtaaaaataactcagaattataattgagtttgtgattattcagccagcatttcatttaagatgcttgcagcaggtcattttaagttgtccaaaatacacagtctgctaccattagatatttccctcacacaaacgaaagagttacattacatgaggctttcaaaagcactacataatagtcagttttaatgtcagcaaaktgttatcaraagtggcaaaaaagtagctgctctttatgatggatattcartatgtttgggcctcttctgcatttcttggcttgttctgggaatgaaaggtctgagacctttcagtctccattataaaccaaactattgtgttgagcaaacaaattaaacacagcaattaactgggaagaaggtgtctgtgattcttgctatcctgaagtggaattaagttagcagtggcactcatgtgctgaacacactgttactgctagatgtttactcagcaacactgcagggtctttaaacttaatt

SEQ ID NO: 2699 - DNA, 600 bp, Chicken  19866894089893_6
atattcagaggatatacatgcatgtgccagaagaccaatcaccaatgaggcatcgtctgctctggctgctagcgacgaagtggcaagcacagtaaaaataactcagaattataattgagtttgtgattattcagccagcatttcatttaagatgcttgcagcaggtcattttaagttgtccaaaatacacagtctgctaccattagatatttccctcacacaaacgaaagagttacattacatgaggctttcaaaagcactacataatagtcagttttaatgtcagcaaaktgttatcaraagtggcaaaaaagtagctgctctttatgatggatattcartatgtttgggcctcttctgcatttcttggcttgttctgggaatgaaaggtctgagacctttcagtctccattataaaccaaactattgtgttgagcaaacaaattaaacacagcaattaactgggaagaaggtgtctgtgattcttgctatcctgaagtggaattaagttagcagtggcactcatgtgctgaacacactgttactgctagatgtttactcagcaacactgcagggtctttaaacttaatttacatggcc

SEQ ID NO: 2700 - DNA, 600 bp, Chicken  19866894089893_7
ccaatgaggcatcgtctgctctggctgctagcgacgaagtggcaagcacagtaaaaataactcagaattataattgagtttgtgattattcagccagcatttcatttaagatgcttgcagcaggtcattttaagttgtccaaaatacacagtctgctaccattagatatttccctcacacaaacgaaagagttacattacatgaggctttcaaaagcactacataatagtcagttttaatgtcagcaaaktgttatcaraagtggcaaaaaagtagctgctctttatgatggatattcartatgtttgggcctcttctgcatttcttggcttgttctgggaatgaaaggtctgagacctttcagtctccattataaaccaaactattgtgttgagcaaacaaattaaacacagcaattaactgggaagaaggtgtctgtgattcttgctatcctgaagtggaattaagttagcagtggcactcatgtgctgaacacactgttactgctagatgtttactcagcaacactgcagggtctttaaacttaatttacatggccagtttttaaaaagagaatcaataccgccatgtgtctgtagt

SEQ ID NO: 2701 - DNA, 599 bp, Chicken  19866894089894_1
  misc_feature (1)..(33): n is any nucleotide
nnnnnnnnnnnnnnnnnnnnnnnnnnnnnnnnnatgacctgagtttgacttcatggagcccaacaaccttcacagtaaagagattttttttaataacgtatccacagttagcaatttccatcctttctaactaaaccaaaaccaaaatcttatcagttcaatcacagactttctcccttgtaatggggaaatcgaaggaaagattcaagaagggatacatggctgtaccttagacagcttagttgctgtctggaaactagaagttcagatgttgcatcccaaatattctgggttcaaccygcaatcttaaagtgagttgctctttgggcccagaagttctttagctttgtaagaacttactctgtcatctacttgctcaataaattctgcaaactaaatgatcttttcacctgtttttatgggcttaatccagtatacccactacagaaaagactactgcagtttttgacacgattttctatgaagtttaaaaaacagcaaccctgtttctgtaagaacacaaagtatccaccaatatattcaagagggtgcacacccgttttctcagagtcttgttttcaaagaaaacgtgatgtgat

SEQ ID NO: 2702 - DNA, 488 bp, Chicken  19866894089894_2
cagaagttctttagctttgtaagaacttactctgtcatctacttgctcaataaattctgcaaactaaatgatcttttcacctgtttttatgggcttaatccagtatacccactacagaaaagactactgcagtttttgacacgattttctatgaagtttaaaaaacagcaaccctgtttctgtaagaacacaaagtatccaccaatatattcaagagggtgcacacccgttttctcagagtcttgttttcaaagaaaacgtgatgtgatcccctacttcccatgaaacaagaagatgaarttgcttatcttctggaaatatttacatgacatgaatcctgaagagaatgtagttcctcaaattagaaccaaacatgatcctaatcaggactcgttggcacagttcagcactgatatacctgtttttacttgatctcttcacacacctcaagtcctgacctttaaccaaagagcaaaaaagtaactaag

SEQ ID NO: 2703 - DNA, 599 bp, Chicken  19866894089895_1
  misc_feature (1)..(117): n is any nucleotide
nnnnnnnnnnnnnnnnnnnnnnnnnnnnnnnnnnnnnnnnnnnnnnnnnnnnnnnnnnnnnnnnnnnnnnnnnnnnnnnnnnnnnnnnnnnnnnnnnnnnnnnnnnnnnnnnnnnnncactaacaacaaagaacagtgccgcttattcttggcacatacgccaaacctccattggcagagttggatttgcttggaccacaaaggaacaaagacaagtgatacatagagtgagaaaagtctagtggttggcaaccctgaacatagcaggggggttgaaactacatgatcactgtagtcctyttcaacccagaccattctatgattctatgatttaatgaaaagactaggaagtacagaaaatcagtastggagaaagcagttgtccttttctctctgctttctccagcagggatccctcacaccgtctcccagcccaagccctgctccccccacatgccaagaccccaccccctgccaagcaccccggggagcaggcatttcacactcctgtcccacaactggaggaaatggccctccttacaacacagctgtaagcatcaactcaatatataccagtgtgtgtcttccataaagtctca

SEQ ID NO: 2704 - DNA, 599 bp, Chicken  19866894089895_2
  misc_feature (1)..(50): n is any nucleotide
nnnnnnnnnnnnnnnnnnnnnnnnnnnnnnnnnnnnnnnnnnnnnnnnnncactaacaacaaagaacagtgccgcttattcttggcacatacgccaaacctccattggcagagttggatttgcttggaccacaaaggaacaaagacaagtgatacatagagtgagaaaagtctagtggttggcaaccctgaacatagcaggggggttgaaactacatgatcactgtagtcctyttcaacccagaccattctatgattctatgatttaatgaaaagactaggaagtacagaaaatcagtastggagaaagcagttgtccttttctctctgctttctccagcagggatccctcacaccgtctcccagcccaagccctgctccccccacatgccaagaccccaccccctgccaagcaccccggggagcaggcatttcacactcctgtcccacaactggaggaaatggccctccttacaacacagctgtaagcatcaactcaatatataccagtgtgtgtcttccataaagtctcagctcaacattttacagcacacgtggtgctggcaagcacatctgaacacagtgggcactgcactttgc

SEQ ID NO: 2705 - DNA, 600 bp, Chicken  19866894089896_1
tatgtcactgctgattttgcaatcagcatctgactgcagagaaacaatattaagtgtcaatgcagttcatgcagttaccaaagacagctggtgtctccttggggcctgtgcttaaatcatgtactccacgaaagcacaatccatgtgtttagcaatgttaatgtaaaaaacactgtgtatttttgaattaaaccaggccctggatttagcatcacttatcttccctatcaaggtgcacagcagttagcgcagaaaggctgttattgcttgtactgtattctaaacacacacacacacgcrcacatctgtatcatcaatatctggcaaaagtatttattgttgtctccaagcagaaagtaatactctgatacaatgtgcaatttataggcactagtttttgctgcctcttattacagaaacaattcatctcattgcagaacgtgtgcttaattataatttgctaatgcccttgagttttttaaagtctaatttattgctggtgtgttctgcagccagcattatctggtgacaaagcaagggaattagcttaaggaactctgattttactcgctctggatttgtgatctgtgaccctatgca

SEQ ID NO: 2706 - DNA, 600 bp, Chicken  19866894089896_2
tacaatgtgcaatttataggcactagtttttgctgcctcttattacagaaacaattcatctcattgcagaacgtgtgcttaattataatttgctaatgcccttgagttttttaaagtctaatttattgctggtgtgttctgcagccagcattatctggtgacaaagcaagggaattagcttaaggaactctgattttactcgctctggatttgtgatctgtgaccctatgcaaaacatttcacctttttcatgagtcagctcccccatctgttgtttaaaaaatggctggagaccaccgsatgagaggagccatatttttatttctttaagcgtcagggcattggaaggattcagcgctttatttacaacataccactccgtgtttgaaacacctcatcatatttataattttaatttggctttacttttgctatcactgctaaacgtaaaccacccacggattaaagatgttgatgttcgtagtagtccaagccataccagtgattcgaccgtagcttagtggtagaaccatgacagtcagcattgccactgatcttagggttcagtcacaacagagctgtgtaaggagggaaaatcat

SEQ ID NO: 2707 - DNA, 600 bp, Chicken  19866894089902_1
tacaagattaaagaaagatcctgtcccagatcagtttagatatctttgtccttgctatcaatcaagttttcacaaaagttcttaatgtgcacaaagttgcacaaagggcttcaattttcacctacaaaggagaagcacagctgcatttccacacatcagcagagatcagagctccatctctttgtttagaaatattccaggggacagaaaaaaaaaaccaaaaaaacattatttgaaacagattcaaaattgactttctttgcacattttgtttctttgtaatgggaaatgcatttctcyargtttgcagaccaggacgcaggctcaagaccagactgcttgactacctgcagcagaaacctttaagcccatgcaaaaaagctgctacagcctgacctcccaagaggaagaaaatgaagatatccaacacattcagacttgctcaagctcctgttagggcagcaaggagggcccagacaagcaggaccaagcatgctgcagacaagctcactgcagaaagctaaagctcagctcttctgacctgcatccctscacttacartatggacacagcacgctttgtctgacagcacagactgca

SEQ ID NO: 2708 - DNA, 600 bp, Chicken  19866894089902_2
caagattaaagaaagatcctgtcccagatcagtttagatatctttgtccttgctatcaatcaagttttcacaaaagttcttaatgtgcacaaagttgcacaaagggcttcaattttcacctacaaaggagaagcacagctgcatttccacacatcagcagagatcagagctccatctctttgtttagaaatattccaggggacagaaaaaaaaaaccaaaaaaacattatttgaaacagattcaaaattgactttctttgcacattttgtttctttgtaatgggaaatgcatttctcyargtttgcagaccaggacgcaggctcaagaccagactgcttgactacctgcagcagaaacctttaagcccatgcaaaaaagctgctacagcctgacctcccaagaggaagaaaatgaagatatccaacacattcagacttgctcaagctcctgttagggcagcaaggagggcccagacaagcaggaccaagcatgctgcagacaagctcactgcagaaagctaaagctcagctcttctgacctgcatccctscacttacartatggacacagcacgctttgtctgacagcacagactgcaca

SEQ ID NO: 2709 - DNA, 600 bp, Chicken  19866894089902_3
actttctttgcacattttgtttctttgtaatgggaaatgcatttctcyargtttgcagaccaggacgcaggctcaagaccagactgcttgactacctgcagcagaaacctttaagcccatgcaaaaaagctgctacagcctgacctcccaagaggaagaaaatgaagatatccaacacattcagacttgctcaagctcctgttagggcagcaaggagggcccagacaagcaggaccaagcatgctgcagacaagctcactgcagaaagctaaagctcagctcttctgacctgcatccctscacttacartatggacacagcacgctttgtctgacagcacagactgcacagatgcaaactaccttttctgctgcacccctcagtcaagcgtgacttggaaaatctgttttcatacaaggatgaaaaagagccatttctacttacctgcgtagaacttccttatgtactgcctgttccccaagagaggtctgagctgtgctgagaggcagtggaactgcaggctgtgctgcagccacagctgtgcaatagcttggtcgctgtggctgtctgggctgggctggccgttctcatgcaggctga

SEQ ID NO: 2710 - DNA, 600 bp, Chicken  19866894089902_4
gcacattttgtttctttgtaatgggaaatgcatttctcyargtttgcagaccaggacgcaggctcaagaccagactgcttgactacctgcagcagaaacctttaagcccatgcaaaaaagctgctacagcctgacctcccaagaggaagaaaatgaagatatccaacacattcagacttgctcaagctcctgttagggcagcaaggagggcccagacaagcaggaccaagcatgctgcagacaagctcactgcagaaagctaaagctcagctcttctgacctgcatccctscacttacartatggacacagcacgctttgtctgacagcacagactgcacagatgcaaactaccttttctgctgcacccctcagtcaagcgtgacttggaaaatctgttttcatacaaggatgaaaaagagccatttctacttacctgcgtagaacttccttatgtactgcctgttccccaagagaggtctgagctgtgctgagaggcagtggaactgcaggctgtgctgcagccacagctgtgcaatagcttggtcgctgtggctgtctgggctgggctggccgttctcatgcaggctgatgaactgga

SEQ ID NO: 2711 - DNA, 600 bp, Chicken  19866894089902_5
cgctcctcctcacagttctgcagcgccaggcactgttggtgagaacacagtcacatctgagcagctaccaagagagcacagggagacaaaagcaccagagaggaacaacacttcaaaggtcagccagcaccggtgaccaaagtcctacccacagccaccagcaatatgaatttcaatggcatgttctcccacccctgacctggagggaccccacactcccaaatctaattgctttcctgcggtgatggtcatgttcttgctgacacattaactgatgtgaacatccttgctgctctacascagactgcagtgaarggcacagactctgctcacatgtgacaaacagcagcatggggtccttcaggacacagggcaccragggctgagagcatccctgtgcatcagcacacgacagaagccaggcacagaagagccaaatgaatggtcaaggccaatacacaaaccagaaatgggatagatgaaatctctggagatttgtacaacagcataagtccccgctgtgtgcacagaagcaccgcttgtgccaattcccttggtgatgcctgctgtacccaaccaagtggagctggaggccagcct

SEQ ID NO: 2712 - DNA, 600 bp, Chicken  19866894089902_6
ttctgcagcgccaggcactgttggtgagaacacagtcacatctgagcagctaccaagagagcacagggagacaaaagcaccagagaggaacaacacttcaaaggtcagccagcaccggtgaccaaagtcctacccacagccaccagcaatatgaatttcaatggcatgttctcccacccctgacctggagggaccccacactcccaaatctaattgctttcctgcggtgatggtcatgttcttgctgacacattaactgatgtgaacatccttgctgctctacascagactgcagtgaarggcacagactctgctcacatgtgacaaacagcagcatggggtccttcaggacacagggcaccragggctgagagcatccctgtgcatcagcacacgacagaagccaggcacagaagagccaaatgaatggtcaaggccaatacacaaaccagaaatgggatagatgaaatctctggagatttgtacaacagcataagtccccgctgtgtgcacagaagcaccgcttgtgccaattcccttggtgatgcctgctgtacccaaccaagtggagctggaggccagcctgtgggaactaagcag

SEQ ID NO: 2713 - DNA, 600 bp, Chicken  19866894089902_7
cagggagacaaaagcaccagagaggaacaacacttcaaaggtcagccagcaccggtgaccaaagtcctacccacagccaccagcaatatgaatttcaatggcatgttctcccacccctgacctggagggaccccacactcccaaatctaattgctttcctgcggtgatggtcatgttcttgctgacacattaactgatgtgaacatccttgctgctctacascagactgcagtgaarggcacagactctgctcacatgtgacaaacagcagcatggggtccttcaggacacagggcaccragggctgagagcatccctgtgcatcagcacacgacagaagccaggcacagaagagccaaatgaatggtcaaggccaatacacaaaccagaaatgggatagatgaaatctctggagatttgtacaacagcataagtccccgctgtgtgcacagaagcaccgcttgtgccaattcccttggtgatgcctgctgtacccaaccaagtggagctggaggccagcctgtgggaactaagcagcttactgcctaaccctaaaccacaccaggttcctgggatgtggctcacacacaaccacagagc

SEQ ID NO: 2714 - DNA, 600 bp, Chicken  19866894089912_1
catcgtggtgtcggatagaaatgtgcagaatcagaaataaaacttcttttcaatgtgagcagttaaggaggcagggcagtgacatgctgctgtcatctgactgggacagacagaagggtggcatgggattccccggggcacgtgcatctctggacaggaagaacggttctgaggcagtttctattcaacaactttgaatgcagtatatgctgagaatacctcatctagtgagtcagattgattccagttcatagaaaaccccacaaatttctttttgttagagcttcaacaccaatgccrtcaaaatactgaacagctgctttgtcactgaggtatttgctatgtagggttagccagaaagggtttggtctttaaaattctttgctgtctgtgcttcggtgagaatctcagcttcagtcagatgaaatctcactgacagtaaggaggagtactcctatgtgcactgcaaaacgtccagtcaagtttgtgtttagttacctaattctgttagagacattccaagttaggatgatttaatatgtcaggtgattgctttttwaaaaaaaaaaactattggttttactaaatacaagaacactt

SEQ ID NO: 2715 - DNA, 600 bp, Chicken  19866894089912_2
cccacaaatttctttttgttagagcttcaacaccaatgccrtcaaaatactgaacagctgctttgtcactgaggtatttgctatgtagggttagccagaaagggtttggtctttaaaattctttgctgtctgtgcttcggtgagaatctcagcttcagtcagatgaaatctcactgacagtaaggaggagtactcctatgtgcactgcaaaacgtccagtcaagtttgtgtttagttacctaattctgttagagacattccaagttaggatgatttaatatgtcaggtgattgctttttwaaaaaaaaaaactattggttttactaaatacaagaacactttaaagagcatagataaatctgccttacaaactagctttgaaaagtaagacacctggagcagtacctcttgggatgagctgcctccttagaagacctaaggtaagtgcactgagaaaacctcagtagctgcagaacatttatgctacagaagagagaactttgaaatacttagtctttcttggagtagagagctgtgatagatgttaaataattgtgaaatattcagtgacatattgagatgtaacagatgctatggaat

SEQ ID NO: 2716 - DNA, 600 bp, Chicken  19866894089912_3
cagtagctgcagaacatttatgctacagaagagagaactttgaaatacttagtctttcttggagtagagagctgtgatagatgttaaataattgtgaaatattcagtgacatattgagatgtaacagatgctatggaatcatgtcatagtcaaacattgtactaattttgtaagtgccacatatttcctggcagaggacaattttgagagttagtaacatgaaattctagtgttaaaagaatacaaataacacgtcagttggagttctgctcacccactctgttggggaagcagcacacrgatacatttagctgtctcagaaggcttcagatgaagaacttgaaattctgtattttgatagtgttgtttaggaagaggcaagcactattccagaactgatatggtgtgcccaaatagagcagccctgtagaaagacctccaagtattgtagattttttttttttaagtccccacttggaggatcagtcaccacctgataaactagcaaatgtataagcagcatgtttaaaaccgtctgttctctgaggtactcttcacctggcttaattaactgagttgggggagtgagagggaaggctt

SEQ ID NO: 2717 - DNA, 600 bp, Chicken  19866894089914_1
tttttctttttctgatgatgttcattaggccttgctgtgggggaaatccaggatgtccccagtgaggagtgccgtgggctgtctcagctgcaggttgcacccacggtgctgctggtgcaggtggactcaccaggctgcttccacaatagccaggatgcagaatccagctgcattgcctggggatacaagctgagcatgcagctagctcatgaaatccttctttccctgtgctacatcctaaaactatggtgctgtgggacagcttacagaatagtagagacagagtaaagttagaagtaycaactctgaatccaacctggagcagatgtggagtgtgatctgarccacaaacttgagtgtagtcagagaaatgatgtctttggtctgttcactgtattttttttttttccaaagtggtgtcacatcagctctggagacagtagctgaagcatctgagaagtcagttcaacactcttgagaaatctatgttaacacttttgagaggtgttgctgtgaacaggataaaattgaaatggcgacaaattacccgacgctgctgtaggaaccaatgctccaggcatcttgacagtccttgcagac

SEQ ID NO: 2718 - DNA, 600 bp, Chicken  19866894089914_2
aatccaggatgtccccagtgaggagtgccgtgggctgtctcagctgcaggttgcacccacggtgctgctggtgcaggtggactcaccaggctgcttccacaatagccaggatgcagaatccagctgcattgcctggggatacaagctgagcatgcagctagctcatgaaatccttctttccctgtgctacatcctaaaactatggtgctgtgggacagcttacagaatagtagagacagagtaaagttagaagtaycaactctgaatccaacctggagcagatgtggagtgtgatctgarccacaaacttgagtgtagtcagagaaatgatgtctttggtctgttcactgtattttttttttttccaaagtggtgtcacatcagctctggagacagtagctgaagcatctgagaagtcagttcaacactcttgagaaatctatgttaacacttttgagaggtgttgctgtgaacaggataaaattgaaatggcgacaaattacccgacgctgctgtaggaaccaatgctccaggcatcttgacagtccttgcagactccctaaatgctccataaatatattaatttctggaattggttgt

SEQ ID NO: 2719 - DNA, 600 bp, Chicken  19866894089916_1
gaaagcacaaactaccactccaaaagctccttctccatcattatttactggacatttcgttctgtggcaacgttacaggaattttaggcaagatatagcagtggtcagcatcactcttacacaggcaaactaccagactttaaaaaaccagtacatgaaacgctcttatgtggatttagggaaaactcatgtgtcaggttagataaggtacgaaggctgcgatatataagcactatatacagaaatagccacaaaaaacaaagcagcttaaggaatagaggaaggaagggaagtagcgargagattgaagtccagctccatcacaaaataagcaaacacaagttcaacaaaaaatgggaagcaaatttagagaaagttactattgcaagcaaaactctgataaggatagataaacataatattaattttaaggctattcacaaggaaagcattttgaagttttcagtttacatatgaaagtactacaaaatttataccaacacttgtgcctggactaaaagaaaatgtattttaggtagctgaataacatattaaaggttcctctttsgaattccaatgtatttacctgagttttagcaa

SEQ ID NO: 2720 - DNA, 600 bp, Chicken  19866894089916_2
taaggaatagaggaaggaagggaagtagcgargagattgaagtccagctccatcacaaaataagcaaacacaagttcaacaaaaaatgggaagcaaatttagagaaagttactattgcaagcaaaactctgataaggatagataaacataatattaattttaaggctattcacaaggaaagcattttgaagttttcagtttacatatgaaagtactacaaaatttataccaacacttgtgcctggactaaaagaaaatgtattttaggtagctgaataacatattaaaggttcctctttsgaattccaatgtatttacctgagttttagcaataacagtctcaatttccagaccacgcagaaggtcaccatgtttctggcttcagaatattttcatgccactctcttcagagacccatcaacaccactcaacctagattcacttctctcttttcactgtgtttctgagaaagccactaatcatattttgtcttacatttccctttgcacgctacagatgttacaggtacacaagcaatactcaaacattctaaaacacagttcattatttcttccactacgctgtgagacttttactttc

SEQ ID NO: 2721 - DNA, 600 bp, Chicken  19866894089920_1
gagagcactgagctgtttaatatttcaatgccccaagaatgcctcggagaaattagttttgtaccatttacttggtcacagtaccaaagtttctgtgaaacaagcttatgtagcagtttctcttcagagtagaagagtgctggaatcaatacaagtttcatactcctctttatgtacctcatcactgagcataccctaaacagaaatatcgtttctaggtgacactcaaatggtcacactaaggatttctggacaggctgagactgagtctggacagaaataaagtcttttttaaaaatyattttatttttaaagaaaaaataaaamccctttttataattaaaggtcacaagtcattcttttctgattaaaaaactttaggcataaaagtgcttgtcatcaaggagcaatgacagccgcttctaagtgctgaatcacagcagtcttcaatggctaactaatatggacagacagcgacatttgtgacccagcacaatcactgagatgctgtaagaaatttactaaacggtagtcattttacaggttgtttgaaatttcatcttctaagagaaaaaaaaaatactttcagtgctttctgtc

SEQ ID NO: 2722 - DNA, 600 bp, Chicken  19866894089920_2
atgccccaagaatgcctcggagaaattagttttgtaccatttacttggtcacagtaccaaagtttctgtgaaacaagcttatgtagcagtttctcttcagagtagaagagtgctggaatcaatacaagtttcatactcctctttatgtacctcatcactgagcataccctaaacagaaatatcgtttctaggtgacactcaaatggtcacactaaggatttctggacaggctgagactgagtctggacagaaataaagtcttttttaaaaatyattttatttttaaagaaaaaataaaamccctttttataattaaaggtcacaagtcattcttttctgattaaaaaactttaggcataaaagtgcttgtcatcaaggagcaatgacagccgcttctaagtgctgaatcacagcagtcttcaatggctaactaatatggacagacagcgacatttgtgacccagcacaatcactgagatgctgtaagaaatttactaaacggtagtcattttacaggttgtttgaaatttcatcttctaagagaaaaaaaaaatactttcagtgctttctgtcttgaaggtctaggagtcactgaactgc

SEQ ID NO: 2723 - DNA, 600 bp, Chicken  19866894089942_1
ccaatatagctcatgtgacgcatttggcagtgacttgtgctgtgtaaagcggctgctggactctcttattccctgtcctgttgtcaaatggaacaatgcctctgtcaatgactcgtttttgggatgctgaaagatctggtcaaccatgttgttccaaggaaatctatgtaatacaagcaaacgtagaccttgcctagatatgtgctgcgtaagtaacactaatatatgtcttaaaaggattaaaggctttacttatttttttttcccggtaagttactactgccgggaatcgcctctttygactgttcttagaaagacgcgtttggataactgggattcactgtgtatggactttctgaataatgctatcaccacggatctatatgactatttgtgccatcattatgggaagaaaagaggatgcagcattcttacgtcatttattttctccttttatttttatttttatwtttttttctctgaaatrtaattcataatactttaggtgtagacacttttaaaaattattttaattttttgagtttaagacaatttctagattattattattgaatgacatctagcactgttttgaacgtt

SEQ ID NO: 2724 - DNA, 511 bp, Chicken  19866894089942_2
atacaagcaaacgtagaccttgcctagatatgtgctgcgtaagtaacactaatatatgtcttaaaaggattaaaggctttacttatttttttttcccggtaagttactactgccgggaatcgcctctttygactgttcttagaaagacgcgtttggataactgggattcactgtgtatggactttctgaataatgctatcaccacggatctatatgactatttgtgccatcattatgggaagaaaagaggatgcagcattcttacgtcatttattttctccttttatttttatttttatwtttttttctctgaaatrtaattcataatactttaggtgtagacacttttaaaaattattttaattttttgagtttaagacaatttctagattattattattgaatgacatctagcactgttttgaacgttccataagttcttgtcaccaacagggaagcagagaactggcaaggctaagttatttgatgcgtttaaaaatccatgtgtcag

SEQ ID NO: 2725 - DNA, 494 bp, Chicken  19866894089942_3
ccttgcctagatatgtgctgcgtaagtaacactaatatatgtcttaaaaggattaaaggctttacttatttttttttcccggtaagttactactgccgggaatcgcctctttygactgttcttagaaagacgcgtttggataactgggattcactgtgtatggactttctgaataatgctatcaccacggatctatatgactatttgtgccatcattatgggaagaaaagaggatgcagcattcttacgtcatttattttctccttttatttttatttttatwtttttttctctgaaatrtaattcataatactttaggtgtagacacttttaaaaattattttaattttttgagtttaagacaatttctagattattattattgaatgacatctagcactgttttgaacgttccataagttcttgtcaccaacagggaagcagagaactggcaaggctaagttatttgatgcgtttaaaaatccatgtgtcag

SEQ ID NO: 2726 - DNA, 600 bp, Chicken  19866894089943_1
tatgtaatacaagcaaacgtagaccttgcctagatatgtgctgcgtaagtaacactaatatatgtcttaaaaggattaaaggctttacttatttttttttcccggtaagttactactgccgggaatcacctctttcgactgttcttagaaagacgcgtttggataactggaattcactgtgtatggactttctgaataatgctatcaccacggatctatatgactatttgtgccatcattatgggaagaaaagaggatgcagcattcttacgtcatttattttctccttttatttttatwttttttttctctgaaatataattcataatrctttaggtgtagacacttttaaaaattattttaattttttgagtttaagacaatttctagattattattattgaatgacatctagcactgttttgaacgttccataagttcttgtcaccaacagggtagcagagaactggcaaggctaagttatttgatgygtttaaaaatccatgtgtcaagttgctttacatgaaggtacttagtcatgagtgtaggatctgaagtgttgtcaagaagtatcctccgcttagaatctatcaattaaat

SEQ ID NO: 2727 - DNA, 600 bp, Chicken  19866894089943_2
tagatatgtgctgcgtaagtaacactaatatatgtcttaaaaggattaaaggctttacttatttttttttcccggtaagttactactgccgggaatcacctctttcgactgttcttagaaagacgcgtttggataactggaattcactgtgtatggactttctgaataatgctatcaccacggatctatatgactatttgtgccatcattatgggaagaaaagaggatgcagcattcttacgtcatttattttctccttttatttttatwttttttttctctgaaatataattcataatrctttaggtgtagacacttttaaaaattattttaattttttgagtttaagacaatttctagattattattattgaatgacatctagcactgttttgaacgttccataagttcttgtcaccaacagggtagcagagaactggcaaggctaagttatttgatgygtttaaaaatccatgtgtcaagttgctttacatgaaggtacttagtcatgagtgtaggatctgaagtgttgtcaagaagtatcctccgcttagaatctatcaattaaatgcaaatataaatgcccagtaatattgcaga

SEQ ID NO: 2728 - DNA, 600 bp, Chicken  19866894089943_3
tgtatggactttctgaataatgctatcaccacggatctatatgactatttgtgccatcattatgggaagaaaagaggatgcagcattcttacgtcatttattttctccttttatttttatwttttttttctctgaaatataattcataatrctttaggtgtagacacttttaaaaattattttaattttttgagtttaagacaatttctagattattattattgaatgacatctagcactgttttgaacgttccataagttcttgtcaccaacagggtagcagagaactggcaaggctargttatttgatgygtttaaaaatccatgtgtcaagttgctttacatgaaggtacttagtcatgagtgtaggatctgaagtgttgtcaagaagtatcctccgcttagaatctatcaattaaatgcaaatataaatgcccagtaatattgcagaggactcccattgtgtatgccagcttacggctattagttcatagtgttccctttgacagcgaagaaaaaaagaacggatattttgaagaatattggaaggtgctatagaaacacagagcaggcagtcagaaaagcctgggagagctttca

SEQ ID NO: 2729 - DNA, 600 bp, Chicken  19866894089943_4
ctgaataatgctatcaccacggatctatatgactatttgtgccatcattatgggaagaaaagaggatgcagcattcttacgtcatttattttctccttttatttttatwttttttttctctgaaatataattcataatrctttaggtgtagacacttttaaaaattattttaattttttgagtttaagacaatttctagattattattattgaatgacatctagcactgttttgaacgttccataagttcttgtcaccaacagggtagcagagaactggcaaggctaagttatttgatgygtttaaaaatccatgtgtcaagttgctttacatgaaggtacttagtcatgagtgtaggatctgaagtgttgtcaagaagtatcctccgcttagaatctatcaattaaatgcaaatataaatgcccagtaatattgcagaggactcccattgtgtatgccagcttacggctattagttcatagtgttccctttgacagcgaagaaaaaaagaacggatattttgaagaatattggaaggtgctatagaaacacagagcaggcagtcagaaaagcctgggagagctttcattcagagcacta

SEQ ID NO: 2730 - DNA, 600 bp, Chicken  19866894089945_1
atactagtgctccccttctctgcattctccaagtgtcgagttttgcacttcctctttccaccaggcttttcacttcttgttctgtttgtctctgcagaagggctccttgatctggagcttgatcgactccttgatctgcattgtttgtaacaggaatcctgtctctcatggagacccatctggctatgcagatctgtcttttctgtgaagggctgggtgctgaattctggaccaacagatttctttgaacagtgagctttagaatgagtcctcttcctgtaggaggggccctctctggcygtcttttgactgtaaggagggtagtcgcacttgtatccactgaagtaacagcctcttttgtaatgatgatcactgtcttggctgcttgacctcctttggccatggcctttgtgatgtgccagtgatctgttggaatctctggttgcagtgttcttgccattactggagcctctctggctttttagggagagattcatgccatgaggccttgacctcctgcttcttttgctttgatgtttgttatcatctctgcttcttgagcatctctttttaagctggtgttcactgtgacacttccta

SEQ ID NO: 2731 - DNA, 566 bp, Chicken  19866894089946_1
tgagacctccagcatattcaggcggagtttcccaaatctcttcaaggtacaacttgccagagcagcacaggagccagcctgctgtgcttcttttctgtgcctccagatccttctgtttgcctttcagcacaccccttagcccaccattatacttctgtggcagtgctagggagggcacaggcaagagcatgggtaagaaagactgttagaaaatggtgggtttgaggtggaaagagggttctggatgtgattagcgctaccagaagaggggagtctgggttagtattactgtcagtgagyagtgcagggtgcagttaggacacagcagtttgtttttggaaaacttgaaacatttcaacttgctcaccactaaatcagcttctaaatgcgtgtgttgagctaccagcagcctccccagttcttggctgaactcttagtctttgtttctgcttttcagaagtggctttccattccccatcccttttggtcacagtgtgagagttgtcttggctgtgtggtggagtgctggggatactgcagcagtttgtaccattttcttacagttt

SEQ ID NO: 2732 - DNA, 600 bp, Chicken  19866894089956_1
ttgggcagttctatagcaggcttgaagtgccccaaatagttggcagcagatggaaatgctgagttaagtgcaatcacagagacttagagagaggaacatatagcttgggaaatggttacttaagctatttattgtttattatgctttaaaaatgcaacaccaaacctcttcgtgcaccctgtgatccaaggagtaagatttattaactatatgggaacgtgcactaatgcagcatgttgtgacatactgatatttgtgttgtctaaaatccctgtcactgaacggaggagcggtaccaayctatcstctgrgagaaatgcaaatacattatttaaagcacccaaattatttccagggatctttacttgatttttttgttgaatattcraaatrcttagccttaaataaaagcaatatcagactccatgagatattgcttccaaggtactaattatgttgataacccagcaggctaccagataccagagggaaagagatattaattgcattccagaagacaaatgggaataacatttgcatgcatgttttttcagtaagttaatgtgtactctctgttgtatctccgccttgtgaactaca

SEQ ID NO: 2733 - DNA, 600 bp, Chicken  19866894089956_2
agttctatagcaggcttgaagtgccccaaatagttggcagcagatggaaatgctgagttaagtgcaatcacagagacttagagagaggaacatatagcttgggaaatggttacttaagctatttattgtttattatgctttaaaaatgcaacaccaaacctcttcgtgcaccctgtgatccaaggagtaagatttattaactatatgggaacgtgcactaatgcagcatgttgtgacatactgatatttgtgttgtctaaaatccctgtcactgaacggaggagcggtaccaayctatcstctgrgagaaatgcaaatacattatttaaagcacccaaattatttccagggatctttacttgatttttttgttgaatattcraaatrcttagccttaaataaaagcaatatcagactccatgagatattgcttccaaggtactaattatgttgataacccagcaggctaccagataccagagggaaagagatattaattgcattccagaagacaaatgggaataacatttgcatgcatgttttttcagtaagttaatgtgtactctctgttgtatctccgccttgtgaactacaggttgt

SEQ ID NO: 2734 - DNA, 600 bp, Chicken  19866894089956_3
tatagcaggcttgaagtgccccaaatagttggcagcagatggaaatgctgagttaagtgcaatcacagagacttagagagaggaacatatagcttgggaaatggttacttaagctatttattgtttattatgctttaaaaatgcaacaccaaacctcttcgtgcaccctgtgatccaaggagtaagatttattaactatatgggaacgtgcactaatgcagcatgttgtgacatactgatatttgtgttgtctaaaatccctgtcactgaacggaggagcggtaccaayctatcstctgrgagaaatgcaaatacattatttaaagcacccaaattatttccagggatctttacttgatttttttgttgaatattcraaatrcttagccttaaataaaagcaatatcagactccatgagatattgcttccaaggtactaattatgttgataacccagcaggctaccagataccagagggaaagagatattaattgcattccagaagacaaatgggaataacatttgcatgcatgttttttcagtaagttaatgtgtactctctgttgtatctccgccttgtgaactacaggttgtgtaat

SEQ ID NO: 2735 - DNA, 600 bp, Chicken  19866894089956_4
gagaggaacatatagcttgggaaatggttacttaagctatttattgtttattatgctttaaaaatgcaacaccaaacctcttcgtgcaccctgtgatccaaggagtaagatttattaactatatgggaacgtgcactaatgcagcatgttgtgacatactgatatttgtgttgtctaaaatccctgtcactgaacggaggagcggtaccaayctatcstctgrgagaaatgcaaatacattatttaaagcacccaaattatttccagggatctttacttgatttttttgttgaatattcraaatrcttagccttaaataaaagcaatatcagactccatgagatattgcttccaaggtactaattatgttgataacccagcaggctaccagataccagagggaaagagatattaattgcattccagaagacaaatgggaataacatttgcatgcatgttttttcagtaagttaatgtgtactctctgttgtatctccgccttgtgaactacaggttgtgtaatcaatcaggaaagggtacgttcacagaattcagaaaagtgcttatattgaargaacaaaattagttttcctatttcca

SEQ ID NO: 2736 - DNA, 600 bp, Chicken  19866894089956_5
gaacatatagcttgggaaatggttacttaagctatttattgtttattatgctttaaaaatgcaacaccaaacctcttcgtgcaccctgtgatccaaggagtaagatttattaactatatgggaacgtgcactaatgcagcatgttgtgacatactgatatttgtgttgtctaaaatccctgtcactgaacggaggagcggtaccaayctatcstctgrgagaaatgcaaatacattatttaaagcacccaaattatttccagggatctttacttgatttttttgttgaatattcraaatrcttagccttaaataaaagcaatatcagactccatgagatattgcttccaaggtactaattatgttgataacccagcaggctaccagataccagagggaaagagatattaattgcattccagaagacaaatgggaataacatttgcatgcatgttttttcagtaagttaatgtgtactctctgttgtatctccgccttgtgaactacaggttgtgtaatcaatcaggaaagggtacgttcacagaattcagaaaagtgcttatattgaargaacaaaattagttttcctatttccacattt

SEQ ID NO: 2737 - DNA, 600 bp, Chicken  19866894089956_6
tacttgatttttttgttgaatattcraaatrcttagccttaaataaaagcaatatcagactccatgagatattgcttccaaggtactaattatgttgataacccagcaggctaccagataccagagggaaagagatattaattgcattccagaagacaaatgggaataacatttgcatgcatgttttttcagtaagttaatgtgtactctctgttgtatctccgccttgtgaactacaggttgtgtaatcaatcaggaaagggtacgttcacagaattcagaaaagtgcttatattgaargaacaaaattagttttcctatttccacatttcttataattcctggctatccctggaacactttaagtcttatccttgctaattatggatacaacacagcaccaagttctgctgactattcttaaagaacattgagtatttccttcagtgatgactgatttccctaattcagttttttagtataaggtatccaggtttttctgatgacaatttcacaggtaggcaactgagctacccttaagctgttagagctttagtcaaggctgtgcaaccaaattctttgcaggcatcccataggctg

SEQ ID NO: 2738 - DNA, 600 bp, Chicken  19866894089962_1
caatcacacaggaatcacttaggatactaccaattgaaaaagaccttcaactaaataccccgatgcatcacaacgttcatagaagccattcctatactcagatgcctatttttctgccttggaagtatttgtcaccacaggccaccctcgcgctagtccttcatctactggggaaaatacattctgctgcatcatccaatttgtgctccagatgacagtcagtgctgagggttattcttccgagcacagactgcggtgctggacaccagggcagcaaggaggggcagatgctgccttccrtcttccccgcacggaaagatgctgcaggagcaaagcaccagggagggagccaacagacagaccatggctacatatcagggtccttcaaaaacaatgtataccaccccttgcacgtttggcaacagtaacacccaagtttctaaaacagcaaaggagttgcaattgttacacctttcagaattgctaggtgctctgcaaaaaaacaaaataccatttgcccctgtgaggtgtaaaccctacacaggcagctttgtaacacaaatccaaaaacactttacctcataatcggaaattaagaca

SEQ ID NO: 2739 - DNA, 600 bp, Chicken  19866894089968_1
tgtaaatgaaaataaaggtaactcggaaaggcaacagaatgtttgaaaagattgaattttttagttataagcatggctgtttccaaatgccatggaaaagaagtcatctactgccagtctaggaagagatctttttcatagtatcccatagtgatttgttatctttctcatctcccccctttaggaaacaattggctgttacttacaatgccaagacgattactgaacaacagattctcgcacctaatacttgcttcatctgacaacccggactcaggtgtgtggccaactttctttcgragcacacaggagtgcattgctctgttacaaccttcttcccagaatcttgtgggctcggaatcccaagtggtttaaacagatgggcgatgatacactgacagatatctgggaaataagctctgtcagttaataaaacttggtgctactcagtactctgactcatcctagaaaaatgccctttgcattgtcttctcttgaactaatggacagtggtcattatttttctaagctgctagagccctttaaaatacagataaaatactgaggaattaatgggaagcttggaaatccacagtctac

SEQ ID NO: 2740 - DNA, 600 bp, Chicken  19866894089968_2
atctggttccattggtatacctattatcccttacctttgttcatatacatgtttatccacacccatccaacacctcccatccaataactactcacgtacttcatgtagagtcctcaaaccatttatttttctctctccactgcttattcatctgaagcaacatcagtacacagccattgaaatcggcagaagcataaacacgatcaggaactctgagaatgtggaaaagtaaactgatggcaaagaaaaatgaataggaaaaaagtctgttcaataggaggagttgatgaggagttggtragaaggaagaaggacattcacagaagtggagcagctttgcttgattgcaagcaaacatttcaaagccaccaattttgctgatgttgcacaagaggaatgcagtggctcctytaggtataagttctaaagggcaaaggtgaataaaaaccagttagggactaagctggaatcactgaggcyggcacagtcccagagaaaacccaatggactatggggaatacctctatgcaccatgtgagacgcacaaagcttgtttgtgcagacactctttggaaagggattgtatttttgtgatgcgct

SEQ ID NO: 2741 - DNA, 600 bp, Chicken  19866894089968_3
cctcaaaccatttatttttctctctccactgcttattcatctgaagcaacatcagtacacagccattgaaatcggcagaagcataaacacgatcaggaactctgagaatgtggaaaagtaaactgatggcaaagaaaaatgaataggaaaaaagtctgttcaataggaggagttgatgaggagttggtragaaggaagaaggacattcacagaagtggagcagctttgcttgattgcaagcaaacatttcaaagccaccaattttgctgatgttgcacaagaggaatgcagtggctcctytaggtataagttctaaagggcaaaggtgaataaaaaccagttagggactaagctggaatcactgaggcyggcacagtcccagagaaaacccaatggactatggggaatacctctatgcaccatgtgagacgcacaaagcttgtttgtgcagacactctttggaaagggattgtatttttgtgatgcgctttggcttcttccgtgttygttgttttgtgggtttttttttttttgtaaaaccaagtggcaatggatgctgaaacagaaggcagaggagttttaaaacaggtctgtgaaaac

SEQ ID NO: 2742 - DNA, 600 bp, Chicken  19866894089968_4
aatcggcagaagcataaacacgatcaggaactctgagaatgtggaaaagtaaactgatggcaaagaaaaatgaataggaaaaaagtctgttcaataggaggagttgatgaggagttggtragaaggaagaaggacattcacagaagtggagcagctttgcttgattgcaagcaaacatttcaaagccaccaattttgctgatgttgcacaagaggaatgcagtggctcctytaggtataagttctaaagggcaaaggtgaataaaaaccagttagggactaagctggaatcactgaggcyggcacagtcccagagaaaacccaatggactatggggaatacctctatgcaccatgtgagacgcacaaagcttgtttgtgcagacactctttggaaagggattgtatttttgtgatgcgctttggcttcttccgtgttygttgttttgtgggtttttttttttttgtaaaaccaagtggcaatggatgctgaaacagaaggcagaggagttttaaaacaggtctgtgaaaacagctgggtctgtatcttcttctcaaggctgcttttgggaaaagtgctgcagtagtgagctatcttctgc

SEQ ID NO: 2743 - DNA, 600 bp, Chicken  19866894089968_5
cacagaagtggagcagctttgcttgattgcaagcaaacatttcaaagccaccaattttgctgatgttgcacaagaggaatgcagtggctcctytaggtataagttctaaagggcaaaggtgaataaaaaccagttagggactaagctggaatcactgaggcyggcacagtcccagagaaaacccaatggactatggggaatacctctatgcaccatgtgagacgcacaaagcttgtttgtgcagacactctttggaaagggattgtatttttgtgatgcgctttggcttcttccgtgttygttgttttgtgggtttttttttttttgtaaaaccaagtggcaatggatgctgaaacagaaggcagaggagttttaaaacaggtctgtgaaaacagctgggtctgtatcttcttctcaaggctgcttttgggaaaagtgctgcagtagtgagctatcttctgcaaacacaaggcatcaggagagaaagaaaggtttccaggaaagagaaccgaaccacccagcaagggtgaagaaaaggcttactccgggcctgtaaacatttgagaaacaaaagtagaagcacagggagaaatcatcttg

SEQ ID NO: 2744 - DNA, 600 bp, Chicken  19866894089968_6
aaaattcctgaaaaataattggaatgaagcagctccaagtcagattagtcttaaatcttcttatgatgaaggttcttgcaaccaaaggcaagttatttcattaggctggttctgcatttttaatacccggtctgtcaacttaacacaatattttttggttatcggggcagctttttattgctatatattaacaacattgcaataggtttaagagtaggagtccatagtcaaggcaattacagaattaagtgctcagtcaagtcccagtcaaactgcggtcaaatgggttaaagggagacrgacagagctgccaatcccaaaatacaacccagccttcagcccatcctgcagccaaaggaatagcactcagttgactttagcagactctgcaatggaaaatatttctgtccagaacaaaattggtctgtaatctgggtaagctattcagagcaaacagtggcaaatttagccctttctcctgtttgtaaatggtccatgtacggactttgtttcttgtagtagctttgcatgtattcttctgacacatactatatatagaaatattttagcagactagcaacattgattatgccttgtgct

SEQ ID NO: 2745 - DNA, 600 bp, Chicken  19866894089970_1
taaaattcagtgagctcctggcattataatagctggagctctttggaatattgcaggaccgagtttttacaaacacattccagagcccaagaccatgtatcaatgttgcattgcaaaaattctccctatcaaatgcctatgtattgcatgaaggagaagtggaaaatcaaggccagcaatagtgcatcagcaaaaccatatgtgaaatgcattgttgaagcaaaacagaaatctacctcagctcagaaatttctgaattgcgtatatgtgcatgcattcatgtcagttttgtatgtgtgrttttgttttagtttgctcaaagtttacagtttgaagcaagttttcttttaatttttttatcacattgctgcatcataaattgcaccataaactaagaattacaacttataaatcccacgtgccaatttacctacactgtttcatgagaaggtgtttccagaaaagcttgggcagccttcggtaaacctaaacatagcagtattcactgggactggaattagatttgataaaacccaaatcaaatcgttgggttttgtgggatgtttaaagagtcagagttttacattttccttcgctgat

SEQ ID NO: 2746 - DNA, 600 bp, Chicken  19866894089973_1
gcccaaaactgaacacagtactcaaggtgaggcctcaccaatgcaaaatgagacataagaggcagtaaatagaaaggctgaagaggaacggtttagtgtggtattacaattcaactgacgtgatgtgtaggtgtcaccaaagggagaagcggtgacctgcaggagagaatgttttgttccaccatacccattggccaaagcaaaggatggtttgcagaatgctgtggcacggggctgctggcaaatagaaggaacaagcaggctcagagcttcagctggtccaggagataatgtgctgtraagaaaacatgattgacgcaccatcaccaaaattcaacaakaatctagttgtaatatatatacctaaactgctgtacccagggccaaaaaagctcagcttccaagatacctctttatatagcaaacagggcatttgggcaagacactggagccattcctccgaagagtacaagctggtattacttcacaatccctgtttcctagctttactcatcacttaagaagattcacagctccaggctgaaaaaacaattcatcattaatacaaactttaagactttcaaactcaaagattccttt

SEQ ID NO: 2747 - DNA, 600 bp, Chicken  19866894089973_2
tgcaaaatgagacataagaggcagtaaatagaaaggctgaagaggaacggtttagtgtggtattacaattcaactgacgtgatgtgtaggtgtcaccaaagggagaagcggtgacctgcaggagagaatgttttgttccaccatacccattggccaaagcaaaggatggtttgcagaatgctgtggcacggggctgctggcaaatagaaggaacaagcaggctcagagcttcagctggtccaggagataatgtgctgtraagaaaacatgattgacgcaccatcaccaaaattcaacaakaatctagttgtaatatatatacctaaactgctgtacccagggccaaaaaagctcagcttccaagatacctctttatatagcaaacagggcatttgggcaagacactggagccattcctccgaagagtacaagctggtattacttcacaatccctgtttcctagctttactcatcacttaagaagattcacagctccaggctgaaaaaacaattcatcattaatacaaactttaagactttcaaactcaaagattcctttacccaggtgaacatgtagtgacttcaaaatgagctgccacg

SEQ ID NO: 2748 - DNA, 600 bp, Chicken  19866894089975_1
tcaaagacccgtgcagccaaaccccgttcccgtactcccctaagcagcatgtattgatttttcactcatatctgtaagaatataatgcttaagcaaaggatttcttataagcaaacaaagttgtggcacagctagggcagccaaaatgaacaagttgctgctagcaggatctcctgactaatatggataagcgatacccaccggtttataattgctattaaaaatgtgctctaggccatgtctatttctgttctttacccatatattgatttatcccagtgtcatgatttcctgtcatcrttrggcaggctggacagggagaaccaagctgtgtaggrgagtgtgtgttccatgarcctgtttggttctgtgttatcactgggcattgttcaccccagtcctgctcagtttcttgtagctgtggcagcactgggcttcagcctgacctttacctggattaggagaaagtgctgtgtcctcccatcacgcgagttctgggatgagcagcacctggcccctcgaaacagacagccttgggcctcaaggtaaagcagcgtcagaacgctccctgttctctgactgcaaagcaaacactggctg

SEQ ID NO: 2749 - DNA, 600 bp, Chicken  19866894089975_2
aagacccgtgcagccaaaccccgttcccgtactcccctaagcagcatgtattgatttttcactcatatctgtaagaatataatgcttaagcaaaggatttcttataagcaaacaaagttgtggcacagctagggcagccaaaatgaacaagttgctgctagcaggatctcctgactaatatggataagcgatacccaccggtttataattgctattaaaaatgtgctctaggccatgtctatttctgttctttacccatatattgatttatcccagtgtcatgatttcctgtcatcrttrggcaggctggacagggagaaccaagctgtgtaggrgagtgtgtgttccatgarcctgtttggttctgtgttatcactgggcattgttcaccccagtcctgctcagtttcttgtagctgtggcagcactgggcttcagcctgacctttacctggattaggagaaagtgctgtgtcctcccatcacgcgagttctgggatgagcagcacctggcccctcgaaacagacagccttgggcctcaaggtaaagcagcgtcagaacgctccctgttctctgactgcaaagcaaacactggctgggc

SEQ ID NO: 2750 - DNA, 600 bp, Chicken  19866894089975_3
cctaagcagcatgtattgatttttcactcatatctgtaagaatataatgcttaagcaaaggatttcttataagcaaacaaagttgtggcacagctagggcagccaaaatgaacaagttgctgctagcaggatctcctgactaatatggataagcgatacccaccggtttataattgctattaaaaatgtgctctaggccatgtctatttctgttctttacccatatattgatttatcccagtgtcatgatttcctgtcatcrttrggcaggctggacagggagaaccaagctgtgtaggrgagtgtgtgttccatgarcctgtttggttctgtgttatcactgggcattgttcaccccagtcctgctcagtttcttgtagctgtggcagcactgggcttcagcctgacctttacctggattaggagaaagtgctgtgtcctcccatcacgcgagttctgggatgagcagcacctggcccctcgaaacagacagccttgggcctcaaggtaaagcagcgtcagaacgctccctgttctctgactgcaaagcaaacactggctgggcccacgttctcattttagttttgtacttcgggcatc

SEQ ID NO: 2751 - DNA, 596 bp, Chicken  19866894089975_4
atttttcactcatatctgtaagaatataatgcttaagcaaaggatttcttataagcaaacaaagttgtggcacagctagggcagccaaaatgaacaagttgctgctagcaggatctcctgactaatatggataagcgatacccaccggtttataattgctattaaaaatgtgctctaggccatgtctatttctgttctttacccatatattgatttatcccagtgtcatgatttcctgtcatcrttrggcaggctggacagggagaaccaagctgtgtaggrgagtgtgtgttccatgarcctgtttggttctgtgttatcactgggcattgttcaccccagtcctgctcagtttcttgtagctgtggcagcactgggcttcagcctgacctttacctggattaggagaaagtgctgtgtcctcccatcacgcgagttctgggatgagcagcacctggcccctcgaaacagacagccttgggcctcaaggtaaagcagcgtcagaacgctccctgttctctgactgcaaagcaaacactggctgggcccacgttctcattttagttttgtacttcgggcatcattttagtcaaaat

SEQ ID NO: 2752 - DNA, 600 bp, Chicken  19866894089976_1
cgctgttctcaaaacaaaacagagaaaggcgatgctgttctcagtacaggcaagaaggcaaagattattcccacagttctgtccctttcctaaggtaacgtgcaccggtacttaacaaaaagcttgtggtgaattgggaattctgatggaccatagcagaagaaaaatatgttacctggctcagacaaacacagaagggtgttccagcaagcaggtaccaatctggaatttggaagacaagtgcttgattacctgttctgtcttagatggtaggcagctcactcgtggcctcgtggctcrtggaaagtactgagtactttcatcagtactcaggcagctaaagatgcacacaggtacatggaaagcacattttatagtgcttaaactcccaggtgcctgtcttaataactgactaaaaaatctcatctctgtctcaaaattcctcgtctgtaaaactataacagtggcccttccctgtatcgtaggaatgctgtaggaatgaacactcawgatcagaagaaattwaatacaatgataacagagtttatataaatactgctgtcagatctgcatcctccagcctgatattttgcaagtagg

SEQ ID NO: 2753 - DNA, 600 bp, Chicken  19866894089976_2
gcaggtaccaatctggaatttggaagacaagtgcttgattacctgttctgtcttagatggtaggcagctcactcgtggcctcgtggctcrtggaaagtactgagtactttcatcagtactcaggcagctaaagatgcacacaggtacatggaaagcacattttatagtgcttaaactcccaggtgcctgtcttaataactgactaaaaaatctcatctctgtctcaaaattcctcgtctgtaaaactataacagtggcccttccctgtatcgtaggaatgctgtaggaatgaacactcawgatcagaagaaattwaatacaatgataacagagtttatataaatactgctgtcagatctgcatcctccagcctgatattttgcaagtaggtcccattctggagaaggctgaattaagaccaccagctggaataaattattttgtgtgttttccaacaccttatctaaacctaggcaggctgagcacacgctttcacaggagtaatactctagccagagatcaaccataagctgtatgagggtataaagatgtaaactaggtaattagaaatggcggtggcgtggggcatgcacgaaaatc

SEQ ID NO: 2754 - DNA, 600 bp, Chicken  19866894089976_3
gaatttggaagacaagtgcttgattacctgttctgtcttagatggtaggcagctcactcgtggcctcgtggctcrtggaaagtactgagtactttcatcagtactcaggcagctaaagatgcacacaggtacatggaaagcacattttatagtgcttaaactcccaggtgcctgtcttaataactgactaaaaaatctcatctctgtctcaaaattcctcgtctgtaaaactataacagtggcccttccctgtatcgtaggaatgctgtaggaatgaacactcawgatcagaagaaattwaatacaatgataacagagtttatataaatactgctgtcagatctgcatcctccagcctgatattttgcaagtaggtcccattctggagaaggctgaattaagaccaccagctggaataaattattttgtgtgttttccaacaccttatctaaacctaggcaggctgagcacacgctttcacaggagtaatactctagccagagatcaaccataagctgtatgagggtataaagatgtaaactaggtaattagaaatggcggtggcgtggggcatgcacgaaaatcaaacgccatttacta

SEQ ID NO: 2755 - DNA, 599 bp, Chicken  19866894089978_1
  misc_feature (1)..(72): n is any nucleotide
nnnnnnnnnnnnnnnnnnnnnnnnnnnnnnnnnnnnnnnnnnnnnnnnnnnnnnnnnnnnnnnnnnnnnnnnacccatcttttatttttactggtctacttttgcccacacaaaaatatcccctaaaagtaaaagtggaacaagaatgtaactctttatcccatctttcccttgcttgcagtcttcacgctctctccatctcgtttagccatcctgaagcctctgaggcattatgctaaccagttcagagccttcctcaagaaggagagttttgatagtctccaggtactttcatgttgmgtacaattgacatctacctcarcaaatagttttggccacaatttctgtcattatcttggcctccacgaaaaggracgctatcaaagtctggcacaacagtgtgggatctagcaccaagtaggtcaatagatccatgtgtttctacaaggagttaagaggattttcaagtgcaygtatgtttcctacatcctctgccccataaatcacatggctgaactttcacatatttgaatacatttttgcttcttttttctggggtacacacattatactgtgctcaccctgaggtggatgccaga

SEQ ID NO: 2756 - DNA, 599 bp, Chicken  19866894089978_2
  misc_feature (1)..(50): n is any nucleotide
nnnnnnnnnnnnnnnnnnnnnnnnnnnnnnnnnnnnnnnnnnnnnnnnnnacccatcttttatttttactggtctacttttgcccacacaaaaatatcccctaaaagtaaaagtggaacaagaatgtaactctttatcccatctttcccttgcttgcagtcttcacgctctctccatctcgtttagccatcctgaagcctctgaggcattatgctaaccagttcagagccttcctcaagaaggagagttttgatagtctccaggtactttcatgttgmgtacaattgacatctacctcarcaaatagttttggccacaatttctgtcattatcttggcctccacgaaaaggracgctatcaaagtctggcacaacagtgtgggatctagcaccaagtaggtcaatagatccatgtgtttctacaaggagttaagaggattttcaagtgcaygtatgtttcctacatcctctgccccataaatcacatggctgaactttcacatatttgaatacatttttgcttcttttttctggggtacacacattatactgtgctcaccctgaggtggatgccagagtacctgttgaaagtttctgca

SEQ ID NO: 2757 - DNA, 600 bp, Chicken  19866894089978_3
ccatcttttatttttactggtctacttttgcccacacaaaaatatcccctaaaagtaaaagtggaacaagaatgtaactctttatcccatctttcccttgcttgcagtcttcacgctctctccatctcgtttagccatcctgaagcctctgaggcattatgctaaccagttcagagccttcctcaagaaggagagttttgatagtctccaggtactttcatgttgmgtacaattgacatctacctcarcaaatagttttggccacaatttctgtcattatcttggcctccacgaaaaggracgctatcaaagtctggcacaacagtgtgggatctagcaccaagtaggtcaatagatccatgtgtttctacaaggagttaagaggattttcaagtgcaygtatgtttcctacatcctctgccccataaatcacatggctgaactttcacatatttgaatacatttttgcttcttttttctggggtacacacattatactgtgctcaccctgaggtggatgccagagtacctgttgaaagtttctgcagtaaggctcctgaagtcacatggcactactgaaagcagctaccaaaccaaatc

SEQ ID NO: 2758 - DNA, 600 bp, Chicken  19866894089978_4
gcttgcagtcttcacgctctctccatctcgtttagccatcctgaagcctctgaggcattatgctaaccagttcagagccttcctcaagaaggagagttttgatagtctccaggtactttcatgttgmgtacaattgacatctacctcarcaaatagttttggccacaatttctgtcattatcttggcctccacgaaaaggracgctatcaaagtctggcacaacagtgtgggatctagcaccaagtaggtcaatagatccatgtgtttctacaaggagttaagaggattttcaagtgcaygtatgtttcctacatcctctgccccataaatcacatggctgaactttcacatatttgaatacatttttgcttcttttttctggggtacacacattatactgtgctcaccctgaggtggatgccagagtacctgttgaaagtttctgcagtaaggctcctgaagtcacatggcactactgaaagcagctaccaaaccaaatccacatccggtacaaagggttttttttggtgtgcttttaacacagagtaaggaaaggaatgaattgcgtacaagctctaatcagaaagcaacaaggagta

SEQ ID NO: 2759 - DNA, 518 bp, Chicken  19866894089979_1
gaacaaggacagcttttagacaacagagtggcttggataatagctgtatattaattgtaccagtgcatcctaacctgacaggtgtaagtctagatcttcatttgtgtttcagatgaagagagagaagtgagaagaattttatattaaatcagatgataagtattagggagactattaaatgttaaagttttgttgtttcagataaccacgcaggccctaagcagcataatgactactttgttaataaacacccactgcttacctgtataattgataaccatagctttcccaaatacagcrggagaatactttgggtttgctaatttggtgttcaggtacaatctaaagttactgtcatagtcaacctctttgtcacccaggacaatgaattttcgcccttgtgcaactttgatattcttctctaagacattgtctatcacaggatcaatgtattcatcaacaccatgcagcaagaagggacttccatactttatggcaagttccagtgtttaaggaaa

SEQ ID NO: 2760 - DNA, 600 bp, Chicken  19866894089981_1
aacagagtaagccctatgcttctgatcctgttttggctgtgacttagtgtgtgctactgataattgtaatttacagtacataattagagattggctaaatgtacttcttgtgttcattgatagtacatggttcagtcaggcttaaagtaattctttgtatgaacagtttaccgttagagaccagtgaaaatggccggtttcaatggatgataccaagtaggaagagcaaaaaagcattgattcaaatggctcaggaaaagaggttttaggggtatcgcttgtgtgcaatacctaggggtrtgctcacctttcttccttggagcatttctggtccctagttctggtgcttgcagttgcttgtggtggtgttcaatttgttattctggtataaacatataatgtagcttgctgtggattagattgcttcctgtggatgagtggagcatgtgtgttaactacctagtcgtttgcgtcaaggatagtttgttrtatttttagtttttaaacatagagtatctagatctattacttgttcaacgatgttgcttcaaactgcctggtctgtaaagtggtgctgataataccagttgctgcttatgg

SEQ ID NO: 2761 - DNA, 556 bp, Chicken  19866894089981_2
atggccggtttcaatggatgataccaagtaggaagagcaaaaaagcattgattcaaatggctcaggaaaagaggttttaggggtatcgcttgtgtgcaatacctaggggtrtgctcacctttcttccttggagcatttctggtccctagttctggtgcttgcagttgcttgtggtggtgttcaatttgttattctggtataaacatataatgtagcttgctgtggattagattgcttcctgtggatgagtggagcatgtgtgttaactacctagtcgtttgcgtcaaggatagtttgttrtatttttagtttttaaacatagagtatctagatctattacttgttcaacgatgttgcttcaaactgcctggtctgtaaagtggtgctgataataccagttgctgcttatgggggaagagtctgggcccataattttctgtgaaacttttggagggtctgtaccatgtcttccatgctatgaaatcttcccttagagtgctctgctgaggctcttcaaagtgaaagcaggttatgtaggttaggaaggagcgtgtca

SEQ ID NO: 2762 - DNA, 600 bp, Chicken  19866894089982_1
cacaagcggccgcctcccctacccccagccagggggacggtgtccccgacaggagccacagtacccggaccccaactctgccgggacacgaagaacaattcccacatactgtcaggaaaggaataaaggaataaacccaacttcgggggagttttcctactcttttcaccttcgtgcagtgaggatcccacggatcgctagactgctttaatagttattaacagtgagttctcctcggcctttctgcagcagcagaaggaggggaaggacagggagagggcagacagctttgagagagaragggagccgaagggaacaagttgtgcggtgggagccctcgggccgcagcaggcgctggtctgtgccwtgcaacacgcgcctgctccaatctgcgccgctcgggaacaataaacaggatcatacaaagaagtggaaaggcggcatctttgcttctggtttctatgacagcatcagagacaaaccaactataaactctaattcctgggattcctccccccccccccgcaacccccttttgtctgccattaattaaagtggccatatggaaaaggctgataataacagcagatgagccaacga

SEQ ID NO: 2763 - DNA, 600 bp, Chicken  19866894089982_2
gaccccaactctgccgggacacgaagaacaattcccacatactgtcaggaaaggaataaaggaataaacccaacttcgggggagttttcctactcttttcaccttcgtgcagtgaggatcccacggatcgctagactgctttaatagttattaacagtgagttctcctcggcctttctgcagcagcagaaggaggggaaggacagggagagggcagacagctttgagagagaragggagccgaagggaacaagttgtgcggtgggagccctcgggccgcagcaggcgctggtctgtgccwtgcaacacgcgcctgctccaatctgcgccgctcgggaacaataaacaggatcatacaaagaagtggaaaggcggcatctttgcttctggtttctatgacagcatcagagacaaaccaactataaactctaattcctgggattcctccccccccccccgcaacccccttttgtctgccattaattaaagtggccatatggaaaaggctgataataacagcagatgagccaacgagagggagaaggaaagaaaaaaataaataactaaaagtaatgtcggagcgattggatttaccctgggc

SEQ ID NO: 2764 - DNA, 599 bp, Chicken  19866894089990_1
  misc_feature (1)..(102): n is any nucleotide
nnnnnnnnnnnnnnnnnnnnnnnnnnnnnnnnnnnnnnnnnnnnnnnnnnnnnnnnnnnnnnnnnnnnnnnnnnnnnnnnnnnnnnnnnnnnnnnnnnnnnntgtgagggagattctgtttccttagaacttttaacactaaaagccagataaaaacaaacaaaacaatcatgactaccaccaacagcaatccaacagtaacaacaaaaccaagaaaccaatggctcttatcatttctgcaagacctattggctgtgacaggcatctggttcttcttcacccttatcagccctgcatttkcataattatttatcycttttttaaacctggtcatgaactgtgctgggttttttttgtttgtttgttttttaatgttcatatgctgtgtttaatwccaaagataattctggaaagcacctatgagctgtgacctctgtcaccagaacttcacacagagctatgagttaggtaaggagattcttgaacaggaagaaaccagcagagtaaggctaagtaaactcttagtcctctctgacattagaagattgtatcacatttcatgaacttggatgtcactttgggaaatgttacacagtgca

SEQ ID NO: 2765 - DNA, 599 bp, Chicken  19866894089990_2
  misc_feature (1)..(87): n is any nucleotide
nnnnnnnnnnnnnnnnnnnnnnnnnnnnnnnnnnnnnnnnnnnnnnnnnnnnnnnnnnnnnnnnnnnnnnnnnnnnnnnnnnnnnnntgtgagggagattctgtttccttagaacttttaacactaaaagccagataaaaacaaacaaaacaatcatgactaccaccaacagcaatccaacagtaacaacaaaaccaagaaaccaatggctcttatcatttctgcaagacctattggctgtgacaggcatctggttcttcttcacccttatcagccctgcatttkcataattatttatcycttttttaaacctggtcatgaactgtgctgggttttttttgtttgtttgttttttaatgttcatatgctgtgtttaatwccaaagataattctggaaagcacctatgagctgtgacctctgtcaccagaacttcacacagagctatgagttaggtaaggagattcttgaacaggaagaaaccagcagagtaaggctaagtaaactcttagtcctctctgacattagaagattgtatcacatttcatgaacttggatgtcactttgggaaatgttacacagtgcaggattgagccaaaga

SEQ ID NO: 2766 - DNA, 599 bp, Chicken  19866894089990_3
  misc_feature (1)..(8): n is any nucleotide
nnnnnnnntgtgagggagattctgtttccttagaacttttaacactaaaagccagataaaaacaaacaaaacaatcatgactaccaccaacagcaatccaacagtaacaacaaaaccaagaaaccaatggctcttatcatttctgcaagacctattggctgtgacaggcatctggttcttcttcacccttatcagccctgcatttkcataattatttatcycttttttaaacctggtcatgaactgtgctgggttttttttgtttgtttgttttttaatgttcatatgctgtgtttaatwccaaagataattctggaaagcacctatgagctgtgacctctgtcaccagaacttcacacagagctatgagttaggtaaggagattcttgaacaggaagaaaccagcagagtaaggctaagtaaactcttagtcctctctgacattagaagattgtatcacatttcatgaacttggatgtcactttgggaaatgttacacagtgcaggattgagccaaagaaataccccactatggataatgctgagatcaaatgccaacaagatttaacaaactaatacacatgatgaaggagaataaa

SEQ ID NO: 2767 - DNA, 600 bp, Chicken  19866894089999_1
atgcactgagaaagcagattgatgtgtatctattgtaaatttcaatttgatgaataaaaacataaaatatataattcaatagaatactgagtaataggaatattctgtttttagagaaatattgcatgtgatttgtctttcagaaaatgcacatatattatataaaagcgaagttagaatataatatctgaactgagggagttcaacactagagttacggtgacttgacagacagtattcccagacaactactaatcattaggtacttcttcctgtgcttataaaatacagagtgggaayctgtttattaatatgctagtgatttgtatataattaaatatggctttctccaaatatttttttgtggttaaaagcaaaatacttcattaaattttctggaatgaaatttcaggtatgtgctgttgaaggttttcaaaatcatgaactttacttcactgcacagcatgtggtttcctctaatttctggcagaattctccagaagctctgtctaaatgtggcagatagaatctgtcccagcagaaagctgaaatggcattccatttctagtccagatttggtaaaattggcagtctacatta

SEQ ID NO: 2768 - DNA, 600 bp, Chicken  19866894090009_1
catgcactcctcctgcctttcctcattagagctctaaatttggtctctcctccattcagcccttaattttctctacagggaattattctctgctgcagcataaaggctggtttaagttggacagcagtatcatagacagctaaaaagaactcttcccctatttgccccgaatttttggaatgtttgtactccatgtgttcataggtcgaagtggaagtgatgtatttttctctgttttctgattggaggcaaatatctactaatataaaacagtgcaacatattcattctatttaacccrttgcttgataaatcacaaactgtattaaatacccaccataaaacttcaggtaacttcctaaaggcagctctgttcagaatctacaaaatacacatctgtattctatgctctggtcttctttctggaaaaaaaacaaagctgagtgyatcaggttttccctagctcttctcaaacataccgtgcagcgatgacctttctctagctgctgtacaggagcagtagcaccgtgtgaagaattttctatcctggtatctcactgaatttctttagttccgtgcagtttggatgggcagtactctg

SEQ ID NO: 2769 - DNA, 600 bp, Chicken  19866894090009_2
gaactcttcccctatttgccccgaatttttggaatgtttgtactccatgtgttcataggtcgaagtggaagtgatgtatttttctctgttttctgattggaggcaaatatctactaatataaaacagtgcaacatattcattctatttaacccrttgcttgataaatcacaaactgtattaaatacccaccataaaacttcaggtaacttcctaaaggcagctctgttcagaatctacaaaatacacatctgtattctatgctctggtcttctttctggaaaaaaaacaaagctgagtgyatcaggttttccctagctcttctcaaacataccgtgcagcgatgacctttctctagctgctgtacaggagcagtagcaccgtgtgaagaattttctatcctggtatctcactgaatttctttagttccgtgcagtttggatgggcagtactctgattctctcagtaaaaatgcttttattatccaggtgagtggttgcatttcattataaatgaacagaaatacttttcattgtcttaaactcatggaacgttagatttttgtattaaaactgtgccttcacattgttgagatccctcga

SEQ ID NO: 2770 - DNA, 600 bp, Chicken  19866894090014_1
gaggagctgaaaggtgaaaatatatgctggcaaagcctgagtgggaagttatgcggtggtacaactcctctgtgctccggggagaaaaagagatttttatcactcatatgtacatttatttcctcatcccattccagtgacatgatcgcaagaaaaaatgaagatgtagttttaaaagtattaccgtatcctgatgcagaggtgatatggaggaagtgtggcagaacactatgggaaaaatgaagcagataatattcaaagagaattcaagcaatggtgaacatcatggccttgcaatcktgagttctacaatctagatttatagttgtgtgygtttttttaaatttagattcatctgaagctgctgtttgatgaaagagcctttgtgcaagctaagagtgtgaacgtaactttgaaccagactgtagattttacaatatataggaaaaatgaaacaaggacaggaaaaggaaatctgggaagcaatgtcagtcctgtaaggtctggaaggaaaagatccaatgagagaagaagaaaaaaaaaaaaaaaaaaggaaaagaaaaagaaatggtttaaagttattcccagaaatactgaata

SEQ ID NO: 2771 - DNA, 600 bp, Chicken  19866894090014_2
agcctgagtgggaagttatgcggtggtacaactcctctgtgctccggggagaaaaagagatttttatcactcatatgtacatttatttcctcatcccattccagtgacatgatcgcaagaaaaaatgaagatgtagttttaaaagtattaccgtatcctgatgcagaggtgatatggaggaagtgtggcagaacactatgggaaaaatgaagcagataatattcaaagagaattcaagcaatggtgaacatcatggccttgcaatcktgagttctacaatctagatttatagttgtgtgygtttttttaaatttagattcatctgaagctgctgtttgatgaaagagcctttgtgcaagctaagagtgtgaacgtaactttgaaccagactgtagattttacaatatataggaaaaatgaaacaaggacaggaaaaggaaatctgggaagcaatgtcagtcctgtaaggtctggaaggaaaagatccaatgagagaagaagaaaaaaaaaaaaaaaaaaggaaaagaaaaagaaatggtttaaagttattcccagaaatactgaatatgctcaaataaacataatctttcctggtacaaa

SEQ ID NO: 2772 - DNA, 599 bp, Chicken  19866894090015_1
  misc_feature (1)..(5): n is any nucleotide
nnnnntgtttcccctttttttatttttactgcagtagctaaagcaagtgagcaaagtcagagtaaaaccatagcagtcatttgaatgccttctgccttctcttctaataagactgatatttactataggaactattgcttttttccaggcgccatcccaggaagcagcaagagtcagtccatatgcctgcagtacccaagatagctcccaagatagctcttgttttaaccatctttggttacttacggttttaaaggcctcaaattccctcttctgcaacaggctagatttaaaaaaaamaaacaaaaaataaacaaaagtattgatgaatcttgtaggctgtctccctctgcttaaacttgtaattgtagcgggttagaacaaattcattgctgtctctgcctttctaacatgctggcatgctcagttcacaggctagttacctacatctttgtgtatgaagacctgatatccttgacctgtggtgccgttgtcatctggtattttgctggcagctttgagaagaacgttggcacggtgaaacactgcttcttcacccttgtgtttgccgtcctggctggcctcctgtacctcttact

SEQ ID NO: 2773 - DNA, 600 bp, Chicken  19866894090021_1
gggaccagcttagtcctcggcagggggacgctcccggtgtgagctccgagctccagactggttgctgtaattgcaccgtgaataattccgtgtccttaaaggaaggagaaacgcgggcgtgcggtggccgtgcggggtgaggggctgctgtttggccacgctgtgcctggggcggttcgggctccacgtggtgcctctcgtggatgtgagcagagcccctttaaggggtcccggtgaaccggtctggttttaattttatcccgtggtgtctgaagggctctcagcgatccgttccccgcrtttatgggagggggagctgcagcgtggctccagtgattgaatcggccctttcgctgcttagcagtcagggctcggggtttgctgctattgttaaacagccyggaatggcacgaggaattctggcaaaatctgccccgccatccctgggctgtaattcaggagaaatattgaccctggtgggctcctgcgccaagcgctaaaaggaagcgttcctaataaaatatggcttggaaaattcatttcggcctggaattcggctctccagaaagcattttaataaggaggtgggggaaatgggac

SEQ ID NO: 2774 - DNA, 600 bp, Chicken  19866894090021_2
gaaggagaaacgcgggcgtgcggtggccgtgcggggtgaggggctgctgtttggccacgctgtgcctggggcggttcgggctccacgtggtgcctctcgtggatgtgagcagagcccctttaaggggtcccggtgaaccggtctggttttaattttatcccgtggtgtctgaagggctctcagcgatccgttccccgcrtttatgggagggggagctgcagcgtggctccagtgattgaatcggccctttcgctgcttagcagtcagggctcggggtttgctgctattgttaaacagccyggaatggcacgaggaattctggcaaaatctgccccgccatccctgggctgtaattcaggagaaatattgaccctggtgggctcctgcgccaagcgctaaaaggaagcgttcctaataaaatatggcttggaaaattcatttcggcctggaattcggctctccagaaagcattttaataaggaggtgggggaaatgggacacatcatccgcaccgctttcagggatcgcagcttttctctctctccctcccataaattctcccccatgtgctcccgctgtggccctgcagggccgggagca

SEQ ID NO: 2775 - DNA, 600 bp, Chicken  19866894090022_1
gacaaaggtagcttctttaactagaaatgaactatgtttttgtacagcaactacataagatcttacatttttgcatcgttttgcttcaaatggagctgatgcctcactgctcaagaatgaattcagttatactcaataatctttgtgggtcccttccaaatgaaattattttttttctattctgtatttcaaatcaatacctgaattttgattatccagcagtagacccagatgataaatcacagcttctccatgcacatctacaaaagaagtgctgacagtaattaagacagattatayactgctactgcaaacaaggggctctttagaccataccacatacaagtctttcaaagtaaatgcatcacagcctccataacctcaaagcctgttttatattcaggaaatctcattaccttggtcaaacaagtaaaatgtgatcacatttgacattttcagggcttaaagacattcagcatccattttagaatatagtttatacaggtgttcagattggaaactcccacgttgcatttgttggtgaatagctctcagtcaacagtcaagtagaatggatataacacaaaagtattgacatct

SEQ ID NO: 2776 - DNA, 599 bp, Chicken  19866894090031_1
  misc_feature (1)..(126): n is any nucleotide
nnnnnnnnnnnnnnnnnnnnnnnnnnnnnnnnnnnnnnnnnnnnnnnnnnnnnnnnnnnnnnnnnnnnnnnnnnnnnnnnnnnnnnnnnnnnnnnnnnnnnnnnnnnnnnnnnnnnnnnnnnnnnnaatacgttgtagctgagagtagagtattactgtagcttctaagaattacaaggattaatgctttggatctcagatgtgcttcattccatgttcaaatgatatattctagctactacagacacagtctgcactgacaggttctatgtcatcaccactgaatgtcagctggatccrattcaatacttaagtgacaaatgagcttttgataccaaaggtgtgaatgaggtgattcttattagtatgttgtaagagtgtccaaagatctctggaaacttgtatatttctttgagtagattgattatattcaacgccagctgtgtgttttaaatgttagtgactaaagaatrctttgttttttacaggcagatcggctgaaaatagacgtgattgactggctcgtatttgatcctgcacagagggctgaagcrctcaagcaaagcaatgctatcatgaggaagttcttgggtactcaa

SEQ ID NO: 2777 - DNA, 600 bp, Chicken  19866894090031_2
acaaggattaatgctttggatctcagatgtgcttcattccatgttcaaatgatatattctagctactacagacacagtctgcactgacaggttctatgtcatcaccactgaatgtcagctggatccrattcaatacttaagtgacaaatgagcttttgataccaaaggtgtgaatgaggtgattcttattagtatgttgtaagagtgtccaaagatctctggaaacttgtatatttctttgagtagattgattatattcaacgccagctgtgtgttttaaatgttagtgactaaagaatrctttgttttttacaggcagatcggctgaaaatagacgtgattgactggctcgtatttgatcctgcacagagggctgaagcrctcaagcaaagcaatgctatcatgaggaagttcttgggtactcaacttcacaaatactatagacttcttaagtgttgcttttgttctcattgactctcggcaatatgtttgatctggctttgcatcttgtctgttgaaaggcatggctaacagagwagagcactgtacagtgcatcttttttcctcataatgacttaactgtgatacagtttatcggtt

SEQ ID NO: 2778 - DNA, 600 bp, Chicken  19866894090031_3
cactgacaggttctatgtcatcaccactgaatgtcagctggatccrattcaatacttaagtgacaaatgagcttttgataccaaaggtgtgaatgaggtgattcttattagtatgttgtaagagtgtccaaagatctctggaaacttgtatatttctttgagtagattgattatattcaacgccagctgtgtgttttaaatgttagtgactaaagaatrctttgttttttacaggcagatcggctgaaaatagacgtgattgactggctcgtatttgatcctgcacagagggctgaagcrctcaagcaaagcaatgctatcatgaggaagttcttgggtactcaacttcacaaatactatagacttcttaagtgttgcttttgttctcattgactctcggcaatatgtttgatctggctttgcatcttgtctgttgaaaggcatggctaacagagwagagcactgtacagtgcatcttttttcctcataatgacttaactgtgatacagtttatcggtttatgtaggtaaagtatgaaaattgcaaagctgttgatactcagttcacattcttatagcatccaagaagcacgaagctgca

SEQ ID NO: 2779 - DNA, 600 bp, Chicken  19866894090031_4
tttgagtagattgattatattcaacgccagctgtgtgttttaaatgttagtgactaaagaatrctttgttttttacaggcagatcggctgaaaatagacgtgattgactggctcgtatttgatcctgcacagagggctgaagcrctcaagcaaagcaatgctatcatgaggaagttcttgggtactcaacttcacaaatactatagacttcttaagtgttgcttttgttctcattgactctcggcaatatgtttgatctggctttgcatcttgtctgttgaaaggcatggctaacagagwagagcactgtacagtgcatcttttttcctcataatgacttaactgtgatacagtttatcggtttatgtaggtaaagtatgaaaattgcaaagctgttgatactcagttcacattcttatagcatccaagaagcacgaagctgcaaaagacgtgtttgtaaagattcctcaagactctatagcagaaatatataaccaatgggaagaacagggaatagaagcctctcttccagctgaagacgacaatgccataagagaacatttatgtatacgggcatatttggtgagttttaaataaact

SEQ ID NO: 2780 - DNA, 600 bp, Chicken  19866894090032_1
gtaaatattatcatcatagagagctgcaaatgcagaaaagcatagcattcataaaaatgggagatttgtttccatgagctgttaaatacagggatagggccaagacaacactgtatatgcatgtatctacaaaacagaaatcatgcttaaccagaacagagaacacatttatagaaaggcaggtacttgtcaaaacttgtccctttactttagcatttattactggacagcaaacatgcaggtaagccactttataggtatttcctctgaggattttaattgttaacatgctcttcatcygtacattaaagtaacaaaaggtgttatcaacagatcccaacataatcaggctagggttcctgagctcttcctatcagcaacccaagagtctacaagaccaccagaaatggacaccacccttgatgacacataataccatgcattcattctttaattatccattaaaagtagaaagagcctgaaggatgtgccccgagtttgaatctttgaatttggcacaaaagaacttaacctaaatagtctacttaatggagtggagagagaagtaaagattgagtctrtacctacctaacaactccc

SEQ ID NO: 2781 - DNA, 600 bp, Chicken  19866894090032_2
gttaacatgctcttcatcygtacattaaagtaacaaaaggtgttatcaacagatcccaacataatcaggctagggttcctgagctcttcctatcagcaacccaagagtctacaagaccaccagaaatggacaccacccttgatgacacataataccatgcattcattctttaattatccattaaaagtagaaagagcctgaaggatgtgccccgagtttgaatctttgaatttggcacaaaagaacttaacctaaatagtctacttaatggagtggagagagaagtaaagattgagtctrtacctacctaacaactcccggtgtggaactgctctgttggctccattgcatggaatgtttgggtatggggcagatgaggaggagtttacccacaactcaggtgatgaatagttgaaggatgactgattactgtggtcctgaagctctttacactgaccaagactgtcttgaggagtgcttaattcttcagaacaagcctggactgaactagaggaaattcttctttggtacaacggcctgcctggtcctcttggttcatactgcaaagacaagagagaaaaaacaataaaagacgaccct

SEQ ID NO: 2782 - DNA, 599 bp, Chicken  19866894090033_1
  misc_feature (1)..(200): n is any nucleotide
nnnnnnnnnnnnnnnnnnnnnnnnnnnnnnnnnnnnnnnnnnnnnnnnnnnnnnnnnnnnnnnnnnnnnnnnnnnnnnnnnnnnnnnnnnnnnnnnnnnnnnnnnnnnnnnnnnnnnnnnnnnnnnnnnnnnnnnnnnnnnnnnnnnnnnnnnnnnnnnnnnnnnnnnnnnnnnnnnnnnnnnnnnnnnnnnnnnnnnnngccgtctggcccgagggggctgaacgcagggagacgtgcggaggtgcctctcgtgggggatcggctctgctgttgggatccccgcggtcgggtcgagccsacccagcgaggggggacatctccctcagtgggctccgtgccctcttctcgccacgggaatgttaacaacagcaacaaaatgtatacatacatacatayatatatatatacatatatatatatgacatcaccccaggcgtgcacaccccctgcccagtgcgtgtgcgagctttgcaagcggagctcgaaagtccacacgcaccggcgcacgctgcgcgccccgcaaagcctcgcactcccgtggcccgcaccgatccccgcgctgacggtgcctctccgcatccgctcccacggccgcgg

SEQ ID NO: 2783 - DNA, 599 bp, Chicken  19866894090033_2
  misc_feature (1)..(102): n is any nucleotide
nnnnnnnnnnnnnnnnnnnnnnnnnnnnnnnnnnnnnnnnnnnnnnnnnnnnnnnnnnnnnnnnnnnnnnnnnnnnnnnnnnnnnnnnnnnnnnnnnnnnnngccgtctggcccgagggggctgaacgcagggagacgtgcggaggtgcctctcgtgggggatcggctctgctgttgggatccccgcggtcgggtcgagccsacccagcgaggggggacatctccctcagtgggctccgtgccctcttctcgccacgggaatgttaacaacagcaacaaaatgtatacatacatacatayatatatatatacatatatatatatgacatcaccccaggcgtgcacaccccctgcccagtgcgtgtgcgagctttgcaagcggagctcgaaagtccacacgcaccggcgcacgctgcgcgccccgcaaagcctcgcactcccgtggcccgcaccgatccccgcgctgacggtgcctctccgcatccgctcccacggccgcggccgcccgcaccgcgcgtggctccgcgctcsggcggaaggaaacagtggcagtcgttcattgttaacatttgatttatttaaagtccttaactgcaaat

SEQ ID NO: 2784 - DNA, 600 bp, Chicken  19866894090033_3
gggctccgtgccctcttctcgccacgggaatgttaacaacagcaacaaaatgtatacatacatacatayatatatatatacatatatatatatgacatcaccccaggcgtgcacaccccctgcccagtgcgtgtgcgagctttgcaagcggagctcgaaagtccacacgcaccggcgcacgctgcgcgccccgcaaagcctcgcactcccgtggcccgcaccgatccccgcgctgacggtgcctctccgcatccgctcccacggccgcggccgcccgcaccgcgcgtggctccgcgctcsggcggaaggaaacagtggcagtcgttcattgttaacatttgatttatttaaagtccttaactgcaaatgatcaaaaaaccatacttcacgcgttaaattctcaggtatcgttttaaatcaaaatatttttttttttcaattacaatcacatttataaaattaacaaaaaattcttaaattcacgtgtaattctttttactgtcatttaaagcaatttccagctgtaaagaaagaaaaaaaaatataaaccatgcaataaattaagaacattgagacagcgaacaggaataataataaaac

SEQ ID NO: 2785 - DNA, 429 bp, Chicken  19866894090033_4
gacggtgcctctccgcatccgctcccacggccgcggccgcccgcaccgcgcgtggctccgcgctcsggcggaaggaaacagtggcagtcgttcattgttaacatttgatttatttaaagtccttaactgcaaatgatcaaaaaaccatacttcacgcgttaaattctcaggtatcgttttaaatcaaaatatttttttttttcaattacaatcacatttataaaattaacaaaaaattcttaaattcacgtgtaattctttttactgtcatttaaagcaatttccagctgtaaagaaagsaaaaaaaatataaaccatgcaataaattaagaacattgagacagcgaacaggaataataataaaacccgtctggctatgctaacaccgtgtaaaactgtggaaagtgcattaacactggatgaaacaag

SEQ ID NO: 2786 - DNA, 600 bp, Chicken  19866894090034_1
tggaagcactcatggcaacaggttgtgccctcctgcagcagcatcaccccagcccaagggctgcgttctgcagcatgggcagagcacacagactgaggcacctactggatgcactaagcaggatgctgctgctgatggctgttggggagtgcatcttgcagctacctgtcccatccacagccttacgctgctttgcagcaactgagcactcactgtggggccctacagtcaggtgccccacacgctgctcttgtgtgctctgccccaggtggaggcagtccagtgctgccctaacacagyrttttgctgtgttctggcagaagccatgggatccgggctaccagctcacaggacactcggtagccatctgcatgtgaacatgaaagccaatgctgctgcccacttcatcccaagcacctgtgccagcccagcctcctgcatggctcacagggcagctctgtgagaagcagctcctggctccagattaaagccttgagaaggaggaggaggtctgtgaaatttctgcttctctgctcagcctcagtgagtgtaaacagagagcccggaccctcccaccttcctgctggcacgaagagcatg

SEQ ID NO: 2787 - DNA, 600 bp, Chicken  19866894090034_2
ggaagcactcatggcaacaggttgtgccctcctgcagcagcatcaccccagcccaagggctgcgttctgcagcatgggcagagcacacagactgaggcacctactggatgcactaagcaggatgctgctgctgatggctgttggggagtgcatcttgcagctacctgtcccatccacagccttacgctgctttgcagcaactgagcactcactgtggggccctacagtcaggtgccccacacgctgctcttgtgtgctctgccccaggtggaggcagtccagtgctgccctaacacagyrttttgctgtgttctggcagaagccatgggatccgggctaccagctcacaggacactcggtagccatctgcatgtgaacatgaaagccaatgctgctgcccacttcatcccaagcacctgtgccagcccagcctcctgcatggctcacagggcagctctgtgagaagcagctcctggctccagattaaagccttgagaaggaggaggaggtctgtgaaatttctgcttctctgctcagcctcagtgagtgtaaacagagagcccggaccctcccaccttcctgctggcacgaagagcatga

SEQ ID NO: 2788 - DNA, 599 bp, Chicken  19866894090035_1
  misc_feature (1)..(188): n is any nucleotide
nnnnnnnnnnnnnnnnnnnnnnnnnnnnnnnnnnnnnnnnnnnnnnnnnnnnnnnnnnnnnnnnnnnnnnnnnnnnnnnnnnnnnnnnnnnnnnnnnnnnnnnnnnnnnnnnnnnnnnnnnnnnnnnnnnnnnnnnnnnnnnnnnnnnnnnnnnnnnnnnnnnnnnnnnnnnnnnnnnnnnnnnnnnnaatggttcctcccagtttggaacaactgtggtcctataggtgtgatttaactcaccagcacaatgtgagcagcatggcttggagcaaagtaaacctggtgagctaacaaatkactttttctaagctgtttgtaaaatgtctacataattttcagtgtaaatgaactcctgattttactatatacatttttgcacacatccctggtcagattggttatgtttgcatcacaccacttgtatttcatcctttcatgtaacagtattgctgccttattcctcaggctgggcagccgcattaggcttttgctacaaacgtatcacaacagctttaattggtcccccatacatcacaggtggtagcctgaccaacaggattaagagaataaaccttgtctgtatgggaagctgaaat

SEQ ID NO: 2789 - DNA, 600 bp, Chicken  19866894090036_1
caagtatagtttatatttgagcttataataacagtttgtttcagtagtcagaaatgaagtgtaagcagagatacaatgatcttttagtctctgcagaatatcaactactgctgaaaagcatcaccagtgttgtctgggtattcagttggttgatttacatacacttatagcaaaggcatctggaatttttgatgaacatagataatatgctttgaaaaaaggtaagtggaaaagatttcagataaaggtgttttgtcacatgctcagagaaaattaataaaaccaactgtaaatatgttraatctagatctaaacatgatgtgctttttgttcagtgtttctaatgtcttagtgatgtcagtggttttttataggcttctttgacttaaaaagtatcatctgaagtttttattgatggctgaaacaaagtgtgtaatcctgtgcagcaataactttcatggtggccagagttgggaggtctgaaaatagtttattgccaggaaaaaaatttggagccagttcttagaaggttcaccacctctgctatgtacatttcattttgttccattttaagggtacatatgataatagagccaaacc

SEQ ID NO: 2790 - DNA, 591 bp, Chicken  19866894090047_1
gtattgctcttggtgagactcaggtaaaacaacaccttcctcactgacagccatccactgcttctggcctccctgggctgctgtagcaatgtccgaggctgcacggaagcccagagcgcttgagagcagagcagggcagcagcttgctgccaaaggagagatgaaaccattctacatcttgtcttcacacccctgttccttctccctgaggttccctgccatcccccaggccccagccaggctccctgggccccgcactgggtgcatgcgggctgctggcctcctgtgcagcacgcaccrcccttcccctgctacgcttctgcttgggaatgtgaccttgctccctagattatttacagtcaaaatattgctgcaagcttgtggaaggcttgcttgctttttttttttttttttttttagagactgaattccacaaaaagatgaattctttcaaggagaacgtggggctcggctgtgcagggccccctctctgtgcctgtacttggagggcctgctgctctcctaaaactcaccacctgcctgggaaggctgctggcatgaccccaccacagtgcacatgcagctggcctg

SEQ ID NO: 2791 - DNA, 600 bp, Chicken  19866894090049_1
gtctcaacagccattttcagtcacagctgcgtccagtgttacaggctcatgctggattgctgctgctgccatgctgatggcatcctccaggctctgctgctcttcaagctaggggaggaaagacagagataactgccctcccaaaaagtgtgctcaggaaggttggccttgccccagaggacagaggtgtgagggactgccagtggagcagagcagcaaagcagagagacactgctgtgatggggaaaggctgcttatgaaagaacattctgcaacccatgcagggcatgcctgctctcstccacatgcaaggcatatgggaattaaggagcaagcartctgggcaggaggagacacagcaaagcaagaggttgaagtcagtgagtggatgggggtgtacacagtgaagatggcaggagcaatgctcagtcttgctcagggggctgtgtggtacctgcactgcaatgtgagtgccattggtggtcgccaacaatgccacctgctgatgacagagggatgtgatggctgactcttcagacacaactgccccagaagtgactatggtaacctaggaaaatttaagacaaaagacaattgtgt

SEQ ID NO: 2792 - DNA, 600 bp, Chicken  19866894090049_2
ttacaggctcatgctggattgctgctgctgccatgctgatggcatcctccaggctctgctgctcttcaagctaggggaggaaagacagagataactgccctcccaaaaagtgtgctcaggaaggttggccttgccccagaggacagaggtgtgagggactgccagtggagcagagcagcaaagcagagagacactgctgtgatggggaaaggctgcttatgaaagaacattctgcaacccatgcagggcatgcctgctctcstccacatgcaaggcatatgggaattaaggagcaagcartctgggcaggaggagacacagcaaagcaagaggttgaagtcagtgagtggatgggggtgtacacagtgaagatggcaggagcaatgctcagtcttgctcagggggctgtgtggtacctgcactgcaatgtgagtgccattggtggtcgccaacaatgccacctgctgatgacagagggatgtgatggctgactcttcagacacaactgccccagaagtgactatggtaacctaggaaaatttaagacaaaagacaattgtgtcataaaagaaagtgggattccctcctagcaggcagtcc

SEQ ID NO: 2793 - DNA, 600 bp, Chicken  19866894090049_3
aagtcagtgagtggatgggggtgtacacagtgaagatggcaggagcaatgctcagtcttgctcagggggctgtgtggtacctgcactgcaatgtgagtgccattggtggtcgccaacaatgccacctgctgatgacagagggatgtgatggctgactcttcagacacaactgccccagaagtgactatggtaacctaggaaaatttaagacaaaagacaattgtgtcataaaagaaagtgggattccctcctagcaggcagtccctctgcagggaagagggaaggccttgcttctgcccrtaccggctgtgtctcaatgccatcagcgttgaccacagtcatggtgtgcatgtcaccacccacaagctcttcctcgggcattgcgagggcactgctttgtatcaccacactgactgcactgcccagggcctgcaggtcttcctgtgacaagctgatctggataggacaaaagcagatactcagccaggctggcttctcaggaagccttacacaacatctgattttagcaacagaaaggctaaaatattctctccttctcatgtgcaagacctaaggcacagagaactccaaggacttcgc

SEQ ID NO: 2794 - DNA, 600 bp, Chicken  19866894090053_1
aattcaacttgacttacaggagatattttgaaccagcagcagatgtgcagctcagtcacctacccacaagccaaacagtggtttgtaaccgcacagagggcagtgactcttccctcggtactaacacactgctaatgccactgccttgcattgcagcaaggtcacacagcacccattaaagttgtttagataggactaaatctcagaagttcatgtgctgtgaatctgagaagatagatacttgaggaccactagaagagcagctgagatgctgacctcttaaaagctatcagcaaagcrtgcagagctgcagggaagcctgccagttttccagcactgtcttgtttgtgctttaagtacaaactgaaaaaatctggtttattgcattgcagagcacataaaaacacattcgatgtaacagaaacaaaccgtagtaatttttatgatatttatgatactttatgttatttgatttagtattccagtctttcccttaccttgaatacactgaatgtgcccatcttcagttgtaattgtaaatgtttcacctgggttcacctgcacaagaataacctgttaaaaaaaaaacaaaaacaaaat

SEQ ID NO: 2795 - DNA, 600 bp, Chicken  19866894090054_1
caacctggctgttgtactgtgagcaggcacactggtgtcaaccattgttcttgctgtaatgttcatatcatgttgtccaggcatgccaaggatgctcaggaaatagatgaatcaatggtatctggaatagctagtcctgttctgatgactgtgcatcttgtgggcatgggtggataagaattcaaggaaacatttggcctcttttttttgctcagcaaagtgatcagcaaaggcacatgtttctaacttctgggactctggtaaggagtaggaagccacttctcaagtaggttttgttcygggatctcctctgcactggagtggccctgcaggcattgcaagctggtggggaccacctatatagggcagctctgtgccaggatgagcatgctaatgttgtcacagtccctctggacagcatctgtagaaaaagaggagtgatcttgcgagtgcagagtttgctttttatggtacttgaagctctgagctccaaggagaagacttagtgtttttttttttttctttctgcacgggaaccagaaaagcagggacaaatcctgctctgtgagctgctgaagtatgaatattcaccataatctc

SEQ ID NO: 2796 - DNA, 600 bp, Chicken  19866894090055_1
tgtaagcagaatactacaactgcattctccaagattaaaaaaaagagtgagtcgagcagtgagttatctcactgttttcatctcaacatcttcagtctcgaggtaattttataactgtttatgctgcttcaatttcctacattaaatctcttcttttttaaacaagggaaatatgattttgctattcaaagccctgtacaccgtgtgtatcaccttcacagaacatcacagctgagtctggtcaaacagttctcaattatcagtgtttaagggtcagacacacaactggcaacagtttgsttgaagatgcttgtatggaattctaatacagacctgaaagtaaccggcattctgacrctgatcactttaacctgaccctaagtctctattattacaatagagttcaarcaaaatgcaaggtgttaaagccattaaaatctattctgtgaccaatgaccgtttcctgcattttttcaccacattaacaattctaccatgctctcaaattatgaaaagtttaataatgatttcccagtcttttgatggatacttgcctcctcttaattggaatgagacatgcagcataagaagtctgccctg

SEQ ID NO: 2797 - DNA, 600 bp, Chicken  19866894090055_2
agtgagttatctcactgttttcatctcaacatcttcagtctcgaggtaattttataactgtttatgctgcttcaatttcctacattaaatctcttcttttttaaacaagggaaatatgattttgctattcaaagccctgtacaccgtgtgtatcaccttcacagaacatcacagctgagtctggtcaaacagttctcaattatcagtgtttaagggtcagacacacaactggcaacagtttgsttgaagatgcttgtatggaattctaatacagacctgaaagtaaccggcattctgacrctgatcactttaacctgaccctaagtctctattattacaatagagttcaarcaaaatgcaaggtgttaaagccattaaaatctattctgtgaccaatgaccgtttcctgcattttttcaccacattaacaattctaccatgctctcaaattatgaaaagtttaataatgatttcccagtcttttgatggatacttgcctcctcttaattggaatgagacatgcagcataagaagtctgccctgccaagggtttgctcatctctctgaatgcattacactacttgaacaaacagagcaatg

SEQ ID NO: 2798 - DNA, 600 bp, Chicken  19866894090055_3
ttataactgtttatgctgcttcaatttcctacattaaatctcttcttttttaaacaagggaaatatgattttgctattcaaagccctgtacaccgtgtgtatcaccttcacagaacatcacagctgagtctggtcaaacagttctcaattatcagtgtttaagggtcagacacacaactggcaacagtttgsttgaagatgcttgtatggaattctaatacagacctgaaagtaaccggcattctgacrctgatcactttaacctgaccctaagtctctattattacaatagagttcaarcaaaatgcaaggtgttaaagccattaaaatctattctgtgaccaatgaccgtttcctgcattttttcaccacattaacaattctaccatgctctcaaattatgaaaagtttaataatgatttcccagtcttttgatggatacttgcctcctcttaattggaatgagacatgcagcataagaagtctgccctgccaagggtttgctcatctctctgaatgcattacactacttgaacaaacagagcaatgaagacagattctgcagagagggaattagaaccatcaccttacttttgcagc

SEQ ID NO: 2799 - DNA, 600 bp, Chicken  19866894090056_1
aaggatgcacaggtgagtgcaggaagtgctggtgccgctcgtctgctgggctgggacttccatggagggatactgaaccttaagcctcctgtctgtaccacaggcccaactctccaggaacaaactgctgattaaagatctccgtgaagaaaacagagggtttgcaatggccctgcaggcagctgaactgaagcagatgagcatcgagaagaagaaccacatgctggaggagcaggccttggccttgaagaagctcattgaaaaaatcacaccagcatctctgagtgcatgatggagcaycgctgtggcagctttgctcctgagcctggctgaggtttgtcaggtgagaaaggagaaatstggctgggctgggcaatcagctttgtcctccctgatctcgccaggattttcctggstagaaagtagaaaatggagaagctagtcctgcaaggaagctagtcctgtgggtagtttaattttcttgttgaaaacaccatctttggtgctggtcccagtggcagtgggtgctgttgtctcagggcagccatcccccagcagctgcctgcatctggaaagtcagggcagagggagctgcatgtt

SEQ ID NO: 2800 - DNA, 600 bp, Chicken  19866894090056_2
catggagggatactgaaccttaagcctcctgtctgtaccacaggcccaactctccaggaacaaactgctgattaaagatctccgtgaagaaaacagagggtttgcaatggccctgcaggcagctgaactgaagcagatgagcatcgagaagaagaaccacatgctggaggagcaggccttggccttgaagaagctcattgaaaaaatcacaccagcatctctgagtgcatgatggagcaycgctgtggcagctttgctcctgagcctggctgaggtttgtcaggtgagaaaggagaaatstggctgggctgggcaatcagctttgtcctccctgatctcgccaggattttcctggstagaaagtagaaaatggagaagctagtcctgcaaggaagctagtcctgtgggtagtttaattttcttgttgaaaacaccatctttggtgctggtcccagtggcagtgggtgctgttgtctcagggcagccatcccccagcagctgcctgcatctggaaagtcagggcagagggagctgcatgttcctgcatctggtgtactccgagcagaaagctgtattgtggcaccagtacttcctgctatc

SEQ ID NO: 2801 - DNA, 600 bp, Chicken  19866894090056_3
ggaacaaactgctgattaaagatctccgtgaagaaaacagagggtttgcaatggccctgcaggcagctgaactgaagcagatgagcatcgagaagaagaaccacatgctggaggagcaggccttggccttgaagaagctcattgaaaaaatcacaccagcatctctgagtgcatgatggagcaycgctgtggcagctttgctcctgagcctggctgaggtttgtcaggtgagaaaggagaaatstggctgggctgggcaatcagctttgtcctccctgatctcgccaggattttcctggstagaaagtagaaaatggagaagctagtcctgcaaggaagctagtcctgtgggtagtttaattttcttgttgaaaacaccatctttggtgctggtcccagtggcagtgggtgctgttgtctcagggcagccatcccccagcagctgcctgcatctggaaagtcagggcagagggagctgcatgttcctgcatctggtgtactccgagcagaaagctgtattgtggcaccagtacttcctgctatctccagcctcctctcaatttcaggtgtctcctacaactattgttgaacttttttttt

SEQ ID NO: 2802 - DNA, 600 bp, Chicken  19866894090061_1
aagtggtgaaactagataagatatatcaaatgcatcataaagcttgcactttatggctactcagctctttgggttcacgaaagccaaaaggatcaggaccaaaaatggcatctgccctttgagcacagatttgttcagacgtttaccctgctctacagatctcagtgtagtattgctctgccatgtggcttggaatcccttgaagtttttgaatgcacacaggagaatcatagccaccccacggcaagtccttaaaatacttctacataaaaaagagttaaaagctgtcttgaaatgcaytaccaacatttttccccctttgagcatgttttaataacaccatgtttcwattgtttcaatgctgtaagcaatcacctgtgtaaacagttttcatttggttcaggggctgactgaaatatcaactcagttcaaaataaaatattcttgagacattctgtcctacacaaattccttgaaactagcatttgtgactttgggacagtaagatgtcaaactgccagtgcatacactggcaaatatacacgtgtgcacacttgcagttataaataccaagtgatggaaaattgctatcattcgttt

SEQ ID NO: 2803 - DNA, 600 bp, Chicken  19866894090061_2
tttatggctactcagctctttgggttcacgaaagccaaaaggatcaggaccaaaaatggcatctgccctttgagcacagatttgttcagacgtttaccctgctctacagatctcagtgtagtattgctctgccatgtggcttggaatcccttgaagtttttgaatgcacacaggagaatcatagccaccccacggcaagtccttaaaatacttctacataaaaaagagttaaaagctgtcttgaaatgcaytaccaacatttttccccctttgagcatgttttaataacaccatgtttcwattgtttcaatgctgtaagcaatcacctgtgtaaacagttttcatttggttcaggggctgactgaaatatcaactcagttcaaaataaaatattcttgagacattctgtcctacacaaattccttgaaactagcatttgtgactttgggacagtaagatgtcaaactgccagtgcatacactggcaaatatacacgtgtgcacacttgcagttataaataccaagtgatggaaaattgctatcattcgtttaattgcatatgtattaaatcattctgttttgtatatttttatgccaaat

SEQ ID NO: 2804 - DNA, 600 bp, Chicken  19866894090064_1
ttaaattatgtgatcatattcacatttgcctctattaacatataaaagactccaggaaaaataggaacactttttattattagataaacagcgatgcctctcatctttcatacaaacccatgcttgacaccaaatttaatcacgccggcaaaggatcatacaggttagctccttatgcccttttcaatgagcagtccatctcttctgcacttccagggccaagcactgcccttgaacaacagaccgacgtgcaagcagcttgttcctcttcagcaggttgctggcatcaccccatttgtsacattgctgctctgtaccaattgctgtcagggtaccaatgcattaaagaccatattcacaagctctgaatcacaaactgaagagaaagtgaaacttcattattcaggatgagcacatttggatcatgaagcattaaagccattgttctgtcatgtaggcagacacacacccctcaaaccttaaggcagggacaacattcctatgttccatggcacraatcatacagacaacacttaagtgaaaggtgatgaaaaacttcctttcttgatcacaatgaatggctttcaggaaaccacaagc

SEQ ID NO: 2805 - DNA, 600 bp, Chicken  19866894090064_2
ggccaagcactgcccttgaacaacagaccgacgtgcaagcagcttgttcctcttcagcaggttgctggcatcaccccatttgtsacattgctgctctgtaccaattgctgtcagggtaccaatgcattaaagaccatattcacaagctctgaatcacaaactgaagagaaagtgaaacttcattattcaggatgagcacatttggatcatgaagcattaaagccattgttctgtcatgtaggcagacacacacccctcaaaccttaaggcagggacaacattcctatgttccatggcacraatcatacagacaacacttaagtgaaaggtgatgaaaaacttcctttcttgatcacaatgaatggctttcaggaaaccacaagcacaaaatcttaatctaatggatttcaggcaaaaggacaaatttcaatacttttctacatagataggctygcaggggaaatctcatcaagatattctatactccaaaagggcaggagaggatttgcatggttatcgctatcatatatctttttttcccattcacttcttctatttcatttctcaatcggatccaaatcaaccctgaagtatttctgc

SEQ ID NO: 2806 - DNA, 600 bp, Chicken  19866894090064_3
tcacaaactgaagagaaagtgaaacttcattattcaggatgagcacatttggatcatgaagcattaaagccattgttctgtcatgtaggcagacacacacccctcaaaccttaaggcagggacaacattcctatgttccatggcacraatcatacagacaacacttaagtgaaaggtgatgaaaaacttcctttcttgatcacaatgaatggctttcaggaaaccacaagcacaaaatcttaatctaatggatttcaggcaaaaggacaaatttcaatacttttctacatagataggctygcaggggaaatctcatcaagatattctatactccaaaagggcaggagaggatttgcatggttatcgctatcatatatctttttttcccattcacttcttctatttcatttctcaatcggatccaaatcaaccctgaagtatttctgcatttttctcaagtttccagaccctaattctggacgtcctgacttaactcttcattactgaaaagcataacatctacatcccttcctgactcttctatcatgtggacacctcagcacttagagaaccacagaatcattaaggttggcaggatca

SEQ ID NO: 2807 - DNA, 600 bp, Chicken  19866894090064_4
tcctgactcttctatcatgtggacacctcagcacttagagaaccacagaatcattaaggttggcaggatcactaagatcatctattccaaccatcaactcatgcctgtaacggctctagaccatatcactcagagttacgtctatcctattcttgaacacctccagcaatgctgactccatcacctccctgggcagcttgttccattacctcaccactctaagaagtttttccaacattcagcatgaacttcagatggtccaaccctgtccaaaaggaacaggagttactgcatacacamaactcagtcataaggaatgcaagcaatgtatctgacgctcatcatacaccatccattcacacacaagatcctcttaaacttccttttgtactttaatttgtagttgtagaggaggaaaaaacattccctgccacagaggtgatttatgaggacagtgcctatgtgactgtatcgcagggctattcttcacacaacagtggctttaagtttaggaaatgaaagacagtatataccagaaggttgccaagcttaatagattctgctgtaaggaatgggagaagttagtgctaacttaacatt

SEQ ID NO: 2808 - DNA, 600 bp, Chicken  19866894090070_1
ttctctgcccctgtcaagttttacagagcccaaatgatttggagggctccctctgtccacccaatgtgcatttggctgtgctttgtacccttctgctctacccacatagacagaagcgtgctacaggcggaacgctaatgagagatttcatgttgtaacgttatttggatttaagaataaagaaatcacagcagtaaaacaaatagcagataaatgggcagagggaggtggcacagggggacgaagaatgactgtgtgatctcacagataaagagcagaagtactgactgggagctgcastggaggtgaggggaggtcacgaygagtgcaacccccttcaagtaaacatcagatgtcaaaaaatgcttcaaaacagacccacaatgggctctgcaygcacacgtttggaatcttcctcttttgtaagccgctgtgcaaggtcaagtctgagtgcaagagctgcggtgttcctacagactgctaatgctcatttgctgctacaaaacgaatcctgttaagcttttagagaracgactctcttctagcctccagtatctcaaacaccaaagaatctattagaaaaygagggaacaagacacr

SEQ ID NO: 2809 - DNA, 587 bp, Chicken  19866894090070_10
tctcatgttctgataaaatccccccaagtaggtaaaattttgatgtccttaaaatctctatttccacaaccttataataggttataagggattataacgccttataaggcackgataaagtgcagtatttatccatcacacttcagggactcttggaacaagggcagaggtagcagacctccaacaaagcagagcaagaccaggaggaaatacctgcatgtaccacatatggctgctctggaaaataggcacgtaggtgggagaaaacactcctatttacacactgtgtaacacacttcycataggcagacgtagaagtgttcaacgtgagacttcctaatgtaacactgctctaggcagccgcagtgcattagcaggcagtgggaataaaatgaatgcatcacgctggggctctgctaactttgcagtggggaattcttctctctctgctgcccactctgcataaacgcatccaaagcggagctgctgctctggcactgcaatctgatggctattattctctcaaatcccatttgcaggtcatttctgtatgaactgacccgcttgaaacccttcctgcttttctc

SEQ ID NO: 2810 - DNA, 600 bp, Chicken  19866894090070_2
cagagcccaaatgatttggagggctccctctgtccacccaatgtgcatttggctgtgctttgtacccttctgctctacccacatagacagaagcgtgctacaggcggaacgctaatgagagatttcatgttgtaacgttatttggatttaagaataaagaaatcacagcagtaaaacaaatagcagataaatgggcagagggaggtggcacagggggacgaagaatgactgtgtgatctcacagataaagagcagaagtactgactgggagctgcastggaggtgaggggaggtcacgaygagtgcaacccccttcaagtaaacatcagatgtcaaaaaatgcttcaaaacagacccacaatgggctctgcaygcacacgtttggaatcttcctcttttgtaagccgctgtgcaaggtcaagtctgagtgcaagagctgcggtgttcctacagactgctaatgctcatttgctgctacaaaacgaatcctgttaagcttttagagaracgactctcttctagcctccagtatctcaaacaccaaagaatctattagaaaaygagggaacaagacacrggacacacatrcacgcgaggtat

SEQ ID NO: 2811 - DNA, 600 bp, Chicken  19866894090070_3
tctacccacatagacagaagcgtgctacaggcggaacgctaatgagagatttcatgttgtaacgttatttggatttaagaataaagaaatcacagcagtaaaacaaatagcagataaatgggcagagggaggtggcacagggggacgaagaatgactgtgtgatctcacagataaagagcagaagtactgactgggagctgcastggaggtgaggggaggtcacgaygagtgcaacccccttcaagtaaacatcagatgtcaaaaaatgcttcaaaacagacccacaatgggctctgcaygcacacgtttggaatcttcctcttttgtaagccgctgtgcaaggtcaagtctgagtgcaagagctgcggtgttcctacagactgctaatgctcatttgctgctacaaaacgaatcctgttaagcttttagagaracgactctcttctagcctccagtatctcaaacaccaaagaatctattagaaaaygagggaacaagacacrggacacacatrcacgcgaggtattctatgtgatagcatagcttatatttcttctgatcaaaaatgtgatcataaattctctatgttgaattaaaaa

SEQ ID NO: 2812 - DNA, 600 bp, Chicken  19866894090070_4
gcacagggggacgaagaatgactgtgtgatctcacagataaagagcagaagtactgactgggagctgcastggaggtgaggggaggtcacgaygagtgcaacccccttcaagtaaacatcagatgtcaaaaaatgcttcaaaacagacccacaatgggctctgcaygcacacgtttggaatcttcctcttttgtaagccgctgtgcaaggtcaagtctgagtgcaagagctgcggtgttcctacagactgctaatgctcatttgctgctacaaaacgaatcctgttaagcttttagagaracgactctcttctagcctccagtatctcaaacaccaaagaatctattagaaaaygagggaacaagacacrggacacacatrcacgcgaggtattctatgtgatagcatagcttatatttcttctgatcaaaaatgtgatcataaattctctatgttgaattaaaaatgatggcttgcattatttagtattaactactgcaagtgccactcattagaatatttagattcctrtagcctgcccaacacctgttacaagctcttccgttcactcacttgcactgctgcccagatgcagccctt

SEQ ID NO: 2813 - DNA, 600 bp, Chicken  19866894090070_5
tgactgggagctgcastggaggtgaggggaggtcacgaygagtgcaacccccttcaagtaaacatcagatgtcaaaaaatgcttcaaaacagacccacaatgggctctgcaygcacacgtttggaatcttcctcttttgtaagccgctgtgcaaggtcaagtctgagtgcaagagctgcggtgttcctacagactgctaatgctcatttgctgctacaaaacgaatcctgttaagcttttagagaracgactctcttctagcctccagtatctcaaacaccaaagaatctattagaaaaygagggaacaagacacrggacacacatrcacgcgaggtattctatgtgatagcatagcttatatttcttctgatcaaaaatgtgatcataaattctctatgttgaattaaaaatgatggcttgcattatttagtattaactactgcaagtgccactcattagaatatttagattcctrtagcctgcccaacacctgttacaagctcttccgttcactcacttgcactgctgcccagatgcagcccttcagccttaggtccaccccccaataaactgcagcaaatagacctcacgtgttccc

SEQ ID NO: 2814 - DNA, 600 bp, Chicken  19866894090070_6
tggaggtgaggggaggtcacgaygagtgcaacccccttcaagtaaacatcagatgtcaaaaaatgcttcaaaacagacccacaatgggctctgcaygcacacgtttggaatcttcctcttttgtaagccgctgtgcaaggtcaagtctgagtgcaagagctgcggtgttcctacagactgctaatgctcatttgctgctacaaaacgaatcctgttaagcttttagagaracgactctcttctagcctccagtatctcaaacaccaaagaatctattagaaaaygagggaacaagacacrggacacacatrcacgcgaggtattctatgtgatagcatagcttatatttcttctgatcaaaaatgtgatcataaattctctatgttgaattaaaaatgatggcttgcattatttagtattaactactgcaagtgccactcattagaatatttagattcctrtagcctgcccaacacctgttacaagctcttccgttcactcacttgcactgctgcccagatgcagcccttcagccttaggtccaccccccaataaactgcagcaaatagacctcacgtgttcccaagagtaagacagggg

SEQ ID NO: 2815 - DNA, 600 bp, Chicken  19866894090070_7
ggaggtcacgaygagtgcaacccccttcaagtaaacatcagatgtcaaaaaatgcttcaaaacagacccacaatgggctctgcaygcacacgtttggaatcttcctcttttgtaagccgctgtgcaaggtcaagtctgagtgcaagagctgcggtgttcctacagactgctaatgctcatttgctgctacaaaacgaatcctgttaagcttttagagaracgactctcttctagcctccagtatctcaaacaccaaagaatctattagaaaaygagggaacaagacacrggacacacatrcacgcgaggtattctatgtgatagcatagcttatatttcttctgatcaaaaatgtgatcataaattctctatgttgaattaaaaatgatggcttgcattatttagtattaactactgcaagtgccactcattagaatatttagattcctrtagcctgcccaacacctgttacaagctcttccgttcactcacttgcactgctgcccagatgcagcccttcagccttaggtccaccccccaataaactgcagcaaatagacctcacgtgttcccaagagtaagacaggggaggttaaaata

SEQ ID NO: 2816 - DNA, 600 bp, Chicken  19866894090070_8
gcggtgttcctacagactgctaatgctcatttgctgctacaaaacgaatcctgttaagcttttagagaracgactctcttctagcctccagtatctcaaacaccaaagaatctattagaaaaygagggaacaagacacrggacacacatrcacgcgaggtattctatgtgatagcatagcttatatttcttctgatcaaaaatgtgatcataaattctctatgttgaattaaaaatgatggcttgcattatttagtattaactactgcaagtgccactcattagaatatttagattcctrtagcctgcccaacacctgttacaagctcttccgttcactcacttgcactgctgcccagatgcagcccttcagccttaggtccaccccccaataaactgcagcaaatagacctcacgtgttcccaagagtaagacaggggaggttaaaataaatacatcagtagaaatcccagcggtgccgtgtcacagccgagctccctggcttagcaatccagttataattgaattttggtggctgtgatttttctcatgttctgataaaatccccccaagtaggtaaaattttgatgtccttaaaatc

SEQ ID NO: 2817 - DNA, 600 bp, Chicken  19866894090070_9
gatgcagcccttcagccttaggtccaccccccaataaactgcagcaaatagacctcacgtgttcccaagagtaagacaggggaggttaaaataaatacatcagtagaaatcccagcggtgccgtgtcacagccgagctccctggcttagcaatccagttataattgaattttggtggctgtgatttttctcatgttctgataaaatccccccaagtaggtaaaattttgatgtccttaaaatctctatttccacaaccttataataggttataagggattataacgccttataaggcackgataaagtgcagtatttatccatcacacttcagggactcttggaacaagggcagaggtagcagacctccaacaaagcagagcaagaccaggaggaaatacctgcatgtaccacatatggctgctctggaaaataggcacgtaggtgggagaaaacactcctatttacacactgtgtaacacacttcycataggcagacgtagaagtgttcaacgtgagacttcctaatgtaacactgctctaggcagccgcagtgcattagcaggcagtgggaataaaatgaatgcatcacgctggggct

SEQ ID NO: 2818 - DNA, 600 bp, Chicken  19866894090071_1
tataggcttttctagctgccaattaaatggcatttagctgcagtgacagtggtatgttgttttgggtctgcagaaatcacttgctcatgctagaaaatctgggacattgtgtttcggatacagggttcttactgggctggattttctatcgctctgcattctcagtgtaggcatgaaagatacctcccagggagaagtgctaagttcatgaatagtgcaaaggggctggcagagtgcagttctttcccagtgtctgtttggatacacctctcgaaggtttctcttccagttggatgatgycttttttttaacaatactgtctggatactggtgcattttgtaaggttcctattttatcccatttggtctggagtgagatagtttgtcaccagttctgtcctatggttcatttaaatgtttttagctatcatcttccctgcatttcactgcgagtttctgcgagggttgcaaaatcaaggtgtggttccatggatgcctctcagtaggcaataaccagtgtagtagctactactgactactgcttgtcatgagagaagttgtagattaaaaatcatctttagaaaaattctatggaacagt

SEQ ID NO: 2819 - DNA, 600 bp, Chicken  19866894090073_1
actcccatttctttatcagtgttgctttttatgtgagttgccagaatccaaaccaactggggcatccgtatagcagcaataattacagagctgctaaactagtgccctggtagacatgctgctctgatacagtagataaagcaagcattacaagggcaattgttccttaccctttcaactcagtgtccccctgtggtttagtgatgggactcagcaggtcaggctgatagttggacctgatcatcttgaaggtcttatacaaactctgctcataacaagtaaccacgctgtagaaagaaygcgttggcgcctgggcacaggggctgcctcacgacaggtttgcatacactcatccccataatgctgggtctgacacagggtcataccaaaacagtatctcctcctgcttattaggcttccaaaaccaaaggaaaacagaaaatactgttcccaggagggcttacacccacaaaaagcactagtgattgcttcattttaaggaggggagaaagggagctgggaagaaaggcttattatggaggaaatgaagcatagccttctcaaagtagatagaaatgcatagctaataagtacgtagct

SEQ ID NO: 2820 - DNA, 599 bp, Chicken  19866894090074_1
  misc_feature (1)..(168): n is any nucleotide
nnnnnnnnnnnnnnnnnnnnnnnnnnnnnnnnnnnnnnnnnnnnnnnnnnnnnnnnnnnnnnnnnnnnnnnnnnnnnnnnnnnnnnnnnnnnnnnnnnnnnnnnnnnnnnnnnnnnnnnnnnnnnnnnnnnnnnnnnnnnnnnnnnnnnnnnnnnnnnnnnnnnnnnntgctgacacttggataaaacacacactggaaccacgcatcagggaagattaagtgcaaacttgtgatgaagaacagagctatgtgatttggctgtgcagaactctaatgatcatttctggtctaggaaagcytgatctgttgcatcaaacccactgcaactctgagatcctcttctatccgaaaatgattttacatctgtttcagttcaaagagtcatataaatcagaatatctgactataaattttgatgacacctttaaagatgatttatacactgtgtataatatatatatacactggaggtacgtacataagagatactaaccactaaaactaagcaatgaatgctatattctctgtatatcatatttaagtccttatctatgaagtcctatcttgagggctagaattcctcaccagtgaagaatga

SEQ ID NO: 2821 - DNA, 599 bp, Chicken  19866894090076_1
  misc_feature (1)..(111): n is any nucleotide
nnnnnnnnnnnnnnnnnnnnnnnnnnnnnnnnnnnnnnnnnnnnnnnnnnnnnnnnnnnnnnnnnnnnnnnnnnnnnnnnnnnnnnnnnnnnnnnnnnnnnnnnnnnnnnnctgctggttttgctgttctcatgacaatttattgaacttgtaggatcacatatgtaattgtgtacttgttttcttgctccccatcacagtgtctcgaaaagaacacttttaaattcattatttgctctcttttcttatagttatctagcatgttctagaatgtggaataattgctacaggcaacttgawaattaaagtataacactgttcacttaaaattaaggtaccrattgttcataggtgtacaaaagtaatggaaagccattaaatagcacwgaaggtagagcagaatggggattctgtagccaagttctgtaattcatagtagttccccaggcaaccttagttgtcggtgacatcaggagaatgtgatgtactgactctaagaagaacaatgctgggatggggacttggtggtggcaaggcactgataaaaccacccgctatcccaggccaaaagtctgtcacttttattttacaaaatgcca

SEQ ID NO: 2822 - DNA, 599 bp, Chicken  19866894090076_2
  misc_feature (1)..(71): n is any nucleotide
nnnnnnnnnnnnnnnnnnnnnnnnnnnnnnnnnnnnnnnnnnnnnnnnnnnnnnnnnnnnnnnnnnnnnnnctgctggttttgctgttctcatgacaatttattgaacttgtaggatcacatatgtaattgtgtacttgttttcttgctccccatcacagtgtctcgaaaagaacacttttaaattcattatttgctctcttttcttatagttatctagcatgttctagaatgtggaataattgctacaggcaacttgawaattaaagtataacactgttcacttaaaattaaggtaccrattgttcataggtgtacaaaagtaatggaaagccattaaatagcacwgaaggtagagcagaatggggattctgtagccaagttctgtaattcatagtagttccccaggcaaccttagttgtcggtgacatcaggagaatgtgatgtactgactctaagaagaacaatgctgggatggggacttggtggtggcaaggcactgataaaaccacccgctatcccaggccaaaagtctgtcacttttattttacaaaatgccatgctttgagtgaattttggtcattatacactcattgtaat

SEQ ID NO: 2823 - DNA, 599 bp, Chicken  19866894090076_3
  misc_feature (1)..(24): n is any nucleotide
nnnnnnnnnnnnnnnnnnnnnnnnctgctggttttgctgttctcatgacaatttattgaacttgtaggatcacatatgtaattgtgtacttgttttcttgctccccatcacagtgtctcgaaaagaacacttttaaattcattatttgctctcttttcttatagttatctagcatgttctagaatgtggaataattgctacaggcaacttgawaattaaagtataacactgttcacttaaaattaaggtaccrattgttcataggtgtacaaaagtaatggaaagccattaaatagcacwgaaggtagagcagaatggggattctgtagccaagttctgtaattcatagtagttccccaggcaaccttagttgtcggtgacatcaggagaatgtgatgtactgactctaagaagaacaatgctgggatggggacttggtggtggcaaggcactgataaaaccacccgctatcccaggccaaaagtctgtcacttttattttacaaaatgccatgctttgagtgaattttggtcattatacactcattgtaatgccaaaatgctcctctgtctcaaaagctacccatattcaaggtgcaa

SEQ ID NO: 2824 - DNA, 468 bp, Chicken  19866894090079_1
agagtgcatcaaaacatgagcaggtccgcagagctgctgcatataatcgtttatgtcattttctgactacgacacttctactgtgtgaagtagagaggctgtggagcctccctccccggaaattttccaaaggtgtctggacgtggccctgggcaccctgctctggtatccctgctggagcaggaggtgaagcaggtgacctccagaggtccctgcccacctcaggcatcctgctgtgctgtgaagcagctcaaacacagcaacacccatgctgtttagagaaggaaaagaaacacatayctgtttacattaaatctttgtatatgagccaaatcctgcaatcagctattgataatttcctcctgtgtagtctgacagatagaaactgcagcagcaatgtgtaccaccagacatctgcagcagtcaaatgttaggcacactgcagcagccccttgtacagcctctaag

SEQ ID NO: 2825 - DNA, 600 bp, Chicken  19866894090081_1
gcagctgttttccttcgcttctgtgcccatagctgctgcatttgggttcgtactcgtttgctgtagctaaagactttgcctccccgctattatcacagtagtttccatcacgttagagcattacactttttttttctttttttttttttcactgagtttatggctgaatcagtgtagagataggttctatctctagaatatctaatatcttaggtattgagatgtattagaaaacaataatccttaattcttgttcattaacaacattcactgaggtgcaaaagtaagtagtcaagaatkctcatgacaaagtacagtccatatgagtgacagatgaaatgtgttaaggttctacttagctaccactatcaaaaactgatctcaagttatatgaacattttccatgtaaaaattcagcatgctggctttgtagtcagatacagttctatggcattaacaatttaattgttctttgtggaaaaatgaaacaaacaacaagaaacgtaggtacagaaaagaaaaaaaaaatcaagctctatctctgtcttgtaacaggtactgtttaatgccacagctttcaagaggcttcaaacatcatca

SEQ ID NO: 2826 - DNA, 600 bp, Chicken  19866894090083_1
tatacctgaatttctagatcattagtgcagctgaagacagaagacatctaaagcttattgcttccacaagcagtaattagttccttttccagcagttcatggatacttatttattctgtatgatgtgcagtcattgatttcttttttcttttttcttgcacttactgtcccagcagtgaaagctggaagttaggaagagacagatggcaatgaaatatatttcattattgttacataaagcatatttaatacttttttcttgtatggaaaagcattttggttattaaatgatccagtatratactgagtacagaacttaactatttgccaggccttcatggttgtggctcatgatactatgacttgctaagcaaaactactatgagcttatccttgcttycctgctgtgacaatgtgtgcacagtagcattgccaagatgtccacacagtgctgcaagctgctgcattaagttctgctgggactatttatctgcttaaaagttggcttttattttggtcagtggtgaatatgctcaaggcagactataagcagctatggaaatagaattaaaggaactgcatgcaaaaacrtgtgctata

SEQ ID NO: 2827 - DNA, 600 bp, Chicken  19866894090083_2
ggatacttatttattctgtatgatgtgcagtcattgatttcttttttcttttttcttgcacttactgtcccagcagtgaaagctggaagttaggaagagacagatggcaatgaaatatatttcattattgttacataaagcatatttaatacttttttcttgtatggaaaagcattttggttattaaatgatccagtatratactgagtacagaacttaactatttgccaggccttcatggttgtggctcatgatactatgacttgctaagcaaaactactatgagcttatccttgcttycctgctgtgacaatgtgtgcacagtagcattgccaagatgtccacacagtgctgcaagctgctgcattaagttctgctgggactatttatctgcttaaaagttggcttttattttggtcagtggtgaatatgctcaaggcagactataagcagctatggaaatagaattaaaggaactgcatgcaaaaacrtgtgctataaactacaaacacccaaagcctgcaaagcaaacaaggactttcctactgtgcagtagtggatcatttcaattgaaatgctgaatcatagattgaaccactg

SEQ ID NO: 2828 - DNA, 600 bp, Chicken  19866894090083_3
tccagtatratactgagtacagaacttaactatttgccaggccttcatggttgtggctcatgatactatgacttgctaagcaaaactactatgagcttatccttgcttycctgctgtgacaatgtgtgcacagtagcattgccaagatgtccacacagtgctgcaagctgctgcattaagttctgctgggactatttatctgcttaaaagttggcttttattttggtcagtggtgaatatgctcaaggcagactataagcagctatggaaatagaattaaaggaactgcatgcaaaaacrtgtgctataaactacaaacacccaaagcctgcaaagcaaacaaggactttcctactgtgcagtagtggatcatttcaattgaaatgctgaatcatagattgaaccactgattgagcacttggtgggaaggcaggaccaacccaggggagctcaggtgcatgcaatgtacctgagtgatcagagtagtggagccagcattccttcccaggcctcacttaatggttgataggggaggcaagggtattttgctggagattcctgcattcctgaggccttctgaaggtaagcagtgtctttcct

SEQ ID NO: 2829 - DNA, 600 bp, Chicken  19866894090083_4
ctctgctgtcattgctgtgctttccattgtgttacaatcatggaagggatcaagtatgagtgtggtggtagcagaatctgtattagcaggtttgtttgctctagaccttcattgttcaggctgtggttacaaccagcctttttaacccttgagaggattaaactgtgtgcagttgccagcatggtttagttgggaatctttctattaggaaagtctctgctcggtgaggctgggcaaccaatggctgttctgtatggtactgagaatcaagtcaagtggaacgtaactggatccaatggygaatactttgactgatttacagttagctccgtaattgtagctggccataaaaatgctaattytttattttgggggtgatactaaatccattcctaggctgaatgtcctcatgcagatgaaatcatttgtaatgtgtacatctccatccagatgctggattaataggrtcaaaagtgagttgcagtgcttcaggtttgtttgcatttgttatggtaaaaaacacaatctgcaacattgttctttgaaataagayttccccttctaccaagatgtggaagacatgaggaaaacatcatgtgg

SEQ ID NO: 2830 - DNA, 600 bp, Chicken  19866894090083_5
tggtggtagcagaatctgtattagcaggtttgtttgctctagaccttcattgttcaggctgtggttacaaccagcctttttaacccttgagaggattaaactgtgtgcagttgccagcatggtttagttgggaatctttctattaggaaagtctctgctcggtgaggctgggcaaccaatggctgttctgtatggtactgagaatcaagtcaagtggaacgtaactggatccaatggygaatactttgactgatttacagttagctccgtaattgtagctggccataaaaatgctaattytttattttgggggtgatactaaatccattcctaggctgaatgtcctcatgcagatgaaatcatttgtaatgtgtacatctccatccagatgctggattaataggrtcaaaagtgagttgcagtgcttcaggtttgtttgcatttgttatggtaaaaaacacaatctgcaacattgttctttgaaataagayttccccttctaccaagatgtggaagacatgaggaaaacatcatgtggagctgtaactcctgctagttatatctcatytcttcttgtagtttagcctacatcaggcgcct

SEQ ID NO: 2831 - DNA, 600 bp, Chicken  19866894090083_6
tgcagttgccagcatggtttagttgggaatctttctattaggaaagtctctgctcggtgaggctgggcaaccaatggctgttctgtatggtactgagaatcaagtcaagtggaacgtaactggatccaatggygaatactttgactgatttacagttagctccgtaattgtagctggccataaaaatgctaattytttattttgggggtgatactaaatccattcctaggctgaatgtcctcatgcagatgaaatcatttgtaatgtgtacatctccatccagatgctggattaataggrtcaaaagtgagttgcagtgcttcaggtttgtttgcatttgttatggtaaaaaacacaatctgcaacattgttctttgaaataagayttccccttctaccaagatgtggaagacatgaggaaaacatcatgtggagctgtaactcctgctagttatatctcatytcttcttgtagtttagcctacatcaggcgcctttgtaagtgtgggtgcttcatttctgtgacgaaggagaacagggcaacttctttttgatcatgcagtgcagtttcatttaactggcaaggtgagaactgctgtga

SEQ ID NO: 2832 - DNA, 600 bp, Chicken  19866894090083_7
atggtactgagaatcaagtcaagtggaacgtaactggatccaatggygaatactttgactgatttacagttagctccgtaattgtagctggccataaaaatgctaattytttattttgggggtgatactaaatccattcctaggctgaatgtcctcatgcagatgaaatcatttgtaatgtgtacatctccatccagatgctggattaataggrtcaaaagtgagttgcagtgcttcaggtttgtttgcatttgttatggtaaaaaacacaatctgcaacattgttctttgaaataagayttccccttctaccaagatgtggaagacatgaggaaaacatcatgtggagctgtaactcctgctagttatatctcatytcttcttgtagtttagcctacatcaggcgcctttgtaagtgtgggtgcttcatttctgtgacgaaggagaacagggcaacttctttttgatcatgcagtgcagtttcatttaactggcaaggtgagaactgctgtgagggaggttattctctctcctgaggagtggaaactgacactctcagcagtcctggtcctggctgaagtcagagccatttgatctccc

SEQ ID NO: 2833 - DNA, 600 bp, Chicken  19866894090083_8
gtaattgtagctggccataaaaatgctaattytttattttgggggtgatactaaatccattcctaggctgaatgtcctcatgcagatgaaatcatttgtaatgtgtacatctccatccagatgctggattaataggrtcaaaagtgagttgcagtgcttcaggtttgtttgcatttgttatggtaaaaaacacaatctgcaacattgttctttgaaataagayttccccttctaccaagatgtggaagacatgaggaaaacatcatgtggagctgtaactcctgctagttatatctcatytcttcttgtagtttagcctacatcaggcgcctttgtaagtgtgggtgcttcatttctgtgacgaaggagaacagggcaacttctttttgatcatgcagtgcagtttcatttaactggcaaggtgagaactgctgtgagggaggttattctctctcctgaggagtggaaactgacactctcagcagtcctggtcctggctgaagtcagagccatttgatctccctttggatggaagacttgctgcgcctctcacacaggagctgtgtgaattctgatgctgcccagcttcatgtcttcctg

SEQ ID NO: 2834 - DNA, 600 bp, Chicken  19866894090085_1
tctaacccaaatggaaagaacttactttctggacacgctgttagaatttattattatagattcccatagatgtattgttgttagtgactggtgggctctccgcaagcacagccccaacgtctcaccgctgagcgcagcccctctgtgtgacaggagcgggacacagcctggtgttgtgagctctacatgcccaggtgaaacccaactctgggcagcccggctctcaatacagcattgtggcagcagggtgcacctctggtgcattattaaagatacaaccactgcgtgggacccggtgcygggtctctgatgacatgagtgcaattacataacggggctcatctgctgcactccaggggtgctgataggtttcaggccgttgcgatcacaggacgttcaggctaamgagtgatttatttaactgttcattcccattcctacttagtgcggaacgttgacttaaccagtacctcttacaactgcctgcatgagctggtcttttgcaagacttggtgcccacccttctgagcctgcatacacgtggctcttgtccgtaatgcctcagtttgctgcaactgctgaacttcctcatttcattcc

SEQ ID NO: 2835 - DNA, 600 bp, Chicken  19866894090085_2
cacagccccaacgtctcaccgctgagcgcagcccctctgtgtgacaggagcgggacacagcctggtgttgtgagctctacatgcccaggtgaaacccaactctgggcagcccggctctcaatacagcattgtggcagcagggtgcacctctggtgcattattaaagatacaaccactgcgtgggacccggtgcygggtctctgatgacatgagtgcaattacataacggggctcatctgctgcactccaggggtgctgataggtttcaggccgttgcgatcacaggacgttcaggctaamgagtgatttatttaactgttcattcccattcctacttagtgcggaacgttgacttaaccagtacctcttacaactgcctgcatgagctggtcttttgcaagacttggtgcccacccttctgagcctgcatacacgtggctcttgtccgtaatgcctcagtttgctgcaactgctgaacttcctcatttcattccattgaaaaactgagaggaagttgagttttcaggggtgctgtttttgtgctagggcatctgatttgctgttggagtaaacttggagagttaggagcattgatattgc

SEQ ID NO: 2836 - DNA, 600 bp, Chicken  19866894090085_3
ccttctgagcctgcatacacgtggctcttgtccgtaatgcctcagtttgctgcaactgctgaacttcctcatttcattccattgaaaaactgagaggaagttgagttttcaggggtgctgtttttgtgctagggcatctgatttgctgttggagtaaacttggagagttaggagcattgatattgctccatttttgctgtccagaatggttttagcgtgtcaggctgttggtaggaatcccagtggacttcagttatagaatgtctggagctgcgcctgacctactccacatagggaaakgccatccaggcattgggcaacacttgcaagttgtagctaatgtttaacagagtagtaaggcacccaagcagagccttactcctgaaaaagcaggtggtggatatgaatgggaaacttcccatgaggctgttattggaagatgatgtgaattaatctcaaagaatgacaatcaacgctgcgcgtggtatgataatagttatccatggatccactcctgcaggtcagggtatggtcaggctgctgtgtgaagcttgtcctgatctgcagctccatccctgctgcattgcwtattgtgctgct

SEQ ID NO: 2837 - DNA, 591 bp, Chicken  19866894090085_4
acatagggaaakgccatccaggcattgggcaacacttgcaagttgtagctaatgtttaacagagtagtaaggcacccaagcagagccttactcctgaaaaagcaggtggtggatatgaatgggaaacttcccatgaggctgttattggaagatgatgtgaattaatctcaaagaatgacaatcaacgctgcgcgtggtatgataatagttatccatggatccactcctgcaggtcagggtatggtcaggctgctgtgtgaagcttgtcctgatctgcagctccatccctgctgcattgcwtattgtgctgctcagggcgtgctggcatgcgctgtcactgccagcatcttgccaaggtgatgtgggaatgagcacggaagggccccagaagctctgcaccattctgcctctgcaggctgtgtctcttggctacccaatgccttatacccacagcttgaactgaacagtcagagtgctcaagtgagatgtggctagttagcttcctagatgtaaggaagcattcaaggtagctattaaatataaaatcaaagatgtagtcaggcttcaggctttgtttgccaggctggagtc

SEQ ID NO: 2838 - DNA, 600 bp, Chicken  19866894090093_1
gctgccaccacaaacctaagagctccgttcccaagtgaagatcaaacttcacaacctcaacacagcacagcagatctgttccttcactaccaccaccactgccaggcagaggaagtctctctgggcagaactgctgttaccctgtttttatctttttgtagggaaaataggttttttgccctccccaccccagcttggagtactgcagcaattacattgccacaagcagaggcagtgatactgacaggagcaaggcagcagctacagtagactgtggttagaggcaatattcaaagggtwggggggaggggcacagaagacattaggaaatgggaaaagaggatgaaaataaagaactctctcaaaatacggtgggtaaagccaaacactgagcacactaaggacgtatgatgcagttcaagyagatgtacctggtccagagaacaaccttctccccagtagagctgactttgctgttcttggcacacaccgttgcttctgtgacycgctgctgttgctgctcctcttccttctgccccagggaggcagtgcacactctatactctagctcctcagaatgccgatgcacctggaagcagt

SEQ ID NO: 2839 - DNA, 600 bp, Chicken  19866894090093_2
ggcagaactgctgttaccctgtttttatctttttgtagggaaaataggttttttgccctccccaccccagcttggagtactgcagcaattacattgccacaagcagaggcagtgatactgacaggagcaaggcagcagctacagtagactgtggttagaggcaatattcaaagggtgggggggaggggcacagaagacattaggaaatgggaaaagaggatgaaaataaagaactctctcaaaatacggtgggtaaagccaaacactgagcacactaaggacgtatgatgcagttcaagyagatgtacctggtccagagaacaaccttctccccagtagagctgactttgctgttcttggcacacaccgttgcttctgtgacycgctgctgttgctgctcctcttccttctgccccagggaggcagtgcacactctatactctagctcctcagaatgccgatgcacctggaagcagttgtttgcatttgacttcaatctgttctcaggaacacttccagtgcagcccatactatctgcttccaaagcacaattactgggggacggtgagcagcagctcttacccagtgctggttttctag

SEQ ID NO: 2840 - DNA, 600 bp, Chicken  19866894090093_3
agcaattacattgccacaagcagaggcagtgatactgacaggagcaaggcagcagctacagtagactgtggttagaggcaatattcaaagggtgggggggaggggcacagaagacattaggaaatgggaaaagaggatgaaaataaagaactctctcaaaatacggtgggtaaagccaaacactgagcacactaaggacgtatgatgcagttcaagyagatgtacctggtccagagaacaaccttctccccagtagagctgactttgctgttcttggcacacaccgttgcttctgtgacycgctgctgttgctgctcctcttccttctgccccagggaggcagtgcacactctatactctagctcctcagaatgccgatgcacctggaagcagttgtttgcatttgacttcaatctgttctcaggaacacttccagtgcagcccatactatctgcttccaaagcacaattactgggggacggtgagcagcagctcttacccagtgctggttttctagctggtgttatccaactctgctttgcttcagattttccttccagaggcaaaggtgatccctcaaattcccttgcacttagtttt

SEQ ID NO: 2841 - DNA, 558 bp, Chicken  19866894090093_4
ttctcaggaacacttccagtgcagcccatactatctgcttccaaagcacaattactgggggacggtgagcagcagctcttacccagtgctggttttctagctggtgttatccaactctgctttgcttcagattttccttccagaggcaaaggtgatccctcaaattcccttgcacttagttttgaagaatgaccaaacttatctgatgaatccgagggaagcccttcagtctgacacaaactgtttttggaggagccgggtcgcactgagcctttcactgtagcagaacgagatgacaasagcagatctctgctcagctcaagggaggcatccacatctccttgatgctgctgctttagtccttcactgccactccctgygctgcaagggctgcctttggtttcttgaggtagttttggggcagctttctgcaagcgtgtccatccaggtacagcaacgaaagaaggactgtccttggcagcactcacagcagcactcacacctccttcctggacccggcgttcaagcaatgcagctttgtctggagatgtgtgtctg

SEQ ID NO: 2842 - DNA, 478 bp, Chicken  19866894090093_5
acccagtgctggttttctagctggtgttatccaactctgctttgcttcagattttccttccagaggcaaaggtgatccctcaaattcccttgcacttagttttgaagaatgaccaaacttatctgatgaatccgagggaagcccttcagtctgacacaaactgtttttggaggagccgggtcgcactgagcctttcactgtagcagaacgagatgacaasagcagatctctgctcagctcaagggaggcatccacatctccttgatgctgctgctttagtccttcactgccactccctgygctgcaagggctgcctttggtttcttgaggtagttttggggcagctttctgcaagcgtgtccatccaggtacagcaacgaaagaaggactgtccttggcagcactcacagcagcactcacacctccttcctggacccggcgttcaagcaatgcagctttgtctggagatgtgtgtctg

SEQ ID NO: 2843 - DNA, 600 bp, Chicken  19866894090095_1
gtaacttcagtctaaggaaaagtgtcagggataaaaggaagacatttaaaattaaatatacaaattttaacattacttctgataatttacttcataaatagatatagtgctatcttttcctttcttttttcttttttttctcttttaagtaggtggggaagatagctgcatatttgtgataaagaagctgatttaggataggaaggatcgtatctccataatggtgagcctttcctgtaactattttttttccagtaccactgcttgttagcacacagtaacagctgcaattcagtaaargcttcattctcttcagagaattaattctccaaagcatgctgacagcctgaattcacccctgcatctacctagttctccctttcaccactgaaacatttaaggatattgctatatacagaacgttactggaattagagttgagtccttgccttccatagggtctggtaaagcaataaggctcagcaggagtagaaactggtttttccggtgcactctggcctctctccaagtggcatgtctacataatccagccaayacagaagggtggaagaacatcttaaaactaaaatttctatttat

SEQ ID NO: 2844 - DNA, 600 bp, Chicken  19866894090095_2
accactgcttgttagcacacagtaacagctgcaattcagtaaargcttcattctcttcagagaattaattctccaaagcatgctgacagcctgaattcacccctgcatctacctagttctccctttcaccactgaaacatttaaggatattgctatatacagaacgttactggaattagagttgagtccttgccttccatagggtctggtaaagcaataaggctcagcaggagtagaaactggtttttccggtgcactctggcctctctccaagtggcatgtctacataatccagccaayacagaagggtggaagaacatcttaaaactaaaatttctatttatatatgtaaattccaatccccaaaactttatgttgaaaataccactttaaactaactatkctttatcagtatacccctgtcattacaaaagagagccccaaacaattagaatgaaaagggttttgacacaaccttcaccatccaaaatactttattgagtttatctctcatttactttagctatggcagaaactgatgctgaagttctgtccagttgcttttaaaaaaacagtgaaccagcaaaatacaattacagt

SEQ ID NO: 2845 - DNA, 600 bp, Chicken  19866894090095_3
tgcatctacctagttctccctttcaccactgaaacatttaaggatattgctatatacagaacgttactggaattagagttgagtccttgccttccatagggtctggtaaagcaataaggctcagcaggagtagaaactggtttttccggtgcactctggcctctctccaagtggcatgtctacataatccagccaayacagaagggtggaagaacatcttaaaactaaaatttctatttatatatgtaaattccaatccccaaaactttatgttgaaaataccactttaaactaactatkctttatcagtatacccctgtcattacaaaagagagccccaaacaattagaatgaaaagggttttgacacaaccttcaccatccaaaatactttattgagtttatctctcatttactttagctatggcagaaactgatgctgaagttctgtccagttgcttttaaaaaaacagtgaaccagcaaaatacaattacagtctggtttcaaaataactacagtaaatgcaacacccatctcagatctctacataaaatgcccttttctgtttcttagtacactactatcctgattcagttgttc

SEQ ID NO: 2846 - DNA, 599 bp, Chicken  19866894090096_1
  misc_feature (1)..(69): n is any nucleotide
nnnnnnnnnnnnnnnnnnnnnnnnnnnnnnnnnnnnnnnnnnnnnnnnnnnnnnnnnnnnnnnnnnnnnaaaatttgtgcttgtttggttactatattggcaatagcctaatccttactggttgtcaccagcatctgaattagagtaacatcagcaatgttccagatggctctgaaagactgaaaagtcttgctctgaattgatcacagcctgaagtgacacagctcttaggtatgacctgcagagggacaagacacacagggcttgtgataactgcagactttggcccaccatcaccaytgmagttgtttgtatcatggtatcaatgagtcttgtggaagaatgtgaagaaagagtagtgacattacagggggtatgtgggagtggagtggaaaaaacgcatgaaggcaacataggataagagcctcccagtaaggttcaactaactgatgcaaaaagcacctaaaatccacatgcaaggttccattttccagctgagcacaaagatatcatcagaatgcctgtgtgtgccctgtagagcagagtgaaataagaactcgtggcacatagaaggaacacagaccagataaatgaagaca

SEQ ID NO: 2847 - DNA, 599 bp, Chicken  19866894090096_2
  misc_feature (1)..(66): n is any nucleotide
nnnnnnnnnnnnnnnnnnnnnnnnnnnnnnnnnnnnnnnnnnnnnnnnnnnnnnnnnnnnnnnnnnaaaatttgtgcttgtttggttactatattggcaatagcctaatccttactggttgtcaccagcatctgaattagagtaacatcagcaatgttccagatggctctgaaagactgaaaagtcttgctctgaattgatcacagcctgaagtgacacagctcttaggtatgacctgcagagggacaagacacacagggcttgtgataactgcagactttggcccaccatcaccaytgmagttgtttgtatcatggtatcaatgagtcttgtggaagaatgtgaagaaagagtagtgacattacagggggtatgtgggagtggagtggaaaaaacgcatgaaggcaacataggataagagcctcccagtaaggttcaactaactgatgcaaaaagcacctaaaatccacatgcaaggttccattttccagctgagcacaaagatatcatcagaatgcctgtgtgtgccctgtagagcagagtgaaataagaactcgtggcacatagaaggaacacagaccagataaatgaagacatcr

SEQ ID NO: 2848 - DNA, 600 bp, Chicken  19866894090096_3
magttgtttgtatcatggtatcaatgagtcttgtggaagaatgtgaagaaagagtagtgacattacagggggtatgtgggagtggagtggaaaaaacgcatgaaggcaacataggataagagcctcccagtaaggttcaactaactgatgcaaaaagcacctaaaatccacatgcaaggttccattttccagctgagcacaaagatatcatcagaatgcctgtgtgtgccctgtagagcagagtgaaataagaactcgtggcacatagaaggaacacagaccagataaatgaagacatcrtagtggctaagaaattgtcagtgaaggatgggcagtagaatgaaaaatacttataaaatgctgtgagatggacagtgagtgaagagcagcatctgcagcaacagagctgactgcaaaggaatgaggatgaaccacaacgatttggcagctctsgggtagagcgggagctgctggtggctgtggcactcctccaggcatggctgggatctgagctgttttcagaccaggagatggtaacagctatctccctcagtctctatgaagtggtgaattcagttatgcacaaaacacaatttagac

SEQ ID NO: 2849 - DNA, 600 bp, Chicken  19866894090096_4
aaagcacctaaaatccacatgcaaggttccattttccagctgagcacaaagatatcatcagaatgcctgtgtgtgccctgtagagcagagtgaaataagaactcgtggcacatagaaggaacacagaccagataaatgaagacatcrtagtggctaagaaattgtcagtgaaggatgggcagtagaatgaaaaatacttataaaatgctgtgagatggacagtgagtgaagagcagcatctgcagcaacagagctgactgcaaaggaatgaggatgaaccacaacgatttggcagctctsgggtagagcgggagctgctggtggctgtggcactcctccaggcatggctgggatctgagctgttttcagaccaggagatggtaacagctatctccctcagtctctatgaagtggtgaattcagttatgcacaaaacacaatttagactgctgaaagctggctgtagatcaggtttggaaataaacatgttaatgccatacgagtaaatggtaccatcagacaaaaggtaacattggcttttactgcttccctttcttgtaatccctcgctatcttggagcaggtcctgaccaggtacctg

SEQ ID NO: 2850 - DNA, 599 bp, Chicken  19866894090102_1
  misc_feature (1)..(243): n is any nucleotide
nnnnnnnnnnnnnnnnnnnnnnnnnnnnnnnnnnnnnnnnnnnnnnnnnnnnnnnnnnnnnnnnnnnnnnnnnnnnnnnnnnnnnnnnnnnnnnnnnnnnnnnnnnnnnnnnnnnnnnnnnnnnnnnnnnnnnnnnnnnnnnnnnnnnnnnnnnnnnnnnnnnnnnnnnnnnnnnnnnnnnnnnnnnnnnnnnnnnnnnnnnnnnnnnnnnnnnnnnnnnnnnnnnnnnnnnnnnnnnnnnnnatcaattctttccattcttccaactgtttctgaaaatgagtactttttagtcatagwaagaaatacataccaatcaatgtgtacaatgttgttacagtaaatgcgtacaacgttgttacagtatttacttggttttatttatttatctctaaagcttatttaacaaaaacacactgatatatttcattcactcactctttcacacccataaacaaagctcccagacaccgggaccaggcagcctgcctgaaattgctcctgcacgctgctgactgcaggtgatgccagctgtcacgtctttatcacactgccgaagtwcttaatcagcaacaacagaccaggagatgaacagacca

SEQ ID NO: 2851 - DNA, 600 bp, Chicken  19866894090102_2
tccaactgtttctgaaaatgagtactttttagtcatagwaagaaatacataccaatcaatgtgtacaatgttgttacagtaaatgcgtacaacgttgttacagtatttacttggttttatttatttatctctaaagcttatttaacaaaaacacactgatatatttcattcactcactctttcacacccataaacaaagctcccagacaccgggaccaggcagcctgcctgaaattgctcctgcacgctgctgactgcaggtgatgccagctgtcacgtctttatcacactgccgaagtwcttaatcagcaacaacagaccaggagatgaacagaccacttagacaagactgctgttgatcacccactttcttctctttcactgaaaatgaggtttgaatgcctattttcatgcaaggctgacaggactagatacagcactgcggggtctgctgcccagagctattctctgaggacaaggcaggctttctggtctccataaatgattttactctgacatcaatagagaactgggaacagcgttcctcattgatattattttggatcactcttttaacccttgtttctcaatttcttcaca

SEQ ID NO: 2852 - DNA, 600 bp, Chicken  19866894090105_1
catatgtttttccttaagtcattattcacatggtttagcaaataggaatttcctttacaaaatggatatgccctggcactggaactaaatttctaaatctactttttttctaaatctacttttttactttctgcctgaatcaaaggaaggtgttgttttttctcctgagttacataaaataactcggactaatactaaaaagatatatgcaaatgcaagaaataaaatcaaagatgtttacaataatgttaagtttcagaaaaaaaatgtatttcattgtgattgataaagcaaaattaryacatatggatcagaayaatcgatagatcacacacattgtcttttwaaaaaagacacacgttaaaaacgtgtaaaatgtcactgacttattttcctttgccactttgacatgattagctataatgcatttttagattgccactgaatggcagaaatttgctgacccttggcataaacggaacagccattactctgagatgtaatgatccaaaccataactggtttattctatgatttccagtagagcagactcagtgtatttcattctttctaaacactctaaaactgcacctgtttaat

SEQ ID NO: 2853 - DNA, 600 bp, Chicken  19866894090105_2
atatgtttttccttaagtcattattcacatggtttagcaaataggaatttcctttacaaaatggatatgccctggcactggaactaaatttctaaatctactttttttctaaatctacttttttactttctgcctgaatcaaaggaaggtgttgttttttctcctgagttacataaaataactcggactaatactaaaaagatatatgcaaatgcaagaaataaaatcaaagatgtttacaataatgttaagtttcagaaaaaaaatgtatttcattgtgattgataaagcaaaattaryacatatggatcagaayaatcgatagatcacacacattgtcttttwaaaaaagacacacgttaaaaacgtgtaaaatgtcactgacttattttcctttgccactttgacatgattagctataatgcatttttagattgccactgaatggcagaaatttgctgacccttggcataaacggaacagccattactctgagatgtaatgatccaaaccataactggtttattctatgatttccagtagagcagactcagtgtatttcattctttctaaacactctaaaactgcacctgtttaatt

SEQ ID NO: 2854 - DNA, 600 bp, Chicken  19866894090105_3
gtcattattcacatggtttagcaaataggaatttcctttacaaaatggatatgccctggcactggaactaaatttctaaatctactttttttctaaatctacttttttactttctgcctgaatcaaaggaaggtgttgttttttctcctgagttacataaaataactcggactaatactaaaaagatatatgcaaatgcaagaaataaaatcaaagatgtttacaataatgttaagtttcagaaaaaaaatgtatttcattgtgattgataaagcaaaattaryacatatggatcagaayaatcgatagatcacacacattgtcttttwaaaaaagacacacgttaaaaacgtgtaaaatgtcactgacttattttcctttgccactttgacatgattagctataatgcatttttagattgccactgaatggcagaaatttgctgacccttggcataaacggaacagccattactctgagatgtaatgatccaaaccataactggtttattctatgatttccagtagagcagactcagtgtatttcattctttctaaacactctaaaactgcacctgtttaattaagttgttatagaact

SEQ ID NO: 2855 - DNA, 600 bp, Chicken  19866894090105_4
aatttcctttacaaaatggatatgccctggcactggaactaaatttctaaatctactttttttctaaatctacttttttactttctgcctgaatcaaaggaaggtgttgttttttctcctgagttacataaaataactcggactaatactaaaaagatatatgcaaatgcaagaaataaaatcaaagatgtttacaataatgttaagtttcagaaaaaaaatgtatttcattgtgattgataaagcaaaattaryacatatggatcagaayaatcgatagatcacacacattgtcttttwaaaaaagacacacgttaaaaacgtgtaaaatgtcactgacttattttcctttgccactttgacatgattagctataatgcatttttagattgccactgaatggcagaaatttgctgacccttggcataaacggaacagccattactctgagatgtaatgatccaaaccataactggtttattctatgatttccagtagagcagactcagtgtatttcattctttctaaacactctaaaactgcacctgtttaattaagttgttatagaactgggtgtcatttcagtggttgaaactttcc

SEQ ID NO: 2856 - DNA, 600 bp, Chicken  19866894090111_1
gtaggtagatctgtgcttagctatttccagtgtccttgattagaaaagcctagaacagatgctacttctaccaaatgcagactcttcatgttcatctttcattaaatgtggccatgttctctgctttaaagtactacaaaaacctcccagtcacattttcagtgtgctaagcaatttattgcaaacgtattcgagtaatctgtaacattttctattccaaaggttcccattttctaatgttcactgtcttttgcgttcgcttaagattgttaccccttttatcttaaagatataagttawaaaagaaacatactcctatgctagagatccagcctaagttctgctttaattcaccagcaatttccaatgacttcagagggaagagatctaattccacaagggaaaacaaaattaaaaaaaaaaaaaaagccttttagtgagattaaaacctaggttacttgacatctacatggactataatgttcagagcatattaccttccctgtacaaatattttcagtatgacacagtttgcggcagtgactgcactaacatcaaaatctgcagacaaattatttggaagggtgttaaaatgggaag

SEQ ID NO: 2857 - DNA, 600 bp, Chicken  19866894090111_2
gcctaagttctgctttaattcaccagcaatttccaatgacttcagagggaagagatctaattccacaagggaaaacaaaattaaaaaaaaaaaaaaagccttttagtgagattaaaacctaggttacttgacatctacatggactataatgttcagagcatattaccttccctgtacaaatattttcagtatgacacagtttgcggcagtgactgcactaacatcaaaatctgcagacaaattatttggaagggtgttaaaatgggaagtatcctcatcataccatgtgatgatatctgytgtcyagagagatctaaygataagattgcatatactggaaaagcagtgtaaggttggatttttccttgtatcaggttctaaaccaatgggcttcatttcattagctatatcatggcttaattaaaagtcaaatttgactaagaatatttcagaatgcagtrcaactgagaatgcagtgttgctgacctccattcatattatctataccagacattctggaatttcagcagatatcactatgacgtgtctggtggaattgaggaaaaactgtacattcaattaattgtagctattccaggg

SEQ ID NO: 2858 - DNA, 600 bp, Chicken  19866894090111_3
agttctgctttaattcaccagcaatttccaatgacttcagagggaagagatctaattccacaagggaaaacaaaattaaaaaaaaaaaaaaagccttttagtgagattaaaacctaggttacttgacatctacatggactataatgttcagagcatattaccttccctgtacaaatattttcagtatgacacagtttgcggcagtgactgcactaacatcaaaatctgcagacaaattatttggaagggtgttaaaatgggaagtatcctcatcataccatgtgatgatatctgytgtcyagagagatctaaygataagattgcatatactggaaaagcagtgtaaggttggatttttccttgtatcaggttctaaaccaatgggcttcatttcattagctatatcatggcttaattaaaagtcaaatttgactaagaatatttcagaatgcagtrcaactgagaatgcagtgttgctgacctccattcatattatctataccagacattctggaatttcagcagatatcactatgacgtgtctggtggaattgaggaaaaactgtacattcaattaattgtagctattccagggtaata

SEQ ID NO: 2859 - DNA, 600 bp, Chicken  19866894090111_4
ttcaccagcaatttccaatgacttcagagggaagagatctaattccacaagggaaaacaaaattaaaaaaaaaaaaaaagccttttagtgagattaaaacctaggttacttgacatctacatggactataatgttcagagcatattaccttccctgtacaaatattttcagtatgacacagtttgcggcagtgactgcactaacatcaaaatctgcagacaaattatttggaagggtgttaaaatgggaagtatcctcatcataccatgtgatgatatctgytgtcyagagagatctaaygataagattgcatatactggaaaagcagtgtaaggttggatttttccttgtatcaggttctaaaccaatgggcttcatttcattagctatatcatggcttaattaaaagtcaaatttgactaagaatatttcagaatgcagtrcaactgagaatgcagtgttgctgacctccattcatattatctataccagacattctggaatttcagcagatatcactatgacgtgtctggtggaattgaggaaaaactgtacattcaattaattgtagctattccagggtaatagaggacataagga

SEQ ID NO: 2860 - DNA, 600 bp, Chicken  19866894090111_5
attaccttccctgtacaaatattttcagtatgacacagtttgcggcagtgactgcactaacatcaaaatctgcagacaaattatttggaagggtgttaaaatgggaagtatcctcatcataccatgtgatgatatctgytgtcyagagagatctaaygataagattgcatatactggaaaagcagtgtaaggttggatttttccttgtatcaggttctaaaccaatgggcttcatttcattagctatatcatggcttaattaaaagtcaaatttgactaagaatatttcagaatgcagtrcaactgagaatgcagtgttgctgacctccattcatattatctataccagacattctggaatttcagcagatatcactatgacgtgtctggtggaattgaggaaaaactgtacattcaattaattgtagctattccagggtaatagaggacataaggagtctgagatagtttgagcttgactaactgtcagcagaacaaaagcaaaagctccctgggatgttcatcacaccttcctgccacagaacaacagcgacagagccctcagcaatcacagccctgctctgctcccacacagagcaa

SEQ ID NO: 2861 - DNA, 600 bp, Chicken  19866894090118_1
agtaatgcttttgtagcactttgttgatgactaaagtctgatgacaactctaatttcatttaactgcattcagttgcttccttttgaacatacagatgtagtcctgcagttcacaccattaaatattccacaaacacctatggcattttgcttaaacaggcactgcaggctttggactctgttcatctgctttgttctaagaaaaaattacagttatacctgctttcagattatgttctcctcattcatgtagtttacaaatactacaaaaacaccattttatacaatatataaaaatakgcaatattaagccttctctaacattaagctgttactgattgaaaacattcacactgaaatttctttacagaatgaaaaggcttaatttgaagagaagggtttgaaagaacttgaacttactgtcttgagcagtgtaaactctgggttcaggacttttgatgcaggaagaggcagcatagaatcatagaatggcctgggttgaaaaggaccagaaagatcatctagtttaaaccccctgctacgtgcagggttgccaaccactagaccaggctgcccagagccacatccagcctggatgtr

SEQ ID NO: 2862 - DNA, 600 bp, Chicken  19866894090118_2
gcaatattaagccttctctaacattaagctgttactgattgaaaacattcacactgaaatttctttacagaatgaaaaggcttaatttgaagagaagggtttgaaagaacttgaacttactgtcttgagcagtgtaaactctgggttcaggacttttgatgcaggaagaggcagcatagaatcatagaatggcctgggttgaaaaggaccagaaagatcatctagtttaaaccccctgctacgtgcagggttgccaaccactagaccaggctgcccagagccacatccagcctggatgtrtgcacgagatgggaacagaagtgttcgtacacactgtgcaaccacaattagtgacagaaagagaagacgaacaagaaaataccataaacaacaaggaatgctgtaagaagttggttgcttccttttgcattcaagcaaatacctctttgcagattcttacaggtaatggtaactgcatttgtgatttacccacatccctttctcctatctggaacagtcagtgaaccctcagttttgggtagctgctcagaccaaaatgatgtaggtgacttttgcaaagataaattccaagttaaaagg

SEQ ID NO: 2863 - DNA, 600 bp, Chicken  19866894090119_1
ccgccatgctcactaactatgtccctcaatgtcacatccacagtttcctgaactcctgcagggatggcaactccaccgcctctgggcagcctgtgacaatgcctcactactctttcagagaataaatttttcctaatatccagtctgagccttctcttaaagccattatgtttagagactgctatattctctcaaccaagcagtgtggttgttttgtggaaagagatgttggggcttagagtcactgtcgcattgtggtgacccttctatctgaaccctaatagtccctgagatgatgayaattgcaatgcctttttatgtttttacactggaacagaggattggaagaaggatgtcaacatttagctgagatgtggaccaggtagtgtgcctgcattaccacttctcttactgtgagtggctggtgtccctgggagctttttctaatggttatttaatggtacaaagacatatcacttaatgggacaaggaacaaagaagggctgattaggacctatgatttaactgcattcccagtgtattgcatttactttatcagtgatatttgcaaaaaatacttctgagtaactttgccacgtt

SEQ ID NO: 2864 - DNA, 600 bp, Chicken  19866894090121_1
caggagaggtgccggggtgcctggaactcctggttgcggtccccttgctgttgtgtcgtgctgatgctctctctaagttagagaactcagcaatgaaccatttcagaaagtcctggccatttaatatctaaagactagttcttgtttactgttcagctcagtgaatgtactctaacactgtttttatttccccgtttcatttttaacctccatcatgtgacagtttctttaaattatttgatttatccacagcattcttcaaggtttctccccatagattattttactgtggtggctgawgtgatctctgcatagccacacactaccttacagagctcccactggggctcttcacacatccatacatgattgcagttcccactaatgcttgccagtgggacttaatgtacaaacacaatttggggtctgtctggggccccatcatagactttctgggcaggatggttggatctttgctggtcagttcttacaaaaatgaatgcaaagctgagatttgaaaatttgcattttacttctgtgtacctattttctgcatctttagtggttctcatatctccaggctcccccactatgctggta

SEQ ID NO: 2865 - DNA, 600 bp, Chicken  19866894090121_2
tgctgagctataattctggacgcactagggaccaatgaactaaagtaaagccaaacatgggcaggaagcactgtatttcaataccagcctctcaagaacaaatttacttagtttaaatcttcactttctacctcactgtatgctttcaggcttgttttactggtcctagaagtgtgaatgtgccaataaaggagtaacatgatatgacagtatccgctttccagaagatctggccccaaaccgagctacaccacgggtagaacctcatataacagcaaaagtctattgaattcagtccaygggcactgggacacgcttctgaaggccaaaccataggcacatcttatgaaaaagccaactggcatattcagcaaattcagcaagtggtaactcagtgttttttgtcacccaaggctgaccaatgcttcctgtttaaaaagttgattttcagcgctcgtaacttccccaggtattagcaattagaggacattccccacacttcatgtttttgtcagcctgatttctttctggaattcttttcatccgagccaattcatctatctctaaaaaaaggcactagaaaaaaatgtttcagtgttc

SEQ ID NO: 2866 - DNA, 599 bp, Chicken  19866894090126_1
  misc_feature (1)..(87): n is any nucleotide
nnnnnnnnnnnnnnnnnnnnnnnnnnnnnnnnnnnnnnnnnnnnnnnnnnnnnnnnnnnnnnnnnnnnnnnnnnnnnnnnnnnnnnnaatggattctgtgcgaaattaaattgaactaagaggaaattgcacggattacaaacgcgggttattggctcaataggggagtaactgagcgatattatctggtctgcgctacggagaaaataacattagctgagctaatggtccttttttactcctaaaacctattactccagagctgctttggaagcagagtgttttccacggaggtacctygtgagacggagcagctctgagtgctgtgcagccacagtctgacatccttcccaggtagcgtcagagtaaccccacgtccagcactgcaaccaggttggagtggaaaggagcagagctttgcatctstttgtgcacctcacacgaaaactgcccatctgcagctccgagtgaygcagctttgggttcctctctcccaccacgaactttgtgtgagctccactccgggtcccactgcrtgcactgcctgagccgaggggtcrctccaggtggaaaccccccacatcacagccccacgggga

SEQ ID NO: 2867 - DNA, 600 bp, Chicken  19866894090126_2
ttgcacggattacaaacgcgggttattggctcaataggggagtaactgagcgatattatctggtctgcgctacggagaaaataacattagctgagctaatggtccttttttactcctaaaacctattactccagagctgctttggaagcagagtgttttccacggaggtacctygtgagacggagcagctctgagtgctgtgcagccacagtctgacatccttcccaggtagcgtcagagtaaccccacgtccagcactgcaaccaggttggagtggaaaggagcagagctttgcatctstttgtgcacctcacacgaaaactgcccatctgcagctccgagtgaygcagctttgggttcctctctcccaccacgaactttgtgtgagctccactccgggtcccactgcrtgcactgcctgagccgaggggtcrctccaggtggaaaccccccacatcacagccccacggggaagccagcagtgtaggacccctcccgcccacggcagatcccaaacagtgacccaaatctgccctgaactgccccaaaacgcagctccggtgcgtggctgcgggatgcagcgacacggatcagccgtag

SEQ ID NO: 2868 - DNA, 600 bp, Chicken  19866894090126_3
tgagcgatattatctggtctgcgctacggagaaaataacattagctgagctaatggtccttttttactcctaaaacctattactccagagctgctttggaagcagagtgttttccacggaggtacctygtgagacggagcagctctgagtgctgtgcagccacagtctgacatccttcccaggtagcgtcagagtaaccccacgtccagcactgcaaccaggttggagtggaaaggagcagagctttgcatctstttgtgcacctcacacgaaaactgcccatctgcagctccgagtgaygcagctttgggttcctctctcccaccacgaactttgtgtgagctccactccgggtcccactgcrtgcactgcctgagccgaggggtcrctccaggtggaaaccccccacatcacagccccacggggaagccagcagtgtaggacccctcccgcccacggcagatcccaaacagtgacccaaatctgccctgaactgccccaaaacgcagctccggtgcgtggctgcgggatgcagcgacacggatcagccgtagtttgggctcaggcagcgacggctccgcgctgaccccaaccttcccc

SEQ ID NO: 2869 - DNA, 574 bp, Chicken  19866894090126_4
tactcctaaaacctattactccagagctgctttggaagcagagtgttttccacggaggtacctygtgagacggagcagctctgagtgctgtgcagccacagtctgacatccttcccaggtagcgtcagagtaaccccacgtccagcactgcaaccaggttggagtggaaaggagcagagctttgcatctstttgtgcacctcacacgaaaactgcccatctgcagctccgagtgaygcagctttgggttcctctctcccaccacgaactttgtgtgagctccactccgggtcccactgcrtgcactgcctgagccgaggggtcrctccaggtggaaaccccccacatcacagccccacggggaagccagcagtgtaggacccctcccgcccacggcagatcccaaacagtgacccaaatctgccctgaactgccccaaaacgcagctccggtgcgtggctgcgggatgcagcgacacggatcagccgtagtttgggctcaggcagcgacggctccgcgctgaccccaaccttcccccggctctgccccgtggcagtgctgctgctgcactgctg

SEQ ID NO: 2870 - DNA, 550 bp, Chicken  19866894090126_5
agctgctttggaagcagagtgttttccacggaggtacctygtgagacggagcagctctgagtgctgtgcagccacagtctgacatccttcccaggtagcgtcagagtaaccccacgtccagcactgcaaccaggttggagtggaaaggagcagagctttgcatctstttgtgcacctcacacgaaaactgcccatctgcagctccgagtgaygcagctttgggttcctctctcccaccacgaactttgtgtgagctccactccgggtcccactgcrtgcactgcctgagccgaggggtcrctccaggtggaaaccccccacatcacagccccacggggaagccagcagtgtaggacccctcccgcccacggcagatcccaaacagtgacccaaatctgccctgaactgccccaaaacgcagctccggtgcgtggctgcgggatgcagcgacacggatcagccgtagtttgggctcaggcagcgacggctccgcgctgaccccaaccttcccccggctctgccccgtggcagtgctgctgctgcactgctg

SEQ ID NO: 2871 - DNA, 600 bp, Chicken  19866894090128_1
catacacataagtgcaagaagcgattgtatgcatgtgcccccctcccctccgacacctgcagtactacagggacaacgctgcttttgagccaggatgcttttattgaaaagaccccgccacagggagttgcttaccctgtcccttcccaatccagtcctgcagcaggagctgaacagcacctggaagtgagagtcctgaaagtgctttgctgggaggtttattcctggaagacgctggatcctgtgatgcttgagtccagggctgcagagccagcgcccggctcggtgaccagccacagrgcagagcacggagggaagagcagcagccagggcaccaggcacggcctctgtggcagcggggctcctcgtgtcaccctgcatcccctgcctctggcaagagagcatggctgggccagacctcagcctcggatacagcacgcatcccgccaatccagccaggctggctgcattatgcatgcagtgcacgcacagtgagccctgagggagaagtggcagagccacagcagtgcgccggccagacccgttcccatggctctgtgagcctcgcctcacccacgggactgacgctccctgccctgc

SEQ ID NO: 2872 - DNA, 600 bp, Chicken  19866894090142_1
acaggaatgcacagaagtgacagacattggacattcatttacttacttttgtgcatcagaattgccgccaggttattcagcaccatgtgctcctcagggtgttgtgtcacctttgccagttcagctgccctcttcacatgagagtatgcctcatcatagtgcccttgagcatccaatacagttgctaagtcattcatgaggaccacagtctgcagcaggacagaaaaggaatcctcagagcaaaacttgtatagaactttgagtcaacagcagcaccccactcatatattacattaacaraagtgcttcgtagtgaagcttttagtaaggaagtaccttacctatatattaacatgatacatgctcagtgttcctggcaggaaaacagtactgtctatattcaatgccagctaagctgcttttaaggctactgccttcccctgttccatccctcacaaccgttatgcctttctttcctcactactcccactgtacacattacctgtggatgagtctctccctgaacatcatttgatatctgcagagccttctcatacattttttgggccactgagagctggttaatgtctagcagatagc

SEQ ID NO: 2873 - DNA, 600 bp, Chicken  19866894090143_1
ctatttcaatattagattctaactggtgacagcattaagaaaaagccacactgtttaacacgcacatcatagcagccttgagcgttcctttctcagagatttataagtgaattcagaaaaagctcaaaagcacagagatgttgaaactcaaactggattaactcctaaggagggacttacaactaacagaacctgcactaacagttctgccctcatcactgagcctacaatgaagacgctgctgccctcaaatactgtttcctgcttagatccacctaactaaaatccacacaatttagrattccatccccagaaggcaatactctagaccaattctcatatcatgctgttttcataatgaaaaagcaattgaatagttctagtgctcaaaaatttggtggctgctttttacaaaattccagaactattaaaaaaaaaaaagaagttagagtacctggctctagaaagttaaatataaaattccacttcgaaaaagaatttcaaatgaggctacttgcaagatatagagctactggaaaatccaacaaagggtcatcaagatgatgaagattcaagaccattgggaccagatgaccctta

SEQ ID NO: 2874 - DNA, 600 bp, Chicken  19866894090143_2; identical to SEQ ID NO: 2873

SEQ ID NO: 2875 - DNA, 600 bp, Chicken  19866894090143_3; identical to SEQ ID NO: 2873

SEQ ID NO: 2876 - DNA, 600 bp, Chicken  19866894090144_1
tgaaagcttgcagcagtttcttaacagcagttattgagaaaaggctgactgcagcttattccttctgagcatctgagcagaacctaacaacagtaattaaatcccactaaattggtaacgataccagactgctggagatgaaacgctgcgtatcgtcccacccttcctggtgcatttctgctaggtcagtgcagcctgctcttggaatccagctccacgtgtcccttcctgaagtctgccagcaaagaacagcacccaggcgttctgctcacaaagcccaggaaaaaataaagcctcggrgttaatgcagctgataggtttgtggattctgctcttctcagaggggtgtactgtatacaatgacacaggaggaccggtggataatgaacaaggaagagcatgctcccactttggtgggacaactgctttaaatagatactgttgcatctctgacaatgtatcgcctgcatgctcaactacattttcgtaaataaatcaggaaaaaaaggaaaaaatctacaatcaagatctttcaatgcagcacctcacagttattgcaaggaaacttctgcaagaagtgatacataaagtgtaattgaa

SEQ ID NO: 2877 - DNA, 600 bp, Chicken  19866894090145_1
agttagaggctctgctttgtctgtcaggaacttcctctctcctactactactgcgtctgcatgactaaaaccgaaaccacttcagcgtcctaattggcctctttgagctgaactgctgagatgtgatggattctgcagaattacggccccgtgttacttcatgcaggggcagaggatgagcctgcatctttcccactgctcacgaggattactgctccagtcacctccagcatcctgcttacagtgccagcagagaccgcccaacctgtgcacgggagcacggggtgcaagcagcagggygtcrggcyggagctgagtcttctgttcatcattcagtttcccagcttggagcagagcctctgccggcccagcagctgctgatggtgttggagggcagcagtgagcaggtgggaggtgctggtggcatcctgcagcaggactgggaggggaaggggtgttggtacccagctgccccccgccctacagcctgctgcgtccgaccccacgctggtttggtgcccagctccttcctgccccaggatctgctgctcccgaccccacactgacctggcactgctgctgttgacgcgcaccgtgcat

SEQ ID NO: 2878 - DNA, 600 bp, Chicken  19866894090145_2
agaggctctgctttgtctgtcaggaacttcctctctcctactactactgcgtctgcatgactaaaaccgaaaccacttcagcgtcctaattggcctctttgagctgaactgctgagatgtgatggattctgcagaattacggccccgtgttacttcatgcaggggcagaggatgagcctgcatctttcccactgctcacgaggattactgctccagtcacctccagcatcctgcttacagtgccagcagagaccgcccaacctgtgcacgggagcacggggtgcaagcagcagggygtcrggcyggagctgagtcttctgttcatcattcagtttcccagcttggagcagagcctctgccggcccagcagctgctgatggtgttggagggcagcagtgagcaggtgggaggtgctggtggcatcctgcagcaggactgggaggggaaggggtgttggtacccagctgccccccgccctacagcctgctgcgtccgaccccacgctggtttggtgcccagctccttcctgccccaggatctgctgctcccgaccccacactgacctggcactgctgctgttgacgcgcaccgtgcatccat

SEQ ID NO: 2879 - DNA, 600 bp, Chicken  19866894090145_3
gctctgctttgtctgtcaggaacttcctctctcctactactactgcgtctgcatgactaaaaccgaaaccacttcagcgtcctaattggcctctttgagctgaactgctgagatgtgatggattctgcagaattacggccccgtgttacttcatgcaggggcagaggatgagcctgcatctttcccactgctcacgaggattactgctccagtcacctccagcatcctgcttacagtgccagcagagaccgcccaacctgtgcacgggagcacggggtgcaagcagcagggygtcrggcyggagctgagtcttctgttcatcattcagtttcccagcttggagcagagcctctgccggcccagcagctgctgatggtgttggagggcagcagtgagcaggtgggaggtgctggtggcatcctgcagcaggactgggaggggaaggggtgttggtacccagctgccccccgccctacagcctgctgcgtccgaccccacgctggtttggtgcccagctccttcctgccccaggatctgctgctcccgaccccacactgacctggcactgctgctgttgacgcgcaccgtgcatccatccca

SEQ ID NO: 2880 - DNA, 600 bp, Chicken  19866894090145_4
ttctgttcatcattcagtttcccagcttggagcagagcctctgccggcccagcagctgctgatggtgttggagggcagcagtgagcaggtgggaggtgctggtggcatcctgcagcaggactgggaggggaaggggtgttggtacccagctgccccccgccctacagcctgctgcgtccgaccccacgctggtttggtgcccagctccttcctgccccaggatctgctgctcccgaccccacactgacctggcactgctgctgttgacgcgcaccgtgcatccatcccagtggctgtgcrcagaaggctgtgaggcacacgtagctcatttcattcagatggatgtgaggcacacgtaggcagagctgctgggcctgagttgggcacaatcacttctcacagyggggtgagcgcaggcacagagtgctgctcgcaggcagcgcgcagccaaccgcagagctgtttgcattcgggtctctgatagagcatcggtgttttctttccggtaggttttatgagtctgtagttggaagttggagtttgtggctgctgagcccaagcactgagtgctctgtggggcgctcggttcttcgatgggat

SEQ ID NO: 2881 - DNA, 600 bp, Chicken  19866894090145_5
ggcatcctgcagcaggactgggaggggaaggggtgttggtacccagctgccccccgccctacagcctgctgcgtccgaccccacgctggtttggtgcccagctccttcctgccccaggatctgctgctcccgaccccacactgacctggcactgctgctgttgacgcgcaccgtgcatccatcccagtggctgtgcrcagaaggctgtgaggcacacgtagctcatttcattcagatggatgtgaggcacacgtaggcagagctgctgggcctgagttgggcacaatcacttctcacagyggggtgagcgcaggcacagagtgctgctcgcaggcagcgcgcagccaaccgcagagctgtttgcattcgggtctctgatagagcatcggtgttttctttccggtaggttttatgagtctgtagttggaagttggagtttgtggctgctgagcccaagcactgagtgctctgtggggcgctcggttcttcgatgggatgtgctgtgtttgatccttttcggtctccttttcagacctgctcttattttagcatctgtatatttactgggattattactgcgtttcctagggcagtattttt

SEQ ID NO: 2882 - DNA, 600 bp, Chicken  19866894090145_6
tgtgctgtgtttgatccttttcggtctccttttcagacctgctcttattttagcatctgtatatttactgggattattactgcgtttcctagggcagtatttttagctttttccttggttcctgcgctgctgctgagatcccagccgtggcatttcctgctccgtggtaaaaaccctgctaatattttccatgcaggtgtgctggcgttggatggggatgcagggaaaggcagagctctgcgtttggctgtgggtgcattgctcagcattgatgccgagcggggccgcctcgtcccaccrccactgggatctcaggagcagctgagattgtgcttttccagcagcctgatggttttgaacgtgtcagcttgtaacctctaaagatctgaatgaaatcatgcgtgagtcattattggttttgcatggtgagagctcrgtggggctgagcatttgtcaggccaccgagctgcgcagcagcgctccgtcgatagcgaatgttctctgttgagggatgtatggcggtccgtgaaggagctgcaggaatggttggaagcggggagaaaatccctcggggagatgggaggagaggggaagagagcg

SEQ ID NO: 2883 - DNA, 600 bp, Chicken  19866894090145_7
gatcccagccgtggcatttcctgctccgtggtaaaaaccctgctaatattttccatgcaggtgtgctggcgttggatggggatgcagggaaaggcagagctctgcgtttggctgtgggtgcattgctcagcattgatgccgagcggggccgcctcgtcccaccrccactgggatctcaggagcagctgagattgtgcttttccagcagcctgatggttttgaacgtgtcagcttgtaacctctaaagatctgaatgaaatcatgcgtgagtcattattggttttgcatggtgagagctcrgtggggctgagcatttgtcaggccaccgagctgcgcagcagcgctccgtcgatagcgaatgttctctgttgagggatgtatggcggtccgtgaaggagctgcaggaatggttggaagcggggagaaaatccctcggggagatgggaggagaggggaagagagcgcagcgtgcgatgtgtgcagggaagggagcgctgctggcgtggggagaagtgtggtaggtgggagggctggaaggggacggccgtcctgcggggcggggagaaaaacccatcattttcaggaagaaaaaacccatca

SEQ ID NO: 2884 - DNA, 599 bp, Chicken  19866894090146_1
  misc_feature (1)..(152): n is any nucleotide
nnnnnnnnnnnnnnnnnnnnnnnnnnnnnnnnnnnnnnnnnnnnnnnnnnnnnnnnnnnnnnnnnnnnnnnnnnnnnnnnnnnnnnnnnnnnnnnnnnnnnnnnnnnnnnnnnnnnnnnnnnnnnnnnnnnnnnnnnnnnnnnnnnnnnnnnctttctcctccctaaggtgaagatatagcttgtgtctctgtggcttttactcagacacaaagtgtgcttgtttgcactcataagaagattttcaagagttcataactctatagctgcaaagcggactctgtgagtgaggaacatgtayctgctgtgtgttccaggtgttgcctcctcctgcccaccccaactgtttagttgaaaacccaaaagattttccttatgttggcaaccccatgaccctggtatgcatttacttactgcagggagatgccttttaatgttcattaacagatggtctcttcttttgacatttagctgtgggaaggtctgcaggcatttcacagtccattgtgcatttgatgcagtgttcagtaacagtagtgaaaatgcagagcaatattgttctgggtttgttgttcaacatcttttcttgttattatttta

SEQ ID NO: 2885 - DNA, 600 bp, Chicken  19866894090146_2
tcagtaacagtagtgaaaatgcagagcaatattgttctgggtttgttgttcaacatcttttcttgttattattttattttattttattttaatcgttattattatttttagcatcagccatgggactgggtgtagtgtttccacattgttcattattgctacatgttgccctaccccattcagtgtttctatttatttttgtatctttgcatccatcaaccacattagcctctttaataacaacaggagctcctagtgtgatgcttggatatgtgtctatgaggacctctctatcctttytggtttccttacttcttaacttcacggtcctctgatttgcaaacctacttgcatttcttatgactagatagatacatctgcattcagatgtcttaagagtgttttggctggaatgagctcagcttgacaaattattgagataactctgtgtgatatcctttctattgttatttaccatgctactaaaccatgtaatccattaattttattgccgaggatgtgcttatttccaggcagccaataaaactaataagtgatatagagcataattccagtctctgtgaactgcacaaggagtat

SEQ ID NO: 2886 - DNA, 600 bp, Chicken  19866894090147_1
gctgcattagataggaagatttgagtttatttaaaaaataaaaaactgttcatcttctttgttggtttccaagtagtgccattctgtatatatgtgcttagtactttcgatttgagagttaagctgcttttgttgtgtttggcttgcatcactgcatgtctcagctttcagggtttgtgtaaaggtagaacaaaaagccccaccagagaattaggttatgttctatatactggcagaggtctatttgattctgtctgcatttgattttggaatgaatgttcatttcttgcttcataagaytatctgtrtgtaaagcattctgcctgagttgggtacttaacatatatcttgcctgttaggaaacttcaggctctgcttaagttttgatgtataaccatggaattaatgtaacagttctgaaagttgatatctgaaacagcttagtctccaaatagatataccttgaaactgccattagaattccagaaaacttgtatctttatgtgtcgatggtttacggtctggtccagcccggttccgtgactagtggggtggagggatttttttgcaaaatcctcacatccggaaaagggaaacagg

SEQ ID NO: 2887 - DNA, 600 bp, Chicken  19866894090147_2
agataggaagatttgagtttatttaaaaaataaaaaactgttcatcttctttgttggtttccaagtagtgccattctgtatatatgtgcttagtactttcgatttgagagttaagctgcttttgttgtgtttggcttgcatcactgcatgtctcagctttcagggtttgtgtaaaggtagaacaaaaagccccaccagagaattaggttatgttctatatactggcagaggtctatttgattctgtctgcatttgattttggaatgaatgttcatttcttgcttcataagaytatctgtrtgtaaagcattctgcctgagttgggtacttaacatatatcttgcctgttaggaaacttcaggctctgcttaagttttgatgtataaccatggaattaatgtaacagttctgaaagttgatatctgaaacagcttagtctccaaatagatataccttgaaactgccattagaattccagaaaacttgtatctttatgtgtcgatggtttacggtctggtccagcccggttccgtgactagtggggtggagggatttttttgcaaaatcctcacatccggaaaagggaaacaggggcccccc

SEQ ID NO: 2888 - DNA, 600 bp, Chicken  19866894090149_1
attgacgattactgtctgaatttaaattccacctctctgctatcagcagcagaaataacgggaattttatttcttacagcttactgtacaatgtgttctttctgatcacatattttcacaaatatttgcagttcagaaattgaaaatattctccctaatagtccagaaaagacattttttaaacctttattcatagccaaataagaggttgaaaatggcatatttagggcatacagtaattaagtctcaaggaaaacaagtatgggagtactttttaggacggctgtaggattgactggrgagaaaactgtagtccggtaattgcaatttattatcaattcaggagactatatttggctacggtgtctgtaatgcattttaaaatgaatttactgctgatgtaaactgaaaaatgcatccaattgaattatacattttctgataggtgaagcaattttgtacaattcttgcgaaagatgaaatacgacacaccgatgttgttggttacaaaagtactgcagtgtaagaaagtgactgccgtgcagggaagagttctccactcatttatatctacagggaaaattaattaaagttgcccct

SEQ ID NO: 2889 - DNA, 600 bp, Chicken  19866894090149_2
gcgaaagatgaaatacgacacaccgatgttgttggttacaaaagtactgcagtgtaagaaagtgactgccgtgcagggaagagttctccactcatttatatctacagggaaaattaattaaagttgcccctgtgaagctgaacgcagtttgctgctctgcctggatatatttttaaacacaaataatccgtgtttcagctccattttagaaggcagagaagttcctggcatcaaagtttcttcttcagattgattcgctggattggattgcctttcctcatgtaatcagactgatacacrtccygagttcctrcgcaaaggcattatatgaagatggaaagatgtaaattcacttgaaggagacgaccaaattaacagtgcatcagcaagcaaaccacaccgtgactgcttacaatctccctgcacacatcgcccgttaaggaacattcagcagcattaataatcaaatgttaactgaaaaagctagacaagctattggatatttggcatggccaattgatgttcgttctgctcaagcgtttgtgaaataaacatttatcctctggtggatggtgatgttaattacttggcattccagag

SEQ ID NO: 2890 - DNA, 600 bp, Chicken  19866894090149_3
aagatgaaatacgacacaccgatgttgttggttacaaaagtactgcagtgtaagaaagtgactgccgtgcagggaagagttctccactcatttatatctacagggaaaattaattaaagttgcccctgtgaagctgaacgcagtttgctgctctgcctggatatatttttaaacacaaataatccgtgtttcagctccattttagaaggcagagaagttcctggcatcaaagtttcttcttcagattgattcgctggattggattgcctttcctcatgtaatcagactgatacacrtccygagttcctrcgcaaaggcattatatgaagatggaaagatgtaaattcacttgaaggagacgaccaaattaacagtgcatcagcaagcaaaccacaccgtgactgcttacaatctccctgcacacatcgcccgttaaggaacattcagcagcattaataatcaaatgttaactgaaaaagctagacaagctattggatatttggcatggccaattgatgttcgttctgctcaagcgtttgtgaaataaacatttatcctctggtggatggtgatgttaattacttggcattccagagcaga

SEQ ID NO: 2891 - DNA, 600 bp, Chicken  19866894090149_4
tacgacacaccgatgttgttggttacaaaagtactgcagtgtaagaaagtgactgccgtgcagggaagagttctccactcatttatatctacagggaaaattaattaaagttgcccctgtgaagctgaacgcagtttgctgctctgcctggatatatttttaaacacaaataatccgtgtttcagctccattttagaaggcagagaagttcctggcatcaaagtttcttcttcagattgattcgctggattggattgcctttcctcatgtaatcagactgatacacrtccygagttcctrcgcaaaggcattatatgaagatggaaagatgtaaattcacttgaaggagacgaccaaattaacagtgcatcagcaagcaaaccacaccgtgactgcttacaatctccctgcacacatcgcccgttaaggaacattcagcagcattaataatcaaatgttaactgaaaaagctagacaagctattggatatttggcatggccaattgatgttcgttctgctcaagcgtttgtgaaataaacatttatcctctggtggatggtgatgttaattacttggcattccagagcagaaataactaa

SEQ ID NO: 2892 - DNA, 600 bp, Chicken  19866894090149_5
gaagatggaaagatgtaaattcacttgaaggagacgaccaaattaacagtgcatcagcaagcaaaccacaccgtgactgcttacaatctccctgcacacatcgcccgttaaggaacattcagcagcattaataatcaaatgttaactgaaaaagctagacaagctattggatatttggcatggccaattgatgttcgttctgctcaagcgtttgtgaaataaacatttatcctctggtggatggtgatgttaattacttggcattccagagcagaaataactaaaataaagccagagttkacaaggaaactacagagttacatgttggtaatgctaggccttggtaaatttttggtgaaaacttattcaccagaaagtgaggctttgtgtgatacaactctcaaatgccagccttctttggcattcttttccctacaataagcaaaactgatgcaaactctgaatacctctgaatgtggctcttcaaaaagtgaacgcatgcccaaatgttcttctctagccatagtaatcagtcaggactgggcatacttttttttcaaaacaagtctgtataacctgtgatctctggaaagccacact

SEQ ID NO: 2893 - DNA, 600 bp, Chicken  19866894090150_1
tttctatctgtcagctaaaatgacacaaacattcctcccaggagttgcttcatatacagtccagtttatacagcttttcaggtgcagaacatattgagtcttttgctttctttttctaataggtgctaggcagaccatcacaaaacataattcagctagatatcaaaacctctcatcttctggatgtagacacatgactggttcagactagccttcaatacagaggaaaagacagagtaacttggaagtagctgctttttttttttattaaatcagagaaggtcttgccaaatctgctaygctcacaaagaaaaagaaaagctctgaagtgacactctttacctttgcattgtaaaccttgtctcaaaagaccccagagcaatgaaccacagtggtcacagaaggtgggcactttgtaattgtgaatgctaaatttgtgaggcatgttgacactgaaacgctgagatcccacttgctgaaaaagaagagcacaacacaattcattctaattaatcattttatacccagtgtacaacaaggccttttatgtattgaaaccacacagaattaaaaaaaaatgaaatagccatatactcaaaa

SEQ ID NO: 2894 - DNA, 600 bp, Chicken  19866894090152_1
gattactgtaggaaaacttctctgtaactactaaaacttgaatccaactcattttaccaccacttcatcacagaagcttcttattcaacagcattccgacttctgtcaccactggaaacccataacctaacagctggaataatgttatttttttctttgttgcatcacaatagtaacttggagtctttacatactaccctcccttctacatccttccttctatctgagtggtattccatcatctatgcttctagtaggtatgacttccccctatacagctaataacttcttattagtagrtattgtgtgcatagtcttgcactattcccactagattttatctcattcataggaattcatctaatttatcctggaaacttcctccctgtcactggccccacaaacccttatgtcgataaacatgaataacttggcccctcttcttgcaactggttcaacagacagaatactgaacaagtgattgctaggtctactttgataattctgcctgcaatttctcttcagcctgatacttctgagggatttaggctccccatattttcttagctagatactcctgttaaagaagggcagtaaatt

SEQ ID NO: 2895 - DNA, 599 bp, Chicken  19866894090153_1
  misc_feature (1)..(106): n is any nucleotide
nnnnnnnnnnnnnnnnnnnnnnnnnnnnnnnnnnnnnnnnnnnnnnnnnnnnnnnnnnnnnnnnnnnnnnnnnnnnnnnnnnnnnnnnnnnnnnnnnnnnnnnnnnaagagatgggtctgtcagaagtgttcagcaagtggcctgtgtaacagccagtcaatacaactcaccggtgtggctgtctgactcctcaccatcatcacctgtaatatccatgcagctaaagatatttggatctttctttttttcttctttcaggtctaactttacaacttctacttgagtatgaggaggaagcygagcttccttctgtttctttctgacttctaacatgtacagatttgccatcagaagcaatgtgactgcccagctagtgagtaggatcaggctttagcctccacctttygctctgttggcycaataatacaaagaagcttaggcagaagggtttatttgaagaaagagtgaaaggctcctacccaccaccacctcttttcatgctytctttcctctttcccttacagtattccccaaagcatgggcccagctctgtgtctgttgcttgctaggggtgactgcttgactagaaatgtagaat

SEQ ID NO: 2896 - DNA, 600 bp, Chicken  19866894090153_2
agagatgggtctgtcagaagtgttcagcaagtggcctgtgtaacagccagtcaatacaactcaccggtgtggctgtctgactcctcaccatcatcacctgtaatatccatgcagctaaagatatttggatctttctttttttcttctttcaggtctaactttacaacttctacttgagtatgaggaggaagcygagcttccttctgtttctttctgacttctaacatgtacagatttgccatcagaagcaatgtgactgcccagctagtgagtaggatcaggctttagcctccacctttygctctgttggcycaataatacaaagaagcttaggcagaagggtttatttgaagaaagagtgaaaggctcctacccaccaccacctcttttcatgctytctttcctctttcccttacagtattccccaaagcatgggcccagctctgtgtctgttgcttgctaggggtgactgcttgactagaaatgtagaatagcaccaacttacagtaagtcttctgcagagtttcaaacagatatgtttccaagtgacactaaacggatgccctgcaaaattaccgatttgaaagggggagtgaagca

SEQ ID NO: 2897 - DNA, 600 bp, Chicken  19866894090153_3
gtcagaagtgttcagcaagtggcctgtgtaacagccagtcaatacaactcaccggtgtggctgtctgactcctcaccatcatcacctgtaatatccatgcagctaaagatatttggatctttctttttttcttctttcaggtctaactttacaacttctacttgagtatgaggaggaagcygagcttccttctgtttctttctgacttctaacatgtacagatttgccatcagaagcaatgtgactgcccagctagtgagtaggatcaggctttagcctccacctttygctctgttggcycaataatacaaagaagcttaggcagaagggtttatttgaagaaagagtgaaaggctcctacccaccaccacctcttttcatgctytctttcctctttcccttacagtattccccaaagcatgggcccagctctgtgtctgttgcttgctaggggtgactgcttgactagaaatgtagaatagcaccaacttacagtaagtcttctgcagagtttcaaacagatatgtttccaagtgacactaaacggatgccctgcaaaattaccgatttgaaagggggagtgaagcattctgcttgttc

SEQ ID NO: 2898 - DNA, 600 bp, Chicken  19866894090153_4
ctgtaatatccatgcagctaaagatatttggatctttctttttttcttctttcaggtctaactttacaacttctacttgagtatgaggaggaagcygagcttccttctgtttctttctgacttctaacatgtacagatttgccatcagaagcaatgtgactgcccagctagtgagtaggatcaggctttagcctccacctttygctctgttggcycaataatacaaagaagcttaggcagaagggtttatttgaagaaagagtgaaaggctcctacccaccaccacctcttttcatgctytctttcctctttcccttacagtattccccaaagcatgggcccagctctgtgtctgttgcttgctaggggtgactgcttgactagaaatgtagaatagcaccaacttacagtaagtcttctgcagagtttcaaacagatatgtttccaagtgacactaaacggatgccctgcaaaattaccgatttgaaagggggagtgaagcattctgcttgttctttgaagcagaacaaccctctggctcatggaccagcagtaatgaatggagtcacatagcatggcatataatcgccttctcctttt

SEQ ID NO: 2899 - DNA, 428 bp, Chicken  19866894090157_1
taaacaacctccattataatgtttgtatgctccaagtatctctgcctctcttgcaatttatcttgctcaaaagaccagagaaaagaagtgacaagctgcactgagcactcatctcggtgcaatatttttgcattataaatacagcatggttgcatttctacctttctttctcacaacccagtgctttggcttgcttggtgtgaatggagctgggaagacaaccatctttaagatgctgacaggagatatcggagcatccagcggaaggttgcaggtccaggatcattctgggtatgcaaratgtgatttcaggggaaggcacataagctaatcagcctgagaatgggtttataaggctggatggcgaaggaaaggaaatatgaaggtttgaaacaaagccaaacatgcaaaacagcaaaaataaataa

SEQ ID NO: 2900 - DNA, 599 bp, Chicken  19866894090167_1
  misc_feature (1)..(38): n is any nucleotide
nnnnnnnnnnnnnnnnnnnnnnnnnnnnnnnnnnnnnngaaggggtggtgagctgagcaaatcccgcagttgttttatgattacaatagaatggaggaccgtggtccaacaatgacctggtgatggacaaggagctgagcaggcagccctgaaacacgtgggtgttttatttccgtctgccagaggacattcatgccaacaaatatatttggcttctgcatatttcaggtattgcattacatgaccattctttgacatccatgcagctcttaaaggaaaagaagtttaccctacagatayttctatttatccaactccaaaactgtttggtgaggattctgtttgtttgcgttacttaatagttatttccagaagaaacatttctgtttgcttaatgaaggtttttttgtagttattgagctaattcagtagcttcactcaaaatgaatgcatctgcctgctggtcwatcatttatttaacaaaaccttaawatttttcagtyccattggatagtgtttatcaaggcactcgctctgcttcagaagtgaaagtgttaacccaaagtatatccatttttacatagaaaccaaaggacatc

SEQ ID NO: 2901 - DNA, 600 bp, Chicken  19866894090167_2
tatttccgtctgccagaggacattcatgccaacaaatatatttggcttctgcatatttcaggtattgcattacatgaccattctttgacatccatgcagctcttaaaggaaaagaagtttaccctacagatayttctatttatccaactccaaaactgtttggtgaggattctgtttgtttgcgttacttaatagttatttccagaagaaacatttctgtttgcttaatgaaggtttttttgtagttattgagctaattcagtagcttcactcaaaatgaatgcatctgcctgctggtcwatcatttatttaacaaaaccttaawatttttcagtyccattggatagtgtttatcaaggcactcgctctgcttcagaagtgaaagtgttaacccaaagtatatccatttttacatagaaaccaaaggacatctgaatttggtctctcgctcatcctcatgtttgcttccatggcttcctccctgatacagggacacctgatagacttccactcaatcaggtggaaagaatagctttctaatttcagagtaggggataatggagatctaaggagatatgtgtgatcagtggctccctatag

SEQ ID NO: 2902 - DNA, 600 bp, Chicken  19866894090167_3
atgccaacaaatatatttggcttctgcatatttcaggtattgcattacatgaccattctttgacatccatgcagctcttaaaggaaaagaagtttaccctacagatayttctatttatccaactccaaaactgtttggtgaggattctgtttgtttgcgttacttaatagttatttccagaagaaacatttctgtttgcttaatgaaggtttttttgtagttattgagctaattcagtagcttcactcaaaatgaatgcatctgcctgctggtcwatcatttatttaacaaaaccttaawatttttcagtyccattggatagtgtttatcaaggcactcgctctgcttcagaagtgaaagtgttaacccaaagtatatccatttttacatagaaaccaaaggacatctgaatttggtctctcgctcatcctcatgtttgcttccatggcttcctccctgatacagggacacctgatagacttccactcaatcaggtggaaagaatagctttctaatttcagagtaggggataatggagatctaaggagatatgtgtgatcagtggctccctatagtttttactctgatctgtttggtgcc

SEQ ID NO: 2903 - DNA, 600 bp, Chicken  19866894090167_4
tatatttggcttctgcatatttcaggtattgcattacatgaccattctttgacatccatgcagctcttaaaggaaaagaagtttaccctacagatayttctatttatccaactccaaaactgtttggtgaggattctgtttgtttgcgttacttaatagttatttccagaagaaacatttctgtttgcttaatgaaggtttttttgtagttattgagctaattcagtagcttcactcaaaatgaatgcatctgcctgctggtcwatcatttatttaacaaaaccttaawatttttcagtyccattggatagtgtttatcaaggcactcgctctgcttcagaagtgaaagtgttaacccaaagtatatccatttttacatagaaaccaaaggacatctgaatttggtctctcgctcatcctcatgtttgcttccatggcttcctccctgatacagggacacctgatagacttccactcaatcaggtggaaagaatagctttctaatttcagagtaggggataatggagatctaaggagatatgtgtgatcagtggctccctatagtttttactctgatctgtttggtgccaacaggsagtt

SEQ ID NO: 2904 - DNA, 600 bp, Chicken  19866894090167_5
agtyccattggatagtgtttatcaaggcactcgctctgcttcagaagtgaaagtgttaacccaaagtatatccatttttacatagaaaccaaaggacatctgaatttggtctctcgctcatcctcatgtttgcttccatggcttcctccctgatacagggacacctgatagacttccactcaatcaggtggaaagaatagctttctaatttcagagtaggggataatggagatctaaggagatatgtgtgatcagtggctccctatagtttttactctgatctgtttggtgccaacaggsagttgaaaccaaaataaatctctccctaacccaaaggtttatctcggtggctcattttcacaatgtgaaatarggtgttttaccacttttatcctaaattcaaagccaaatagaattaaaatggtggaactaagtatattaaaatggactgtgagattagaagttatgcatgctgtgatctcatcttgaataaacataaaaatatctgagtaaaaagaaaggaaattacgatgcctctgagtaaagaacccgaatcatcttaaagcagagtaacatggatcactttgtgatctgcagaga

SEQ ID NO: 2905 - DNA, 591 bp, Chicken  19866894090167_6
atttttacatagaaaccaaaggacatctgaatttggtctctcgctcatcctcatgtttgcttccatggcttcctccctgatacagggacacctgatagacttccactcaatcaggtggaaagaatagctttctaatttcagagtaggggataatggagatctaaggagatatgtgtgatcagtggctccctatagtttttactctgatctgtttggtgccaacaggsagttgaaaccaaaataaatctctccctaacccaaaggtttatctcggtggctcattttcacaatgtgaaatarggtgttttaccacttttatcctaaattcaaagccaaatagaattaaaatggtggaactaagtatattaaaatggactgtgagattagaagttatgcatgctgtgatctcatcttgaataaacataaaaatatctgagtaaaaagaaaggaaattacgatgcctctgagtaaagaacccgaatcatcttaaagcagagtaacatggatcactttgtgatctgcagagatagaacacagctgtgtagcatggtcttggctaatgctacacccccagcacacgagctttcagga

SEQ ID NO: 2906 - DNA, 600 bp, Chicken  19866894090171_1
caacccaagcaaggcccgggagggcacgggaggagtcacggagtggggagaggagggtttttagaaggctttatttggaaagttacacaataggactttgctgtttaaaaaacaacccccagctttaaaaaaataaaccagcgaatccaaagacacgtgaacaaaccagccctgctcgcagatgagccactgccagagcaactccatcctcccattcccggcccaaagcaggcactgcgtggagccccatccttcccagcatgggcacatccccagcgagcggcagcgcagcagccccarcgaggggctgctttgtttgctgcagcgggtcgccaggcrgggacatcccatccctctgccctccctgcagctcgggacaggcacaggggctgtggcagaagtggcacccagcacactccrcgctgttttttygctgcaccccatgagcaggatgggcgaggaagctctgctgccttctgcctccccaagcgtgcgactgcatgtgtgcttgctggagaggacaatgtggcagggtcagaacamagggacagggagcgagctcctcgaggaatgggtttaaggcttgctttgttttccaga

SEQ ID NO: 2907 - DNA, 600 bp, Chicken  19866894090171_2
ggagtggggagaggagggtttttagaaggctttatttggaaagttacacaataggactttgctgtttaaaaaacaacccccagctttaaaaaaataaaccagcgaatccaaagacacgtgaacaaaccagccctgctcgcagatgagccactgccagagcaactccatcctcccattcccggcccaaagcaggcactgcgtggagccccatccttcccagcatgggcacatccccagcgagcggcagcgcagcagccccarcgaggggctgctttgtttgctgcagcgggtcgccaggcrgggacatcccatccctctgccctccctgcagctcgggacaggcacaggggctgtggcagaagtggcacccagcacactccrcgctgttttttygctgcaccccatgagcaggatgggcgaggaagctctgctgccttctgcctccccaagcgtgcgactgcatgtgtgcttgctggagaggacaatgtggcagggtcagaacamagggacagggagcgagctcctcgaggaatgggtttaaggcttgctttgttttccagagcaagggaaggggaaggtcctctcccactgccagcagaa

SEQ ID NO: 2908 - DNA, 600 bp, Chicken  19866894090171_3
agctttaaaaaaataaaccagcgaatccaaagacacgtgaacaaaccagccctgctcgcagatgagccactgccagagcaactccatcctcccattcccggcccaaagcaggcactgcgtggagccccatccttcccagcatgggcacatccccagcgagcggcagcgcagcagccccarcgaggggctgctttgtttgctgcagcgggtcgccaggcrgggacatcccatccctctgccctccctgcagctcgggacaggcacaggggctgtggcagaagtggcacccagcacactccrcgctgttttttygctgcaccccatgagcaggatgggcgaggaagctctgctgccttctgcctccccaagcgtgcgactgcatgtgtgcttgctggagaggacaatgtggcagggtcagaacamagggacagggagcgagctcctcgaggaatgggtttaaggcttgctttgttttccagagcaagggaaggggaaggtcctctcccactgccagcagaatttctccatgtttctgagccacttccaacagcaccttccgcaggacacagtgacagtggtccctggtggctcaggaagtct

SEQ ID NO: 2909 - DNA, 600 bp, Chicken  19866894090171_4
ataaaccagcgaatccaaagacacgtgaacaaaccagccctgctcgcagatgagccactgccagagcaactccatcctcccattcccggcccaaagcaggcactgcgtggagccccatccttcccagcatgggcacatccccagcgagcggcagcgcagcagccccarcgaggggctgctttgtttgctgcagcgggtcgccaggcrgggacatcccatccctctgccctccctgcagctcgggacaggcacaggggctgtggcagaagtggcacccagcacactccrcgctgttttttygctgcaccccatgagcaggatgggcgaggaagctctgctgccttctgcctccccaagcgtgcgactgcatgtgtgcttgctggagaggacaatgtggcagggtcagaacamagggacagggagcgagctcctcgaggaatgggtttaaggcttgctttgttttccagagcaagggaaggggaaggtcctctcccactgccagcagaatttctccatgtttctgagccacttccaacagcaccttccgcaggacacagtgacagtggtccctggtggctcaggaagtctctgctgcccaca

SEQ ID NO: 2910 - DNA, 504 bp, Chicken  19866894090171_5
gccccatccttcccagcatgggcacatccccagcgagcggcagcgcagcagccccarcgaggggctgctttgtttgctgcagcgggtcgccaggcrgggacatcccatccctctgccctccctgcagctcgggacaggcacaggggctgtggcagaagtggcacccagcacactccrcgctgttttttygctgcaccccatgagcaggatgggcgaggaagctctgctgccttctgcctccccaagcgtgcgactgcatgtgtgcttgctggagaggacaatgtggcagggtcagaacamagggacagggagcgagctcctcgaggaatgggtttaaggcttgctttgttttccagagcaagggaaggggaaggtcctctcccactgccagcagaatttctccatgtttctgagccacttccaacagcaccttccgcaggacacagtgacagtggtccctggtggctcaggaagtctctgctgcccacattcaggacagacgta

SEQ ID NO: 2911 - DNA, 600 bp, Chicken  19866894090173_1
caggctgcagcagcacttatatggtgctgaccatgtcctggaggcccagccagcccctgagctctgcatgcagttgtgtgcctcttgtccatgtccctgctactcccccataacagcatcttgcccatttggccccacacgggtgtttgtgtgagctgaagcctcttgctgagtgctggggctgtagctgtgagctgggcagaagtgtgcaatgcatgtcatggaagaaaggctttcaggtggtgctctcaccacttttcattcaattgtacctggagcatgttcaaacctaccagggcrctgcaaacctagatgaggtacagagagtcaccttgagttacacacagtcctttctgttgctccagccttgagaccagaatgaactactgatcaggaactgctgcaagaagcctggatgttctggttatggaacttatttctttttttcctaaaagcgtctggtttattttaagagtcccagtagaacatctaggtcccttgagaacagctagcaataccacttatagccaaaatacagaacatgaactttggaatggaagatactgagcggtcagttcaggtcccccaattttgttccaa

SEQ ID NO: 2912 - DNA, 600 bp, Chicken  19866894090174_1
ctgtgagggtggtgagacactgaaacaggttgcctagcaaggctgtggatgtccctccctggaagcattcaagaccaagctggatggggctttgagcaacctggtctagagggaggtgtccctgcctatagcatgggggctggaactacacggtcttaaaggtcccttccaacccaaaccattctatgattcattctatgattctgtacctcacttcaagacaacctacttgtgtcacactcaaatgtctctgtgaccaaaaaaaaaaaaaaaaaagtgaaatcactgattagcagttgytgcatgaagctgatattaggcaattacttttctgtacatcacagagattagtccatgcataattccagtgtttctccctgctcttatcctatttctcactgtcacacagcttggttggctttggccaactatgttctkctccagcttgagttagtcctagccagttgatagtcacctcttgtgttcatctttcccaatcaattaatttgagctagtcaaaattgtctcttttattatcttacatactttatcatatccaattccatttgtcagaaaaaacacttgaaggaaacagaagat

SEQ ID NO: 2913 - DNA, 600 bp, Chicken  19866894090174_2
gctggaactacacggtcttaaaggtcccttccaacccaaaccattctatgattcattctatgattctgtacctcacttcaagacaacctacttgtgtcacactcaaatgtctctgtgaccaaaaaaaaaaaaaaaaaagtgaaatcactgattagcagttgytgcatgaagctgatattaggcaattacttttctgtacatcacagagattagtccatgcataattccagtgtttctccctgctcttatcctatttctcactgtcacacagcttggttggctttggccaactatgttctkctccagcttgagttagtcctagccagttgatagtcacctcttgtgttcatctttcccaatcaattaatttgagctagtcaaaattgtctcttttattatcttacatactttatcatatccaattccatttgtcagaaaaaacacttgaaggaaacagaagatgaaagtgtggagaggaaacgtaactcttcatctagttgactgtagagaaagcaagcctcagattttacttagaatcactgaatcatagattcattaaggttggaaaagacttctaagatcatctagtccaaccatcca

SEQ ID NO: 2914 - DNA, 600 bp, Chicken  19866894090178_1
agttattctttctttctttcacctatgaaaggaatacttatttaatgtcagctcctgtcctgactcttacaggcagtgttctctctccttcatagttgatctggttattaagctttaagtggtagctactgaaagaccacagaagctattttggaaagcaagcttgaaaagtttgtttccttgagaaaagaggtagggaagattctaatcctagcatagcatagaacgaaaaaatatatgggaaatttcactgtttaaatatgctaaaatacaagaaagtatgaacaccaaggcttaaaytcccattcatctttctcatgcaagaaacatgatcacaccaacatttttgatcctatcttaaacatcttactcatagctgcagtctcagcactatgcagctcacaatttaatcactgcagcgttcagaagaacctctgtctttcaacatctgagtgtttagctgtctacatttgtgatcgttcctttgctgtaggctaggagacatcagaaaaggagatggatccctccgagcacacagtaaacacttggtgaatgaaaagacacatgacacaacattttgttaaggcatttacagcaagt

SEQ ID NO: 2915 - DNA, 599 bp, Chicken  19866894090182_1
  misc_feature (1)..(46): n is any nucleotide
nnnnnnnnnnnnnnnnnnnnnnnnnnnnnnnnnnnnnnnnnnnnnnacttgtcgagcactttctgcttgtcctggtcactgatctttcccttcagtttctcatcctccactgtctgcttcatgttgtaagtatacgactcaagggagttcttggctcccaccctatctctgttggcttcatcctctgctttgtatttctctgcttcttgtaccatacggtcaatatcatctttgctaaggcgacccttgtcattggtgatggttatcttgttctccttccctgtactcttgtccacagcrctgacgttcaggataccattagcatctatgtcaaaagtgacctcgatctgaggaactccacggggtgccggggggatgcctgttaggtcaaacttgcccagcaagttgttgtcctttgtcatagccctctcaccttcatacacctggacgaggacactgctctggttgtctgagtaggtggtgaaggtctgtgtttgtttggtgggaatggtggtgttacgcttgatgagagcagtcatcactccaccagctgtctcgatgcccagggacaggggggtgacatccaacaggagcagatc

SEQ ID NO: 2916 - DNA, 600 bp, Chicken  19866894090185_1
tgaaatgttttgacatatctacttgatgttgaaaagcaagaaaggaatgaacgataaatttaaattggaatatgtcttatttggttcccaaagtcaaattcttaaatttacctaaacaagatttcttagatattgtatgtttacaaattgaagtaactttttaaatttttataaattattttgattcttatacgcaatatactgagaagtatttcccatgaagttcttcactccctggtaaagcacagtatctactgttgatggcagatgtgatattgttaaatcattcagaaattcttmagatacatcaagtccattagtatcttacacgtactgggatttctaaaaataagttattcctgacgtatcactcaatgattgttgaccttctattgctaataataatggtcaatatgcttccaaaataataaacattaagatttcacattcactctactcaattccaactgtgttaaatataatttttttatattttattatagacccaaaatctgctctcttttgctgggctcttattaacagttcactttgcaattagcctcgtagaactcagtgacgcatgcagaacaagattcagcc

SEQ ID NO: 2917 - DNA, 600 bp, Chicken  19866894090185_2
cactggttatgtatgatcaccagttacagggacaggaaaatctctacaacacctataccttaatttttttttttattttccccctatgtgtatgtgtgtgtttgtgtggctgttcagttttttgctttcagaaaaagcaaataaaatattgtttctattttgaagattcaaaaaatcattacaaataaggtgttcacagacaaaatagtctgagtgcagacattatttttgctttataagataaaacaagtctacctagaaataataaatgtggctaaaatttgttgaaatatcatgcaygtgagcttgattttaaatctgtgagtgaatttcatgctgagactactccatcctcttatacgcttatgtttaaaacaacccttcaagtataattcttgttagtgtacatccaacaatatcatggtgtgatgttcatcttatctttgtccttaaaaagctggccctgtgttcactgagctcacagaaaatgacttacccagagatgtacatatttcctatataacagggcagctcctgaacatatgttgaatgttaaaagtacttttcagtgggaattagttactcatttataaataaact

SEQ ID NO: 2918 - DNA, 600 bp, Chicken  19866894090187_1
gcctttagattcagaactgcattaataaaatattgctgaatatgctagaaaagcaacatttgattttattgtattccaaagagataccagttgatacattgatagggaaaaaaacaaacaaacaaacaaaaaaaaaacaccaagtatcttaatttagaaataattctttctgcaatgcttcagagacttttccacattaagcttaccactgtacctgtccaatactatggaattgatgctgttcctgtctctaacccgcctactggtgaagaagaatggctacaggtgaagctctgtgaytttccaatgaggtagcaggagtgtcaggcacctgagcacagatacaatgcaaagggtctgcagtgattaagatctgtcatagaagagaagaaggatatttaagaccaagttgggaagacatctctctgtgagggatagaggatgcagtagctggactgcaggctccttccaccctaattttccaatgaaatatgaactactgtgtaaaaatgattagagtacttcagcaggagtgagctttgcaacccacaaagaagccatagcaagatgacagaaaactaactaaaytkgcttttctca

SEQ ID NO: 2919 - DNA, 600 bp, Chicken  19866894090187_2
aagctctgtgaytttccaatgaggtagcaggagtgtcaggcacctgagcacagatacaatgcaaagggtctgcagtgattaagatctgtcatagaagagaagaaggatatttaagaccaagttgggaagacatctctctgtgagggatagaggatgcagtagctggactgcaggctccttccaccctaattttccaatgaaatatgaactactgtgtaaaaatgattagagtacttcagcaggagtgagctttgcaacccacaaagaagccatagcaagatgacagaaaactaactaaaytkgcttttctcatatgatctcagtaaaaggatgcatgtgcgacttaaggcctgatagccaaacatcctccatatgaatttcttctgtttgaattttctcaagttcttggaatcattaagatatggaataaaaagattttgcaaaatgagggtcttcctctggcttgatttcatcatctagtactgatgaagtcactggagagtaatgaggaagttattatgatttttatataataaaatatatattatatgtatataattataaagtttatgaatatttgaattgtatataaatatgtac

SEQ ID NO: 2920 - DNA, 600 bp, Chicken  19866894090187_3
gctctgtgaytttccaatgaggtagcaggagtgtcaggcacctgagcacagatacaatgcaaagggtctgcagtgattaagatctgtcatagaagagaagaaggatatttaagaccaagttgggaagacatctctctgtgagggatagaggatgcagtagctggactgcaggctccttccaccctaattttccaatgaaatatgaactactgtgtaaaaatgattagagtacttcagcaggagtgagctttgcaacccacaaagaagccatagcaagatgacagaaaactaactaaaytkgcttttctcatatgatctcagtaaaaggatgcatgtgcgacttaaggcctgatagccaaacatcctccatatgaatttcttctgtttgaattttctcaagttcttggaatcattaagatatggaataaaaagattttgcaaaatgagggtcttcctctggcttgatttcatcatctagtactgatgaagtcactggagagtaatgaggaagttattatgatttttatataataaaatatatattatatgtatataattataaagtttatgaatatttgaattgtatataaatatgtacag

SEQ ID NO: 2921 - DNA, 600 bp, Chicken  19866894090191_1
agctagattccttgggatccttgtgtggactttagtgtttgaggtttcagtcagatcactcgcaaagcagctacttcaggggtcttctcctgcaccgagataacagaacagacctagagtagagatgggatgctcttctggtgttttgagtgtgtaaaagaagcagtacattaaatggtgcttgttactagctttctgcaaatcaacaagtatagtcagacatcctcaaggctttgttttatttttgagagtttcttgtgctttaatttttacacttctctttcttcctagagagagcaytgagaaaagacactccagccatccttcgccagcacctatccatccagtaaactccctcggacataatcgcagctccaatgagcagatcaggagccatctgaatcctgaggttcgagaaaaagagaaacccaaagagcgagagagggatcactccgaatctcggaaggaaattaatgttgaagagcacaaggtgaaggacaactatatttcagagaaagaaagcctgagccatgaaagccgagtggtggaagagtcgaagcaaatgtccagggttccttcaccctatgctaggccacctgt

SEQ ID NO: 2922 - DNA, 600 bp, Chicken  19866894090192_1
cgtgggggtcacagtgaatcccggccatagatgcaaccatcaggcagcaggggacaaagacagctctgagtgacagcactgctccggcttacaaagacccagagggcccaggaacaaaactggtgtaagagcaggagcaacctgctccaccaaaacgtcgcgtgtttgagttccacagcagcagcgcgctatagaaatggagcttcaaagggtcgcagccctggaaataaaaagccacacagcaaaaaggacagtaacacaaacttgccctccactaacaactttagttgcaggataccygtctgtgaccgcacagtaggygctgagagaagggccacacctgcagccagacctgctccatctctcccatttcccttctcaattctcaaayatttctatktattctccctcaaaatcagcactcaygagttcttgccgtttctcccrttgaaacagactgcctattgataaaatccatctatccaaacatgcagacctgatgtcatctacccccagatcaacctaaaatagcccatttttcatttaccgaacgcagctatctggcttggtatgattaagatattgcagcacagacatctc

SEQ ID NO: 2923 - DNA, 600 bp, Chicken  19866894090192_2
cggccatagatgcaaccatcaggcagcaggggacaaagacagctctgagtgacagcactgctccggcttacaaagacccagagggcccaggaacaaaactggtgtaagagcaggagcaacctgctccaccaaaacgtcgcgtgtttgagttccacagcagcagcgcgctatagaaatggagcttcaaagggtcgcagccctggaaataaaaagccacacagcaaaaaggacagtaacacaaacttgccctccactaacaactttagttgcaggataccygtctgtgaccgcacagtaggygctgagagaagggccacacctgcagccagacctgctccatctctcccatttcccttctcaattctcaaayatttctatktattctccctcaaaatcagcactcaygagttcttgccgtttctcccrttgaaacagactgcctattgataaaatccatctatccaaacatgcagacctgatgtcatctacccccagatcaacctaaaatagcccatttttcatttaccgaacgcagctatctggcttggtatgattaagatattgcagcacagacatctcctcccaggctccaaaaataac

SEQ ID NO: 2924 - DNA, 600 bp, Chicken  19866894090192_3
caaagacccagagggcccaggaacaaaactggtgtaagagcaggagcaacctgctccaccaaaacgtcgcgtgtttgagttccacagcagcagcgcgctatagaaatggagcttcaaagggtcgcagccctggaaataaaaagccacacagcaaaaaggacagtaacacaaacttgccctccactaacaactttagttgcaggataccygtctgtgaccgcacagtaggygctgagagaagggccacacctgcagccagacctgctccatctctcccatttcccttctcaattctcaaayatttctatktattctccctcaaaatcagcactcaygagttcttgccgtttctcccrttgaaacagactgcctattgataaaatccatctatccaaacatgcagacctgatgtcatctacccccagatcaacctaaaatagcccatttttcatttaccgaacgcagctatctggcttggtatgattaagatattgcagcacagacatctcctcccaggctccaaaaataacatttcagaacagctccactcatttcattgggagaaaccatgacatcatgccccatccaggtgagcaagaa

SEQ ID NO: 2925 - DNA, 600 bp, Chicken  19866894090192_4
agagggcccaggaacaaaactggtgtaagagcaggagcaacctgctccaccaaaacgtcgcgtgtttgagttccacagcagcagcgcgctatagaaatggagcttcaaagggtcgcagccctggaaataaaaagccacacagcaaaaaggacagtaacacaaacttgccctccactaacaactttagttgcaggataccygtctgtgaccgcacagtaggygctgagagaagggccacacctgcagccagacctgctccatctctcccatttcccttctcaattctcaaayatttctatktattctccctcaaaatcagcactcaygagttcttgccgtttctcccrttgaaacagactgcctattgataaaatccatctatccaaacatgcagacctgatgtcatctacccccagatcaacctaaaatagcccatttttcatttaccgaacgcagctatctggcttggtatgattaagatattgcagcacagacatctcctcccaggctccaaaaataacatttcagaacagctccactcatttcattgggagaaaccatgacatcatgccccatccaggtgagcaagaatatgacaaa

SEQ ID NO: 2926 - DNA, 600 bp, Chicken  19866894090192_5
aagagcaggagcaacctgctccaccaaaacgtcgcgtgtttgagttccacagcagcagcgcgctatagaaatggagcttcaaagggtcgcagccctggaaataaaaagccacacagcaaaaaggacagtaacacaaacttgccctccactaacaactttagttgcaggataccygtctgtgaccgcacagtaggygctgagagaagggccacacctgcagccagacctgctccatctctcccatttcccttctcaattctcaaayatttctatktattctccctcaaaatcagcactcaygagttcttgccgtttctcccrttgaaacagactgcctattgataaaatccatctatccaaacatgcagacctgatgtcatctacccccagatcaacctaaaatagcccatttttcatttaccgaacgcagctatctggcttggtatgattaagatattgcagcacagacatctcctcccaggctccaaaaataacatttcagaacagctccactcatttcattgggagaaaccatgacatcatgccccatccaggtgagcaagaatatgacaaatcttgcccccgtgaactgatccttaa

SEQ ID NO: 2927 - DNA, 600 bp, Chicken  19866894090192_6
caccaaaacgtcgcgtgtttgagttccacagcagcagcgcgctatagaaatggagcttcaaagggtcgcagccctggaaataaaaagccacacagcaaaaaggacagtaacacaaacttgccctccactaacaactttagttgcaggataccygtctgtgaccgcacagtaggygctgagagaagggccacacctgcagccagacctgctccatctctcccatttcccttctcaattctcaaayatttctatktattctccctcaaaatcagcactcaygagttcttgccgtttctcccrttgaaacagactgcctattgataaaatccatctatccaaacatgcagacctgatgtcatctacccccagatcaacctaaaatagcccatttttcatttaccgaacgcagctatctggcttggtatgattaagatattgcagcacagacatctcctcccaggctccaaaaataacatttcagaacagctccactcatttcattgggagaaaccatgacatcatgccccatccaggtgagcaagaatatgacaaatcttgcccccgtgaactgatccttaacccaaatgctgctcccagctc

SEQ ID NO: 2928 - DNA, 600 bp, Chicken  19866894090195_1
tcatcaagggcttccctgctcttttcagacagccctaacagcaatctgtgaaaagcctgttctccatgctgtgttacacagcatctgagtcctttacaccctcagggagcatgtttattcagcttccagtcctgagaagaaacagagccaggatgaaatttggagatgcttgctgccagcaggagacgatgttactagccagagaaagatgaatttgggaagtatgaaacaaatgacctgagaaagtcatagttgtgaatttaaatctagccagtagattaacatctaaaagtgcagtcrggtgcttctgttgctcatgggcagacataaatccatcagggagactctgcagaccagtggactgactccattacttaaggctactggaaaagcaggttgtttgaagcccttgaaggtgcctggtgtccctcacatttctgcagtgaagcagcacgggttgcaagcaccaatatgrgctctgtgtctcattgatggcagcagatggatttggaatagagaagctagcagttagtgattttttttcctccgtgggctcatccttttcccttgcagatttcctcaccagtcaatacagcaggc

SEQ ID NO: 2929 - DNA, 600 bp, Chicken  19866894090195_2; identical to SEQ ID NO: 2928

SEQ ID NO: 2930 - DNA, 600 bp, Chicken  19866894090195_3; identical to SEQ ID NO: 2928

SEQ ID NO: 2931 - DNA, 600 bp, Chicken  19866894090195_4
ccagcaggagacgatgttactagccagagaaagatgaatttgggaagtatgaaacaaatgacctgagaaagtcatagttgtgaatttaaatctagccagtagattaacatctaaaagtgcagtcgggtgcttctgttgctcatgggcagacataaatccatcagggagactctgcagaccagtggactgactccattacttaaggctactggaaaagcaggttgtttgaagcccttgaaggtgcctggtgtccctcacatttctgcagtgaagcagcacgggttgcaagcaccaatatgrgctctgtgtctcattgatggcagcagatggatttggaatagagaagctagcagttagtgattttttttcctccgtgggctcatccttttcccttgcagatttcctcaccagtcaatacagcaggctcccatgatgactgggatgaaccatttgggtccccaaggagtcccctcaggaattcgacccagccagatactgcctgaccagcagcagcagcagtacctgcggcagcagcagcaacagcagcagcagatgctgagggtgagtggttgctgacaggagaaaggcagctggaggtgg

SEQ ID NO: 2932 - DNA, 599 bp, Chicken  19866894090196_1
  misc_feature (1)..(178): n is any nucleotide
nnnnnnnnnnnnnnnnnnnnnnnnnnnnnnnnnnnnnnnnnnnnnnnnnnnnnnnnnnnnnnnnnnnnnnnnnnnnnnnnnnnnnnnnnnnnnnnnnnnnnnnnnnnnnnnnnnnnnnnnnnnnnnnnnnnnnnnnnnnnnnnnnnnnnnnnnnnnnnnnnnnnnnnnnnnnnnnnnntggagcagctagggaatgaatccagtataaggctgctctgcttctatcagttctcagactcagttcaacctttcagccctgtctgaatataagacatgaatcccttgcagatgagctccaasctagcttgttcttaagaaaaggtgtggaacaggtcttggatgaagcacactgaaccatgccagactttgcaagaaggcaaaggtatatggaactccaaaagtgcatttaaagatatctttaagtttaaaaaatcaacttgcaataatatgaacgtgtgatcatayggacaaattattgtctttaggtaatcgttaatttatacaggcattgcagtcgtgacaacacggattgattcagctttaagatcattgcagtccttcttcagcagaggatgtgggagactgaaaacagatcagag

SEQ ID NO: 2933 - DNA, 599 bp, Chicken  19866894090196_2
  misc_feature (1)..(13): n is any nucleotide
nnnnnnnnnnnnntggagcagctagggaatgaatccagtataaggctgctctgcttctatcagttctcagactcagttcaacctttcagccctgtctgaatataagacatgaatcccttgcagatgagctccaasctagcttgttcttaagaaaaggtgtggaacaggtcttggatgaagcacactgaaccatgccagactttgcaagaaggcaaaggtatatggaactccaaaagtgcatttaaagatatctttaagtttaaaaaatcaacttgcaataatatgaacgtgtgatcatayggacaaattattgtctttaggtaatcgttaatttatacaggcattgcagtcgtgacaacacggattgattcagctttaagatcattgcagtccttcttcagcagaggatgtgggagactgaaaacagatcagagggtggtgttgttccagttctatatccatctccatcaaatgggaaccgcagtattttattaaataacagaaacaactctggagaagtataaagtacctgtgttggtcatgagaaaaatgctgttgttgttatayatttatttatrtggtattttgaagttaaaatg

SEQ ID NO: 2934 - DNA, 600 bp, Chicken  19866894090196_3
tcaacttgcaataatatgaacgtgtgatcatayggacaaattattgtctttaggtaatcgttaatttatacaggcattgcagtcgtgacaacacggattgattcagctttaagatcattgcagtccttcttcagcagaggatgtgggagactgaaaacagatcagagggtggtgttgttccagttctatatccatctccatcaaatgggaaccgcagtattttattaaataacagaaacaactctggagaagtataaagtacctgtgttggtcatgagaaaaatgctgttgttgttatayatttatttatrtggtattttgaagttaaaatgtttcatctgcattgtatttcttacctcatgatttatattcttcaaatgttattgtcagggtaagcctaacagcaaatcagtttgattgactgattaatgagcctttcttcttccaaaattggaagccatctttcttcaaaggcggttgagcctcagagatttaagtgtgctttcattgcagtcctgtgtgctgaatgtggatgcaagctcttccctaatgctttttgctttcattacaagcagttcttgaaatagagagatggaagta

SEQ ID NO: 2935 - DNA, 600 bp, Chicken  19866894090196_4
taatatgaacgtgtgatcatayggacaaattattgtctttaggtaatcgttaatttatacaggcattgcagtcgtgacaacacggattgattcagctttaagatcattgcagtccttcttcagcagaggatgtgggagactgaaaacagatcagagggtggtgttgttccagttctatatccatctccatcaaatgggaaccgcagtattttattaaataacagaaacaactctggagaagtataaagtacctgtgttggtcatgagaaaaatgctgttgttgttatayatttatttatrtggtattttgaagttaaaatgtttcatctgcattgtatttcttacctcatgatttatattcttcaaatgttattgtcagggtaagcctaacagcaaatcagtttgattgactgattaatgagcctttcttcttccaaaattggaagccatctttcttcaaaggcggttgagcctcagagatttaagtgtgctttcattgcagtcctgtgtgctgaatgtggatgcaagctcttccctaatgctttttgctttcattacaagcagttcttgaaatagagagatggaagtaaaaaggggtag

SEQ ID NO: 2936 - DNA, 599 bp, Chicken  19866894090200_1
  misc_feature (1)..(21): n is any nucleotide
nnnnnnnnnnnnnnnnnnnnnacgtaataatgtatgtagtaatattttacctggaaaggtattcttcacatgatatatttgaactgatcgaacaaagtgaatcatttgcaccatttgtctgcctgtctgtctttctgtcagtgtaattatctgttcttcctcgtagaaaatatcagccagacacacaagaggggctcaaatctcagaggtcatcaaatatctacccattgatggaagcagcctgctgagtaaatacaagagaacaagccaaaggctgaggtgcacagtggtcaccctgtragccagtgcagcaaggatctgtaaatgacttgaccttggaaaaatttaaactggcgtcacagtcagggatgagacatgggtccacgggaagcttgtctttattatttccagggctcggggagctacttatttcctatttaatacaactagttgtgcgaagtcaggaccaagtatggcaacaacaataacgtctgtagttgttccaatagttctttgtacttatttcctgtacttatttcacatttaatactcawctggcaacacagtcatgcttgacaagattaggaaacatggagttt

SEQ ID NO: 2937 - DNA, 594 bp, Chicken  19866894090200_2
acaagagaacaagccaaaggctgaggtgcacagtggtcaccctgtragccagtgcagcaaggatctgtaaatgacttgaccttggaaaaatttaaactggcgtcacagtcagggatgagacatgggtccacgggaagcttgtctttattatttccagggctcggggagctacttatttcctatttaatacaactagttgtgcgaagtcaggaccaagtatggcaacaacaataacgtctgtagttgttccaatagttctttgtacttatttcctgtacttatttcacatttaatactcawctggcaacacagtcatgcttgacaagattaggaaacatggagtttccttcttttacacttcacrgtttccacgtggggatgtggacctctctgagctccctctccacgctgttagaataccctaataactttgagcatcagactgtacgtagggactccctctgtacaactctgtgaatctggtagctttttaactggtccatcacagagccattgtgagggctgatccactgcaaagtgtctctgaggagcacacatgggtgctgggggagtgctcctattacctgccctgtg

SEQ ID NO: 2938 - DNA, 530 bp, Chicken  19866894090200_3
ctgtaaatgacttgaccttggaaaaatttaaactggcgtcacagtcagggatgagacatgggtccacgggaagcttgtctttattatttccagggctcggggagctacttatttcctatttaatacaactagttgtgcgaagtcaggaccaagtatggcaacaacaataacgtctgtagttgttccaatagttctttgtacttatttcctgtacttatttcacatttaatactcawctggcaacacagtcatgcttgacaagattaggaaacatggagtttccttcttttacacttcacrgtttccacgtggggatgtggacctctctgagctccctctccacgctgttagaataccctaataactttgagcatcagactgtacgtagggactccctctgtacaactctgtgaatctggtagctttttaactggtccatcacagagccattgtgagggctgatccactgcaaagtgtctctgaggagcacacatgggtgctgggggagtgctcctattacctgccctgtg

SEQ ID NO: 2939 - DNA, 600 bp, Chicken  19866894090202_1
aaaacacgagaactgatgagaacaacagatctgacccttcatactattatgactgtgtcaaattgtaccaaaccattaaccttaccatcaaatgaaagctctcacatggcctttctacagcacagttcaggtggcagagcagtatttggctggaaaacccacccacaggaatacacaagcagctgtttgcttatgtggactgcccaataatgccttcctggactattccagatgctatgcccataatttttacttaatgagtgggattgtattcaaatgtcgttcactttctgttgtcgraatgctaagatgtgaaattactgcactgtatttctatgtgtgtaattttctctggtagagctataagaagatccatttactgaacccaattgtgctgttcctgaaattcagttgaatttcagtgaacttcttgtaaggtacaaaaagaaatccacaggtctttccctggggacagaagaccttcttcctcggtatgttccttgtctttgccattttctcaagattccccctgccctcagggggggcagactttccctgcccccacacccaacttccttccccagttttcttcccatagag

SEQ ID NO: 2940 - DNA, 531 bp, Chicken  19866894090203_1
gctctctaaaaagcttgaaattatccttttacattacacaagactgtttttctttctcctttcagcctctactgagcaagaaactttatcaaattctgagttcaatcatgttactgaagtttagtggggctctatccttcctaccatgctaagtttcccacagtgaagtgcagcaaattgagcaattccaagtcaaaaatgcactctgactccaactcctgagcagactatcatctcatgattcaactaacagtaagcttcatgccccctacctatgcaccgtcttccccagataaagcyacaaaagtgcattaacattttgmcacactgagacctacataaatagaggatctggaatcgtttacaagaaaaaaataaattaaaaaagaataaaagtaatctgcattctgaataactttttcatatgtttgctccttatattcaactagtccaaagcaagaaacaaacaagaagaaaaagaaaaacggaacacagagaagtcaaaaagaacaagggaaaaaagttacacta

SEQ ID NO: 2941 - DNA, 508 bp, Chicken  19866894090203_2
tccttttacattacacaagactgtttttctttctcctttcagcctctactgagcaagaaactttatcaaattctgagttcaatcatgttactgaagtttagtggggctctatccttcctaccatgctaagtttcccacagtgaagtgcagcaaattgagcaattccaagtcaaaaatgcactctgactccaactcctgagcagactatcatctcatgattcaactaacagtaagcttcatgccccctacctatgcaccgtcttccccagataaagcyacaaaagtgcattaacattttgmcacactgagacctacataaatagaggatctggaatcgtttacaagaaaaaaataaattaaaaaagaataaaagtaatctgcattctgaataactttttcatatgtttgctccttatattcaactagtccaaagcaagaaacaaacaagaagaaaaagaaaaacggaacacagagaagtcaaaaagaacaagggaaaaaagttacacta

SEQ ID NO: 2942 - DNA, 600 bp, Chicken  19866894090205_1
aagaactacagagattcctctggatcagctgcccttgccctaaggggtgacttcaacttgcgatgcgatgcgaacaagtacaggacattcattctatactttgatgaagacttcttggtataggtataaagagagatgactaggaaatgtgctcctcttttaaatagagagggtttcatgggtgaagtggccatctagatcatagtgactatgaagtagttgagtttaaaatctttgctaggaggcttgggctttagcatgtatattaatatactaagatttttctttaacaagtgaaaytgtgtatgaatgatgctcggtatttattattagctgctccattccagcagaacctttttgcaacttgtatattggaggtatgttcctctgagcaggcaactgacctccagtgacgttgttccaggaatcaaatatgtaaaccaaagagggaactactgaagcctgtctttaaatgttgggtttttgtaacctagcttaaaagcaccttaagggcattttgatttttctaggctatgaggcttcttggtaatctaaatcggatggggatctacttgtttacctgtgtttttctgacattgc

SEQ ID NO: 2943 - DNA, 600 bp, Chicken  19866894090205_2
gaatgatgctcggtatttattattagctgctccattccagcagaacctttttgcaacttgtatattggaggtatgttcctctgagcaggcaactgacctccagtgacgttgttccaggaatcaaatatgtaaaccaaagagggaactactgaagcctgtctttaaatgttgggtttttgtaacctagcttaaaagcaccttaagggcattttgatttttctaggctatgaggcttcttggtaatctaaatcggatggggatctacttgtttacctgtgtttttctgacattgcaaacgcrcttcacctgctgtaatagaatagaaaatggagagaaattgttatgattttttgraacaaatcatcagagaacaagrccagtgttgcctaaacctgtgtgggagaggaggatcggctacaagaaaataaaaatccaaactaaatggagcagggaagcacgttgcctttatacccttctcctcagtctgagacagggctgaagttacctagccctagcttggttctgctgaagtcagtgtagttttgctatgactgtatttagcttctagtgattcagcggagtaatatatttttagggtta

SEQ ID NO: 2944 - DNA, 600 bp, Chicken  19866894090205_3
aacttgtatattggaggtatgttcctctgagcaggcaactgacctccagtgacgttgttccaggaatcaaatatgtaaaccaaagagggaactactgaagcctgtctttaaatgttgggtttttgtaacctagcttaaaagcaccttaagggcattttgatttttctaggctatgaggcttcttggtaatctaaatcggatggggatctacttgtttacctgtgtttttctgacattgcaaacgcrcttcacctgctgtaatagaatagaaaatggagagaaattgttatgattttttgraacaaatcatcagagaacaagrccagtgttgcctaaacctgtgtgggagaggaggatcggctacaagaaaataaaaatccaaactaaatggagcagggaagcacgttgcctttatacccttctcctcagtctgagacagggctgaagttacctagccctagcttggttctgctgaagtcagtgtagttttgctatgactgtatttagcttctagtgattcagcggagtaatatatttttagggttaaagtgctgtagcatttccagtgcttctaagaaattgatactgtcctttttttct

SEQ ID NO: 2945 - DNA, 600 bp, Chicken  19866894090205_4
tcctctgagcaggcaactgacctccagtgacgttgttccaggaatcaaatatgtaaaccaaagagggaactactgaagcctgtctttaaatgttgggtttttgtaacctagcttaaaagcaccttaagggcattttgatttttctaggctatgaggcttcttggtaatctaaatcggatggggatctacttgtttacctgtgtttttctgacattgcaaacgcrcttcacctgctgtaatagaatagaaaatggagagaaattgttatgattttttgraacaaatcatcagagaacaagrccagtgttgcctaaacctgtgtgggagaggaggatcggctacaagaaaataaaaatccaaactaaatggagcagggaagcacgttgcctttatacccttctcctcagtctgagacagggctgaagttacctagccctagcttggttctgctgaagtcagtgtagttttgctatgactgtatttagcttctagtgattcagcggagtaatatatttttagggttaaagtgctgtagcatttccagtgcttctaagaaattgatactgtcctttttttcttattaaccgcagaccactgtct

SEQ ID NO: 2946 - DNA, 600 bp, Chicken  19866894090205_5
acaagaaaataaaaatccaaactaaatggagcagggaagcacgttgcctttatacccttctcctcagtctgagacagggctgaagttacctagccctagcttggttctgctgaagtcagtgtagttttgctatgactgtatttagcttctagtgattcagcggagtaatatatttttagggttaaagtgctgtagcatttccagtgcttctaagaaattgatactgtcctttttttcttattaaccgcagaccactgtcttaaaattctcccttgagtttctgaagggcatgtgccacarcacatatgtaccacgcacggtgcgtgctacataggaggcactgaaagtgcctcagcacccactattgcacagttgactggcttctaaagcactgcgagagcgcccttcagcaaacacgatttaatctggtatgcatccacaccctagatacagttcagagttctgattacctcttcccagaatagatatagcaaaggtagccatgaaataaaggagtgacaagaattatgtggcacgtggagtagtttctgtgtgggaaaagattacgcaggaatcaactgaggtggctgcggagagtta

SEQ ID NO: 2947 - DNA, 572 bp, Chicken  19866894090207_1
aagaaatttatcaaacagacttacacagaaagtctacgttgcccatgggctttccactatccagctggacacatctgaatttgttttcagttcctaacttaaaatgggagtagaggtcacacaaatgtctattttttttttttttttagctgtgaaatagtcactgaaataaggatcaaaaactcaatacaaagtacagaaatctatctaaaaactggggattacattactctaactactattctagggcctgtgcaagtgtaaactgttgcatgtgatggggaatagggaggaggaggwgaatggtaacatttatgaatgagtgtatctagcaggaggtacctatagaaagacagtattttttccaatatggaaataaaagtcccgaaacgtgagtcagatagtatgagcaggtgactgtgggcagaaatggtgcagaagtgtgttctcataactgtcgtgctgctgttcccgagtgaagattattagtttttctcccagggactggaagtgtttcttctgtagtccagaggtccattaagatttctgagacgttagtagaggagtggatt

SEQ ID NO: 2948 - DNA, 600 bp, Chicken  19866894090219_1
tgggtagagagtagcactcggaagttactcttgctttgtacaagcgtcagtagacagggaattcagagtacttttcagcagacattattcagtgttcccccccccccccctggacatttgagctgaaaccactgtgccttttttatttcttttgcactctgatactgaaaagtaggtgctagttttgctccagatacagaacaatagcagccttcaaattcctagtgcaggttgatgatgtcgagcagtgaacatacaggattgaaaaaagtcttaatgggaaaacctaggcacctatgkgtagttcttgctccaaactgaatccttggaggaaaggttttcaaagctagttaggttgctaaatatgcaggtaagtaggaggtcagattttaaacagaataatctgggtaagtgcctaaaacctgttggagattagacgcttatcttgctgacgcagtttgaaattccastgttaaattatctgcatgttttggcacctaactaactggagaaaaatctgatcttgtatgttaattttagcaagtaattagcaatctgccctaccatcaatacagctccctgttccctggatggaatcca

SEQ ID NO: 2949 - DNA, 600 bp, Chicken  19866894090219_2
agtaggtgctagttttgctccagatacagaacaatagcagccttcaaattcctagtgcaggttgatgatgtcgagcagtgaacatacaggattgaaaaaagtcttaatgggaaaacctaggcacctatgkgtagttcttgctccaaactgaatccttggaggaaaggttttcaaagctagttaggttgctaaatatgcaggtaagtaggaggtcagattttaaacagaataatctgggtaagtgcctaaaacctgttggagattagacgcttatcttgctgacgcagtttgaaattccastgttaaattatctgcatgttttggcacctaactaactggagaaaaatctgatcttgtatgttaattttagcaagtaattagcaatctgccctaccatcaatacagctccctgttccctggatggaatccagtaagcatgctcaggatatatgcaacttcatctcttaatccggagcgagcccctcagtcttcacagaagactgatcaagggctgattggtgagggaaactacattgcttcagcacatttaacataggccttattgcaaaggctccatccaggtaagtactactgccgtgt

SEQ ID NO: 2950 - DNA, 599 bp, Chicken  19866894090229_1
  misc_feature (1)..(78): n is any nucleotide
nnnnnnnnnnnnnnnnnnnnnnnnnnnnnnnnnnnnnnnnnnnnnnnnnnnnnnnnnnnnnnnnnnnnnnnnnnnnnnacttggtgtgttcctatcagagacaggaagcagaaacagcgtgtgggacttcataagtctgttttgagagttaagatggttcttgaataaggagactttatcattttctcctagtgttttatgttcagtatcattccttaatagcagagctgagtatgagcaacttctgtcccagagtcacataaaatggagatgacaaatttgatttaaccttctgtgtcrtcatctttagcaagagcttgttcattgttccagctagcatcaatgtcacagagcagagcactgatgcttgtgaaatttagtattactaaaaattacaatccccatcaccratgaagttcactgcaccatgttgtctactgactgcacttctaccaccacattttccacacagatctctttaagatagtgcatattattagtctccaaaacaattaaggtacatttttctgagacagaagagctggaatactcacagagcctatgtcttttgtccaagacatgcacagacctcttcaacc

SEQ ID NO: 2951 - DNA, 600 bp, Chicken  19866894090229_2
gaaacagcgtgtgggacttcataagtctgttttgagagttaagatggttcttgaataaggagactttatcattttctcctagtgttttatgttcagtatcattccttaatagcagagctgagtatgagcaacttctgtcccagagtcacataaaatggagatgacaaatttgatttaaccttctgtgtcrtcatctttagcaagagcttgttcattgttccagctagcatcaatgtcacagagcagagcactgatgcttgtgaaatttagtattactaaaaattacaatccccatcaccratgaagttcactgcaccatgttgtctactgactgcacttctaccaccacattttccacacagatctctttaagatagtgcatattattagtctccaaaacaattaaggtacatttttctgagacagaagagctggaatactcacagagcctatgtcttttgtccaagacatgcacagacctcttcaaccacmtgtcttaaacttgcaattggactagtctgtatttctgaatgcatgaagcagaaaggtgttctcacaggttgcacttccagttytacagtaaaagactcagtagctctt

SEQ ID NO: 2952 - DNA, 600 bp, Chicken  19866894090229_3
atctttagcaagagcttgttcattgttccagctagcatcaatgtcacagagcagagcactgatgcttgtgaaatttagtattactaaaaattacaatccccatcaccratgaagttcactgcaccatgttgtctactgactgcacttctaccaccacattttccacacagatctctttaagatagtgcatattattagtctccaaaacaattaaggtacatttttctgagacagaagagctggaatactcacagagcctatgtcttttgtccaagacatgcacagacctcttcaaccacmtgtcttaaacttgcaattggactagtctgtatttctgaatgcatgaagcagaaaggtgttctcacaggttgcacttccagttytacagtaaaagactcagtagctcttcctaagtttcacaggagcatcagttgattattttggcattgttgaaaatataaaaggcattgaaatgcataagtatgctgtaagagttgttggctttacgactttcatgcttttttattaacagcacacagcatttcttcctgtcaaggcaaagtttaagtagagaaaatcttctgtatgcatttttgttca

SEQ ID NO: 2953 - DNA, 600 bp, Chicken  19866894090229_4
ctaaaaattacaatccccatcaccratgaagttcactgcaccatgttgtctactgactgcacttctaccaccacattttccacacagatctctttaagatagtgcatattattagtctccaaaacaattaaggtacatttttctgagacagaagagctggaatactcacagagcctatgtcttttgtccaagacatgcacagacctcttcaaccacmtgtcttaaacttgcaattggactagtctgtatttctgaatgcatgaagcagaaaggtgttctcacaggttgcacttccagttytacagtaaaagactcagtagctcttcctaagtttcacaggagcatcagttgattattttggcattgttgaaaatataaaaggcattgaaatgcataagtatgctgtaagagttgttggctttacgactttcatgcttttttattaacagcacacagcatttcttcctgtcaaggcaaagtttaagtagagaaaatcttctgtatgcatttttgttcagtagcttctcaaaaggcaactcctaatacaaaactgttgacaatagtctcctcagatagaaacatttcacttctaagactgag

SEQ ID NO: 2954 - DNA, 600 bp, Chicken  19866894090231_1
ttggtccttaacaaaactcaccttttctgttcagctcttctcctttgtttgcattctaaattagctggtctctagaaatgggagagttgcctactgctgttttcaattctgatttctcctgccagagtgaaaagtgtccactggttttggttctaaatagttttgtttctctgttttaccttgatgggtttttttctgtcatcttcagagcctcttcagcccttctccacactacctatgtttatacagttctggtttttgcactaaaatacagctcagagcctccttttgactgtttcrtatttcttaatgaactagagaagtgtttgtgggatagaaaaagcaactgaagaacaggtttctccaatattgtccatagtatcctatcaatacgaaagactgtcagaataaatgtaaaattctacttaatcactcttgcaacgaaggagaaccagttgctatgaaacagtgtttacggtagcgctgcatttgttcccacttaacagaaacaggagaccagaaggctgctgttggtatccctgaaacaggaacaggttccttggaatttgctggcgggttgcttaactggctgcaattaca

SEQ ID NO: 2955 - DNA, 600 bp, Chicken  19866894090231_2
aactgaagaacaggtttctccaatattgtccatagtatcctatcaatacgaaagactgtcagaataaatgtaaaattctacttaatcactcttgcaacgaaggagaaccagttgctatgaaacagtgtttacggtagcgctgcatttgttcccacttaacagaaacaggagaccagaaggctgctgttggtatccctgaaacaggaacaggttccttggaatttgctggcgggttgcttaactggctgcaattacaggaagtgaaggcagggagcagatgttttcaatagctgcacttakggctactagggaaagtggagaagaagctagtgtagatctcttaatgcatgaggggaatatggcttgtgtttttcttccaccaggagagaaaatacctgaatatttccttttttgttttgggagctgttgagctcttgatccctttagcagtgttatctgggcatgagttttggggaggaaaaagattagaacttgctgtcgctggctgctaggttagggtttgtttgctgtgtgcttgatggagtcaagctctagcatctttattgagtaaagtgcagaccttggtggccatccaggcag

SEQ ID NO: 2956 - DNA, 599 bp, Chicken  19866894090232_1
  misc_feature (1)..(32): n is any nucleotide
nnnnnnnnnnnnnnnnnnnnnnnnnnnnnnnnttaatgtttgcagagaaatggaaacctttcctctgaagtctgacagggaagggatgctaaggatggagctgcagttggctatagtatgctccaagtacgctgcttgctttttctgttttcttgttttgtttttaatttgtgtttaacagatactgttggaagctcttttcagagcaggagaggtcttgctgcaaagtgacaattccaagagagaacaagtttcctattagatggccatgactacctgcatcatcaggaaattccatgsggctccttgtatggaggcaaatsttcaggcttttgtaggacattttacaaagagttcttttcgcattctgtttttgtttcactttttttaaactttccttttgctcccttctccttcttgcttcaaagatccagttgatcgtctgcaagaacgaaagctttatgaagtctctgtggtggtagtgctgtgcagcagtgtttttctgtccaatactgctgcacacgtgtgtatacatatatattttaaagctcacagaggacacatctcactattgctctcactagcaatgatgggatgct

SEQ ID NO: 2957 - DNA, 599 bp, Chicken  19866894090232_2
  misc_feature (1)..(9): n is any nucleotide
nnnnnnnnnttaatgtttgcagagaaatggaaacctttcctctgaagtctgacagggaagggatgctaaggatggagctgcagttggctatagtatgctccaagtacgctgcttgctttttctgttttcttgttttgtttttaatttgtgtttaacagatactgttggaagctcttttcagagcaggagaggtcttgctgcaaagtgacaattccaagagagaacaagtttcctattagatggccatgactacctgcatcatcaggaaattccatgsggctccttgtatggaggcaaatsttcaggcttttgtaggacattttacaaagagttcttttcgcattctgtttttgtttcactttttttaaactttccttttgctcccttctccttcttgcttcaaagatccagttgatcgtctgcaagaacgaaagctttatgaagtctctgtggtggtagtgctgtgcagcagtgtttttctgtccaatactgctgcacacgtgtgtatacatatatattttaaagctcacagaggacacatctcactattgctctcactagcaatgatgggatgctcttcaccatcctctaacactgct

SEQ ID NO: 2958 - DNA, 600 bp, Chicken  19866894090234_1
cagtagtacatgtatgcgtgcacaaataaaaccctgagatacatatctgtgtcgtacagataccaaaatgcattttcatgggtttccttactaaattgcattcctatcatgaagctgattgttattttaacatgaaagtataggaagtttgcagtctatttttgtcatcgtaaaaacatgagttcagcagagcttaatattttcatttcatattgcctgcttctgatctttaaaggctgattcttttttcagttgttactgaggactgatgctttgtttgcccttctgcttacaaggccraattctgatcacatacattttcagcagcattaccatctcagttcccacagttgtccacactcctgtagttggcttctttgggagcctgcaaaaattgatgctcagcagtttatagttaatagcatggtaagacattcttcaaaataatttttgaatatttcatttactgaaatgacttgttttctcaacttcagtagactgtccctggtagagaagattattgtttgttagatccacctcctgtattctctgtgcctcttggaagtaagaatggaactgtggagctctgtgtgtgtatcc

SEQ ID NO: 2959 - DNA, 599 bp, Chicken  19866894090235_1
  misc_feature (1)..(44): n is any nucleotide
nnnnnnnnnnnnnnnnnnnnnnnnnnnnnnnnnnnnnnnnnnnnaagtaaacacggagcaccagagtaccttgtggcctctgtacgcctgctgaggcctagtgggctcctgtgtggagcctgagtgacaaatacttgtaacaacattttgttgggtttgatcttggggatcagaagcgggactttcagggcagtgcaaacactgctcccaggacaaatttacagcaatacaaaagatacaatcatttaactgttttgatgtataccctatttatttttagaaaacatttaaatgcctgcrttatgctgtacatctctttccactaagattttgtgtatggagcaaaatgtatcagttaattaatacaggccaaacctttgtttaaaygttacaattctcagagtcgaggaagagccaaatgtttaattaggacttagaaacttgccttgcagtttttcacccactgaaggaaaagtggacaatatcatgtcaactcatatttaaaaggatgacagtaactaatatattwgctagagaagacagcagtgtacatgctaataatttaagccattaatttagcttgtgctggaagatgacag

SEQ ID NO: 2960 - DNA, 600 bp, Chicken  19866894090235_2
ctgctgaggcctagtgggctcctgtgtggagcctgagtgacaaatacttgtaacaacattttgttgggtttgatcttggggatcagaagcgggactttcagggcagtgcaaacactgctcccaggacaaatttacagcaatacaaaagatacaatcatttaactgttttgatgtataccctatttatttttagaaaacatttaaatgcctgcrttatgctgtacatctctttccactaagattttgtgtatggagcaaaatgtatcagttaattaatacaggccaaacctttgtttaaaygttacaattctcagagtcgaggaagagccaaatgtttaattaggacttagaaacttgccttgcagtttttcacccactgaaggaaaagtggacaatatcatgtcaactcatatttaaaaggatgacagtaactaatatattwgctagagaagacagcagtgtacatgctaataatttaagccattaatttagcttgtgctggaagatgacagccttcttttcacgctgtgctaaatgaataatgaatgatacactcccaaggcaactttaatttttaaagccaatacttagagttactca

SEQ ID NO: 2961 - DNA, 600 bp, Chicken  19866894090235_3
caaaagatacaatcatttaactgttttgatgtataccctatttatttttagaaaacatttaaatgcctgcrttatgctgtacatctctttccactaagattttgtgtatggagcaaaatgtatcagttaattaatacaggccaaacctttgtttaaaygttacaattctcagagtcgaggaagagccaaatgtttaattaggacttagaaacttgccttgcagtttttcacccactgaaggaaaagtggacaatatcatgtcaactcatatttaaaaggatgacagtaactaatatattwgctagagaagacagcagtgtacatgctaataatttaagccattaatttagcttgtgctggaagatgacagccttcttttcacgctgtgctaaatgaataatgaatgatacactcccaaggcaactttaatttttaaagccaatacttagagttactcactcatgccaggtacttagaggtaaacgtgacaatatggaacgatacatttatcaaattattcacaaaataaaagcagtgaaccattctgtactgcagagatgttgcttggaacagaattctgcttcgttttatactgatgga

SEQ ID NO: 2962 - DNA, 599 bp, Chicken  19866894090238_1
  misc_feature (1)..(105): n is any nucleotide
nnnnnnnnnnnnnnnnnnnnnnnnnnnnnnnnnnnnnnnnnnnnnnnnnnnnnnnnnnnnnnnnnnnnnnnnnnnnnnnnnnnnnnnnnnnnnnnnnnnnnnnnncctgctaagaacagttggacagcacgtttgggatgtctgaaggaacatgtcatcccaagaagacgtcccagaggacgtgtgcttttttaactgaatgctttaagcacaatttggttggcagttgaactgcacagccttttgtatttataaacatctttctctgtaggtctgtgctaacctctgacctgtacagcrctgcatttcttccctttatcagtaacagttggcctaggaaggcagaagcaaaaggtaaagctgragaaatttgtatgtgcaacaaacaagtcggctgtgctgatrtactccgtgcaggttcctttccctcccaattaatccaggctctgcagtgttaataggtatttagctttcatagcaggaagataaataattagacatataattcaaggggaatatcaggaagttgtcttttctactactttctccctgatttatatagcaatcttttattataaacattctggccctggtttaaa

SEQ ID NO: 2963 - DNA, 599 bp, Chicken  19866894090238_2
  misc_feature (1)..(41): n is any nucleotide
nnnnnnnnnnnnnnnnnnnnnnnnnnnnnnnnnnnnnnnnncctgctaagaacagttggacagcacgtttgggatgtctgaaggaacatgtcatcccaagaagacgtcccagaggacgtgtgcttttttaactgaatgctttaagcacaatttggttggcagttgaactgcacagccttttgtatttataaacatctttctctgtaggtctgtgctaacctctgacctgtacagcrctgcatttcttccctttatcagtaacagttggcctaggaaggcagaagcaaaaggtaaagctgragaaatttgtatgtgcaacaaacaagtcggctgtgctgatrtactccgtgcaggttcctttccctcccaattaatccaggctctgcagtgttaataggtatttagctttcatagcaggaagataaataattagacatataattcaaggggaatatcaggaagttgtcttttctactactttctccctgatttatatagcaatcttttattataaacattctggccctggtttaaaggtaagaaataatctgcaaggagctgaggagcacacaggtaacaaaagcagcacaaatattctc

SEQ ID NO: 2964 - DNA, 600 bp, Chicken  19866894090238_3
cctgctaagaacagttggacagcacgtttgggatgtctgaaggaacatgtcatcccaagaagacgtcccagaggacgtgtgcttttttaactgaatgctttaagcacaatttggttggcagttgaactgcacagccttttgtatttataaacatctttctctgtaggtctgtgctaacctctgacctgtacagcrctgcatttcttccctttatcagtaacagttggcctaggaaggcagaagcaaaaggtaaagctgragaaatttgtatgtgcaacaaacaagtcggctgtgctgatrtactccgtgcaggttcctttccctcccaattaatccaggctctgcagtgttaataggtatttagctttcatagcaggaagataaataattagacatataattcaaggggaatatcaggaagttgtcttttctactactttctccctgatttatatagcaatcttttattataaacattctggccctggtttaaaggtaagaaataatctgcaaggagctgaggagcacacaggtaacaaaagcagcacaaatattctcaagagaccagatttcttccaggttctggatcccaaagcacac

SEQ ID NO: 2965 - DNA, 600 bp, Chicken  19866894090241_1
ttgtggaaaccttcagctgtcccagtgcagctccatgcatggtcctagggacctggcacagacagtgttgagctgcagactcgcgatgatcctttaggatcaataatcttactcgatgttataaatatatattgattattatgtaattgtcaagctcactgcggagctaaatctcccttggaaggagaaaaatctcccttggaataaatgttttacatatttcagataaaaggaaggactgcacctcaaagagctgtttcagtgattatctgttgatggtgtgtgtattagatgggactsggactaaacagatataagtgtcttgcaatcagttccaggtcagagatttttgcatttttagataattatatgactgagtggcgtaaactacttcaatatytttctggcaccaaagaagagcaaatttgaatgtttattgagatgtttggaacacttcagacccctcaccgaaaatgagaatattcagaacaacctacattttctcggaaaatggagcttgcattgtaggggctttttaaagcatattcatgacttgaatttgcaggggaactctaattcagatatataggtgtaggtgta

SEQ ID NO: 2966 - DNA, 506 bp, Chicken  19866894090241_2
caataatcttactcgatgttataaatatatattgattattatgtaattgtcaagctcactgcggagctaaatctcccttggaaggagaaaaatctcccttggaataaatgttttacatatttcagataaaaggaaggactgcacctcaaagagctgtttcagtgattatctgttgatggtgtgtgtattagatgggactsggactaaacagatataagtgtcttgcaatcagttccaggtcagagatttttgcatttttagataattatatgactgagtggcgtaaactacttcaatatytttctggcaccaaagaagagcaaatttgaatgtttattgagatgtttggaacacttcagacccctcaccgaaaatgagaatattcagaacaacctacattttctcggaaaatggagcttgcattgtaggggctttttaaagcatattcatgacttgaatttgcaggggaactctaattcagatatataggtgtaggtgtaaattag

SEQ ID NO: 2967 - DNA, 600 bp, Chicken  19866894090246_1
tataagtctgtccctacaaaactactgttttgtactcggtgtcttcaggtgtaactgactaaaactaataagtgtatcagtaaaccactgcacttttgtgcttttgatctacgaatatacaaaaagatgaatagcttgtttcagttaaaattctgtagcttattcttttgttgcaaaattcttaacaatcttcccaaaaaggagcatcagtctgtggtgagtgtatgaactgcttgtgtacttcggctggctcaggactaagtaccacagcactgctgtgagatgccttgcactgcagamttcttcacttggacgcatctgtggatgctgtggtcctactgaggacatcacctgttgatgcaccctcaggctggccctgggctattgtgaaatgcaaagacacagacacctatatttctgctgaaacagaactttgtaggctgagaawacactcccagctgtccaaaaggcacgtatagttagtgaaacctatttgtatatctcaagtggagaaggaggggcctgaactgttccccaggtggtgctcaggtrgagctgtgggagaagtgcagcttgtaaagcgtacataggcatgtattg

SEQ ID NO: 2968 - DNA, 600 bp, Chicken  19866894090246_2
aattctgtagcttattcttttgttgcaaaattcttaacaatcttcccaaaaaggagcatcagtctgtggtgagtgtatgaactgcttgtgtacttcggctggctcaggactaagtaccacagcactgctgtgagatgccttgcactgcagamttcttcacttggacgcatctgtggatgctgtggtcctactgaggacatcacctgttgatgcaccctcaggctggccctgggctattgtgaaatgcaaagacacagacacctatatttctgctgaaacagaactttgtaggctgagaawacactcccagctgtccaaaaggcacgtatagttagtgaaacctatttgtatatctcaagtggagaaggaggggcctgaactgttccccaggtggtgctcaggtrgagctgtgggagaagtgcagcttgtaaagcgtacataggcatgtattgtagtgtgctttgctgtttataatggatttgcagtcattgccaatatagaagacattatcttgcatcagaagaaattcaccacaggmaaacagcataatttcagaattgcacaggtgcttatggccttacagcagccctctgtggcctt

SEQ ID NO: 2969 - DNA, 600 bp, Chicken  19866894090246_3
caggactaagtaccacagcactgctgtgagatgccttgcactgcagamttcttcacttggacgcatctgtggatgctgtggtcctactgaggacatcacctgttgatgcaccctcaggctggccctgggctattgtgaaatgcaaagacacagacacctatatttctgctgaaacagaactttgtaggctgagaawacactcccagctgtccaaaaggcacgtatagttagtgaaacctatttgtatatctcaagtggagaaggaggggcctgaactgttccccaggtggtgctcaggtrgagctgtgggagaagtgcagcttgtaaagcgtacataggcatgtattgtagtgtgctttgctgtttataatggatttgcagtcattgccaatatagaagacattatcttgcatcagaagaaattcaccacaggmaaacagcataatttcagaattgcacaggtgcttatggccttacagcagccctctgtggcctttcctgaagagaagtacttcagcagtgtgtcgtggagctggctgctgctcctgtgatggagtagcatgtatagcagtgctatatttttgtaagcagtgctatgct

SEQ ID NO: 2970 - DNA, 600 bp, Chicken  19866894090246_4
gtgaaatgcaaagacacagacacctatatttctgctgaaacagaactttgtaggctgagaawacactcccagctgtccaaaaggcacgtatagttagtgaaacctatttgtatatctcaagtggagaaggaggggcctgaactgttccccaggtggtgctcaggtrgagctgtgggagaagtgcagcttgtaaagcgtacataggcatgtattgtagtgtgctttgctgtttataatggatttgcagtcattgccaatatagaagacattatcttgcatcagaagaaattcaccacaggmaaacagcataatttcagaattgcacaggtgcttatggccttacagcagccctctgtggcctttcctgaagagaagtacttcagcagtgtgtcgtggagctggctgctgctcctgtgatggagtagcatgtatagcagtgctatatttttgtaagcagtgctatgcttttgtaaggtctgcactgtgttcaggccctgcaaagtgtaaaataagggtctgaaatgaccattttgccctagatgagcaatgctgagagctgcaggggtggattcaatgataacaagcatacatcactttaaa

SEQ ID NO: 2971 - DNA, 600 bp, Chicken  19866894090247_1
accagacaacagtatactgaatactttctttgaaggcagtaagtgggagaaagtatagaaaaatacacagctttgaaatgtaagaaggatatcactccttcgaaatcttcagtggctgtgaagagccaggctttggttttagcactggctgagagagatcctattaactgttgtccatgcaatgccgtgcaaaaattactcctaatgaatccccaagatcatgtcctgtattattctgaaggtctctgcacttatgagtgaacatctttcctctgagttttttacttaagcagggaagtrcacagaaattttccacaccagtacttcactattattacccagtgctttattgataattacttcaggtcttgttgtatgcaaccatgttcagtcaaatcaattaaaatgatccacgatatctcwatgctgttcttttgaaagttatacagtgtgatgtgttttgccttttcacaaaccaatgcttctcctagaatttcagatttagagctggaagaaggtttccaagtaagactcactgaccctgtttctctatccagctgggctgaccttcaaaactgaagctggagaaggactcagtta

SEQ ID NO: 2972 - DNA, 600 bp, Chicken  19866894090247_2
agccaggctttggttttagcactggctgagagagatcctattaactgttgtccatgcaatgccgtgcaaaaattactcctaatgaatccccaagatcatgtcctgtattattctgaaggtctctgcacttatgagtgaacatctttcctctgagttttttacttaagcagggaagtrcacagaaattttccacaccagtacttcactattattacccagtgctttattgataattacttcaggtcttgttgtatgcaaccatgttcagtcaaatcaattaaaatgatccacgatatctcwatgctgttcttttgaaagttatacagtgtgatgtgttttgccttttcacaaaccaatgcttctcctagaatttcagatttagagctggaagaaggtttccaagtaagactcactgaccctgtttctctatccagctgggctgaccttcaaaactgaagctggagaaggactcagttaatgtatgtctacaaagttgttacttgatttttatataagtgctaagctaactctgtttaattgattttccacattgtacactgagaaataggatttttatggctcttgaataattcacaactt

SEQ ID NO: 2973 - DNA, 599 bp, Chicken  19866894090249_1
  misc_feature (1)..(171): n is any nucleotide
nnnnnnnnnnnnnnnnnnnnnnnnnnnnnnnnnnnnnnnnnnnnnnnnnnnnnnnnnnnnnnnnnnnnnnnnnnnnnnnnnnnnnnnnnnnnnnnnnnnnnnnnnnnnnnnnnnnnnnnnnnnnnnnnnnnnnnnnnnnnnnnnnnnnnnnnnnnnnnnnnnnnnnnnnnntgccccttcatcttggtcgcatttttctcccagtaagaagttaagagaagtccctagtgcctgctggccaaccatctctccacagccctgccctttgaacggaaatgcatgtggccataatcctgctgyacacttacatctcatccaagacagatctctacacacatacttctattgacacactgcacagtcagtttgggttttctgtcttccaaggaaatcacctcccacctttgccaacttacatcaagcaatttgactaagaaattctcagtactttcttttcttttattgccttctttcaatacttgggtctcagaaatctgcattatatccccccacccagtctataaagctgcctttctttttatcagatctaattattgccaaataatagtgaatttgttcattacaagaccaggtactat

SEQ ID NO: 2974 - DNA, 600 bp, Chicken  19866894090249_2
acactgcacagtcagtttgggttttctgtcttccaaggaaatcacctcccacctttgccaacttacatcaagcaatttgactaagaaattctcagtactttcttttcttttattgccttctttcaatacttgggtctcagaaatctgcattatatccccccacccagtctataaagctgcctttctttttatcagatctaattattgccaaataatagtgaatttgttcattacaagaccaggtactataactcactcttgccatgatgaatctgttttcaatttcctgatcctaccatsgtctaagcagatgattactgaatttgaatgacttcacctgcatgaggtgagtcatgagtttaactgcattctgagattattttctctaacgtgctttgccaaatctctgcctactctactctacctcagagaagrgaaaaaagtcattacactgaagaacggcaaaaggtctttgttttgataccaatatgtgaaaaccctatatcagcagattgttggacctcttctctctttcccagcttgccttttggtccccattattaggaatattaaagtgaattatagcctgctcaagactgt

SEQ ID NO: 2975 - DNA, 600 bp, Chicken  19866894090249_3
ctcagaaatctgcattatatccccccacccagtctataaagctgcctttctttttatcagatctaattattgccaaataatagtgaatttgttcattacaagaccaggtactataactcactcttgccatgatgaatctgttttcaatttcctgatcctaccatsgtctaagcagatgattactgaatttgaatgacttcacctgcatgaggtgagtcatgagtttaactgcattctgagattattttctctaacgtgctttgccaaatctctgcctactctactctacctcagagaagrgaaaaaagtcattacactgaagaacggcaaaaggtctttgttttgataccaatatgtgaaaaccctatatcagcagattgttggacctcttctctctttcccagcttgccttttggtccccattattaggaatattaaagtgaattatagcctgctcaagactgttcttctgtcctcttccacaaaagacccaaataaacacagtggggaggcaaaaggaggaaggaggttgccgtcatatccaggaggggaatactgaggaggatttattcccagttgaggttggaagacttggaacaa

SEQ ID NO: 2976 - DNA, 600 bp, Chicken  19866894090253_1
ataaagatttatttatgtctcagtataaagtagcctgatgagagttatagaaataccagcaaaagcccagtattgtgcagttaagcacagtttattaaagttgcacaattttttactgtggcaatgggaataaggtattatttagagaatgatctatagtctgtggaaaataagtctaccaccataattcaagtatgtgaatctagcaaacagtcctcaggccaagcgggactctcactccctgctgtcagtaacagctctgaaatcagaaacatgcacaaagaatgagatcagcgctgktgaataataaagttttaagtttactggaaaaggttaaaaagttattctcttggacataacatccttagggattaaaaggagtcacgtagttatttacgtagacggctttactgttctgtgatgagtacctgtaataatctagttacgagccagagggggccaatacctattgtttttctccagctttaatgcctggggctaattcctgctgcagttggtttatgggagtcttggttcaaaatgttgcttaagagtaattatagtaatttgatacattgcagtctaacattttgagtatat

SEQ ID NO: 2977 - DNA, 600 bp, Chicken  19866894090255_1
gcagtcacaatgagaagcatcaaacaagaaaaacaatggtccagcaaacattaggagcgttattaagtacagatgttgtcttagaaagcaaagcatctggtataaggagaatattctcaggttttgcactggccaatttggaccttcttttgtcccttttagggctctggaaaaagatatctatttgccattatatttcagaagatttgtgtgagcagaaatggactataaccactagtgcatctcattatttcccctggactctgcaatctggctttacagccaatttatatgatagtrgcacctggtatatttccttatagctgcaaatttccttgattctttcctatgacttacctctgttctttacaactagacttacaaatgacatccctkgatgtggtgccttgtttccctgccatgagcccaccatgctggtttctcactccctctcctcggtgggtcagggaaatgccractgtgcacttaaagaaggccaaaacgaagatgtactgtatgtcctgcttgtgggctgtccattggcatatctgcatgtgcatactattyttctctgtgtcaggaggcagtggggatatataa

SEQ ID NO: 2978 - DNA, 600 bp, Chicken  19866894090255_2
ctggtataaggagaatattctcaggttttgcactggccaatttggaccttcttttgtcccttttagggctctggaaaaagatatctatttgccattatatttcagaagatttgtgtgagcagaaatggactataaccactagtgcatctcattatttcccctggactctgcaatctggctttacagccaatttatatgatagtrgcacctggtatatttccttatagctgcaaatttccttgattctttcctatgacttacctctgttctttacaactagacttacaaatgacatccctkgatgtggtgccttgtttccctgccatgagcccaccatgctggtttctcactccctctcctcggtgggtcagggaaatgccractgtgcacttaaagaaggccaaaacgaagatgtactgtatgtcctgcttgtgggctgtccattggcatatctgcatgtgcatactattyttctctgtgtcaggaggcagtggggatatataaacaacaaatacatgattttcagcttaacagatgtccaatctatgaaaaacaaaatataaagataaagaccaaatccaaaatttctatattctttca

SEQ ID NO: 2979 - DNA, 600 bp, Chicken  19866894090255_3
tatctatttgccattatatttcagaagatttgtgtgagcagaaatggactataaccactagtgcatctcattatttcccctggactctgcaatctggctttacagccaatttatatgatagtrgcacctggtatatttccttatagctgcaaatttccttgattctttcctatgacttacctctgttctttacaactagacttacaaatgacatccctkgatgtggtgccttgtttccctgccatgagcccaccatgctggtttctcactccctctcctcggtgggtcagggaaatgccractgtgcacttaaagaaggccaaaacgaagatgtactgtatgtcctgcttgtgggctgtccattggcatatctgcatgtgcatactattyttctctgtgtcaggaggcagtggggatatataaacaacaaatacatgattttcagcttaacagatgtccaatctatgaaaaacaaaatataaagataaagaccaaatccaaaatttctatattctttcattgaccacttgttatgattcaagtgagatctttcttttcgtgattactgttttcccatacactgccaaagtgacaatcaag

SEQ ID NO: 2980 - DNA, 600 bp, Chicken  19866894090255_4
aatctggctttacagccaatttatatgatagtrgcacctggtatatttccttatagctgcaaatttccttgattctttcctatgacttacctctgttctttacaactagacttacaaatgacatccctkgatgtggtgccttgtttccctgccatgagcccaccatgctggtttctcactccctctcctcggtgggtcagggaaatgccractgtgcacttaaagaaggccaaaacgaagatgtactgtatgtcctgcttgtgggctgtccattggcatatctgcatgtgcatactattyttctctgtgtcaggaggcagtggggatatataaacaacaaatacatgattttcagcttaacagatgtccaatctatgaaaaacaaaatataaagataaagaccaaatccaaaatttctatattctttcattgaccacttgttatgattcaagtgagatctttcttttcgtgattactgttttcccatacactgccaaagtgacaatcaaggattgtccaaatccaaagtcaacctattgttccacattcttttactgcaacaagggcagatttctcaaaataattaaaaatgaggaaaaa

SEQ ID NO: 2981 - DNA, 600 bp, Chicken  19866894090262_1
tgcagggttgtctggggttgttgtgaccaaaatgcagaacctgacacttggccctattgaaactcatgccgttaaccttggcccatcaatccaccctatccaggtccctctgtagtgcccttctcccctctagcagatcaacactccctcccagcttggtgttgctgtgtagaacatatccactgactgactttgtgagagttgaagtaccaaagaattccatatttgttagaaaacctgcctgcatgctgtggtccagtaagtcatgctaatgaagtctgagctggttgtactggaaarcaactattatgtgaggcagtttgtgtctcatagtgctgtacactgctctgcagacaagttagcaactgtctatactttgactcaacagcttttcttttgttttcaacagaaggagatgttttggactgttggttgttgtccttcagtaacaattgttaatgccttggtgcaataccatgtgagtaaatgtgtacaaacaacagcttgaggcttcagagatagatagaagagctgtaaagttgatgctgtgttcttctgacagaagactgtgacagactcagaggctctgttctacttgtc

SEQ ID NO: 2982 - DNA, 600 bp, Chicken  19866894090262_2
acaggtttacccagctttatacttttcagactttatttgcttttgttaagggctctgcagatcactaagtgcagagtgctgatagaggttaggtgatgacttaaggcagtgtcaccttccgaggcagagtcactaaacaggggagacagcacacatttatcttcctctgtttgcacagtgtggtaggtgggttgaccctggccggcacctaagcacccatcacctgcctccttgcttccctcctgcagtgggacgagggacagaatcagaagggcaggaagcaagaaaaactcatgggtygagataaagacagttaaaatgaaggaaaaaataaaaccacaagtgatggaaaggcaatcaccagctctcatgagtatactgatgctgagttgatttctgaaaagagactactgtgggaagaacctctcctcagtkttatttctaaacacagaattacatggcgtgccagatagactcttccagtcaatcctttcccgtttgcttccttatcctcagcctacctgcttggggagcagagtgaaaaatggagatggtcttgatgctgtgcaagtactgttcagtgacagctaaagcactggt

SEQ ID NO: 2983 - DNA, 600 bp, Chicken  19866894090262_3
aacaggggagacagcacacatttatcttcctctgtttgcacagtgtggtaggtgggttgaccctggccggcacctaagcacccatcacctgcctccttgcttccctcctgcagtgggacgagggacagaatcagaagggcaggaagcaagaaaaactcatgggtygagataaagacagttaaaatgaaggaaaaaataaaaccacaagtgatggaaaggcaatcaccagctctcatgagtatactgatgctgagttgatttctgaaaagagactactgtgggaagaacctctcctcagtkttatttctaaacacagaattacatggcgtgccagatagactcttccagtcaatcctttcccgtttgcttccttatcctcagcctacctgcttggggagcagagtgaaaaatggagatggtcttgatgctgtgcaagtactgttcagtgacagctaaagcactggtgtgttaccaacgctgttttagttataaatctaaagcacagcagcatgcaggttgctgtgaaagaataactccrtcctggctggacacagtgcatgctgtaatagatggggttggccctagggtggggtaatcact

SEQ ID NO: 2984 - DNA, 600 bp, Chicken  19866894090262_4
gtatactgatgctgagttgatttctgaaaagagactactgtgggaagaacctctcctcagtkttatttctaaacacagaattacatggcgtgccagatagactcttccagtcaatcctttcccgtttgcttccttatcctcagcctacctgcttggggagcagagtgaaaaatggagatggtcttgatgctgtgcaagtactgttcagtgacagctaaagcactggtgtgttaccaacgctgttttagttataaatctaaagcacagcagcatgcaggttgctgtgaaagaataactccrtcctggctggacacagtgcatgctgtaatagatggggttggccctagggtggggtaatcactgtgcaagctgtaaattcactctgtctgtatctgcatcttcccatattcagttccaaataaattttatgtgagttatgaacaacaaaaaacattaagagtggctgaagttctgcctctgatcattacatgtgcacatacatgttttgggcctttacatatgtttttcacttgcagtttcagaaaatttgtagcagcttgatcactaagatggcattttgcaggagttgcatgttcatca

SEQ ID NO: 2985 - DNA, 600 bp, Chicken  19866894090262_5
atggggttggccctagggtggggtaatcactgtgcaagctgtaaattcactctgtctgtatctgcatcttcccatattcagttccaaataaattttatgtgagttatgaacaacaaaaaacattaagagtggctgaagttctgcctctgatcattacatgtgcacatacatgttttgggcctttacatatgtttttcacttgcagtttcagaaaatttgtagcagcttgatcactaagatggcattttgcaggagttgcatgttcatcatattttgcttgctattcatgatgtatttttsttgtctgtttaggtgaaattctagattagtgaaagttgtaccctacataaatacaaacctcagtttcagagaaacttgctyctgtagaatcatttgaattttcttctagaaaatattgtgctttacggtgaaacctcattctgcttagggactttctggattatcatttctagcattcctccatttgccctgtaagtgccctttatttgaactcctgtacttctgtaaaatttattacatttctttctggaagaggagatcactaggagcagaggagttgagatgacatgcaatatgtta

SEQ ID NO: 2986 - DNA, 600 bp, Chicken  19866894090262_6
ttccaaataaattttatgtgagttatgaacaacaaaaaacattaagagtggctgaagttctgcctctgatcattacatgtgcacatacatgttttgggcctttacatatgtttttcacttgcagtttcagaaaatttgtagcagcttgatcactaagatggcattttgcaggagttgcatgttcatcatattttgcttgctattcatgatgtatttttsttgtctgtttaggtgaaattctagattagtgaaagttgtaccctacataaatacaaacctcagtttcagagaaacttgctyctgtagaatcatttgaattttcttctagaaaatattgtgctttacggtgaaacctcattctgcttagggactttctggattatcatttctagcattcctccatttgccctgtaagtgccctttatttgaactcctgtacttctgtaaaatttattacatttctttctggaagaggagatcactaggagcagaggagttgagatgacatgcaatatgttagcctggaaacagtaatacctttattaaaactagcaatgttttgacctacaaaggatcaaggtgtaactgaagtgtcagtct

SEQ ID NO: 2987 - DNA, 600 bp, Chicken  19866894090268_1
tatagggcagcaaagaaaaggagattccgcagaagttaattcagataaaataactataatttctaactgctttggatacttcttttctactctaaatgaatgatgtaaacactctggtagtaggtaatgcaaaaaatgtttataaaaagttacctcttccaattcaaaaagctgattctgtttccagatcgattctttcacaggctcatctctacggaatgcaaacagagctctctggtaagtgatttttcccatgcttttacttgctttctaaattacttctgacacacgcacacacayatatatatttgccagtaattgggaaatgttttcccctactgaaatactggaaattatttctgaacttgagatttagcaacaagaatctagtatgaggtgactgtagatatgtgacaaaaccaccttaatgtaaaatgtgggacgctcacatatgccaagtttggtgcaggcaatggaaggggacggtattttcgcagtcaaatcagagcaacagctttactgcatggactcagaactatcctatcaaagaatctttctctctagttattacaaacaggtgtacaatggtacaacaaatag

SEQ ID NO: 2988 - DNA, 600 bp, Chicken  19866894090272_1
tgtgagcttaatctaatagcagtttcaaaaaaatgccttattttaacccacatatcactggttacatatatacataggctcacattggtggcagtgagcttgcctgacttgcctcatttttgttttctggaatgaaagaaacaaaatccaaccttatttgcaaacgttgcatgatttccagtctgtacccccaaatggtatgaggcagaaaaaagtgagttgcttgtagtaaagctccttttatctgtagaaggtgcattgtctgcgctttatctgtaaaagcagaaaaatattattagyaattatgttgaatattaattaatttgatgcgtgttttccctttgatttaaactcttttccgctggcttcctctatagcattgcccacagtgacacctactggcattccagacaaggctggcttgcaggctgttgcctcctgggcaagtcatgmgggggggatgaattaataaaatccagaagagggaaaacgtggccttggagacacctcctggccacccaaggaacagctctggaccaggctgtgggtgctgcctccccagtctgtgctggacattgttcctggagtcttgtctacaag

SEQ ID NO: 2989 - DNA, 600 bp, Chicken  19866894090272_2
ttatttgcaaacgttgcatgatttccagtctgtacccccaaatggtatgaggcagaaaaaagtgagttgcttgtagtaaagctccttttatctgtagaaggtgcattgtctgcgctttatctgtaaaagcagaaaaatattattagyaattatgttgaatattaattaatttgatgcgtgttttccctttgatttaaactcttttccgctggcttcctctatagcattgcccacagtgacacctactggcattccagacaaggctggcttgcaggctgttgcctcctgggcaagtcatgmgggggggatgaattaataaaatccagaagagggaaaacgtggccttggagacacctcctggccacccaaggaacagctctggaccaggctgtgggtgctgcctccccagtctgtgctggacattgttcctggagtcttgtctacaagctaaatgacagcctccagtaatggcaacatggtgatctcagctttgtgcttagggaacaagcaaacattagaaacgagggatgcctcccttccatgggctgcaatggcttctcaaagcaaagtcccactggcaggtgtttctgttgccaggga

SEQ ID NO: 2990 - DNA, 600 bp, Chicken  19866894090275_1
aagtctttaatttgaactgtgctctctatgaagaggtaatcgtaacttcatgatgtaagcaccaaaacttatgggtctctttttacacagttgaataattgtctgtgtatatggagtgtgcggtatttttgtgtatttatatacttggaagaaggtaaatggagaaggtaaatggtaaaggtagttaggttgacccaagtcaaacttcagtaaggtgaaatgtacgacagtggataagaaataaggtagtatactaagcagtagttgaaactcttctctactgtttccctaattttaatytcagtttgtctgtatcctcaaagctgtgaagccaggacatttatttatgcrttttcatacaagaagtgccttcctrcggggtatygtacgacactaactttgttcttgatctccttttctttatttccgtaatgtggcacaaatatgaagctttaatctatctttactagttgaaacttcttttcagagttgtgagaggtattctgtggacatacagagaatgagtgtttggtgaaatattcagactcaactgctgaaaacctttagtgctgcctttttttgtcttacgaggagacaagt

SEQ ID NO: 2991 - DNA, 600 bp, Chicken  19866894090275_2
gatgtaagcaccaaaacttatgggtctctttttacacagttgaataattgtctgtgtatatggagtgtgcggtatttttgtgtatttatatacttggaagaaggtaaatggagaaggtaaatggtaaaggtagttaggttgacccaagtcaaacttcagtaaggtgaaatgtacgacagtggataagaaataaggtagtatactaagcagtagttgaaactcttctctactgtttccctaattttaatytcagtttgtctgtatcctcaaagctgtgaagccaggacatttatttatgcrttttcatacaagaagtgccttcctrcggggtatygtacgacactaactttgttcttgatctccttttctttatttccgtaatgtggcacaaatatgaagctttaatctatctttactagttgaaacttcttttcagagttgtgagaggtattctgtggacatacagagaatgagtgtttggtgaaatattcagactcaactgctgaaaacctttagtgctgcctttttttgtcttacgaggagacaagtttgtgggaggaaaaaagaaggaggaggcggagaaggggaattaaatgcaaa

SEQ ID NO: 2992 - DNA, 600 bp, Chicken  19866894090275_3
ctctttttacacagttgaataattgtctgtgtatatggagtgtgcggtatttttgtgtatttatatacttggaagaaggtaaatggagaaggtaaatggtaaaggtagttaggttgacccaagtcaaacttcagtaaggtgaaatgtacgacagtggataagaaataaggtagtatactaagcagtagttgaaactcttctctactgtttccctaattttaatytcagtttgtctgtatcctcaaagctgtgaagccaggacatttatttatgcrttttcatacaagaagtgccttcctrcggggtatygtacgacactaactttgttcttgatctccttttctttatttccgtaatgtggcacaaatatgaagctttaatctatctttactagttgaaacttcttttcagagttgtgagaggtattctgtggacatacagagaatgagtgtttggtgaaatattcagactcaactgctgaaaacctttagtgctgcctttttttgtcttacgaggagacaagtttgtgggaggaaaaaagaaggaggaggcggagaaggggaattaaatgcaaacactgagaattgaaagagaccgtgt

SEQ ID NO: 2993 - DNA, 599 bp, Chicken  19866894090275_4
cacagttgaataattgtctgtgtatatggagtgtgcggtatttttgtgtatttatatacttggaagaaggtaaatggagaaggtaaatggtaaaggtagttaggttgacccaagtcaaacttcagtaaggtgaaatgtacgacagtggataagaaataaggtagtatactaagcagtagttgaaactcttctctactgtttccctaattttaatytcagtttgtctgtatcctcaaagctgtgaagccaggacatttatttatgcrttttcatacaagaagtgccttcctrcggggtatygtacgacactaactttgttcttgatctccttttctttatttccgtaatgtggcacaaatatgaagctttaatctatctttactagttgaaacttcttttcagagttgtgagaggtattctgtggacatacagagaatgagtgtttggtgaaatattcagactcaactgctgaaaacctttagtgctgcctttttttgtcttacgaggagacaagtttgtgggaggaaaaaagaaggaggaggcggagaaggggaattaaatgcaaacactgagaattgaaagagaccgtgttgctttat

SEQ ID NO: 2994 - DNA, 600 bp, Chicken  19866894090276_1
ttcctggatggctgaggttccccattcaagctcgttgtgtaatcagtgcaatccacttgctccaagtggcatcagtagcacagtgggtggagggaacctttcctttaaacatccagttcagcactggcagtcgaggtactagaaggagctgcacttcagtactgattagttcagaagcagcccaaaccccctcgtacatggttcaatctctttttcaattggagtgtaacgctcttctgaccctctgaacgcttgactccagaatcccaggggtctctcctgacactctttgccacaaastccaagtggggcccttctctccagcagcagtgtagaggatgttctttaaatcatgtcccgtatgtactggccccagggccataccacaagctatctcctgtttaatttgttcaaaggcctgctgctgctcaggaccccatgaaaaattattcttcttctgagtcacctgataaagggggcttacaatgaggctgtagtttggaacatgcattctccaaaagcccactacgcactgaaaagacggtgtctctctcttgctagtgggttgagaaatagcagtgattttgtcagtcacatctg

SEQ ID NO: 2995 - DNA, 600 bp, Chicken  19866894090282_1
cagacccctcatcagctttgttgcccttctctgggcgtggtccaaggccctagtgtctttgttgtagtgaagagctcaaaactgagcacagtactcaaggtgcagcctcaccacagctgagtacagagggacgataacttccttgctcccactggcaacactttctaataaaagccggatgccgtggtttaatatctggcttattttgtttcagacctgatggtgtcacgtgcccagacctgttttgttgttgtaaacacttcctgctgctccatgctaggaaaaatacagtggcagctrttggctgcactttccaaagggwtttggtgaggaaggaaggtgagggtgccttcagggaagaggaaggaagagaccccaaatccgagccatctaaacttttcacagaattttgattgttttgactaaaaactttgaatagtctctaactactaaagtctgcttgctatcagctcagctgccagatgatcagtgcttacagatgcttcaagccttccaatagctttcatttcttcttctttttttttttttttttcgtgaaggagatgccagagttcatattggccttcttagagcttacat

SEQ ID NO: 2996 - DNA, 600 bp, Chicken  19866894090282_2
gcccttctctgggcgtggtccaaggccctagtgtctttgttgtagtgaagagctcaaaactgagcacagtactcaaggtgcagcctcaccacagctgagtacagagggacgataacttccttgctcccactggcaacactttctaataaaagccggatgccgtggtttaatatctggcttattttgtttcagacctgatggtgtcacgtgcccagacctgttttgttgttgtaaacacttcctgctgctccatgctaggaaaaatacagtggcagctrttggctgcactttccaaagggwtttggtgaggaaggaaggtgagggtgccttcagggaagaggaaggaagagaccccaaatccgagccatctaaacttttcacagaattttgattgttttgactaaaaactttgaatagtctctaactactaaagtctgcttgctatcagctcagctgccagatgatcagtgcttacagatgcttcaagccttccaatagctttcatttcttcttctttttttttttttttttcgtgaaggagatgccagagttcatattggccttcttagagcttacattaagagtttcagaaagttgtgt

SEQ ID NO: 2997 - DNA, 600 bp, Chicken  19866894090282_3
aaacacttcctgctgctccatgctaggaaaaatacagtggcagctrttggctgcactttccaaagggwtttggtgaggaaggaaggtgagggtgccttcagggaagaggaaggaagagaccccaaatccgagccatctaaacttttcacagaattttgattgttttgactaaaaactttgaatagtctctaactactaaagtctgcttgctatcagctcagctgccagatgatcagtgcttacagatgcttcaagccttccaatagctttcatttcttcttctttttttttttttttttwgtgaaggagatgccagagttcatattggccttcttagagcttacattaagagtttcagaaagttgtgtccaactcaattggacacaactataaggcaaaagatttttcttaactgtatgttgaattaaaaaacatttacgacttttttgcttaatgttttcaatcctgctactttaaactgaaatccaagtgcttagaacaatgctatatagttagctcagtaaaacaaggagaaatatcatatattttaggttgttttcttgaggtatactacaacttttacacatcaaattctgattt

SEQ ID NO: 2998 - DNA, 600 bp, Chicken  19866894090282_4
ggtatactacaacttttacacatcaaattctgattttataaagttgccaatcatttatttagttatttatttattttcaagcaaaaccacattatttttcagtaggtctgatcactgcatggactgctgtgttgctgtagacataaccatcactggcataaggctggctgcctcagtccttcatgcaaagagggtaaagatacacttgcaattttgaaaaaaattatcagtttcactgaataaatatgaggcttgcagctaactgagaagccttcctccctgttgccgactctgctgttytatcacctgaatgggacagaggaaaaagatgatacatgggatgagcttggcttataccagaagagaaaatattttttctgctctgccagaaagtaggaagtaggaaaagcccccacactaagcaaggcatatatattttattcctactatgtcataaagmaaaatctagaaatctaaatcatgtcatagatctgattcttggtatactacatattcaactcttcgaacagactagagatacccagtgcaacactgaggcatcaatgaggctttctggggattggcccaggcactcgctat

SEQ ID NO: 2999 - DNA, 600 bp, Chicken  19866894090282_5
aggctggctgcctcagtccttcatgcaaagagggtaaagatacacttgcaattttgaaaaaaattatcagtttcactgaataaatatgaggcttgcagctaactgagaagccttcctccctgttgccgactctgctgttytatcacctgaatgggacagaggaaaaagatgatacatgggatgagcttggcttataccagaagagaaaatattttttctgctctgccagaaagtaggaagtaggaaaagcccccacactaagcaaggcatatatattttattcctactatgtcataaagmaaaatctagaaatctaaatcatgtcatagatctgattcttggtatactacatattcaactcttcgaacagactagagatacccagtgcaacactgaggcatcaatgaggctttctggggattggcccaggcactcgctatcagacactgtcatacaagctgctgctctgctgataactgtgtgcacacaagtgctcagaggaagcagtctgaccgcttacacacgcaggtagctaagcagttatatggccagtggctcagtggtaatgctgaaactttccaaggctgctctactctgaag

SEQ ID NO: 3000 - DNA, 600 bp, Chicken  19866894090282_6
atatcattgcacagaagtgcttttgtgcaggcatatcaagactatagcctctgtgtgctttgctgacctctgggctcttcagtctacttgagtctcaagatgctttccgtctctgtgtcagcagacatcagagaaaagtcttgtattggaattgttttcccaacagtttattctccttctaaatacacctcattgcaattaaaaaaaaaacagatgagccatgtttttattagaagtactgtcagatgacagtgacctgagaaagtgaattaacttgataatgaaaagtaaatgttgtcwtttaaaaatcatcagtttacaaaatgcaggctggtggggggagaaaggggagaattaagtttagaactcagctccttcacactcaacagcctcatttacaggaagaatacaacaaatctcttgtttttgctrcacaagggctttatacaggtaaacacattgagaattttgcctgtaatgtttgcccagctagaccataaagaatccctgtgagcaaggggagctggtgacattgcatggccccaaggaactctgctttcctcccatgtccatctgccctagtgccaggcagggagaccg

SEQ ID NO: 3001 - DNA, 600 bp, Chicken  19866894090282_7
gaaaagtcttgtattggaattgttttcccaacagtttattctccttctaaatacacctcattgcaattaaaaaaaaaacagatgagccatgtttttattagaagtactgtcagatgacagtgacctgagaaagtgaattaacttgataatgaaaagtaaatgttgtcwtttaaaaatcatcagtttacaaaatgcaggctggtggggggagaaaggggagaattaagtttagaactcagctccttcacactcaacagcctcatttacaggaagaatacaacaaatctcttgtttttgctrcacaagggctttatacaggtaaacacattgagaattttgcctgtaatgtttgcccagctagaccataaagaatccctgtgagcaaggggagctggtgacattgcatggccccaaggaactctgctttcctcccatgtccatctgccctagtgccaggcagggagaccgctagagttgtgctattcctgtggagccgtccagtgcatttattctgagtacagacgcagtggtcttccattttgcaattacagaaacaagaatatccagtcaagctttctagctttcctcccttccccgctg

SEQ ID NO: 3002 - DNA, 600 bp, Chicken  19866894090285_1
tcctgcagcacttggctcaggttgggcagctgcactccatttctccaaagaacagctggtcattacccatctggactggatctgaactggtgacccagaaaaaatggatcttgtcaggttatcacttgctgagccatctactacttcttaacctgagcagaagttttgctgccagatgcttacagacttcagtgagtgcaatctttaactcttttaaaacaccgaaaagagaaatgttttagcagctacttttccttttaaaaggaaaatagtaatgtgcagctttctcagagcattggyttgatcttcttgctgtagttactctcccttctctggagaagagagaattcataacagctgacacactctgatgcacttagagtagcaaactcgaacaggcagaatttagatatttgtccctacaaacaagccagctttctcagagccacggttaaaacataatagaaagcatcttcaagctgcatactacttcctaggcaggagtagctctcttcctaataagaagacttcgtcaactgaccctgctgctctgaatgcacattgggagggcacaggaagaggaccgattataaaaccatt

SEQ ID NO: 3003 - DNA, 600 bp, Chicken  19866894090295_1
gtgtccccacagtgccactgcacaccttccctcccaggcaggggccatctcaggcagcccagtttattgcctcttaaaccaaatgcaggagggcaaatccaactgctggagcacagaacaccattttccccaggctggatttagaaaaaaaaaaaaaaaaaaaaaaatcaatacatcactcctgtactgcacagctttctttgtgttcatcaggcaagcagaagggctctccatccccagcaccgcactggcagaaaatgggtgagcagtagctgacagcagggtcttcctagtgacaastggaaagctgctgctgttgttctgctattgatctaagcagaatacaaaacacctgaagtcagcagggaaaaatagctgcagttggaaaagaaactgtaggggggtggggagcaggggtagagcaggtaagaagttttccatgcataaaattaacagccgggcattttattgcagctatcttgcccgactacaatagcggattaacgtagggagcaggaacactgccaccattgtttctgcagtctctcatttgatgagaaacaaaaggtttcgctcccatttctgccagcaacttgccac

SEQ ID NO: 3004 - DNA, 599 bp, Chicken  19866894090297_1
  misc_feature (1)..(114): n is any nucleotide
nnnnnnnnnnnnnnnnnnnnnnnnnnnnnnnnnnnnnnnnnnnnnnnnnnnnnnnnnnnnnnnnnnnnnnnnnnnnnnnnnnnnnnnnnnnnnnnnnnnnnnnnnnnnnnnnnnttacggggatcccaacagtgtggcacagatgttgtgatgccccacacacctcccttggtcttatgggattttttggttggattggtacagatttttgggtcccacagaagaggtggtgggattttgagatgaatcagaaaaaattgtgttccctcatgcatggtggctgtgttttggggaggattkgttggatttggcattctcaactggttataatgaattcatggtgcttaaggaggaatgttggggttagagatgagcatctgagggcatttcatgtcatccaaaggcaaccgatrtcatctacctgggtttgcacaatgtccttgacaaggctgcacaccacaccctcatctcacaatgggagagagatggatgtgagcattgggcagttctgcagagaaggaataggttggaaagtcgcagccagagggctgtggccaacrgctccatgtccaggtggaggtggtgatgagtggtgaccc

SEQ ID NO: 3005 - DNA, 600 bp, Chicken  19866894090297_10
ttatttccatgggaatgggcacagctgcagggagcacagtgacgcagtctgacagaaagccttctcagccacaaaaccccatttctctgcgcagtcccaccagaggtggtgcatttccatcagcaatgaacaagggctgcatgtcactcytgtacccatctggccctgcagaggtgccccagtgcagctgtcaccactgtgacatgggctgcctgaccacactggagccatccatgctgtgtttggcatcccatgggggacagcatgcaaagccacacgctggcagcagtttggggacarwgygtgaaacctggaagggracagcctgagtggggcacctccatgtggtctgtgtgcacgcctccacgtgtgccgtcccatcaaggaccacacagtgtcaccacaratggaggatcacaaataccacatgaggaggtgacaccacagcatcccgtgcccagggggaaactgaaagcagctttctcacctctccctgtgtcctcagctgcagcctcgctgtccccacgctgctcctgcctcatggcaccaatggccgtggccctcatcctcggtgagtgacaatggggacgtggtaccacg

SEQ ID NO: 3006 - DNA, 600 bp, Chicken  19866894090297_11
tatttccatgggaatgggcacagctgcagggagcacagtgacgcagtctgacagaaagccttctcagccacaaaaccccatttctctgcgcagtcccaccagaggtggtgcatttccatcagcaatgaacaagggctgcatgtcactcytgtacccatctggccctgcagaggtgccccagtgcagctgtcaccactgtgacatgggctgcctgaccacactggagccatccatgctgtgtttggcatcccatgggggacagcatgcaaagccacacgctggcagcagtttggggacarwgygtgaaacctggaagggracagcctgagtggggcacctccatgtggtctgtgtgcacgcctccacgtgtgccgtcccatcaaggaccacacagtgtcaccacaratggaggatcacaaataccacatgaggaggtgacaccacagcatcccgtgcccagggggaaactgaaagcagctttctcacctctccctgtgtcctcagctgcagcctcgctgtccccacgctgctcctgcctcatggcaccaatggccgtggccctcatcctcggtgagtgacaatggggacgtggtaccacgg

SEQ ID NO: 3007 - DNA, 600 bp, Chicken  19866894090297_12
tttccatgggaatgggcacagctgcagggagcacagtgacgcagtctgacagaaagccttctcagccacaaaaccccatttctctgcgcagtcccaccagaggtggtgcatttccatcagcaatgaacaagggctgcatgtcactcytgtacccatctggccctgcagaggtgccccagtgcagctgtcaccactgtgacatgggctgcctgaccacactggagccatccatgctgtgtttggcatcccatgggggacagcatgcaaagccacacgctggcagcagtttggggacarwgygtgaaacctggaagggracagcctgagtggggcacctccatgtggtctgtgtgcacgcctccacgtgtgccgtcccatcaaggaccacacagtgtcaccacaratggaggatcacaaataccacatgaggaggtgacaccacagcatcccgtgcccagggggaaactgaaagcagctttctcacctctccctgtgtcctcagctgcagcctcgctgtccccacgctgctcctgcctcatggcaccaatggccgtggccctcatcctcggtgagtgacaatggggacgtggtaccacgggg

SEQ ID NO: 3008 - DNA, 600 bp, Chicken  19866894090297_13
acagctgcagggagcacagtgacgcagtctgacagaaagccttctcagccacaaaaccccatttctctgcgcagtcccaccagaggtggtgcatttccatcagcaatgaacaagggctgcatgtcactcytgtacccatctggccctgcagaggtgccccagtgcagctgtcaccactgtgacatgggctgcctgaccacactggagccatccatgctgtgtttggcatcccatgggggacagcatgcaaagccacacgctggcagcagtttggggacarwgygtgaaacctggaagggracagcctgagtggggcacctccatgtggtctgtgtgcacgcctccacgtgtgccgtcccatcaaggaccacacagtgtcaccacaratggaggatcacaaataccacatgaggaggtgacaccacagcatcccgtgcccagggggaaactgaaagcagctttctcacctctccctgtgtcctcagctgcagcctcgctgtccccacgctgctcctgcctcatggcaccaatggccgtggccctcatcctcggtgagtgacaatggggacgtggtaccacgggggttggtggccctgtgtg

SEQ ID NO: 3009 - DNA, 600 bp, Chicken  19866894090297_14
tggtgcatttccatcagcaatgaacaagggctgcatgtcactcytgtacccatctggccctgcagaggtgccccagtgcagctgtcaccactgtgacatgggctgcctgaccacactggagccatccatgctgtgtttggcatcccatgggggacagcatgcaaagccacacgctggcagcagtttggggacarwgygtgaaacctggaagggracagcctgagtggggcacctccatgtggtctgtgtgcacgcctccacgtgtgccgtcccatcaaggaccacacagtgtcaccacaratggaggatcacaaataccacatgaggaggtgacaccacagcatcccgtgcccagggggaaactgaaagcagctttctcacctctccctgtgtcctcagctgcagcctcgctgtccccacgctgctcctgcctcatggcaccaatggccgtggccctcatcctcggtgagtgacaatggggacgtggtaccacgggggttggtggccctgtgtgagtccaggactgtccctcgcaagttggtggctggtggcagcgagcagggcacagcaacgtgagtatggggacagggggagaatggg

SEQ ID NO: 3010 - DNA, 599 bp, Chicken  19866894090297_2
  misc_feature (1)..(1): n is any nucleotide
nttacggggatcccaacagtgtggcacagatgttgtgatgccccacacacctcccttggtcttatgggattttttggttggattggtacagatttttgggtcccacagaagaggtggtgggattttgagatgaatcagaaaaaattgtgttccctcatgcatggtggctgtgttttggggaggattkgttggatttggcattctcaactggttataatgaattcatggtgcttaaggaggaatgttggggttagagatgagcatctgagggcatttcatgtcatccaaaggcaaccgatrtcatctacctgggtttgcacaatgtccttgacaaggctgcacaccacaccctcatctcacaatgggagagagatggatgtgagcattgggcagttctgcagagaaggaataggttggaaagtcgcagccagagggctgtggccaacrgctccatgtccaggtggaggtggtgatgagtggtgacccccagaggtccctcctgrgagcgctgctcttcaccacctctcactgacacagatgatgggatggagtgcaccctcagcactttgctgatggcactgagctgagtgctgcagtgg

SEQ ID NO: 3011 - DNA, 600 bp, Chicken  19866894090297_3
tgttccctcatgcatggtggctgtgttttggggaggattkgttggatttggcattctcaactggttataatgaattcatggtgcttaaggaggaatgttggggttagagatgagcatctgagggcatttcatgtcatccaaaggcaaccgatrtcatctacctgggtttgcacaatgtccttgacaaggctgcacaccacaccctcatctcacaatgggagagagatggatgtgagcattgggcagttctgcagagaaggaataggttggaaagtcgcagccagagggctgtggccaacrgctccatgtccaggtggaggtggtgatgagtggtgacccccagaggtccctcctgrgagcgctgctcttcaccacctctcactgacacagatgatgggatggagtgcaccctcagcactttgctgatggcactgagctgagtgctgcagtggagacgacagaaggaagggatgctgggaagggcaaacagaagagagcttcatcatcttcatggcggccatcgttgctctttgctgattcaggactgccacctccaggtgagtctcaccccttcctccggagatgtgggcygaccctttc

SEQ ID NO: 3012 - DNA, 600 bp, Chicken  19866894090297_4
tcaactggttataatgaattcatggtgcttaaggaggaatgttggggttagagatgagcatctgagggcatttcatgtcatccaaaggcaaccgatrtcatctacctgggtttgcacaatgtccttgacaaggctgcacaccacaccctcatctcacaatgggagagagatggatgtgagcattgggcagttctgcagagaaggaataggttggaaagtcgcagccagagggctgtggccaacrgctccatgtccaggtggaggtggtgatgagtggtgacccccagaggtccctcctgrgagcgctgctcttcaccacctctcactgacacagatgatgggatggagtgcaccctcagcactttgctgatggcactgagctgagtgctgcagtggagacgacagaaggaagggatgctgggaagggcaaacagaagagagcttcatcatcttcatggcggccatcgttgctctttgctgattcaggactgccacctccaggtgagtctcaccccttcctccggagatgtgggcygaccctttcactcctcaaaacagaccttggaatcagtgcggtgatcaatctgattcctgtccccc

SEQ ID NO: 3013 - DNA, 600 bp, Chicken  19866894090297_5
tggccaacrgctccatgtccaggtggaggtggtgatgagtggtgacccccagaggtccctcctgrgagcgctgctcttcaccacctctcactgacacagatgatgggatggagtgcaccctcagcactttgctgatggcactgagctgagtgctgcagtggagacgacagaaggaagggatgctgggaagggcaaacagaagagagcttcatcatcttcatggcggccatcgttgctctttgctgattcaggactgccacctccaggtgagtctcaccccttcctccggagatgtgggcygaccctttcactcctcaaaacagaccttggaatcagtgcggtgatcaatctgattcctgtccccctcactgactcctgttttctctcctcctccctgacaaacccgattcactgtcacttctgtggattccctccttcattcccatttattgcatgatagtgaatggaaaggaagataatattaattaatttctgccttcctctcttcagcactgctgtcctttcgtactcctgactcttccacccatcctcatcatcctcctggtagaccaaaatgggtgggaaaaaggatttgggggg

SEQ ID NO: 3014 - DNA, 600 bp, Chicken  19866894090297_6
catcatcctcctggtagaccaaaatgggtgggaaaaaggatttggggggactcttgagttgacatgtgtgatttggggaatcgttttctgaaattatttcagttttggtgcatgggaaagaggagggaagagagggaaggagggtttgaggcacacaatgtgttttgtgtggtgcagtggaaggaggaggaagcttaaaatagaaaaggggaagtaatgttggctgagaaaacggacttctaggaacaaatctgcaggaaacagcagattgtctgagtagaggttgggataaaaagacarttttagatckaaagcccagagatggagtgatttcagtcatagtttagtcmataggtttatttaaattcaaacacacccgaagtatcccacccaaaatgaccagcatgtacatccagcacagcaaaaatgtgggcaccaaatgatgcccgtccttctcttcccaaagacagacatcagtcctgagtgtaggttgggaattctcctccagtttcataccaaagccaagagacgcatatcctctgcatatcctgaacattctccattgatttccctacagatttggggtgcgcagccccacag

SEQ ID NO: 3015 - DNA, 600 bp, Chicken  19866894090297_7
ctggtagaccaaaatgggtgggaaaaaggatttggggggactcttgagttgacatgtgtgatttggggaatcgttttctgaaattatttcagttttggtgcatgggaaagaggagggaagagagggaaggagggtttgaggcacacaatgtgttttgtgtggtgcagtggaaggaggaggaagcttaaaatagaaaaggggaagtaatgttggctgagaaaacggacttctaggaacaaatctgcaggaaacagcagattgtctgagtagaggttgggataaaaagacarttttagatckaaagcccagagatggagtgatttcagtcatagtttagtcmataggtttatttaaattcaaacacacccgaagtatcccacccaaaatgaccagcatgtacatccagcacagcaaaaatgtgggcaccaaatgatgcccgtccttctcttcccaaagacagacatcagtcctgagtgtaggttgggaattctcctccagtttcataccaaagccaagagacgcatatcctctgcatatcctgaacattctccattgatttccctacagatttggggtgcgcagccccacagcatgacccca

SEQ ID NO: 3016 - DNA, 600 bp, Chicken  19866894090297_8
ctcttgagttgacatgtgtgatttggggaatcgttttctgaaattatttcagttttggtgcatgggaaagaggagggaagagagggaaggagggtttgaggcacacaatgtgttttgtgtggtgcagtggaaggaggaggaagcttaaaatagaaaaggggaagtaatgttggctgagaaaacggacttctaggaacaaatctgcaggaaacagcagattgtctgagtagaggttgggataaaaagacarttttagatckaaagcccagagatggagtgatttcagtcatagtttagtcmataggtttatttaaattcaaacacacccgaagtatcccacccaaaatgaccagcatgtacatccagcacagcaaaaatgtgggcaccaaatgatgcccgtccttctcttcccaaagacagacatcagtcctgagtgtaggttgggaattctcctccagtttcataccaaagccaagagacgcatatcctctgcatatcctgaacattctccattgatttccctacagatttggggtgcgcagccccacagcatgaccccatgggcccacaactccaggccatgcctgggctgcactgagt

SEQ ID NO: 3017 - DNA, 600 bp, Chicken  19866894090297_9
aacattctccattgatttccctacagatttggggtgcgcagccccacagcatgaccccatgggcccacaactccaggccatgcctgggctgcactgagtgcctgggtgggtatcagggatgggggaagctccgaaaaaaatacctcccacttatttccatgggaatgggcacagctgcagggagcacagtgacgcagtctgacagaaagccttctcagccacaaaaccccatttctctgcgcagtcccaccagaggtggtgcatttccatcagcaatgaacaagggctgcatgtcactcytgtacccatctggccctgcagaggtgccccagtgcagctgtcaccactgtgacatgggctgcctgaccacactggagccatccatgctgtgtttggcatcccatgggggacagcatgcaaagccacacgctggcagcagtttggggacarwgygtgaaacctggaagggracagcctgagtggggcacctccatgtggtctgtgtgcacgcctccacgtgtgccgtcccatcaaggaccacacagtgtcaccacaratggaggatcacaaataccacatgaggaggtgacaccacagcat

SEQ ID NO: 3018 - DNA, 600 bp, Chicken  19866894090308_1
ccatgtcttagtttcagctgggacagaattgttttttttcagtgtctggtatgatgccatgctttggttcttggagaaaaaagtgttgaaaatacaccaatgtttatagttgcctactaagcactgctgtacagagccaaggccattcacaatgaagggccaaaggagctgggagggaacagaattaggacagctcctgaacacttggaatacattgacaacactgggacatacaaacactgggacacacatttagcaaaagctacctggttaatcaacattcagggatatgccaatcgrgctagtcctgcccaaacctcctacatactgtagaaggggataaaatgctggtggtgcacatatctacatgtcttccatgtggggcaagacagcctcggttattcctgccttgggcaaaagcaagcctattcatggaattgcttttgttcaaggacctgggtgcacgctgtgagtaatgtggaaggatggggatgtccattgtttacctcaaggtgatttgatgctgggtgagaacagccaatgatttaaattgtatgatgttaaattactacataatactgcatgccattttattatggt

SEQ ID NO: 3019 - DNA, 600 bp, Chicken  19866894090312_1
ttctcagcaaagcggaaaataagatacttctttaaaataacaactcccgtattactgtagtcataggtgaacgtaaaattgtaaacacattacctggtccttcttcttctccttccagttgctccattacacttgaactaggtttttgtttttttccatcaaaactaatatataaacctccaacgcttcctgatattcaaaccagggtctatgctgctggaaagatgcaaactaaacagggaacacagtaaattattagaatattgtatcaaagcttataatgccctgtgaaggaataarcagaaaaaaatatttttcaccttcttccaacttaagtttagcactgcagagacttttaagcctcagtatckagaagaaatacacaattaagacgtgacaagtttactcttgccattatatgaaatgagggttggataaagagcaactcctgtgggctcacttccacagatccttcacattatctccagtgctctattctatcttagatatttctatcctctataaaatttagttcttagtttgcttaaccatgccaaaataacttataaccagcatccttcttctagacatttaaaagct

SEQ ID NO: 3020 - DNA, 600 bp, Chicken  19866894090312_2
cgtaaaattgtaaacacattacctggtccttcttcttctccttccagttgctccattacacttgaactaggtttttgtttttttccatcaaaactaatatataaacctccaacgcttcctgatattcaaaccagggtctatgctgctggaaagatgcaaactaaacagggaacacagtaaattattagaatattgtatcaaagcttataatgccctgtgaaggaataarcagaaaaaaatatttttcaccttcttccaacttaagtttagcactgcagagacttttaagcctcagtatckagaagaaatacacaattaagacgtgacaagtttactcttgccattatatgaaatgagggttggataaagagcaactcctgtgggctcacttccacagatccttcacattatctccagtgctctattctatcttagatatttctatcctctataaaatttagttcttagtttgcttaaccatgccaaaataacttataaccagcatccttcttctagacatttaaaagctagctaaagaggaggggaaaaaaacagctgcaaattattttcagctcttagtgaaaaatatgaaggtactac

SEQ ID NO: 3021 - DNA, 600 bp, Chicken  19866894090312_3
ttttaaaaacaagaattgaaaacataagagcatatgcaacttttcaggattaaaaaggatgatttaactaagcaatgtgtaagtcatttactggattgctgttatttacatctgaactaaaaataatacaaaaataaaagattagcaagaaaactgtgacctgaataagcaattaagtcagcctgaccagtttaaaccagtttcacatttcatttttaagctgaatgcatacaaggcctcaagatgcctaagtatttcagatatttctgttctgctacatgtaggactgaaaaaaataartgaattacaattctacttgatcatcagaacaactcaattttcyacatctgtgacaacactaytcccttttactctgtaccatttagcgtgtaatacgcaaatcttatgcatatatttaatgcaatgcatgttttttcagttttcagaaagatacttacacatctattttatttttcaacaaatcatcatcttcatctttctcatcttcatctattagttcctcttcagcctcttctagatccgaggattcaactttttcactctcttcatgcttactttcaaaatcactaccttggccta

SEQ ID NO: 3022 - DNA, 600 bp, Chicken  19866894090312_4
tcaggattaaaaaggatgatttaactaagcaatgtgtaagtcatttactggattgctgttatttacatctgaactaaaaataatacaaaaataaaagattagcaagaaaactgtgacctgaataagcaattaagtcagcctgaccagtttaaaccagtttcacatttcatttttaagctgaatgcatacaaggcctcaagatgcctaagtatttcagatatttctgttctgctacatgtaggactgaaaaaaataartgaattacaattctacttgatcatcagaacaactcaattttcyacatctgtgacaacactaytcccttttactctgtaccatttagcgtgtaatacgcaaatcttatgcatatatttaatgcaatgcatgttttttcagttttcagaaagatacttacacatctattttatttttcaacaaatcatcatcttcatctttctcatcttcatctattagttcctcttcagcctcttctagatccgaggattcaactttttcactctcttcatgcttactttcaaaatcactaccttggcctacctgatctagataatacttttggctggaacccatcccaggttc

SEQ ID NO: 3023 - DNA, 600 bp, Chicken  19866894090312_5
tttaactaagcaatgtgtaagtcatttactggattgctgttatttacatctgaactaaaaataatacaaaaataaaagattagcaagaaaactgtgacctgaataagcaattaagtcagcctgaccagtttaaaccagtttcacatttcatttttaagctgaatgcatacaaggcctcaagatgcctaagtatttcagatatttctgttctgctacatgtaggactgaaaaaaataartgaattacaattctacttgatcatcagaacaactcaattttcyacatctgtgacaacactaytcccttttactctgtaccatttagcgtgtaatacgcaaatcttatgcatatatttaatgcaatgcatgttttttcagttttcagaaagatacttacacatctattttatttttcaacaaatcatcatcttcatctttctcatcttcatctattagttcctcttcagcctcttctagatccgaggattcaactttttcactctcttcatgcttactttcaaaatcactaccttggcctacctgatctagataatacttttggctggaacccatcccaggttcagtatcaattacaaaaagc

SEQ ID NO: 3024 - DNA, 600 bp, Chicken  19866894090313_1
caccgctggtgctgagtttggtcgtctgatgctgtagaccacgttatagctgcggccgtaccttttgctgctggattctttgagtcctgctagctctttggggaggtgctgccgggctgagtgcttggggtgggctctactggtgcatggatgtgtgcaataacggccttctcgttttgtttccacagaaatggaagcggtttggaatttgcagaagcaaggtaaggatatgggagggaatgacggccgccccatcctcacatgctggttgtgtcgctgtccagcggcgcttggtcctgyttgcatctccttgggtttgtccatgttgggtctcagagccaggacaggcagcagtgctgggagcctaaagaaagcgattcgaatgagtctgttgcatgtccrtgctgtaatcattctgtatttctgctgttgggctcaagaatcagcattagattctgtacgtccccctagttcatctgcaaacacatcatggggaggatgcaggaggaggccctgtgcctcaggtcctgggaggcactcgtcaaaaactgagggtttttgcttcctttccagatcccaaaaggataatcacctacgacg

SEQ ID NO: 3025 - DNA, 600 bp, Chicken  19866894090313_2
gaggtgctgccgggctgagtgcttggggtgggctctactggtgcatggatgtgtgcaataacggccttctcgttttgtttccacagaaatggaagcggtttggaatttgcagaagcaaggtaaggatatgggagggaatgacggccgccccatcctcacatgctggttgtgtcgctgtccagcggcgcttggtcctgyttgcatctccttgggtttgtccatgttgggtctcagagccaggacaggcagcagtgctgggagcctaaagaaagcgattcgaatgagtctgttgcatgtccrtgctgtaatcattctgtatttctgctgttgggctcaagaatcagcattagattctgtacgtccccctagttcatctgcaaacacatcatggggaggatgcaggaggaggccctgtgcctcaggtcctgggaggcactcgtcaaaaactgagggtttttgcttcctttccagatcccaaaaggataatcacctacgacgaagccatggatcacccggatcaatgaaggtagcaagacaagactgcctgttataacctttctgcagcatttgtgctgtccgtgggggacaaaaggcttttat

SEQ ID NO: 3026 - DNA, 600 bp, Chicken  19866894090313_3
tatttctgctgttgggctcaagaatcagcattagattctgtacgtccccctagttcatctgcaaacacatcatggggaggatgcaggaggaggccctgtgcctcaggtcctgggaggcactcgtcaaaaactgagggtttttgcttcctttccagatcccaaaaggataatcacctacgacgaagccatggatcacccggatcaatgaaggtagcaagacaagactgcctgttataacctttctgcagcatttgtgctgtccgtgggggacaaaaggcttttatgctccttctaaatctwcagtgcagcagaggaaccgtaattagaatcacaggataatatatacaaatatataatatagttatttaaaaatggcgactgaaagtaattagacttcttaaggaatcggaaaaattatttcaacgagactacacacgtgattatttaatctccggtactgaatagatttttttttccattatttttgttttgttttgtttttgtttaaagagtgaatgcaagtgattaacgaatacagactcaatttgcaagcccggttctaaagttcccgctgtcgtctgcatgggcaacagcaaccca

SEQ ID NO: 3027 - DNA, 600 bp, Chicken  19866894090323_1
tgctctaaaaacgtttcatcagacacatctctgatcttgttctgtgattttcttttttaaagcacatatagtgttttacatagcacatggaattctagccctaattctatatcgtgtgaaaaatatgtattccaaaaattaaatagaaatcttacatggcaactggaagatctaaaagatggtgaatttaaaaaaaggaagagttgtttgtgaagaaatatctgtagaacagccaccttaagctgagatgtacaggtagagttcatctgtagatctgcattcagaatcatgaatgggagwgttatgaatgatggcaagattttcaagattaatactaatcctgaacctttaacaaaagctgtgcagggagaattgaagtaaacttttaagtgtttccattgcatgtgcaaagttgttttttcagaaacagctgttgagatgcaagtgcctgtcattaatctgtcagatcagataatctgcaatgggaaataacattttaaaaataaatactaacatttaatctttaggaccgctttgcactcatctggctttgaatacaggttgacttagagtaatttggagtcagaagcttgcagccag

SEQ ID NO: 3028 - DNA, 600 bp, Chicken  19866894090324_1
ttattcatggagatgaaagctaacagaatgtctccattacctcttgaaataaggggtctattaaggaccagggaggaaaccgcttctgcggatgctgcctgcccatcaggcacacgtaatgtttcagttccaattatcctcagagatctcatttgtttctcataaccatgagttgattccaatttgaaaacgtgggacgttctctcatcagctacctccagtaactccttggaccatattcattttggaaaatatagtttctttattgagtgcatctgtcttctgtggcttgaacttctyccctgagagatcccgggcctagaaggtagctggtggaaaactaggctaaatctattccttaatgtctaaatagcatgaaatactgctaaactagatcataaccacagtatttatatatggagttgctatgccactgcttagcttttcctaacatattactttgcaaggctctttgggatacctggaattgggaaagtggtatattaaaccgaattctattatattctctattgctgttagcaacttctctttttagcctgttttaaggcacctatgtgtttcatgaaagtgcattccttc

SEQ ID NO: 3029 - DNA, 600 bp, Chicken  19866894090330_1
atgctgctggatggggcagcattttcccagaagaaggaaagggagctgatgaatctatctataagccaaaagcttgttagggctatggtgttaggcatcagctgttaggggtaaggttccccagtgcacacatgatatgccactctcctgcctttgccaccacgtgtacaacatcagtgatggtttaacagatgccatcagtgctgctgccacactaataaatgatgcatccatttgagaactagtgggacagcatcacacaaatcaccttcagcttttgctatttgagtctccttcctrcacacttgtcccacctttccttgcttgtaaaggtaagggggtttgggcacagagataccactagaattgcaatttctcccccaaatatagctccttcttactgcttcagactggatccagccctatcagagcctctgcagctacgtggcccacagtacccttaggctgagcaatgaatccatatgcctttttatgtctttcccttgtgtcaatgycttttgctttcttaaaaccaccagtaaagggatgaaatgcagcatcggaagtcacccaagaagtaacactgctctatggctttat

SEQ ID NO: 3030 - DNA, 600 bp, Chicken  19866894090330_2
taataaatgatgcatccatttgagaactagtgggacagcatcacacaaatcaccttcagcttttgctatttgagtctccttcctrcacacttgtcccacctttccttgcttgtaaaggtaagggggtttgggcacagagataccactagaattgcaatttctcccccaaatatagctccttcttactgcttcagactggatccagccctatcagagcctctgcagctacgtggcccacagtacccttaggctgagcaatgaatccatatgcctttttatgtctttcccttgtgtcaatgycttttgctttcttaaaaccaccagtaaagggatgaaatgcagcatcggaagtcacccaagaagtaacactgctctatggctttatttcagcagcctgcacagccatctgtcaamatgaccactaccagggcaggattagatgagccactgcaatgaaaacaaataatggtgagaggccccctgcttcccattgggtctgcaatgctccaagcagctctgtaaaatgccaggcaccattcccacagagttccatccttcaatccctgtttgacagggacatgaagaactcaaggatgagta

SEQ ID NO: 3031 - DNA, 600 bp, Chicken  19866894090330_3
aaggtaagggggtttgggcacagagataccactagaattgcaatttctcccccaaatatagctccttcttactgcttcagactggatccagccctatcagagcctctgcagctacgtggcccacagtacccttaggctgagcaatgaatccatatgcctttttatgtctttcccttgtgtcaatgycttttgctttcttaaaaccaccagtaaagggatgaaatgcagcatcggaagtcacccaagaagtaacactgctctatggctttatttcagcagcctgcacagccatctgtcaamatgaccactaccagggcaggattagatgagccactgcaatgaaaacaaataatggtgagaggccccctgcttcccattgggtctgcaatgctccaagcagctctgtaaaatgccaggcaccattcccacagagttccatccttcaatccctgtttgacagggacatgaagaactcaaggatgagtattcaaagtgagtagtgagtcggactccaggtttcccttctggttttatcatgatctccccacaaccagcctgcagcatcctcggctgtggagagaagaccccaccccagcaggg

SEQ ID NO: 3032 - DNA, 599 bp, Chicken  19866894090337_1
  misc_feature (1)..(117): n is any nucleotide
nnnnnnnnnnnnnnnnnnnnnnnnnnnnnnnnnnnnnnnnnnnnnnnnnnnnnnnnnnnnnnnnnnnnnnnnnnnnnnnnnnnnnnnnnnnnnnnnnnnnnnnnnnnnnnnnnnnnngtagtttttgttctttgtggtggtacgttttgagttgtggtggttatcgagggaatgttgaacaaatgaggcactgttgcatttttttcattcttttttacttgcctgagtgtacctcatgggttctgaaaggtcagtgaaatcatctatatatgaattctttcataagtaggaaaaaataamgatgatgtcatttttttttcagaaccaagggtttatcggcgatgtcttagggaacaggactttctctcctcttctggggaatttgggaactatcttgtccatttaggacagttgtccatagtttcatgtcagagaataatcatactgctctccttaatcactagattgtgtcagtccaatttagcagaaatttagatgtgggtttttctgtgtttttccttccttatttatccagatatgtctttaagtcagttcattttcttattattcagatgtcaaccagcaagtcacaaatcaat

SEQ ID NO: 3033 - DNA, 600 bp, Chicken  19866894090337_2
tcatactgctctccttaatcactagattgtgtcagtccaatttagcagaaatttagatgtgggtttttctgtgtttttccttccttatttatccagatatgtctttaagtcagttcattttcttattattcagatgtcaaccagcaagtcacaaatcaatatctgaccacataatttttttggtgaaggcaatgaggcatgcttaaggggttacaggaaaagaatgacagaaaagggcactttttaaagtgaagttaacgctctggaactggacagattgacatcaatcaataaagcacraggagctgctcaactgctgttgcttaaacctcttctagaatgaccatttacaagggaaggtcattcaatttttgtgccactggatgtctcaatcctgccttatgatacctgcaaacactttcccatgcaacttccccagttctcaaattaactgttaacaaaatggctattggatcactttgatatttattacctctgctcttcccagttagtagaatcttggaaatgatcctttctatactaccatccaagtcattactgtgaataattagaaagctgggctataccctactggtaacc

SEQ ID NO: 3034 - DNA, 600 bp, Chicken  19866894090337_3
ccatttacttccactgtttgtttcttgcccttcagccaattttcagtctgtgtagcctgccagttttcttcctattgtgtgagtctgcaccttaggtgctagtcttccatatggaaatgttttcagcaaataagagccgaacttctcgtatccagtctccctctaatcataatgtgctataccatcacacttatatactcaaaatcctttccccattccctcttggaaacatttactaaactatttcattttggggggctgaagttgcctctccatcttcaccttcctgttcttgcttgygaaccacatccctgagcagagtctgagcccttttggtaattgcctgtgggcagaacaccctccaggtagctacctatgaggacgccgtgggttgaggacgaggtgtctgctctccatctctgtgtcagtctccacagggccactagtcttgcaccatcagtatttttgtgggataaatgggggggaattttgattgtactggaaatttaattagatttaaggctaattaaattcatttttttcctattaacatgttcacaaatattattgcatctcgttagatttcattcttctatcctt

SEQ ID NO: 3035 - DNA, 600 bp, Chicken  19866894090341_1
tttgtcttaggggggtggtggtgtaagttttatggccaaaacacacagataccccagaagggacaccctgctctggagctcattataaccatgtccccttgggcatgactcctgtgcggcaagtgggaaggtctctgttatactgagaacaaatgtatggcataaaaaaacccagctccagagctttcccatagttaatttccagggttactatgttgtatagcatagtaaaagtcttgtagtttccattcttcttccacccaatcccttgtatttttaagatcacttatgacacacacrcacacaaggctccagcacaaaaaggcagccacatcaaacacagcattgcaaacaagcaggctccatctcttccaagctctcatttttatctcaatctgtgcactgcaaattaacgtgcaaattacataaataagaagcacatgtaaattggaagtcattctccctggcactggctactcccaggcacttcagagtgagactgtggctacagatatctctagatgaagcattacatccttcagagtaaatccctggaccaacagaggggctactccagagcagctccacagatgagaaaga

SEQ ID NO: 3036 - DNA, 600 bp, Chicken  19866894090346_1
ctgaaagggtggtcaggcactggaatgggctgcccagagaggtggtggagtcaccgaagcctggtggtgttcaaagagcgtttggatgttgtgttgagggacatggtttagcgagaaccattggtgaagggcgaatggttggactgggtgatcctgtgggtcttttccaaccttagcgattctatgattctatgattctgtgattctatggggcatccacagcttctctaggcaacctgttccaatgccttaccacctgcatagtgaagattttttccttataactaatctaagtatacytcagtttaaagccattaccccttgtcctatcactacttgcctttgtgataagtccctatccagcttaccttaggccccctttaggtacttgtaggctgctaaaaggtctccctggagcatcctcattctcttctccagctgaaaaactccaactctctcatcctgttaaaaatttcctttccattcttcactcagcttgtatttgtgcttggattcaccctgacaaaggtgcacagccttgcacttggcctcattgaactttctgagatccacacaagctcacctctcagacctgcccag

SEQ ID NO: 3037 - DNA, 600 bp, Chicken  19866894090348_1
tagttaaaatgggtgcaagcatctagttatgagaatttgctgtaagactgatttcaaaaccttttcaacagaacctctgctatgttttctctccttatcaccctccgttttacttcatgaaatttgggtagaacagttacatgacagcaatcagataagatgacaacttcagtttcccaagtctgtgatcaaagattagcactggatttgctgagtttcatatgccacgtctataaggttggggactgggggggggagtagcataaaaaccgtaagaaagcgataaggcactaaaaccayctacagatgtacttacggaacagtgaaactacagctgcatttcttaatggaaaggaaatcggtcagtttatcagattgcaaatgcaagcaatacagaggaaggccagaagctcttacaagtgacagatgttattctcaactgtccttaaagcaggacaatttcttcatcaataagtggcatttgtttttgcccccagtataaactgaagtttgaattacttgtctggaaaatactaacactgagctctagaaataaaatgaatcttacaagattttaggaggtgctgaaacatttgtttt

SEQ ID NO: 3038 - DNA, 599 bp, Chicken  19866894090349_1
  misc_feature (1)..(205): n is any nucleotide
nnnnnnnnnnnnnnnnnnnnnnnnnnnnnnnnnnnnnnnnnnnnnnnnnnnnnnnnnnnnnnnnnnnnnnnnnnnnnnnnnnnnnnnnnnnnnnnnnnnnnnnnnnnnnnnnnnnnnnnnnnnnnnnnnnnnnnnnnnnnnnnnnnnnnnnnnnnnnnnnnnnnnnnnnnnnnnnnnnnnnnnnnnnnnnnnnnnnnnnnnnnnnacacctccctggttggggcgggtgatcttctgcaccgtttgttgcctctttcctccaacgtgaagctcctctcgggcatcagctgtgaaatgagmrgagacttttgctgtttcatgcacaatagaatagagctcaacctccattcataccaaygctggccccagggccacatgaagtcgtttattccagagcttttgccatagcaygcatcacctcagcagatgagaaccctgctggttaattaacacaaattaacaaggtgtgctgcatgccctgtgctttccaggaaaagctgtccactgggagatttctgcctcaggaattaccaaagcacagatagctgcagcaaagcatgcagagcactctgtgtaatctgtgggcatcgaaagccaaa

SEQ ID NO: 3039 - DNA, 599 bp, Chicken  19866894090349_2
  misc_feature (1)..(204): n is any nucleotide
nnnnnnnnnnnnnnnnnnnnnnnnnnnnnnnnnnnnnnnnnnnnnnnnnnnnnnnnnnnnnnnnnnnnnnnnnnnnnnnnnnnnnnnnnnnnnnnnnnnnnnnnnnnnnnnnnnnnnnnnnnnnnnnnnnnnnnnnnnnnnnnnnnnnnnnnnnnnnnnnnnnnnnnnnnnnnnnnnnnnnnnnnnnnnnnnnnnnnnnnnnnnacacctccctggttggggcgggtgatcttctgcaccgtttgttgcctctttcctccaacgtgaagctcctctcgggcatcagctgtgaaatgagmrgagacttttgctgtttcatgcacaatagaatagagctcaacctccattcataccaaygctggccccagggccacatgaagtcgtttattccagagcttttgccatagcaygcatcacctcagcagatgagaaccctgctggttaattaacacaaattaacaaggtgtgctgcatgccctgtgctttccaggaaaagctgtccactgggagatttctgcctcaggaattaccaaagcacagatagctgcagcaaagcatgcagagcactctgtgtaatctgtgggcatcgaaagccaaaa

SEQ ID NO: 3040 - DNA, 599 bp, Chicken  19866894090349_3
  misc_feature (1)..(147): n is any nucleotide
nnnnnnnnnnnnnnnnnnnnnnnnnnnnnnnnnnnnnnnnnnnnnnnnnnnnnnnnnnnnnnnnnnnnnnnnnnnnnnnnnnnnnnnnnnnnnnnnnnnnnnnnnnnnnnnnnnnnnnnnnnnnnnnnnnnnnnnnnnnnnnnnnnnacacctccctggttggggcgggtgatcttctgcaccgtttgttgcctctttcctccaacgtgaagctcctctcgggcatcagctgtgaaatgagmrgagacttttgctgtttcatgcacaatagaatagagctcaacctccattcataccaaygctggccccagggccacatgaagtcgtttattccagagcttttgccatagcaygcatcacctcagcagatgagaaccctgctggttaattaacacaaattaacaaggtgtgctgcatgccctgtgctttccaggaaaagctgtccactgggagatttctgcctcaggaattaccaaagcacagatagctgcagcaaagcatgcagagcactctgtgtaatctgtgggcatcgaaagccaaaacgaacccaactgctgrcaacagaaaataagaggtgggaaggagaggaagccaggaag

SEQ ID NO: 3041 - DNA, 599 bp, Chicken  19866894090349_4
  misc_feature (1)..(94): n is any nucleotide
nnnnnnnnnnnnnnnnnnnnnnnnnnnnnnnnnnnnnnnnnnnnnnnnnnnnnnnnnnnnnnnnnnnnnnnnnnnnnnnnnnnnnnnnnnnnnnacacctccctggttggggcgggtgatcttctgcaccgtttgttgcctctttcctccaacgtgaagctcctctcgggcatcagctgtgaaatgagmrgagacttttgctgtttcatgcacaatagaatagagctcaacctccattcataccaaygctggccccagggccacatgaagtcgtttattccagagcttttgccatagcaygcatcacctcagcagatgagaaccctgctggttaattaacacaaattaacaaggtgtgctgcatgccctgtgctttccaggaaaagctgtccactgggagatttctgcctcaggaattaccaaagcacagatagctgcagcaaagcatgcagagcactctgtgtaatctgtgggcatcgaaagccaaaacgaacccaactgctgrcaacagaaaataagaggtgggaaggagaggaagccaggaagggccgagctcacagcagktcctccatctggccatacctgtggggagcacctca

SEQ ID NO: 3042 - DNA, 568 bp, Chicken  19866894090349_5
tcatgcacaatagaatagagctcaacctccattcataccaaygctggccccagggccacatgaagtcgtttattccagagcttttgccatagcaygcatcacctcagcagatgagaaccctgctggttaattaacacaaattaacaaggtgtgctgcatgccctgtgctttccaggaaaagctgtccactgggagatttctgcctcaggaattaccaaagcacagatagctgcagcaaagcatgcagagcactctgtgtaatctgtgggcatcgaaagccaaaacgaacccaactgctgrcaacagaaaataagaggtgggaaggagaggaagccaggaagggccgagctcacagcagktcctccatctggccatacctgtggggagcacctcacctccatccccacccccgatgtcttcaaggcttggtgaagatggatcccaatgccacggcctgatgcttctgggacggctcctcttgcattccacccggacagaaggcagctgggatgggactcagcatgttttatgaggagcatcacatttttctgaccccgaaagcacagct

SEQ ID NO: 3043 - DNA, 509 bp, Chicken  19866894090349_6
atgaagtcgtttattccagagcttttgccatagcaygcatcacctcagcagatgagaaccctgctggttaattaacacaaattaacaaggtgtgctgcatgccctgtgctttccaggaaaagctgtccactgggagatttctgcctcaggaattaccaaagcacagatagctgcagcaaagcatgcagagcactctgtgtaatctgtgggcatcgaaagccaaaacgaacccaactgctgrcaacagaaaataagaggtgggaaggagaggaagccaggaagggccgagctcacagcagktcctccatctggccatacctgtggggagcacctcacctccatccccacccccgatgtcttcaaggcttggtgaagatggatcccaatgccacggcctgatgcttctgggacggctcctcttgcattccacccggacagaaggcagctgggatgggactcagcatgttttatgaggagcatcacatttttctgaccccgaaagcacagct

SEQ ID NO: 3044 - DNA, 600 bp, Chicken  19866894090353_1
ctgaatgtttatatgcctgtaactctaacttctcatttttgcaatcttaggccacagtctgttttctctgcaaatggtttccattgactggatctttttagtgacagttactgagctgattattctttaagaataattttataaatcatatacatctccaaaaatgcatgatgttttttagaggaatgtgaggctataatgtgcttttggaaaaagttgaatacattccctttaggggaaaaaaaaaaatctgtattctctgccttttctgaaacttgaatctttgctgcgcacatcttytctacagttaatttcctctcatgcactttctattgttgactgtatttctcagtttggaaarcaggcatgaaggtttgaacgtcttgttgcatgatgagtaacgcctgtattccatgcagtgttttttagtaaatgtatgcattctctttgtctttgctaagactaaatttacagaatccagtcaaaagtgttttacttamacgagagtatctattgagtacaataggttgactactttgccttttaatttctttcttccttccttcccactacaggaatggtatggtcagatgttaaaag

SEQ ID NO: 3045 - DNA, 600 bp, Chicken  19866894090353_2
ttttctctgcaaatggtttccattgactggatctttttagtgacagttactgagctgattattctttaagaataattttataaatcatatacatctccaaaaatgcatgatgttttttagaggaatgtgaggctataatgtgcttttggaaaaagttgaatacattccctttaggggaaaaaaaaaaatctgtattctctgccttttctgaaacttgaatctttgctgcgcacatcttytctacagttaatttcctctcatgcactttctattgttgactgtatttctcagtttggaaarcaggcatgaaggtttgaacgtcttgttgcatgatgagtaacgcctgtattccatgcagtgttttttagtaaatgtatgcattctctttgtctttgctaagactaaatttacagaatccagtcaaaagtgttttacttamacgagagtatctattgagtacaataggttgactactttgccttttaatttctttcttccttccttcccactacaggaatggtatggtcagatgttaaaagactctggtatgatggtttagaagactttttagaagagtcacgcaatcagcttagttttgtc

SEQ ID NO: 3046 - DNA, 600 bp, Chicken  19866894090353_3
gtgcttttggaaaaagttgaatacattccctttaggggaaaaaaaaaaatctgtattctctgccttttctgaaacttgaatctttgctgcgcacatcttytctacagttaatttcctctcatgcactttctattgttgactgtatttctcagtttggaaarcaggcatgaaggtttgaacgtcttgttgcatgatgagtaacgcctgtattccatgcagtgttttttagtaaatgtatgcattctctttgtctttgctaagactaaatttacagaatccagtcaaaagtgttttacttamacgagagtatctattgagtacaataggttgactactttgccttttaatttctttcttccttccttcccactacaggaatggtatggtcagatgttaaaagactctggtatgatggtttagaagactttttagaagagtcacgcaatcagcttagttttgtcatgaattccttgtatttggcaacttttgctctcaaagtagttgcccataacaaggtgagcacccatcttcataaaaaygtgagcttctctgagatagactgggcaaatatagaagtgtcttgaaggaggagttaaaaag

SEQ ID NO: 3047 - DNA, 600 bp, Chicken  19866894090353_4
cattctctttgtctttgctaagactaaatttacagaatccagtcaaaagtgttttacttamacgagagtatctattgagtacaataggttgactactttgccttttaatttctttcttccttccttcccactacaggaatggtatggtcagatgttaaaagactctggtatgatggtttagaagactttttagaagagtcacgcaatcagcttagttttgtcatgaattccttgtatttggcaacttttgctctcaaagtagttgcccataacaaggtgagcacccatcttcataaaaaygtgagcttctctgagatagactgggcaaatatagaagtgtcttgaaggaggagttaaaaagagagttagagaatacataaggcagcttcaagaattcaggaaccctaaactgtctagatgtccttttctaagaactcagttctcatttggggtactctccccatatagctttttctaattttgatttaattcatttgaggtagctggatttcataggccagtatctgtgcagaagtccattactaaccctgtgtacttagattgtctaacattttttggtaacaaaattttctttagctt

SEQ ID NO: 3048 - DNA, 600 bp, Chicken  19866894090358_1
tatactaattactctgttttatgaagagctattaataattttttgcaccaggaaatctgaagcaaactatattctaagtataaacagaaaagtcaactgggaaaataacaatcagacagggacggtattgcatggtatatacaacagtttcataactgtggctcactggtgacctatggggcaatatgttaagcaatgttaaatgatctgcatctgctccgtgcaaccatacagcttcaacaggggttacaattgctagcactgttgtgtgagcttctggcagaaattctgagatgacarggctctatagctcagagctttgggagctgttgccctttggcatattcagatatgacgaggcatagcttatacactactgtgcccacttctgagccccaccatacaagagaggcagggggttcactggaaaaaatacatcataatgccaccaagtgattaggtgattagtctggagagcaactttgtgaaaagagatctaggggctctgtgccttagtggacaaaacagtcattcatactctggggagcatcgggcacatcactgctaggcaattgatgctggtagtggaacagttcatgc

SEQ ID NO: 3049 - DNA, 600 bp, Chicken  19866894090365_1
tacacagataagctgcttcttgtgctacctggttggccgttttattccttttctatgctccatgctattttttactggaaatgcatcttgctgctattgtgccatgaggcagagtgctttccaaccagcaaggccgacttgtctgttacaaatctttcctccttctgttcatgacagttcatctggtctctgggaaagctctaagattatctcagctggagcaccagttttcatactgttctggtgcctggttcctgcatgtggattgttttctctttgcaccacatgctcgcccactcrtggtttccygcattatctctcagtccttatctttgtgtcatcttcctgctctttttcatttcttctcgacaatttctttttcagtccttaccttccttgagcaaattaatgttcattttgyttgccttggtgtctttcacttcacacagtcccttggtgttatcatccttcccccatccatttgttcttttctttggtcgcggctcagtttttcacacacgctgtgatgtctttctggctgccccttccatgcttgcacactgattcccatctgcatctcctccagcaagttttaaagac

SEQ ID NO: 3050 - DNA, 600 bp, Chicken  19866894090365_2
aagctgcttcttgtgctacctggttggccgttttattccttttctatgctccatgctattttttactggaaatgcatcttgctgctattgtgccatgaggcagagtgctttccaaccagcaaggccgacttgtctgttacaaatctttcctccttctgttcatgacagttcatctggtctctgggaaagctctaagattatctcagctggagcaccagttttcatactgttctggtgcctggttcctgcatgtggattgttttctctttgcaccacatgctcgcccactcrtggtttccygcattatctctcagtccttatctttgtgtcatcttcctgctctttttcatttcttctcgacaatttctttttcagtccttaccttccttgagcaaattaatgttcattttgyttgccttggtgtctttcacttcacacagtcccttggtgttatcatccttcccccatccatttgttcttttctttggtcgcggctcagtttttcacacacgctgtgatgtctttctggctgccccttccatgcttgcacactgattcccatctgcatctcctccagcaagttttaaagacctggccayt

SEQ ID NO: 3051 - DNA, 600 bp, Chicken  19866894090365_3
caaccagcaaggccgacttgtctgttacaaatctttcctccttctgttcatgacagttcatctggtctctgggaaagctctaagattatctcagctggagcaccagttttcatactgttctggtgcctggttcctgcatgtggattgttttctctttgcaccacatgctcgcccactcrtggtttccygcattatctctcagtccttatctttgtgtcatcttcctgctctttttcatttcttctcgacaatttctttttcagtccttaccttccttgagcaaattaatgttcattttgyttgccttggtgtctttcacttcacacagtcccttggtgttatcatccttcccccatccatttgttcttttctttggtcgcggctcagtttttcacacacgctgtgatgtctttctggctgccccttccatgcttgcacactgattcccatctgcatctcctccagcaagttttaaagacctggccaytgactgctggtttatagaaacctcccaccygaacagaacaaaacytttggcctgtgggtgggcagccagctgccacagtgtggaggctgctgagggcaccacatcacaaagtg

SEQ ID NO: 3052 - DNA, 600 bp, Chicken  19866894090365_4
ygcattatctctcagtccttatctttgtgtcatcttcctgctctttttcatttcttctcgacaatttctttttcagtccttaccttccttgagcaaattaatgttcattttgyttgccttggtgtctttcacttcacacagtcccttggtgttatcatccttcccccatccatttgttcttttctttggtcgcggctcagtttttcacacacgctgtgatgtctttctggctgccccttccatgcttgcacactgattcccatctgcatctcctccagcaagttttaaagacctggccaytgactgctggtttatagaaacctcccaccygaacagaacaaaacytttggcctgtgggtgggcagccagctgccacagtgtggaggctgctgagggcaccacatcacaaagtgaggaggggaagagcaaacctctctgtgccccctgcccagggcacatcagccttttgccatcatctctgttgatgtctgcaggagctggtgacgctcattagcgctttgcagcagcacgcggcactgccagccctccttagccattgcacagcaggttcatggggtgatgtggtgagtgatgtattgc

SEQ ID NO: 3053 - DNA, 600 bp, Chicken  19866894090365_5
catcttcctgctctttttcatttcttctcgacaatttctttttcagtccttaccttccttgagcaaattaatgttcattttgyttgccttggtgtctttcacttcacacagtcccttggtgttatcatccttcccccatccatttgttcttttctttggtcgcggctcagtttttcacacacgctgtgatgtctttctggctgccccttccatgcttgcacactgattcccatctgcatctcctccagcaagttttaaagacctggccaytgactgctggtttatagaaacctcccaccygaacagaacaaaacytttggcctgtgggtgggcagccagctgccacagtgtggaggctgctgagggcaccacatcacaaagtgaggaggggaagagcaaacctctctgtgccccctgcccagggcacatcagccttttgccatcatctctgttgatgtctgcaggagctggtgacgctcattagcgctttgcagcagcacgcggcactgccagccctccttagccattgcacagcaggttcatggggtgatgtggtgagtgatgtattgccaagaggcaggctgaggggagagaagaggc

SEQ ID NO: 3054 - DNA, 592 bp, Chicken  19866894090365_6
tttcatttcttctcgacaatttctttttcagtccttaccttccttgagcaaattaatgttcattttgyttgccttggtgtctttcacttcacacagtcccttggtgttatcatccttcccccatccatttgttcttttctttggtcgcggctcagtttttcacacacgctgtgatgtctttctggctgccccttccatgcttgcacactgattcccatctgcatctcctccagcaagttttaaagacctggccaytgactgctggtttatagaaacctcccaccygaacagaacaaaacytttggcctgtgggtgggcagccagctgccacagtgtggaggctgctgagggcaccacatcacaaagtgaggaggggaagagcaaacctctctgtgccccctgcccagggcacatcagccttttgccatcatctctgttgatgtctgcaggagctggtgacgctcattagcgctttgcagcagcacgcggcactgccagccctccttagccattgcacagcaggttcatggggtgatgtggtgagtgatgtattgccaagaggcaggctgaggggagagaagaggctgtggga

SEQ ID NO: 3055 - DNA, 600 bp, Chicken  19866894090366_1
tgaattttcctccaaatagccatttatgaataatccttctagaggtataatgtgggcaggcatggctggtgagtaaggcacgaaggacacgatgaggcttgtgctgggggagaggcaagaaagacttcccagaggtacatgtcctgggccccggcagacggggccaaagggccactgctgcttgcaggggatgtatggagtccccagtagcagagtgccttgttgcaaccttgtggtggttcagagccagggtcgggacagctgaacccattactgatgttgaagtgaagaatagagttrgaacttgaggcaaattcttctgtccactgtgaagcatctgactgaggaagaagagagatggtgcatcactgtgtggagaatgctctgtgttcctatgatgtacagtagctgggacttggattgtgtttctaggatgattcttgggacctctctttcttgccaggcaaaagactgtgtgctgcttgagaggctgtgccctatggtcaggaccttctgcagttgagagagagtggtgggcatggcccaagggaatcaaggaagacttagaaatgaaaaagtaaatcttttgcttgaataaag

SEQ ID NO: 3056 - DNA, 576 bp, Chicken  19866894090370_1
gagttgagctacttgagagaggcagttaaatattatttctaatttggtttaggaaaatagtcaatgtactgtttttaaaaatttattttaatgattgaagaagataccttagtgtaggtgaagtgatgttccggcatgtataccaatgctcactaaagttattattaagtaaatagttttttggatcaagaaaaaaccttaattgcttgataaagttactagatgtgtattcactgttaggcctgcatgatctgatggtgatcaagtctcttctgtttcaagtactatgtctatttatgytaataagtcctgacctcaaagcatttaaattcaaaacactgcaacatttgcaaccattttgccagggagaaagatctgggcagcagttataccagactttgcagactttggtaacagctatgtctgatgtccacttgatagctttcttcgttaataaattattcatttgtagaaatgatggggcagtcaaatgtgtttcaagtcttttttattttcctttttttttttttttttccagtggaagaagtttaaaattaggcctggtagacttaaaaa

SEQ ID NO: 3057 - DNA, 599 bp, Chicken  19866894090379_1
  misc_feature (1)..(14): n is any nucleotide
nnnnnnnnnnnnnncccttatctccctcttaaaacattcaggcaggcacctctatactttctcccatgcagctgtatctgcaaatctaccctcattatcctcaaaattctcctttgacgttatgtcaataaaatccttaagtgctgggctgtgagtgtgctggcaccctgcgacaaacagtgcctaatgattctttgcctccctgcctgcctctgtccattcattagctcctgtttgatagtgagagctcaggctgtggaggacagacattgcctttctctttcacaacccctaccaccrtggggtcttaggagggactgagggaataaattgatccacggttttatttcatcaaaactatgcttcacaattcgtgctaatggaaaacacacttggcccaataagccagcaaaaactttactgaagactaattccgatttcatgtcagaacgaacatgaagttcttatggcacataaagagagcagtgacaaaaacatggagaagccttcctgggatataygataygtaaaatatttttaattctgacctttacttctgtcaagtatttgtctctaacctctgatagaccttttcaggc

SEQ ID NO: 3058 - DNA, 600 bp, Chicken  19866894090379_2
cattagctcctgtttgatagtgagagctcaggctgtggaggacagacattgcctttctctttcacaacccctaccaccrtggggtcttaggagggactgagggaataaattgatccacggttttatttcatcaaaactatgcttcacaattcgtgctaatggaaaacacacttggcccaataagccagcaaaaactttactgaagactaattccgatttcatgtcagaacgaacatgaagttcttatggcacataaagagagcagtgacaaaaacatggagaagccttcctgggatataygataygtaaaatatttttaattctgacctttacttctgtcaagtatttgtctctaacctctgatagaccttttcaggcccttatacgattcctaaaacaccagcatcttgaactcaaaccagtattaagaggcaatactctctcttattaatgcactaagataaaaagtggttttctgttagacaacaacttctaagacatatttcttttccacggcaacatttgctggtagaacaatagtgacagcagagctaccatagcactcctgatgctttacatggcacctctacaggttttaca

SEQ ID NO: 3059 - DNA, 600 bp, Chicken  19866894090379_3
gctcctgtttgatagtgagagctcaggctgtggaggacagacattgcctttctctttcacaacccctaccaccrtggggtcttaggagggactgagggaataaattgatccacggttttatttcatcaaaactatgcttcacaattcgtgctaatggaaaacacacttggcccaataagccagcaaaaactttactgaagactaattccgatttcatgtcagaacgaacatgaagttcttatggcacataaagagagcagtgacaaaaacatggagaagccttcctgggatataygataygtaaaatatttttaattctgacctttacttctgtcaagtatttgtctctaacctctgatagaccttttcaggcccttatacgattcctaaaacaccagcatcttgaactcaaaccagtattaagaggcaatactctctcttattaatgcactaagataaaaagtggttttctgttagacaacaacttctaagacatatttcttttccacggcaacatttgctggtagaacaatagtgacagcagagctaccatagcactcctgatgctttacatggcacctctacaggttttacacatgc

SEQ ID NO: 3060 - DNA, 600 bp, Chicken  19866894090381_1
ctgaagctgcaatgagacaccacgaactcagtaacttcattttggtgtctgcccactatcacattcccagacagttcctggggatcttaagagacattcccagaaggcaaaaaccatgcagctctactgtcggtgcatagctgcattcaacccatcagttgagtataagagtttagtattctggacagaagtatcacctaccagtcagcttcaaagctaaagagcactctggaacattccacttcctaccaaggctgtggctttagcacctaggttttctgctggcacagaactactagkgttcttacaacagctcaactgcaatggcttcactttttggaatattaggagcctagaataaatccaggtccttggggagaacaacacgtgggattggtaagaggtaaggtgaggcaggttgcaaacaaatcatcattcccaacgttcacttccaaaacagtctccataacttcaaactgtgcccatgaagaagtttcactactgtggtagttctgtggaacccacaacaaaccatacctgtaaggatgttcttgaatgcctcttctacatttgttgaatccagagcagaagtttcaataa

SEQ ID NO: 3061 - DNA, 600 bp, Chicken  19866894090381_2
caggcacagagcttgaactgtgacacctgtaccatccccaggtatttaaaagtagggagttaggggcaaaaagtaaggtgttgaaccacaagatcaaagtaatgctctaaccagggtgcctactaatttgtttgattctcttatacagattttgcctctcattcagctggaaatttaaaagcagcttccctatacactgggtactcgcttactagtgaagctgaggaaatgcatttaagcaagccctggtaatattcctagaaggattctaaaggccatatatttaaattccagccccaygcttgatatgcacaactgtaaattgaatgtctgttggcctattcaggcacaagaatatttgatcagtcctctgcaagataaggaagagagagaagtaacacagtggcarcagctcacataaccaactagacttttcccaaaacaaatgataacctccaagtctggtgatgagtgcctttaaatgacactagatgayactactatccaggttagtgctctggggcagaaactgcactatctaagagaaggttcagaattcatttgcagctctscatagaaccaggcctctaggaatgaagg

SEQ ID NO: 3062 - DNA, 600 bp, Chicken  19866894090381_3
accagggtgcctactaatttgtttgattctcttatacagattttgcctctcattcagctggaaatttaaaagcagcttccctatacactgggtactcgcttactagtgaagctgaggaaatgcatttaagcaagccctggtaatattcctagaaggattctaaaggccatatatttaaattccagccccaygcttgatatgcacaactgtaaattgaatgtctgttggcctattcaggcacaagaatatttgatcagtcctctgcaagataaggaagagagagaagtaacacagtggcarcagctcacataaccaactagacttttcccaaaacaaatgataacctccaagtctggtgatgagtgcctttaaatgacactagatgayactactatccaggttagtgctctggggcagaaactgcactatctaagagaaggttcagaattcatttgcagctctscatagaaccaggcctctaggaatgaaggaaagacattttgtattgtgatatttgacatctatatgtggtattttctcctctaarcataaaaaaaacatgctgttttttagccttcctagaggaagtgtttatgcttc

SEQ ID NO: 3063 - DNA, 600 bp, Chicken  19866894090381_4
ctgggtactcgcttactagtgaagctgaggaaatgcatttaagcaagccctggtaatattcctagaaggattctaaaggccatatatttaaattccagccccaygcttgatatgcacaactgtaaattgaatgtctgttggcctattcaggcacaagaatatttgatcagtcctctgcaagataaggaagagagagaagtaacacagtggcarcagctcacataaccaactagacttttcccaaaacaaatgataacctccaagtctggtgatgagtgcctttaaatgacactagatgayactactatccaggttagtgctctggggcagaaactgcactatctaagagaaggttcagaattcatttgcagctctscatagaaccaggcctctaggaatgaaggaaagacattttgtattgtgatatttgacatctatatgtggtattttctcctctaarcataaaaaaaacatgctgttttttagccttcctagaggaagtgtttatgcttcagatatcaggcagctcaaggacagtgttttacaaacatgtgctaccaagagatttaacaagagaaaacaccatccgctacttaacaa

SEQ ID NO: 3064 - DNA, 600 bp, Chicken  19866894090381_5
aggccatatatttaaattccagccccaygcttgatatgcacaactgtaaattgaatgtctgttggcctattcaggcacaagaatatttgatcagtcctctgcaagataaggaagagagagaagtaacacagtggcarcagctcacataaccaactagacttttcccaaaacaaatgataacctccaagtctggtgatgagtgcctttaaatgacactagatgayactactatccaggttagtgctctggggcagaaactgcactatctaagagaaggttcagaattcatttgcagctctscatagaaccaggcctctaggaatgaaggaaagacattttgtattgtgatatttgacatctatatgtggtattttctcctctaarcataaaaaaaacatgctgttttttagccttcctagaggaagtgtttatgcttcagatatcaggcagctcaaggacagtgttttacaaacatgtgctaccaagagatttaacaagagaaaacaccatccgctacttaacaagccagctacaaaacsttcaataccccttttttcacaccaaaataagcataaggcaaaagctaaatattggacaaag

SEQ ID NO: 3065 - DNA, 600 bp, Chicken  19866894090381_6
atttgatcagtcctctgcaagataaggaagagagagaagtaacacagtggcarcagctcacataaccaactagacttttcccaaaacaaatgataacctccaagtctggtgatgagtgcctttaaatgacactagatgayactactatccaggttagtgctctggggcagaaactgcactatctaagagaaggttcagaattcatttgcagctctscatagaaccaggcctctaggaatgaaggaaagacattttgtattgtgatatttgacatctatatgtggtattttctcctctaarcataaaaaaaacatgctgttttttagccttcctagaggaagtgtttatgcttcagatatcaggcagctcaaggacagtgttttacaaacatgtgctaccaagagatttaacaagagaaaacaccatccgctacttaacaagccagctacaaaacsttcaataccccttttttcacaccaaaataagcataaggcaaaagctaaatattggacaaagattccagtctgcaccactgaacgtgagaaagcacctgaggacactgcataccaacctgcaaaagcacgggcctcgtcggtgggc

SEQ ID NO: 3066 - DNA, 600 bp, Chicken  19866894090381_7
gatcagtcctctgcaagataaggaagagagagaagtaacacagtggcarcagctcacataaccaactagacttttcccaaaacaaatgataacctccaagtctggtgatgagtgcctttaaatgacactagatgayactactatccaggttagtgctctggggcagaaactgcactatctaagagaaggttcagaattcatttgcagctctscatagaaccaggcctctaggaatgaaggaaagacattttgtattgtgatatttgacatctatatgtggtattttctcctctaarcatraaaaaaacatgctgttttttagccttcctagaggaagtgtttatgcttcagatatcaggcagctcaaggacagtgttttacaaacatgtgctaccaagagatttaacaagagaaaacaccatccgctacttaacaagccagctacaaaacsttcaataccccttttttcacaccaaaataagcataaggcaaaagctaaatattggacaaagattccagtctgcaccactgaacgtgagaaagcacctgaggacactgcataccaacctgcaaaagcacgggcctcgtcggtgggcacag

SEQ ID NO: 3067 - DNA, 455 bp, Chicken  19866894090381_8
agtgctctggggcagaaactgcactatctaagagaaggttcagaattcatttgcagctctscatagaaccaggcctctaggaatgaaggaaagacattttgtattgtgatatttgacatctatatgtggtattttctcctctaarcataaaaaaaacatgctgttttttagccttcctagaggaagtgtttatgcttcagatatcaggcagctcaaggacagtgttttacaaacatgtgctaccaagagatttaacaagagaaaacaccatccgctacttaacaagccagctacaaaacsttcaataccccttttttcacaccaaaataagcataaggcaaaagctaaatattggacaaagattccagtctgcaccactgaacgtgagaaagcacctgaggacactgcataccaacctgcaaaagcacgggcctcgtcggtgggcacagccctca

SEQ ID NO: 3068 - DNA, 581 bp, Chicken  19866894090386_1
gcattgtctcacttcttatgcatgaatgcaactgtagtacagaagtctatcacaatttactttaagttccaactccatgcgagtgaattccttttcagagaaatatggagcataaatattggtttacaaaaatccatgttctagaaaatgtgctatttaatccatggcacttgcaaacagatgaaagcattaagagcgcttggtattaatactgcaggacccctcggaaggaaaagagacttctaaggactccaggacttcacattctttgctactgcatagcaaagataacacgaaagygaaaacacaggcattgcactagggatgaagagctgaagaaatgactcagagccatgaatggtggtgagcaggtccaaaactgagcaaagaagatggaaaaatagatggaacttgaaaagaaaaagcaaacaaaaaacaacccaccgggtacagaggtacttaaaatttaatagcaaaccaatcaatggaagacaaaaagtagtaactgctgtcaaaactcaggaggtaggaatttatttctccctaagactagtattaaaaatgcttcaaagaaaacagta

SEQ ID NO: 3069 - DNA, 600 bp, Chicken  19866894090394_1
tgccagacaataataactcttgatttaatttctgagctaacattaactgaggttcagataacccacatacttaggagaatccatccctgaaaaatcagagaacggtgttcggaagatacgaaaagataaataaatatttagcttttttcgatataaggtaatcagaaatattttgaagggaaaatggtgggccagactcacacctgtcaccagaaactcctatcctatttcagggtctatctgtaaggaaaattgggctgaaaatttagccattcaactcagatgcccaaaaagaagggmaatgcactctgtttaatgtctgagaagtctttttttgttctgaagagagccattcaaatttgaaagatataactgctcgtttcttatttagtaggtgaatgaacaaaggtgtagggcagagctctgcattatcccgtttggtcactcaacagagcagtgagggtaggataattctgatttgataacacttcagcactcatttggtcaagatcaagtggtttcaaaacatcaatgattcagacttccataattaattcatttttcaatcatcatcaagaaatatattttaaaatctaccaa

SEQ ID NO: 3070 - DNA, 585 bp, Chicken  19866894090396_1
gatattattttccagcagttttcaattactaattagtacgaaaaaaagtttctgccaaaaacaagaagtttctgcatttccagtgatcacgatactgcttactctatgattagtgtgttgtagagatagtaagtctctggaatccactgcattaaatatctgaagattaattactttgttacagcactgccagtgtttccactcaaacatacatatctcttgtgaagataaaatataaaataaaaataaaaaatcaacaaacagacagaattagtgtgctgagtagatttttttcacatytataagcatttgtgatatttgtaaagtccctacctttacagtttagacagttgtgacacacactgtaaagttacaaataccacctagctttttaattcaggccaaattagagaaataataaaaaataactactatgtttcagtagttcaccattttgatgtgacactataatgtgtcaatattacaatcctcagtgaacagcaatgcaatagtactccttaaataaaagagtatatattatgacaactcacaaagataacagactagataacggtcttcaaaatt

SEQ ID NO: 3071 - DNA, 600 bp, Chicken  19866894090401_1
tgaggccttaagcaaacctcaagccatgaaggagcagggaatttatacaggcctgcacagactcaatcagcagtttcctttccactgacatccacaggaagctagcttgtatggaaagatgggggcatgcagacatcaacaattacagataggccacttttcccacatttggaaatgaacagctcaaggctacctatttagttagtgtctttaaggcgtgggaaacctctactagctggcagattttttctttgaaaaatttactcattgattctattactaagcacagggcaataatamagtaaggatgcaagatgacaaaaaygaacaaaagaaaatcacattttaaggaaagttatttaaaggtgacaacatttgtagtctgtaagagtaccactttcaaatatatgccctgactcaaatattttaggtatactcacaaacccagccactaaaacagaatttggaaagatgacatacagacatatatctgcttaacttaattctacattctgaagacgctgcaatctcctctaaagagaagaaattacatttcaatactgcagtaccctcattaaaccatttcacttgcatttgtag

SEQ ID NO: 3072 - DNA, 600 bp, Chicken  19866894090401_2
atgaaggagcagggaatttatacaggcctgcacagactcaatcagcagtttcctttccactgacatccacaggaagctagcttgtatggaaagatgggggcatgcagacatcaacaattacagataggccacttttcccacatttggaaatgaacagctcaaggctacctatttagttagtgtctttaaggcgtgggaaacctctactagctggcagattttttctttgaaaaatttactcattgattctattactaagcacagggcaataatamagtaaggatgcaagatgacaaaaaygaacaaaagaaaatcacattttaaggaaagttatttaaaggtgacaacatttgtagtctgtaagagtaccactttcaaatatatgccctgactcaaatattttaggtatactcacaaacccagccactaaaacagaatttggaaagatgacatacagacatatatctgcttaacttaattctacattctgaagacgctgcaatctcctctaaagagaagaaattacatttcaatactgcagtaccctcattaaaccatttcacttgcatttgtagcctgtttatttgtttataaagacat

SEQ ID NO: 3073 - DNA, 600 bp, Chicken  19866894090401_3
acccagattaagcaatagtttgggaacctggaaggaagaaccaacatcacaagttaataggacagtgctatatctgtatgttacataaacatgggtggctatgatttccattgtgctcgtgtcataaatttattaactgatagaagaatgtaggttcttactttttaaatctgcaactggtttctcatcttcccattttataaaggagtgaggtatacttccatgtgttctacatgtctccctcccagctcagcttcccactagtggagaagcaaaggatcatcaccagcaagcagattsgttccagkaggacacagtgacatcccatatactaccttacaggtttgtccatcatctaccattttaaatgccactcaaaatgttctgtatcattcagtaatgcaagagagagaaggaagtagtatcaaatataaacyggcataaaacaacaactacgttctgcccactcactaaggtagtgtgctgagatacaggcaacgaagaagtctttcagatgctttggaggaaagaaactgaattgatcgagtagctattccagatggtagaaagctgcagaagaaaaggctcttgacagagaga

SEQ ID NO: 3074 - DNA, 600 bp, Chicken  19866894090401_4
taagcaatagtttgggaacctggaaggaagaaccaacatcacaagttaataggacagtgctatatctgtatgttacataaacatgggtggctatgatttccattgtgctcgtgtcataaatttattaactgatagaagaatgtaggttcttactttttaaatctgcaactggtttctcatcttcccattttataaaggagtgaggtatacttccatgtgttctacatgtctccctcccagctcagcttcccactagtggagaagcaaaggatcatcaccagcaagcagattsgttccagkaggacacagtgacatcccatatactaccttacaggtttgtccatcatctaccattttaaatgccactcaaaatgttctgtatcattcagtaatgcaagagagagaaggaagtagtatcaaatataaacyggcataaaacaacaactacgttctgcccactcactaaggtagtgtgctgagatacaggcaacgaagaagtctttcagatgctttggaggaaagaaactgaattgatcgagtagctattccagatggtagaaagctgcagaagaaaaggctcttgacagagagaagacaggt

SEQ ID NO: 3075 - DNA, 600 bp, Chicken  19866894090401_5
tgatagaagaatgtaggttcttactttttaaatctgcaactggtttctcatcttcccattttataaaggagtgaggtatacttccatgtgttctacatgtctccctcccagctcagcttcccactagtggagaagcaaaggatcatcaccagcaagcagattsgttccagkaggacacagtgacatcccatatactaccttacaggtttgtccatcatctaccattttaaatgccactcaaaatgttctgtatcattcagtaatgcaagagagagaaggaagtagtatcaaatataaacyggcataaaacaacaactacgttctgcccactcactaaggtagtgtgctgagatacaggcaacgaagaagtctttcagatgctttggaggaaagaaactgaattgatcgagtagctattccagatggtagaaagctgcagaagaaaaggctcttgacagagagaagacaggtgttagataagcagacaaagctgcaatggtaatagagagaygcgtggtccatgaggtagccaaaaacaagtccacagagagaaatccggagccggctcctgaaaagaagggggagccactgctgtcagag

SEQ ID NO: 3076 - DNA, 600 bp, Chicken  19866894090401_6
ccatcatctaccattttaaatgccactcaaaatgttctgtatcattcagtaatgcaagagagagaaggaagtagtatcaaatataaacyggcataaaacaacaactacgttctgcccactcactaaggtagtgtgctgagatacaggcaacgaagaagtctttcagatgctttggaggaaagaaactgaattgatcgagtagctattccagatggtagaaagctgcagaagaaaaggctcttgacagagagaagacaggtgttagataagcagacaaagctgcaatggtaatagagagaygcgtggtccatgaggtagccaaaaacaagtccacagagagaaatccggagccggctcctgaaaagaagggggagccactgctgtcagaggatgggatatcactttttcattcccccttttctgggtgaaggarcagcctgaggcattctgcatctcctggcgtcaggcgggggccaaggtcacacaccacagaggaggtgatgacagcacggatgatgatacaaggcgaggcagaaggctcacagcacagcactgacagtgctgcgtggagtcacagagcagtgatgcagcgtacggtgc

SEQ ID NO: 3077 - DNA, 600 bp, Chicken  19866894090401_7
tgctgagatacaggcaacgaagaagtctttcagatgctttggaggaaagaaactgaattgatcgagtagctattccagatggtagaaagctgcagaagaaaaggctcttgacagagagaagacaggtgttagataagcagacaaagctgcaatggtaatagagagaygcgtggtccatgaggtagccaaaaacaagtccacagagagaaatccggagccggctcctgaaaagaagggggagccactgctgtcagaggatgggatatcactttttcattcccccttttctgggtgaaggarcagcctgaggcattctgcatctcctggcgtcaggcgggggccaaggtcacacaccacagaggaggtgatgacagcacggatgatgatacaaggcgaggcagaaggctcacagcacagcactgacagtgctgcgtggagtcacagagcagtgatgcagcgtacggtgcagctcagtatgacagagacagcaggcaaagaaacacaggagatatggaaggtgacaagttgacttctgagtgccaaaaggtctgtgtcatggcagatcgtgtgcctgagtgagaagcagggcatgttggggct

SEQ ID NO: 3078 - DNA, 600 bp, Chicken  19866894090421_1
acccactattcagtgtcatttcactgtacttatgtcctcaggggatttctgcctcctgaaaccacttttccattgttagtactcattgaacactggagttacacccttattaaagccaagctacaaaagatacacacaaaaataaaattcagcagtccaacaaattgcattgaatttgttacagcttgctagtaatcagcagccacagatagctgccactcccaaaagcagagagaagcagaagctgaggtttgacaccttgtggttccacataggctattcctgtctcattcccaggtrgaggccagcaatttggagcatgcaactactctacgcattccactccctgtarcrcacacttagcrtggtcatttctcgcaccaagaggaggtaggttcagaattgctacatactttaggtactgatcacttctccactaaggatgaagcacagaagggtcagacaggaagggcagaggcagcagctaggactgcaagcaagcaggtgtgtgtrtccccatgtatggggaaaaggctcagagmggaaagatgagaacactgacttgcaatctgagtcttacaatcctgtagcccagagatc

SEQ ID NO: 3079 - DNA, 600 bp, Chicken  19866894090421_2
ctcctgaaaccacttttccattgttagtactcattgaacactggagttacacccttattaaagccaagctacaaaagatacacacaaaaataaaattcagcagtccaacaaattgcattgaatttgttacagcttgctagtaatcagcagccacagatagctgccactcccaaaagcagagagaagcagaagctgaggtttgacaccttgtggttccacataggctattcctgtctcattcccaggtrgaggccagcaatttggagcatgcaactactctacgcattccactccctgtarcrcacacttagcrtggtcatttctcgcaccaagaggaggtaggttcagaattgctacatactttaggtactgatcacttctccactaaggatgaagcacagaagggtcagacaggaagggcagaggcagcagctaggactgcaagcaagcaggtgtgtgtrtccccatgtatggggaaaaggctcagagmggaaagatgagaacactgacttgcaatctgagtcttacaatcctgtagcccagagatctgcagctgctaagatctcatcctacctccagtcaytgtctttatgtctattt

SEQ ID NO: 3080 - DNA, 600 bp, Chicken  19866894090421_3
cctgaaaccacttttccattgttagtactcattgaacactggagttacacccttattaaagccaagctacaaaagatacacacaaaaataaaattcagcagtccaacaaattgcattgaatttgttacagcttgctagtaatcagcagccacagatagctgccactcccaaaagcagagagaagcagaagctgaggtttgacaccttgtggttccacataggctattcctgtctcattcccaggtrgaggccagcaatttggagcatgcaactactctacgcattccactccctgtarcrcacacttagcrtggtcatttctcgcaccaagaggaggtaggttcagaattgctacatactttaggtactgatcacttctccactaaggatgaagcacagaagggtcagacaggaagggcagaggcagcagctaggactgcaagcaagcaggtgtgtgtrtccccatgtatggggaaaaggctcagagmggaaagatgagaacactgacttgcaatctgagtcttacaatcctgtagcccagagatctgcagctgctaagatctcatcctacctccagtcaytgtctttatgtctatttca

SEQ ID NO: 3081 - DNA, 600 bp, Chicken  19866894090421_4
ttttccattgttagtactcattgaacactggagttacacccttattaaagccaagctacaaaagatacacacaaaaataaaattcagcagtccaacaaattgcattgaatttgttacagcttgctagtaatcagcagccacagatagctgccactcccaaaagcagagagaagcagaagctgaggtttgacaccttgtggttccacataggctattcctgtctcattcccaggtrgaggccagcaatttggagcatgcaactactctacgcattccactccctgtarcrcacacttagcrtggtcatttctcgcaccaagaggaggtaggttcagaattgctacatactttaggtactgatcacttctccactaaggatgaagcacagaagggtcagacaggaagggcagaggcagcagctaggactgcaagcaagcaggtgtgtgtrtccccatgtatggggaaaaggctcagagmggaaagatgagaacactgacttgcaatctgagtcttacaatcctgtagcccagagatctgcagctgctaagatctcatcctacctccagtcaytgtctttatgtctatttcatttatcatccg

SEQ ID NO: 3082 - DNA, 560 bp, Chicken  19866894090421_5
tgccactcccaaaagcagagagaagcagaagctgaggtttgacaccttgtggttccacataggctattcctgtctcattcccaggtrgaggccagcaatttggagcatgcaactactctacgcattccactccctgtarcrcacacttagcrtggtcatttctcgcaccaagaggaggtaggttcagaattgctacatactttaggtactgatcacttctccactaaggatgaagcacagaagggtcagacaggaagggcagaggcagcagctaggactgcaagcaagcaggtgtgtgtrtccccatgtatggggaaaaggctcagagmggaaagatgagaacactgacttgcaatctgagtcttacaatcctgtagcccagagatctgcagctgctaagatctcatcctacctccagtcaytgtctttatgtctatttcatttatcatccgttttaaaaatacaatggattaataatctgttctgataggaaagtggtttgtcatagaaaaacctgtattcttgctgtttcagttaaaagcctgcatttctccaatatt

SEQ ID NO: 3083 - DNA, 531 bp, Chicken  19866894090421_6
agctgaggtttgacaccttgtggttccacataggctattcctgtctcattcccaggtrgaggccagcaatttggagcatgcaactactctacgcattccactccctgtarcrcacacttagcrtggtcatttctcgcaccaagaggaggtaggttcagaattgctacatactttaggtactgatcacttctccactaaggatgaagcacagaagggtcagacaggaagggcagaggcagcagctaggactgcaagcaagcaggtgtgtgtrtccccatgtatggggaaaaggctcagagmggaaagatgagaacactgacttgcaatctgagtcttacaatcctgtagcccagagatctgcagctgctaagatctcatcctacctccagtcaytgtctttatgtctatttcatttatcatccgttttaaaaatacaatggattaataatctgttctgataggaaagtggtttgtcatagaaaaacctgtattcttgctgtttcagttaaaagcctgcatttctccaatatt

SEQ ID NO: 3084 - DNA, 438 bp, Chicken  19866894090421_7
cattccactccctgtarcrcacacttagcrtggtcatttctcgcaccaagaggaggtaggttcagaattgctacatactttaggtactgatcacttctccactaaggatgaagcacagaagggtcagacaggaagggcagaggcagcagctaggactgcaagcaagcaggtgtgtgtrtccccatgtatggggaaaaggctcagagmggaaagatgagaacactgacttgcaatctgagtcttacaatcctgtagcccagagatctgcagctgctaagatctcatcctacctccagtcaytgtctttatgtctatttcatttatcatccgttttaaaaatacaatggattaataatctgttctgataggaaagtggtttgtcatagaaaaacctgtattcttgctgtttcagttaaaagcctgcatttctccaatatt

SEQ ID NO: 3085 - DNA, 599 bp, Chicken  19866894090422_1
  misc_feature (1)..(124): n is any nucleotide
nnnnnnnnnnnnnnnnnnnnnnnnnnnnnnnnnnnnnnnnnnnnnnnnnnnnnnnnnnnnnnnnnnnnnnnnnnnnnnnnnnnnnnnnnnnnnnnnnnnnnnnnnnnnnnnnnnnnnnnnnnnnccctactgtgctttcatgggagatacccagtactgacattaaaaaatgactctatttccaaaatgccccactgagcagcttgctgaacaggaaaatttgtggtgcttacagcagcaccagagagtgatgggcacttcagctgcagtgtgtgttttagcctgctttcatgaagaaaktggggtccagcaagctttcggtggtgaccgtgggatgctcataagacaacagagtggcccagaggctgtggtgagacaagcagatgtgggaaggagctgtggggaagggtggtggtgtcatgggagcctgttacgrgtgagaagtttggcttccaggatgcaaatctgcagaaaaagcaggctttgttagtttgctgcttatgggaaacattctgtagttgtactcatagaatttgttaatcttcaatggaggctgcatctttgacaggagaaagcagcaaagatactataaaggttca

SEQ ID NO: 3086 - DNA, 600 bp, Chicken  19866894090422_2
ttcatgggagatacccagtactgacattaaaaaatgactctatttccaaaatgccccactgagcagcttgctgaacaggaaaatttgtggtgcttacagcagcaccagagagtgatgggcacttcagctgcagtgtgtgttttagcctgctttcatgaagaaaktggggtccagcaagctttcggtggtgaccgtgggatgctcataagacaacagagtggcccagaggctgtggtgagacaagcagatgtgggaaggagctgtggggaagggtggtggtgtcatgggagcctgttacgrgtgagaagtttggcttccaggatgcaaatctgcagaaaaagcaggctttgttagtttgctgcttatgggaaacattctgtagttgtactcatagaatttgttaatcttcaatggaggctgcatctttgacaggagaaagcagcaaagatactataaaggttcagggctaggagtcagtactacgtctgttcctaaccacagcctaagttttatacagccatgaacttaatttttccatgcctcagttaccttgtttatacaataggaatgaaggtaccttttatctccaattaccttttg

SEQ ID NO: 3087 - DNA, 500 bp, Chicken  19866894090425_1
ttgaagcgtccttctgcatgtgatgcaatggaaggtagcagcaggactttctgctctgatgtattccttcccatcaagtttttgggagtgctttcaacactttattccaggaaatatgccaagaaagggcaaatatgctggttatttataggctttcttatggttttccttattactgcctgtagtccatcaaggtaggcatttctgtactattctgacctcttctgcgatctgagagaccacacatcctctggttctccagtgaccttccagtgcactctttcttgggaagacagaaawaagacaaagtccccaaagagcctcaaaggaagaaacatttttctcattagagcatctagcgtaagcattcataattggcaaagaaaggggttttgtaggcattctttttgtttttgtcacctcagcttgagaagggaggaatagtgtttatttgtgtgaagccactgtgagaagatttccaatatctcctatggcataga

SEQ ID NO: 3088 - DNA, 600 bp, Chicken  19866894090427_1
ttgtttttcctgctggctggttgtaaaaatgtgtagcatctcctcaggaccctcataaaatcagaattctaatgagaagacacacgtcacacctctagattggcataaaaatagaatggtattgttcttgtcactagaatgaagcatggctcacacaccttgactgctcactgacccagtgtggcctttaggctgaagtagtatacatagaagtgtgcagtgaaaatcaggaacatccataaattcagaaaatgaggtctcttaaatcctaacttccaagttgtataaccttaagaagcrttttaaccactgaaagcatcaaagttcaataactctaccactagatacagtgtattatccaaagtagattccagyatctgtgtatctggatactcagtgccyraatctcccctgaggttccagtccctgtttagatttgtaycaccctcagccaacacagaagcaccactacttggtctcccagcagcttcctgcacataatctgctgtgttactctccttgcagagcgtcttcatgccacgttcacctatgctttgagtcattctttctaaaatagtctctctccccacatcagtgaat

SEQ ID NO: 3089 - DNA, 600 bp, Chicken  19866894090427_2
gaagacacacgtcacacctctagattggcataaaaatagaatggtattgttcttgtcactagaatgaagcatggctcacacaccttgactgctcactgacccagtgtggcctttaggctgaagtagtatacatagaagtgtgcagtgaaaatcaggaacatccataaattcagaaaatgaggtctcttaaatcctaacttccaagttgtataaccttaagaagcrttttaaccactgaaagcatcaaagttcaataactctaccactagatacagtgtattatccaaagtagattccagyatctgtgtatctggatactcagtgccyraatctcccctgaggttccagtccctgtttagatttgtaycaccctcagccaacacagaagcaccactacttggtctcccagcagcttcctgcacataatctgctgtgttactctccttgcagagcgtcttcatgccacgttcacctatgctttgagtcattctttctaaaatagtctctctccccacatcagtgaattcatgtctattgtcaagacttagacatgatttcaggagtcaggcatgacaatccttgtaggtcccttgccaattt

SEQ ID NO: 3090 - DNA, 600 bp, Chicken  19866894090427_3
gcataaaaatagaatggtattgttcttgtcactagaatgaagcatggctcacacaccttgactgctcactgacccagtgtggcctttaggctgaagtagtatacatagaagtgtgcagtgaaaatcaggaacatccataaattcagaaaatgaggtctcttaaatcctaacttccaagttgtataaccttaagaagcrttttaaccactgaaagcatcaaagttcaataactctaccactagatacagtgtattatccaaagtagattccagyatctgtgtatctggatactcagtgccyraatctcccctgaggttccagtccctgtttagatttgtaycaccctcagccaacacagaagcaccactacttggtctcccagcagcttcctgcacataatctgctgtgttactctccttgcagagcgtcttcatgccacgttcacctatgctttgagtcattctttctaaaatagtctctctccccacatcagtgaattcatgtctattgtcaagacttagacatgatttcaggagtcaggcatgacaatccttgtaggtcccttgccaatttgggttacattaggatttactgatctct

SEQ ID NO: 3091 - DNA, 600 bp, Chicken  19866894090427_4
cataaaaatagaatggtattgttcttgtcactagaatgaagcatggctcacacaccttgactgctcactgacccagtgtggcctttaggctgaagtagtatacatagaagtgtgcagtgaaaatcaggaacatccataaattcagaaaatgaggtctcttaaatcctaacttccaagttgtataaccttaagaagcrttttaaccactgaaagcatcaaagttcaataactctaccactagatacagtgtattatccaaagtagattccagyatctgtgtatctggatactcagtgccyraatctcccctgaggttccagtccctgtttagatttgtaycaccctcagccaacacagaagcaccactacttggtctcccagcagcttcctgcacataatctgctgtgttactctccttgcagagcgtcttcatgccacgttcacctatgctttgagtcattctttctaaaatagtctctctccccacatcagtgaattcatgtctattgtcaagacttagacatgatttcaggagtcaggcatgacaatccttgtaggtcccttgccaatttgggttacattaggatttactgatctctc

SEQ ID NO: 3092 - DNA, 600 bp, Chicken  19866894090427_5
agcatggctcacacaccttgactgctcactgacccagtgtggcctttaggctgaagtagtatacatagaagtgtgcagtgaaaatcaggaacatccataaattcagaaaatgaggtctcttaaatcctaacttccaagttgtataaccttaagaagcrttttaaccactgaaagcatcaaagttcaataactctaccactagatacagtgtattatccaaagtagattccagyatctgtgtatctggatactcagtgccyraatctcccctgaggttccagtccctgtttagatttgtaycaccctcagccaacacagaagcaccactacttggtctcccagcagcttcctgcacataatctgctgtgttactctccttgcagagcgtcttcatgccacgttcacctatgctttgagtcattctttctaaaatagtctctctccccacatcagtgaattcatgtctattgtcaagacttagacatgatttcaggagtcaggcatgacaatccttgtaggtcccttgccaatttgggttacattaggatttactgatctctctcactactcctgcaacccctaacacctcagttcaacagt

SEQ ID NO: 3093 - DNA, 600 bp, Chicken  19866894090435_1
agctgcaataacaacgctgggatttgtatcagtacactgaaatgataaattgatacaggcaaacaaaaaccaggtaaatgcacctttcagaagctgcgggcaccgtgctgggggtcagaggtcacctgactttaggcacccatctgacagagcagttaaagcagaaggctactgcagggttggctagaggaaaagtggtttggtctggtggttggcaaccctgcacacagcaggggggttgaaactagatgatcactgtggtccatttcaacccaggccattctatgaaaagaatttttraagtagcacaaatgtaaaataaaaaccacagttcagtgccctcactggctttgaagggagttagaacttcactactttctgtattattaacaattctcctgaagtccaaaaatgctattctggtgttcctattacagaagaaccctgaatactatctggcttataamttattcacaaggttttacgtgtgtgatcacacagttcccacgtaaggactacatgttcatagtaaagcacagccattcctaccttctctaactgttttgttcagagtttcattcaaactccttcamactacaa

SEQ ID NO: 3094 - DNA, 600 bp, Chicken  19866894090435_2
gctactgcagggttggctagaggaaaagtggtttggtctggtggttggcaaccctgcacacagcaggggggttgaaactagatgatcactgtggtccatttcaacccaggccattctatgaaaagaatttttraagtagcacaaatgtaaaataaaaaccacagttcagtgccctcactggctttgaagggagttagaacttcactactttctgtattattaacaattctcctgaagtccaaaaatgctattctggtgttcctattacagaagaaccctgaatactatctggcttataamttattcacaaggttttacgtgtgtgatcacacagttcccacgtaaggactacatgttcatagtaaagcacagccattcctaccttctctaactgttttgttcagagtttcattcaaactccttcamactacaaagttgctttgtaaaggacaacccaagatgctactaaaaggtatagccagggctctgtgcttgcagctctttgttggtgaaagttgaacaagtgacaactaacacccaaaagcaaagcgtgaaagccaaaaataataaacttctgctgtgctacatctacccagagca

SEQ ID NO: 3095 - DNA, 600 bp, Chicken  19866894090435_3
atttttraagtagcacaaatgtaaaataaaaaccacagttcagtgccctcactggctttgaagggagttagaacttcactactttctgtattattaacaattctcctgaagtccaaaaatgctattctggtgttcctattacagaagaaccctgaatactatctggcttataamttattcacaaggttttacgtgtgtgatcacacagttcccacgtaaggactacatgttcatagtaaagcacagccattcctaccttctctaactgttttgttcagagtttcattcaaactccttcamactacaaagttgctttgtaaaggacaacccaagatgctactaaaaggtatagccagggctctgtgcttgcagctctttgttggtgaaagttgaacaagtgacaactaacacccaaaagcaaagcgtgaaagccaaaaataataaacttctgctgtgctacatctacccagagcaatcagttcaactgcacagtaagttcagaagactattcttaagaaggttaaatgcatttgactgagactgccaagaatcctaactgaacgccctcagcttggtgattaaaacataaggacttccata

SEQ ID NO: 3096 - DNA, 600 bp, Chicken  19866894090439_1
ttccaaaaatactcaacgtattgaatgttaaaatcatctgaaggtatgattagttaatactggcagatgagtgctatagaaatctgcttatcacctgttggcttagacagtcagaaaaaaaactgcagcattggccacctgaatatgaagccaggaaagtttaagaatctgggctgcagtacttctgggttagatgtttgtgaaatggggtgatgtgacttattatatcttagactttcattgcaaaccttgtaaactctggatccaagagcagaacatcttcttccctattcatgaagyaagcttcagwgcatgaaactaatggatgcttataagtaaatcctatgaactgaaaggtaggcacttaatttctatcatttaatcgatagtatattcttctatctaacatttgcatctttttctcttttcygaagtgactgattctcagtattataaacagcttaaagactgccgagacaggaatgcttttagtaaacagttaaattatgttgcacttcccaacactaaacaggaaggatgaagcaaacaatgcttttgctttttgtaggacgcaaacctgatgacagtggagatttcttt

SEQ ID NO: 3097 - DNA, 600 bp, Chicken  19866894090439_2
actcaacgtattgaatgttaaaatcatctgaaggtatgattagttaatactggcagatgagtgctatagaaatctgcttatcacctgttggcttagacagtcagaaaaaaaactgcagcattggccacctgaatatgaagccaggaaagtttaagaatctgggctgcagtacttctgggttagatgtttgtgaaatggggtgatgtgacttattatatcttagactttcattgcaaaccttgtaaactctggatccaagagcagaacatcttcttccctattcatgaagyaagcttcagwgcatgaaactaatggatgcttataagtaaatcctatgaactgaaaggtaggcacttaatttctatcatttaatcgatagtatattcttctatctaacatttgcatctttttctcttttcygaagtgactgattctcagtattataaacagcttaaagactgccgagacaggaatgcttttagtaaacagttaaattatgttgcacttcccaacactaaacaggaaggatgaagcaaacaatgcttttgctttttgtaggacgcaaacctgatgacagtggagatttctttgataaaatca

SEQ ID NO: 3098 - DNA, 600 bp, Chicken  19866894090439_3
ttggccacctgaatatgaagccaggaaagtttaagaatctgggctgcagtacttctgggttagatgtttgtgaaatggggtgatgtgacttattatatcttagactttcattgcaaaccttgtaaactctggatccaagagcagaacatcttcttccctattcatgaagyaagcttcagwgcatgaaactaatggatgcttataagtaaatcctatgaactgaaaggtaggcacttaatttctatcatttaatcgatagtatattcttctatctaacatttgcatctttttctcttttcygaagtgactgattctcagtattataaacagcttaaagactgccgagacaggaatgcttttagtaaacagttaaattatgttgcacttcccaacactaaacaggaaggatgaagcaaacaatgcttttgctttttgtaggacgcaaacctgatgacagtggagatttctttgataaaatcatatttctttgaaaatcgtgtacaaggttttgtttcccagcacggagtagaacaaagcagcagcagattgtttgagcactgcttgcagcctgctatgttgtgctcttggtccaaaagctct

SEQ ID NO: 3099 - DNA, 599 bp, Chicken  19866894090440_1
  misc_feature (1)..(219): n is any nucleotide
nnnnnnnnnnnnnnnnnnnnnnnnnnnnnnnnnnnnnnnnnnnnnnnnnnnnnnnnnnnnnnnnnnnnnnnnnnnnnnnnnnnnnnnnnnnnnnnnnnnnnnnnnnnnnnnnnnnnnnnnnnnnnnnnnnnnnnnnnnnnnnnnnnnnnnnnnnnnnnnnnnnnnnnnnnnnnnnnnnnnnnnnnnnnnnnnnnnnnnnnnnnnnnnnnnnnnnnnnnnacctttgccctttttcttctgttttgaaatctagagactgttaaaaatatattcagtgctgtggtgaatattttagcatcytaaaatctcacttgggagtgcagttccaggctttcrttttattgatayttttccagaaattatttcataaagatttttaaagatttggaatatcaagctttatacatcagtgtgaatgagatatatattgaaagtcctggaaatgacatgaagtgctgttatcaaattaaaaataaaaataaaaaactaaggcaggctgagactgattctacttttttgaatcaacgttttaaaaattgctattttgatattatgggatttttatccaaaactgcattaaactctactggctacaaatg

SEQ ID NO: 3100 - DNA, 599 bp, Chicken  19866894090440_2
  misc_feature (1)..(183): n is any nucleotide
nnnnnnnnnnnnnnnnnnnnnnnnnnnnnnnnnnnnnnnnnnnnnnnnnnnnnnnnnnnnnnnnnnnnnnnnnnnnnnnnnnnnnnnnnnnnnnnnnnnnnnnnnnnnnnnnnnnnnnnnnnnnnnnnnnnnnnnnnnnnnnnnnnnnnnnnnnnnnnnnnnnnnnnnnnnnnnnnnnnnnnnacctttgccctttttcttctgttttgaaatctagagactgttaaaaatatattcagtgctgtggtgaatattttagcatcytaaaatctcacttgggagtgcagttccaggctttcrttttattgatayttttccagaaattatttcataaagatttttaaagatttggaatatcaagctttatacatcagtgtgaatgagatatatattgaaagtcctggaaatgacatgaagtgctgttatcaaattaaaaataaaaataaaaaactaaggcaggctgagactgattctacttttttgaatcaacgttttaaaaattgctattttgatattatgggatttttatccaaaactgcattaaactctactggctacaaatgatgaactgtaactgtatgagaataggacactcagtc

SEQ ID NO: 3101 - DNA, 599 bp, Chicken  19866894090440_3
  misc_feature (1)..(171): n is any nucleotide
nnnnnnnnnnnnnnnnnnnnnnnnnnnnnnnnnnnnnnnnnnnnnnnnnnnnnnnnnnnnnnnnnnnnnnnnnnnnnnnnnnnnnnnnnnnnnnnnnnnnnnnnnnnnnnnnnnnnnnnnnnnnnnnnnnnnnnnnnnnnnnnnnnnnnnnnnnnnnnnnnnnnnnnnnnnacctttgccctttttcttctgttttgaaatctagagactgttaaaaatatattcagtgctgtggtgaatattttagcatcytaaaatctcacttgggagtgcagttccaggctttcrttttattgatayttttccagaaattatttcataaagatttttaaagatttggaatatcaagctttatacatcagtgtgaatgagatatatattgaaagtcctggaaatgacatgaagtgctgttatcaaattaaaaataaaaataaaaaactaaggcaggctgagactgattctacttttttgaatcaacgttttaaaaattgctattttgatattatgggatttttatccaaaactgcattaaactctactggctacaaatgatgaactgtaactgtatgagaataggacactcagtcagtcacagtatg

SEQ ID NO: 3102 - DNA, 558 bp, Chicken  19866894090440_4
aaatgatgaactgtaactgtatgagaataggacactcagtcagtcacagtatgtgaactgttacaaaagagagaaaatgagtacattaaggacaacttagctgcaggttattgctttacagtgtttttccatctatgcatttttatgtagaaataaccgaggagctcagtcactgtaagcctaagaatgcctttcgaattttaaacaacaaacaaatgaaaatagctgattcagttttctatttttattatttttccacacgaggtacttcgaaactgacagtttgaaggctctgcgaaygtcatgcatatccaacatcctgagcaacctcagctgggatgcaaaggcccagtttaatggaaattatgttttttcctsttgcttcctacctcctaacgaacrttctaagaaaaaacctgtcctttagtaccagatttacttcctttctgatgtattctctgactccagtggcaattagatagtaacagcccaggccaaagctgttcttcctcaaacacttcccttgagtgcagtttgcacataacagccatggagaat

SEQ ID NO: 3103 - DNA, 480 bp, Chicken  19866894090440_5
gagtacattaaggacaacttagctgcaggttattgctttacagtgtttttccatctatgcatttttatgtagaaataaccgaggagctcagtcactgtaagcctaagaatgcctttcgaattttaaacaacaaacaaatgaaaatagctgattcagttttctatttttattatttttccacacgaggtacttcgaaactgacagtttgaaggctctgcgaaygtcatgcatatccaacatcctgagcaacctcagctgggatgcaaaggcccagtttaatggaaattatgttttttcctsttgcttcctacctcctaacgaacrttctaagaaaaaacctgtcctttagtaccagatttacttcctttctgatgtattctctgactccagtggcaattagatagtaacagcccaggccaaagctgttcttcctcaaacacttcccttgagtgcagtttgcacataacagccatggagaat

SEQ ID NO: 3104 - DNA, 456 bp, Chicken  19866894090440_6
gcaggttattgctttacagtgtttttccatctatgcatttttatgtagaaataaccgaggagctcagtcactgtaagcctaagaatgcctttcgaattttaaacaacaaacaaatgaaaatagctgattcagttttctatttttattatttttccacacgaggtacttcgaaactgacagtttgaaggctctgcgaaygtcatgcatatccaacatcctgagcaacctcagctgggatgcaaaggcccagtttaatggaaattatgttttttcctsttgcttcctacctcctaacgaacrttctaagaaaaaacctgtcctttagtaccagatttacttcctttctgatgtattctctgactccagtggcaattagatagtaacagcccaggccaaagctgttcttcctcaaacacttcccttgagtgcagtttgcacataacagccatggagaat

SEQ ID NO: 3105 - DNA, 600 bp, Chicken  19866894090443_1
gaacacctaagattataaaaattgttttaaactagcatataaattaaatgttcagatttcttttctgcatgagcatgttaggaatacttgaggttgcttcaaaaggtattatgctcctctcctgcataagcatctcttggccatcctgttcagtgaggtaaaataaatcaataatcaagtgaagtactgtatgatcatatcttcaataataaagacttctgttcctgactgcttttgtataagtctgtactattctgtaataattttacagagatcatttagaaatgataggttgtaaaytgggcagagaggaaccttatgaggttcaacaagggcaagtgcagtgttcaacacctggggaggaataactgcatgcatcagtacagactgggggctgacctgatggaaaggagctctgcagagaaggacctgggtgtgctggtgggtgatgggttagctgtgagccagcagtacgcccttgtggccaagaaggccaatgggatcctggagtgtattaacaagagtgtggccaacatgtaaagggtagtgatcctccctctctgctctgccctgctgaggtcacatctggagtactgtgtc

SEQ ID NO: 3106 - DNA, 600 bp, Chicken  19866894090446_1
tgaatgagttgggttggaaggaccttaaagagcatctaattccaacccccttgctgtgggcagggctgtcacgcagtagatctggatgcctggggcccgtgacatcttgaacatctccagcgatggggcagccacaacttctctgggctacctgttccacacctgtcctgcgcctcacatcatgatctacaaaatgtaaggaatgcattcccaacatcaaatgtaaatctctcttttagtttattaccattcatgctgtacctagtattcagaaatgatgtaaagagttactctcctccwtttttatatgaagaaaccatgtctggaaggtggagggaaggcactatccagagtggtgcctccaacacaaaaaaaaatgtcagcaacttggagtggattttggaaagttcacacaagctgactgggtttggagcacatcccctgttaggagagacaaacagaggctttctttctgaagctgtaagtctggaagttgtttatgtcaataaaattgaatcaaagaattgatgaaaaagatagaaatcaatgaaaatgtgttgacacacttctcaacatcaaatattctcatgatcctctttc

SEQ ID NO: 3107 - DNA, 599 bp, Chicken  19866894090447_1
  misc_feature (1)..(36): n is any nucleotide
nnnnnnnnnnnnnnnnnnnnnnnnnnnnnnnnnnnncctgtcctgcgcctcacatcatgatctacaaaatgtcaggaatgcattcccaacatcaaatgtaaatctctcttgtagtttattaccattcatgctgtacctagtattcagaaatgatgtaaagagttactctcctccttttttatatgaagaaaccatgtctggaaggtggagggaaggcactatccagagtggtgcctccaacacaaaaaaaaaatgtcagcaacctggagtggattttggaaagttcacacaagctgactsggtttggagcacatcctctgttaggagagataaacagaggttttctttctgaagctgtaagtctggaagttgtttatgtcaataaaattgaaacaaagaattgatgaaaaagatagaaatcaatgaaaatgtgttgacacacttctcaacatcaaatattctcatgttcctctttccatttaagttgaaaaaactgctttttgagggatgtgggtttttttgttttttttaatcgttcttgagaaagggcaatgttttccagaactgtgtttgcaggacacagatgccttcaggtacac

SEQ ID NO: 3108 - DNA, 600 bp, Chicken  19866894090450_1
aacagcaagggcaggaaggaaaggagtatcagagtcttttccatgtcctgtctcaccaggttccctgtcccattctactctgggcccacattctccctagccttccttttttagcttacatatttctacaagccattctcgtcagtgatatgcctgggcacattcaattgcagttgaactccaacattcctaagctcatctcatcaggtacgctggacaaagtctctgcattgctgccaggtgacctcttcttgtccgctccctctttgtttgtgcttgaccaggtctaccgttcccatstgtctgtggagaacatcttccacatgctcttcctgatcaggaagccaggaacggrcactgttggtctcctctgttggccatttccattcactctgacctggctgctctgccatccccaggcagagctcagtgcactttcacagagggcagtcgcccttccttgtctcctcacacatccatcgtaaagactctgtatcccccttgtgcttcagttcagttttggaagccattaaaccatgtccccgtggtccaaacaagacctcaggcctgcaactgtacaaacatttctagctctgcatg

SEQ ID NO: 3109 - DNA, 600 bp, Chicken  19866894090450_2
ccaggttccctgtcccattctactctgggcccacattctccctagccttccttttttagcttacatatttctacaagccattctcgtcagtgatatgcctgggcacattcaattgcagttgaactccaacattcctaagctcatctcatcaggtacgctggacaaagtctctgcattgctgccaggtgacctcttcttgtccgctccctctttgtttgtgcttgaccaggtctaccgttcccatstgtctgtggagaacatcttccacatgctcttcctgatcaggaagccaggaacggrcactgttggtctcctctgttggccatttccattcactctgacctggctgctctgccatccccaggcagagctcagtgcactttcacagagggcagtcgcccttccttgtctcctcacacatccatcgtaaagactctgtatcccccttgtgcttcagttcagttttggaagccattaaaccatgtccccgtggtccaaacaagacctcaggcctgcaactgtacaaacatttctagctctgcatgtgctggtgttctcattagtgtaagaagaacacataagaaaacaccctagttggaa

SEQ ID NO: 3110 - DNA, 511 bp, Chicken  19866894090452_1
acaactcctgcgatggggcagccacaacttctctgggctacctgttccacacctgtcctgcgcctcacatcatgatctacaaaatgtcaggaatgccttccaacatcaaatgtaaatctctcttttagtttattaccattcatgctgtacctagtattcagaaatgatgtaaagagttactctcctccttttttatatgaagaaaccatgtctggaaggtggagggaaggcactatccagagtggtgcctccaacacaaaaaaaaatgtcagcaacttggagtggattttggaaagttcmcacaagctgactgggtttggagcacatcctctgytaggagagacaaacagaggctttctttctgaagctgtgagtctggaagttgtttatgtcaataaaattgaaacaaagaattgatgaaaaagatagaaatgaatgaaaatgtgttgacacacatctcaacatcaaatattctcatgttcctctttccatttaagttgaaaaaactact

SEQ ID NO: 3111 - DNA, 477 bp, Chicken  19866894090452_2
gggctacctgttccacacctgtcctgcgcctcacatcatgatctacaaaatgtcaggaatgccttccaacatcaaatgtaaatctctcttttagtttattaccattcatgctgtacctagtattcagaaatgatgtaaagagttactctcctccttttttatatgaagaaaccatgtctggaaggtggagggaaggcactatccagagtggtgcctccaacacaaaaaaaaatgtcagcaacttggagtggattttggaaagttcmcacaagctgactgggtttggagcacatcctctgytaggagagacaaacagaggctttctttctgaagctgtgagtctggaagttgtttatgtcaataaaattgaaacaaagaattgatgaaaaagatagaaatgaatgaaaatgtgttgacacacatctcaacatcaaatattctcatgttcctctttccatttaagttgaaaaaactact

SEQ ID NO: 3112 - DNA, 599 bp, Chicken  19866894090461_1
  misc_feature (1)..(144): n is any nucleotide
nnnnnnnnnnnnnnnnnnnnnnnnnnnnnnnnnnnnnnnnnnnnnnnnnnnnnnnnnnnnnnnnnnnnnnnnnnnnnnnnnnnnnnnnnnnnnnnnnnnnnnnnnnnnnnnnnnnnnnnnnnnnnnnnnnnnnnnnnnnnnnnntggattgtcttgtcttgctcagaggaccacatccctctttttatggttctgtatgaagagaggagtaatcttgactccaatagtgcagtggcaattggaagaacactggagatacctctgtttttctgtcatcttcacataccctctagttgtagyttctgaaaccccaagtatacataaagtgccatgtgaaaacatttgagtaagctcatgtgttgccattctggaggctgagttcaaaactctgctccagcacagtggccttggagaaatccttgctctggtttctctgtatgagraaccagtgctgttctgtgggttattttttgcctttttgcatgttgtacaacctactggtgtctgtaggtgacttaaagccatggatcccagactcatctgttgaccagtgctattctgctgctgaccgagcatcacttaccccaccatcctggaga

SEQ ID NO: 3113 - DNA, 599 bp, Chicken  19866894090461_2
  misc_feature (1)..(1): n is any nucleotide
ntggattgtcttgtcttgctcagaggaccacatccctctttttatggttctgtatgaagagaggagtaatcttgactccaatagtgcagtggcaattggaagaacactggagatacctctgtttttctgtcatcttcacataccctctagttgtagyttctgaaaccccaagtatacataaagtgccatgtgaaaacatttgagtaagctcatgtgttgccattctggaggctgagttcaaaactctgctccagcacagtggccttggagaaatccttgctctggtttctctgtatgagraaccagtgctgttctgtgggttattttttgcctttttgcatgttgtacaacctactggtgtctgtaggtgacttaaagccatggatcccagactcatctgttgaccagtgctattctgctgctgaccgagcatcacttaccccaccatcctggagaacctctctcatacacaacaatacaccaatgtctgtgcaagatccaagaggaggcactgacactcagacgtgatataagctgaaatcctgtgttctttctggatcaytgcagtggcattaaactaaaagaaacaaacaacaaca

SEQ ID NO: 3114 - DNA, 573 bp, Chicken  19866894090461_3
ccttggagaaatccttgctctggtttctctgtatgagraaccagtgctgttctgtgggttattttttgcctttttgcatgttgtacaacctactggtgtctgtaggtgacttaaagccatggatcccagactcatctgttgaccagtgctattctgctgctgaccgagcatcacttaccccaccatcctggagaacctctctcatacacaacaatacaccaatgtctgtgcaagatccaagaggaggcactgacactcagacgtgatataagctgaaatcctgtgttctttctggatcaytgcagtggcattaaactaaaagaaacaaacaacaacaaaaacccaatgccaacagaaaagtttcatgtttgcaaagttaatgcagaagggcaaagggctttgtgtacaagggaagggtatgcagaaaggaagaagaggaaaaaaaaaacccaaaaacttatatagctgagggaaaaaaaaagggtcagttaagaaggggatttaattgataatggcttagataatgtcaagtgaagtttctattctcagcccaagtgtagatgatgaggcgaa

SEQ ID NO: 3115 - DNA, 600 bp, Chicken  19866894090469_1
gtgctgcctggataggaaacagagtgatgctgaacagctcagcttcggaggcagacagcagtgctgtgtccctacgcctggaatactccatgcatcgaaggtaactgcaactgcagctgatatcctccagtggaaagcccccgagcacacgaatggactggggggcacgtgacgtgttactcaaatgcaaaatactgtaattacttttgaggaggaaaaggatctgaatcccaccctccttaaatctccaatgcctcttaaagatttctgttagcattttctgatggttttagttgatgktttcaatttgtatctccaacaacatccaatccctgccggccacctggagtgtaaatatcagatccatggtacagatggggaggtgggtacgggaaacaagaaacttccagggccacagaacagtcagtgtggcagaactaggattatcaacaagtgctcccaacttccaggccatacagtgggactctggctcgtgagtagggggaatttgcatttgaagaagtgccaaataacctaagccaagcgaccatggaagctctcccctgctagtctagaggctacctgtatttctttcagtac

SEQ ID NO: 3116 - DNA, 600 bp, Chicken  19866894090469_2
caagtgctcccaacttccaggccatacagtgggactctggctcgtgagtagggggaatttgcatttgaagaagtgccaaataacctaagccaagcgaccatggaagctctcccctgctagtctagaggctacctgtatttctttcagtacttttaaatcgtttaagatctctgcatttctatctgagttgataagccaaaggaaagcattccagggaatcctgactactgctgcccaagcctttgccaaaagctgatgccaaccaggtagcagtagagatttggtgacatcaggtgttcraatagaagaaatctcaagctacaccaaaaaggaagctcttcacttttaaacccaacctcaaatccaaatctctgcagtccctccctatacccatttatggtctttttattcatataataagcacccctgtagtacatttgaataattgcaggtgaataattgatatcacccccaaaatacatccattcagtcaatgaactgtcagccacatctgtgtgccagttgtctgtggcctcggaagttttcagaagtgcaatggagaaaaggaggggaatattttcttacagttgcaacagtacc

SEQ ID NO: 3117 - DNA, 600 bp, Chicken  19866894090472_1
taccaagcagagtgtgggtcaggaagacatttgagattttctttcctctgcaattgtttgccttgttttggagcctaaagcaatagagtaattccatgacaaaattccgggtcagaaaagctgacaaagcaaaaattgtgactgactgaaaaatcttctatcatttcctccaagcttaagattttcatttgcattgtctggatttaattcacagtccctgccattcatctatttgaatttctgcatgcattttttgctggattagtatttgttgtttttcttatcatcagatttattaargggtaatttattaagaggcactctgcaccctgagccctgcatgcatccagaagaaagcagtgatgaccacagagctcagaaacctcagagcagggtctgggcttcattactctggattcctgagagtgaggtaagcaggaaggatggttatggggaccaatctagcataatggctttgtggttatctctgagtttatgttcttctgcctttgcatttaaggaaggtttgttaatttcctgcagtctcagatccccagcaagcctttactgcactaaaacagggcatgagccctcacttcc

SEQ ID NO: 3118 - DNA, 599 bp, Chicken  19866894090474_1
  misc_feature (1)..(64): n is any nucleotide
nnnnnnnnnnnnnnnnnnnnnnnnnnnnnnnnnnnnnnnnnnnnnnnnnnnnnnnnnnnnnnnnctgtcctagagatgtgccagcagcaagcacagcccgggctgacagcaccaggctttgcacagaagatgattatcgatgggctgatgtaaaatggcagccgcatggctgcagcccaatggcatgccctcaccccttttatgtaataactcatgcttagagcattgcataagaagactctgcctgcttaagtgctttgtgtcaaattattgtggctttgctgggagcaaaggctgtgsccttcccaggggggtgcccgcatcagctctgagccctggtcctgcctcctgcyctgggcatcagcacccacctgggcagtggcagagcccygttcagctgcagagtacacagatgccagatttccagtttcatagaatatatatttttcaggatatattccaccctttctgcattcaaccagcaaggcagaagtaagtttcaaaatgaaatgatgtaatctcatatccaggagtatggtgatactatctcaagccagagccaaacttcccatggcagtagtcttcagattcagtwgagg

SEQ ID NO: 3119 - DNA, 599 bp, Chicken  19866894090474_2
  misc_feature (1)..(11): n is any nucleotide
nnnnnnnnnnnctgtcctagagatgtgccagcagcaagcacagcccgggctgacagcaccaggctttgcacagaagatgattatcgatgggctgatgtaaaatggcagccgcatggctgcagcccaatggcatgccctcaccccttttatgtaataactcatgcttagagcattgcataagaagactctgcctgcttaagtgctttgtgtcaaattattgtggctttgctgggagcaaaggctgtgsccttcccaggggggtgcccgcatcagctctgagccctggtcctgcctcctgcyctgggcatcagcacccacctgggcagtggcagagcccygttcagctgcagagtacacagatgccagatttccagtttcatagaatatatatttttcaggatatattccaccctttctgcattcaaccagcaaggcagaagtaagtttcaaaatgaaatgatgtaatctcatatccaggagtatggtgatactatctcaagccagagccaaacttcccatggcagtagtcttcagattcagtwgagggggtcactggtcacaaagctctgtctctcttttcccagttagcctgctgcaaa

SEQ ID NO: 3120 - DNA, 600 bp, Chicken  19866894090474_3
cacagcccgggctgacagcaccaggctttgcacagaagatgattatcgatgggctgatgtaaaatggcagccgcatggctgcagcccaatggcatgccctcaccccttttatgtaataactcatgcttagagcattgcataagaagactctgcctgcttaagtgctttgtgtcaaattattgtggctttgctgggagcaaaggctgtgsccttcccaggggggtgcccgcatcagctctgagccctggtcctgcctcctgcyctgggcatcagcacccacctgggcagtggcagagcccygttcagctgcagagtacacagatgccagatttccagtttcatagaatatatatttttcaggatatattccaccctttctgcattcaaccagcaaggcagaagtaagtttcaaaatgaaatgatgtaatctcatatccaggagtatggtgatactatctcaagccagagccaaacttcccatggcagtagtcttcagattcagtwgagggggtcactggtcacaaagctctgtctctcttttcccagttagcctgctgcaaaattgtgaaataggcagacagctttatatttaatttaaag

SEQ ID NO: 3121 - DNA, 600 bp, Chicken  19866894090474_4
tgtgsccttcccaggggggtgcccgcatcagctctgagccctggtcctgcctcctgcyctgggcatcagcacccacctgggcagtggcagagcccygttcagctgcagagtacacagatgccagatttccagtttcatagaatatatatttttcaggatatattccaccctttctgcattcaaccagcaaggcagaagtaagtttcaaaatgaaatgatgtaatctcatatccaggagtatggtgatactatctcaagccagagccaaacttcccatggcagtagtcttcagattcagtwgagggggtcactggtcacaaagctctgtctctcttttcccagttagcctgctgcaaaattgtgaaataggcagacagctttatatttaatttaaagcccagaagagataacaggaactaccttttttctcagagaatctgactctaatgtgaagaaattcctctgagagaaacaattactctggaaagtgttcagccatccatgggatcttgtttcatcgtggagacaaaattatcgagccctttaagttccttgtgggagactttggagagcagcttcataattttaaatctgttttga

SEQ ID NO: 3122 - DNA, 600 bp, Chicken  19866894090474_5
atacgtaattaccttttatatgtaataaagtaaggcattcaccagtctgggtcttgcgacttagatctggctcaaatttcactgttctccgtatgtattagaaaagcataaaatgagattaggagaaatgttttgctctttgcagttgtttcacctgtggaatggaaacctttacgaacaagaatagtggtgagtactcgaaagatccactatcccaaaggacaaaaacatactttaaaacaaaatctttctccagcagttgcatttttaacttctccttctgtcatgcatccactcccygcttattttagttccagaaagcaaggatcttatactttttgttattcaggccataacattgataaagaagtgtcttttccctgagtgagaattgttctagagtggagtaggtttctctaaatgataaccgtcacttattgcatgtggccagtagaggttgagagttggaaactgaaaccatgatgttaggatgttcctagagcttgccacagcagaaaatgcagcatttccctgctctggagctagtttctctgtcaggttacttgcttttttttttgtttcttccttaggtggcagggt

SEQ ID NO: 3123 - DNA, 600 bp, Chicken  19866894090476_1
ttctgctacacacatgttgtaccaaaactataggagatgaggcattccggcaatgcatgaatgcactcaatcaaaaactgtaaagtaatcccaatcctttgtttaaagcactgcagtaagggaaaacttggccctgaaattaaatgagcttttggggaagaaggagcatgtcaaatgtatgtttataccatagccaggatgatgggaacctcctctgatgtgcctctagaaaagaagtatgtactacagtgcttatagacaagtgaatgatcccattatgtgtttatatatagacaggcrtactctgaaacattcagaagctgccttgcccaattttggagaattttttgtttttattttttctctctgagttttctgttggtatttatttatttttatttwtttttatttttttgagttttgttttgtttgtctggttggttttctgggggctctgagctgctgcttctgctcctcagcagttttcctggttcaatgagtcaatttctaatctctttggtcagtgtacgttttgcatgaatttaatacctggtcagcattatcccagctttgcagaggatggtctcttgcactgctggt

SEQ ID NO: 3124 - DNA, 600 bp, Chicken  19866894090476_2
ttaaagcactgcagtaagggaaaacttggccctgaaattaaatgagcttttggggaagaaggagcatgtcaaatgtatgtttataccatagccaggatgatgggaacctcctctgatgtgcctctagaaaagaagtatgtactacagtgcttatagacaagtgaatgatcccattatgtgtttatatatagacaggcrtactctgaaacattcagaagctgccttgcccaattttggagaattttttgtttttattttttctctctgagttttctgttggtatttatttatttttatttwtttttatttttttgagttttgttttgtttgtctggttggttttctgggggctctgagctgctgcttctgctcctcagcagttttcctggttcaatgagtcaatttctaatctctttggtcagtgtacgttttgcatgaatttaatacctggtcagcattatcccagctttgcagaggatggtctcttgcactgctggttcattcctgcagcttggattcaggttagctaattgtgcagaagggtcttctagcgacgtgttcagggagttagaagaaaggcatttccaagagggaaactta

SEQ ID NO: 3125 - DNA, 600 bp, Chicken  19866894090477_1
cagcaaaagttaaagggaatcatcactttcggtcatagcagaaatttaactgaagatgatgaaatgctaatagcaaacttcaaacacataatagactcaaacaagattgtttagatcctgtttcaggagagattttttttttatgcttaacacccattaaacaccaattgaattaaggcactttatactttgtaactcctttgaaaatcccagccactctcacagttgatagtgcttggttatttgattaagggtaaatttaagattttattctttcagatggtgaattaagggaaatgratgggcaagtatagttcaaaagaaaattttagttaacttcactcctcagaagagaggagtattgatagaagatgaataaagcaggtgaggaaacttcaatgaatatattgaaaggtgatgtctagaggagaatgagaacttgagtcaattgcccaagcaccctcagtatcttcaagtattctaggtaccttccttgcaaatattgtgatctccagatgttattctagaagggtacatgcttttcaccaaccctcaggggccatttcctttagagaaatgaattcagttttacagcatttt

SEQ ID NO: 3126 - DNA, 600 bp, Chicken  19866894090487_1
tggaataatgaaaggtgacaatctgatgaaaaacaacaaaaaatggccaaacacacaaaaaacattgacatcatttagtagtttctcccaaagttaatgaaagagctctttagtcatatgagttatcatccaaaaaactgcctccaaaattcctaaatatttgtctacaagcttcccattttgtgcagtgttaagaacaccttacaaaccacaacgtgagtgcctgcttaagagaaggcactcatgatgtgccttcattctgaatccatatgctcactactgaggacatgaccaatgaawgaaacttccatcttcagaataaaactaaactaaaagccactaacaaatccaagttcaactgaagtcttaactgcagtcttctcaagtgttttagaagcacatgcccagagctggatagcgcacacattttccaaatatcttaatgctgacaatccaacctcacatggcatcaggcatgaattgtgatggagtacatgaatgcaaagttaggtatttttaggtacttcagtgtcattttaagagttttttttttttttttttctccaggtagcatcatgcactgccctatttcaaggacca

SEQ ID NO: 3127 - DNA, 600 bp, Chicken  19866894090492_1
cctagccttatcaatagaagcttcttttctcaacagcgtcttgtgaaatacattaattttttttttccagcagtgtagaggcaggaaaagaaagcccaagaagaacttaaagcaaaatgaaaaccagcagttagtttaaggccagcaggtttggtgtgaggaattaacaaatacaattccttttaggaacaaaaaaaccacatgcaccatagctactttgttgagcgaaacatagaatcacagcatggcctgggttgaaaaggcccacagtgctcatccagttccaaccccctgctatgygcagggtcgccaaccagcagcccaggctgcccagagccacatccagcctggccttgaatgcctgcagggatggggcatccacagcctccttgggcaacctgttcagtgtgtaacatcacaacccatgtcagaaaagaagaaaacgaactcaaatgataacctaccctgaaagttacccactcgcatgttttacctgctactgactcttaagaaatacccggggaacggaacacccctgtaggcgtttttcaggatatacagtataaatatagtaggagccatgccagaaaactagatgca

SEQ ID NO: 3128 - DNA, 600 bp, Chicken  19866894090497_1
attgtaggagggaatacaggataggatccctgggaactgatgaagaagtagtcttagtaccctcctacagcccaggagagagctcaggtctctgagatgcattgctatcaggtagattaaacctcatttttatacgtttatctatgctgttgtgaagcatggcaccagccacagtctgggtgcctggaagtatgaggataagccccacccagtctgctttcaggcagggttgtgtttcacttcaattcagctggctttttttttttgcagacattgtcaattctgctacagagaaagagstcctgatgaactgtaacttaaaaactgagaaatatgtcaattaagacataataaatatctcagtaattattactgtcctttctgctttattttgctgtgcaaacaaatagttaaatagttcaaaggcagttttctttggagaatgtttatttgattgagttcagtgtggcttagaccccaaataaaaatactaatttcaaacagagcactactataaaagtagaaatagtctgtggccttctagacctcacaagctatgttggtttgttacacagagtcaaaacaacgatgtcccttaaa

SEQ ID NO: 3129 - DNA, 599 bp, Chicken  19866894090500_1
  misc_feature (1)..(108): n is any nucleotide
nnnnnnnnnnnnnnnnnnnnnnnnnnnnnnnnnnnnnnnnnnnnnnnnnnnnnnnnnnnnnnnnnnnnnnnnnnnnnnnnnnnnnnnnnnnnnnnnnnnnnnnnnnnnggactgaggtgagttattctctgacttattctgacagatgccttaacgaagccttcacaaaactgagtcatacagaaatgaggcattcctgcctaggaaaaacacatcagtaaaaagaaaatccaggaaatctgagttctgatgctgaatgtggtgttaactacaaagcgaaatatgttgttttgggtttgsttttttttttactgtttctttcttatttttagtcagttaaggagatcttttcttgactaaaactgttattgtcttattaattggaatatgtaagtagaaatcttctttccaaggagatcaaaatcaaacctaataaaggatggatttcttcacaactgaagtgctaccagttagtgtattgtggaggttatctacacatcttaatggaaaactcagcaaatgagaaagtggtatgaaatgagcaaaatgaagaagaaataaatacacaggtattccttttaaatgcagttcagttcaga

SEQ ID NO: 3130 - DNA, 599 bp, Chicken  19866894090500_2
  misc_feature (1)..(107): n is any nucleotide
nnnnnnnnnnnnnnnnnnnnnnnnnnnnnnnnnnnnnnnnnnnnnnnnnnnnnnnnnnnnnnnnnnnnnnnnnnnnnnnnnnnnnnnnnnnnnnnnnnnnnnnnnnnggactgaggtgagttattctctgacttattctgacagatgccttaacgaagccttcacaaaactgagtcatacagaaatgaggcattcctgcctaggaaaaacacatcagtaaaaagaaaatccaggaaatctgagttctgatgctgaatgtggtgttaactacaaagcgaaatatgttgttttgggtttgtstttttttttactgtttctttcttatttttagtcagttaaggagatcttttcttgactaaaactgttattgtcttattaattggaatatgtaagtagaaatcttctttccaaggagatcaaaatcaaacctaataaaggatggatttcttcacaactgaagtgctaccagttagtgtattgtggaggttatctacacatcttaatggaaaactcagcaaatgagaaagtggtatgaaatgagcaaaatgaagaagaaataaatacacaggtattccttttaaatgcagttcagttcagat

SEQ ID NO: 3131 - DNA, 600 bp, Chicken  19866894090500_3
ttaaggagatcttttcttgactaaaactgttattgtcttattaattggaatatgtaagtagaaatcttctttccaaggagatcaaaatcaaacctaataaaggatggatttcttcacaactgaagtgctaccagttagtgtattgtggaggttatctacacatcttaatggaaaactcagcaaatgagaaagtggtatgaaatgagcaaaatgaagaagaaataaatacacaggtattccttttaaatgcagttcagttcagatctgtgttgcattagcaagcttttggtctcaacctaygcaacctactttgcaaacctcttcaaaggaaaaatatattttagcaattcagtacatggctaagacaagtttcagagtcaatgcaatgtgttttctcgtgtattttctcagtggctcatgtagtatttaatctcctccatcgtgtactccagttttaggctgcattttctatatatcacttacattttgtttccaagatgacataggttttgttttttccaatttaaacactccatgtgtttttattctcctaaccttttatccttactgttttccaaaattgatattatcatatagctt

SEQ ID NO: 3132 - DNA, 599 bp, Chicken  19866894090501_1
  misc_feature (1)..(14): n is any nucleotide
nnnnnnnnnnnnnntatgaaaatctatatatattttttttagtttttacttaaagcatagttacagtgatgtttcctcattgcaagatgctgtcgtgtgaaagcaaaatacgggaataagatcgctattgatttgattttgattactgtcagcaatgagttccattgaccttgtaattttttcttaaacttcagctggaaaaagtgaaataccacagtaagagccttcacaatgaagaactcatagtttctgttcagcacaagtaagaaatgaatgaaaagtgaatgaaaacccattgcygcttcctaacgtgggttcttcattgctgcaccaagctggcagacttgtcttgaagtggatgaagttgtttccaggaagtgctttacatctctgtaaggctgctgtgtatctctctcaggcgtggcttgtcagctggccaatgtaaacctcatcataatctgctggaccctattatattgtcttagagaagggctgagtgcctgtttatccaraatgaacaactacagggaaatggcaatgctggaataatttgggttcgagtgagcctaattaaacgatggtcttgaatgataccgaga

SEQ ID NO: 3133 - DNA, 567 bp, Chicken  19866894090501_2
cacagtaagagccttcacaatgaagaactcatagtttctgttcagcacaagtaagaaatgaatgaaaagtgaatgaaaacccattgcygcttcctaacgtgggttcttcattgctgcaccaagctggcagacttgtcttgaagtggatgaagttgtttccaggaagtgctttacatctctgtaaggctgctgtgtatctctctcaggcgtggcttgtcagctggccaatgtaaacctcatcataatctgctggaccctattatattgtcttagagaagggctgagtgcctgtttatccaraatgaacaactacagggaaatggcaatgctggaataatttgggttcgagtgagcctaattaaacgatggtcttgaatgataccgagacttgtgctgtgaagctgtttaacatggttgttgctgggacttagctaatatttgacaggtcagcttttgttgcatcccctaatgctttgcctctgctttgggcatcaggttcattcaaggaggaagcttatcagtacactagatccaggggttattggttctgggagagagaattgtcat

SEQ ID NO: 3134 - DNA, 600 bp, Chicken  19866894090511_1
taataattctgtgtagggaggaacagatgcaaagccatattcagccccagcagaggttacgccaactgcctacaaacagctctctttctgcggccagtcctctcacctctgtttctctcatgctttgctttttgttctcctgaatctgctgtaagtgagatgtatgcagatgagctggttccccttcattcctgcttgtccaaaatgtatggtaaaaagagagggagagagaggaaaaaaaccttacagtgcctggagccacagcgtatggataaaacagctgcacatgagaaataattkatgtggtttgtgaactacttcagcttgggaataaatgccaactcagtcctcgcttcyagtaagaacagaactagaagatgtactgttgaaaagaggtctttgggtgtgggttttttgagcgataggcagaaccaggcacacctggagcccatgctgtgctgcagccagcctcagggcttccacctccttcctgaagcaaagccctgccagggggcagcagctcgcagcccctcgggacaccagaagaagccctgaccctcttgtccttcccacaaacctgcagagagggcagtgagggaa

SEQ ID NO: 3135 - DNA, 600 bp, Chicken  19866894090511_2
tacgccaactgcctacaaacagctctctttctgcggccagtcctctcacctctgtttctctcatgctttgctttttgttctcctgaatctgctgtaagtgagatgtatgcagatgagctggttccccttcattcctgcttgtccaaaatgtatggtaaaaagagagggagagagaggaaaaaaaccttacagtgcctggagccacagcgtatggataaaacagctgcacatgagaaataattkatgtggtttgtgaactacttcagcttgggaataaatgccaactcagtcctcgcttcyagtaagaacagaactagaagatgtactgttgaaaagaggtctttgggtgtgggttttttgagcgataggcagaaccaggcacacctggagcccatgctgtgctgcagccagcctcagggcttccacctccttcctgaagcaaagccctgccagggggcagcagctcgcagcccctcgggacaccagaagaagccctgaccctcttgtccttcccacaaacctgcagagagggcagtgagggaagcgatgcccatcttgcagacagtgaggaacctgggctgcaccacgaggtccctttga

SEQ ID NO: 3136 - DNA, 600 bp, Chicken  19866894090518_1
caggggacaaagaaagaacacaggctactggagtggggatattttcctgtaatactggagcgcaatatcaggatgagttgtatagtttgaaaaccaacttactcatctgtggaaaacactgaatttcctttgggaaatacaaaagtgtattttatagccttatcccagaacagtctatatgtgttttctcgtgtgtgctagcagctctgtgaaaacaaagactgaatgtacttttgggtgattatggaatacttcagtctttttctggatattatgatccatcttattttaagatacgcrgaaggaaagtgaaaatcgtgttattacagttgtcttcttcagtttyatgagtatttgattataggaagctcttttgtactcttttcttataattatgyaagcagttaaatatgcaaatatctgagattaaatggctcattccatgtaatgtaagagactgggaattagaatgaaaatgtctttaagttgcttcttatttcttatcaagaataacttgttctacatttatataatcaatacataagtattttttctgcataagttctaaatgactgaaagaaaaatgcatttgttttctct

SEQ ID NO: 3137 - DNA, 600 bp, Chicken  19866894090518_2
ctgtaatactggagcgcaatatcaggatgagttgtatagtttgaaaaccaacttactcatctgtggaaaacactgaatttcctttgggaaatacaaaagtgtattttatagccttatcccagaacagtctatatgtgttttctcgtgtgtgctagcagctctgtgaaaacaaagactgaatgtacttttgggtgattatggaatacttcagtctttttctggatattatgatccatcttattttaagatacgcrgaaggaaagtgaaaatcgtgttattacagttgtcttcttcagtttyatgagtatttgattataggaagctcttttgtactcttttcttataattatgyaagcagttaaatatgcaaatatctgagattaaatggctcattccatgtaatgtaagagactgggaattagaatgaaaatgtctttaagttgcttcttatttcttatcaagaataacttgttctacatttatataatcaatacataagtattttttctgcataagttctaaatgactgaaagaaaaatgcatttgttttctctgcttacattggtgtagcaacgttgacttgtttagagttacttctct

SEQ ID NO: 3138 - DNA, 600 bp, Chicken  19866894090518_3
ttactcatctgtggaaaacactgaatttcctttgggaaatacaaaagtgtattttatagccttatcccagaacagtctatatgtgttttctcgtgtgtgctagcagctctgtgaaaacaaagactgaatgtacttttgggtgattatggaatacttcagtctttttctggatattatgatccatcttattttaagatacgcrgaaggaaagtgaaaatcgtgttattacagttgtcttcttcagtttyatgagtatttgattataggaagctcttttgtactcttttcttataattatgyaagcagttaaatatgcaaatatctgagattaaatggctcattccatgtaatgtaagagactgggaattagaatgaaaatgtctttaagttgcttcttatttcttatcaagaataacttgttctacatttatataatcaatacataagtattttttctgcataagttctaaatgactgaaagaaaaatgcatttgttttctctgcttacattggtgtagcaacgttgacttgtttagagttacttctctgtttctcccatgtgaaaggtaaattgggctctgttgttcctagtttcttcaa

SEQ ID NO: 3139 - DNA, 600 bp, Chicken  19866894090518_4
aatatgcaaatatctgagattaaatggctcattccatgtaatgtaagagactgggaattagaatgaaaatgtctttaagttgcttcttatttcttatcaagaataacttgttctacatttatataatcaatacataagtattttttctgcataagttctaaatgactgaaagaaaaatgcatttgttttctctgcttacattggtgtagcaacgttgacttgtttagagttacttctctgtttctcccatgtgaaaggtaaattgggctctgttgttcctagtttcttcaagtaaagttrtaaacaactatgagttcatcttaatgtatagactttcagttagcgcacatactcagaaacatcccacaaagtaaaccagaatctcattgccatggtaatttggagtgcttttcttttcatttttggctataaaaatgtgtacagatttcccgtcaatattagtccctctacagtctaattattattatattttctgaataagttatcttcatgagctgtaaaatctatagacatatttttctttaacagggtaaagaagcgttagaaataagcaactatatattgacacctcttttctaa

SEQ ID NO: 3140 - DNA, 600 bp, Chicken  19866894090521_1
aggtacagcctgatgccctggttgatcctgggcctgccagcccaggcccacgtaatacctgcattacggagacggctggtgccaattcacagttactgtgagctcagggactacaaactgcctgggtgactgatgcctactccatgtatgaatgcaagcagctatgcatgcttcaggctggcaggaactgcgctgtgcactccttaggcctgagcatttctgagcagtaggtgatttttcggactttagtcctcgcttgtttggtcattcaacagcatggtaaaagaagggtgtgttttyttttccagcggttcagttcattctgctgctgaattcttattgttcttggtccaaaaggacatgggtgacatgaagcacagcagaagcaaaagccatgccaccctggcttatctcatgttcagggccaatgggaacatgtaaagtcaatggagttttgaccaaaaccctyctcctttcttctaaaaacaatttatgatatatttacttcacttttgtttaagcagaaaaaatgtagttggagagatcctggatcttctgaacttaagcagcagctgtggaaggtgtctaagtaggatgacg

SEQ ID NO: 3141 - DNA, 488 bp, Chicken  19866894090521_2
gcttcaggctggcaggaactgcgctgtgcactccttaggcctgagcatttctgagcagtaggtgatttttcggactttagtcctcgcttgtttggtcattcaacagcatggtaaaagaagggtgtgttttyttttccagcggttcagttcattctgctgctgaattcttattgttcttggtccaaaaggacatgggtgacatgaagcacagcagaagcaaaagccatgccaccctggcttatctcatgttcagggccaatgggaacatgtaaagtcaatggagttttgaccaaaaccctyctcctttcttctaaaaacaatttatgatatatttacttcacttttgtttaagcagaaaaaatgtagttggagagatcctggatcttctgaacttaagcagcagctgtggaaggtgtctaagtaggatgacgatgtttcatgtgaagcaaataattttgtctgcctttcatccagataacattccaaaa

SEQ ID NO: 3142 - DNA, 599 bp, Chicken  19866894090534_1
  misc_feature (1)..(26): n is any nucleotide
nnnnnnnnnnnnnnnnnnnnnnnnnnatatgcccattggacaggtgaaaatgaaaggaattaatgagctgacacctgggctatgtatttacttcgaatttaaccattccaagtttactttgcagttcaattgcactatggctcagccttaaagatttcaagtgcagtagcaacaacagctctcagactgcaacagcttgtcttaatcgaatacaaagcttgtcaccccctggagaaaacagattactcctttctgtgcctttggacctcaaggctcaaaataaagtctcttcccctgctyaaaatagcaaaacgcgtgttactaaatgaaaagaaaaacattttgaaaatgatagtagatgaaatctgccaagggacagatctattttgcactctggcaattttcctgaggttttactttaatgtttattgtttaacttcataaaattgagtaactagcgtaacagcacctcaactgccagacagaaaaagtccattaaaatatgaagcatcttgttaatataatacactcattagaatcataaaatcaytaaagctggaaaatactactgagatcttctagttcagccaccaacccat

SEQ ID NO: 3143 - DNA, 407 bp, Chicken  19866894090534_2
ttctgtgcctttggacctcaaggctcaaaataaagtctcttcccctgctyaaaatagcaaaacgcgtgttactaaatgaaaagaaaaacattttgaaaatgatagtagatgaaatctgccaagggacagatctattttgcactctggcaattttcctgaggttttactttaatgtttattgtttaacttcataaaattgagtaactagcgtaacagcacctcaactgccagacagaaaaagtccattaaaatatgaagcatcttgttaatataatacactcattagaatcataaaatcaytaaagctggaaaatactactgagatcttctagttcagccaccaacccatcaccaccatgcctgctaaacaatgtccctcagtaccgtatctgcacgtttcttaacac

SEQ ID NO: 3144 - DNA, 600 bp, Chicken  19866894090535_1
tatggtataatatacagatataaaccctagtatatgcaattgaacttttcacaccctcaaaagccacaaaatcagatggtctgtggtttttgcagctggtgcactgcactcatattgggtagtgtcatatgaaaaatatttcactccccaagccctaaacagagtcactcattaatgaaatgcaggcagtacaatgagatcatataaggtatagatttcaacagccatactaaaaacagtaaaggaacactgaacaagaacacaaatcaagttcctttgccagaacaggatttttttttwaaaaggaatctctccttacatttaacatttgctttgaaaacaactgctaaccactayccagaaaaagcctttagtacaagtgttagcagactaaacaatcacaatttggcagaggaaaaacagtaaataacttcagacatagttacattacaggatgtctcaccccaatacaccatcatcgaatcacaaaatgatttacttaataccacatatggaatctgcttacttaagaaaataagctgtcaccagcgaaactttgtttaaaaataatttcagagctgaggtttatcgaatttcact

SEQ ID NO: 3145 - DNA, 600 bp, Chicken  19866894090535_2
caaaagccacaaaatcagatggtctgtggtttttgcagctggtgcactgcactcatattgggtagtgtcatatgaaaaatatttcactccccaagccctaaacagagtcactcattaatgaaatgcaggcagtacaatgagatcatataaggtatagatttcaacagccatactaaaaacagtaaaggaacactgaacaagaacacaaatcaagttcctttgccagaacaggatttttttttwaaaaggaatctctccttacatttaacatttgctttgaaaacaactgctaaccactayccagaaaaagcctttagtacaagtgttagcagactaaacaatcacaatttggcagaggaaaaacagtaaataacttcagacatagttacattacaggatgtctcaccccaatacaccatcatcgaatcacaaaatgatttacttaataccacatatggaatctgcttacttaagaaaataagctgtcaccagcgaaactttgtttaaaaataatttcagagctgaggtttatcgaatttcactttagtttgtttttacagaaatctaaaaagaaaaagtcaagcaatctagtttcaaaaa

SEQ ID NO: 3146 - DNA, 599 bp, Chicken  19866894090536_1
  misc_feature (1)..(10): n is any nucleotide
nnnnnnnnnnctgagggctgctttaggggtatcttccgaatgaactggatgaatttttctgagaaacttatatggaaatggagccatctctgtaattccatgagatcttgttgatttgaaaaacaaattaacaaaaatcataccttgcttcatgcagccaaacagatttgtcttagctcttttctcgtgtgtatgtttgagtgttgctaggtcaataaatgcacaatatacaaataaatatgcatatatatgtctttaaaggacataaatcatgacaaaacttgtcttttctattgtgtraattgatgatgaaagttaatgactctagttgagtttgtggacagcaaaaatagggctttgtttcattccatcagtcagcacctttcaagtatttacttctgtcattactttgtttttgacgtttgttacctgaatttctgcagaagtctggaatagctgaggtacataaagcagaaasagaawcttctgcatttgaaaattctgtgtaaaaaaagtgaggtctgttaccacaaatagtgaaactagtaagtgtgattctgtatctgttttttaagcttcattattcagttaagaaaata

SEQ ID NO: 3147 - DNA, 520 bp, Chicken  19866894090536_2
cttttctcgtgtgtatgtttgagtgttgctaggtcaataaatgcacaatatacaaataaatatgcatatatatgtctttaaaggacataaatcatgacaaaacttgtcttttctattgtgtraattgatgatgaaagttaatgactctagttgagtttgtggacagcaaaaatagggctttgtttcattccatcagtcagcacctttcaagtatttacttctgtcattactttgtttttgacgtttgttacctgaatttctgcagaagtctggaatagctgaggtacataaagcagaaasagaawcttctgcatttgaaaattctgtgtaaaaaaagtgaggtctgttaccacaaatagtgaaactagtaagtgtgattctgtatctgttttttaagcttcattattcagttaagaaaatactgtgctaagtgctttcggagtgtagtgttacccgcttgagtaggcatatacaacttgagtttagtagtgagtggctaactgatttccttcctgcagtt

SEQ ID NO: 3148 - DNA, 515 bp, Chicken  19866894090536_3
ctcgtgtgtatgtttgagtgttgctaggtcaataaatgcacaatatacaaataaatatgcatatatatgtctttaaaggacataaatcatgacaaaacttgtcttttctattgtgtraattgatgatgaaagttaatgactctagttgagtttgtggacagcaaaaatagggctttgtttcattccatcagtcagcacctttcaagtatttacttctgtcattactttgtttttgacgtttgttacctgaatttctgcagaagtctggaatagctgaggtacataaagcagaaasagaawcttctgcatttgaaaattctgtgtaaaaaaagtgaggtctgttaccacaaatagtgaaactagtaagtgtgattctgtatctgttttttaagcttcattattcagttaagaaaatactgtgctaagtgctttcggagtgtagtgttacccgcttgagtaggcatatacaacttgagtttagtagtgagtggctaactgatttccttcctgcagtt

SEQ ID NO: 3149 - DNA, 600 bp, Chicken  19866894090539_1
gcaaggcatcatcccgcaggtactgcctggtgaatcgtagcatcgctaaggttggcaaagacccctcagatccccaggtccaaccccagcctaccccatggtgcccactgcccacatctctcagtgccacatctccacggctctgaacacctccaggaatggtgacacccacttccctgtgccgctgtgcagtgcctcactgctctttctgagaagaaattcttcttaatatccaacccgaaaagctgcctcacacctgagcaggatgcccaaggaagaagtcagagggagggacaagtwggggggatgatctgtgggccagggggcactgcagagcatccctctgcctggggctgagcatcccaactcttccctctgcagctgtgtgaggacctcttctcccgaatcaatgacacaaccaacgacaacatgtcctactccgtagaggtaagcacatctccttgtgggggtgggatgctggagtccctgcgtgttggccgtgcaccaacaccattaattccaaatgaaactcagccccgtgcttgctgtccccaggtgagctacatggagatctactgcgagcgggtgagagayctcctg

SEQ ID NO: 3150 - DNA, 600 bp, Chicken  19866894090539_2
caagtgggggggatgatctgtgggccagggggcactgcagagcatccctctgcctggggctgagcatcccaactcttccctctgcagctgtgtgaggacctcttctcccgaatcaatgacacaaccaacgacaacatgtcctactccgtagaggtaagcacatctccttgtgggggtgggatgctggagtccctgcgtgttggccgtgcaccaacaccattaattccaaatgaaactcagccccgtgcttgctgtccccaggtgagctacatggagatctactgcgagcgggtgagagayctcctgaaccccaagaacaaggggaacctgcgggtgagggagcaccccctcatgggtccctatgtggaggacctttccaagctggccgtgacctcctacaatgacatccaggacctgatggactcggggaacaaggcccggtgagtggggtgcaggagggcactgaagrgctcgcaggcacctccagggacatcaagatatttgtgcatgggctgaagttggctgcaaagctttccctggtgctgggggcagggtgagagtttggtgcctctctgcttccccagaaaggaggcaagatgt

SEQ ID NO: 3151 - DNA, 600 bp, Chicken  19866894090539_3
gtgggggtgggatgctggagtccctgcgtgttggccgtgcaccaacaccattaattccaaatgaaactcagccccgtgcttgctgtccccaggtgagctacatggagatctactgcgagcgggtgagagayctcctgaaccccaagaacaaggggaacctgcgggtgagggagcaccccctcatgggtccctatgtggaggacctttccaagctggccgtgacctcctacaatgacatccaggacctgatggactcggggaacaaggcccggtgagtggggtgcaggagggcactgaagrgctcgcaggcacctccagggacatcaagatatttgtgcatgggctgaagttggctgcaaagctttccctggtgctgggggcagggtgagagtttggtgcctctctgcttccccagaaaggaggcaagatgtgacctgccttgtctgccctgccccataactgtccccagcatcgccgctctggctcccccygcggagtgtcatgccttctgtcctctccccacagcacggtggctgccaccaacatgaacgagaccagcagtcgctcgcacgccgtcttcaatatcatcttcacccagaa

SEQ ID NO: 3152 - DNA, 600 bp, Chicken  19866894090539_4
tatgtggaggacctttccaagctggccgtgacctcctacaatgacatccaggacctgatggactcggggaacaaggcccggtgagtggggtgcaggagggcactgaagrgctcgcaggcacctccagggacatcaagatatttgtgcatgggctgaagttggctgcaaagctttccctggtgctgggggcagggtgagagtttggtgcctctctgcttccccagaaaggaggcaagatgtgacctgccttgtctgccctgccccataactgtccccagcatcgccgctctggctcccccygcggagtgtcatgccttctgtcctctccccacagcacggtggctgccaccaacatgaacgagaccagcagtcgctcgcacgccgtcttcaatatcatcttcacccagaagcggcacgatgccgagacggacatcaccaccgagaaggtgagagcagagcccctgggaaacccgagaggacacagcgagggctttttgtgccactcttggccgtggagagcagctgggaaggtgttgggtgttgggtccttttgtgctggacgtgtgccgagcctgctacagctgtcggctctgcctctgc

SEQ ID NO: 3153 - DNA, 600 bp, Chicken  19866894090545_1
aagttgctgtggttttcttcagattccttcgctctcctgtttgattttctctccattatcgaagcgagcacagcggtcttgctttgttcctgtcagcttgaaaagagagagatttttatttaagagcacctttcttcagctctggcacgatgttggaatggaaacgctgctcgcattgctcgggctgtcagctgggttttgcagtaggtggcgtatcagctgtgtatgcagggagatggcaggaatatgactgtagagggaatttgcatttaactgtgtgagggaaggaggggataaaarccacttctctttctgtccttacaactaggaagttcacagagttttgtgggttccgcgcagaaatgagtaatgctgttctaaagggcaccttgtttttaatgccttgcagtgtgtttgtagtatcagctggccaaatcgtgtgtaatgcttctggagttaaacgctccgcttcatttatggtgcgacgatctcagtttgcacagagcctttttcacattttccttgtgttatctgtggtagccgatggcacagcagggcagcactgaaggtgaaggcatccctagcgggacgcagagaggt

SEQ ID NO: 3154 - DNA, 600 bp, Chicken  19866894090546_1
atgtatcacctatttttaaatataccgtttaagccataaaatgtactttgtaacttctggatacctgaataaacacagtcactttagttctcaaagtttcttaaaaactccaagctcgggaacatactgtattattacccagattatatcaatacattaatatcctgccttctgccatctcaaatattttttatttggtctttggaggcattttattataaacttgactcatcaaataaaaagtgatcctctccatgtacccttcaaaactcttcacattcttttggaagaatttaaagyacaatcgaaaaggctttgctttttgaaatatattacagaattttgtatagtgccttatttttaattaaagaacctactgcctattacagacctttaagatatgcaaaaatgrtttgaaatagtaatgctttaccacatattatcactcaaattgtaaataactagttgtgttgcaagaggtaaatgaggaaatattctcaatcaaaatgaatcacgtgggccaaatgatcgtaccttttaaagagtcaaataaaattcttgctttttttttacatcttattttattcttgtacatggaca

SEQ ID NO: 3155 - DNA, 560 bp, Chicken  19866894090546_2
agctcgggaacatactgtattattacccagattatatcaatacattaatatcctgccttctgccatctcaaatattttttatttggtctttggaggcattttattataaacttgactcatcaaataaaaagtgatcctctccatgtacccttcaaaactcttcacattcttttggaagaatttaaagyacaatcgaaaaggctttgctttttgaaatatattacagaattttgtatagtgccttatttttaattaaagaacctactgcctattacagacctttaagatatgcaaaaatgrtttgaaatagtaatgctttaccacatattatcactcaaattgtaaataactagttgtgttgcaagaggtaaatgaggaaatattctcaatcaaaatgaatcacgtgggccaaatgatcgtaccttttaaagagtcaaataaaattcttgctttttttttacatcttattttattcttgtacatggacatgttctacatattacaaagcagacatgttaagaacaagtaagtgatgtaattctttgatgtctgatttaagc

SEQ ID NO: 3156 - DNA, 599 bp, Chicken  19866894090551_1
  misc_feature (1)..(269): n is any nucleotide
nnnnnnnnnnnnnnnnnnnnnnnnnnnnnnnnnnnnnnnnnnnnnnnnnnnnnnnnnnnnnnnnnnnnnnnnnnnnnnnnnnnnnnnnnnnnnnnnnnnnnnnnnnnnnnnnnnnnnnnnnnnnnnnnnnnnnnnnnnnnnnnnnnnnnnnnnnnnnnnnnnnnnnnnnnnnnnnnnnnnnnnnnnnnnnnnnnnnnnnnnnnnnnnnnnnnnnnnnnnnnnnnnnnnnnnnnnnnnnnnnnnnnnnnnnnnnnnnnnnnnnnnnnnnncatccatccatccatccatccatccatccayccayccatccattcaaatcctgttccaaaaacacttgctgagagctggaactgcatttggatgttctgaaagttatttgctgtacaatcttccgaaacacttgtaaagtttctrttctctcttcagaacctcttatgttcgttttctgatttcactggcctcatcttcccatgatcttccatcttgttcaattcctgacacacatttgaatgcaactctcatctcttctttcaggctcacatccccttttcctttcatgttgtccwcatatgcctggagccacctcagagccacatttc

SEQ ID NO: 3157 - DNA, 599 bp, Chicken  19866894090551_2
  misc_feature (1)..(265): n is any nucleotide
nnnnnnnnnnnnnnnnnnnnnnnnnnnnnnnnnnnnnnnnnnnnnnnnnnnnnnnnnnnnnnnnnnnnnnnnnnnnnnnnnnnnnnnnnnnnnnnnnnnnnnnnnnnnnnnnnnnnnnnnnnnnnnnnnnnnnnnnnnnnnnnnnnnnnnnnnnnnnnnnnnnnnnnnnnnnnnnnnnnnnnnnnnnnnnnnnnnnnnnnnnnnnnnnnnnnnnnnnnnnnnnnnnnnnnnnnnnnnnnnnnnnnnnnnnnnnnnnnnnnnnnnncatccatccatccatccatccatccatccayccayccatccattcaaatcctgttccaaaaacacttgctgagagctggaactgcatttggatgttctgaaagttatttgctgtacaatcttccgaaacacttgtaaagtttctrttctctcttcagaacctcttatgttcgttttctgatttcactggcctcatcttcccatgatcttccatcttgttcaattcctgacacacatttgaatgcaactctcatctcttctttcaggctcacatccccttttcctttcatgttgtccwcatatgcctggagccacctcagagccacatttcctga

SEQ ID NO: 3158 - DNA, 599 bp, Chicken  19866894090551_3
  misc_feature (1)..(155): n is any nucleotide
nnnnnnnnnnnnnnnnnnnnnnnnnnnnnnnnnnnnnnnnnnnnnnnnnnnnnnnnnnnnnnnnnnnnnnnnnnnnnnnnnnnnnnnnnnnnnnnnnnnnnnnnnnnnnnnnnnnnnnnnnnnnnnnnnnnnnnnnnnnnnnnnnnnnnnnnnnncatccatccatccatccatccatccatccayccayccatccattcaaatcctgttccaaaaacacttgctgagagctggaactgcatttggatgttctgaaagttatttgctgtacaatcttccgaaacacttgtaaagtttctrttctctcttcagaacctcttatgttcgttttctgatttcactggcctcatcttcccatgatcttccatcttgttcaattcctgacacacatttgaatgcaactctcatctcttctttcaggctcacatccccttttcctttcatgttgtccwcatatgcctggagccacctcagagccacatttcctgagtsttcagttttctccacaagtctggcctttcttcgagcttcccgttaagatttcctccttctcacagtgaatatttctacttcttttcctgtcattatttaagcaatgg

SEQ ID NO: 3159 - DNA, 599 bp, Chicken  19866894090551_4
  misc_feature (1)..(3): n is any nucleotide
nnncatccatccatccatccatccatccatccayccayccatccattcaaatcctgttccaaaaacacttgctgagagctggaactgcatttggatgttctgaaagttatttgctgtacaatcttccgaaacacttgtaaagtttctrttctctcttcagaacctcttatgttcgttttctgatttcactggcctcatcttcccatgatcttccatcttgttcaattcctgacacacatttgaatgcaactctcatctcttctttcaggctcacatccccttttcctttcatgttgtccwcatatgcctggagccacctcagagccacatttcctgagtsttcagttttctccacaagtctggcctttcttcgagcttcccgttaagatttcctccttctcacagtgaatatttctacttcttttcctgtcattatttaagcaatggaaagtcaagttaccactaacacagaaaatcagcagaggtggtgggtttcgtgctccatccaaacagaacaagcwgggaccaccaggagccaggctctgcatttgtgtgtacacttaaatgttcttcataggtctatgctgtgggctccacaa

SEQ ID NO: 3160 - DNA, 564 bp, Chicken  19866894090551_5
atccattcaaatcctgttccaaaaacacttgctgagagctggaactgcatttggatgttctgaaagttatttgctgtacaatcttccgaaacacttgtaaagtttctrttctctcttcagaacctcttatgttcgttttctgatttcactggcctcatcttcccatgatcttccatcttgttcaattcctgacacacatttgaatgcaactctcatctcttctttcaggctcacatccccttttcctttcatgttgtccwcatatgcctggagccacctcagagccacatttcctgagtsttcagttttctccacaagtctggcctttcttcgagcttcccgttaagatttcctccttctcacagtgaatatttctacttcttttcctgtcattatttaagcaatggaaagtcaagttaccactaacacagaaaatcagcagaggtggtgggtttcgtgctccatccaaacagaacaagcwgggaccaccaggagccaggctctgcatttgtgtgtacacttaaatgttcttcataggtctatgctgtgggctccacaagacaa

SEQ ID NO: 3161 - DNA, 383 bp, Chicken  19866894090551_6
tcaattcctgacacacatttgaatgcaactctcatctcttctttcaggctcacatccccttttcctttcatgttgtccwcatatgcctggagccacctcagagccacatttcctgagtsttcagttttctccacaagtctggcctttcttcgagcttcccgttaagatttcctccttctcacagtgaatatttctacttcttttcctgtcattatttaagcaatggaaagtcaagttaccactaacacagaaaatcagcagaggtggtgggtttcgtgctccatccaaacagaacaagcwgggaccaccaggagccaggctctgcatttgtgtgtacacttaaatgttcttcataggtctatgctgtgggctccacaagacaa

SEQ ID NO: 3162 - DNA, 600 bp, Chicken  19866894090555_1
agcatttctttggtaagatttaatttatgtaccctgtttgcattgccttatgcagattagatttgctgaaggcagtttacctgagcatgcacagcaactacactgaatatccactgcttttttatccccctcccctctttattaattatgttttaattagctctccagttattaaactgggagagtgaagtatcttttggagctacctttgatttaaatgtgcagctaaaccagcttcatagatcaccttcacatgtgcacatctagttgattttcctgggaacttgcatctgtgaggcrtaagtggtattcttgtattggcttgtaatgttggtttgggtatttcatcacatcagtaatattggtaacttactaatagccagcttaagctcagctgaatattgcagtaacgaccttaaaatagcttcttcatctctgagccctctaatgaagatatgttttctctgtgtggcagtagttgtggctattacaaattgcattcagttcctagttcttagaattgtacctgtttgcagggggagcctgcaaagagaaatccatctaaaactggttttacctctatcattacaatgcagaaca

SEQ ID NO: 3163 - DNA, 600 bp, Chicken  19866894090556_1
tgtgctttaatgtataacatctaatgttgaggggttttttttattattattattataattattatttgttggggttttttttgtctacaagttcaatgcaaaataagaaaatccaagtatcagagatgtgacataattattaagtatcattctagaatattctgtataactcattttttgttgttaatgaaatcttccgtgtaaaaactatcaatcctatgctttctcagataattttgacagccttataatagaagcacattcaaaattgtctctatttttcaagttctccaaaatttwctccagctacctctgttctctaacatagaccttttcctagccctcttttatagtatcacagctctatgctcataaggacaagagttctcccttatagcacagccacacaaataagcatcactcaaactagggtctttatgtgacaccagaaacaaattatcactgggatatgaacccaaagtttttgccacctgaaccattcttcctctttcagtttccccagcttacttgtttctttttgactcctattaaccgatgttctttcttactcacgctaatcctatggtaaatatacactaa

SEQ ID NO: 3164 - DNA, 600 bp, Chicken  19866894090564_1
accggtctcctcttggatactgagctgctgaccacaactctctgagtgcggccatccagccaattccttacccagcaagtggtgcatccatcaaatccatttatctccagtttggtggccaggatgtcatgcaggacagcgtcaaatgctttgctcaagttcagctaaatgacgtcagctactcttcctttatctactgaggctgtaactccatcataaaaggccaccaagtttgccaggtgtgacttgcccttgttgaagccaggttggttaccaccaatcacctcaaaatgactttgwttttttttttggtgactgcattactagcccccagcatctcccatttcgaaacacggggaacatccacagggatgctgcaatgaagcagtaccacagcatgaygaacacaggcaggcagcatggttacagagactcaaagtgagtyttctgctcyctgtcaccaattctctaaatagctatgtgaactgagaacctttctccttgctcctacgtctgccataaccaatagaataattcagcaaaggacatctgcatggagtgctgccctcagttcctccttccctgatcactctatttgga

SEQ ID NO: 3165 - DNA, 600 bp, Chicken  19866894090564_2
ccggtctcctcttggatactgagctgctgaccacaactctctgagtgcggccatccagccaattccttacccagcaagtggtgcatccatcaaatccatttatctccagtttggtggccaggatgtcatgcaggacagcgtcaaatgctttgctcaagttcagctaaatgacgtcagctactcttcctttatctactgaggctgtaactccatcataaaaggccaccaagtttgccaggtgtgacttgcccttgttgaagccaggttggttaccaccaatcacctcaaaatgactttgtwtttttttttggtgactgcattactagcccccagcatctcccatttcgaaacacggggaacatccacagggatgctgcaatgaagcagtaccacagcatgaygaacacaggcaggcagcatggttacagagactcaaagtgagtyttctgctcyctgtcaccaattctctaaatagctatgtgaactgagaacctttctccttgctcctacgtctgccataaccaatagaataattcagcaaaggacatctgcatggagtgctgccctcagttcctccttccctgatcactctatttggat

SEQ ID NO: 3166 - DNA, 600 bp, Chicken  19866894090564_3
atctccagtttggtggccaggatgtcatgcaggacagcgtcaaatgctttgctcaagttcagctaaatgacgtcagctactcttcctttatctactgaggctgtaactccatcataaaaggccaccaagtttgccaggtgtgacttgcccttgttgaagccaggttggttaccaccaatcacctcaaaatgactttgtttttttttttggtgactgcattactagcccccagcatctcccatttcgaaacacggggaacatccacagggatgctgcaatgaagcagtaccacagcatgaygaacacaggcaggcagcatggttacagagactcaaagtgagtyttctgctcyctgtcaccaattctctaaatagctatgtgaactgagaacctttctccttgctcctacgtctgccataaccaatagaataattcagcaaaggacatctgcatggagtgctgccctcagttcctccttccctgatcactctatttggatgtggacattcacatctgcactttggaataacaagcaacagagtagggaatgcttccatgcaccgtagagttgttacagtccataaagtgagagagagagaa

SEQ ID NO: 3167 - DNA, 600 bp, Chicken  19866894090564_4
atgctttgctcaagttcagctaaatgacgtcagctactcttcctttatctactgaggctgtaactccatcataaaaggccaccaagtttgccaggtgtgacttgcccttgttgaagccaggttggttaccaccaatcacctcaaaatgactttgtttttttttttggtgactgcattactagcccccagcatctcccatttcgaaacacggggaacatccacagggatgctgcaatgaagcagtaccacagcatgaygaacacaggcaggcagcatggttacagagactcaaagtgagtyttctgctcyctgtcaccaattctctaaatagctatgtgaactgagaacctttctccttgctcctacgtctgccataaccaatagaataattcagcaaaggacatctgcatggagtgctgccctcagttcctccttccctgatcactctatttggatgtggacattcacatctgcactttggaataacaagcaacagagtagggaatgcttccatgcaccgtagagttgttacagtccataaagtgagagagagagaacaagcatttgcacccaatgaaggtaaaacacgggttactctgt

SEQ ID NO: 3168 - DNA, 600 bp, Chicken  19866894090564_5
tcaagttcagctaaatgacgtcagctactcttcctttatctactgaggctgtaactccatcataaaaggccaccaagtttgccaggtgtgacttgcccttgttgaagccaggttggttaccaccaatcacctcaaaatgactttgtttttttttttggtgactgcattactagcccccagcatctcccatttcgaaacacggggaacatccacagggatgctgcaatgaagcagtaccacagcatgaygaacacaggcaggcagcatggttacagagactcaaagtgagtyttctgctcyctgtcaccaattctctaaatagctatgtgaactgagaacctttctccttgctcctacgtctgccataaccaatagaataattcagcaaaggacatctgcatggagtgctgccctcagttcctccttccctgatcactctatttggatgtggacattcacatctgcactttggaataacaagcaacagagtagggaatgcttccatgcaccgtagagttgttacagtccataaagtgagagagagagaacaagcatttgcacccaatgaaggtaaaacacgggttactctgttcatagcat

SEQ ID NO: 3169 - DNA, 600 bp, Chicken  19866894090566_1
acttcctaaggcttttcagaattttctatgtctaatcaattgctatttgatctgcttcttaaattataaatctcttgcattcatttctttccttaacataaaggttacattataaattataggccatgtttaatagctgaaaaaatatgccttaacgagacttattagtagcaaatcttaacccaaaatatatgaaaatagaaagaataaacagcagattctgtctttttcctcaagtaaaattatacaaaacagacaaaacaagccagtcctacacaaaaattaaaagtataaatatcrtaatgattacatgtaagagaaagaaatgaaagctaacaaggtgactgtgaggacaaaggcatcagcaaaattgtggagaagaaattttagaatataaatgacagcaacttgcctccttagcttgtttcagtgaattatgaatctcttatttttgtatgaattaaaagtatctttaaaaactgcaaacaaraatgactaacactgaaaaggaattaaacaataaagaagaaaattcaagtagagattaatttaaaagaattataatgttcaattaaacattagatgttttctgtcacatct

SEQ ID NO: 3170 - DNA, 600 bp, Chicken  19866894090566_2
tatgaaaatagaaagaataaacagcagattctgtctttttcctcaagtaaaattatacaaaacagacaaaacaagccagtcctacacaaaaattaaaagtataaatatcrtaatgattacatgtaagagaaagaaatgaaagctaacaaggtgactgtgaggacaaaggcatcagcaaaattgtggagaagaaattttagaatataaatgacagcaacttgcctccttagcttgtttcagtgaattatgaatctcttatttttgtatgaattaaaagtatctttaaaaactgcaaacaaraatgactaacactgaaaaggaattaaacaataaagaagaaaattcaagtagagattaatttaaaagaattataatgttcaattaaacattagatgttttctgtcacatcttctaccatacatttcaaacagaagataatttaaattttatattcaacacattaaaatgcaaagaaacaaaagcagtgtaatgtaatactttttcaaagcttttagaaatgtgctgatgttgtctgccgccagctgaactggcaatgaatgaacatgggattgaagccattacttctaggctttgacacaa

SEQ ID NO: 3171 - DNA, 600 bp, Chicken  19866894090573_1
tgtgttctgtgatatgaaaggttaaggcaaatgccttgtcctttgattccctcacttctgtcttttctttccaccctctacccctctcagaccaaaagacagcagagtgttctacgggatctccgtccacagatgggtctgattaaagaaggatcagggaccccaggaaccaattcatctctttccagagctgttcccagtaaagcccagagggaagataaggagaagatgaccagagaacaggaattcaacaggagggtgaggtctagagacacatatcacaacacacttggtcctttyctacatcagaatcatggatggatgcagcattgccttagccagctgagggatgctcatcaccttgaaattttagtaaatgctatctgaacaaatgtacaacagaatcacatcctaaatgtatgagggcacgaggtttggatctgaaatggagatgtcttttcttgcttctcaatagacatccaacacaacaaaaatccagttgtcaggtgttgctgaggaagctgcaagtgtcacatctgtcagccttgatggaaaggtaattttgtatctccaaagagaagtaaagactgctagaccatc

SEQ ID NO: 3172 - DNA, 600 bp, Chicken  19866894090573_2
tgaggaagctgcaagtgtcacatctgtcagccttgatggaaaggtaattttgtatctccaaagagaagtaaagactgctagaccatccctgcatcagtgtctcacacctttcatgtaattaaatgatttaagagtgagctggaggcaaggggtgttttacacagatgctgtcctggagttcttccagtgatgtccagctggaggaaagtctagcattgggctagaagctctctataaataattaggcattatttagaagagtttcttcctttttgtgacatctttctcaaaatatgtagratgcatattcattctccaagcaaactgattggctcggtgttctcatttttttttcctagactgacttctcaaggtgaatttttctactgtaaatcattttgagtgcaagttctaaagcgagcaggatctctgcagtttaaagaggatttgctgaagatccgtagctaaatgttcagttttttcatcttgtcagtaatgtcttgagatagcacaacactgagggagcaatgtttatcttcgcagcaatatgttgaagcaggaacattcctggtgatggagataaagctggacaaggctttg

SEQ ID NO: 3173 - DNA, 600 bp, Chicken  19866894090573_3
cacaacactgagggagcaatgtttatcttcgcagcaatatgttgaagcaggaacattcctggtgatggagataaagctggacaaggctttggtacccaaacgactgcaagaggagctcaccagaaggtgtgtaaagacatgctatagctctggagctgacagctcagttctgtaggacacaaacgaggctgtacagggagcctaccctctgaagtactctgcaagcagcagttgaaggcttcatccaatgtccactgaaatcaggaggacagggccaccaggctgcttcagcagcagcaytgcctgggtttggaaaacagttgcattcatccgagctggcatctctgcacaacagtatctgtgttcctgtccaggctttgtttcccattaatcctcctgtgcttgcctcttgcacgtgatgttcagctgcttggtcagggctggccaccagtggactgcagtaggtagcactgctctaactccagaatagcattctgttgttttgctgaaattttctcacaactttcttcctgggctctggttttcacactgttctgctgtagagctgtgctctcatctctgaggcttcgaggctttcac

SEQ ID NO: 3174 - DNA, 600 bp, Chicken  19866894090573_4
aacaggaagtatgtgtattgtcttttgttctgcctgctgtcttccaggaaaacaggtttggggaaagtgagcctcccttacagcagactttcccctgagcttttttatttgcttcctactctactgcagcttgcagaaattcagtgtaattcctctttgctcacctgccttgtgcagctgtggatgggaagactggaaaatcagatctgagtggcagagagggtcctttcttgggggggcttcagctaatgacacatacacgtgtcctggcacacgtgctcagcaattatgctttttttyttgttgttgttttactttttgtcttgtttcctgtgaaggtggtttgaatacatagctcgttagcaaascacaactccctttcttggrctgcatccaaagcttcctgtcagcctccgcttctgctcgcttactttgcttgaactgctgttgtgctcrgttttctttttctcatcttgaagtgaagcagtttggttctcatttgtgccactaacagaggtaacacagcagtgatgggagctcttctgaagtgggactgygagtgtgggcgctgcactgttcaggctcagtggcttcccaagg

SEQ ID NO: 3175 - DNA, 600 bp, Chicken  19866894090573_5
gagcctcccttacagcagactttcccctgagcttttttatttgcttcctactctactgcagcttgcagaaattcagtgtaattcctctttgctcacctgccttgtgcagctgtggatgggaagactggaaaatcagatctgagtggcagagagggtcctttcttgggggggcttcagctaatgacacatacacgtgtcctggcacacgtgctcagcaattatgctttttttgttgttgttgttttactttttgtcttgtttcctgtgaaggtggtttgaatacatagctcgttagcaaascacaactccctttcttggrctgcatccaaagcttcctgtcagcctccgcttctgctcgcttactttgcttgaactgctgttgtgctcrgttttctttttctcatcttgaagtgaagcagtttggttctcatttgtgccactaacagaggtaacacagcagtgatgggagctcttctgaagtgggactgygagtgtgggcgctgcactgttcaggctcagtggcttcccaaggagcggtgccagatctctgcagggaggcactgcagaacaagaggatcagacagcacggcagggtgtgca

SEQ ID NO: 3176 - DNA, 600 bp, Chicken  19866894090573_6
ctttcccctgagcttttttatttgcttcctactctactgcagcttgcagaaattcagtgtaattcctctttgctcacctgccttgtgcagctgtggatgggaagactggaaaatcagatctgagtggcagagagggtcctttcttgggggggcttcagctaatgacacatacacgtgtcctggcacacgtgctcagcaattatgctttttttgttgttgttgttttactttttgtcttgtttcctgtgaaggtggtttgaatacatagctcgttagcaaascacaactccctttcttggrctgcatccaaagcttcctgtcagcctccgcttctgctcgcttactttgcttgaactgctgttgtgctcrgttttctttttctcatcttgaagtgaagcagtttggttctcatttgtgccactaacagaggtaacacagcagtgatgggagctcttctgaagtgggactgygagtgtgggcgctgcactgttcaggctcagtggcttcccaaggagcggtgccagatctctgcagggaggcactgcagaacaagaggatcagacagcacggcagggtgtgcaaaagaaggaaaaggacacg

SEQ ID NO: 3177 - DNA, 600 bp, Chicken  19866894090573_7
ttgctcacctgccttgtgcagctgtggatgggaagactggaaaatcagatctgagtggcagagagggtcctttcttgggggggcttcagctaatgacacatacacgtgtcctggcacacgtgctcagcaattatgctttttttgttgttgttgttttactttttgtcttgtttcctgtgaaggtggtttgaatacatagctcgttagcaaascacaactccctttcttggrctgcatccaaagcttcctgtcagcctccgcttctgctcgcttactttgcttgaactgctgttgtgctcrgttttctttttctcatcttgaagtgaagcagtttggttctcatttgtgccactaacagaggtaacacagcagtgatgggagctcttctgaagtgggactgygagtgtgggcgctgcactgttcaggctcagtggcttcccaaggagcggtgccagatctctgcagggaggcactgcagaacaagaggatcagacagcacggcagggtgtgcaaaagaaggaaaaggacacgtggctgcttatggtcacagcactttccacagacctggcagcttccctggtgcctgcagcagcctcatgc

SEQ ID NO: 3178 - DNA, 600 bp, Chicken  19866894090573_8
acacgtgtcctggcacacgtgctcagcaattatgctttttttgttgttgttgttttactttttgtcttgtttcctgtgaaggtggtttgaatacatagctcgttagcaaascacaactccctttcttggrctgcatccaaagcttcctgtcagcctccgcttctgctcgcttactttgcttgaactgctgttgtgctcrgttttctttttctcatcttgaagtgaagcagtttggttctcatttgtgccactaacagaggtaacacagcagtgatgggagctcttctgaagtgggactgygagtgtgggcgctgcactgttcaggctcagtggcttcccaaggagcggtgccagatctctgcagggaggcactgcagaacaagaggatcagacagcacggcagggtgtgcaaaagaaggaaaaggacacgtggctgcttatggtcacagcactttccacagacctggcagcttccctggtgcctgcagcagcctcatgcagagttagatgactgtatttgtgtcctgtggggaaacgtcctgcgtgggatgagggaccagcaggagcagcagctttctgaagggtattttggagctgtgc

SEQ ID NO: 3179 - DNA, 599 bp, Chicken  19866894090576_1
  misc_feature (1)..(244): n is any nucleotide
nnnnnnnnnnnnnnnnnnnnnnnnnnnnnnnnnnnnnnnnnnnnnnnnnnnnnnnnnnnnnnnnnnnnnnnnnnnnnnnnnnnnnnnnnnnnnnnnnnnnnnnnnnnnnnnnnnnnnnnnnnnnnnnnnnnnnnnnnnnnnnnnnnnnnnnnnnnnnnnnnnnnnnnnnnnnnnnnnnnnnnnnnnnnnnnnnnnnnnnnnnnnnnnnnnnnnnnnnnnnnnnnnnnnnnnnnnnnnnnnnnnnaaggctatatgtggaaataaagaaatgagaaggaaagagcctagggaaatgtgagrgaaatgacagaaatatgaagraaatgacagaaaaacgttagggcaacagtataaatgtgagggaaatgaaggtatgaggcaaatgtgaaggaaagaaatgtgagtggaatgtgatgggaagatatgaggaaaatgatggaaccatgagaggaatgtgaggaaatgaaagggaattataaggaagatgtgagggaaacatgagggaaaatagattcwgtgaggtgctggtaccagaatggatgtgcaaggctttgccctggccgtgcagtctgggaacagcccctcccaagcaggctcta

SEQ ID NO: 3180 - DNA, 599 bp, Chicken  19866894090576_2
  misc_feature (1)..(223): n is any nucleotide
nnnnnnnnnnnnnnnnnnnnnnnnnnnnnnnnnnnnnnnnnnnnnnnnnnnnnnnnnnnnnnnnnnnnnnnnnnnnnnnnnnnnnnnnnnnnnnnnnnnnnnnnnnnnnnnnnnnnnnnnnnnnnnnnnnnnnnnnnnnnnnnnnnnnnnnnnnnnnnnnnnnnnnnnnnnnnnnnnnnnnnnnnnnnnnnnnnnnnnnnnnnnnnnnnnnnnnnnnnnnnnnaaggctatatgtggaaataaagaaatgagaaggaaagagcctagggaaatgtgagrgaaatgacagaaatatgaagraaatgacagaaaaacgttagggcaacagtataaatgtgagggaaatgaaggtatgaggcaaatgtgaaggaaagaaatgtgagtggaatgtgatgggaagatatgaggaaaatgatggaaccatgagaggaatgtgaggaaatgaaagggaattataaggaagatgtgagggaaacatgagggaaaatagattcwgtgaggtgctggtaccagaatggatgtgcaaggctttgccctggccgtgcagtctgggaacagcccctcccaagcaggctctatcagacccatctatctctgtg

SEQ ID NO: 3181 - DNA, 599 bp, Chicken  19866894090576_3
  misc_feature (1)..(28): n is any nucleotide
nnnnnnnnnnnnnnnnnnnnnnnnnnnnaaggctatatgtggaaataaagaaatgagaaggaaagagcctagggaaatgtgagrgaaatgacagaaatatgaagraaatgacagaaaaacgttagggcaacagtataaatgtgagggaaatgaaggtatgaggcaaatgtgaaggaaagaaatgtgagtggaatgtgatgggaagatatgaggaaaatgatggaaccatgagaggaatgtgaggaaatgaaagggaattataaggaagatgtgagggaaacatgagggaaaatagattcwgtgaggtgctggtaccagaatggatgtgcaaggctttgccctggccgtgcagtctgggaacagcccctcccaagcaggctctatcagacccatctatctctgtgtttcagagggccayctccagtgtcccaggaagggcttggacatcaggattgtaagcagtgggtttctgtgcacagccggtgttttccaaggagagctgatccacacatacctcccaaggaaaactggcttggtatgagccatgcaggtaattctgcctttgggaaagaccacacagcagcagacgctgttcaaat

SEQ ID NO: 3182 - DNA, 600 bp, Chicken  19866894090576_4
acgttagggcaacagtataaatgtgagggaaatgaaggtatgaggcaaatgtgaaggaaagaaatgtgagtggaatgtgatgggaagatatgaggaaaatgatggaaccatgagaggaatgtgaggaaatgaaagggaattataaggaagatgtgagggaaacatgagggaaaatagattcwgtgaggtgctggtaccagaatggatgtgcaaggctttgccctggccgtgcagtctgggaacagcccctcccaagcaggctctatcagacccatctatctctgtgtttcagagggccayctccagtgtcccaggaagggcttggacatcaggattgtaagcagtgggtttctgtgcacagccggtgttttccaaggagagctgatccacacatacctcccaaggaaaactggcttggtatgagccatgcaggtaattctgcctttgggaaagaccacacagcagcagacgctgttcaaatgctgaacggcaacatctccctgtgggcgcagggagaggcagtgtttctgacataagtttttccctggttcccagccatgaagccttgtgtgaccccagtcgtgccatgtggtatctctg

SEQ ID NO: 3183 - DNA, 600 bp, Chicken  19866894090576_5
catacctcccaaggaaaactggcttggtatgagccatgcaggtaattctgcctttgggaaagaccacacagcagcagacgctgttcaaatgctgaacggcaacatctccctgtgggcgcagggagaggcagtgtttctgacataagtttttccctggttcccagccatgaagccttgtgtgaccccagtcgtgccatgtggtatctctgtgctctgtctggtcagcagagataaaaatacccagtttttcacagttgtgctgggcaagattgcctttctcctgtgggctgcataaccccmcaaaaaatctcacagtgtaggtgctataaaaagaggtagcttcacatagtgccctgtcactgtttattattgaatctggcattttgcaggggggcagagtatgcactagtgcctttgtcacatggtcacaaacagaccttttgcaaacagcaaatggtgttcaagagtactctgggcaggtcagggacatggggctgcaactcccaggtggctccgtcccttccagggcctctctcttggacactcacagggtagggacagacactgagatggtgtcctaggatgctaggatgctgcagg

SEQ ID NO: 3184 - DNA, 599 bp, Chicken  19866894090579_1
  misc_feature (1)..(109): n is any nucleotide
nnnnnnnnnnnnnnnnnnnnnnnnnnnnnnnnnnnnnnnnnnnnnnnnnnnnnnnnnnnnnnnnnnnnnnnnnnnnnnnnnnnnnnnnnnnnnnnnnnnnnnnnnnnnnaacattacacttcaacatatattttgcctgttgtttaacttccttttttaactacggttttcctccccatttgggcacataactggattaagcagcataccaagctagtgaaacatattgtgtaaatctcaattttatgtcttcaggaccacagaaaatctgcgtgccacagcccttcaggacaagccctrttgcagtacatgagcagagcagaagcrtcccacactggtgcctcagcagctccaggaagctctgggtttgcagtggctgagctgcaggacgaaggcaggtgtgtgactgatgctctgcatgtcctggagatcccactggaacagaaatcaccgtaagcagacctgatcccagaacaacatgagcagccaagaacctgyagctgccagctacaaggatactttggaagtacatagtgcctgtcatacaggctcatctgccaccagggtttttggaccattccttcagcacatcacataca

SEQ ID NO: 3185 - DNA, 599 bp, Chicken  19866894090579_2
  misc_feature (1)..(82): n is any nucleotide
nnnnnnnnnnnnnnnnnnnnnnnnnnnnnnnnnnnnnnnnnnnnnnnnnnnnnnnnnnnnnnnnnnnnnnnnnnnnnnnnnnaacattacacttcaacatatattttgcctgttgtttaacttccttttttaactacggttttcctccccatttgggcacataactggattaagcagcataccaagctagtgaaacatattgtgtaaatctcaattttatgtcttcaggaccacagaaaatctgcgtgccacagcccttcaggacaagccctrttgcagtacatgagcagagcagaagcrtcccacactggtgcctcagcagctccaggaagctctgggtttgcagtggctgagctgcaggacgaaggcaggtgtgtgactgatgctctgcatgtcctggagatcccactggaacagaaatcaccgtaagcagacctgatcccagaacaacatgagcagccaagaacctgyagctgccagctacaaggatactttggaagtacatagtgcctgtcatacaggctcatctgccaccagggtttttggaccattccttcagcacatcacatacattttcctgtgaagatgcctcttacaaa

SEQ ID NO: 3186 - DNA, 600 bp, Chicken  19866894090579_3
aagcagcataccaagctagtgaaacatattgtgtaaatctcaattttatgtcttcaggaccacagaaaatctgcgtgccacagcccttcaggacaagccctrttgcagtacatgagcagagcagaagcrtcccacactggtgcctcagcagctccaggaagctctgggtttgcagtggctgagctgcaggacgaaggcaggtgtgtgactgatgctctgcatgtcctggagatcccactggaacagaaatcaccgtaagcagacctgatcccagaacaacatgagcagccaagaacctgyagctgccagctacaaggatactttggaagtacatagtgcctgtcatacaggctcatctgccaccagggtttttggaccattccttcagcacatcacatacattttcctgtgaagatgcctcttacaaacacagmgcttgaaatcagatgattaagatctacaccaggctgataccctccctgactgctgcctcctccctccatactcctgcacagacccatcagaaaggactgctagcaccaactgatacccaaagcctggcagatggaagacttgttctgctgggtcagtggtccacac

SEQ ID NO: 3187 - DNA, 600 bp, Chicken  19866894090579_4
cactggtgcctcagcagctccaggaagctctgggtttgcagtggctgagctgcaggacgaaggcaggtgtgtgactgatgctctgcatgtcctggagatcccactggaacagaaatcaccgtaagcagacctgatcccagaacaacatgagcagccaagaacctgyagctgccagctacaaggatactttggaagtacatagtgcctgtcatacaggctcatctgccaccagggtttttggaccattccttcagcacatcacatacattttcctgtgaagatgcctcttacaaacacagmgcttgaaatcagatgattaagatctacaccaggctgataccctccctgactgctgcctcctccctccatactcctgcacagacccatcagaaaggactgctagcaccaactgatacccaaagcctggcagatggaagacttgttctgctgggtcagtggtccacacaccagctccacaaataggactggctgacagtacctacagatcacaaaagaactgtatgttgaagtttataagctttttctactcatctatttccacacacagtctgtagatccaccgcagttaagagcggtgta

SEQ ID NO: 3188 - DNA, 599 bp, Chicken  19866894090581_1
  misc_feature (1)..(53): n is any nucleotide
nnnnnnnnnnnnnnnnnnnnnnnnnnnnnnnnnnnnnnnnnnnnnnnnnnnnngtatgaatgctgctcccaagaggttctgatgtttctgttcctgaaggattcatattacccagtgccgtgctgttctgcatctcatgcctccataggaagcacatagcatctcctggtggcccagagcctggtagactgatattttactgaagttaatgggtgctgtccttctcccagtccttccagagcaccagaatgtaggcagacttagcaacctgcgtaaggtgtgcagagcaaagagatcttycccttcttagggaaatgaatgtcagtaggcagctttatagctcatttgaaggacaatctattatcaagttggtacttggacagtagaaacagcttccactgtctgattggtccagaggtatgaaggaagttactctkaagtctaatttcagttgattacccccatgtaaaaggggatatatgggccaaattgggcagggccatgctctgaacaatgattaggctcacaatgcttctgactgatgctacacacactgcatctagcacaaatttagtaacagcttgtgtagcttttgttgt

SEQ ID NO: 3189 - DNA, 600 bp, Chicken  19866894090581_2
tgcctccataggaagcacatagcatctcctggtggcccagagcctggtagactgatattttactgaagttaatgggtgctgtccttctcccagtccttccagagcaccagaatgtaggcagacttagcaacctgcgtaaggtgtgcagagcaaagagatcttycccttcttagggaaatgaatgtcagtaggcagctttatagctcatttgaaggacaatctattatcaagttggtacttggacagtagaaacagcttccactgtctgattggtccagaggtatgaaggaagttactctkaagtctaatttcagttgattacccccatgtaaaaggggatatatgggccaaattgggcagggccatgctctgaacaatgattaggctcacaatgcttctgactgatgctacacacactgcatctagcacaaatttagtaacagcttgtgtagcttttgttgttattgctattttgttgttgttgcgtgtaacactgagcataaagtaattgctatcaggtatgaaaaaggaaacctatttcacattgctacctggagtgatgcacttccatatgtcgaatattttgatgtgaagatgact

SEQ ID NO: 3190 - DNA, 600 bp, Chicken  19866894090581_3
aaaggcgctgaaatgaatacttgataaacaatatctggcaaattaaaaatctgaaatgttaaatgaaatgcaaattaaaaatctggaccgttaaattaattgaatgcaaaaaaaaaaccctgacattaactatcatcaagggtcgaagttatatcagcaaaagcaacgctattctgagttatatcctgcttctcagtaatttacttgtgaatgggtgggtacaagaggagccccaaagatatagatatatttacatacatcgggagccatcctttctgcctgctgggcacagtgctgtcygaggaaagatggggggatggtttgtgcctaaaagaaacaagcgggttccttgtgtataggcaaagtgcatgacctgtgttgtagtgtctgtacaatcttcaaacaagctgaaagtgtacaagttttaatctaggagagacttgagggtttttttttgtcttttgtgttatattttgtctaaatttgttcttgttagagacaggagaacatgatactatgagaatgtaaggtatttctaagaattaattgacaggaagttaattaaggtttaatacatgttcacgtatatataaagtaatt

SEQ ID NO: 3191 - DNA, 497 bp, Chicken  19866894090583_1
attccaaaaggtctgagttttctgaaaaaatataagtgtgttactaagaagattttctgcatgattaatattaaaaacatgaaaagcagattgaatttatctgtatgtaggcattatagacctcagaaaagggaagttatttagaaggtggtagaactgtaattgcagtctcaacaaaaaagcaatcactgaggaatgaaacaagctctatctgccaaaatgaaaatttggaagttaatcaaatgccatcttagccagcctgttctgctgatatgtgtatctgaaatttccaatttgttsttgctcttcattactaaaagtacaatacagttttataatctcttttagaaagagtaagttgtgttccaacccaataaacagagaatcaaaagtctaaattctgttcctattatgcagtgttatgctgatcctctctcaggtagtagttgatgacacaccatttgtagacaataatgtaacactaaatccaatatttt

SEQ ID NO: 3192 - DNA, 600 bp, Chicken  19866894090588_1
gtcccagaaatcccctgctgagcatcccacgtcttctcacatagttgtgttgtgtttggttttaaatacccaacaacagtggctgccagctcttctccttcatttctaggccatgactcccaggctcttccaccccaccatcccaccattcaatgggttgacttcatcaccagtcgcacattgagaaatctcacgtttggcttaagcagcttggctttaaattttgttgatacacctttgcatcaggttttgccttgtgtgcactgtttcccagtttaggtcacctctttagtcagcccragaaaatgaggatgtattccagtccccatctgtgtgtctgttggggcacagtatgtttgcagctacaccgctgcacaccaggagagcagacttgagacagcttcatctgtctgcatcccctctgctgtttggcggtctgcagcccaaacattcctgctgccattaagcccttattgctcaggcagtgcccacaaagtgcattggcagaagtgttgctgcagtcgtgtttgatacccactgtgcagcagattgttgctcctcctgtgggatacaggtgctttagtactgagcttggtgaat

SEQ ID NO: 3193 - DNA, 600 bp, Chicken  19866894090588_2
aagtaaaattttgtttcagccaaacctgtgaacagctccacttggctgccttgtgctttacagtgctgagccagggactttgtgctatgaaaacagctgtggggcggccccagagagattgctctgagctccggccatgctgtgtgtcagctcaggttggcagtgcaggtgctgctgcagacatcagctgccaaaattgctgtttcattctttcaaaaccgagatgtggtgaatttcgctcgtaaagcatttggggccggagctcctctggctgttgggcttttgagttttagtgtcttyatggaagcaaaatgcttctagaatggccttgtttctgagagcaggactgtgtgcattgactgtccttctgccagccgtgcgtggtgtcaggcagcagtgtgccccacaccttttctccagagcgaagtctgagagctcgccttgtgttttgcaggaggagggcttggagaagcagctggtgaaccttttaatcgagctgtcagctgaacagtatgtgcctgtctttgcacaccatcgaatttccttggaaatgctcagcaccatgactgccagtgacctggaaaaggtatgaggcagcag

SEQ ID NO: 3194 - DNA, 600 bp, Chicken  19866894090589_1
tccagcacctcgctgctcccatagtaaagatcagaaataatctaccccctttttatcagttttggttcttattagttaaatattatcttgcactttttcttagctgcaactgttattgctgtagatgctaagtggtgtaagttgttgaatacctctaatgataaccagtatatatttacttccagtataagcaagatacatgtttcatccaaaaatttacctgttgttggacccaaagcatagacaatttttgtgattctgcctcagcatgatagattcataatgcatcctgtatccacrcttttgagacttctcatagaccataagaatagcagtctatcttcagcatcaacctttggagtcaccaactaagtccaagaggataaggatttccaggttggaaatccctgtgragccactgaaggcaaawagggatgcaaaaagcmcaagaaagcttttacttatgcatctatcattataatatgaaaaaacctgggctcgtccatctcacagcctatttgggagttaccttaagctctccctggcaaatggaagaggtagtgtgcacaagcaaaagaggaataaaatgagatctggctg

SEQ ID NO: 3195 - DNA, 600 bp, Chicken  19866894090589_2
tattgctgtagatgctaagtggtgtaagttgttgaatacctctaatgataaccagtatatatttacttccagtataagcaagatacatgtttcatccaaaaatttacctgttgttggacccaaagcatagacaatttttgtgattctgcctcagcatgatagattcataatgcatcctgtatccacrcttttgagacttctcatagaccataagaatagcagtctatcttcagcatcaacctttggagtcaccaactaagtccaagaggataaggatttccaggttggaaatccctgtgragccactgaaggcaaawagggatgcaaaaagcmcaagaaagcttttacttatgcatctatcattataatatgaaaaaacctgggctcgtccatctcacagcctatttgggagttaccttaagctctccctggcaaatggaagaggtagtgtgcacaagcaaaagaggaataaaatgagatctggctgcaactgagtatgaattgcatccagcctgagccaaggagctggggacatgcatctcatttgcctgaaagatatctagtctgagcctgtaagtcagggtgctgtcacagtcggtg

SEQ ID NO: 3196 - DNA, 600 bp, Chicken  19866894090589_3
agtggtgtaagttgttgaatacctctaatgataaccagtatatatttacttccagtataagcaagatacatgtttcatccaaaaatttacctgttgttggacccaaagcatagacaatttttgtgattctgcctcagcatgatagattcataatgcatcctgtatccacrcttttgagacttctcatagaccataagaatagcagtctatcttcagcatcaacctttggagtcaccaactaagtccaagaggataaggatttccaggttggaaatccctgtgragccactgaaggcaaawagggatgcaaaaagcmcaagaaagcttttacttatgcatctatcattataatatgaaaaaacctgggctcgtccatctcacagcctatttgggagttaccttaagctctccctggcaaatggaagaggtagtgtgcacaagcaaaagaggaataaaatgagatctggctgcaactgagtatgaattgcatccagcctgagccaaggagctggggacatgcatctcatttgcctgaaagatatctagtctgagcctgtaagtcagggtgctgtcacagtcggtggaaaaagaaaggcatca

SEQ ID NO: 3197 - DNA, 600 bp, Chicken  19866894090589_4
gaatacctctaatgataaccagtatatatttacttccagtataagcaagatacatgtttcatccaaaaatttacctgttgttggacccaaagcatagacaatttttgtgattctgcctcagcatgatagattcataatgcatcctgtatccacrcttttgagacttctcatagaccataagaatagcagtctatcttcagcatcaacctttggagtcaccaactaagtccaagaggataaggatttccaggttggaaatccctgtgragccactgaaggcaaawagggatgcaaaaagcmcaagaaagcttttacttatgcatctatcattataatatgaaaaaacctgggctcgtccatctcacagcctatttgggagttaccttaagctctccctggcaaatggaagaggtagtgtgcacaagcaaaagaggaataaaatgagatctggctgcaactgagtatgaattgcatccagcctgagccaaggagctggggacatgcatctcatttgcctgaaagatatctagtctgagcctgtaagtcagggtgctgtcacagtcggtggaaaaagaaaggcatcatggagaatgaaccatt

SEQ ID NO: 3198 - DNA, 600 bp, Chicken  19866894090591_1
ccacgtgagaacctacagctgtggcgtagttcccaccttgtaaatatgcacctgtgccatggtgtgggtgctgtgggggttctgaggttgctggtttggagcagctgttttgttttgccagatcttgatttgttttgagatatgactgggggatttgtattgtaaaaaagttactaaacttgagccaggtctcaaggtggaagtgtgtcttctggctagtgttcagcataggctgatgggtagaactgattgaaaaagctccatgtgagcatgtggaagaaaaaagagtaatgggtttgraaatcgtgcttaagtatgccttgcaccccagtaagatatctgtttgcagtcttgaagagttcagtcaagctgcagtgagaattgagagtttgggggtatattgcaggaaaactaccatagtgtgtatgtttatttgtcggttgcatgctaayttttatcagttatcttacagaacttagtttgtccccagccacctcttataaataagtagagttcagaacacaaagatgatttgtaaggagtttttcagatacgttgctttgtgatttgatacagaaaacaagaaaaatatcagcctag

SEQ ID NO: 3199 - DNA, 600 bp, Chicken  19866894090591_2
atttgtattgtaaaaaagttactaaacttgagccaggtctcaaggtggaagtgtgtcttctggctagtgttcagcataggctgatgggtagaactgattgaaaaagctccatgtgagcatgtggaagaaaaaagagtaatgggtttgraaatcgtgcttaagtatgccttgcaccccagtaagatatctgtttgcagtcttgaagagttcagtcaagctgcagtgagaattgagagtttgggggtatattgcaggaaaactaccatagtgtgtatgtttatttgtcggttgcatgctaayttttatcagttatcttacagaacttagtttgtccccagccacctcttataaataagtagagttcagaacacaaagatgatttgtaaggagtttttcagatacgttgctttgtgatttgatacagaaaacaagaaaaatatcagcctaggatcatctcagggcagcgtatgccagcaggtgtgatagctcatccaactaacagtgctgtgctgccaaacttagcatctttgtgcaagcataggcttggattggcactgagggggtgaaaggtggctctagtgaataagagtgctacagagg

SEQ ID NO: 3200 - DNA, 600 bp, Chicken  19866894090597_1
ttggactagatgatcttggaggtcttttccaaccttggtcattctatgagtctatgatcccctgcggcctgaaggtgactagcagagctatgaggcactagggaaacctttgcattacaattgcttgtgagcgtgcagccagtgaaacacaggcttggaaaaaacctgcatgtgaccatgggctgtgagggaaatctaactgcttacaaagggcttctgagtcaacagaaagacagtggtggagccagagagcaagcaatttaacccaaggacagagtggagtgcaagaaaatgagagarctccagagaaacaagctaaggaacccgagaggaacaagaacaaaaccagatcaaatcaaacaaagaaataacgagagatgcaaactgaaacagagctataaataaatgagatagacctataaatagaaccactttctggagaaaagtaatgagaagtgcctttgctagggaatccccatgtggggattagagagagggagaaagaagtaggatagaaaccagctaacccacatgatgaaactggaagcaaaagaagaagaaaagaaaagctgtttttggaaaatatgcaagcttagcaag

SEQ ID NO: 3201 - DNA, 600 bp, Chicken  19866894090607_1
gagtttcagctctctacaatggacaaccaggaggaaaggaaaacaaatggcataacatatctgcattttttaagtatttctagaaaaaacccaacaagctatgaactcaaatgaacaggcatatttggacatcaaagtcatatgcacttaaaaagcaatttaatttcccccccagaaagacattcctaaaggcacgagtcagccagagaatcacaatggctttaatgactaatatgtttacttgtctcactgcagtgactatgggaaaaggatgctcagagcagctcacctttggggagrggggagaagccacatactgcttgcctgaggctgagcaggatggggacactcatgcgtgctgcctgcttgtaggaagcaagaaacacagaaatgtactgatcttagtgtcccacaaggcacactgaagcaactttgagagaaggtgaggcagcaggttatgtttgagacccttgaacccttctttacgcatttatttcttgcctgcgggcaagtttggcttggagtgaggatgccaagctaaacctcagtgctgtttctatagagaccactgacatcaaatctgtggctaaatacggggaa

SEQ ID NO: 3202 - DNA, 600 bp, Chicken  19866894090607_2
tggggacactcatgcgtgctgcctgcttgtaggaagcaagaaacacagaaatgtactgatcttagtgtcccacaaggcacactgaagcaactttgagagaaggtgaggcagcaggttatgtttgagacccttgaacccttctttacgcatttatttcttgcctgcgggcaagtttggcttggagtgaggatgccaagctaaacctcagtgctgtttctatagagaccactgacatcaaatctgtggctaaatacggggaacattgtttatcctgtacaacttatcctcctcttgccttcytcttgctctaactaaatactcaactcttctgaatttgagcctcccaagatttaacaatatatatcttaaggatgatgctggcacttcatttacttcgttctccctttttgagttgcttcctctcaccctcaagggctggtgatttcttgggttgccgttccttgcttctttccctatcagtgggaagagtttggctggacatcttttccactcccattcatggtcctaccatctttttggcatgacataccaatcccaagtggccttatccagaaagctttttcttcccagagctgcatc

SEQ ID NO: 3203 - DNA, 600 bp, Chicken  19866894090611_1
tatctcttgtaaaacagaaggctcgttaaattggtctcattatggttgttgaggttgtgtgacactggtgaaaggggttcccccattatctgtgtttgacacgtattcctaatcaactgggccaagtctgctttatcaaagggctgtcacaggagtggagacaatatttattctggcttgtactattaaagtaaaaaatgaaggttgcattggcaaacacacaaccttctgtcacaaatggccacacagaacatttattgaggtgctcgctttctgcaaatgtgattctaaatatagccyacttcacctttcggtaccgaggatgcaggacacttggtttttcaaaacccctatttttaaggcatatttgttaaattaaatttaaacatacaatgagggtatttctcagcaaagaagtgctaaaggacaagattacaatcaagtctgcaatttcctccaaatttaataatgaaaagaaaatcagcagtcccacatatccagcttcagaaacttgttagcaacatgttctcctttctattaagagatcttaatatgtatcacaatattgcctcatttattgaaaatgttctgaacacttta

SEQ ID NO: 3204 - DNA, 599 bp, Chicken  19866894090620_1
  misc_feature (1)..(80): n is any nucleotide
nnnnnnnnnnnnnnnnnnnnnnnnnnnnnnnnnnnnnnnnnnnnnnnnnnnnnnnnnnnnnnnnnnnnnnnnnnnnnnnncccccatagtcctctgtgttgtctgatgtgtgccctggaggagatggagactctcaagcatcctacgagtgccaagtgctgttgagaaggtaggtgaggtgctgctgacaacctggctgtccatttgtacaggcaccgagaggcttactgtcgctgctcaaagggatcttcaaagccaggatgttttctctgagctcccagcaagtttcagccaatagtrctggagtggtcagcatctgtgtaacttttcctaaggtttctcctgagtggtttcctttccattgtggcgttacatgcataaataacttcttaataagctagtaagtgaaactagggtgttattcyaccttagagcatagcctgctttgtagctgtctgttacctaaaggcatagtctrtttcctccctctgaggttgcagatttcaacgccttccattgagycggacccgatcctttggtgagctgcttctggggtttttaggactttctttgaatggaggaacarcatttgcatcaag

SEQ ID NO: 3205 - DNA, 600 bp, Chicken  19866894090620_2
ggagactctcaagcatcctacgagtgccaagtgctgttgagaaggtaggtgaggtgctgctgacaacctggctgtccatttgtacaggcaccgagaggcttactgtcgctgctcaaagggatcttcaaagccaggatgttttctctgagctcccagcaagtttcagccaatagtrctggagtggtcagcatctgtgtaacttttcctaaggtttctcctgagtggtttcctttccattgtggcgttacatgcataaataacttcttaataagctagtaagtgaaactagggtgttattcyaccttagagcatagcctgctttgtagctgtctgttacctaaaggcatagtctrtttcctccctctgaggttgcagatttcaacgccttccattgagycggacccgatcctttggtgagctgcttctggggtttttaggactttctttgaatggaggaacarcatttgcatcaagtttgctgctaattcagcttcctaaagctttgcttgatcagaaagcatgagtgcttcaggagygttctgcctgagaacagacttacactcagtctggccctgctgtgaagtttctctgttcttactg

SEQ ID NO: 3206 - DNA, 600 bp, Chicken  19866894090620_3
gtgctgctgacaacctggctgtccatttgtacaggcaccgagaggcttactgtcgctgctcaaagggatcttcaaagccaggatgttttctctgagctcccagcaagtttcagccaatagtrctggagtggtcagcatctgtgtaacttttcctaaggtttctcctgagtggtttcctttccattgtggcgttacatgcataaataacttcttaataagctagtaagtgaaactagggtgttattcyaccttagagcatagcctgctttgtagctgtctgttacctaaaggcatagtctrtttcctccctctgaggttgcagatttcaacgccttccattgagycggacccgatcctttggtgagctgcttctggggtttttaggactttctttgaatggaggaacarcatttgcatcaagtttgctgctaattcagcttcctaaagctttgcttgatcagaaagcatgagtgcttcaggagygttctgcctgagaacagacttacactcagtctggccctgctgtgaagtttctctgttcttactgaacgggcacagtggtaattgcatgcgtgcagcctctactctggacacagtgca

SEQ ID NO: 3207 - DNA, 600 bp, Chicken  19866894090620_4
gcttactgtcgctgctcaaagggatcttcaaagccaggatgttttctctgagctcccagcaagtttcagccaatagtrctggagtggtcagcatctgtgtaacttttcctaaggtttctcctgagtggtttcctttccattgtggcgttacatgcataaataacttcttaataagctagtaagtgaaactagggtgttattcyaccttagagcatagcctgctttgtagctgtctgttacctaaaggcatagtctrtttcctccctctgaggttgcagatttcaacgccttccattgagycggacccgatcctttggtgagctgcttctggggtttttaggactttctttgaatggaggaacarcatttgcatcaagtttgctgctaattcagcttcctaaagctttgcttgatcagaaagcatgagtgcttcaggagygttctgcctgagaacagacttacactcagtctggccctgctgtgaagtttctctgttcttactgaacgggcacagtggtaattgcatgcgtgcagcctctactctggacacagtgcaggactggagcagcaagcaacctggtgtctctgtacccatgctag

SEQ ID NO: 3208 - DNA, 600 bp, Chicken  19866894090620_5
ttcagccaatagtrctggagtggtcagcatctgtgtaacttttcctaaggtttctcctgagtggtttcctttccattgtggcgttacatgcataaataacttcttaataagctagtaagtgaaactagggtgttattcyaccttagagcatagcctgctttgtagctgtctgttacctaaaggcatagtctrtttcctccctctgaggttgcagatttcaacgccttccattgagycggacccgatcctttggtgagctgcttctggggtttttaggactttctttgaatggaggaacarcatttgcatcaagtttgctgctaattcagcttcctaaagctttgcttgatcagaaagcatgagtgcttcaggagygttctgcctgagaacagacttacactcagtctggccctgctgtgaagtttctctgttcttactgaacgggcacagtggtaattgcatgcgtgcagcctctactctggacacagtgcaggactggagcagcaagcaacctggtgtctctgtacccatgctaggttaatcaatctgcttgaagcctgcagtagctcgctcatactgccaaagctccagtaagagctg

SEQ ID NO: 3209 - DNA, 600 bp, Chicken  19866894090620_6
ttgtggcgttacatgcataaataacttcttaataagctagtaagtgaaactagggtgttattcyaccttagagcatagcctgctttgtagctgtctgttacctaaaggcatagtctrtttcctccctctgaggttgcagatttcaacgccttccattgagycggacccgatcctttggtgagctgcttctggggtttttaggactttctttgaatggaggaacarcatttgcatcaagtttgctgctaattcagcttcctaaagctttgcttgatcagaaagcatgagtgcttcaggagygttctgcctgagaacagacttacactcagtctggccctgctgtgaagtttctctgttcttactgaacgggcacagtggtaattgcatgcgtgcagcctctactctggacacagtgcaggactggagcagcaagcaacctggtgtctctgtacccatgctaggttaatcaatctgcttgaagcctgcagtagctcgctcatactgccaaagctccagtaagagctgaaatcacatttgctggagtgcattttctctggtgctgagattaagcaatagaaaactgtggactgctctgaaagg

SEQ ID NO: 3210 - DNA, 600 bp, Chicken  19866894090625_1
aaaccaaagaaaaagtatgcttacacctatcatgttaattcttttgcagtacaaaagaaattacattttaatggtactacaaatattacatttattcactgtgtatgatttattattaaaatggtaaaatgaaatattctgtttaatcaaatgcattcaaagtaactaccgcagttgaaaacgtaaaaccaaattctctttttagctctctatagagatcctctcacaaaatgtgaccattttctttggtgaatactcttgctgcatgataccttgtctcactcaccattcggtccactrcttctgacccaactgattcagttttgcagtgaaaccaaacagaaggaccggagatactgtctgtgagctcttgatcaccccccttctaacagcaagcaaaagctggagtaccatttaacgtttcattcagatatctgattttttccctgacactcatcttcataacatatattccgaagagatatgccaaagcaagatctaaatactagtgagcatcaggaactatgtagctatgtgactgtatgcaccatccccaggragacacttgcaggggagcagcccagccctggaggaacatca

SEQ ID NO: 3211 - DNA, 594 bp, Chicken  19866894090625_2
tgctgcatgataccttgtctcactcaccattcggtccactrcttctgacccaactgattcagttttgcagtgaaaccaaacagaaggaccggagatactgtctgtgagctcttgatcaccccccttctaacagcaagcaaaagctggagtaccatttaacgtttcattcagatatctgattttttccctgacactcatcttcataacatatattccgaagagatatgccaaagcaagatctaaatactagtgagcatcaggaactatgtagctatgtgactgtatgcaccatccccaggragacacttgcaggggagcagcccagccctggaggaacatcatgctcacagctctaccacttctaagcagcttttcatagacaatgcaggcaatcactgacataaaaggggtaattcttgttagcatgttttagtgctctctttgctaaaaacacctcaatttacttctttcactcacacttctctctttcatttaacttatctgagtctagagcacttagcttcagatgtgctagcttttctacctattaattcctcagcaaggatatactgtatattggaaactagaattcta

SEQ ID NO: 3212 - DNA, 600 bp, Chicken  19866894090631_1
aattttctccagctctttgcccccccttggttaataacgccgattctctttgattcgtatgtgcccattcttatctgaaataaagcagaaatggtagcaaaggagaaaacaccaaatttatccccatcagtgaaaagctaaaggttgtgatcactgaagagttcctcccatagccgtgacctgttcaaccagctgagttttcaaagatgtcctgagcttgttgcccactgtggtttcctcattatcgttttgttttgttttcccttcccctccaagcacctcttcactctcccgagagcrtgccgggcttcagtgccaaacatcaccagtgagctgtacgatgtcccatccatgcagagccgggagtccttactcacacaggtacgtcttccctcagtccctcatgtaccactgggcccccaacccatctccatcccatagagcctcagaatacagcttaaggtttagggtttaattctagcattttcctgttggggttttttgtaaaatttggcagaaaaccatgcctttttagggaagttcaaaacaaagtagttctgctttgaattggttagaaatgcaaagaagtgtgctttaaat

SEQ ID NO: 3213 - DNA, 600 bp, Chicken  19866894090634_1
cctatgctgatgttcttccttgatttcatagggcacgggttcaagagcaaaggcaacctccagttggggtggtccctgaaccacctgctctgccccactgcagaggctgctgagctgcttgtgaagcttttcctaaaatgctgctatttatagctttacatattacacaagtgtcaaaatgaggtagaagtattaatcttgtcaggtgtcctgctgtttgctacgtcttttcttgagtcagagcccagagatgtgccatggtatttgattggtaggctgctcagatgctccaaacacaaygtacctcccaaaataaagcttccagatacagacatcaccacatcatattttcacattttcaaggtccagaataagaagaaaatattaaccatacttaacgatttgcttgattttttctctattattattacctcttaacatacagctctatcctaatcctaaaaaggatttgcttagaaaaacaagctgccttcggtaccacaggtggtgttgcctctgactccaaagcaaagggatgagcagatgtcagtacctgaggaatgctcaaaaggaaattcttcattttggagaagaggagca

SEQ ID NO: 3214 - DNA, 599 bp, Chicken  19866894090637_1
  misc_feature (1)..(69): n is any nucleotide
nnnnnnnnnnnnnnnnnnnnnnnnnnnnnnnnnnnnnnnnnnnnnnnnnnnnnnnnnnnnnnnnnnnnnggcagggatgttctgcctctagctgtatacatcactgcctctctgggctcctaatcccagcaaaagcctctgcgtgtcactacagcagcctcactcccagtcatgatgtgcattctggaaatcctctgtttgcatccattctcctgaccctctttcccatacttaatgacatttctttctgaagcaagcacaggatgagaggctccattaaatgcaccaacctgcaaaagrcttatgcataagatgtgcatgtcacattacgttttgttgaactttcattctcacgatgtttatcttaatttagtaatatattattcttgaggaaaacaggagctccagggcagagacagactctggcagctgtaaggaatgattactttccagtttggctartgacataatccactgtggttgcaagtcttgctttcctctctagatgatgtcaacaattccatgagctacatgtgttgtattcataagtggtacttagaaatatgtgttctgtaatctcctccttatgcctgacactt

SEQ ID NO: 3215 - DNA, 600 bp, Chicken  19866894090637_2
ctcccagtcatgatgtgcattctggaaatcctctgtttgcatccattctcctgaccctctttcccatacttaatgacatttctttctgaagcaagcacaggatgagaggctccattaaatgcaccaacctgcaaaagrcttatgcataagatgtgcatgtcacattacgttttgttgaactttcattctcacgatgtttatcttaatttagtaatatattattcttgaggaaaacaggagctccagggcagagacagactctggcagctgtaaggaatgattactttccagtttggctartgacataatccactgtggttgcaagtcttgctttcctctctagatgatgtcaacaattccatgagctacatgtgttgtattcataagtggtacttagaaatatgtgttctgtaatctcctccttatgcctgacactttacacgtgtttatctacaaggagtggtgacattakcttgctaattttgccagagtattgtaccagtgagggtatgagagactcagaaggatatttaaactggcaaagaaataattattgacactagctatgagtactttataaggctctgttttggactgtca

SEQ ID NO: 3216 - DNA, 600 bp, Chicken  19866894090637_3
tgttgaactttcattctcacgatgtttatcttaatttagtaatatattattcttgaggaaaacaggagctccagggcagagacagactctggcagctgtaaggaatgattactttccagtttggctartgacataatccactgtggttgcaagtcttgctttcctctctagatgatgtcaacaattccatgagctacatgtgttgtattcataagtggtacttagaaatatgtgttctgtaatctcctccttatgcctgacactttacacgtgtttatctacaaggagtggtgacattakcttgctaattttgccagagtattgtaccagtgagggtatgagagactcagaaggatatttaaactggcaaagaaataattattgacactagctatgagtactttataaggctctgttttggactgtcatttgttagaaaatctttgctgctgaaagtcatccatcattcccagatggaccagcaagccttatagaaaactctcatcccaaatcccactcctcwccagtggctgaaagtacttgcctatcmacatttgtaaattagatatatagatattatttcctgacaatgtacaaatg

SEQ ID NO: 3217 - DNA, 600 bp, Chicken  19866894090637_4
agaaatatgtgttctgtaatctcctccttatgcctgacactttacacgtgtttatctacaaggagtggtgacattakcttgctaattttgccagagtattgtaccagtgagggtatgagagactcagaaggatatttaaactggcaaagaaataattattgacactagctatgagtactttataaggctctgttttggactgtcatttgttagaaaatctttgctgctgaaagtcatccatcattcccagatggaccagcaagccttatagaaaactctcatcccaaatcccactcctcwccagtggctgaaagtacttgcctatcmacatttgtaaattagatatatagatattatttcctgacaatgtacaaatggtatgataagatgcagttttcttggctgctaaatggacttcagtggtgaaaaaaaatgctcttttgccagagctccacctacatgcccctgtttatacacgtaactcaggttttctttattaagtagactgtatgcacaatgttcacatggtgatgatcctcagcaagagctcatactgcccatgtaagtgttttttaaagaatcaagctcttacctctcaaa

SEQ ID NO: 3218 - DNA, 600 bp, Chicken  19866894090637_5
ttatgcctgacactttacacgtgtttatctacaaggagtggtgacattakcttgctaattttgccagagtattgtaccagtgagggtatgagagactcagaaggatatttaaactggcaaagaaataattattgacactagctatgagtactttataaggctctgttttggactgtcatttgttagaaaatctttgctgctgaaagtcatccatcattcccagatggaccagcaagccttatagaaaactctcatcccaaatcccactcctcwccagtggctgaaagtacttgcctatcmacatttgtaaattagatatatagatattatttcctgacaatgtacaaatggtatgataagatgcagttttcttggctgctaaatggacttcagtggtgaaaaaaaatgctcttttgccagagctccacctacatgcccctgtttatacacgtaactcaggttttctttattaagtagactgtatgcacaatgttcacatggtgatgatcctcagcaagagctcatactgcccatgtaagtgttttttaaagaatcaagctcttacctctcaaaattacacttgtatggcattgttcaata

SEQ ID NO: 3219 - DNA, 600 bp, Chicken  19866894090639_1
ggccacactgaatttgctcccttcattctgagagcagccgggcctcagcatggagaaggagggcagagatgggatggtccccaaggagtcctccacagccctttcaagttgtggttcagctcctgctgcccacagtgcatcatggctgctgtgtgcttgcactgctgtggggctgcacggcggggaaggcgatgccggcagcacgcaatgctcctgcagacctgcacacagcaaagggaccattgtaataatgctccaaaaaccatgtgggaaatcgaaccagccacagaaaaccacacmgagtttacattatttaataaaatactacagacatagatcagctcccctcgtccagtatttattgtttcatttttctctagagaagttgcaagcgttatgatagactgaagatttctttgttttcatatagtttctttataacttcctacagcaacgtaccacactgaatcccaacagataaccatacaataacaacaacaatacaccagacaattttttaatcctcgccataaatcaaagaatatcaataccaaagagatggatgacacgagcccccttcacgcaggccagccaggatgc

SEQ ID NO: 3220 - DNA, 600 bp, Chicken  19866894090639_2
aacgcccgtccttcagcctcatcacagcatccccagcacagcaacacatacccctggatacaggtccatcagcccttccaaaacgccatctgctcaacgccatgaggatcatcaccaccttctgtttgattccctttttcagcatcccacacagcgtacaccacctccttgctcagcaccccagtcatgctggccttacagatcagctcaggacagccccggacaacgcgctgtctgcactctgggacacactgaaagttgctacggtgaaaggaaagctggacagtggcaacacagtgstgtaaactgtgatggtataaaggcacatgcccaagggaaagtgcaccacgtgagtacaacagaatggaagcaggaagaggaaacgtatagtaattcccagggatttgagctgggccttgaatgtgaagtgaaaactggtagggagagataaaaccagtgaagccatcccagtagaacagctcttcttctgaggtatagcccgcagggctgggcaccaagctgggcatctaaaaaccacaacctttgatgcagttcctgtgcttctgtatatccaacacacaaggataggagcatcatttg

SEQ ID NO: 3221 - DNA, 559 bp, Chicken  19866894090639_3
atcactttaaggccaagaaaagcagttgcagcacgcaaggagagcacagaaaaaataaggagaaatttctgtgccagagcatatttacaggttgagctgtaagcttcccgagtttgtatacagtgctttgttttggtgcaacagtaacactgatttgtgtattagaagtcctatgtgtatctaaagattaattcaattgccatatacttctacagggggacccagaggagaccagaattgctctgaatatcagttccagccattccctgcaggagagactacaaaaaaaaaaaaaaaaarggaaaatacggatcttgtggaaggccactgaagaataagaacagtgatgacaaatgcctctgctcttcggtgcatcctttgtttgagagtatccacatccacttgtatttgctatataaaggtaaaaaaagctcctggggaaagcctggtgcattacttactggttttaacaattctggatctgcaatccacaatgccaagtctgtggagacatacatggagtaaatggtaaatactacaaaggcagcactgagcagca

SEQ ID NO: 3222 - DNA, 600 bp, Chicken  19866894090645_1
tatttagccataggcttgagtgtttacactgaaggctattccgggaaatactgagttgtttctaactggattaaatgaattatatttatcaggaattcaaagaacaagcaatgtttggcagactctttcctcagatataaataaaagccaagacaacatgcctaaattagggtatgctgaaaagaggtaagcaggagaaaacagctatttaagaccacattggtccactcatatgtgaaggatacggaaggaggaagagcggtggaaatgtttaatgagaaaatcagagataagcaaacrttgtgccactgactccctggtaagrgctgaaatgatggaatagaacagtgtgagagctgtgtacgtcagtaggtgtgtgtctgagatgacaaggagcttgtgtgtgggcacgtccaaagcatccggggctcagtcctataaactgcctaagcatgtggagcacttggctccggtgggattgattacttgtgctccctccatgaaaacacgagcacagggaatttacaagccaagaacaggcaagtggaagtctatgccggtttaaagagcacaacagtagcatgctgaattggcaaaata

SEQ ID NO: 3223 - DNA, 600 bp, Chicken  19866894090645_2
acactgaaggctattccgggaaatactgagttgtttctaactggattaaatgaattatatttatcaggaattcaaagaacaagcaatgtttggcagactctttcctcagatataaataaaagccaagacaacatgcctaaattagggtatgctgaaaagaggtaagcaggagaaaacagctatttaagaccacattggtccactcatatgtgaaggatacggaaggaggaagagcggtggaaatgtttaatgagaaaatcagagataagcaaacrttgtgccactgactccctggtaagrgctgaaatgatggaatagaacagtgtgagagctgtgtacgtcagtaggtgtgtgtctgagatgacaaggagcttgtgtgtgggcacgtccaaagcatccggggctcagtcctataaactgcctaagcatgtggagcacttggctccggtgggattgattacttgtgctccctccatgaaaacacgagcacagggaatttacaagccaagaacaggcaagtggaagtctatgccggtttaaagagcacaacagtagcatgctgaattggcaaaatagagcaagaaaaaacaggttggtttg

SEQ ID NO: 3224 - DNA, 600 bp, Chicken  19866894090652_1
tctggcaaggatgcctccagagcacatctagtgacaccatttaagcctgctgggattgtatttgttcactagaaccaaggagctggctccgagaaagcacccttttcccagggctgaaatgcagccctcataatttaagagagtgttcctgcataagagcctagtgaatgttatgattactcaggcatttattctcaactttcatggctcttgcagcaagagctggtctagccactctcaagaggtctccctgtcatgctggatattgaaggctgcagaggctgggcttctcatctcccygctgtttttgtgcttgcctttgtcactgtgctgttccctttacacaccagctctctgtacactcttctgcccgtaacttcccacattctgctgccattattgagtttgtgtccttttcttgccatagawatctagaattcaattttacttctttctgtttgtgaaaaatgatgggacatcactgagatggatattcccctctgggtcagtctcgtcacacagtttcaggagctgcttgaccctcactacttgaggccacttgatccagaacaagctaaaagactgattggaacacttggc

SEQ ID NO: 3225 - DNA, 600 bp, Chicken  19866894090652_2
ataatttaagagagtgttcctgcataagagcctagtgaatgttatgattactcaggcatttattctcaactttcatggctcttgcagcaagagctggtctagccactctcaagaggtctccctgtcatgctggatattgaaggctgcagaggctgggcttctcatctcccygctgtttttgtgcttgcctttgtcactgtgctgttccctttacacaccagctctctgtacactcttctgcccgtaacttcccacattctgctgccattattgagtttgtgtccttttcttgccatagawatctagaattcaattttacttctttctgtttgtgaaaaatgatgggacatcactgagatggatattcccctctgggtcagtctcgtcacacagtttcaggagctgcttgaccctcactacttgaggccacttgatccagaacaagctaaaagactgattggaacacttggctcttccctgccatggcacattattttaaaccaccagcaaagaaggctttttgcaaacacattctgcattggagtcactgagacacaggcaacacttctgtctctgtagtggagcaataaaatccagcca

SEQ ID NO: 3226 - DNA, 600 bp, Chicken  19866894090652_3
taggttttgtcttgctattcattatttacctatgacaaaagttctgtcaggtaagttaggatcacctttcacaaatctcacgtatttctatatatgaaattcccatgaaacaatcctgttattaggagatctacccctgctatttgccaagcttccagatgtgttgcaactcaatgaacagcgatcaaaaaagcaaactcattgcataaaaatacgaggataaagttaacatatgtgatactggaaacaaacatcagacttgagcttgacagtgagaaagattttgacaaacatttggargacctgctcttcttccatggaagttgaatttttgagatagcagttctgatcaacccagaaaaaacttagtcatgtccattttaatagccggaatgtaatcctatttccacttacagtaatggacattttgctcgtctgtaaagataaaagggtatgatctctgtgaaaacaaaattaaaaccagtgatatgcaccacttccaggcacgcaacattggttcatggagaaaacttgtccartgcatctgaatttcactgactaatttgatatacatatgtgaaaagaccttgtgcaattacg

SEQ ID NO: 3227 - DNA, 600 bp, Chicken  19866894090652_4
actggaaacaaacatcagacttgagcttgacagtgagaaagattttgacaaacatttggargacctgctcttcttccatggaagttgaatttttgagatagcagttctgatcaacccagaaaaaacttagtcatgtccattttaatagccggaatgtaatcctatttccacttacagtaatggacattttgctcgtctgtaaagataaaagggtatgatctctgtgaaaacaaaattaaaaccagtgatatgcaccacttccaggcacgcaacattggttcatggagaaaacttgtccartgcatctgaatttcactgactaatttgatatacatatgtgaaaagaccttgtgcaattacgaaaggatattaggggtggtcttgtaaagtacaggaacagtaatatatatattttaaaagcagctgtggaggtaaatttcaatattcctaaatatttaaggaaaggtaaaatgccttcggaaatgaagaagtctgaaaatagatgttaagagattacaggcatgagtcgtactmctctgaacagctcagtgtgcaagagatcactgtaatagtgctcatcacaaacacagggttagtaat

SEQ ID NO: 3228 - DNA, 600 bp, Chicken  19866894090652_5
attaaaaccagtgatatgcaccacttccaggcacgcaacattggttcatggagaaaacttgtccartgcatctgaatttcactgactaatttgatatacatatgtgaaaagaccttgtgcaattacgaaaggatattaggggtggtcttgtaaagtacaggaacagtaatatatatattttaaaagcagctgtggaggtaaatttcaatattcctaaatatttaaggaaaggtaaaatgccttcggaaatgaagaagtctgaaaatagatgttaagagattacaggcatgagtcgtactmctctgaacagctcagtgtgcaagagatcactgtaatagtgctcatcacaaacacagggttagtaatttgtaccttagaatttcctatcagcttatctgtgagggaatttgatgactcttgactcctgtcatcagagaggygctagcatacaaggaaagaggatggctatggaaatcaactyacwtttatccaataagtaaattgaatcactaaaacagaacaataatctccaatcgttttagcatttttcaacttaaactgtacagaattcacaacccaggcctcttaaagacaaagtac

SEQ ID NO: 3229 - DNA, 600 bp, Chicken  19866894090652_6
ggtggtcttgtaaagtacaggaacagtaatatatatattttaaaagcagctgtggaggtaaatttcaatattcctaaatatttaaggaaaggtaaaatgccttcggaaatgaagaagtctgaaaatagatgttaagagattacaggcatgagtcgtactmctctgaacagctcagtgtgcaagagatcactgtaatagtgctcatcacaaacacagggttagtaatttgtaccttagaatttcctatcagcttatctgtgagggaatttgatgactcttgactcctgtcatcagagaggygctagcatacaaggaaagaggatggctatggaaatcaactyacwtttatccaataagtaaattgaatcactaaaacagaacaataatctccaatcgttttagcatttttcaacttaaactgtacagaattcacaacccaggcctcttaaagacaaagtactgctgttaaatgaatgattttgaattctcttctgagaattgttttttttttctattgcctctcctcagaaaccttacctgcactagaatgcacacaataaaatatattttgcacatgttgctgatgaattgcatatataa

SEQ ID NO: 3230 - DNA, 600 bp, Chicken  19866894090652_7
aaaagcagctgtggaggtaaatttcaatattcctaaatatttaaggaaaggtaaaatgccttcggaaatgaagaagtctgaaaatagatgttaagagattacaggcatgagtcgtactmctctgaacagctcagtgtgcaagagatcactgtaatagtgctcatcacaaacacagggttagtaatttgtaccttagaatttcctatcagcttatctgtgagggaatttgatgactcttgactcctgtcatcagagaggygctagcatacaaggaaagaggatggctatggaaatcaactyacwtttatccaataagtaaattgaatcactaaaacagaacaataatctccaatcgttttagcatttttcaacttaaactgtacagaattcacaacccaggcctcttaaagacaaagtactgctgttaaatgaatgattttgaattctcttctgagaattgttttttttttctattgcctctcctcagaaaccttacctgcactagaatgcacacaataaaatatattttgcacatgttgctgatgaattgcatatataagtacgtatagaccaggcatataggtagtatgacctcaatga

SEQ ID NO: 3231 - DNA, 600 bp, Chicken  19866894090652_8
agcagctgtggaggtaaatttcaatattcctaaatatttaaggaaaggtaaaatgccttcggaaatgaagaagtctgaaaatagatgttaagagattacaggcatgagtcgtactmctctgaacagctcagtgtgcaagagatcactgtaatagtgctcatcacaaacacagggttagtaatttgtaccttagaatttcctatcagcttatctgtgagggaatttgatgactcttgactcctgtcatcagagaggygctagcatacaaggaaagaggatggctatggaaatcaactyacwtttatccaataagtaaattgaatcactaaaacagaacaataatctccaatcgttttagcatttttcaacttaaactgtacagaattcacaacccaggcctcttaaagacaaagtactgctgttaaatgaatgattttgaattctcttctgagaattgttttttttttctattgcctctcctcagaaaccttacctgcactagaatgcacacaataaaatatattttgcacatgttgctgatgaattgcatatataagtacgtatagaccaggcatataggtagtatgacctcaatgatat

SEQ ID NO: 3232 - DNA, 599 bp, Chicken  19866894090658_1
  misc_feature (1)..(19): n is any nucleotide
nnnnnnnnnnnnnnnnnnntatatattatcgtgtaaatactgctattcaacaggaacctgcaggatttccttacaggcatcctaaagacaggggagagaaccccgtggccaaagacaaatcactttgtgttggtgttggagatgtttttgggaaagttttcaggtattgcaccagcagcccatggagcccatcagcacagcccgttagtgtctcctgagcagtcctcaagccaagtgaataaagtttcacagctaatacatagcgcttttagacttgaaagctacttccaaaatgagggkacagctggcaggtgggcaagacacccaggaggagagccttgttttggggggactggtttcccggaaggaaacttactggtcatgggggtcacactgaagatctagccaggagacagatgtcagaagatgtctgaagtattatcaaacaagagctgtgagctagctgcagtgtggaagcgttctgcttgaggatagacctgctttctgatacatgacacaccacattcgcataaaaaccataatagctttcaagctcgttttaagttcaggaaatgtgaacgtcttcagaacgttgtggt

SEQ ID NO: 3233 - DNA, 600 bp, Chicken  19866894090659_1
gcaccaggaagtgttctgttaaataattatgcccataaaatttcattttccatagtggccacgttatccaaatcagctacatggtccttccttaaaaatctgtcggaacatacttttaccacgaaaacaagccaccccagaacatgaaatagaaattcatccaacctattatcctggaaaggaaaagctgtttgggccaaatccagtgagacaccacgtttgtatcttaattcctggaaacctttggctttcactaggagcaagcagttctgagtcacttctcccagtcccacccttgcratgaattccaagagttggcaggtaagtgtcagtagttgacatgaggttaagaagtagggcagttgggagcagcatgacaattacctgaggtatgacaaggtctcccaccttcacccacctgcaaccccaatgctttccaacacaaagagcagctcccagrgcagcaaatctcacagccagggcctgaccatgggtcttcattggtactaacccatctctgcacatgacagctcctgccactgtgaattgcagtcctgtctctttacgggctccgtgggttacagggggtggtgggtaacc

SEQ ID NO: 3234 - DNA, 600 bp, Chicken  19866894090659_2
ccaacctattatcctggaaaggaaaagctgtttgggccaaatccagtgagacaccacgtttgtatcttaattcctggaaacctttggctttcactaggagcaagcagttctgagtcacttctcccagtcccacccttgcratgaattccaagagttggcaggtaagtgtcagtagttgacatgaggttaagaagtagggcagttgggagcagcatgacaattacctgaggtatgacaaggtctcccaccttcacccacctgcaaccccaatgctttccaacacaaagagcagctcccagrgcagcaaatctcacagccagggcctgaccatgggtcttcattggtactaacccatctctgcacatgacagctcctgccactgtgaattgcagtcctgtctctttacgggctccgtgggttacagggggtggtgggtaaccatggaaaccatgttgtaaaacagcatgggagttgacgtgtaataaagcactacacctgaacacagcccttcaggaggggtaattgtggatgcacttgtaacaggtgggagcagggctgtcttgtgcagaaagtcatcctgtctggagagcagggcttggc

SEQ ID NO: 3235 - DNA, 600 bp, Chicken  19866894090665_1
caaaagcttccaaattagaggtatgtttgaactctgtacctgaactcacacgaaggtatttgaccacttctgcttgcatcagctctacccacagcaggaatggaaacaaggataaccattcctgccctccctctgtaattgaaatccacaaatgccaccacatcgctgtatgccatcgctgctgcagacgcagcgtaacggtgacagagggaacgtcctgcaggtccgcactctgcaggttgggccctctccaggccagagcagctctgccttaagcaaaggagcaaggacacgacacaygggccctaagggacatccagccacctgcactgagccacacacaggcttatttctcacttttcactttcttaacawttcatttgataaactcaactccagctaaacrtgcctgaacaaaaagtacgtgcgaactaactgttggtatcagctttcttccttctaattgctttggctacacgttactgcagcattaacacaatgtcacagcactgctgtgtttccagctatggcaaaaaaaaactggcttatcagaaaaaccaccagggcagaattagtaggaagggtagagcaccgagaatg

SEQ ID NO: 3236 - DNA, 600 bp, Chicken  19866894090665_2
gcatcagctctacccacagcaggaatggaaacaaggataaccattcctgccctccctctgtaattgaaatccacaaatgccaccacatcgctgtatgccatcgctgctgcagacgcagcgtaacggtgacagagggaacgtcctgcaggtccgcactctgcaggttgggccctctccaggccagagcagctctgccttaagcaaaggagcaaggacacgacacaygggccctaagggacatccagccacctgcactgagccacacacaggcttatttctcacttttcactttcttaacawttcatttgataaactcaactccagctaaacrtgcctgaacaaaaagtacgtgcgaactaactgttggtatcagctttcttccttctaattgctttggctacacgttactgcagcattaacacaatgtcacagcactgctgtgtttccagctatggcaaaaaaaaactggcttatcagaaaaaccaccagggcagaattagtaggaagggtagagcaccgagaatgcattagcctcattttcctacctcgctttccccggtgacatttacagaagaatgcttaacataaagactgtttatc

SEQ ID NO: 3237 - DNA, 600 bp, Chicken  19866894090665_3
caaggataaccattcctgccctccctctgtaattgaaatccacaaatgccaccacatcgctgtatgccatcgctgctgcagacgcagcgtaacggtgacagagggaacgtcctgcaggtccgcactctgcaggttgggccctctccaggccagagcagctctgccttaagcaaaggagcaaggacacgacacaygggccctaagggacatccagccacctgcactgagccacacacaggcttatttctcacttttcactttcttaacawttcatttgataaactcaactccagctaaacrtgcctgaacaaaaagtacgtgcgaactaactgttggtatcagctttcttccttctaattgctttggctacacgttactgcagcattaacacaatgtcacagcactgctgtgtttccagctatggcaaaaaaaaactggcttatcagaaaaaccaccagggcagaattagtaggaagggtagagcaccgagaatgcattagcctcattttcctacctcgctttccccggtgacatttacagaagaatgcttaacataaagactgtttatcaattgcttcctcagagataaacaggttaaat

SEQ ID NO: 3238 - DNA, 600 bp, Chicken  19866894090666_1
gaagagggaagatttaggttggatatcagggggaatttctttactatgagagtgttgaggtgcttttagcctctgcagagaggttgtggatgccctgtccatccctggaggtgttcaaggttaggctggatggggcactgcacagcctggtctagtattagatacaggtgttggcagccctgcgagtggcaagggggttggagcttgatgatccttgagttctcttccaccccaaaccattctatgacagagtgaagaaaaggccaactgcctcatcagcatcagggtaaaccagctagraagaagtaaaaatggggtgaggagctgctggagccaatcttgaagcaagagaaaaccctgcaagagtaggggaggggacagaaatttgccccgaagagttgcagaagtttgggacttggggtatgtagaaacagcaccagagctgggtctaccctaaggtgggtgggtgtttactgcactgggagggatcatagaatggcctgggttgaaaatgaccacaatgatcatctagtttcaacccccctgctatgtgcagggtcgccaaccactagaccaggctgccctgagtcacatccagcc

SEQ ID NO: 3239 - DNA, 580 bp, Chicken  19866894090674_1
ctctctgttcctgtattactgatgtctctaaggcaccatgtgatctgtttacttaaaagtggatcttgggtgatttcttctcagataaactatgttaagccacactgctacatcgatattggtgtcactgttaatgattgttaacaagcattaaatagtgctgtgtattcaaggccattaacttgtgccacctttgcgttttgtaagtgatgacttagcagacctctttaaaaatctttcttctctcacagatattctttgttcacacatacaagcactgtattagatatggtctctacrctgtcttgtacctctcttcttctcttgttcaatactactactgacaagaattctttttttcttgggtgctgggggtggaggaacattgttttctaatttttttttcttcacttggcatggtatatttcctctgcagagtattttgaatttatcttcctgaagtcttcatttcttggaacaacttgcagtcatatagttgtaagacataaactgattctgtgctcagtgaaatctgatggaacaggattcatggatgtgaactggggtgtaagtgtggaaa

SEQ ID NO: 3240 - DNA, 600 bp, Chicken  19866894090676_1
tcctacaatgtcattgcaatgatggtgttttgttttgttttgttttgttttgtttttttccaatattctttcttttttctctttttttttccccctccttataggaacccaacagccctcttatctttttgactactgatatactttggaaagccacataccagttgccagtgccactaatatctctttcctaagtgacaccaaagcccaggcctgtccgtatgcattatgctgtgcctgtcagcgctgagcctcatctatcatttttgcacctctcacaatgtatcagagatccctttkcgattcttcagcttacttttaatttcactatcctgaggaattacattacatcatcaccatgccatctccttcacacgtcttctgggtgctctcagcagcaccgctccccatgacgtactgcacacctgccaactcactgcttcctcattgttaacaaattatcaaaccaaaagctaactcccttctcatcccatcaaggctcgatttctttaaggatctttagcgcgtacctttgcaaaaacttgtgaaaattcacaagcatgatattaaatacaggatgctaaactacaagttcggtga

SEQ ID NO: 3241 - DNA, 600 bp, Chicken  19866894090677_1
actgagcagatcatgaatagtacttgttctcatttcagggttaacttttaagcaatctacaagctattatacagaaaaagaattatgaatcttttcagagcccctgctaaaggagaacaataacaatacaattagggaaacttagcaaggaagcatttccaaaatcaaagttcacaacagataaagaatcttctgtgctatgttatcattatgcacattaggtaatattaaagactgtgaactaaaacacaaagaagtaatgaagttaccaaattaaatccgtgtctatttatatctttscatttttaaactggaaatgtattaacttcatgagaagtaacgactaacctttatttttcctgcataatcccagtgtctttaatttataaagacaacgatgcacattctgtatgctgctattcaacatgtggctacatgctttattcattacatttaaggacagatttctagaaatatmgtgcacatcgctggagtatgtaacaaaaaaaatactacatgaaaaacatcttggaaaaagagacaaagcagaaggcaacaatgaatagtaaggctgctgatagtaccatagcaagaaattat

SEQ ID NO: 3242 - DNA, 600 bp, Chicken  19866894090677_2
agataaagaatcttctgtgctatgttatcattatgcacattaggtaatattaaagactgtgaactaaaacacaaagaagtaatgaagttaccaaattaaatccgtgtctatttatatctttscatttttaaactggaaatgtattaacttcatgagaagtaacgactaacctttatttttcctgcataatcccagtgtctttaatttataaagacaacgatgcacattctgtatgctgctattcaacatgtggctacatgctttattcattacatttaaggacagatttctagaaatatmgtgcacatcgctggagtatgtaacaaaaaaaatactacatgaaaaacatcttggaaaaagagacaaagcagaaggcaacaatgaatagtaaggctgctgatagtaccatagcaagaaattataagcttcacaaccaaacctctctttcaagtgcttagcctaggctggaaagcctacctagtatagaaaaccaggagtacaaagcagcatccagccttttcccacactgggctgctggtcctaaagctaacccaaagcactggcaatctaacccctgggaccacaacatcctcagagact

SEQ ID NO: 3243 - DNA, 600 bp, Chicken  19866894090678_1
cagcctggtctggtggttggcaaccctgcacacagcaggggggttgaaacttgatgatcatcttttcaactctggccattctatgattctatgattacgattaaaacccaatcacataaccaaatttagggcatctgatcatacctgttctctttgttgcggtaatcactgaaatcacttccaaatcttgcagcatctcctgccttagactccactttcttagatatagaagagtctactttatggttatactttgacagaatctacaacaaacattaaaaaaggaatagaaagaacttyagaactccaaacaggattacaatctacgcattttagtaagcagcagagaactctatctttttgaggaacaacacttgctatacaacccccttttaatgttacytttctgatacgaaaactattcataaaacaaacagagctaacctgtagtacatcatctggtatccttgttatttctggaggtgggaggagtgctgagtaaatggtcgtactgttttattttgggaggagatgggttccccaaacgtttgagatactcatcagagctcacagcagaaggaatactgtcttctatggttt

SEQ ID NO: 3244 - DNA, 600 bp, Chicken  19866894090678_2
aaacccaatcacataaccaaatttagggcatctgatcatacctgttctctttgttgcggtaatcactgaaatcacttccaaatcttgcagcatctcctgccttagactccactttcttagatatagaagagtctactttatggttatactttgacagaatctacaacaaacattaaaaaaggaatagaaagaacttyagaactccaaacaggattacaatctacgcattttagtaagcagcagagaactctatctttttgaggaacaacacttgctatacaacccccttttaatgttacytttctgatacgaaaactattcataaaacaaacagagctaacctgtagtacatcatctggtatccttgttatttctggaggtgggaggagtgctgagtaaatggtcgtactgttttattttgggaggagatgggttccccaaacgtttgagatactcatcagagctcacagcagaaggaatactgtcttctatggttttgtttctctgctgcattgcttttggtcaccaacgtgatcttctcttgcatttcctgttatagagaagctattatatgccttcagctcatttattttttttagg

SEQ ID NO: 3245 - DNA, 600 bp, Chicken  19866894090690_1
gaagaggtaactgtaagtgaataaacacagaaaatcttgaatatacagctctagtggcttacacacacactggcatagtgctgctttttatattgctaaaggtatgaaaatagtgtttttgtatcattatgcatttcaatcactttttagaattgaatgcagaaatggatgtattatgtgtgttggtttcttctgggtctgatatactgtactttctgcacgccgctgctttggtgtagttttctgtctggatgtagtcaagttgctccttgaagatgcaagagctaggaacttgttggyacagctgaatgaaatgctgccagagacacagaagagtcctcagagatcaccaccattaaagctggggagctgctttatctgatgaaaacgttcttagagttgattcagagataagctgtaagctgtgatgtttctctttcatcgcgagtattcagcacatccccatggatcgtgcacttgaaaatgaacttgcaggtcacagtccatcatttgacagagcgaygacaggacatttgtgggctctgtccttgggagctaagaaatcctgaacrttcaaagaacgagaatgagaaaacagaa

SEQ ID NO: 3246 - DNA, 600 bp, Chicken  19866894090690_2
cgctgctttggtgtagttttctgtctggatgtagtcaagttgctccttgaagatgcaagagctaggaacttgttggyacagctgaatgaaatgctgccagagacacagaagagtcctcagagatcaccaccattaaagctggggagctgctttatctgatgaaaacgttcttagagttgattcagagataagctgtaagctgtgatgtttctctttcatcgcgagtattcagcacatccccatggatcgtgcacttgaaaatgaacttgcaggtcacagtccatcatttgacagagcgaygacaggacatttgtgggctctgtccttgggagctaagaaatcctgaacrttcaaagaacgagaatgagaaaacagaacatctgatactcattcttggtctcgtaagactggtacgatcttggctttagaggcactggcagctggctggaggcattaaaaatgcttaaggcaagtgcacgcttctgcttattgaacagtttgttggactgagctcagccttgctgactggcacctcttggcaccagatcttccttccaggatttccttctagtactactactacagggcaaggatttgcta

SEQ ID NO: 3247 - DNA, 600 bp, Chicken  19866894090690_3
aagatgcaagagctaggaacttgttggyacagctgaatgaaatgctgccagagacacagaagagtcctcagagatcaccaccattaaagctggggagctgctttatctgatgaaaacgttcttagagttgattcagagataagctgtaagctgtgatgtttctctttcatcgcgagtattcagcacatccccatggatcgtgcacttgaaaatgaacttgcaggtcacagtccatcatttgacagagcgaygacaggacatttgtgggctctgtccttgggagctaagaaatcctgaacrttcaaagaacgagaatgagaaaacagaacatctgatactcattcttggtctcgtaagactggtacgatcttggctttagaggcactggcagctggctggaggcattaaaaatgcttaaggcaagtgcacgcttctgcttattgaacagtttgttggactgagctcagccttgctgactggcacctcttggcaccagatcttccttccaggatttccttctagtactactactacagggcaaggatttgctaatgagtaatgaatcaaccaaatatggccagcaggtaattttgccactct

SEQ ID NO: 3248 - DNA, 600 bp, Chicken  19866894090695_1
agaacagccatcaagcagagtgcccaaatgctctctgaagtggtgctcatttcctcccatatgtaggagtgtaaatctgaaagcactggttccaatcctggtaggaaactttccacaaggtaatcattgcaacataatgatgctaaaaactaagtaagaatttagagctaataacacaaaaatatgagtgagggagtgctgtacttcagcgagtgctactgttttgatttggctccaaatatctacaaaagatctgataccaagaactgaagaaacagagtgttcttgggaagaatcaaygtagggtgttcctgataacttccagctggtagcaacagcacaagcacaacacatgacattgctgtgacacaggctgagccgcagccctgacgtttcccaaatcaaaaccacacacatttcatcagttattccacaaccttgtaacttaagaatctgtctatgacaacattcccagctgtgctgccaaaaggaagaccaaatcccgggaatgagcaaatgggtgggagtacaagaaattccctcatatcaaggtctggaaatgaggaatcaaaggcagcaagtaacgcaaaatcgagcctg

SEQ ID NO: 3249 - DNA, 600 bp, Chicken  19866894090695_2
aaattccctcatatcaaggtctggaaatgaggaatcaaaggcagcaagtaacgcaaaatcgagcctggagaagaggagatccagctcaaactgaagttcatcgtgatacagctgaaaagaaagggaatgaagcaacagtcagaagattggcccagaattgttttgatctatgtctgaaaatgtctctagaagcttctccaggctcaatctgtttattttttgcctttaactcctgggagtctcacagacctcgtgttggctcaagcacggaaccacagaagaatcacacagaaatctgasawataggcagtcactgtgattgcatcagcaaaaaaaatacctttgctggaactaaatttaaggcaacataataatgtagaagaggatttactctataatttctgctttgggtttttgaaacaaaccactggtttggaacaattgctgccaaattgcctgcatctgcacagacagctattgcaagaatctctttcaggatggaaagctatttgccacaaaccgtttacatctccactgtactatgactgtatagcttgaaagctmtcccacaagctttgtgcctatacataacaggactta

SEQ ID NO: 3250 - DNA, 600 bp, Chicken  19866894090695_3
attccctcatatcaaggtctggaaatgaggaatcaaaggcagcaagtaacgcaaaatcgagcctggagaagaggagatccagctcaaactgaagttcatcgtgatacagctgaaaagaaagggaatgaagcaacagtcagaagattggcccagaattgttttgatctatgtctgaaaatgtctctagaagcttctccaggctcaatctgtttattttttgcctttaactcctgggagtctcacagacctcgtgttggctcaagcacggaaccacagaagaatcacacagaaatctgasawataggcagtcactgtgattgcatcagcaaaaaaaatacctttgctggaactaaatttaaggcaacataataatgtagaagaggatttactctataatttctgctttgggtttttgaaacaaaccactggtttggaacaattgctgccaaattgcctgcatctgcacagacagctattgcaagaatctctttcaggatggaaagctatttgccacaaaccgtttacatctccactgtactatgactgtatagcttgaaagctmtcccacaagctttgtgcctatacataacaggacttact

SEQ ID NO: 3251 - DNA, 600 bp, Chicken  19866894090695_4
gcacggaaccacagaagaatcacacagaaatctgasawataggcagtcactgtgattgcatcagcaaaaaaaatacctttgctggaactaaatttaaggcaacataataatgtagaagaggatttactctataatttctgctttgggtttttgaaacaaaccactggtttggaacaattgctgccaaattgcctgcatctgcacagacagctattgcaagaatctctttcaggatggaaagctatttgccacaaaccgtttacatctccactgtactatgactgtatagcttgaaagctmtcccacaagctttgtgcctatacataacaggacttactcatttatacagmccttagcctgagagcttcataaatattgatgactcctcaggtttaagtgagmatgtatcattgcttgttttcaaccgtgaactacagctcacaaggctgcacagcctaattcctgccatctgcctttccctctcctggattcaagaaaaaaaaacttgagattcaagaagaaacaagacatagcagcccaaggaacgacactaaaacatcttcccaaggacaggtgcattagggggaggagtcatgatgg

SEQ ID NO: 3252 - DNA, 600 bp, Chicken  19866894090695_5
tgtgattgcatcagcaaaaaaaatacctttgctggaactaaatttaaggcaacataataatgtagaagaggatttactctataatttctgctttgggtttttgaaacaaaccactggtttggaacaattgctgccaaattgcctgcatctgcacagacagctattgcaagaatctctttcaggatggaaagctatttgccacaaaccgtttacatctccactgtactatgactgtatagcttgaaagctmtcccacaagctttgtgcctatacataacaggacttactcatttatacagmccttagcctgagagcttcataaatattgatgactcctcaggtttaagtgagmatgtatcattgcttgttttcaaccgtgaactacagctcacaaggctgcacagcctaattcctgccatctgcctttccctctcctggattcaagaaaaaaaaacttgagattcaagaagaaacaagacatagcagcccaaggaacgacactaaaacatcttcccaaggacaggtgcattagggggaggagtcatgatggaggtcccagacatacagctaacttggaaagcccatatggaaaaagtacag

SEQ ID NO: 3253 - DNA, 600 bp, Chicken  19866894090695_6
cataataatgtagaagaggatttactctataatttctgctttgggtttttgaaacaaaccactggtttggaacaattgctgccaaattgcctgcatctgcacagacagctattgcaagaatctctttcaggatggaaagctatttgccacaaaccgtttacatctccactgtactatgactgtatagcttgaaagctmtcccacaagctttgtgcctatacataacaggacttactcatttatacagmccttagcctgagagcttcataaatattgatgactcctcaggtttaagtgagmatgtatcattgcttgttttcaaccgtgaactacagctcacaaggctgcacagcctaattcctgccatctgcctttccctctcctggattcaagaaaaaaaaacttgagattcaagaagaaacaagacatagcagcccaaggaacgacactaaaacatcttcccaaggacaggtgcattagggggaggagtcatgatggaggtcccagacatacagctaacttggaaagcccatatggaaaaagtacagccagtagcattgttatggcagatgtgactcccacactgtttttttttttttt

SEQ ID NO: 3254 - DNA, 599 bp, Chicken  19866894090699_1
  misc_feature (1)..(192): n is any nucleotide
nnnnnnnnnnnnnnnnnnnnnnnnnnnnnnnnnnnnnnnnnnnnnnnnnnnnnnnnnnnnnnnnnnnnnnnnnnnnnnnnnnnnnnnnnnnnnnnnnnnnnnnnnnnnnnnnnnnnnnnnnnnnnnnnnnnnnnnnnnnnnnnnnnnnnnnnnnnnnnnnnnnnnnnnnnnnnnnnnnnnnnnnnnnnnnnnggtcccggagcagctggtcaggagcattacctggcagaccctccaagctgtgaacttttgtcacaaacacaacgtaagtcccctgagcagcactaacaagagctgtgmtgtgcctttgggtgagacacagattctgatgctgttttcctgatcacagagttttcttgagaagaagtcagatgacatctcccattttcagcagaaaacacccatctgaaatagtagtgtgtaccctcagcagtgagagggggtagaacagctttacaacccctcctctgctttctggaggctgagacacagggacttgctcagacgtctgtcctgcctccaggatttgtctttttcatgctccctttctcagcttgaaagatttaatggagttttaaagctggggaaacaattagata

SEQ ID NO: 3255 - DNA, 564 bp, Chicken  19866894090699_2
atgacatctcccattttcagcagaaaacacccatctgaaatagtagtgtgtaccctcagcagtgagagggggtagaacagctttacaacccctcctctgctttctggaggctgagacacagggacttgctcagacgtctgtcctgcctccaggatttgtctttttcatgctccctttctcagcttgaaagatttaatggagttttaaagctggggaaacaattagatagcacagtctgacctgctgtagagcacaggtaatgaggttttatgtagtcacccttctctggagctttgtgaygctgggttagcaaacagcacttcagtcctcaggmgaagaaactaacagcagctaaattaagcagttctttgtccaagggccaggttaaatagaatcatagaatcctagaatggccctgggttgaaaaggcccacagtgctcattgagttccaaccccctgctatgtgcagggtcgccaaccagcagcccaggctgcccagagccacatccagcctggcccttgaatgcctgcaggggatggggcatccacagcctccttgggca

SEQ ID NO: 3256 - DNA, 530 bp, Chicken  19866894090699_3
ctgaaatagtagtgtgtaccctcagcagtgagagggggtagaacagctttacaacccctcctctgctttctggaggctgagacacagggacttgctcagacgtctgtcctgcctccaggatttgtctttttcatgctccctttctcagcttgaaagatttaatggagttttaaagctggggaaacaattagatagcacagtctgacctgctgtagagcacaggtaatgaggttttatgtagtcacccttctctggagctttgtgaygctgggttagcaaacagcacttcagtcctcaggmgaagaaactaacagcagctaaattaagcagttctttgtccaagggccaggttaaatagaatcatagaatcctagaatggccctgggttgaaaaggcccacagtgctcattgagttccaaccccctgctatgtgcagggtcgccaaccagcagcccaggctgcccagagccacatccagcctggcccttgaatgcctgcaggggatggggcatccacagcctccttgggca

SEQ ID NO: 3257 - DNA, 600 bp, Chicken  19866894090702_1
tccgagaggcagtctgagtgagtttgtttataacaggatgctggacaggatttttgacacccagttcaattggcaggttttgtacagacctctgccagactgttaaattaaccctacacaagctaatccttaaatttatgatcatagtttgcatttcagtgatgttttggggcatagtccaggataaatatataagcagcaacaggaaagagtggacatgtaggactgcctcctacatatttcaactggtattttcttaagttccttagcagggttcacacaaaatcaatgtatttggtwgttcagtcacatgaagccaaatattttatgccctttatcttacatttaaacattcttagaatcycctaaaataaagctcagcttgaccattgtaaagcaacactgaatatttargaaacactgctgaccaaaatctttccagtcaatatcatgaacctaatacaataaaaatttttattcaagatatgtgagcagtgaattgattattttgtctagaaagaaaggatgaaaaactaaagctttcagttaaacatattatcatgctcacaacaatgctcagttttggaggatgtcaaaaat

SEQ ID NO: 3258 - DNA, 570 bp, Chicken  19866894090702_2
ttcaattggcaggttttgtacagacctctgccagactgttaaattaaccctacacaagctaatccttaaatttatgatcatagtttgcatttcagtgatgttttggggcatagtccaggataaatatataagcagcaacaggaaagagtggacatgtaggactgcctcctacatatttcaactggtattttcttaagttccttagcagggttcacacaaaatcaatgtatttggtwgttcagtcacatgaagccaaatattttatgccctttatcttacatttaaacattcttagaatcycctaaaataaagctcagcttgaccattgtaaagcaacactgaatatttargaaacactgctgaccaaaatctttccagtcaatatcatgaacctaatacaataaaaatttttattcaagatatgtgagcagtgaattgattattttgtctagaaagaaaggatgaaaaactaaagctttcagttaaacatattatcatgctcacaacaatgctcagttttggaggatgtcaaaaatcctgtgatctctgctgcaacaaaaacctactaag

SEQ ID NO: 3259 - DNA, 520 bp, Chicken  19866894090702_3
tacacaagctaatccttaaatttatgatcatagtttgcatttcagtgatgttttggggcatagtccaggataaatatataagcagcaacaggaaagagtggacatgtaggactgcctcctacatatttcaactggtattttcttaagttccttagcagggttcacacaaaatcaatgtatttggtwgttcagtcacatgaagccaaatattttatgccctttatcttacatttaaacattcttagaatcycctaaaataaagctcagcttgaccattgtaaagcaacactgaatatttargaaacactgctgaccaaaatctttccagtcaatatcatgaacctaatacaataaaaatttttattcaagatatgtgagcagtgaattgattattttgtctagaaagaaaggatgaaaaactaaagctttcagttaaacatattatcatgctcacaacaatgctcagttttggaggatgtcaaaaatcctgtgatctctgctgcaacaaaaacctactaag

SEQ ID NO: 3260 - DNA, 599 bp, Chicken  19866894090705_1
  misc_feature (1)..(145): n is any nucleotide
nnnnnnnnnnnnnnnnnnnnnnnnnnnnnnnnnnnnnnnnnnnnnnnnnnnnnnnnnnnnnnnnnnnnnnnnnnnnnnnnnnnnnnnnnnnnnnnnnnnnnnnnnnnnnnnnnnnnnnnnnnnnnnnnnnnnnnnnnnnnnnnnnaaaacctgaaaagatccctggaaacattcaatttaatttattcacgagcttttctcagagtgtttttataagcaattagaagttgcttatgaaaggaatcacagattcctgaaaatgcctttttcatggaggtagacagaccaacaggtttatayggcacacgcagccttccacccatatacygctggctggaattaagctcaagcctggtttagaagtcactaacagactgggtccctaggaagttacttgtctgaaataacatgctgatgctgacagtgcaygatggagtggacagatgtctaaaaagctctgcagtactaccactggcactgcccagctcttcctggctcctgtaccacagacacctggcactaagcaggttatgggtccagccagcactgaagcatactcaggaccttgctttctgtctcctgacgcaaatgaaaatgca

SEQ ID NO: 3261 - DNA, 599 bp, Chicken  19866894090705_2
  misc_feature (1)..(117): n is any nucleotide
nnnnnnnnnnnnnnnnnnnnnnnnnnnnnnnnnnnnnnnnnnnnnnnnnnnnnnnnnnnnnnnnnnnnnnnnnnnnnnnnnnnnnnnnnnnnnnnnnnnnnnnnnnnnnnnnnnnnnaaaacctgaaaagatccctggaaacattcaatttaatttattcacgagcttttctcagagtgtttttataagcaattagaagttgcttatgaaaggaatcacagattcctgaaaatgcctttttcatggaggtagacagaccaacaggtttatayggcacacgcagccttccacccatatacygctggctggaattaagctcaagcctggtttagaagtcactaacagactgggtccctaggaagttacttgtctgaaataacatgctgatgctgacagtgcaygatggagtggacagatgtctaaaaagctctgcagtactaccactggcactgcccagctcttcctggctcctgtaccacagacacctggcactaagcaggttatgggtccagccagcactgaagcatactcaggaccttgctttctgtctcctgacgcaaatgaaaatgcagggcagcaaggtccaatgcagcaaagat

SEQ ID NO: 3262 - DNA, 599 bp, Chicken  19866894090705_3
  misc_feature (1)..(16): n is any nucleotide
nnnnnnnnnnnnnnnnaaaacctgaaaagatccctggaaacattcaatttaatttattcacgagcttttctcagagtgtttttataagcaattagaagttgcttatgaaaggaatcacagattcctgaaaatgcctttttcatggaggtagacagaccaacaggtttatayggcacacgcagccttccacccatatacygctggctggaattaagctcaagcctggtttagaagtcactaacagactgggtccctaggaagttacttgtctgaaataacatgctgatgctgacagtgcaygatggagtggacagatgtctaaaaagctctgcagtactaccactggcactgcccagctcttcctggctcctgtaccacagacacctggcactaagcaggttatgggtccagccagcactgaagcatactcaggaccttgctttctgtctcctgacgcaaatgaaaatgcagggcagcaaggtccaatgcagcaaagattaaattaatgaacttgcatttaattcacactgcaaatgctacgcaaccatccgttctgtaacatattttaaaaggtcgaggattaacagacatcctttcaa

SEQ ID NO: 3263 - DNA, 600 bp, Chicken  19866894090708_1
ggactcaagtccttcagggaaaaagaaatacctgtcataaaataactgcatagagacaacaggagtgtttaggttcaagcattactatttatgcatattgtttccccagtgctaaacaaaacaagttttcccatgccaaaacgagggacaccgccagagctgccagacaccccgtctgggtgggacaaatagcctgacctacagaaggggcagcaggatgcagagacattttatcgcagtctcactttgctaatgcactcacaccgggccactctcaggctccagaaaatgaaccacagyccaaaaacatcacatcaaagtggcctgcaagaccagacatggagggaacggggaagtaagggagtgccaggctgcaaagcagacatgcgctcgctttagtgaccgaggrgctgcaaatcacatcagcctgccttctgagagcactggtcatggcaagtgagcagaaaacacagaaggatgtttttgttaatcaccctctcctcaaacacccattctttaccttaagccatcagtcatgtaccacagcaggtaacaaaaggcagtgagatttatagggcatttcctgagctgagggtcctg

SEQ ID NO: 3264 - DNA, 520 bp, Chicken  19866894090708_2
tgctaaacaaaacaagttttcccatgccaaaacgagggacaccgccagagctgccagacaccccgtctgggtgggacaaatagcctgacctacagaaggggcagcaggatgcagagacattttatcgcagtctcactttgctaatgcactcacaccgggccactctcaggctccagaaaatgaaccacagyccaaaaacatcacatcaaagtggcctgcaagaccagacatggagggaacggggaagtaagggagtgccaggctgcaaagcagacatgcgctcgctttagtgaccgaggrgctgcaaatcacatcagcctgccttctgagagcactggtcatggcaagtgagcagaaaacacagaaggatgtttttgttaatcaccctctcctcaaacacccattctttaccttaagccatcagtcatgtaccacagcaggtaacaaaaggcagtgagatttatagggcatttcctgagctgagggtcctgcagcagagcctgcaagcgggacagcacca

SEQ ID NO: 3265 - DNA, 517 bp, Chicken  19866894090720_1
cagctaatggaaacatgcatgaatgtatgattataaacattaaaaaatgtaccatttcttcctaatagaactgcagcatatacagacatctgagcagggagtctgtattttctgatgttggaggaatggaaaaaggagacagggaagtttttttatcccactgctctcctttatcgctgggctaagagcagtggatgctccaaaaccagagcacccttggctttgccctgtgttgcaggcagagctctatcagagatgcacacacagccccagtgccgtagtattgcctgggtctgtgtyccccttaagcccactgctcagcagtacacctatctyggacctctgtrttacagtcacacttgtacrctgttccctttataagggagcaatgtatgtctgaaaacacgtycagcactcacaaccatcttacctggctgtgagaaaagtcagttgaacttgacagaccttctgctttcctagatagctcttctgaagtgtggtccaagttgcactcaga

SEQ ID NO: 3266 - DNA, 481 bp, Chicken  19866894090720_2
acattaaaaaatgtaccatttcttcctaatagaactgcagcatatacagacatctgagcagggagtctgtattttctgatgttggaggaatggaaaaaggagacagggaagtttttttatcccactgctctcctttatcgctgggctaagagcagtggatgctccaaaaccagagcacccttggctttgccctgtgttgcaggcagagctctatcagagatgcacacacagccccagtgccgtagtattgcctgggtctgtgtyccccttaagcccactgctcagcagtacacctatctyggacctctgtrttacagtcacacttgtacrctgttccctttataagggagcaatgtatgtctgaaaacacgtycagcactcacaaccatcttacctggctgtgagaaaagtcagttgaacttgacagaccttctgctttcctagatagctcttctgaagtgtggtccaagttgcactcaga

SEQ ID NO: 3267 - DNA, 470 bp, Chicken  19866894090720_3
tgtaccatttcttcctaatagaactgcagcatatacagacatctgagcagggagtctgtattttctgatgttggaggaatggaaaaaggagacagggaagtttttttatcccactgctctcctttatcgctgggctaagagcagtggatgctccaaaaccagagcacccttggctttgccctgtgttgcaggcagagctctatcagagatgcacacacagccccagtgccgtagtattgcctgggtctgtgtyccccttaagcccactgctcagcagtacacctatctyggacctctgtrttacagtcacacttgtacrctgttccctttataagggagcaatgtatgtctgaaaacacgtycagcactcacaaccatcttacctggctgtgagaaaagtcagttgaacttgacagaccttctgctttcctagatagctcttctgaagtgtggtccaagttgcactcaga

SEQ ID NO: 3268 - DNA, 451 bp, Chicken  19866894090720_4
agaactgcagcatatacagacatctgagcagggagtctgtattttctgatgttggaggaatggaaaaaggagacagggaagtttttttatcccactgctctcctttatcgctgggctaagagcagtggatgctccaaaaccagagcacccttggctttgccctgtgttgcaggcagagctctatcagagatgcacacacagccccagtgccgtagtattgcctgggtctgtgtyccccttaagcccactgctcagcagtacacctatctyggacctctgtrttacagtcacacttgtacrctgttccctttataagggagcaatgtatgtctgaaaacacgtycagcactcacaaccatcttacctggctgtgagaaaagtcagttgaacttgacagaccttctgctttcctagatagctcttctgaagtgtggtccaagttgcactcaga

SEQ ID NO: 3269 - DNA, 408 bp, Chicken  19866894090720_5
ttctgatgttggaggaatggaaaaaggagacagggaagtttttttatcccactgctctcctttatcgctgggctaagagcagtggatgctccaaaaccagagcacccttggctttgccctgtgttgcaggcagagctctatcagagatgcacacacagccccagtgccgtagtattgcctgggtctgtgtyccccttaagcccactgctcagcagtacacctatctyggacctctgtrttacagtcacacttgtacrctgttccctttataagggagcaatgtatgtctgaaaacacgtycagcactcacaaccatcttacctggctgtgagaaaagtcagttgaacttgacagaccttctgctttcctagatagctcttctgaagtgtggtccaagttgcactcaga

SEQ ID NO: 3270 - DNA, 600 bp, Chicken  19866894090728_1
acaaatcattgcccatttgagagaaaggacggaacggcagcgcagcatgagtggggtctcccggggacggcaccgccagtcgctcccagcaggatccgatcgtggcctttctgttttactggttcgccagaactcaaaacaaaacaaagcagggacaaagggcgggagggagtaaatgtacaatcctcccattcagatgaaagaaagggaaagtaaaacagtaaatattgcatttaagggaggacgctctgacccgcatagagaagccacgcggtttaaccctctgcatgctggagctcrgccataacgcggggcagcgctgtgctccactctgggatgtgggtgaaggaaacatgtgcccttgagcacctataaatcacctggggatcccagagagggctgcagtttggaaagatgttggagggaaaggtgcatgcaytgggaaggcactgctcccaagaggtgcagttctctgctctgtgacccattcacccctacctctgtgtgttggatcccacctgcagaactgatgcacctccctcctttgtgagagcactgygaggaaaatgcgtttcagagagaagtgatggtgctkgtttc

SEQ ID NO: 3271 - DNA, 600 bp, Chicken  19866894090728_2
caaaacaaagcagggacaaagggcgggagggagtaaatgtacaatcctcccattcagatgaaagaaagggaaagtaaaacagtaaatattgcatttaagggaggacgctctgacccgcatagagaagccacgcggtttaaccctctgcatgctggagctcrgccataacgcggggcagcgctgtgctccactctgggatgtgggtgaaggaaacatgtgcccttgagcacctataaatcacctggggatcccagagagggctgcagtttggaaagatgttggagggaaaggtgcatgcaytgggaaggcactgctcccaagaggtgcagttctctgctctgtgacccattcacccctacctctgtgtgttggatcccacctgcagaactgatgcacctccctcctttgtgagagcactgygaggaaaatgcgtttcagagagaagtgatggtgctkgtttcctttgacaagttatttcagagtaacattggctattggggtaatatgctgcctccaaggragaggtaccccacgggactrctgttgactgcccttctcagaggggtgtgatggggacgtggccatgacattgccatgcaa

SEQ ID NO: 3272 - DNA, 600 bp, Chicken  19866894090728_3
agagaagccacgcggtttaaccctctgcatgctggagctcrgccataacgcggggcagcgctgtgctccactctgggatgtgggtgaaggaaacatgtgcccttgagcacctataaatcacctggggatcccagagagggctgcagtttggaaagatgttggagggaaaggtgcatgcaytgggaaggcactgctcccaagaggtgcagttctctgctctgtgacccattcacccctacctctgtgtgttggatcccacctgcagaactgatgcacctccctcctttgtgagagcactgygaggaaaatgcgtttcagagagaagtgatggtgctkgtttcctttgacaagttatttcagagtaacattggctattggggtaatatgctgcctccaaggragaggtaccccacgggactrctgttgactgcccttctcagaggggtgtgatggggacgtggccatgacattgccatgcaagcttctgttataggagcaaggactccaaaagctgttctgccatgacaaaacctcattcccatgaagcaggtgggtcatccttagcctttttcagctgtcacaaatctccgctgatatttt

SEQ ID NO: 3273 - DNA, 600 bp, Chicken  19866894090728_4
gctcrgccataacgcggggcagcgctgtgctccactctgggatgtgggtgaaggaaacatgtgcccttgagcacctataaatcacctggggatcccagagagggctgcagtttggaaagatgttggagggaaaggtgcatgcaytgggaaggcactgctcccaagaggtgcagttctctgctctgtgacccattcacccctacctctgtgtgttggatcccacctgcagaactgatgcacctccctcctttgtgagagcactgygaggaaaatgcgtttcagagagaagtgatggtgctkgtttcctttgacaagttatttcagagtaacattggctattggggtaatatgctgcctccaaggragaggtaccccacgggactrctgttgactgcccttctcagaggggtgtgatggggacgtggccatgacattgccatgcaagcttctgttataggagcaaggactccaaaagctgttctgccatgacaaaacctcattcccatgaagcaggtgggtcatccttagcctttttcagctgtcacaaatctccgctgatattttcagcctctagcacagagctggtgagttcataggctg

SEQ ID NO: 3274 - DNA, 600 bp, Chicken  19866894090728_5
ccttgagcacctataaatcacctggggatcccagagagggctgcagtttggaaagatgttggagggaaaggtgcatgcaytgggaaggcactgctcccaagaggtgcagttctctgctctgtgacccattcacccctacctctgtgtgttggatcccacctgcagaactgatgcacctccctcctttgtgagagcactgygaggaaaatgcgtttcagagagaagtgatggtgctkgtttcctttgacaagttatttcagagtaacattggctattggggtaatatgctgcctccaaggragaggtaccccacgggactrctgttgactgcccttctcagaggggtgtgatggggacgtggccatgacattgccatgcaagcttctgttataggagcaaggactccaaaagctgttctgccatgacaaaacctcattcccatgaagcaggtgggtcatccttagcctttttcagctgtcacaaatctccgctgatattttcagcctctagcacagagctggtgagttcataggctggtggtacccttcctcagtgtgccatctcaagtgagattgacctgcttggcgttccaagctctgg

SEQ ID NO: 3275 - DNA, 600 bp, Chicken  19866894090728_6
cctggggatcccagagagggctgcagtttggaaagatgttggagggaaaggtgcatgcaytgggaaggcactgctcccaagaggtgcagttctctgctctgtgacccattcacccctacctctgtgtgttggatcccacctgcagaactgatgcacctccctcctttgtgagagcactgygaggaaaatgcgtttcagagagaagtgatggtgctkgtttcctttgacaagttatttcagagtaacattggctattggggtaatatgctgcctccaaggragaggtaccccacgggactrctgttgactgcccttctcagaggggtgtgatggggacgtggccatgacattgccatgcaagcttctgttataggagcaaggactccaaaagctgttctgccatgacaaaacctcattcccatgaagcaggtgggtcatccttagcctttttcagctgtcacaaatctccgctgatattttcagcctctagcacagagctggtgagttcataggctggtggtacccttcctcagtgtgccatctcaagtgagattgacctgcttggcgttccaagctctgggagggcagactgatggttct

SEQ ID NO: 3276 - DNA, 600 bp, Chicken  19866894090728_7
acgtaccagagactgccctgtggcttaaatactcctcttcttaaacagagctcaaccaccactggaagccttacaggaattcctatgtttgcccaaacaggtgtccacgcaaagagaagagacctccagtgggatggatggcagatctttccgcatgctgccctgctaagcatttccagccagatgggactgcagggaggtctgtgcagcaagtctggagcatctgagcaccaagatctccaaggagaaaacagggataagctgaaggtttcagcaccaagtgaccttgttagctcaacyctcagagctctgcaaaaaccagccctgcctcaccaccaaacaccggagctcaggtggaggaaggaatgagaaggcaacactccagcactgtccagcaraggtgtgatgggaagggaggttatttctcactaatctggcatgacatttttgttctaatgacttaactggtatggaaatggaaattctttctgggtgatatttctagacagagactaattgactaagaataaaacaggcagctttcataccaccatgctggtctcagtgtcagcggaggccagctgtgttttcttttcagtg

SEQ ID NO: 3277 - DNA, 530 bp, Chicken  19866894090728_8
aggtgtccacgcaaagagaagagacctccagtgggatggatggcagatctttccgcatgctgccctgctaagcatttccagccagatgggactgcagggaggtctgtgcagcaagtctggagcatctgagcaccaagatctccaaggagaaaacagggataagctgaaggtttcagcaccaagtgaccttgttagctcaacyctcagagctctgcaaaaaccagccctgcctcaccaccaaacaccggagctcaggtggaggaaggaatgagaaggcaacactccagcactgtccagcaraggtgtgatgggaagggaggttatttctcactaatctggcatgacatttttgttctaatgacttaactggtatggaaatggaaattctttctgggtgatatttctagacagagactaattgactaagaataaaacaggcagctttcataccaccatgctggtctcagtgtcagcggaggccagctgtgttttcttttcagtgaacagtgcctacagtttccatccaaggt

SEQ ID NO: 3278 - DNA, 600 bp, Chicken  19866894090730_1
gggaaaaaaatggccaaagctttcctcagatggagaagactagacacattacgggttacctgccagcataatcaaagagaatattcatcacttctctctgaaagataagcataagggcaaggcacattcacccttatgtgagtgcacagcatggcagtagcccacatgcacgctctcagactgcagcaagcagctcacacctctttccctgcaggggaagtgtcttagattactccgaaatatgaacatggatggctggaagttacgtagagcaagtgacaggctctggaactgcccccrggaggactgcatgataactctgaagcagaggtggcagagtgctgctgttcttgtcaaaatttgaggggaaagagagctcagcaacaactcagctttgccaccaacactcacccttggcaacaaacacagcactgcaggaaccgtttataaaaggactttgttttgctatctgctacagaactaactctctgaagctaaggatcagaaaacatgcatttgatttttaactatctattctcagctcatagaagcaataagccatttaccctgtgctcttcaaaacctaccttaaagcgtcca

SEQ ID NO: 3279 - DNA, 600 bp, Chicken  19866894090731_1
ttagaccaagagtaatcacttaagtaatatcagattatattgctaggaaaaacagaaatattatccttcaaactgtcctattgttgtaagtctgcatgggcaaaatatgaccttttccattcttaattggtcagatgcagataggtctgatgttgcctcttttcatgtttcctctcccccccctcagacacttcttgccttcacctccatttatttggttatattctcatggcaaaaaaaaaacattacagctggagccaaaaattttgatgtagagcatttccttccagtcctccaagwcattccatttcagaggatcctcacaaggacttcacatcccttggcattaagyaatctgctggataagggttctggttaaaatcttaggaaattttaatggaaaatgtaccgtaaggaatgtaaatacaaaaaagtgttcctttgcacacaataaacactgtatggtaatgtcaagtttctttttaaaggttggactacagtggaccttcaagggaattttttttcctggtgtctagagagcttttcaatccgtattatggtttatttgaatattcagccaacgatacctatacagtacaa

SEQ ID NO: 3280 - DNA, 600 bp, Chicken  19866894090731_2
cagaaatattatccttcaaactgtcctattgttgtaagtctgcatgggcaaaatatgaccttttccattcttaattggtcagatgcagataggtctgatgttgcctcttttcatgtttcctctcccccccctcagacacttcttgccttcacctccatttatttggttatattctcatggcaaaaaaaaaacattacagctggagccaaaaattttgatgtagagcatttccttccagtcctccaagwcattccatttcagaggatcctcacaaggacttcacatcccttggcattaagyaatctgctggataagggttctggttaaaatcttaggaaattttaatggaaaatgtaccgtaaggaatgtaaatacaaaaaagtgttcctttgcacacaataaacactgtatggtaatgtcaagtttctttttaaaggttggactacagtggaccttcaagggaattttttttcctggtgtctagagagcttttcaatccgtattatggtttatttgaatattcagccaacgatacctatacagtacaaataagtcccatgtctgcttttgtagacaatcaccatgaatggtaagaatttt

SEQ ID NO: 3281 - DNA, 600 bp, Chicken  19866894090733_1
taagcatgtgaacatcaaacccaataaaatgcatagtgatccctttctgttgctctgatcactttcctctgcttctttggcccactgtggcccaggtttggtaaattctaagtcaggctggactgtcaaacccattcttcaaaccaggccaatggaaaagggaagtacttgttgcagaggatttcaggacaggctgttatttggtcctaaactacaattaaaactttatgttgcctcatctgtcttacagatgcctggtctttgtctaatccaagctgtagaacttgaccctagggaagmtgtgtttgaacaataaagatattcaagtcagccagatcttgcataaactatggcagagctttttttttttttcttttttcataaaccagctgaacaattatggatattctttcttcacttaactatatattaggtcataggctaaagaaggaatgaaatgtgtccactgggtatttctctttcctccctttctgacattagttgtctccactaggactgttttcctcctttagtccctgtatagctcaaagtagctccagatcataggggagtgcaacaggaaatcctgaaataagttgc

SEQ ID NO: 3282 - DNA, 599 bp, Chicken  19866894090734_1
  misc_feature (1)..(95): n is any nucleotide
nnnnnnnnnnnnnnnnnnnnnnnnnnnnnnnnnnnnnnnnnnnnnnnnnnnnnnnnnnnnnnnnnnnnnnnnnnnnnnnnnnnnnnnnnnnnnnncgcttacatcagataataacaggagctatgagcatgcagagcactgaagtacttcatgtggttttcagttcattatttgcctccaaaatagcagaagaccgtgcccctcccagacctcttggcttacctgggaaatgctctgctttggctcaggtaatgggcatatgcttgtagggccccagccccactttctgggacccttccrcatgagactgcaccgtgggaagctgagccacaacagcagtaaaactgtgccctgtgggaccttgcatgcacagttggtgtgcamgggtcagtgcattgagttcacacctctgcaacaccatcactgcccgaccatgggtgttcagtggggaggawatgtagcagagctgtttgctgctggagaagggtttgccttagcaaccctgagctgtgccagggggtgtaaggctgtgcagggccgggggaggtgtgttttgcagaaggcacttggcactgtattcagctccatttatccatcag

SEQ ID NO: 3283 - DNA, 599 bp, Chicken  19866894090734_2
  misc_feature (1)..(11): n is any nucleotide
nnnnnnnnnnncgcttacatcagataataacaggagctatgagcatgcagagcactgaagtacttcatgtggttttcagttcattatttgcctccaaaatagcagaagaccgtgcccctcccagacctcttggcttacctgggaaatgctctgctttggctcaggtaatgggcatatgcttgtagggccccagccccactttctgggacccttccrcatgagactgcaccgtgggaagctgagccacaacagcagtaaaactgtgccctgtgggaccttgcatgcacagttggtgtgcamgggtcagtgcattgagttcacacctctgcaacaccatcactgcccgaccatgggtgttcagtggggaggawatgtagcagagctgtttgctgctggagaagggtttgccttagcaaccctgagctgtgccagggggtgtaaggctgtgcagggccgggggaggtgtgttttgcagaaggcacttggcactgtattcagctccatttatccatcagcaccaggcatggtatgggggaggaggggggaaggatagagacagtgcagtgtgtggaaagaatgcaggttggccaggctcctcc

SEQ ID NO: 3284 - DNA, 600 bp, Chicken  19866894090734_3
gttttcagttcattatttgcctccaaaatagcagaagaccgtgcccctcccagacctcttggcttacctgggaaatgctctgctttggctcaggtaatgggcatatgcttgtagggccccagccccactttctgggacccttccrcatgagactgcaccgtgggaagctgagccacaacagcagtaaaactgtgccctgtgggaccttgcatgcacagttggtgtgcamgggtcagtgcattgagttcacacctctgcaacaccatcactgcccgaccatgggtgttcagtggggaggawatgtagcagagctgtttgctgctggagaagggtttgccttagcaaccctgagctgtgccagggggtgtaaggctgtgcagggccgggggaggtgtgttttgcagaaggcacttggcactgtattcagctccatttatccatcagcaccaggcatggtatgggggaggaggggggaaggatagagacagtgcagtgtgtggaaagaatgcaggttggccaggctcctccggctcaccgaccggtgacggatctgtcaggctgagcccacggaggggaagggctgtttgttttgaacaatga

SEQ ID NO: 3285 - DNA, 600 bp, Chicken  19866894090734_4
agctccatttatccatcagcaccaggcatggtatgggggaggaggggggaaggatagagacagtgcagtgtgtggaaagaatgcaggttggccaggctcctccggctcaccgaccggtgacggatctgtcaggctgagcccacggaggggaagggctgtttgttttgaacaatgagatgggctgaaggacgtgctaggaatgcagaaatggcagtgttcgaactttgggctcttctcctggtagcagaatgctattgtggagcctgagatgttgttgtgccctgtcagactgtgcaaaaygtgcacggtgactgaattactgcaggctcttggctctaacaaactcgttgtatacaaactttgtgaagaaggaatgcagtgaartgcaatgagagctggaatgaaggtcagatgctgcagtagctgggatagctctatgtgtgatacaggagttagaaaggtaagaaacgacaccaactgataggatgcagaggatgtgctgttcttcttatagaaatcctggaagcagaggacgtggatccaggactgccatccaacaggaacagccagaagactttggagcagcgtgcttgacaaaag

SEQ ID NO: 3286 - DNA, 600 bp, Chicken  19866894090734_5
aggttggccaggctcctccggctcaccgaccggtgacggatctgtcaggctgagcccacggaggggaagggctgtttgttttgaacaatgagatgggctgaaggacgtgctaggaatgcagaaatggcagtgttcgaactttgggctcttctcctggtagcagaatgctattgtggagcctgagatgttgttgtgccctgtcagactgtgcaaaaygtgcacggtgactgaattactgcaggctcttggctctaacaaactcgttgtatacaaactttgtgaagaaggaatgcagtgaartgcaatgagagctggaatgaaggtcagatgctgcagtagctgggatagctctatgtgtgatacaggagttagaaaggtaagaaacgacaccaactgataggatgcagaggatgtgctgttcttcttatagaaatcctggaagcagaggacgtggatccaggactgccatccaacaggaacagccagaagactttggagcagcgtgcttgacaaaagaagccaaaacctctctgccagctgagtccacgtagggtgaggcaggagctgcagtgctgtactggcttgagatgagatgggagt

SEQ ID NO: 3287 - DNA, 600 bp, Chicken  19866894090737_1
gagcggagatgaattattcaagagtttgaaagctgggagctgggatatttcaagcagaagggagcatcgtgacccgatttggaaaaaacagcacagaactgccaaaccaccagggactgttccaaaaaggagaagaaccaggggagtccaacacctccaaaaccagataactgcaggagagcggacacgtcagctcctcagcatcacagcagctgagctccagtgctgggccacggggaggaggacacacacaggggctgggagcgagctggcccagcatgcatgagatcttcctcgtgytggcgcccaaagggagaacaaaacaccccccaccccttctcaggctcaagtccaatcctgtgatttcagaactcacagacccttgacactgtggctggctgcccctctaggccataagggtgacagtgagcagaggaatagaccaagccctatcgtctctgctgttattagtgctctgcacttggagatgtgccttccattcagaaaataattagcatgactgctttctggaataattagtgagcaagcgtgacagagagacatccccacactccagtgcttcagaggaacttaattcca

SEQ ID NO: 3288 - DNA, 600 bp, Chicken  19866894090737_2
caccccccaccccttctcaggctcaagtccaatcctgtgatttcagaactcacagacccttgacactgtggctggctgcccctctaggccataagggtgacagtgagcagaggaatagaccaagccctatcgtctctgctgttattagtgctctgcacttggagatgtgccttccattcagaaaataattagcatgactgctttctggaataattagtgagcaagcgtgacagagagacatccccacactccagtgcttcagaggaacttaattccacagggattcggacaaagaaagarcaaaacttggaatgagtgctctgctcagtactcccagcacagggctctgacccgagccctgacctcacctggtgtcctcctccgtcacccacgtggcactgcggaagccgagggaggagagacgtgtgtggtagaagccatcctggaagcagagcgagggggtcatggttggctttggctggaggaggcagcagccctcagcccaacctgggctcacccagctccttggggtgcaggcctggcagcagcgccccatgagcggccggaaccagcgccgagaggggatgaaaacttccactc

SEQ ID NO: 3289 - DNA, 600 bp, Chicken  19866894090737_3
gagggggtcatggttggctttggctggaggaggcagcagccctcagcccaacctgggctcacccagctccttggggtgcaggcctggcagcagcgccccatgagcggccggaaccagcgccgagaggggatgaaaacttccactctttgccctgaatcagagaaccaggccttcatctgaaaagaggcagaaataaaggggagggagggagggcatgagacatccttcgcctggaaataatgaagcgtgtccaaatggtgcccaaaatgcactcccactggggagagggaaagccccatygctgggctcattggggagaaacaaaggttggtgccaaccccccgggctcaccaccaatgtgtgtgtgccatcatcactgcaggagtgcggggacccggatggggcaggaycagmaccccggggtgctcaccgtgtgctggtgggagcgagacctcggagatgtgtccggtacagcctgcagagctcagctggggagacacgggcagagagagctgagacacatggagatgtgcacctcgtccctgtcccacagcacagagagcacaggagcagccatgaggcctcttcctccataactgg

SEQ ID NO: 3290 - DNA, 600 bp, Chicken  19866894090737_4
gaaccagcgccgagaggggatgaaaacttccactctttgccctgaatcagagaaccaggccttcatctgaaaagaggcagaaataaaggggagggagggagggcatgagacatccttcgcctggaaataatgaagcgtgtccaaatggtgcccaaaatgcactcccactggggagagggaaagccccatygctgggctcattggggagaaacaaaggttggtgccaaccccccgggctcaccaccaatgtgtgtgtgccatcatcactgcaggagtgcggggacccggatggggcaggaycagmaccccggggtgctcaccgtgtgctggtgggagcgagacctcggagatgtgtccggtacagcctgcagagctcagctggggagacacgggcagagagagctgagacacatggagatgtgcacctcgtccctgtcccacagcacagagagcacaggagcagccatgaggcctcttcctccataactggggtggggtggcggcacaataggacccacagggcacaggaaggcggtactgagcccctctcccccactgcaggcacctgaagggaagggagctgctccttggtggggagat

SEQ ID NO: 3291 - DNA, 600 bp, Chicken  19866894090737_5
cagcgccgagaggggatgaaaacttccactctttgccctgaatcagagaaccaggccttcatctgaaaagaggcagaaataaaggggagggagggagggcatgagacatccttcgcctggaaataatgaagcgtgtccaaatggtgcccaaaatgcactcccactggggagagggaaagccccatygctgggctcattggggagaaacaaaggttggtgccaaccccccgggctcaccaccaatgtgtgtgtgccatcatcactgcaggagtgcggggacccggatggggcaggaycagmaccccggggtgctcaccgtgtgctggtgggagcgagacctcggagatgtgtccggtacagcctgcagagctcagctggggagacacgggcagagagagctgagacacatggagatgtgcacctcgtccctgtcccacagcacagagagcacaggagcagccatgaggcctcttcctccataactggggtggggtggcggcacaataggacccacagggcacaggaaggcggtactgagcccctctcccccactgcaggcacctgaagggaagggagctgctccttggtggggagatgtgt

SEQ ID NO: 3292 - DNA, 600 bp, Chicken  19866894090747_1
agtctccctttaggtactgaaaggctgcaattaggtcaccctgccttctcttctccaggctgaacaagcccagctccctcagcctgtcttcatagggaaggtgctctagccctttgatcatcttcgtcaccctcctctggaccctgtctttcttgtattgggagctccagaactggactcagtactccagatggggcctcataagggcagagtagacagggacaatcacctccctgtccctgctggctaccccagcaggatcctgcagatacccctgatggattccaggataccatttgytttccaagctgcaagagcacactgttggctcaygttcagtttttcatccaccaggacccccaaggtacttttctgcagggctactctcaaggactgctccttccagtctgtatatatgcctgggattccttcrgcccaagtgcaaaaccttgcactttgctgtgttgaacctcattagattcacccaggcccacctttcaagtctgttgaggcccctctgaatggcaccccttccttccactgtggaagtcaatataaaccattcattttgccaaagatccatgaaaaaggatcttatca

SEQ ID NO: 3293 - DNA, 600 bp, Chicken  19866894090747_2
ggtcaccctgccttctcttctccaggctgaacaagcccagctccctcagcctgtcttcatagggaaggtgctctagccctttgatcatcttcgtcaccctcctctggaccctgtctttcttgtattgggagctccagaactggactcagtactccagatggggcctcataagggcagagtagacagggacaatcacctccctgtccctgctggctaccccagcaggatcctgcagatacccctgatggattccaggataccatttgytttccaagctgcaagagcacactgttggctcaygttcagtttttcatccaccaggacccccaaggtacttttctgcagggctactctcaaggactgctccttccagtctgtatatatgcctgggattccttcrgcccaagtgcaaaaccttgcactttgctgtgttgaacctcattagattcacccaggcccacctttcaagtctgttgaggcccctctgaatggcaccccttccttccactgtggaagtcaatataaaccattcattttgccaaagatccatgaaaaaggatcttatcaggtggattcccattcaacagagtttcacaagat

SEQ ID NO: 3294 - DNA, 600 bp, Chicken  19866894090747_3
cctctggaccctgtctttcttgtattgggagctccagaactggactcagtactccagatggggcctcataagggcagagtagacagggacaatcacctccctgtccctgctggctaccccagcaggatcctgcagatacccctgatggattccaggataccatttgytttccaagctgcaagagcacactgttggctcaygttcagtttttcatccaccaggacccccaaggtacttttctgcagggctactctcaaggactgctccttccagtctgtatatatgcctgggattccttcrgcccaagtgcaaaaccttgcactttgctgtgttgaacctcattagattcacccaggcccacctttcaagtctgttgaggcccctctgaatggcaccccttccttccactgtggaagtcaatataaaccattcattttgccaaagatccatgaaaaaggatcttatcaggtggattcccattcaacagagtttcacaagattttgagaacaaaacctcayaacttcaaawgttttgtcaaaacactttcatactgtcaagctcctcagtatctccacacatcatcagatttgtggacacaa

SEQ ID NO: 3295 - DNA, 600 bp, Chicken  19866894090747_4
aggacccccaaggtacttttctgcagggctactctcaaggactgctccttccagtctgtatatatgcctgggattccttcrgcccaagtgcaaaaccttgcactttgctgtgttgaacctcattagattcacccaggcccacctttcaagtctgttgaggcccctctgaatggcaccccttccttccactgtggaagtcaatataaaccattcattttgccaaagatccatgaaaaaggatcttatcaggtggattcccattcaacagagtttcacaagattttgagaacaaaacctcayaacttcaaawgttttgtcaaaacactttcatactgtcaagctcctcagtatctccacacatcatcagatttgtggacacaaaatttggacatggtatgtacagtggtttcaccagtgtcatatgcaaagtaaaataactacctgcatttgatatatctacagatagtaaagcccaagacatcattctgattgtcttgaactgatggcttgtgctgaggtgattatccaaaataacccctcttttatataccataaatttgtagtacatcagacacaaagttcacacatataatgcctaac

SEQ ID NO: 3296 - DNA, 600 bp, Chicken  19866894090747_5
aggtacttttctgcagggctactctcaaggactgctccttccagtctgtatatatgcctgggattccttcrgcccaagtgcaaaaccttgcactttgctgtgttgaacctcattagattcacccaggcccacctttcaagtctgttgaggcccctctgaatggcaccccttccttccactgtggaagtcaatataaaccattcattttgccaaagatccatgaaaaaggatcttatcaggtggattcccattcaacagagtttcacaagattttgagaacaaaacctcayaacttcaaawgttttgtcaaaacactttcatactgtcaagctcctcagtatctccacacatcatcagatttgtggacacaaaatttggacatggtatgtacagtggtttcaccagtgtcatatgcaaagtaaaataactacctgcatttgatatatctacagatagtaaagcccaagacatcattctgattgtcttgaactgatggcttgtgctgaggtgattatccaaaataacccctcttttatataccataaatttgtagtacatcagacacaaagttcacacatataatgcctaacacaattgttg

SEQ ID NO: 3297 - DNA, 599 bp, Chicken  19866894090754_1
  misc_feature (1)..(87): n is any nucleotide
nnnnnnnnnnnnnnnnnnnnnnnnnnnnnnnnnnnnnnnnnnnnnnnnnnnnnnnnnnnnnnnnnnnnnnnnnnnnnnnnnnnnnnnttgctcagcttactggcagcacacaccagtcttcgcactaaagcaattaacaaatgaaaacttagtgcacgtttttgaaagtgcaaatacctgaaacagaaatctgacgtggcaattaagaccgaagaaacaaagaatgaattgaaaaaaagcaaacattgaaatctcaattactatggaaacatacagggctgaagctgcgtggacatagargacagcgctttaacatacaaaaacaagatgccaaagcctaagtgaaatatttagccacccagatgccaaagacaacatttctgtcatactgttcacattttaaattacttatttttactgcaagtcaaaatttatcacacagtttttcaaaagctgcaatacagtttatttctctcttcacctattatgattactaactcacatttcccatcacactccacttcagaaaacagcatcttggatttccaaagatactggtggtttcagtaacagtacagcaacatcaatgctacacggaa

SEQ ID NO: 3298 - DNA, 600 bp, Chicken  19866894090754_2
taactcacatttcccatcacactccacttcagaaaacagcatcttggatttccaaagatactggtggtttcagtaacagtacagcaacatcaatgctacacggaagcagataaataaagctaacgcctcagccttaaagagagtcttaaatacccgattacataattactgtgtaaattagctggtcagttaaatggcagaagagctgcaattactgttctggcatccagaaaagacccagtttgagcaagcaaaggcagtgctcagaacttttagacatatcagacgacttcaatatcraaccaggaagctagtaaacccacgctaacaaatcccttgcacacacatcaccacccagggcaattctgacaagacaacatcaagtctacaaaagtacacatctactggaactatggtcccctgataataaaatatatccatttacagataacatttatctatacgctgatagtgttcataagacattaaaaacctctgtagcctttgcttatattaactcatctcttgatgacccaggacagggtaggttctaaccctgttctcttgggggaaaaggatccttgatgctcttctaagcct

SEQ ID NO: 3299 - DNA, 600 bp, Chicken  19866894090754_3
caaactactgctggtatcatcacagtattcctttgtgcgtggaggagcatttgcagctgtgcaaaagccagggataaagtaagcagcctaaactgcaattcctttctctttcttacccattactaaagctgtcagaaaaaaaaaaaatgaccagctgataggaaatcaggcccaatatttccttcacacctgcaggcaattggcaatttctttcccacctcttcatttcagattctatttgcccctttctcatgctgcagctgcttccacaaccacagcaaacattacaaaagctgactkgagagcttattttcttctgttactgttctttttatctggtattaaaaacatactggcgcaaatactactctatttctacatcatccttaggtctgtagtttctaatagcagccatgctactgcagttaccaaatacaggctgtgcagaagaattactgtctttacaacagtacatgccaataatcagttacctcaattataaggtattcaaattcttcttttctcatcaggctttgactcaagatgatatacagtttaatgcaaagtttagtttacctaggattcctaaaaccaactttt

SEQ ID NO: 3300 - DNA, 600 bp, Chicken  19866894090756_1
aagaatttgtagcagggcactggacagcactaatacaaccatcattaaaacagagtaaagagctttaaaggtttagtgaccactgattcaagtgtagaatgcccaaaaacactttcaagggtgtaaggttatctccagtctgtatctctaatgctatccccaccactactgcaacaggtagttgagagcccagagcctataagggaagggacttcactgtgggtaaaaaccttgctcaacgtgcccccaaaaatgcagttaattcagttatttcttcatgatacattatttattattctyctaggcatgggttctcccctgctgcaagtcacacagtttattcctgtgctgagtaggacccggtggctctaggaacatttcccaccagtctcaaaataggatcagggatccaagagcaaagaactcctataaccagtatctttggagaaactctcaagacgtaaaacagtttccaaagcaggcttcctttggaggctctgtttctcttyatgatgcagcgttctctgcatggacccttggcatgcctwtacattgtcattgctacaaagcagattttctttttaagtgtgaggtctgcat

SEQ ID NO: 3301 - DNA, 600 bp, Chicken  19866894090756_2
gacttcactgtgggtaaaaaccttgctcaacgtgcccccaaaaatgcagttaattcagttatttcttcatgatacattatttattattctyctaggcatgggttctcccctgctgcaagtcacacagtttattcctgtgctgagtaggacccggtggctctaggaacatttcccaccagtctcaaaataggatcagggatccaagagcaaagaactcctataaccagtatctttggagaaactctcaagacgtaaaacagtttccaaagcaggcttcctttggaggctctgtttctcttyatgatgcagcgttctctgcatggacccttggcatgcctwtacattgtcattgctacaaagcagattttctttttaagtgtgaggtctgcattttaaattactattttcattctcagtgttgcacttttacaaatggctctagtacagctggagtrcctactgttcctttcaccattgcctcattgctttggtttggagaactaaagatattcaggttaagtaaccattgtataccattcagtttttattaataataatcttgcgcgtttaagacatttaaatgcaggcattgtttacatt

SEQ ID NO: 3302 - DNA, 600 bp, Chicken  19866894090756_3
aaaaatgcagttaattcagttatttcttcatgatacattatttattattctyctaggcatgggttctcccctgctgcaagtcacacagtttattcctgtgctgagtaggacccggtggctctaggaacatttcccaccagtctcaaaataggatcagggatccaagagcaaagaactcctataaccagtatctttggagaaactctcaagacgtaaaacagtttccaaagcaggcttcctttggaggctctgtttctcttyatgatgcagcgttctctgcatggacccttggcatgcctwtacattgtcattgctacaaagcagattttctttttaagtgtgaggtctgcattttaaattactattttcattctcagtgttgcacttttacaaatggctctagtacagctggagtrcctactgttcctttcaccattgcctcattgctttggtttggagaactaaagatattcaggttaagtaaccattgtataccattcagtttttattaataataatcttgcgcgtttaagacatttaaatgcaggcattgtttacattagtacaaattaattgacataacatatacttttttcattt

SEQ ID NO: 3303 - DNA, 565 bp, Chicken  19866894090756_4
ggctctaggaacatttcccaccagtctcaaaataggatcagggatccaagagcaaagaactcctataaccagtatctttggagaaactctcaagacgtaaaacagtttccaaagcaggcttcctttggaggctctgtttctcttyatgatgcagcgttctctgcatggacccttggcatgcctwtacattgtcattgctacaaagcagattttctttttaagtgtgaggtctgcattttaaattactattttcattctcagtgttgcacttttacaaatggctctagtacagctggagtrcctactgttcctttcaccattgcctcattgctttggtttggagaactaaagatattcaggttaagtaaccattgtataccattcagtttttattaataataatcttgcgcgtttaagacatttaaatgcaggcattgtttacattagtacaaattaattgacataacatatacttttttcattttactatttccattttcaatttgcagctacttagattatattgaaaatatatatggtccacactgatcttatttatggctca

SEQ ID NO: 3304 - DNA, 600 bp, Chicken  19866894090760_1
tcctcagagatacaagggagagacagcgggtaggcaaggaaaagtagcccacctcttcctcctgtttcccttcaagtccagaaaagatgatatactttgatgtatattagttcaagtgagattgagagctgagacttagcaaatgctcagaaagagcaaaagtgtaagcaaatactcatccagaatcttactagaagtgctctgcatttccatgtttcacaagttcaatcatcattttaaatccctctattaattcataggcaagagaagatgagaacacgtcagggcaacacattcacycccaagtgaaggctgggaagtagtttcatgtcatccagcgcaaccactccagctgattaataacaaacagcccagagtcaagaatggtcagtgtgacatgaggccacaagttcattggaaaaaaagatgagtgaagggtctcctctgaatgcaagaagtaaccacctttgtcaagaagcagtttctaggtgctttacacatgttcatctactatgcatacrtgccacactgatccaacccctccgttgctccaggctctgtyttcagggtctgaacataacctaggaattcattttgcca

SEQ ID NO: 3305 - DNA, 600 bp, Chicken  19866894090760_2
agttcaatcatcattttaaatccctctattaattcataggcaagagaagatgagaacacgtcagggcaacacattcacycccaagtgaaggctgggaagtagtttcatgtcatccagcgcaaccactccagctgattaataacaaacagcccagagtcaagaatggtcagtgtgacatgaggccacaagttcattggaaaaaaagatgagtgaagggtctcctctgaatgcaagaagtaaccacctttgtcaagaagcagtttctaggtgctttacacatgttcatctactatgcatacrtgccacactgatccaacccctccgttgctccaggctctgtyttcagggtctgaacataacctaggaattcattttgccaaggtccctgtttctgaaagctgaaactctacagctcaggagttcactacactacacaggcagctcctcatgctttttgacttgctttaactccacagattaattctcagcagagatgcttagctgcaccatgcatatgcatgcagcgctttttaatagctgttctcagacatgagatggctgacatatctagacacaataacaaacactaatttttttttc

SEQ ID NO: 3306 - DNA, 600 bp, Chicken  19866894090760_3
aagagaagatgagaacacgtcagggcaacacattcacycccaagtgaaggctgggaagtagtttcatgtcatccagcgcaaccactccagctgattaataacaaacagcccagagtcaagaatggtcagtgtgacatgaggccacaagttcattggaaaaaaagatgagtgaagggtctcctctgaatgcaagaagtaaccacctttgtcaagaagcagtttctaggtgctttacacatgttcatctactatgcatacrtgccacactgatccaacccctccgttgctccaggctctgtyttcagggtctgaacataacctaggaattcattttgccaaggtccctgtttctgaaagctgaaactctacagctcaggagttcactacactacacaggcagctcctcatgctttttgacttgctttaactccacagattaattctcagcagagatgcttagctgcaccatgcatatgcatgcagcgctttttaatagctgttctcagacatgagatggctgacatatctagacacaataacaaacactaatttttttttcatttccttagcaatggatttatgtaatgcccgttggtgcag

SEQ ID NO: 3307 - DNA, 600 bp, Chicken  19866894090763_1
ccatggtgctgaaaaggtcagagatttcagagaggtgcgtgagagcttggcttagagtttggaaaatcgttgggttcagaaggctctgtctggcctcttggaaccaacccttcttgtctggatttcctttcacatctggtgcaaatacctgcaactgtttctgctatgatcctagcttctttgtccttggaggcagtgttggttcgccaagaatcttgcatttggcaaaagttgcatatgtagagcaggcctgagaagtgaaagagactgaatgcagctgtaggcactgacttctgtgaygttaaaggaaaagaagagcggaagagttgtgtggggaaagatgttccctgaaaacactgatctagcaccataccaggtgccatatagtgctgtaagatttcacctgcatgtacacctgattgcatgtctctaatgggacaagatttccttcgcaccaagtgccacggtgttttcttccagtgtatgcgtaggaatctcattagaaattgaagtgaactgaaagcaaggccggggttttcaactgttccagactgcaagcatgcagacatactagagggatctggtgggtgccaaatgtcc

SEQ ID NO: 3308 - DNA, 600 bp, Chicken  19866894090763_2
ccacggtgttttcttccagtgtatgcgtaggaatctcattagaaattgaagtgaactgaaagcaaggccggggttttcaactgttccagactgcaagcatgcagacatactagagggatctggtgggtgccaaatgtccaaacaaagagtggcaggaactatttctctgtcacttttgtgttgatgctctctcgtacatgtcttggttttccaaaggctagagattactgttcttgcaacatagacatagagttcacaggcagtacaagagcatcaagccttcccttgaatcaggaagaytgatgggtcagcagtgtacttgactgtaccatgttttgattactcatactgtgtcaaagttagtgcctatttcactgagcccctttcttccagtgttgtgacaatcataactgacartcttttctgtacaagccttcaaccagcaccactggatgtaaattcacctcacacggaaatgcagcttgaattttcattgacttccaagtgctcattttaaggcaaagtcgtatcaatggaactacacactgcagtagtgctcctcccatggacctgctgtttctttataattagaatcagaag

SEQ ID NO: 3309 - DNA, 600 bp, Chicken  19866894090763_3
atctggtgggtgccaaatgtccaaacaaagagtggcaggaactatttctctgtcacttttgtgttgatgctctctcgtacatgtcttggttttccaaaggctagagattactgttcttgcaacatagacatagagttcacaggcagtacaagagcatcaagccttcccttgaatcaggaagaytgatgggtcagcagtgtacttgactgtaccatgttttgattactcatactgtgtcaaagttagtgcctatttcactgagcccctttcttccagtgttgtgacaatcataactgacartcttttctgtacaagccttcaaccagcaccactggatgtaaattcacctcacacggaaatgcagcttgaattttcattgacttccaagtgctcattttaaggcaaagtcgtatcaatggaactacacactgcagtagtgctcctcccatggacctgctgtttctttataattagaatcagaagtatttgaaatgactgagctactggtttgcaaggagaagttctgaaggacacagccatgctcttctacccattgttgtaatcaagaaatagcaaaaggtcaacattattacgtacacg

SEQ ID NO: 3310 - DNA, 600 bp, Chicken  19866894090771_1
catagtttcttgggaatactgtttttgttgttgtataagtcaagtttttactactttgccccagcagattatgatttttttctcccgtgacatctatagccttttttgctagactctgtccattggtgttgtggtttttcctagtttgtacttatgtcctatgctcccactgcttagccagatcttacctctgggtatttccaaaggattctctgttgctggctagtcttaggataacttcaccataactttgtcttctccctaccgcatgccaccagagtgatcagacttatacatgcrgtcctttagctaccaacagatccctttctagctttttcctggtttgcatgcaacactcctagcactataatggaagtcaagtgtaagagagagatctactgcctttcagtgtacatagtaatcttactgtagagcagcacatagctatagattgtagaacagcataaaaagagaataagagtgggaagctttataccagacagcaccaataataaaagatcatcactgcatgagaaagcagcaccgtgtttttctgagtctatagttccatgactgatgtgaagcagtaatatattttag

SEQ ID NO: 3311 - DNA, 600 bp, Chicken  19866894090772_1
tgtcagacagaaatatagtttaccaaagcatattcaagaatcttctgtttcttcaacagcaaatgccagtaaaaaggatttattggctacctgactatggccttccctgactgctccttgtttactgatgtcatcagtggtagtacagaatcttcaggcaagctttttttcttgcagtgtgtagggagaataaaatattatttagtttaatttttcagataattgcttctcagactgttcatctgactgattttactttgtttttttttttttttaaacagagtttgcaaagcttcgctrttgctatttttattatttaacttgggtacagtttcagtactttgagtgatgctttcttaattctaatatctttttctttgctgtgtcatcacacaggttttcttttatcctttctcaaactgttctaatgcatgatagtcataggtactgtacttccagtttggcatcctaaggtagtctatatagtgcataaaaggatttaattcctttagctgcatgttttaacttcctaacaagctctcccattyttactgaagccatagattggagtttagtcctgccatagtggatttttgttgg

SEQ ID NO: 3312 - DNA, 600 bp, Chicken  19866894090772_2
gattttactttgtttttttttttttttaaacagagtttgcaaagcttcgctrttgctatttttattatttaacttgggtacagtttcagtactttgagtgatgctttcttaattctaatatctttttctttgctgtgtcatcacacaggttttcttttatcctttctcaaactgttctaatgcatgatagtcataggtactgtacttccagtttggcatcctaaggtagtctatatagtgcataaaaggatttaattcctttagctgcatgttttaacttcctaacaagctctcccattyttactgaagccatagattggagtttagtcctgccatagtggatttttgttggtcctgtaaggagtgaatctaagtgcattttagtcattgttaaaacaaagttttcactgtgcaaatttgaatcagatccagtgcactgctcagtataaatgtacagtttgcttttcatctcaccgtttgctccaatgaactactgctgttaactgaaatccatgatataattcccctttcactgaattcaatgaaatcacagttttagcagattcactcagggaagctgaagttcaaacccatttatag

SEQ ID NO: 3313 - DNA, 600 bp, Chicken  19866894090782_1
ccctgccagtcagcattctctggttttggaggagacttcttccacataacacaaatggagaagaaaacattcaaggagattgataacatgcacaagagtatgagctccagctcggcagttgaaaaaacacgtgacaaactgagaagaaagcctggaaactggtttgaaagtgtcaaacttaaaatgataccacattgcataaaggtaccaggcaggtgtctccatcagggcccttatttggttatacatgaacacaattccacagcacgaaatcatgatgttaattataggccaataatwtcccaagatcatgattgtccttcatcccttatacaacgctcctgcaataaagagcagactcatagctggtagctgctaaaatgggggaaaaacaacaacaacaactactgggtacagtgtccggagttcggcagactgcccagacyataatctcatctatgaaggtcacactagcaatgccttgcagtctggcagtctccggcttaaagaaatcctttcttttctctgttagcgttaaaagcttcagattgcccgcattctccacmaaaagctgtcacggacttatctagctcaatctag

SEQ ID NO: 3314 - DNA, 481 bp, Chicken  19866894090782_2
aaagcctggaaactggtttgaaagtgtcaaacttaaaatgataccacattgcataaaggtaccaggcaggtgtctccatcagggcccttatttggttatacatgaacacaattccacagcacgaaatcatgatgttaattataggccaataatwtcccaagatcatgattgtccttcatcccttatacaacgctcctgcaataaagagcagactcatagctggtagctgctaaaatgggggaaaaacaacaacaacaactactgggtacagtgtccggagttcggcagactgcccagacyataatctcatctatgaaggtcacactagcaatgccttgcagtctggcagtctccggcttaaagaaatcctttcttttctctgttagcgttaaaagcttcagattgcccgcattctccacmaaaagctgtcacggacttatctagctcaatctagatcagtctatgcccgtgacagggaggc

SEQ ID NO: 3315 - DNA, 361 bp, Chicken  19866894090782_3
acgaaatcatgatgttaattataggccaataatwtcccaagatcatgattgtccttcatcccttatacaacgctcctgcaataaagagcagactcatagctggtagctgctaaaatgggggaaaaacaacaacaacaactactgggtacagtgtccggagttcggcagactgcccagacyataatctcatctatgaaggtcacactagcaatgccttgcagtctggcagtctccggcttaaagaaatcctttcttttctctgttagcgttaaaagcttcagattgcccgcattctccacmaaaagctgtcacggacttatctagctcaatctagatcagtctatgcccgtgacagggaggc

SEQ ID NO: 3316 - DNA, 600 bp, Chicken  19866894090784_1
tttgttcggatgccgtgtaaactctttccttgagccttggatttcagtcatcttcagaggtcggcaaacagaaatagagacttcctcttcatcactcgcctctccgtgtctcttggtttttgcttttgcctttcgtggctctgaggaggccccctggcctggatcttcctctacctcctcctccgcagctgctgcttcttttttccattccagacgcgtggacacccacttccatttcttgccttccacaggggcagcagaaggcactgctactggtgtctcctgtgactgatcagattygacttggagatttccccctttggcttcaacctctgcttggaaactctctctctccagaagagtattacatagagcacggtaagcacaagccaagccccaaataagccgtacctccttcgatctatctgagccacaccatccctgactcaaatactggcttcgtttcctgggatcccacaggtgttcaagagtggagtgccatgacattgcgggtccccacgcttctaagatttctcctaaacctctccatattccctgccagtcagcattctctggttttggaggagacttcttccacat

SEQ ID NO: 3317 - DNA, 600 bp, Chicken  19866894090803_1
gacaccacctcttctcacccgcacaggaagtgaacttcccttctgagtgctgtgttacttcagccagccctgcatgcatgtgtttggagtgtgtgggtgtgtgtatctctgtttgctcaacttcctgcatctcctcgggctgacacagtgtgtgctcccctgctcacacactgtttccaacagttagcacatgggttctgccctgtgctaggcgctctcctaccatgtaggattatcttacccggtgcctgtgccaactgtactcaagtcggaatgccccagtctcaactttgttcagcwgctttctttgtgaaaagcagctctcagcgctgtgctcattgtagtcagccattagcttcaaaaccgtgttgggcagctcatgccttggatgggtgctgctgaccaggctttgagccaagctggcatggttttgtaattttgccattggtattccacatcatagcatcatggacagcccgggtaattacagggttaatagtccggttctgtggactgacaacgatccagatacctgcttctcgaaagagaagaagaactgcgtatcccagaggacctcacggtcagagagggaagatacgg

SEQ ID NO: 3318 - DNA, 599 bp, Chicken  19866894090809_1
  misc_feature (1)..(81): n is any nucleotide
nnnnnnnnnnnnnnnnnnnnnnnnnnnnnnnnnnnnnnnnnnnnnnnnnnnnnnnnnnnnnnnnnnnnnnnnnnnnnnnnncgcagtggggatgctgatgtgatggggtcaggtggagacaagctgatggcgcgtcacaccccccaacatgacatcctttaagcactggcagtgaaaattgctaaaggaacaggcctgagagaagctgagagaggagtgggtctggctgtctggcctgacgcctgcagtccttgaatgtgctgtgccctctgtgagcatctgggagaaagatgttcctcrttccttgatgcagaacatgctgtaagagctgtcaatccctccctttgtgtgatagctaaattagcaaataaaacaaatggaaaaggagatgtcagtggattatctcaacagcttcagtccactgagttgtgctttgatgtcccactactgtccaggcacttggggacacatttagctatcatggcattgtgcattcacaggctgattttcactcccrggcaatttgatagaatcayagaatcatagaaccagtgaggttggaaagaccactgagatcatccagtccaaccattaaccca

SEQ ID NO: 3319 - DNA, 600 bp, Chicken  19866894090809_10
gggaagaggataagagaagctgtaatgacaggtactgatggaaacaaatgaagggaattactctgctggtggatgaggagcagtggcaggagaagcattagtcaggttatactttgcaataaagctcttggaaggtcagcggctgagagaagtcctggcagaggagatggactcctagttgagaagcttacaggaaccaggtggagacttgttctgcaaaacacagggtgcagctggtgttgcctaagtggagtttcccacctayaccataagcwttgtgccctgtgcccctgcayacarccccaggacagctctgcygaggtgggggcccagcaggcaccgtggcacagccatttgagaaggtgagggccaggttgaggttggctggggtcacagaactcaacgtgcagttcggaaagtgtttccatgagtaggaagtgtttgttcaaacacagcccctgtggctattttgctcaagagtgaagtctgattttctgagagccagagctaaacagaggcaattattggctccgtgttttcgagatgagtctcaagataatgaaactcattcagcttctcatgtgaaattcccacgtaact

SEQ ID NO: 3320 - DNA, 600 bp, Chicken  19866894090809_11
gctgtaatgacaggtactgatggaaacaaatgaagggaattactctgctggtggatgaggagcagtggcaggagaagcattagtcaggttatactttgcaataaagctcttggaaggtcagcggctgagagaagtcctggcagaggagatggactcctagttgagaagcttacaggaaccaggtggagacttgttctgcaaaacacagggtgcagctggtgttgcctaagtggagtttcccacctayaccataagcwttgtgccctgtgcccctgcayacarccccaggacagctctgcygaggtgggggcccagcaggcaccgtggcacagccatttgagaaggtgagggccaggttgaggttggctggggtcacagaactcaacgtgcagttcggaaagtgtttccatgagtaggaagtgtttgttcaaacacagcccctgtggctattttgctcaagagtgaagtctgattttctgagagccagagctaaacagaggcaattattggctccgtgttttcgagatgagtctcaagataatgaaactcattcagcttctcatgtgaaattcccacgtaactcactgtcagctgagtgca

SEQ ID NO: 3321 - DNA, 600 bp, Chicken  19866894090809_2
tgggtctggctgtctggcctgacgcctgcagtccttgaatgtgctgtgccctctgtgagcatctgggagaaagatgttcctcrttccttgatgcagaacatgctgtaagagctgtcaatccctccctttgtgtgatagctaaattagcaaataaaacaaatggaaaaggagatgtcagtggattatctcaacagcttcagtccactgagttgtgctttgatgtcccactactgtccaggcacttggggacacatttagctatcatggcattgtgcattcacaggctgattttcactcccrggcaatttgatagaatcayagaatcatagaaccagtgaggttggaaagaccactgagatcatccagtccaaccattaacccatcatgcccactaaccatgtccctcagtgccacatctatgcagttcctgaacacctccagggatggtatctccaccacctccctgggcagcctgttctaatgcattwtcactctttctgagaataatttmttctaatatccaacctgaacctcccccatgcagcttaaggccatcacytctcatcactgttgcctgggagaagaggatgatccccgcct

SEQ ID NO: 3322 - DNA, 600 bp, Chicken  19866894090809_3
tgacgcctgcagtccttgaatgtgctgtgccctctgtgagcatctgggagaaagatgttcctcrttccttgatgcagaacatgctgtaagagctgtcaatccctccctttgtgtgatagctaaattagcaaataaaacaaatggaaaaggagatgtcagtggattatctcaacagcttcagtccactgagttgtgctttgatgtcccactactgtccaggcacttggggacacatttagctatcatggcattgtgcattcacaggctgattttcactcccrggcaatttgatagaatcayagaatcatagaaccagtgaggttggaaagaccactgagatcatccagtccaaccattaacccatcatgcccactaaccatgtccctcagtgccacatctatgcagttcctgaacacctccagggatggtatctccaccacctccctgggcagcctgttctaatgcattwtcactctttctgagaataatttmttctaatatccaacctgaacctcccccatgcagcttaaggccatcacytctcatcactgttgcctgggagaagaggatgatccccgcctcatcacagccttctttcag

SEQ ID NO: 3323 - DNA, 600 bp, Chicken  19866894090809_4
caacagcttcagtccactgagttgtgctttgatgtcccactactgtccaggcacttggggacacatttagctatcatggcattgtgcattcacaggctgattttcactcccrggcaatttgatagaatcayagaatcatagaaccagtgaggttggaaagaccactgagatcatccagtccaaccattaacccatcatgcccactaaccatgtccctcagtgccacatctatgcagttcctgaacacctccagggatggtatctccaccacctccctgggcagcctgttctaatgcattwtcactctttctgagaataatttmttctaatatccaacctgaacctcccccatgcagcttaaggccatcacytctcatcactgttgcctgggagaagaggatgatccccgcctcatcacagccttctttcaggcagttgaagagggcaataaagtcctccctgagcctcctccagactgaacaatcccagttccctcaaccactacctgtaagatttgtgctccatacccctcacagctttgttgcccttctctggacatgctccagggcctcaatgtctttcttgtaacaaggggccctt

SEQ ID NO: 3324 - DNA, 600 bp, Chicken  19866894090809_5
gtgctttgatgtcccactactgtccaggcacttggggacacatttagctatcatggcattgtgcattcacaggctgattttcactcccrggcaatttgatagaatcayagaatcatagaaccagtgaggttggaaagaccactgagatcatccagtccaaccattaacccatcatgcccactaaccatgtccctcagtgccacatctatgcagttcctgaacacctccagggatggtatctccaccacctccctgggcagcctgttctaatgcattwtcactctttctgagaataatttmttctaatatccaacctgaacctcccccatgcagcttaaggccatcacytctcatcactgttgcctgggagaagaggatgatccccgcctcatcacagccttctttcaggcagttgaagagggcaataaagtcctccctgagcctcctccagactgaacaatcccagttccctcaaccactacctgtaagatttgtgctccatacccctcacagctttgttgcccttctctggacatgctccagggcctcaatgtctttcttgtaacaaggggccctttgctttttatgaaagaattatga

SEQ ID NO: 3325 - DNA, 600 bp, Chicken  19866894090809_6
tatcatggcattgtgcattcacaggctgattttcactcccrggcaatttgatagaatcayagaatcatagaaccagtgaggttggaaagaccactgagatcatccagtccaaccattaacccatcatgcccactaaccatgtccctcagtgccacatctatgcagttcctgaacacctccagggatggtatctccaccacctccctgggcagcctgttctaatgcattwtcactctttctgagaataatttmttctaatatccaacctgaacctcccccatgcagcttaaggccatcacytctcatcactgttgcctgggagaagaggatgatccccgcctcatcacagccttctttcaggcagttgaagagggcaataaagtcctccctgagcctcctccagactgaacaatcccagttccctcaaccactacctgtaagatttgtgctccatacccctcacagctttgttgcccttctctggacatgctccagggcctcaatgtctttcttgtaacaaggggccctttgctttttatgaaagaattatgaaaactatctcaaatgcgtagaagactgatacagtttttggtgccatga

SEQ ID NO: 3326 - DNA, 600 bp, Chicken  19866894090809_7
ggtgccatgaagagccctccatgggaataagagaggggaagaggataagagaagctgtaatgacaggtactgatggaaacaaatgaagggaattactctgctggtggatgaggagcagtggcaggagaagcattagtcaggttatactttgcaataaagctcttggaaggtcagcggctgagagaagtcctggcagaggagatggactcctagttgagaagcttacaggaaccaggtggagacttgttctgcaaaacacagggtgcagctggtgttgcctaagtggagtttcccacctayaccataagcwttgtgccctgtgcccctgcayacarccccaggacagctctgcygaggtgggggcccagcaggcaccgtggcacagccatttgagaaggtgagggccaggttgaggttggctggggtcacagaactcaacgtgcagttcggaaagtgtttccatgagtaggaagtgtttgttcaaacacagcccctgtggctattttgctcaagagtgaagtctgattttctgagagccagagctaaacagaggcaattattggctccgtgttttcgagatgagtctcaagataatgaaac

SEQ ID NO: 3327 - DNA, 600 bp, Chicken  19866894090809_8
agagccctccatgggaataagagaggggaagaggataagagaagctgtaatgacaggtactgatggaaacaaatgaagggaattactctgctggtggatgaggagcagtggcaggagaagcattagtcaggttatactttgcaataaagctcttggaaggtcagcggctgagagaagtcctggcagaggagatggactcctagttgagaagcttacaggaaccaggtggagacttgttctgcaaaacacagggtgcagctggtgttgcctaagtggagtttcccacctayaccataagcwttgtgccctgtgcccctgcayacarccccaggacagctctgcygaggtgggggcccagcaggcaccgtggcacagccatttgagaaggtgagggccaggttgaggttggctggggtcacagaactcaacgtgcagttcggaaagtgtttccatgagtaggaagtgtttgttcaaacacagcccctgtggctattttgctcaagagtgaagtctgattttctgagagccagagctaaacagaggcaattattggctccgtgttttcgagatgagtctcaagataatgaaactcattcagct

SEQ ID NO: 3328 - DNA, 600 bp, Chicken  19866894090809_9
agaggggaagaggataagagaagctgtaatgacaggtactgatggaaacaaatgaagggaattactctgctggtggatgaggagcagtggcaggagaagcattagtcaggttatactttgcaataaagctcttggaaggtcagcggctgagagaagtcctggcagaggagatggactcctagttgagaagcttacaggaaccaggtggagacttgttctgcaaaacacagggtgcagctggtgttgcctaagtggagtttcccacctayaccataagcwttgtgccctgtgcccctgcayacarccccaggacagctctgcygaggtgggggcccagcaggcaccgtggcacagccatttgagaaggtgagggccaggttgaggttggctggggtcacagaactcaacgtgcagttcggaaagtgtttccatgagtaggaagtgtttgttcaaacacagcccctgtggctattttgctcaagagtgaagtctgattttctgagagccagagctaaacagaggcaattattggctccgtgttttcgagatgagtctcaagataatgaaactcattcagcttctcatgtgaaattcccacgt

SEQ ID NO: 3329 - DNA, 599 bp, Chicken  19866894090812_1
  misc_feature (1)..(90): n is any nucleotide
nnnnnnnnnnnnnnnnnnnnnnnnnnnnnnnnnnnnnnnnnnnnnnnnnnnnnnnnnnnnnnnnnnnnnnnnnnnnnnnnnnnnnnnnnnttataaaatcatagaatcctttgagttggtggagatccttaaaggtcatttagtccaactcccctgcaatgaacagggacacctagagctagatcaggttgctcagagcttggtccagccttaccctgaatgtcttaaaggacagggcatccacctcctctctgagtagcctattccagtgcctcaccacccttattgtatcttccttayatccaatctaaatctccccccttttagtttgaaaccatttccttgtcctgtcacagcagaccctgctaaagaatctgtccccttctttcttacagccttcatttagttgctgaaaggccactctcaggtctcccagagccttctcttctccagaccgaacagccccagctctctcagcctgtcctcataggagaggtgttccatcacttggatcatttttgtggccctcctctggacacactccaacaggtccatgtccagtattgaggactccacagctggatgcaatactccagatg

SEQ ID NO: 3330 - DNA, 600 bp, Chicken  19866894090812_2
catcacttggatcatttttgtggccctcctctggacacactccaacaggtccatgtccagtattgaggactccacagctggatgcaatactccagatgaggcctcacagtgcagagtaaaggggcaggatcacctccctcaccctgctagccacacttgatgtagtccaggatgcagttggcattctgggctgtgagagcacactgctggctcatgtccagtttgtagtccaccgatacccccaggtcctttttggcagggctgtgctctatccttacacccctcagtttgtactgacakcaggggttgccgggatccagatacagaccttgcacttggatttgttgaacctcatgatcttctcatgagcccactgctccagcctgtctagatctctctggatggcatcccatcccccaggtgtgttagctgcaccccacagcttggtatcatccacaaacttgctgagagtgtactcaatcccactgtcaatgtaattgatgaagatgttaaagagcactggtcccaagacagacccatttgggacacgacttgtcactaatctctgtctggacatttagccattaacccctctctggg

SEQ ID NO: 3331 - DNA, 600 bp, Chicken  19866894090813_1
cctgtctagatctctctggatggcatcccatcccccaggtgtgttagctgcaccccacagcttggtatcatccacaaacttgctgagagtgtactcaatcccactgtcaatgtaattgatgaagatgttaaagagcactggtcccaagacagacccatttgggacacgacttgtcactaatctctgtctggacatttagccattaacccctctctgggtacacacttgcaactacttcctcattagggctcttccaaatctttgaacacttcatccattgcctgagagctactgcacacrtcatctgctgctgtggtattggtaacatagrgcccaacttcagaatcaatgaatttttgtacttttgtgcagttgctctgtaaatggtaaaagtaaatatttttttttctggtataaaactgaacagtctatttttgtttctaattcagtctgaaaaatacacgatatgtaagtagcccacgttaatggacttattcaggataacttacatgcatctgatttaaagaattgctagattttacacagaaaatattaccagcctagtggaagtgcagggctgcaaagggctttatcaatttt

SEQ ID NO: 3332 - DNA, 600 bp, Chicken  19866894090813_2
cccccaggtgtgttagctgcaccccacagcttggtatcatccacaaacttgctgagagtgtactcaatcccactgtcaatgtaattgatgaagatgttaaagagcactggtcccaagacagacccatttgggacacgacttgtcactaatctctgtctggacatttagccattaacccctctctgggtacacacttgcaactacttcctcattagggctcttccaaatctttgaacacttcatccattgcctgagagctactgcacacrtcatctgctgctgtggtattggtaacatagrgcccaacttcagaatcaatgaatttttgtacttttgtgcagttgctctgtaaatggtaaaagtaaatatttttttttctggtataaaactgaacagtctatttttgtttctaattcagtctgaaaaatacacgatatgtaagtagcccacgttaatggacttattcaggataacttacatgcatctgatttaaagaattgctagattttacacagaaaatattaccagcctagtggaagtgcagggctgcaaagggctttatcaattttggatcccccagaatcacagaatcacagaatg

SEQ ID NO: 3333 - DNA, 599 bp, Chicken  19866894090817_1
  misc_feature (1)..(68): n is any nucleotide
nnnnnnnnnnnnnnnnnnnnnnnnnnnnnnnnnnnnnnnnnnnnnnnnnnnnnnnnnnnnnnnnnnnnaccttctgctgtacgagaggaaaagaagtgagtgcacatagaaagcatgaggcacagtagtcccactccaacttggagcattacatttttaagccaaaaccttcttctggtatgtcatgctgcgtatgatcaaggtgtgcatttagtaagcaaaacaaaccattgttttgaaagactaaagaagcagctcagcatgctggtagagcacataatgtcatttacaagtctgtcktaaaatctcagttttaattcattagttctttctggagttaaaacagctgcatctatacataatttggacactaggtcagattcttaatgaagaaaattgttttttccaagagtttgatatgtggctattgcagtcacttgatgttctgtacgaaatagtaggaaatggagtgtgtcatcatcaacatcatttgaatgagtccgtatgtttttcatgatgtacaagatctttttaaattaggattattgactatgcaatcaactgcatagaatttgataatgttgttattttagtgattg

SEQ ID NO: 3334 - DNA, 600 bp, Chicken  19866894090818_1
aatgctttggactcagagctcaagggaaccatgtttagtctttaaagaataattggcttttagttcagaaagtaaaaatcctggtcaatgaaatgacattccacacttcggagctttctccattgcacaggcagtgaaacagccgtggtgaatgaaaggtacatggtggcaggatgtgaaaaacagaatacaggggaaaattgaatatgctgaatatgcagaaaatacattttctgcaggtttccaaaaggctttgaattttgtttccatctgcaaagctcagttggagagaaaaaaagkaaaaaaaaaataatccctgttcttttgtaggccagtcrtgcttctccatcccactgaatacaaatggctccctgcccatacatttatgggtaattttgttatcttgtagcaggagttccagtcttagtctttaatctcaatgctcatgggtacatccagcagagagaaggaagaaacagatcagtctcaattagtccttgcatcagtttttraaaactgaaggcacacaatgacggctggctgtgtgctcttggattgcagcccccgtgtctcggcactggtccgctcaggctgcctgta

SEQ ID NO: 3335 - DNA, 600 bp, Chicken  19866894090818_2
atgctttggactcagagctcaagggaaccatgtttagtctttaaagaataattggcttttagttcagaaagtaaaaatcctggtcaatgaaatgacattccacacttcggagctttctccattgcacaggcagtgaaacagccgtggtgaatgaaaggtacatggtggcaggatgtgaaaaacagaatacaggggaaaattgaatatgctgaatatgcagaaaatacattttctgcaggtttccaaaaggctttgaattttgtttccatctgcaaagctcagttggagagaaaaaaagakaaaaaaaaataatccctgttcttttgtaggccagtcrtgcttctccatcccactgaatacaaatggctccctgcccatacatttatgggtaattttgttatcttgtagcaggagttccagtcttagtctttaatctcaatgctcatgggtacatccagcagagagaaggaagaaacagatcagtctcaattagtccttgcatcagtttttraaaactgaaggcacacaatgacggctggctgtgtgctcttggattgcagcccccgtgtctcggcactggtccgctcaggctgcctgtac

SEQ ID NO: 3336 - DNA, 600 bp, Chicken  19866894090818_3
tctttaaagaataattggcttttagttcagaaagtaaaaatcctggtcaatgaaatgacattccacacttcggagctttctccattgcacaggcagtgaaacagccgtggtgaatgaaaggtacatggtggcaggatgtgaaaaacagaatacaggggaaaattgaatatgctgaatatgcagaaaatacattttctgcaggtttccaaaaggctttgaattttgtttccatctgcaaagctcagttggagagaaaaaaagaaaaaaaaaaataatccctgttcttttgtaggccagtcrtgcttctccatcccactgaatacaaatggctccctgcccatacatttatgggtaattttgttatcttgtagcaggagttccagtcttagtctttaatctcaatgctcatgggtacatccagcagagagaaggaagaaacagatcagtctcaattagtccttgcatcagtttttraaaactgaaggcacacaatgacggctggctgtgtgctcttggattgcagcccccgtgtctcggcactggtccgctcaggctgcctgtactcaccaacagttgtgtggttcccctcactgtcatcta

SEQ ID NO: 3337 - DNA, 600 bp, Chicken  19866894090818_4
aatatgcagaaaatacattttctgcaggtttccaaaaggctttgaattttgtttccatctgcaaagctcagttggagagaaaaaaagaaaaaaaaaaataatccctgttcttttgtaggccagtcrtgcttctccatcccactgaatacaaatggctccctgcccatacatttatgggtaattttgttatcttgtagcaggagttccagtcttagtctttaatctcaatgctcatgggtacatccagcagagagaaggaagaaacagatcagtctcaattagtccttgcatcagtttttraaaactgaaggcacacaatgacggctggctgtgtgctcttggattgcagcccccgtgtctcggcactggtccgctcaggctgcctgtactcaccaacagttgtgtggttcccctcactgtcatctacagaatgtgccactaagtgtttcctttcatatacatcgtgataccgtacgatgcatttgctttacgttttgcaaagcctgttttttgtggggaaaatccgtgccttactgttcttaacttgaaagagttggtttgttctgcagaaactattgttcttccattatgggattggat

SEQ ID NO: 3338 - DNA, 600 bp, Chicken  19866894090819_1
attttgaatgggtctggaccagcttgggaagagccataagcacacccagctctcccaaatctttttggccaagcaggggccagcttagccacatgtgctggaaagcttgacatgagggaccagaagttatccttaatttgacatggccaaggctctgtgggatgaaaggaagggcagtaaacaggcagaaatcacgcaccagcgttgcttgccgttctgctcctccttttaagtccctgacacataatcttggtcccgatttggtctccacctcatctggcttgtgtaagctgcttcccrtgacctttcctcggcagagggaaggaggggaagcgatgggggcatgcttatagagccagaccctcctgccagcgggcagagggtgctcttgcctagcatatccctctccctccggatagccggggctgttcccccttcataccagcccttcccacccacccggacccagagatgcccgagcatccccgctggcccagcacgatggatctgcttcattaatattcctgctgaggcgggcgggtggagggagcgctgcatctaacctactttattcaaatagaaaatgtgtgtggtggagtg

SEQ ID NO: 3339 - DNA, 600 bp, Chicken  19866894090822_1
cccttccggtcacacaggtgaattgccttcacctgtgctcccatggcgtgactcagttcttgcctcgggtgaccaatcagagattcaggctgtgattcaacagttcccatacatcgtggaataatttttcaacagttcctatacatcgtggaatattttttcaaaataatttcatattaaatgaacagtataaaactatatttttttaataatcatttcttacagagtattagaaagattatccctataccatcaagttctgtcttccggagtatatacacacctgcttaacctctgtgygtccctgtctttatatttaacttttgcatttaaacaagtggcaaaaccagaaaaggcagacatgctgtaaaggttttctgtgcagagtcccagttcagatgggtgcttaacttctatgcctggcactacctgggatgtacctcactgtaacaaagctcctcgtacagggcagttcctgttcccaccctcccccaaaaattcatctgatttttactatgggtcctgatttacacatcagctccccaaaaggcagtgaggttcacagttttaagaactcatttctgtgctgctggactcaag

SEQ ID NO: 3340 - DNA, 600 bp, Chicken  19866894090823_1
aatagctatcacgtggtgggccaggcaaacaatgtactggttaaacctagaacagcaaaaaacacagtttaatgtggttccagaactgaacacaaggacgtgtctgtctgagaaatacaactgttccttcacctactgtaagtttaaaacaaaagagaaaagcagacttctatttaaggaaaacagacattgtgtcccaggtgaatacggtccaccttcagaaaaggcttggagacaacaaaatgaacaaaattccataaataatcttgacccgagtgctacaaaaaagcctatcttatyctcttcattttacagatgaggaaggggatgaagcagatttgctacaaacttacttggaagggtttgtgtatggcagggagatggcaaacacactggcatactgctctgcagcaaagttcctgtagaggtgaggcagccttgctagagctagaatggttcaagaagaaaaccaacacaggtgagttctgaacatgagctattcaataccagaattcagcttaacttgaattgttttgtttcttctaagtcatcagctgacagagragttaacatcatggttaacatcacagtaatttcaca

SEQ ID NO: 3341 - DNA, 600 bp, Chicken  19866894090823_2
tcttgacccgagtgctacaaaaaagcctatcttatyctcttcattttacagatgaggaaggggatgaagcagatttgctacaaacttacttggaagggtttgtgtatggcagggagatggcaaacacactggcatactgctctgcagcaaagttcctgtagaggtgaggcagccttgctagagctagaatggttcaagaagaaaaccaacacaggtgagttctgaacatgagctattcaataccagaattcagcttaacttgaattgttttgtttcttctaagtcatcagctgacagagragttaacatcatggttaacatcacagtaatttcacactgcttaagttataaacaacaagggagggagaagagctttccatttcccaccactctacarctgcactgtaagcatgtgcaagcatttaaaaagaaaaacagtaacaaatgagataattaaacatttacattttgagaatggtgaaaaggcatcatcaaaagaacaataaactcacagcacgatgcacttgactaatgcaatcaaaacagtcacactcaggtctaaacatttacaaccacaagatgaagcacagaagaacctta

SEQ ID NO: 3342 - DNA, 600 bp, Chicken  19866894090823_3
gtttgtgtatggcagggagatggcaaacacactggcatactgctctgcagcaaagttcctgtagaggtgaggcagccttgctagagctagaatggttcaagaagaaaaccaacacaggtgagttctgaacatgagctattcaataccagaattcagcttaacttgaattgttttgtttcttctaagtcatcagctgacagagragttaacatcatggttaacatcacagtaatttcacactgcttaagttataaacaacaagggagggagaagagctttccatttcccaccactctacarctgcactgtaagcatgtgcaagcatttaaaaagaaaaacagtaacaaatgagataattaaacatttacattttgagaatggtgaaaaggcatcatcaaaagaacaataaactcacagcacgatgcacttgactaatgcaatcaaaacagtcacactcaggtctaaacatttacaaccacaagatgaagcacagaagaaccttacaacttacttgaaagaaattctaagagagggattgccatgttggctgtagcagatatgtgggttaatttgactattaagactggaagtgcctttatg

SEQ ID NO: 3343 - DNA, 600 bp, Chicken  19866894090833_1
acttataaacacttaacactgtttggaatcagatttttcctactagtaagtaataactgtagttgataatgagacagattaatatttttgttctttttttctagactagtcaattgtgatgagactgctcctgccactgctcctgtaaccaccaacgcacatggaactcagaagaccccagggcagacacgaagggattatggattctggtgtccacgacacctacacacttccaatggacaaggctacaaatttctgggcatcgatcagtgtgcaccaccgtgtcccaatatgtacttyaaaaattatgaattggatgttgcaaaaagcttcattggaatagtttcaatcttttgtctttgtgctacacttttcacattccttacttttctgattgatgttaaaaggtttaggtacccagagaggccaatcatatattactctgtctgttacagcatagtgtctctaatgtactttattggatttcttcttgggaatagaactgcctgtaacaaggcagatgataagctagaaattggggaaacggttgttcttggctcccaaaacaaagcctgcacggtccttttcatgggttttgta

SEQ ID NO: 3344 - DNA, 600 bp, Chicken  19866894090833_2
tctctcttctattagctggtattatctctttaaatcatgtgcggcaagtcatacagcacgatggcagaaaccaagagaagctaaagaaatttatgataagaattggagtttttagtggtttatacttagtgccacttgtggcacttcttggatgttatgtctatgaactggtgaacaggaagatctgggaaacaacttgggtgtttgaccactgtgaccagtaccacattccttgtccctaccaggcaagtagcaatttgctttgtaaataatatgggagagttaattagcaaaaacccktatgcatcgctgtatcctgcagtgtagcctggcaaacaatttttgcgttaagtagtcagttcaagaagatgtagcagtaagtttgcttttaagtcaaagttgatggtatcatacttctacttggaaacttttgactgagcaaattgactgcattcagcaagtaagttccaactcaacaacctaaagggaatgtttccacttggtttcacaaataatgctgggggattgtttttcaccrtatctgttcctaagatcagttactcagtgtttggatgcctggctcagtatttcagtacctaa

SEQ ID NO: 3345 - DNA, 600 bp, Chicken  19866894090833_3
ctaccaggcaagtagcaatttgctttgtaaataatatgggagagttaattagcaaaaacccktatgcatcgctgtatcctgcagtgtagcctggcaaacaatttttgcgttaagtagtcagttcaagaagatgtagcagtaagtttgcttttaagtcaaagttgatggtatcatacttctacttggaaacttttgactgagcaaattgactgcattcagcaagtaagttccaactcaacaacctaaagggaatgtttccacttggtttcacaaataatgctgggggattgtttttcaccrtatctgttcctaagatcagttactcagtgtttggatgcctggctcagtatttcagtacctaaggtgaattttcatcaatttctattgaggtggaaaaatgagtcttgaaaattgagtctaggttggattttaaacgttacttgctaccatagatttaaagtcatttcatcttttttctttgaagtgcagaactgtaaaacactggaaattacacatttccaatgtattttttccatgatagccgtcagttgtaggctgatattcagtaacgtagaagaaacttttaaaaacaaaaataca

SEQ ID NO: 3346 - DNA, 600 bp, Chicken  19866894090835_1
catacgtgtaatgtctaaaatgtgtgtgtgatgggaatcaataatatgactaaacatttaagtgaacttaagttgcttaggatcaactatgaagataaaatattaaaagatacacagaaagaaatctgatgttattcagaatcatggaaactagacatttaatctgtggctttttcaccttgtccaggtattctaagagagatctggtgcaattaaagaaatgtgttcagttttcttcaaaactttttcttatgaggaaacgtatgaagcttaacaggctagcacagactagctaaacgmagagcttgaaattacagcctcattttcctccaggatgactattttaataaaactaatagctaatttattttcatatgtacttcaatctaggtcttgctgaatataaagackttcagtctgataactgtgtgtcagaatgactttaaagttgtagttcttgactgtgagtggtagyttgtgtaaaattagaacagctttctctcatgactatttcaggattatagggagctggaaagtagggaattaaattgacttaggcctcagtgggatatatcaattatgccagtagtggcagtttgt

SEQ ID NO: 3347 - DNA, 600 bp, Chicken  19866894090835_2
acacagaaagaaatctgatgttattcagaatcatggaaactagacatttaatctgtggctttttcaccttgtccaggtattctaagagagatctggtgcaattaaagaaatgtgttcagttttcttcaaaactttttcttatgaggaaacgtatgaagcttaacaggctagcacagactagctaaacgmagagcttgaaattacagcctcattttcctccaggatgactattttaataaaactaatagctaatttattttcatatgtacttcaatctaggtcttgctgaatataaagackttcagtctgataactgtgtgtcagaatgactttaaagttgtagttcttgactgtgagtggtagyttgtgtaaaattagaacagctttctctcatgactatttcaggattatagggagctggaaagtagggaattaaattgacttaggcctcagtgggatatatcaattatgccagtagtggcagtttgtaagctgaatacagttgaccagtttgaattgtgaactattaaggtggtcccaagaaacagtaaaagaacagagaaatgcccttctctttcttttttttttttcagaagtaat

SEQ ID NO: 3348 - DNA, 600 bp, Chicken  19866894090835_3
caccttgtccaggtattctaagagagatctggtgcaattaaagaaatgtgttcagttttcttcaaaactttttcttatgaggaaacgtatgaagcttaacaggctagcacagactagctaaacgmagagcttgaaattacagcctcattttcctccaggatgactattttaataaaactaatagctaatttattttcatatgtacttcaatctaggtcttgctgaatataaagackttcagtctgataactgtgtgtcagaatgactttaaagttgtagttcttgactgtgagtggtagyttgtgtaaaattagaacagctttctctcatgactatttcaggattatagggagctggaaagtagggaattaaattgacttaggcctcagtgggatatatcaattatgccagtagtggcagtttgtaagctgaatacagttgaccagtttgaattgtgaactattaaggtggtcccaagaaacagtaaaagaacagagaaatgcccttctctttcttttttttttttcagaagtaataacatctattctccataactgacacggataatatgcatcatgattcaaaaagccaatagatact

SEQ ID NO: 3349 - DNA, 600 bp, Chicken  19866894090839_1
cattaaagctgctaccacgtgacaaaaacccaactaagttttgctgttcatgattttctaggttgtcccagcctctcctcctaagacattacagggtgccattgtctgatacaacatcagtgtgattgagcatgtcctgaaaggattgggtgagatcctgccctctttgcacagggtttttccctctgggtcaagctggaaggtgcacagttgagtaagatcagaaaaatacagtccttttgttttgtatgtaagagacttaatttctttccacatcagcgaaacataacttaaaaaagyaaaawaatcattataaaaattatcagaaagccatatggaaatttgaaaggtactactattttatggtcaaaccagggtctttgagaagttatggttgagtaagttagttagctaactgtaaaccatttgttttacatacagtatatatttttatttgaaaaatgtggaacagcatatagttgtcatgttatttctgcaactaaaattaaagttgtttttttttttttaaatttgcaaaagctcagactgcttttgacatttagaaaaagtgtttagattgttccttctagcaatatactc

SEQ ID NO: 3350 - DNA, 600 bp, Chicken  19866894090839_2
aagctgctaccacgtgacaaaaacccaactaagttttgctgttcatgattttctaggttgtcccagcctctcctcctaagacattacagggtgccattgtctgatacaacatcagtgtgattgagcatgtcctgaaaggattgggtgagatcctgccctctttgcacagggtttttccctctgggtcaagctggaaggtgcacagttgagtaagatcagaaaaatacagtccttttgttttgtatgtaagagacttaatttctttccacatcagcgaaacataacttaaaaaagaaaaawaatcattataaaaattatcagaaagccatatggaaatttgaaaggtactactattttatggtcaaaccagggtctttgagaagttatggttgagtaagttagttagctaactgtaaaccatttgttttacatacagtatatatttttatttgaaaaatgtggaacagcatatagttgtcatgttatttctgcaactaaaattaaagttgtttttttttttttaaatttgcaaaagctcagactgcttttgacatttagaaaaagtgtttagattgttccttctagcaatatactcttgct

SEQ ID NO: 3351 - DNA, 600 bp, Chicken  19866894090842_1
ttcatgtcacagttggttttaaatcctgtctgttacgcagcctggcatttttttagtgcaattacctttcaggaaatagtagtatagctgagcaataagctattagcaatataggcattggtgtacctagaattaaagataaaactgcagtgtatatctggttatttaactgcttgttttatgactcgagattattttaaaagcacaaggtgttctgagctcagtctttgctcagtatgctagtcttttgaggttcttttgaactactgaaggttatgtgtggattttcacaaaagcatrcataaaaatatgtaacctcaagacatatgagcaaattaatttagacaaaatgggacattttatccctggggtaactgcatggcagctggtggcagtaagccagacactgatttggaccatcaaacgttatattgtttatgtagaagttatttctagttggarctggtttaatccagtttggccatcttgaagctcatttgggagagttgttgtctgcagactttgttgagggtcatggtctaccgttcaactccagtaatgttcrggattacagcatttgcgtgggagattttactaact

SEQ ID NO: 3352 - DNA, 600 bp, Chicken  19866894090842_2
tatttaactgcttgttttatgactcgagattattttaaaagcacaaggtgttctgagctcagtctttgctcagtatgctagtcttttgaggttcttttgaactactgaaggttatgtgtggattttcacaaaagcatrcataaaaatatgtaacctcaagacatatgagcaaattaatttagacaaaatgggacattttatccctggggtaactgcatggcagctggtggcagtaagccagacactgatttggaccatcaaacgttatattgtttatgtagaagttatttctagttggarctggtttaatccagtttggccatcttgaagctcatttgggagagttgttgtctgcagactttgttgagggtcatggtctaccgttcaactccagtaatgttcrggattacagcatttgcgtgggagattttactaactggttgagacagctccactgttcttaatgcttgtgaatataaagggatataaatattggggaatatatttttgcagaaataaataagctttaggcacaacaggcacagctataaagtattagctgtcttcataaggaaaatgttcctcattttttacaagtac

SEQ ID NO: 3353 - DNA, 600 bp, Chicken  19866894090842_3
actgaaggttatgtgtggattttcacaaaagcatrcataaaaatatgtaacctcaagacatatgagcaaattaatttagacaaaatgggacattttatccctggggtaactgcatggcagctggtggcagtaagccagacactgatttggaccatcaaacgttatattgtttatgtagaagttatttctagttggarctggtttaatccagtttggccatcttgaagctcatttgggagagttgttgtctgcagactttgttgagggtcatggtctaccgttcaactccagtaatgttcrggattacagcatttgcgtgggagattttactaactggttgagacagctccactgttcttaatgcttgtgaatataaagggatataaatattggggaatatatttttgcagaaataaataagctttaggcacaacaggcacagctataaagtattagctgtcttcataaggaaaatgttcctcattttttacaagtactgtttgtggctgttccagctccctttgaagtcagttttgcctttgatttaagtgggaattctatggggcatagacagttttagtcatcattttttcacatttc

SEQ ID NO: 3354 - DNA, 600 bp, Chicken  19866894090843_1
ttatggattgttagaaaaacagcaaggaaaaacaatattgctagtggacttccctgtctggcccaaggcgtcttggaaatatttacttctccaactacaagttttgaggtgttggagaaaagaaaatggaggttggtggcagcagcaatgttgatcacagaaagcatcttcttcctctgtcctaaaacaaagacatcctgacagtggaactcaccattggtggaaatgcaagattcaggtgttcttaaaagggatataggttgccttggttttaaccaaagcccttagtctgccttttaktaaccagctttctttattctcaaggaaattctttcaatcactgctataaaaattcccaggaaaagaggctaaccagtgtcataccccatttgacttgtgatgctggttctcttgataagccagggatggcaaacttcttcagccatgaagctgaagaatcagttcagatcagaaatagttgtaaaaggttttgtctataatttgatgtgttcaggattgctgaaaaactttaaaatgtattgtcccctacccatgacagttgaactggaaaaagttctaggccttcactacataattagg

SEQ ID NO: 3355 - DNA, 599 bp, Chicken  19866894090851_1
  misc_feature (1)..(251): n is any nucleotide
nnnnnnnnnnnnnnnnnnnnnnnnnnnnnnnnnnnnnnnnnnnnnnnnnnnnnnnnnnnnnnnnnnnnnnnnnnnnnnnnnnnnnnnnnnnnnnnnnnnnnnnnnnnnnnnnnnnnnnnnnnnnnnnnnnnnnnnnnnnnnnnnnnnnnnnnnnnnnnnnnnnnnnnnnnnnnnnnnnnnnnnnnnnnnnnnnnnnnnnnnnnnnnnnnnnnnnnnnnnnnnnnnnnnnnnnnnnnnnnnnnnnnnnnnnnaccaggtgctgttgtcattcctgacctccctgggttgcggcgttggacrtgccctgatccttrgaaaggggtaagagagctgtatttcattatcagaaggtgatctctacttaccttgtcttgtgtccatcaggaggcagtggagagttgtgaccctctcgagtgctgcaaggactctatggaggcatttggtggacgccgcaggaacccacagccagagatggatgccaagatgcactccttcctctgtctggcaagctctgctgacctgtgaggtcgttcccacgcttgcagaggtcctacgggcttggtgttggttgtcgcttgtgctcaccttgctgtcaccgg

SEQ ID NO: 3356 - DNA, 599 bp, Chicken  19866894090851_2
  misc_feature (1)..(237): n is any nucleotide
nnnnnnnnnnnnnnnnnnnnnnnnnnnnnnnnnnnnnnnnnnnnnnnnnnnnnnnnnnnnnnnnnnnnnnnnnnnnnnnnnnnnnnnnnnnnnnnnnnnnnnnnnnnnnnnnnnnnnnnnnnnnnnnnnnnnnnnnnnnnnnnnnnnnnnnnnnnnnnnnnnnnnnnnnnnnnnnnnnnnnnnnnnnnnnnnnnnnnnnnnnnnnnnnnnnnnnnnnnnnnnnnnnnnnnnnnnnnnaccaggtgctgttgtcattcctgacctccctgggttgcggcgttggacrtgccctgatccttrgaaaggggtaagagagctgtatttcattatcagaaggtgatctctacttaccttgtcttgtgtccatcaggaggcagtggagagttgtgaccctctcgagtgctgcaaggactctatggaggcatttggtggacgccgcaggaacccacagccagagatggatgccaagatgcactccttcctctgtctggcaagctctgctgacctgtgaggtcgttcccacgcttgcagaggtcctacgggcttggtgttggttgtcgcttgtgctcaccttgctgtcaccgggtgttcttcctttg

SEQ ID NO: 3357 - DNA, 599 bp, Chicken  19866894090855_1
  misc_feature (1)..(177): n is any nucleotide
nnnnnnnnnnnnnnnnnnnnnnnnnnnnnnnnnnnnnnnnnnnnnnnnnnnnnnnnnnnnnnnnnnnnnnnnnnnnnnnnnnnnnnnnnnnnnnnnnnnnnnnnnnnnnnnnnnnnnnnnnnnnnnnnnnnnnnnnnnnnnnnnnnnnnnnnnnnnnnnnnnnnnnnnnnnnnnnnnccattgcgtggggcttatttgccaaacaagcagtgctacaatcctgctgcgcactgctcggtgcagcagacaaggcttgctctgccaaacaaggcacgctctgcccttagcagctcttacacrgggctgcagatggtggctcttctactttttaaatatttaatttgctccttcctaatgagctactgctaattgtmtctacctgcaaaggtcagtgaagcaaagctgggcaacagacttttggcagccccttgcttccagtgctgtgctcccaagttgtgcattcagtgaaagccaacgggcagaccactgtgtcctgtctgtaacagtggccagaaatggagccctgttcaaggaaagcagagaggagaaactgatgtcctgcagggaactggggaaccaccagcaacctgactgcctgt

SEQ ID NO: 3358 - DNA, 599 bp, Chicken  19866894090855_2
  misc_feature (1)..(103): n is any nucleotide
nnnnnnnnnnnnnnnnnnnnnnnnnnnnnnnnnnnnnnnnnnnnnnnnnnnnnnnnnnnnnnnnnnnnnnnnnnnnnnnnnnnnnnnnnnnnnnnnnnnnnnnccattgcgtggggcttatttgccaaacaagcagtgctacaatcctgctgcgcactgctcggtgcagcagacaaggcttgctctgccaaacaaggcacgctctgcccttagcagctcttacacrgggctgcagatggtggctcttctactttttaaatatttaatttgctccttcctaatgagctactgctaattgtmtctacctgcaaaggtcagtgaagcaaagctgggcaacagacttttggcagccccttgcttccagtgctgtgctcccaagttgtgcattcagtgaaagccaacgggcagaccactgtgtcctgtctgtaacagtggccagaaatggagccctgttcaaggaaagcagagaggagaaactgatgtcctgcagggaactggggaaccaccagcaacctgactgcctgtttgtccaacacacgargggagattggttgctcgtggacctcagggccagcagaactggcacaagtggacaatga

SEQ ID NO: 3359 - DNA, 600 bp, Chicken  19866894090855_3
gctcttctactttttaaatatttaatttgctccttcctaatgagctactgctaattgtmtctacctgcaaaggtcagtgaagcaaagctgggcaacagacttttggcagccccttgcttccagtgctgtgctcccaagttgtgcattcagtgaaagccaacgggcagaccactgtgtcctgtctgtaacagtggccagaaatggagccctgttcaaggaaagcagagaggagaaactgatgtcctgcagggaactggggaaccaccagcaacctgactgcctgtttgtccaacacacgargggagattggttgctcgtggacctcagggccagcagaactggcacaagtggacaatgacgtgacagcagatggagaactttccttcaaaccaatttcagtgccttctaagcartttgatcatttagctttggtgtttaaaaaggagcaatgagcatgtgwcattttccacactgtcccagctcagtaagggctcaataagcacagggcttatggaagcagaagcagctcatgctgagttcagtgagcttcagggaggccctcagaccaaactctgctcactatttttgtttgcagatgca

SEQ ID NO: 3360 - DNA, 600 bp, Chicken  19866894090855_4
ttgcttccagtgctgtgctcccaagttgtgcattcagtgaaagccaacgggcagaccactgtgtcctgtctgtaacagtggccagaaatggagccctgttcaaggaaagcagagaggagaaactgatgtcctgcagggaactggggaaccaccagcaacctgactgcctgtttgtccaacacacgargggagattggttgctcgtggacctcagggccagcagaactggcacaagtggacaatgacgtgacagcagatggagaactttccttcaaaccaatttcagtgccttctaagcartttgatcatttagctttggtgtttaaaaaggagcaatgagcatgtgwcattttccacactgtcccagctcagtaagggctcaataagcacagggcttatggaagcagaagcagctcatgctgagttcagtgagcttcagggaggccctcagaccaaactctgctcactatttttgtttgcagatgcagaaatcccccacagctgatgtacattacgagcattcctggattctctttttgtttcccagttcccgaacactccattccagcattaacacttccgctgcatcttcctgcctcc

SEQ ID NO: 3361 - DNA, 600 bp, Chicken  19866894090855_5
cgggcagaccactgtgtcctgtctgtaacagtggccagaaatggagccctgttcaaggaaagcagagaggagaaactgatgtcctgcagggaactggggaaccaccagcaacctgactgcctgtttgtccaacacacgargggagattggttgctcgtggacctcagggccagcagaactggcacaagtggacaatgacgtgacagcagatggagaactttccttcaaaccaatttcagtgccttctaagcartttgatcatttagctttggtgtttaaaaaggagcaatgagcatgtgwcattttccacactgtcccagctcagtaagggctcaataagcacagggcttatggaagcagaagcagctcatgctgagttcagtgagcttcagggaggccctcagaccaaactctgctcactatttttgtttgcagatgcagaaatcccccacagctgatgtacattacgagcattcctggattctctttttgtttcccagttcccgaacactccattccagcattaacacttccgctgcatcttcctgcctccatgagttcactctagggaaatgacctcccagttagagccaagaatca

SEQ ID NO: 3362 - DNA, 600 bp, Chicken  19866894090857_1
catcctaagttaacttactttatggcttgggatttagacaccctttagttttaacaggaaaatctttgcagtggtaactttaaaggatatgaaacctctgccttgaagagatttcattcagggaatctgtttttcttcctttccacctgttaaaggttattttgctgtctactgcatcctattaatctgtaaatgaagacaaaaaaagacctatcatttatgttgatccaaggtgcctttttttttttttttaagtccattactttcaatttatctgctcaaaaagggaaagttcacttygcctggcatggagcacacagatcactcagcctgtaaaacaaaataagaagctccgaagctcagcttttcttycattctcattagctcttgagtggttagaaggtcatttgagacagaagctcatatgtggattttaaacctcgattagaaaatattgtagtgttaaagttaagcagaagctgagaagagtcagagaaccagctgtgaaacacctcagaatataaattccttggagcagaaaccatttcttattgtataatggtacagcgttagcccaatgggactgaactttgttgacct

SEQ ID NO: 3363 - DNA, 600 bp, Chicken  19866894090857_2
ggtaactttaaaggatatgaaacctctgccttgaagagatttcattcagggaatctgtttttcttcctttccacctgttaaaggttattttgctgtctactgcatcctattaatctgtaaatgaagacaaaaaaagacctatcatttatgttgatccaaggtgcctttttttttttttttaagtccattactttcaatttatctgctcaaaaagggaaagttcacttygcctggcatggagcacacagatcactcagcctgtaaaacaaaataagaagctccgaagctcagcttttcttycattctcattagctcttgagtggttagaaggtcatttgagacagaagctcatatgtggattttaaacctcgattagaaaatattgtagtgttaaagttaagcagaagctgagaagagtcagagaaccagctgtgaaacacctcagaatataaattccttggagcagaaaccatttcttattgtataatggtacagcgttagcccaatgggactgaactttgttgacctctagacattatggtaatacatatggtttcgttaaagtctcaaaatcaggtagactaaactctgcagaacaag

SEQ ID NO: 3364 - DNA, 600 bp, Chicken  19866894090857_3
ttcagagtttagcttccccagctgctgatactgtaaaaatgttgcttggcaacatggtaacagggggaaaaaaatcttcaaaaacattaggagtttttgtccttagaaatgtactagttcagcacatccaacctcctacagatccattttggaggaaaagaggcaaaaagatttcccccccctccccaatgaactagttccagcagcctttaaagcagagcatttaaaatgggacaggagaaggggtgccctgggatgctggaaggtcgcaggcagatccctacatgggactgacaggcragggaatggaaaaaggcactcagcattcacctggtatctcacmcaagatgcctgcagacaaagcaatgttgcaactgcacacggagccattacactttcagagttctgccatcatttaggatgcagttgtacttatctgtcctccacccccaagaaccagatgctcgctagcgctgcctagtggggacacaaccaatctccttgatcaagtggcaacacccaggcagaaaagcagcagatccaagaacttgatgctggcctctgaactgtcacacaatgaggtggtcaccctgmtaatta

SEQ ID NO: 3365 - DNA, 600 bp, Chicken  19866894090857_4
gcttggcaacatggtaacagggggaaaaaaatcttcaaaaacattaggagtttttgtccttagaaatgtactagttcagcacatccaacctcctacagatccattttggaggaaaagaggcaaaaagatttcccccccctccccaatgaactagttccagcagcctttaaagcagagcatttaaaatgggacaggagaaggggtgccctgggatgctggaaggtcgcaggcagatccctacatgggactgacaggcragggaatggaaaaaggcactcagcattcacctggtatctcacmcaagatgcctgcagacaaagcaatgttgcaactgcacacggagccattacactttcagagttctgccatcatttaggatgcagttgtacttatctgtcctccacccccaagaaccagatgctcgctagcgctgcctagtggggacacaaccaatctccttgatcaagtggcaacacccaggcagaaaagcagcagatccaagaacttgatgctggcctctgaactgtcacacaatgaggtggtcaccctgmtaattattgcartgaatccccgcagacatcaatgcttacagcagtttgt

SEQ ID NO: 3366 - DNA, 600 bp, Chicken  19866894090857_5
caggcragggaatggaaaaaggcactcagcattcacctggtatctcacmcaagatgcctgcagacaaagcaatgttgcaactgcacacggagccattacactttcagagttctgccatcatttaggatgcagttgtacttatctgtcctccacccccaagaaccagatgctcgctagcgctgcctagtggggacacaaccaatctccttgatcaagtggcaacacccaggcagaaaagcagcagatccaagaacttgatgctggcctctgaactgtcacacaatgaggtggtcaccctgmtaattattgcartgaatccccgcagacatcaatgcttacagcagtttgtactttaaaaactattctaagtgggtcttgtaaagttcactgtttttctgcccccctcccttgtactgaaattcagtgtcacacttgacctcggcagagctatttctgatttatactgctgaatcatgattacatgcatttactatccacaagccacaatagagccttacatccagataagatgtttttgttcattcaaggaagagtaagtgatataagttcctgcaaacaacacagaacacaagcacyggt

SEQ ID NO: 3367 - DNA, 600 bp, Chicken  19866894090857_6
tggaaaaaggcactcagcattcacctggtatctcacmcaagatgcctgcagacaaagcaatgttgcaactgcacacggagccattacactttcagagttctgccatcatttaggatgcagttgtacttatctgtcctccacccccaagaaccagatgctcgctagcgctgcctagtggggacacaaccaatctccttgatcaagtggcaacacccaggcagaaaagcagcagatccaagaacttgatgctggcctctgaactgtcacacaatgaggtggtcaccctgmtaattattgcartgaatccccgcagacatcaatgcttacagcagtttgtactttaaaaactattctaagtgggtcttgtaaagttcactgtttttctgcccccctcccttgtactgaaattcagtgtcacacttgacctcggcagagctatttctgatttatactgctgaatcatgattacatgcatttactatccacaagccacaatagagccttacatccagataagatgtttttgttcattcaaggaagagtaagtgatataagttcctgcaaacaacacagaacacaagcacyggtgtttttaaagca

SEQ ID NO: 3368 - DNA, 600 bp, Chicken  19866894090857_7
tgmtaattattgcartgaatccccgcagacatcaatgcttacagcagtttgtactttaaaaactattctaagtgggtcttgtaaagttcactgtttttctgcccccctcccttgtactgaaattcagtgtcacacttgacctcggcagagctatttctgatttatactgctgaatcatgattacatgcatttactatccacaagccacaatagagccttacatccagataagatgtttttgttcattcaaggaagagtaagtgatataagttcctgcaaacaacacagaacacaagcacyggtgtttttaaagcaaaatcccaatgggcatctgcctttatctagctagaggtaaaagaattggaacacagagttgttgtggcgacagcacaggcattgtatggcatcctttgtgttgattttaatgctgagattagtaatctagatgatgggtctcaaataagatcagagtgtaaaaaggtgagccaaatttgagttgtacctattgattctcacagtcaaagcagaaatacacaagaaaaaacaaagcaaaggagattctagagtaaatccagtacagcacaacatatgcctgtaagc

SEQ ID NO: 3369 - DNA, 600 bp, Chicken  19866894090861_1
gatgctatccagagagcccagaacaggcttgaaaagtggccccacatgaaccaaatgaggttcagtaaggacaggttcaaggtgttacacttgggtcagggcaatcacaggcaggtgtacagactgggggaagaactcatggtgagcagccctgcaaagaaggactttggggtcctgatggacaaaatgctggacatgaggcaacgtttgctcttgctacctgggaggtcaatacctgggctgcattgaaagaggggtagcagcagaatgagggaggggttgtccccctctgctctgccyttgtttggccccatcttgagtactgcatccaggcctgggacctggagaagaaggatgtagagctgttagagccagtytggagggccacaaaaataaccagagatctggaacacctytcctatgaagaaagtttgagagagctgggcttgttaatcctggaaaagagaaagctctggggacacctcatttcagccttccagtttttgaagggagcttatgaggagcaggactaactttttacatggcctcatagtgataggacgagagggaattgctttaaacttaaagagggaagattta

SEQ ID NO: 3370 - DNA, 600 bp, Chicken  19866894090861_2
caaggtgttacacttgggtcagggcaatcacaggcaggtgtacagactgggggaagaactcatggtgagcagccctgcaaagaaggactttggggtcctgatggacaaaatgctggacatgaggcaacgtttgctcttgctacctgggaggtcaatacctgggctgcattgaaagaggggtagcagcagaatgagggaggggttgtccccctctgctctgccyttgtttggccccatcttgagtactgcatccaggcctgggacctggagaagaaggatgtagagctgttagagccagtytggagggccacaaaaataaccagagatctggaacacctytcctatgaagaaagtttgagagagctgggcttgttaatcctggaaaagagaaagctctggggacacctcatttcagccttccagtttttgaagggagcttatgaggagcaggactaactttttacatggcctcatagtgataggacgagagggaattgctttaaacttaaagagggaagatttagattaggtataatgaagaaatggcactgctgcccagagagctgtgggtgccccatccctggaggtgcccaaggccgg

SEQ ID NO: 3371 - DNA, 600 bp, Chicken  19866894090861_3
gtacagactgggggaagaactcatggtgagcagccctgcaaagaaggactttggggtcctgatggacaaaatgctggacatgaggcaacgtttgctcttgctacctgggaggtcaatacctgggctgcattgaaagaggggtagcagcagaatgagggaggggttgtccccctctgctctgccyttgtttggccccatcttgagtactgcatccaggcctgggacctggagaagaaggatgtagagctgttagagccagtytggagggccacaaaaataaccagagatctggaacacctytcctatgaagaaagtttgagagagctgggcttgttaatcctggaaaagagaaagctctggggacacctcatttcagccttccagtttttgaagggagcttatgaggagcaggactaactttttacatggcctcatagtgataggacgagagggaattgctttaaacttaaagagggaagatttagattaggtataatgaagaaatggcactgctgcccagagagctgtgggtgccccatccctggaggtgcccaaggccgggcagctggatggggccctgggcagcctgaactggtggga

SEQ ID NO: 3372 - DNA, 599 bp, Chicken  19866894090863_1
  misc_feature (1)..(4): n is any nucleotide
nnnncagtgaatgacaaagggacgcagatcaagagtaaatcagttccagattttagaagtagtaatgtctcttttaacagctgctgaaattactaacataaacaaaaagccacctctgacacgctttggtgcatatagcactaaaacctgataaatcaaatacaccacagcagtcaatgttccatgtcactctttccagcacaaccaggctaaattacatgaggaaagggaaagctttttgaaatatatatatatatatatatgaaagtaggcaactccaaaaaggcagagttaccaggrttgctcaggagcctgtgccacaagcccaascaccatgcagaacagtcactgcagtgtccactctggaaggaagcaggagccctcctgcccagcatcccactgcttcacctgctcctgtgcttcctttctcacatgccagccttctattttcaaactacattacctgaaaataaatcataccaggggaaagagaaaaaaaaaaaaaragagagagaaaagaaggagcactattttagtttagttgtggctttgcagggggcaggaacaggaagagcatccatatgttattgctccagttt

SEQ ID NO: 3373 - DNA, 600 bp, Chicken  19866894090863_2
aagagtaaatcagttccagattttagaagtagtaatgtctcttttaacagctgctgaaattactaacataaacaaaaagccacctctgacacgctttggtgcatatagcactaaaacctgataaatcaaatacaccacagcagtcaatgttccatgtcactctttccagcacaaccaggctaaattacatgaggaaagggaaagctttttgaaatatatatatatatatatatgaaagtaggcaactccaaaaaggcagagttaccaggrttgctcaggagcctgtgccacaagcccaascaccatgcagaacagtcactgcagtgtccactctggaaggaagcaggagccctcctgcccagcatcccactgcttcacctgctcctgtgcttcctttctcacatgccagccttctattttcaaactacattacctgaaaataaatcataccaggggaaagagaaaaaaaaaaaaaragagagagaaaagaaggagcactattttagtttagttgtggctttgcagggggcaggaacaggaagagcatccatatgttattgctccagttttctcaggctgagctttgtaaagatgctaaat

SEQ ID NO: 3374 - DNA, 600 bp, Chicken  19866894090863_3
aggctaaattacatgaggaaagggaaagctttttgaaatatatatatatatatatatgaaagtaggcaactccaaaaaggcagagttaccaggrttgctcaggagcctgtgccacaagcccaascaccatgcagaacagtcactgcagtgtccactctggaaggaagcaggagccctcctgcccagcatcccactgcttcacctgctcctgtgcttcctttctcacatgccagccttctattttcaaactacattacctgaaaataaatcataccaggggaaagagaaaaaaaaaaaaaragagagagaaaagaaggagcactattttagtttagttgtggctttgcagggggcaggaacaggaagagcatccatatgttattgctccagttttctcaggctgagctttgtaaagatgctaaatgcaaatgctcgcatttaagaatagggctaatttttaacacttagagttgtgtaagagacacgctacttttccttgcatgtctgtggtaaaaacactgtgtatttgaatatacaggtatacagtttaatctgctgcatttcaaatagtgtcacttgaatcacccccaaatagttctg

SEQ ID NO: 3375 - DNA, 600 bp, Chicken  19866894090863_4
catccatatgttattgctccagttttctcaggctgagctttgtaaagatgctaaatgcaaatgctcgcatttaagaatagggctaatttttaacacttagagttgtgtaagagacacgctacttttccttgcatgtctgtggtaaaaacactgtgtatttgaatatacaggtatacagtttaatctgctgcatttcaaatagtgtcacttgaatcacccccaaatagttctgagcagtgacattaaggtacattgtcttttagtagtaccatgtgttattgaaattccaatgccaaagayaactactggagaagtttaaaatgttgcaaatgtccataacttcacatttaccagggaagcttttgctgtttgtaattacagcccaaaagctttgcaatttcaagcttggcaccagcttccgaagccaaagaaggcggtttgactctgaacgcagacaaggaatgggtgttaccttgtctaaaaaacagcacaaatgaccagaaatgttgagtgatatgacgctgaacaaactcaacagctgtttctaaagtcacagggccaagatttctaattctctgtatccaaatgaaggttattcca

SEQ ID NO: 3376 - DNA, 600 bp, Chicken  19866894090885_1
acaatttctgcaaacaggagaccaaagtaagatctcttatgtcccaccgtaagtcagaaaagtccacgggagtcacgggaatggtaaatgccatgaaggatcaggcctaatacatgcattagagaagcaagacagctcctttgctcgagatctggccgattcactttgcacataccacttctttagcattacatccttatctaatggtagacctgtttcaacaacatgcaatacatattaatgcaatatgcactgcaacacatgatacgcatccaaagaaataggccaatgcaaaaatcygacttctcaaacatcgcagggctaacaaggaagtcttttacaaaagacaatcaagaaatcacctgaaaccatgagacccagagggccttgagcaatctgcaatactggtacctaataacagatgctaattcatgaaagaaacacaaacagtgggactgaggtaatggcagagatttcattagtgcaattaacatttataatggtatgttctttaatagaatttaaataaggctttgaataattacacacactaaaactaacattccataaccttattccacatgggaaagcagcagaaac

SEQ ID NO: 3377 - DNA, 600 bp, Chicken  19866894090889_1
gctgctggctggcagtagtgttgtcagacgtctgccagtcaggcccacgtggtgcagctgttacacagctctctggggatagcttccccaagctgtggtgtggataacaacttcaattccctgtctgggagtgaggtcaaagtaggaagcggttccagacagctgtttctccagcagcttccagacacctcaacagcctgaaaaatgtgtggctttttcattgtagttttagagccagtatttcagtatgagcacaacatttagtgcaaactataaggtctcaactcttgaaagggatcrggctgggaatttcctagcatttaagaaacctctgtgtgacatttgaagtagcacatcgtgyattagcctgcaaactgctttaaaatgcagagccacgttctttgtgtccgactcgtatcaggtggttaagtgaaaacgttctgcctgcccacgtgttgtctttaggtcctcgtggttatggcagaacgtggtcttgtcagtcggtgatgcaattctctgagctgtagtttggtaggctgagttaatcagcgtgcttaacaagaatgttcttcattccagaaccatcttaaggacattctg

SEQ ID NO: 3378 - DNA, 600 bp, Chicken  19866894090889_10
tttgggctgtgtgttaagtcaagtagaactgtattcttggaacaaatgaagatttctgtaccctgctacaccatttcaaagtggtgtaacagacctgttctgtgctgggaggtcacagctccccttgtgtgtgacagcctgtgttcctgctctgcagggctggctctgatcatcctgcaggttcttccatgggcagtgtggggaaatgagcatgaaagcgtgaaactttttctcacttgcctctaggtacacaaggaagttattcctgcacacaccgtctacgccctcaacattgagagrattgtcatgaaactctggcatccaaaccatgaggagctgcagcaggataagatccaccgccagcatctggcagcaaaggagggccttctactctgctagagcctggcagctgtgtcaggcctatcgctgctgtgctattccttggacttggtgctgggatgctgcttaaaatcccgtgtctatgcttcaaggaagacgtaagttaggagtcagcttttcctatggaaatactactgaggtaatgtaagtggtacactttctctgcttcccaagagtcatgtgccatggagtgcttgcagc

SEQ ID NO: 3379 - DNA, 600 bp, Chicken  19866894090889_2
tacacagctctctggggatagcttccccaagctgtggtgtggataacaacttcaattccctgtctgggagtgaggtcaaagtaggaagcggttccagacagctgtttctccagcagcttccagacacctcaacagcctgaaaaatgtgtggctttttcattgtagttttagagccagtatttcagtatgagcacaacatttagtgcaaactataaggtctcaactcttgaaagggatcrggctgggaatttcctagcatttaagaaacctctgtgtgacatttgaagtagcacatcgtgyattagcctgcaaactgctttaaaatgcagagccacgttctttgtgtccgactcgtatcaggtggttaagtgaaaacgttctgcctgcccacgtgttgtctttaggtcctcgtggttatggcagaacgtggtcttgtcagtcggtgatgcaattctctgagctgtagtttggtaggctgagttaatcagcgtgcttaacaagaatgttcttcattccagaaccatcttaaggacattctgacatctgtaatatccagacgaaaagcctatcggctgagagatggccacttcaaatacgcct

SEQ ID NO: 3380 - DNA, 600 bp, Chicken  19866894090889_3
aagaacagtgtcgttgcttacaacaatttgattgagtggtaaggagcttttagcacactgttagtttcaaatgcaatttgctagtcctgatgttactctgtccttcggttttaattctcacttagtgggatctgttaatggtgttcagctttcatgcacagtgaaagcagcagggtgctgtatgctgaacagggaggaaggatgtggggatttttcagcagcagagttcaggacaatgttaagtctctctcccttgctaccttatcagtttatcaaggtgacccctggccctctgaatgytagtagttattgcttggagcaagtgacatgggagttctggtctcagggaagaggcccctgggcagaggagcagtactgttgcttacagcartttaattgagtggtaaggagctttcagcacgctgttaatttcaaatgtaatttgctagtcctgaagttactcagttcagtttttcttctgactgagtggaatctgctaactgtttagctttcacacactatgaaagcagcagggcagagctttgggtactgctgttgtgccataaggctgagatgcaggtaaggacctctgaggtgctg

SEQ ID NO: 3381 - DNA, 600 bp, Chicken  19866894090889_4
gttactctgtccttcggttttaattctcacttagtgggatctgttaatggtgttcagctttcatgcacagtgaaagcagcagggtgctgtatgctgaacagggaggaaggatgtggggatttttcagcagcagagttcaggacaatgttaagtctctctcccttgctaccttatcagtttatcaaggtgacccctggccctctgaatgytagtagttattgcttggagcaagtgacatgggagttctggtctcagggaagaggcccctgggcagaggagcagtactgttgcttacagcartttaattgagtggtaaggagctttcagcacgctgttaatttcaaatgtaatttgctagtcctgaagttactcagttcagtttttcttctgactgagtggaatctgctaactgtttagctttcacacactatgaaagcagcagggcagagctttgggtactgctgttgtgccataaggctgagatgcaggtaaggacctctgaggtgctgcagtctgtcatttcttgtgtcygcatgtattaatggtttccctgtgggtcttttgacttgcagagcttcaagctygtstggttttgcagag

SEQ ID NO: 3382 - DNA, 600 bp, Chicken  19866894090889_5
gtgacatgggagttctggtctcagggaagaggcccctgggcagaggagcagtactgttgcttacagcartttaattgagtggtaaggagctttcagcacgctgttaatttcaaatgtaatttgctagtcctgaagttactcagttcagtttttcttctgactgagtggaatctgctaactgtttagctttcacacactatgaaagcagcagggcagagctttgggtactgctgttgtgccataaggctgagatgcaggtaaggacctctgaggtgctgcagtctgtcatttcttgtgtcygcatgtattaatggtttccctgtgggtcttttgacttgcagagcttcaagctygtstggttttgcagagtctcagtgtcaaacagcatatgctctgtgtcaggcagtgtgtgtgtatggtgaggcagttgtttgtccatgacagagcttctagcatttgacaggaggtcgtgggtgttttaaggtttggttatggtaccacaagtggaatccattccaaacaactctgcctaacagctaatgtctctcaattgagtgaattgaatgttgtgggtgcattaatttttttagggtgggtgga

SEQ ID NO: 3383 - DNA, 600 bp, Chicken  19866894090889_6
ctgttgcttacagcartttaattgagtggtaaggagctttcagcacgctgttaatttcaaatgtaatttgctagtcctgaagttactcagttcagtttttcttctgactgagtggaatctgctaactgtttagctttcacacactatgaaagcagcagggcagagctttgggtactgctgttgtgccataaggctgagatgcaggtaaggacctctgaggtgctgcagtctgtcatttcttgtgtcygcatgtattaatggtttccctgtgggtcttttgacttgcagagcttcaagctygtstggttttgcagagtctcagtgtcaaacagcatatgctctgtgtcaggcagtgtgtgtgtatggtgaggcagttgtttgtccatgacagagcttctagcatttgacaggaggtcgtgggtgttttaaggtttggttatggtaccacaagtggaatccattccaaacaactctgcctaacagctaatgtctctcaattgagtgaattgaatgttgtgggtgcattaatttttttagggtgggtggaaactattggttgcgaataacaaagggttaccaactcacattaaagtacaaaac

SEQ ID NO: 3384 - DNA, 600 bp, Chicken  19866894090889_7
ttgcttacagcartttaattgagtggtaaggagctttcagcacgctgttaatttcaaatgtaatttgctagtcctgaagttactcagttcagtttttcttctgactgagtggaatctgctaactgtttagctttcacacactatgaaagcagcagggcagagctttgggtactgctgttgtgccataaggctgagatgcaggtaaggacctctgaggtgctgcagtctgtcatttcttgtgtcygcatgtattaatggtttccctgtgggtcttttgacttgcagagcttcaagctygtstggttttgcagagtctcagtgtcaaacagcatatgctctgtgtcaggcagtgtgtgtgtatggtgaggcagttgtttgtccatgacagagcttctagcatttgacaggaggtcgtgggtgttttaaggtttggttatggtaccacaagtggaatccattccaaacaactctgcctaacagctaatgtctctcaattgagtgaattgaatgttgtgggtgcattaatttttttagggtgggtggaaactattggttgcgaataacaaagggttaccaactcacattaaagtacaaaacagg

SEQ ID NO: 3385 - DNA, 600 bp, Chicken  19866894090889_8
ctaccactcttgggtttggtttatgtgcacagagaggggtttgatttcatcttcccacagtcagtttccttctttccctctcaaacttagttatttggctttgacttgctcccactattaggggacaggtaacacggtcaactcatggtttaatgcctgttctgtcccccttgatcagagagttgataaggaaatccctctctctgcataagaacgcttcctcttttgacagcagtgcagcagtgacctgcctggcatgcctgtttttgctctatgttccacatgggtgtttagaagaayactttatcgtggcgtgtgggctgttgcagtgggttacctgtgactgcctcagccctggggaggcttctgaggccctgtgggtgaattttcctctggagatgcctgtctgtgggtccccctctggcagcgctgaggcccagcagcatttgaatgctggagctacctgtgagaaagtccacccccctcttctcccaccttgttcttgactgctgtgmgcaggccttgtggttttttatctcaaggctgtagaggcagaattttaagaactgcaattgagcatttgggctgtgtgttaagtca

SEQ ID NO: 3386 - DNA, 600 bp, Chicken  19866894090889_9
gcttcctcttttgacagcagtgcagcagtgacctgcctggcatgcctgtttttgctctatgttccacatgggtgtttagaagaayactttatcgtggcgtgtgggctgttgcagtgggttacctgtgactgcctcagccctggggaggcttctgaggccctgtgggtgaattttcctctggagatgcctgtctgtgggtccccctctggcagcgctgaggcccagcagcatttgaatgctggagctacctgtgagaaagtccacccccctcttctcccaccttgttcttgactgctgtgmgcaggccttgtggttttttatctcaaggctgtagaggcagaattttaagaactgcaattgagcatttgggctgtgtgttaagtcaagtagaactgtattcttggaacaaatgaagatttctgtaccctgctacaccatttcaaagtggtgtaacagacctgttctgtgctgggaggtcacagctccccttgtgtgtgacagcctgtgttcctgctctgcagggctggctctgatcatcctgcaggttcttccatgggcagtgtggggaaatgagcatgaaagcgtgaaactttttctcac

SEQ ID NO: 3387 - DNA, 600 bp, Chicken  19866894090894_1
gcagtttatcagttcagtgaccctgtttatgatgtcagccacaagctgttggtacgccagagatgagtaagcactggcatgcaacagcaaatgccaccaaggctcaaaggtcgtggaacttgactaggacattccagcagagaatggattaacatattaaatttgcattgtgaagggaggtcgtgcaactgtgtgccatgagattattctgctgtgactcatcctgcacaagcagaagctcctttgtgttgaggaatctgtattaaaagacaccaaggaatatactgtaagagatgcaawggaagtaattttcatttgaattgaggcagtcttataaaagaattgtactttttgaaatatacggatcacttaaattgttgttaaaattgaatgacagtctgtattatttgcattaccttatattttttggtaataaaatgattcatcttgttacatacagtgatttcagtggtgatggaaacttttttttgccaacagttctaatgatgcagtgggatccatgattactgatcatatatgactgcttaagaaactgagtgttaaagctatccagcttaattaccaaatccatctctttct

SEQ ID NO: 3388 - DNA, 599 bp, Chicken  19866894090899_1
  misc_feature (1)..(16): n is any nucleotide
nnnnnnnnnnnnnnnnagtgctggatctcaatttgtttacatatcaggataagctgtgtattcatttctttctttctttcttctcactgtttcatgtttacatggtaaggttttggcagaagcatggctacagagctgctccccatgggcagagctgacgaggtgcaccatgtcaagaagagaggcaattcaaaccaactccaaaagagacccactgctggccacagctgagccattgagtgacactagttggtttaagaaagggaaaaatctgctgagcagcagcagctgggagaaggwagtgagaaaatatgagagaaatgttcctgcagccaccaaggtcagtgtaggaggtcaagaggtaccccaagtgtggaacagaagtttcctgaagcccagaagggacctatggtggagcaggttgtccccctgcagaccacaggcatcacaaggagcagatttctatgtacagccatggaagagcccagcgtgctcttagaggacagggactaagatgaaagtggatgatttggtagctgaaaacccaacattttaaatgaattgtctaaagcaagttaaatatgaagaactcctttgtg

SEQ ID NO: 3389 - DNA, 600 bp, Chicken  19866894090902_1
tgttagttgcagggctatgtgttgcaaccatgatgagcaaaccaatgccaccccagctgtgtaacttcactgtgcagctcaggagcagttatgacccagatccaatccctgcctcagtgctcagctgctgaactccttcccacactgctgagtgtagtctgatccccctgtacctgccatagcactggttgttccagttctgcatctccccaggtgtgcataaatctcagactggagtggaaaaggatggctcctctttgaatttagctgtgctggggaggagttgctttcttccttgcyagcagcatggtttgcaaagctctactttggtaagaaaccacaccaacttgtttccatgcctgtgggttaggcagcagcacatgagaagccagcacagcaggaggtggaactgtgcagtggggccagctgaggccagcatctcccagtagcagagcaccgtgccttcccttcagctggggtggggggcacatcatccagcacgatgcggggagcattgggaggatcacaggagatctgagagcatggatgagcgcagactttttgctaaaatcaaagcctaattcctacaaagctcatgtc

SEQ ID NO: 3390 - DNA, 600 bp, Chicken  19866894090903_1
ccagaggttttgctttcaaagtgtgcttggtcaaaaacaaactaaacccaaatcaaaacactccacaagtcttgaaaataaataactttgcattagttttctatgttccaaaagttttttcttagtacagaaaggacactgaggttctggagcaggtccaaagaagggcaacaaggcttgtggacagcttggagaatacgccctacgaggagagactgaaggaactggggctgtttagtctggggaaaagaaggctgaagggagaccttattgctctcttcaattatgtgaaaggtgatygcagtgagagtggggctggtctcttctcattggtgacaggtgacaggatgaggggaaaatggccccaagytgcaccaggggaagtttaagttggaaatcacttctttacagaaagggtggttaagcactggaataggctccccaagaaggtggttgaatcaccatccctggatgttttaaaaaccatttggatgtggtgctcagggccatgatttagcggagggttgttagagttagggtagtatggttgggttgtggttggacttgatgatctttaaggtcttttccaacctgagcaat

SEQ ID NO: 3391 - DNA, 600 bp, Chicken  19866894090903_2
cttgaaaataaataactttgcattagttttctatgttccaaaagttttttcttagtacagaaaggacactgaggttctggagcaggtccaaagaagggcaacaaggcttgtggacagcttggagaatacgccctacgaggagagactgaaggaactggggctgtttagtctggggaaaagaaggctgaagggagaccttattgctctcttcaattatgtgaaaggtgatygcagtgagagtggggctggtctcttctcattggtgacaggtgacaggatgaggggaaaatggccccaagytgcaccaggggaagtttaagttggaaatcacttctttacagaaagggtggttaagcactggaataggctccccaagaaggtggttgaatcaccatccctggatgttttaaaaaccatttggatgtggtgctcagggccatgatttagcggagggttgttagagttagggtagtatggttgggttgtggttggacttgatgatctttaaggtcttttccaacctgagcaattctatgattgtatgattctaaagggcttgccagtagggtctgtgaatgaaggagaagaccccaccaagtg

SEQ ID NO: 3392 - DNA, 600 bp, Chicken  19866894090903_3
agagttagggtagtatggttgggttgtggttggacttgatgatctttaaggtcttttccaacctgagcaattctatgattgtatgattctaaagggcttgccagtagggtctgtgaatgaaggagaagaccccaccaagtgggttgcagtctcatgtgcccctccacccccagcctgcatacagacgtcatgagtttgacatgtcccgtttgatttaacccacttgtttctctgggatttttataatgctttccattttcactgatgataaaattacaatcagaatatatgtttataaayattaagagaaactttttttcaggatatgcgaaattgagtttgcatttatatgaaaagctttcacaaacggtgccataaggtctctgtattttttgtacttgagctttgttgcttgagcatggatggcacatacacagaggtgctcttccagaggacgtagggccataatacaargaaaaccaccacagacagacagatgagtcccagctctgacactgcctttctcattgtgaggctatgatgaaaactggggcctcctgccaacacgttcttccatccacctttgtttctgctcgtgct

SEQ ID NO: 3393 - DNA, 600 bp, Chicken  19866894090903_4
ctgcatacagacgtcatgagtttgacatgtcccgtttgatttaacccacttgtttctctgggatttttataatgctttccattttcactgatgataaaattacaatcagaatatatgtttataaayattaagagaaactttttttcaggatatgcgaaattgagtttgcatttatatgaaaagctttcacaaacggtgccataaggtctctgtattttttgtacttgagctttgttgcttgagcatggatggcacatacacagaggtgctcttccagaggacgtagggccataatacaargaaaaccaccacagacagacagatgagtcccagctctgacactgcctttctcattgtgaggctatgatgaaaactggggcctcctgccaacacgttcttccatccacctttgtttctgctcgtgctacgcatcagggaggaaatgaactcttggataaagtcactctgctgaagggcccacaagggtggggagagcgtggctctaaataaatgccagctatgatctcactcttgagtatctactgaatgcagacgaatgagaaaggagcaagcacacatgtcaggagacatattttctct

SEQ ID NO: 3394 - DNA, 600 bp, Chicken  19866894090907_1
tgttagcagaaaaggagaaacaaaaccagtaacgcaagctctagaaaaccagcagatagaacaacccagagacagataagctggaatcctttccaatgaagaagcttcctctacaagcagcatccattttatgaagaagagaagacctgttttgctgaacctatccttttcagccaagacataacagcacattcattttcactactcttctgtacaaacctgccatcgcactgaaataaagttttaagtaaggttacaaacatatattattttcttctcattcttcaaacttagctctayrtgcatccrtggaactgttcaagaaacagtgaagactattccacttaatgaggaaaattacttaaattgcaggttattagaaactcagatgatacttattttgccaaaaatgcctgccacactgcagagatctagcacagtccccatcagaactgcttttcctctataataaaactagaaactatgtattacaaaacgatagtcacagatgacaaatattaacatcagaaaaaaaatctattcagctcaaattaacacatttttataaatcaaagcagaatttagcccttgctttctttc

SEQ ID NO: 3395 - DNA, 600 bp, Chicken  19866894090907_2
gttagcagaaaaggagaaacaaaaccagtaacgcaagctctagaaaaccagcagatagaacaacccagagacagataagctggaatcctttccaatgaagaagcttcctctacaagcagcatccattttatgaagaagagaagacctgttttgctgaacctatccttttcagccaagacataacagcacattcattttcactactcttctgtacaaacctgccatcgcactgaaataaagttttaagtaaggttacaaacatatattattttcttctcattcttcaaacttagctctayrtgcatccrtggaactgttcaagaaacagtgaagactattccacttaatgaggaaaattacttaaattgcaggttattagaaactcagatgatacttattttgccaaaaatgcctgccacactgcagagatctagcacagtccccatcagaactgcttttcctctataataaaactagaaactatgtattacaaaacgatagtcacagatgacaaatattaacatcagaaaaaaaatctattcagctcaaattaacacatttttataaatcaaagcagaatttagcccttgctttctttcc

SEQ ID NO: 3396 - DNA, 600 bp, Chicken  19866894090907_3
aaaaggagaaacaaaaccagtaacgcaagctctagaaaaccagcagatagaacaacccagagacagataagctggaatcctttccaatgaagaagcttcctctacaagcagcatccattttatgaagaagagaagacctgttttgctgaacctatccttttcagccaagacataacagcacattcattttcactactcttctgtacaaacctgccatcgcactgaaataaagttttaagtaaggttacaaacatatattattttcttctcattcttcaaacttagctctayrtgcatccrtggaactgttcaagaaacagtgaagactattccacttaatgaggaaaattacttaaattgcaggttattagaaactcagatgatacttattttgccaaaaatgcctgccacactgcagagatctagcacagtccccatcagaactgcttttcctctataataaaactagaaactatgtattacaaaacgatagtcacagatgacaaatattaacatcagaaaaaaaatctattcagctcaaattaacacatttttataaatcaaagcagaatttagcccttgctttctttcctgttacag

SEQ ID NO: 3397 - DNA, 600 bp, Chicken  19866894090908_1
tggtcttccgtaacgtcaacattcataaaacattttatctactactacaactgttctaaaattttttttctccaactgttctaaaaatataagtgttactcatttctctgaagtcccttcaattgtttattggtaagcattgtctggaaaggaaggaagtgtaaggagatggcaagagtaaatcaatattttattgcagtgaaatgcttgtgctattccagatagtcagttttacttataacctcctcaacttcagtgctatccattgcagtcgctccagaatgaaagactgcctcatcyctgctgctagtttcttgtggtggagcgcggatgaaaaaaaacaggcagatatttcrtttcattttctgactgaatgttttgaaagtgagaagctgggccccctttcccagagcagtaggtaaggcatgctaactttctgctcttcttccatttgcagaaataatgcctgcctcagacataatatstcaggagttctgaggacaggttgctttaggccttgcaagttttatgggtcttctcatctaagctgctgaggagacttttgaaaatggaccttcagatgattcatacacagtaaat

SEQ ID NO: 3398 - DNA, 600 bp, Chicken  19866894090908_2
taaaattttttttctccaactgttctaaaaatataagtgttactcatttctctgaagtcccttcaattgtttattggtaagcattgtctggaaaggaaggaagtgtaaggagatggcaagagtaaatcaatattttattgcagtgaaatgcttgtgctattccagatagtcagttttacttataacctcctcaacttcagtgctatccattgcagtcgctccagaatgaaagactgcctcatcyctgctgctagtttcttgtggtggagcgcggatgaaaaaaaacaggcagatatttcrtttcattttctgactgaatgttttgaaagtgagaagctgggccccctttcccagagcagtaggtaaggcatgctaactttctgctcttcttccatttgcagaaataatgcctgcctcagacataatatstcaggagttctgaggacaggttgctttaggccttgcaagttttatgggtcttctcatctaagctgctgaggagacttttgaaaatggaccttcagatgattcatacacagtaaatctcttcagaaccttgccagtgtttttaaaacagcataaawggagtacagggaaaag

SEQ ID NO: 3399 - DNA, 600 bp, Chicken  19866894090908_3
atattttattgcagtgaaatgcttgtgctattccagatagtcagttttacttataacctcctcaacttcagtgctatccattgcagtcgctccagaatgaaagactgcctcatcyctgctgctagtttcttgtggtggagcgcggatgaaaaaaaacaggcagatatttcrtttcattttctgactgaatgttttgaaagtgagaagctgggccccctttcccagagcagtaggtaaggcatgctaactttctgctcttcttccatttgcagaaataatgcctgcctcagacataatatstcaggagttctgaggacaggttgctttaggccttgcaagttttatgggtcttctcatctaagctgctgaggagacttttgaaaatggaccttcagatgattcatacacagtaaatctcttcagaaccttgccagtgtttttaaaacagcataaawggagtacagggaaaagtggtggatgttggtgagggaggctaccctaattcctctgcaaataactcatctcccttgcagaagtccatgggaggtattagtattagcagatgctgagcatgttcccattgctactaatatcagtgca

SEQ ID NO: 3400 - DNA, 600 bp, Chicken  19866894090908_4
acaggcagatatttcrtttcattttctgactgaatgttttgaaagtgagaagctgggccccctttcccagagcagtaggtaaggcatgctaactttctgctcttcttccatttgcagaaataatgcctgcctcagacataatatstcaggagttctgaggacaggttgctttaggccttgcaagttttatgggtcttctcatctaagctgctgaggagacttttgaaaatggaccttcagatgattcatacacagtaaatctcttcagaaccttgccagtgtttttaaaacagcataaawggagtacagggaaaagtggtggatgttggtgagggaggctaccctaattcctctgcaaataactcatctcccttgcagaagtccatgggaggtattagtattagcagatgctgagcatgttcccattgctactaatatcagtgcatatttgttagctttaagaaaattccttagatatagatgttgacaatcatagctattagaaatacgttgctaaacatgaacaggagcaagtaccttaatacttagatggtgtttgaataataataataaaaaaaatagttcctcaaaagaccaagt

SEQ ID NO: 3401 - DNA, 600 bp, Chicken  19866894090911_1
gattttctggaagtatagcttcaatagtagttctacatttttgtcctaatgagaaactaattttgtgaggatttatttttacaagtaactcaattaaaaataatccaaagcaattctatagaggatgatttacactactttaattcacatatgcatgacatgaattcagaatgaaagtgttctttaccttcggtactttacttaattcatcagtgaacaatgatactaggaatactagtaaggaggcatagagaagtctgagttattccaaccttactccaaatttacaagtgactactrccagaaactgcataatcatatttatgtgatactatgtctgagttaactgtacttgtcccatmtctgtccaattcaacatgtagagaaaagaacttcaagtactccagaaagctaaggacaattaagctcttccaatggagttgacgcatatggcatttacataattctattttttwaaatatatwaaacaaatttaaattatatatataaactatatatgttatgaatatagattataactatgcatgtctgctaggtacaaataaggaatgagataaaaagagaacaggtgctttcaag

SEQ ID NO: 3402 - DNA, 600 bp, Chicken  19866894090911_2
ttgtgaggatttatttttacaagtaactcaattaaaaataatccaaagcaattctatagaggatgatttacactactttaattcacatatgcatgacatgaattcagaatgaaagtgttctttaccttcggtactttacttaattcatcagtgaacaatgatactaggaatactagtaaggaggcatagagaagtctgagttattccaaccttactccaaatttacaagtgactactrccagaaactgcataatcatatttatgtgatactatgtctgagttaactgtacttgtcccatmtctgtccaattcaacatgtagagaaaagaacttcaagtactccagaaagctaaggacaattaagctcttccaatggagttgacgcatatggcatttacataattctattttttwaaatatatwaaacaaatttaaattatatatataaactatatatgttatgaatatagattataactatgcatgtctgctaggtacaaataaggaatgagataaaaagagaacaggtgctttcaagataagaaatacagatcaagcctgtttctagtgcatttatacagtgtattttatattatatca

SEQ ID NO: 3403 - DNA, 600 bp, Chicken  19866894090911_3
gtgttctttaccttcggtactttacttaattcatcagtgaacaatgatactaggaatactagtaaggaggcatagagaagtctgagttattccaaccttactccaaatttacaagtgactactrccagaaactgcataatcatatttatgtgatactatgtctgagttaactgtacttgtcccatmtctgtccaattcaacatgtagagaaaagaacttcaagtactccagaaagctaaggacaattaagctcttccaatggagttgacgcatatggcatttacataattctattttttwaaatatatwaaacaaatttaaattatatatataaactatatatgttatgaatatagattataactatgcatgtctgctaggtacaaataaggaatgagataaaaagagaacaggtgctttcaagataagaaatacagatcaagcctgtttctagtgcatttatacagtgtattttatattatatcagacctaagttacattgttttcattattatgtccttgtatacagaaaatttattttaatattcacttttattgctttagtatttaaatattgttttaatatttagaaaaaaaatc

SEQ ID NO: 3404 - DNA, 600 bp, Chicken  19866894090911_4
accttcggtactttacttaattcatcagtgaacaatgatactaggaatactagtaaggaggcatagagaagtctgagttattccaaccttactccaaatttacaagtgactactrccagaaactgcataatcatatttatgtgatactatgtctgagttaactgtacttgtcccatmtctgtccaattcaacatgtagagaaaagaacttcaagtactccagaaagctaaggacaattaagctcttccaatggagttgacgcatatggcatttacataattctattttttwaaatatatwaaacaaatttaaattatatatataaactatatatgttatgaatatagattataactatgcatgtctgctaggtacaaataaggaatgagataaaaagagaacaggtgctttcaagataagaaatacagatcaagcctgtttctagtgcatttatacagtgtattttatattatatcagacctaagttacattgttttcattattatgtccttgtatacagaaaatttattttaatattcacttttattgctttagtatttaaatattgttttaatatttagaaaaaaaatccttattaga

SEQ ID NO: 3405 - DNA, 600 bp, Chicken  19866894090918_1
aaagaaatagtaacattttagtagattataaggttttagccgtgtgtatattttgtaaacacacagctatgattttcagttgtatttgttcagctctttggtgatccagctgggttatggtgaagctgtgaattagatatatagaattcaatcttacaaatatactttgcaaatattctcagcttccaggatgatttttttttcagttgatttatgcacatttcttaaaagcataactcctggaattcttttaaaatgaatgacacgatttgagatgggaacaattgtcatctgaaatgkgttaaataacatcagagatgaaattgttttactcttaaaattgctaatgatggcccaaaattttaactcagttctcattcagtcaaaattcccatggacctttgtcaggtttttgcttgcaaatgtgatgaaaaatgagagtttggttacttaaagctgtacattattaaaataaagtctttgacctttcaggtagatgatcacagtggcaatgtaagactcttcgccatgttggctggctctaagattaaattttcaggtttgatagttaaagtaaaaattagttttatccaggctagg

SEQ ID NO: 3406 - DNA, 599 bp, Chicken  19866894090925_1
  misc_feature (1)..(86): n is any nucleotide
nnnnnnnnnnnnnnnnnnnnnnnnnnnnnnnnnnnnnnnnnnnnnnnnnnnnnnnnnnnnnnnnnnnnnnnnnnnnnnnnnnnnnnctggtgcattcataaatatggtagacaaactcacttttctgttcagtaactattctgtctctcctttctcccaaaaaaactcccactgtgtgctgagtacagagtgttcatttggcaatgtgtaatgaacatccatctctccatatgggcagcaagcttactggtttcataaggagtactttgaggtaccagttcttatatgaatagaccagtrcaaatctctcttgatcattcatttccctggcaaggcatgatttttaatacacattcaaaccatactagatatcagtataacattcccattttgtgaaagactgttacttagtctttaaaagaaccaactagaatggaaaatgatcattaaaagctattgagtcaaaaatacgtgggtacaaatggaacaacttaggtgcaaaggagaaccacawtgaaagaggcagatttttatttcttctgtagggaaattaaaattttgattcagccattgtaagtacatgcaaaacttaaacattg

SEQ ID NO: 3407 - DNA, 600 bp, Chicken  19866894090925_2
acatccatctctccatatgggcagcaagcttactggtttcataaggagtactttgaggtaccagttcttatatgaatagaccagtrcaaatctctcttgatcattcatttccctggcaaggcatgatttttaatacacattcaaaccatactagatatcagtataacattcccattttgtgaaagactgttacttagtctttaaaagaaccaactagaatggaaaatgatcattaaaagctattgagtcaaaaatacgtgggtacaaatggaacaacttaggtgcaaaggagaaccacawtgaaagaggcagatttttatttcttctgtagggaaattaaaattttgattcagccattgtaagtacatgcaaaacttaaacattgtcattaatgctattctctctaagcaaagtaatcaccttctttgtcttccatagttcaaaaatcagaaaattattagatctcaacagagtagctgtatatacatgataaaagttttttttagttagatatggtaaacatagtgactgtgatcattctatctcagtgtcatttctgataastttctgataacacttatagaaggtccttaaatatac

SEQ ID NO: 3408 - DNA, 600 bp, Chicken  19866894090925_3
caaatggaacaacttaggtgcaaaggagaaccacawtgaaagaggcagatttttatttcttctgtagggaaattaaaattttgattcagccattgtaagtacatgcaaaacttaaacattgtcattaatgctattctctctaagcaaagtaatcaccttctttgtcttccatagttcaaaaatcagaaaattattagatctcaacagagtagctgtatatacatgataaaagttttttttagttagatatggtaaacatagtgactgtgatcattctatctcagtgtcatttctgataastttctgataacacttatagaaggtccttaaatatacctgaatctgttttattccatagtattccaaggacactaaaacaagatatagaattacaccagtaacactcgaaaatttaaaaggatttatttggtaaattgtatcaactttctctactcttttgaaagaggagttctataaatgaatctgctgaaatacagaaccaaatattaaatgttttgagagtcagaaaagcactttaatcatacagtcaaataatttgatgaatgggactattatttgtcttttaattctgtattgttg

SEQ ID NO: 3409 - DNA, 600 bp, Chicken  19866894090925_4
tgaatctgctgaaatacagaaccaaatattaaatgttttgagagtcagaaaagcactttaatcatacagtcaaataatttgatgaatgggactattatttgtcttttaattctgtattgttgactatgtgcttgtgtaggtaattcctttcaaaataacccatttttattttgatactatcttccattttctatggaaaagtaatcaagtatatcgaaattcatagtaatttgtgtacttacgataggaattcataataccaaacacagtattatttagttccatgtctgaattgcagaycagatatcaaatttaagatttcaattgcatggaactaaaattatccaaaatagaaggttttgagaaagtggtcagtgcagtatgtgacagttacatcatgtgttacttaatagaaatatagttggttgtacagttaagaagaaaagcaatacattatttaattaaatttgtatgtatctgaactataaattgcttcagacatgaagtagggagagagattgaggatgatctgtctttgtttttaatctcagaattaccatggtgtcatagaaaaagagaagtgtggtgtgaaacaagagt

SEQ ID NO: 3410 - DNA, 600 bp, Chicken  19866894090926_1
ttgattcattgggttaatgtttggagttatttctagtgtcaataagcattacctcttttcctctgaatgcttgctacattttgggatatttgcaaaaaccctttccactatatatccagttcctgccatgacttctgtgcagttcctctaattattttcctaagcagaaattttggaggatatttacaggtcagatatccaatctcactgaaatcctattgggaattttagcttctttgacaattctaggtaaacatttgcagttactataaatgtgccttttattgtagtcacagatgyatgtctagaaggaacctccatcatctgatttctctctgtctggtggagaatagggaagaaatggagtgaagtggtggttgtggggcaaggaggaaacaaaaataggatgtcaggggcagtaggggtaagaagagatgctaaagcacgtggatgtactaggagctggaggggaaacaaacagcctaaaccactgtaacagaatttctgtaaatctatgatgggtgatttcacagtctctccaagaaacttactttgttttctaaaatgaaggaaatatttttgacttctcaactgaattct

SEQ ID NO: 3411 - DNA, 600 bp, Chicken  19866894090926_2
tctatgatgggtgatttcacagtctctccaagaaacttactttgttttctaaaatgaaggaaatatttttgacttctcaactgaattctactactttttaagaataagtcccttactgttgtcctgtccatgagaaaaaatcatttatctccttctcatccgtatttggtgtcttgtaggatgtccttgtttccttctctctactatctaaatgttctgatttgctaaaatttgctgttattcctgctgatttactgttgtccaaatgtctgccaagagcacttagaattcaggataccrctgcacccrttagtagatgtggtaagatgaagatcctagtaaataccatctctccttgtcacagtgaaggattaacatggtacacaaagaccatgtttctccttggttggtttgtttgtttattttaagaagagctgtgttgtgagggcagtgctcaaagccttgcttggctgtgacatctctttatatactgtaccctgctactcatgtaaaaggaggattgttgtttgttcagctgcacatatacaagttatcttgtactgtaggggttataatcaattatgtagggtgggctaaatg

SEQ ID NO: 3412 - DNA, 600 bp, Chicken  19866894090926_3
ggtgatttcacagtctctccaagaaacttactttgttttctaaaatgaaggaaatatttttgacttctcaactgaattctactactttttaagaataagtcccttactgttgtcctgtccatgagaaaaaatcatttatctccttctcatccgtatttggtgtcttgtaggatgtccttgtttccttctctctactatctaaatgttctgatttgctaaaatttgctgttattcctgctgatttactgttgtccaaatgtctgccaagagcacttagaattcaggataccrctgcacccrttagtagatgtggtaagatgaagatcctagtaaataccatctctccttgtcacagtgaaggattaacatggtacacaaagaccatgtttctccttggttggtttgtttgtttattttaagaagagctgtgttgtgagggcagtgctcaaagccttgcttggctgtgacatctctttatatactgtaccctgctactcatgtaaaaggaggattgttgtttgttcagctgcacatatacaagttatcttgtactgtaggggttataatcaattatgtagggtgggctaaatgtttctgaat

SEQ ID NO: 3413 - DNA, 593 bp, Chicken  19866894090928_1
gatggctgaaaatagtcaattgcttgcatttcagctcagtattatgttttctttgctatttatgtgacagctgttaaacaatgctatgcgattttataaagaccaaatcatccacacaagtagccccactgagctggatttctgctcagtaatacaggggtaaatgcagattagctccttcaaaggcaatggaataattccagatttacagtggtgtaaccaggtcataaacattattatgactatttctgaggaaaatcaaacaaacaaacaagcagacgtttgcttaaactctcctgrgagagtctggaaggaattgtttttgaggttatcataagcgatggtataggaggcaagaaaaactgactgtgaaagctctgaaccagtagttgctaatgaagcaaaattgccagataccccagcagggaatttggtaaagaaagagggatctcagtactatatgtgggtctgttgtcagagcaccaaaggaataactgtatagggaaactgagcgactgctgtgagtaaatttacaaattattcaggagaaacagtaaatgtaacaggtaagaatcactggctttaatgcactg

SEQ ID NO: 3414 - DNA, 600 bp, Chicken  19866894090930_1
gtggctctgggcagcctggtctggtggttggtgaccctgcatatagcaggatggttgaaactatgatcattgtggtccttttcaacccaggccatcctatgattctgtgggttgcatgtttcagtcttagcaacttaagtgctctcaacagtaacaacaacaacaaaattaggatcaatatgacagagattttaatttggccttatttcacccaagaggacagcaaggcaaacagcagctagaaaagagaagagacaaaacaggtgaatcagcttcaccacagagacagatgaggccagraggagcgatcagactgcccagaggaaacaaggccaactatctcaaaggggtraagaaaaggtagacarggaggattccatatgaggaaaaggcgcaatgagagaaaaagtaakggaggaaagagagtgcagttcattgcttgaaagtagtcacggaggtcgaacaaggtgaggacggatttaaaaaaggaaagcgaatgcaaagttcagaacgtgccaaacattccctggcactcaacaaaactgtcacacatacagacaacactaaatgttggactttctgcaagtattattaaaatcc

SEQ ID NO: 3415 - DNA, 600 bp, Chicken  19866894090930_2
ggttgaaactatgatcattgtggtccttttcaacccaggccatcctatgattctgtgggttgcatgtttcagtcttagcaacttaagtgctctcaacagtaacaacaacaacaaaattaggatcaatatgacagagattttaatttggccttatttcacccaagaggacagcaaggcaaacagcagctagaaaagagaagagacaaaacaggtgaatcagcttcaccacagagacagatgaggccagraggagcgatcagactgcccagaggaaacaaggccaactatctcaaaggggtraagaaaaggtagacarggaggattccatatgaggaaaaggcgcaatgagagaaaaagtaakggaggaaagagagtgcagttcattgcttgaaagtagtcacggaggtcgaacaaggtgaggacggatttaaaaaaggaaagcgaatgcaaagttcagaacgtgccaaacattccctggcactcaacaaaactgtcacacatacagacaacactaaatgttggactttctgcaagtattattaaaatccaatatcttgaattatttttgaattatgcttaatcaaaaagctaatgactagg

SEQ ID NO: 3416 - DNA, 600 bp, Chicken  19866894090930_3
attgtggtccttttcaacccaggccatcctatgattctgtgggttgcatgtttcagtcttagcaacttaagtgctctcaacagtaacaacaacaacaaaattaggatcaatatgacagagattttaatttggccttatttcacccaagaggacagcaaggcaaacagcagctagaaaagagaagagacaaaacaggtgaatcagcttcaccacagagacagatgaggccagraggagcgatcagactgcccagaggaaacaaggccaactatctcaaaggggtraagaaaaggtagacarggaggattccatatgaggaaaaggcgcaatgagagaaaaagtaakggaggaaagagagtgcagttcattgcttgaaagtagtcacggaggtcgaacaaggtgaggacggatttaaaaaaggaaagcgaatgcaaagttcagaacgtgccaaacattccctggcactcaacaaaactgtcacacatacagacaacactaaatgttggactttctgcaagtattattaaaatccaatatcttgaattatttttgaattatgcttaatcaaaaagctaatgactaggagcaagttgtataatt

SEQ ID NO: 3417 - DNA, 600 bp, Chicken  19866894090930_4
gcatgtttcagtcttagcaacttaagtgctctcaacagtaacaacaacaacaaaattaggatcaatatgacagagattttaatttggccttatttcacccaagaggacagcaaggcaaacagcagctagaaaagagaagagacaaaacaggtgaatcagcttcaccacagagacagatgaggccagraggagcgatcagactgcccagaggaaacaaggccaactatctcaaaggggtraagaaaaggtagacarggaggattccatatgaggaaaaggcgcaatgagagaaaaagtaakggaggaaagagagtgcagttcattgcttgaaagtagtcacggaggtcgaacaaggtgaggacggatttaaaaaaggaaagcgaatgcaaagttcagaacgtgccaaacattccctggcactcaacaaaactgtcacacatacagacaacactaaatgttggactttctgcaagtattattaaaatccaatatcttgaattatttttgaattatgcttaatcaaaaagctaatgactaggagcaagttgtataattgttattttcttccattaaaagatgataggattgcaagctctaaat

SEQ ID NO: 3418 - DNA, 600 bp, Chicken  19866894090932_1
atagcttgtgaggcttctgttttcttttcatcgtagcttcacatctggaaaggtgagccatggggtgtattttcatcatccttctaagtctttcctttttctgagttgtaagtacttggggaagatatgctcaagacagattactgttgcagcttaactctttgttctattttacttccaatatacttcccaactgttgtcctactagtatggctctgttgggtggaagtatggtaattgtctgtttctactaataattggtctctgaccttcctgtcatgtcacttttgacttttgagyatctgtcaagttccagatcagtttggatatgatcatgacagcatcaattccagcagctgtactaattcatgcagtagcgcatraagcataaagttatggtgctctaaccttaatggatttgttttctttcataagtttatgtaacctcttctgttgtctcagggaaacgtgtcatggaggatgtgagttacaagttctttttcagttattctaaccactgggagtagggcatatagagatttctttcctcatctggaaatggcatggcccttattgaatgtctgcccttggtaggttaag

SEQ ID NO: 3419 - DNA, 600 bp, Chicken  19866894090932_2
ctaagtctttcctttttctgagttgtaagtacttggggaagatatgctcaagacagattactgttgcagcttaactctttgttctattttacttccaatatacttcccaactgttgtcctactagtatggctctgttgggtggaagtatggtaattgtctgtttctactaataattggtctctgaccttcctgtcatgtcacttttgacttttgagyatctgtcaagttccagatcagtttggatatgatcatgacagcatcaattccagcagctgtactaattcatgcagtagcgcatraagcataaagttatggtgctctaaccttaatggatttgttttctttcataagtttatgtaacctcttctgttgtctcagggaaacgtgtcatggaggatgtgagttacaagttctttttcagttattctaaccactgggagtagggcatatagagatttctttcctcatctggaaatggcatggcccttattgaatgtctgcccttggtaggttaaggattctttcttccttctaatgagactgtcttcagagggctctggaatagaacatctggtcacgtgcttaaaatctgatggaac

SEQ ID NO: 3420 - DNA, 600 bp, Chicken  19866894090938_1
gagctatcataagcttccaaattattttcgagagtatgtgcctcctccaagcagttctgcagccatcagccgcaggttttggccaaagctcactcttacaggatcagtattcttcacacacacgcagttttaatgccttcagcaggaaatgctccctcagttaaaccaccggtaagatttcattcaaaccctgctgcccacaccctcaggttctacttcacgtggtgcccttatctcacagctaagctgccactgccctcacaccacagtaaacagagggcatttcatgtttatcatgcrtgcctttataactgatgcccagggacaaagaagatcaagctaccatacaggggggtcttagtgaacaatcagaaacaaagtaagggacagacttcctcaactgcacatgaacagaacagcggtgtattacctctccgccatctctactttatattaaaaaaaggggaacaaacaaagcttagctttgctgccccaagagtccactgtctcactccgaggaggatctcactgccttggagcraggcacacaggagagaggcacgggacaagtcaagcaacaagccctcctagggaaataag

SEQ ID NO: 3421 - DNA, 600 bp, Chicken  19866894090938_2
ctaagctgccactgccctcacaccacagtaaacagagggcatttcatgtttatcatgcrtgcctttataactgatgcccagggacaaagaagatcaagctaccatacaggggggtcttagtgaacaatcagaaacaaagtaagggacagacttcctcaactgcacatgaacagaacagcggtgtattacctctccgccatctctactttatattaaaaaaaggggaacaaacaaagcttagctttgctgccccaagagtccactgtctcactccgaggaggatctcactgccttggagcraggcacacaggagagaggcacgggacaagtcaagcaacaagccctcctagggaaataagaggatctgtttgggctgagggttacaagttttaattccttttgcaatccaagtaagcacgcgggaagagctatagcagagaactatttacatccccttggagccagcccgctcgcacaaagatccaggaggctgaccccgaagttaaaacacgcagctgaactttaagcgctctgctcgtgaactcggggctgagggtacagagccaatgcctcgacttccaccagccctgctccaaagtt

SEQ ID NO: 3422 - DNA, 600 bp, Chicken  19866894090938_3
tacgttacagcaaagcacacatgaagtgaaactcacaggttctccccccttaacaaggcacgtcagcacgagctcacccgcaggcttgcagcccgggacgctccttgccagctgcacacaccaagggccgggaggttacgcagtgcaatttggagtggagctgctggtgctaaaaataccacctgacaccagcagcgtctctcaggataacacagcagaggatctcggggccgtacactttttaaaggaaagctttcagcgccgtcagattcttggcgatgctgggaaaatttctgctcygataggcttgttcggtgatctctatccccaaaagagacagaggagtgtctgcagccttctctttctcaataaaggggagatcctataggggaatgcctccagtagactaagaaaaggagagaccctacgggggaatgccccccccaggagactccccctatattcttctctgtcttttggggacgaagctaacagagaaagcccatccgaacagacattttccggaccatctttacacggctcagaataatactgcttgctgcaagacgggtacctgcagcaagaggccaagataaatca

SEQ ID NO: 3423 - DNA, 600 bp, Chicken  19866894090939_1
agttactctatgcctgaatgcattaagtcctgagtgtcatattcagtccctgcaaggacagaggatgatcagtattttaggaaatgtaaagtctatttcaacttaggagaaatgtgttttgaatggtgtgtttctgagttaatgtacggtgaggatgcagactaaatggcctccaggcagcttcaaattgttattaaagggaggaaaatatatggagggaaaaatctatcatcttcattttccatgtgatttcaaagaaaaaagaaaccactttgagggaaagctctgacaaaaagatcrcctctaatgccataagttatggttctataaatcagccagatgatatagggctggcaccaggcaaatatatcttctagcatcaagaactataggggagattctctcattcaagagttgttcataattcactataattggtgggaaagtgagggctgtgacaatttaattcattcacaactggcaatgttattattgcagaacaaaaatgcygtgttagatgaaaaccatctggtgtcaacaaaaaccatccctgtggtcaagcaacagcttgggacaagtggatgttgtttgaaaagtcac

SEQ ID NO: 3424 - DNA, 533 bp, Chicken  19866894090939_2
tatggagggaaaaatctatcatcttcattttccatgtgatttcaaagaaaaaagaaaccactttgagggaaagctctgacaaaaagatcrcctctaatgccataagttatggttctataaatcagccagatgatatagggctggcaccaggcaaatatatcttctagcatcaagaactataggggagattctctcattcaagagttgttcataattcactataattggtgggaaagtgagggctgtgacaatttaattcattcacaactggcaatgttattattgcagaacaaaaatgcygtgttagatgaaaaccatctggtgtcaacaaaaaccatccctgtggtcaagcaacagcttgggacaagtggatgttgtttgaaaagtcactgggccagaagcagggttgattccagcctctgaaacgggcacgaattcttctctcgtaataagaaaggtgccacccaaacgtgcagagtcccgcttgtctcaaggtatctttgtttttttctgttttctgagggtttggagga

SEQ ID NO: 3425 - DNA, 600 bp, Chicken  19866894090940_1
aagacagagcagaagtgcagagtgacatgtatcacacttccaaatatcacctgtttggctggcaagagatgacagcaagcacatggtcttcggtgttgactgtagctgccagttgagaaacaggcaagtggctattctgaaggtctcgagcagaaactggttgctgctgcttagctttgagatgcttgcagtgggaacttacaatgtgtaagtgaacacatgatcctactgaaggacatagaataactggaatgactcccacagagccctacaatggaataagtccaatactttacttaygggttgaacggctagcatcgaagtcgtctgaacttgggacatactgggcatagtggattatagagtggctaagtatgtgcataccaactaggggcctttgtattgatcttttcttcatttactgcccaaaactggtctccacttaaaaataaataaataaataaataaataaaattaccctctcctttcccttttactgataaaaaaaacctcttcactcaacactgaaagatcctctccttaaacagacggtgttaaaagcagcaagctgctgccacacggcataattctgacccgaca

SEQ ID NO: 3426 - DNA, 600 bp, Chicken  19866894090940_2
aatagcaaatatgtattgtaacaggaattcattcttgttcatcagtctatccaaaagcaaatgccaaaggagtggtcaccattctcagcagtctccatggtgaagtattaggagagttcatgaaatattctcttcaaactgtgattttgttttgcgcccaccccacggcaaataaaaaggattttgctgtagacaatttttattatgaaaatagattccaaaggctattttatctctggaagacttctgtggcactattagtgccatatggaatggtggcaaggagcctaaaatgcttcygtgcgtcactttcctacaaaatcctagtgcaggtcccctaaccaggaagatggagctcagtgtctgtatttctcactccaatgggcaccacagaatttactgtaagcaaccatatcacacggaggacagaaaaagacgttcattcttccagtacctcagagggatgtcaaagagttctgccaacgttacctaggaatgacttctagccaaaaagcagggacactggtgtgctttcagatgattatcaaaatctgcaaaccttcttggtctgtgctagtaagaactgcagtcaggtgccag

SEQ ID NO: 3427 - DNA, 600 bp, Chicken  19866894090941_1
tggatctgttagcactacatttcagtctttcagaaataataattaaagagatatgtaatatttcccataattcctattcaattcttaaaatgttgtggaattttctacagaaagaactttttgagattaaatagaaaaacaaaacaaaaccaaaactgcttaacttctccccaaaggaaattcaattagggatcatcttgtttaagctctttgcaaatagaattgccacgctatcttttttgatgtctacacatcaacatgctcttcccagctgccaaaagattccatgtcagataatgkttttaagaagtcattttgttgacttttcacttatacttcttttaagccaaaacaatgttcacagtaaatcagtgattgttctcttctgcatcttgatatttccctgtttcaaaatagtgtaaataactttactgtgctgaactaaatggcatatccactattacaaggatgttgcataaaaactattctttgctgaatatacgaatacatgttatgactaatgcaacgtctgtcatgttggatttatttgtaatttgatgaggaatttacctttagtaaactgttgacagaactccagcc

SEQ ID NO: 3428 - DNA, 600 bp, Chicken  19866894090942_1
gtgtaataaatagtgataagtctctgttattttacaaattaaagatgtgtgaaattgaattcgtccttcaagatattcttgaagatcttataagtctatttagaaaacctattatatgcttctatttatagtaaaatttatattaatattcatatcacttaggtgtggctttgttgggtggtttaatggtagtctcagaaatgccagcttctttgttataaaaaagtttggccaacctcttgagtatgaggtacctctgtgaaatgaaaatccctgaaaagatctgaaaaggaccatgtytttggcactttcatattcaaagattgttgttcatctaaacagtgcatataatagcactgaaaggttgctatgttaatgcaggcccattatgatgtatgttaatgtacatgctatgagaaaagtcacaacacaacttcaatttaagtgacccacagctgcattagcctcatcaaaagtacatacgttttaaagctactctaattgaatatgtatttctggttcctgactttctaatagaacatgtatttctgattccttacttcgtctagctaataaaggttgtgtcttggtatatttggg

SEQ ID NO: 3429 - DNA, 600 bp, Chicken  19866894090943_1
cctcctctcctccatgctgaacagtcccaagatgcttgtgtgctgatgacaacctgaccctagaggtggaggattcttcccaattttttttttattctctctgcagctatgactcaaccttcccctcacctggaaggcccctcatcaggctgtgctctgtcttccttcgttcctctgttgaactccccctcctatcacggtcaaccctctttcagcatcacctgtcgcttctggccttgtgcacataatctgtcatccacgggacttccaatgcacgtgcatctgctcccagcattttgwccatttctgctaccaccagctttgctgattctctcttgatgctttgattctttctccctttttccccgcttcaagttgcacactggcaccaactcggctgcaacaactgttcttccacaacaactgccaccacgaggttgttctctcccttttccattcactggttccacgcagcacttagcacagcaggcatctggcctgtcggcaaggcatcgtaagcgctgcagtgaatgcaaatataatcacatggctggggaagttgttcctgccattcatgtgaacagttaactgcttttgtta

SEQ ID NO: 3430 - DNA, 600 bp, Chicken  19866894090944_1
aaaggcactacaaagggatctggatagattagatcaatgggccaaggttaactgtatgagtttcaatagggccaagtgtcaagtcctgcattttggtcacaacaaccccaggcttgaggaggagtggctggaaagctacctgatggaaagggaaaggaaaggtcagttgaatatgaaccagcagtgtgcccaggtggccaaggaggccaatgacatcctggcttgtaccagggctggtgtggtgagcaggactagggaagtcatcctgactctgtactcagtattggtgaggcctcaccwcaagtactgtgttcagttttcggcacctctgaacagtactgtacagaaaggatgttgaggagctggagcaagccctaagaagggcaacaaggcttgtgaaggrcttggagaatatgccctacgaggagagactgaaggaagtggggcggtttagtctggggaggaggctgaggggagaccttattgctctcttccaatatctgaaaggtgcttacagtgagagtggggttgatctcttctcactggtaacaggtgacaggatgaagggaaatggcctcaggttgcaccagggcaagttta

SEQ ID NO: 3431 - DNA, 600 bp, Chicken  19866894090944_2
aaccccaggcttgaggaggagtggctggaaagctacctgatggaaagggaaaggaaaggtcagttgaatatgaaccagcagtgtgcccaggtggccaaggaggccaatgacatcctggcttgtaccagggctggtgtggtgagcaggactagggaagtcatcctgactctgtactcagtattggtgaggcctcaccwcaagtactgtgttcagttttcggcacctctgaacagtactgtacagaaaggatgttgaggagctggagcaagccctaagaagggcaacaaggcttgtgaaggrcttggagaatatgccctacgaggagagactgaaggaagtggggcggtttagtctggggaggaggctgaggggagaccttattgctctcttccaatatctgaaaggtgcttacagtgagagtggggttgatctcttctcactggtaacaggtgacaggatgaagggaaatggcctcaggttgcaccagggcaagtttaggttagatatcaggaaaaacttctttactgaaagggttgttaagcactggaataggcttccaggaaggtggttgagtcaccatccccaaatgagtttaaaaac

SEQ ID NO: 3432 - DNA, 599 bp, Chicken  19866894090945_1
  misc_feature (1)..(104): n is any nucleotide
nnnnnnnnnnnnnnnnnnnnnnnnnnnnnnnnnnnnnnnnnnnnnnnnnnnnnnnnnnnnnnnnnnnnnnnnnnnnnnnnnnnnnnnnnnnnnnnnnnnnnnnnacaaaaaaaaaaataccctcaaacatacaaaaatatggacaaaaactgataaataaagtcaccatatatctacacataccaacctatatacatgtatatgtatattgaatacacgtataataatgtacaaccattctctacttcacaaaataattatccacagaaagtggatcaaaagatgaggttttaactacaytactaccaggcagaaaaaaaakatataatcatttcaactacagttttttcatgttctgcacctaccaagatcatgyccawgaayaccatctttttcatattagaacgyaacattttactatcaaggtacaggacaaacagcatctcattttaaaactgaattattataattccacatctgctactaaatcattcaccctgctttaaagtcttgcttgaaaacaagccagcaactgcctataaataaaaacagtgtccttatgctgaattctactccatcccagtattgtcttgcagtag

SEQ ID NO: 3433 - DNA, 599 bp, Chicken  19866894090945_2
  misc_feature (1)..(82): n is any nucleotide
nnnnnnnnnnnnnnnnnnnnnnnnnnnnnnnnnnnnnnnnnnnnnnnnnnnnnnnnnnnnnnnnnnnnnnnnnnnnnnnnnnacaaaaaaaaaaataccctcaaacatacaaaaatatggacaaaaactgataaataaagtcaccatatatctacacataccaacctatatacatgtatatgtatattgaatacacgtataataatgtacaaccattctctacttcacaaaataattatccacagaaagtggatcaaaagatgaggttttaactacaytactaccaggcagaaaaaaaakatataatcatttcaactacagttttttcatgttctgcacctaccaagatcatgyccawgaayaccatctttttcatattagaacgyaacattttactatcaaggtacaggacaaacagcatctcattttaaaactgaattattataattccacatctgctactaaatcattcaccctgctttaaagtcttgcttgaaaacaagccagcaactgcctataaataaaaacagtgtccttatgctgaattctactccatcccagtattgtcttgcagtagttcatatgcaaaacatgctctc

SEQ ID NO: 3434 - DNA, 599 bp, Chicken  19866894090945_3
  misc_feature (1)..(28): n is any nucleotide
nnnnnnnnnnnnnnnnnnnnnnnnnnnnacaaaaaaaaaaataccctcaaacatacaaaaatatggacaaaaactgataaataaagtcaccatatatctacacataccaacctatatacatgtatatgtatattgaatacacgtataataatgtacaaccattctctacttcacaaaataattatccacagaaagtggatcaaaagatgaggttttaactacaytactaccaggcagaaaaaaaakatataatcatttcaactacagttttttcatgttctgcacctaccaagatcatgyccawgaayaccatctttttcatattagaacgyaacattttactatcaaggtacaggacaaacagcatctcattttaaaactgaattattataattccacatctgctactaaatcattcaccctgctttaaagtcttgcttgaaaacaagccagcaactgcctataaataaaaacagtgtccttatgctgaattctactccatcccagtattgtcttgcagtagttcatatgcaaaacatgctctcctactgatggaatccacttgtccttgctattaagtgaaacacagcaggacccag

SEQ ID NO: 3435 - DNA, 599 bp, Chicken  19866894090945_4
  misc_feature (1)..(24): n is any nucleotide
nnnnnnnnnnnnnnnnnnnnnnnnacaaaaaaaaaaataccctcaaacatacaaaaatatggacaaaaactgataaataaagtcaccatatatctacacataccaacctatatacatgtatatgtatattgaatacacgtataataatgtacaaccattctctacttcacaaaataattatccacagaaagtggatcaaaagatgaggttttaactacaytactaccaggcagaaaaaaaakatataatcatttcaactacagttttttcatgttctgcacctaccaagatcatgyccawgaayaccatctttttcatattagaacgyaacattttactatcaaggtacaggacaaacagcatctcattttaaaactgaattattataattccacatctgctactaaatcattcaccctgctttaaagtcttgcttgaaaacaagccagcaactgcctataaataaaaacagtgtccttatgctgaattctactccatcccagtattgtcttgcagtagttcatatgcaaaacatgctctcctactgatggaatccacttgtccttgctattaagtgaaacacagcaggacccagagag

SEQ ID NO: 3436 - DNA, 599 bp, Chicken  19866894090945_5
  misc_feature (1)..(20): n is any nucleotide
nnnnnnnnnnnnnnnnnnnnacaaaaaaaaaaataccctcaaacatacaaaaatatggacaaaaactgataaataaagtcaccatatatctacacataccaacctatatacatgtatatgtatattgaatacacgtataataatgtacaaccattctctacttcacaaaataattatccacagaaagtggatcaaaagatgaggttttaactacaytactaccaggcagaaaaaaaakatataatcatttcaactacagttttttcatgttctgcacctaccaagatcatgyccawgaayaccatctttttcatattagaacgyaacattttactatcaaggtacaggacaaacagcatctcattttaaaactgaattattataattccacatctgctactaaatcattcaccctgctttaaagtcttgcttgaaaacaagccagcaactgcctataaataaaaacagtgtccttatgctgaattctactccatcccagtattgtcttgcagtagttcatatgcaaaacatgctctcctactgatggaatccacttgtccttgctattaagtgaaacacagcaggacccagagagcatt

SEQ ID NO: 3437 - DNA, 600 bp, Chicken  19866894090945_6
aaaaaaaaataccctcaaacatacaaaaatatggacaaaaactgataaataaagtcaccatatatctacacataccaacctatatacatgtatatgtatattgaatacacgtataataatgtacaaccattctctacttcacaaaataattatccacagaaagtggatcaaaagatgaggttttaactacaytactaccaggcagaaaaaaaakatataatcatttcaactacagttttttcatgttctgcacctaccaagatcatgyccawgaayaccatctttttcatattagaacgyaacattttactatcaaggtacaggacaaacagcatctcattttaaaactgaattattataattccacatctgctactaaatcattcaccctgctttaaagtcttgcttgaaaacaagccagcaactgcctataaataaaaacagtgtccttatgctgaattctactccatcccagtattgtcttgcagtagttcatatgcaaaacatgctctcctactgatggaatccacttgtccttgctattaagtgaaacacagcaggacccagagagcatttgctgaagctgaaaactgactttat

SEQ ID NO: 3438 - DNA, 600 bp, Chicken  19866894090952_1
gcttgtaatcaaaatttgcaccggtttacacctgacctattagcagtgcacctatataacatattgcatcattaaagaaaaaaatcgttgaaggtctgaattattacttcccacatgtttgttttccaaacacagcattgcacctaagactaaactgtgtaataacatctgaagtgatgtggcacctttgcagcatttatttttccaaagcactgtgttaagcatgtatgttcattcaccagcctgcttgtgctggttgtcatctgtcagtttgggatatcttttcttcctctctctctyttttttttttttcttagaaaaatgaactcattagtttaaaactcccaaatgccacattcagctcaaacagcgaagatgataacctgtaaaaaaaagaggagaaaagagagaaggagtctggcaggttttctgcaagtggacgctgtaataaaaatgccccctactttgttgggatggtgtttgtagggctgctgccatatgttactttcctttttagctgggattatgccatcattattgctgataaaagctgtttactgccttggcaaagaagtgatgcttggcgcagtttggaagccg

SEQ ID NO: 3439 - DNA, 600 bp, Chicken  19866894090952_2
gggctgctgccatatgttactttcctttttagctgggattatgccatcattattgctgataaaagctgtttactgccttggcaaagaagtgatgcttggcgcagtttggaagccgccattcagtttacagaaaagtgcatttagtgccagatgctaggatccaggggctttgttatcttctcccattattgggatcatccattgtctgtttctccccgtttcagctcagcgctggctttgttggcggcagctcggctccccggccaggcaggtgctcagggcagggctgtgctgtgcccrctcagtgccactgcccagagccctccctgcagacctcggcaccggggcctggcacagtcactgctgcagtgagggaagarctgcggaaaatgtgcacatgaaagagaacatcatatctcagtctgaaggtggccataattcatacgtaaatgctctcagcgtaggctaacagagctgttggctrggcggcagctctgttggtgccaggctttccattaaaaactgttaccttctctgtataggagagaggatgtccaggctgaccctcgctgcaagccgtgggcggtgggcagtggtgcc

SEQ ID NO: 3440 - DNA, 600 bp, Chicken  19866894090952_3
gcaaagaagtgatgcttggcgcagtttggaagccgccattcagtttacagaaaagtgcatttagtgccagatgctaggatccaggggctttgttatcttctcccattattgggatcatccattgtctgtttctccccgtttcagctcagcgctggctttgttggcggcagctcggctccccggccaggcaggtgctcagggcagggctgtgctgtgcccrctcagtgccactgcccagagccctccctgcagacctcggcaccggggcctggcacagtcactgctgcagtgagggaagarctgcggaaaatgtgcacatgaaagagaacatcatatctcagtctgaaggtggccataattcatacgtaaatgctctcagcgtaggctaacagagctgttggctrggcggcagctctgttggtgccaggctttccattaaaaactgttaccttctctgtataggagagaggatgtccaggctgaccctcgctgcaagccgtgggcggtgggcagtggtgccagctggtggctgtgcggggcggcgctgggtggtggccgtgctgcaygctgcctgtgcacggcgtggtgctgagtgtgtgc

SEQ ID NO: 3441 - DNA, 600 bp, Chicken  19866894090952_4
attattgggatcatccattgtctgtttctccccgtttcagctcagcgctggctttgttggcggcagctcggctccccggccaggcaggtgctcagggcagggctgtgctgtgcccrctcagtgccactgcccagagccctccctgcagacctcggcaccggggcctggcacagtcactgctgcagtgagggaagarctgcggaaaatgtgcacatgaaagagaacatcatatctcagtctgaaggtggccataattcatacgtaaatgctctcagcgtaggctaacagagctgttggctrggcggcagctctgttggtgccaggctttccattaaaaactgttaccttctctgtataggagagaggatgtccaggctgaccctcgctgcaagccgtgggcggtgggcagtggtgccagctggtggctgtgcggggcggcgctgggtggtggccgtgctgcaygctgcctgtgcacggcgtggtgctgagtgtgtgctcacggccctggcccagagctcctgttgggcttcgtgctgtaaggagcagagattgtggcctttgtgtgtgtgtccacagcatgagaggatgtccagccaccag

SEQ ID NO: 3442 - DNA, 560 bp, Chicken  19866894090952_5
gcctggcacagtcactgctgcagtgagggaagarctgcggaaaatgtgcacatgaaagagaacatcatatctcagtctgaaggtggccataattcatacgtaaatgctctcagcgtaggctaacagagctgttggctrggcggcagctctgttggtgccaggctttccattaaaaactgttaccttctctgtataggagagaggatgtccaggctgaccctcgctgcaagccgtgggcggtgggcagtggtgccagctggtggctgtgcggggcggcgctgggtggtggccgtgctgcaygctgcctgtgcacggcgtggtgctgagtgtgtgctcacggccctggcccagagctcctgttgggcttcgtgctgtaaggagcagagattgtggcctttgtgtgtgtgtccacagcatgagaggatgtccagccaccagccagcagctgagcaaggccctgggtgtgctgctggccacaggtgtgctgccagacacttcatgctgccttccccttcttctaatgtgcctctttctttgtgctgcccaggtaagtcaggcag

SEQ ID NO: 3443 - DNA, 600 bp, Chicken  19866894090953_1
ccttgctggagggttgtggagggctaggaagcactgccaggtggaaagcacagctctgtggccacactctgcaccccagagtgaagaccgttatgggtctggcttttccagttgtcttcctggaacctgctgggggacagagcaggcactgaggcaggaggaattcccggggcaggtggtatgtagtatgtggtatgtagtggcagtggtgggctagaatggaaatggctgggggtggctcagatcagccattttggggaccgggacctgttaaatgctttctctctgagctccctgccygtgatgcacaagctgtcctggttttgcatacaccctgcataccagatttggagtaagtcacagtagttttctgctttaaacccatttgcacctgtttctttcccccactgaatgtatcagcactgagggcggcctcatgcctctcacctccaccacttcagcagcttgtcattcacatctcagctgaaatagtctcttctgcctcaaatggctctagaaacttatttaagaaaacaaattttcaaaaatacttcctcttcttttaaaactttttttttttttaattgtagtttttctgtt

SEQ ID NO: 3444 - DNA, 536 bp, Chicken  19866894090958_1
gaagaggatgagagagctgggcctgtccagcctgcagcagaggaggcttagggggttctcatcaatgaatattaatacctgacaggaggctgcaaagagaacagagccaggccccttccagtggtgcccagtgcgaggacaagaggcagtaggcacaaatgagcactggaggttccctctgaacaccaggaagaactgtgctgtgtaggtactggagcactgccacaggctgcccagagactgtggggtctcctccttggagatctccaaaagcacctggacgtggcccttagcattctkcagtaggtagccctgcttgagcaggggttgatccagatggacccagaaggccctccccatctcacccattctgtgatttactgccttttctagttagaagcagagcacacactgagtttgaagacttacagcctgggaaggcttttggggggtggggggggacttcaaagcaccacagctgtaacacagaaagcacccagatgacttaaatgctgaatttgtagagtattaggtgc

SEQ ID NO: 3445 - DNA, 600 bp, Chicken  19866894090961_1
agcttctagagcagaacaggagttgtgatcctgaacgagaccaagccctgttcatatttgctctgctccttcccttccttttgtgtcagccactttttttgacagcttacaatacctccagcaagtggccaactgtaaaagctggcagtgcgcttgtgcagatgagctaggtgctatgtgactgtctcccccctggcaaagtgtgtaatttgtgctatataatgattcttcacgggcccagggcatctgatccacatcagctccagagcttgtatttccttgttaacggtttgcttacayggttgcttaaatagtgtggtggccttgatcatttttattgtccttgaaatattctgcatttttgtgcacgtgtgatttgttcgtggtgttctttcatgggaagcagctgyctgttgttatgcagggagcgatcagataggtgaatwgacgaggaaaaacagagtgtggggggaagatggagaaacactgaaatggaatcactctaccgtgctcccagcagggaaatttaatgtctggcagtactactttgcattgactccagctactatcygaggcctgctgccactaagaaagtacttt

SEQ ID NO: 3446 - DNA, 600 bp, Chicken  19866894090961_2
aatacctccagcaagtggccaactgtaaaagctggcagtgcgcttgtgcagatgagctaggtgctatgtgactgtctcccccctggcaaagtgtgtaatttgtgctatataatgattcttcacgggcccagggcatctgatccacatcagctccagagcttgtatttccttgttaacggtttgcttacayggttgcttaaatagtgtggtggccttgatcatttttattgtccttgaaatattctgcatttttgtgcacgtgtgatttgttcgtggtgttctttcatgggaagcagctgyctgttgttatgcagggagcgatcagataggtgaatwgacgaggaaaaacagagtgtggggggaagatggagaaacactgaaatggaatcactctaccgtgctcccagcagggaaatttaatgtctggcagtactactttgcattgactccagctactatcygaggcctgctgccactaagaaagtacttttgtggcagtgggtccttcaatatccggcctattctcttcctgaaatgcctgttttctcattggcatgcatggctggatcctgtgacaaaactagaagcccacaagagcac

SEQ ID NO: 3447 - DNA, 600 bp, Chicken  19866894090961_3
agtgcgcttgtgcagatgagctaggtgctatgtgactgtctcccccctggcaaagtgtgtaatttgtgctatataatgattcttcacgggcccagggcatctgatccacatcagctccagagcttgtatttccttgttaacggtttgcttacayggttgcttaaatagtgtggtggccttgatcatttttattgtccttgaaatattctgcatttttgtgcacgtgtgatttgttcgtggtgttctttcatgggaagcagctgyctgttgttatgcagggagcgatcagataggtgaatwgacgaggaaaaacagagtgtggggggaagatggagaaacactgaaatggaatcactctaccgtgctcccagcagggaaatttaatgtctggcagtactactttgcattgactccagctactatcygaggcctgctgccactaagaaagtacttttgtggcagtgggtccttcaatatccggcctattctcttcctgaaatgcctgttttctcattggcatgcatggctggatcctgtgacaaaactagaagcccacaagagcacctccagccaaaagtaactcctcaaaaacctgcaaga

SEQ ID NO: 3448 - DNA, 600 bp, Chicken  19866894090961_4
gtatttccttgttaacggtttgcttacayggttgcttaaatagtgtggtggccttgatcatttttattgtccttgaaatattctgcatttttgtgcacgtgtgatttgttcgtggtgttctttcatgggaagcagctgyctgttgttatgcagggagcgatcagataggtgaatwgacgaggaaaaacagagtgtggggggaagatggagaaacactgaaatggaatcactctaccgtgctcccagcagggaaatttaatgtctggcagtactactttgcattgactccagctactatcygaggcctgctgccactaagaaagtacttttgtggcagtgggtccttcaatatccggcctattctcttcctgaaatgcctgttttctcattggcatgcatggctggatcctgtgacaaaactagaagcccacaagagcacctccagccaaaagtaactcctcaaaaacctgcaagaaatcaactcaaatttcctatctaacttggatcattaattaattctatctctgyccccattataccattagaaatattgcctgtgtccaaaagcatgattactacatctgttaggaaagggaagaa

SEQ ID NO: 3449 - DNA, 600 bp, Chicken  19866894090961_5
actctaccgtgctcccagcagggaaatttaatgtctggcagtactactttgcattgactccagctactatcygaggcctgctgccactaagaaagtacttttgtggcagtgggtccttcaatatccggcctattctcttcctgaaatgcctgttttctcattggcatgcatggctggatcctgtgacaaaactagaagcccacaagagcacctccagccaaaagtaactcctcaaaaacctgcaagaaatcaactcaaatttcctatctaacttggatcattaattaattctatctctgyccccattataccattagaaatattgcctgtgtccaaaagcatgattactacatctgttaggaaagggaagaaacaaaagaattaatgttgatgataatttatactgacacgccgaggatggggaaagcactcagggcactgaagacctggccagagatttcagctgaacatttggaacaatgtaatgatttgggcattgttcgttcttctccttttgttgtttgctgctttcttgtttgatttttcttttctctctctttacctcagtgaccctaacgagttttaaagtgcctgccgtgc

SEQ ID NO: 3450 - DNA, 600 bp, Chicken  19866894090966_1
tcatttaaagagggttagtattacccttgtggaggcacattcatttcctttgacaaattttgaatggtagagaattgtaacaaaattacttaaaactcagggagattagtaagagaaaacaaaggaggaaattaaaagtgaagaatgtggcataaaaaaaaaaaaaaaagtggatcatgagcaatggatcatgaggagaaaaaggttcccatcaaaagggaaaagcaggtagcgttaacatgagatggggtgtcagctactcttcttcaggaaagaaataaaagaaatgacagaatgaarggaagggttaacatataatgtgaagacttsttctgttagtggggtgaagactttcttattagggtccaccacagggtttatgttttggctggcgtatccttcctgtagtatgaccttcctcaagcatcatatctagctctgtcttcttcttgcctcctattgagcactctgcactcaggggaactcaggtggattcagggccaataatatgagcaggtctcatatgacaayaaaaagaacaaagtgaatattgaatagtgaatatttttgcctccttctgtttgaaagctgtctatggtc

SEQ ID NO: 3451 - DNA, 600 bp, Chicken  19866894090966_2
ggaggcacattcatttcctttgacaaattttgaatggtagagaattgtaacaaaattacttaaaactcagggagattagtaagagaaaacaaaggaggaaattaaaagtgaagaatgtggcataaaaaaaaaaaaaaaagtggatcatgagcaatggatcatgaggagaaaaaggttcccatcaaaagggaaaagcaggtagcgttaacatgagatggggtgtcagctactcttcttcaggaaagaaataaaagaaatgacagaatgaarggaagggttaacatataatgtgaagacttsttctgttagtggggtgaagactttcttattagggtccaccacagggtttatgttttggctggcgtatccttcctgtagtatgaccttcctcaagcatcatatctagctctgtcttcttcttgcctcctattgagcactctgcactcaggggaactcaggtggattcagggccaataatatgagcaggtctcatatgacaayaaaaagaacaaagtgaatattgaatagtgaatatttttgcctccttctgtttgaaagctgtctatggtcttgcttcttgctcagagtatttcagaggac

SEQ ID NO: 3452 - DNA, 600 bp, Chicken  19866894090966_3
gcgttaacatgagatggggtgtcagctactcttcttcaggaaagaaataaaagaaatgacagaatgaarggaagggttaacatataatgtgaagacttsttctgttagtggggtgaagactttcttattagggtccaccacagggtttatgttttggctggcgtatccttcctgtagtatgaccttcctcaagcatcatatctagctctgtcttcttcttgcctcctattgagcactctgcactcaggggaactcaggtggattcagggccaataatatgagcaggtctcatatgacaayaaaaagaacaaagtgaatattgaatagtgaatatttttgcctccttctgtttgaaagctgtctatggtcttgcttcttgctcagagtatttcagaggacctctttattatcttactatggtaatagtctcaataccttaatcatgataacacattacatcacaaatagctttaccagaggttatggaatcttttacaccccacctatgtaatttaaaacagcttactgtcaggaacagcctatggctattttaataaactctttctccctgcaaagaggagctcttgcatgtgaatcttt

SEQ ID NO: 3453 - DNA, 600 bp, Chicken  19866894100238_1
cgatggggagtgtgacttgactgtcaaatggcaatgctgtatatgcagcctttacaactgccagcctgaatgattccatgggtgaaatcacattggtcaggtggtgttggcatggttcatgcagtgggtgcatattgcatgggggcaggctgcattgctggccccagggcctactgacacgcagtgccaggctgcagtgctgggagcattggggcctactggacacacagtgccaggctgcagtgctgggagcgttggggcctactggacacacagtgccaggctgcagtgctgggagcrttggggcctactgacacmcagtgccaggctgcagtgctgggagcgttggggcctactgacacacagtgccaggtcacagtgctgggagtgttggggcctactgacacacagtgccaggctgcagtgctgggagcactggggcctactcagtactggggcctactgacacagtgctggctcaacgccgcttacagagcagggtgctccaagcctgcaagggctagcacaggcatctaagacaggcttagggtttgctggacttgtgagcctggccaagatgctagcatgttcctctgcctt

SEQ ID NO: 3454 - DNA, 600 bp, Chicken  19866894100238_2
gactgtcaaatggcaatgctgtatatgcagcctttacaactgccagcctgaatgattccatgggtgaaatcacattggtcaggtggtgttggcatggttcatgcagtgggtgcatattgcatgggggcaggctgcattgctggccccagggcctactgacacgcagtgccaggctgcagtgctgggagcattggggcctactggacacacagtgccaggctgcagtgctgggagcgttggggcctactggacacacagtgccaggctgcagtgctgggagcrttggggcctactgacacmcagtgccaggctgcagtgctgggagcgttggggcctactgacacacagtgccaggtcacagtgctgggagtgttggggcctactgacacacagtgccaggctgcagtgctgggagcactggggcctactcagtactggggcctactgacacagtgctggctcaacgccgcttacagagcagggtgctccaagcctgcaagggctagcacaggcatctaagacaggcttagggtttgctggacttgtgagcctggccaagatgctagcatgttcctctgccttcccacagcccacccagct

SEQ ID NO: 3455 - DNA, 600 bp, Chicken  19866894100238_3
cccagctgtgctgcctggaagcgcagtgcggaaccaggtcaccctgagcatgcttgaatattatttctgagtggaaatgctcagtgtacaagaaagaaacattgcaatgcagaaaaagttaatgaaagagctgagctagaaatacactcatcacctgagctgacccttttgtcttgtatcatctgaacctttgcttggtttggaacacagaagccctttgtcccagcccagaaataaagaatagcagccctttgggatgtgagctgtctccagtgatccagtcagtgctgaaggagcacstgcacaaacctcaggcccctgaacactgtctgcttccctggggtgctgctcctgctcaggatgggccccacctcactcctacaaactggatccccttctccagggggctgtccacaaacactgaactgttcattgaagccactgtgctcaccaggagaagtaaaacatttccaaaacagctgcagagctactcccaatataaagtattacacagggccggggtattacacattattatcatgcttgtacattttcatagaatatagaatggagttggaagggactcttaaaggccatcta

SEQ ID NO: 3456 - DNA, 600 bp, Chicken  19866894100238_4
aaacctcaggcccctgaacactgtctgcttccctggggtgctgctcctgctcaggatgggccccacctcactcctacaaactggatccccttctccagggggctgtccacaaacactgaactgttcattgaagccactgtgctcaccaggagaagtaaaacatttccaaaacagctgcagagctactcccaatataaagtattacacagggccggggtattacacattattatcatgcttgtacattttcatagaatatagaatggagttggaagggactcttaaaggccatctattctwacttgcctgcaatgagcagggacacctgcagctacatcaggttgctcagagccccatccagcctgaccttgagtgtctccaaggatggggcatccaccgcctctctgggcaacctgtgccagtgcctcaccacccttactgtaaaaaacttcttcctcatatctaatctaattcttcccttttttttagggaaaccatttccccttgtcctatcaccagagaccctgctaaagagcctgtcccctactgaaactttccctccccggggaagaaataaatataaaataaaagagatggcaa

SEQ ID NO: 3457 - DNA, 600 bp, Chicken  19866894100238_5
tggtaaatgccacagcaggttcccccgcgcaggcacccccgacgctgccaattcttgatccggcagcacaggacggattagcagcggaagattaattccttcctgtcatctccccggggaggttaaatgatctcaggagcaatttctcctgctgggcacgccgcagtgccgaggcacaccgctcgctgccgcagtgtgtgtggggctctcacggtggcagcgagctgggggaagggtcatccacccgagatacatttatttaattaaatggtgatttctcgtgaccctttttttttcacrtgaaagggatctacagcatgtcaggagctgctaggaactaacaaacagccgtagctacgtgcatcttgtatgtggatacagaactaggtctgcattgcaaaggaagactatggggaagaagcctgcagtaaagatgacagctcagagtgctttgctgctgaccaggtcttcagttccaggcactatgcagtacggcagcaaagcaaatacatattggcatgtgagcagtttcactggttgcaaagggatcgctcagctgccttaatggtaagcataagcccccaccctttgcaagagctg

SEQ ID NO: 3458 - DNA, 600 bp, Chicken  19866894100242_1
agaaccattgattacaaccctttggctgtgtccagccactcaattccattcaatcaaacagtctatccttcaaatccacacctctccaatttagtgagaaggatgtggtgagggaccatgtcaaaggcctttcagaagtccaggtagatgacatccaccgctcttcccccatccacaaagtcgtaacttcattatagaagaccaccagattggtcaggcatgatctgcccttggtgaagccatgctggctgtctcgaatcacctctttatctcatatgtgccctaaacagagcttccagraggatctgctccatgatcttcccaggcacagaagtgaggctcaccagcctgtagttccccgggttttcctttctgcctttcctaaaaatggaattaatgtttccctttttccagtcactgggacttcaccaggcagccatgatttttcaaatatgatggagagtggctcagcaaccacatcagccatctctttcagaaccctaggatggatatcatccagtcccatggacttatgcaygttcagtgtcatgaggaagactcggacttgttccactgttacagtgggacagaaaccactcc

SEQ ID NO: 3459 - DNA, 600 bp, Chicken  19866894100242_2
gccatgctggctgtctcgaatcacctctttatctcatatgtgccctaaacagagcttccagraggatctgctccatgatcttcccaggcacagaagtgaggctcaccagcctgtagttccccgggttttcctttctgcctttcctaaaaatggaattaatgtttccctttttccagtcactgggacttcaccaggcagccatgatttttcaaatatgatggagagtggctcagcaaccacatcagccatctctttcagaaccctaggatggatatcatccagtcccatggacttatgcaygttcagtgtcatgaggaagactcggacttgttccactgttacagtgggacagaaaccactccccacaccctcacctagaggctcatggtccaggcagacacggaaaccctgaccacccrtgaagactgaggcaaagcactcattgagtacctcagcttttcctacgtctgaggaagccaggtccctgttacttttcatcagagggggagcactctccttggcctgtctctttcttcctatgtacctgtagaaccccttcttgttatctttcacatcccttgccaagttcagctccatctg

SEQ ID NO: 3460 - DNA, 600 bp, Chicken  19866894100242_3
cccgggttttcctttctgcctttcctaaaaatggaattaatgtttccctttttccagtcactgggacttcaccaggcagccatgatttttcaaatatgatggagagtggctcagcaaccacatcagccatctctttcagaaccctaggatggatatcatccagtcccatggacttatgcaygttcagtgtcatgaggaagactcggacttgttccactgttacagtgggacagaaaccactccccacaccctcacctagaggctcatggtccaggcagacacggaaaccctgaccacccrtgaagactgaggcaaagcactcattgagtacctcagcttttcctacgtctgaggaagccaggtccctgttacttttcatcagagggggagcactctccttggcctgtctctttcttcctatgtacctgtagaaccccttcttgttatctttcacatcccttgccaagttcagctccatctgcaccttggctttcctcatcctatctctacacacagggacaacagccctgtattcctcccaggatacagaaccttgcttccacttcctgtacatctcccttttttctctcagtttaagct

SEQ ID NO: 3461 - DNA, 543 bp, Chicken  19866894100244_1
tgtagagataggatgaggaaagccaaggtgcagatggagctgaacttggcaagggatgtgaaagataacaagaaggggttctacaggtacataggaagaaagagacaggccaaggagagtgctccccctctgataaaaacagagggctggtttcctcagacacagaaaatgggatgcattgaaagacgagtggccatcagggagagggaggtgattgtccccctctactcagctcttgtgaggccccatccagagtactgcatccaggcctggggcccccagcacaagaacgacgtggarctcttggaacaatcccaaaggagggccagtaagatgatcagagggctggagcacctctgctcttaagaaagagtgagggaactgggcttatttagcttggagaagagaaggctctgggaagacctcattgmggccttccagtacttgaaggagtgcataagcaggaggcggaaagactgtttatgaggatggatagtgatagggcaaggggaatggttttaaagcacataacatgcaagattt

SEQ ID NO: 3462 - DNA, 412 bp, Chicken  19866894100244_2
gataaaaacagagggctggtttcctcagacacagaaaatgggatgcattgaaagacgagtggccatcagggagagggaggtgattgtccccctctactcagctcttgtgaggccccatccagagtactgcatccaggcctggggcccccagcacaagaacgacgtggarctcttggaacaatcccaaaggagggccagtaagatgatcagagggctggagcacctctgctcttaagaaagagtgagggaactgggcttatttagcttggagaagagaaggctctgggaagacctcattgmggccttccagtacttgaaggagtgcataagcaggaggcggaaagactgtttatgaggatggatagtgatagggcaaggggaatggttttaaagcacataacatgcaagattt

SEQ ID NO: 3463 - DNA, 600 bp, Chicken  19866894100251_1
tgaggaccttttccatcctcctaacaccttaattcactgctctgaacttgtttgctcttgccaatagcttttgctctcctttcatctcagccttgctttccactctgcccattctccttccttttttgtccctccactgagttcttgctctttttttctcctgtgtattttcctgtccccaccagtctgaatgcagcacacatccccaaagcaggcttttttacaagcccatttcttcacaagaactgctcacaattattatattcataatgaaattcaaaatgtgcaaagaacttgaartgatacgacagtcaaaccttcatccagaatattttgtatgccctagagcataggaatgtcttcatatcttcaggtaattaaaaaaagaaatgctttgtagaggatggtgttttgtaatatttcagactggttgtgtcagtgagacttaattcacaactggctagtgtcaagaatatcatacatagcctgttagaaatctcatataaataacaaatgtatcaaaaaagacttgcaatctcttgtcttcaatcttttgcaagggagaatcgtttcatcttgtaacactcagttcagatatca

SEQ ID NO: 3464 - DNA, 600 bp, Chicken  19866894100255_1
aaggcagagagggactctgtgtcaaggagtatattgaagggcaaggatgaatggttttaaactaatagaggggagatttagactgtgtataagaaagaaattcttcactcaggggcagtgaggccctggcacagctgcccatagagctgtgggtgccccatccctggaggtgctcagggctgggctggatggggccctgggcagcctgagctggtggggggcagccagcccacggcaggggttgggactgactgagctttatggctcctttcaacccaactcattctgtggttctatgawttgtgttcacagtaaagctgaggaaaagtcagtgaatggaaaaggaccaccagttacctgtccaatgtatctgtggctctgaagttgatgtttcccattctcattctaaaaccacagtggtgttttaggtttacctgcttgcgttccccagtgagcacttctacctctaatgaggtgctccatctggcaaagagggcctgggaaagggaaggaagggaggggaaaggaagggaaaaggactggttcatgcatcctgcacacactgccagggacacatagtccaattcaggctcactgctc

SEQ ID NO: 3465 - DNA, 600 bp, Chicken  19866894100255_2
cctgtccaatgtatctgtggctctgaagttgatgtttcccattctcattctaaaaccacagtggtgttttaggtttacctgcttgcgttccccagtgagcacttctacctctaatgaggtgctccatctggcaaagagggcctgggaaagggaaggaagggaggggaaaggaagggaaaaggactggttcatgcatcctgcacacactgccagggacacatagtccaattcaggctcactgctctgggtgaggtggatactcccacagaggactcacacacactgaggtcctcacttcayacaactacattgtttgttggaatgagaaacgtggcacacttgaattctccatgcaggcttcattcaattggaagaagagattgggtctgtcgctccacgttttaaatggttcatttaaaccacagtgttcctcagttggaaaatacagattttctactytcctgagctctgggacaggctggggggcacaggagtagctcggkgcattacatctgctgtgctgctcccacaccttcaactattcctgcaaattcccaycactgcagctcccactgccttcagtgagatcactgagacagt

SEQ ID NO: 3466 - DNA, 600 bp, Chicken  19866894100255_3
ggaggggaaaggaagggaaaaggactggttcatgcatcctgcacacactgccagggacacatagtccaattcaggctcactgctctgggtgaggtggatactcccacagaggactcacacacactgaggtcctcacttcayacaactacattgtttgttggaatgagaaacgtggcacacttgaattctccatgcaggcttcattcaattggaagaagagattgggtctgtcgctccacgttttaaatggttcatttaaaccacagtgttcctcagttggaaaatacagattttctactytcctgagctctgggacaggctggggggcacaggagtagctcggkgcattacatctgctgtgctgctcccacaccttcaactattcctgcaaattcccaycactgcagctcccactgccttcagtgagatcactgagacagtgtggcagtacaaagasacaacctgtacctggtgaaactactcatgtttcactgtcttccttcaatgtggtttgcctgtgactggagagattctggctctgagatcatttcccagctgccaggtgcgccaggggcaggatggaggtgcctaatgagggtt

SEQ ID NO: 3467 - DNA, 600 bp, Chicken  19866894100255_4
acactgccagggacacatagtccaattcaggctcactgctctgggtgaggtggatactcccacagaggactcacacacactgaggtcctcacttcayacaactacattgtttgttggaatgagaaacgtggcacacttgaattctccatgcaggcttcattcaattggaagaagagattgggtctgtcgctccacgttttaaatggttcatttaaaccacagtgttcctcagttggaaaatacagattttctactytcctgagctctgggacaggctggggggcacaggagtagctcggkgcattacatctgctgtgctgctcccacaccttcaactattcctgcaaattcccaycactgcagctcccactgccttcagtgagatcactgagacagtgtggcagtacaaagasacaacctgtacctggtgaaactactcatgtttcactgtcttccttcaatgtggtttgcctgtgactggagagattctggctctgagatcatttcccagctgccaggtgcgccaggggcaggatggaggtgcctaatgagggtttaaccaaaggacgctctgcatttgaagccctctygcagttgaca

SEQ ID NO: 3468 - DNA, 600 bp, Chicken  19866894100255_5
actcccacagaggactcacacacactgaggtcctcacttcayacaactacattgtttgttggaatgagaaacgtggcacacttgaattctccatgcaggcttcattcaattggaagaagagattgggtctgtcgctccacgttttaaatggttcatttaaaccacagtgttcctcagttggaaaatacagattttctactytcctgagctctgggacaggctggggggcacaggagtagctcggkgcattacatctgctgtgctgctcccacaccttcaactattcctgcaaattcccaycactgcagctcccactgccttcagtgagatcactgagacagtgtggcagtacaaagasacaacctgtacctggtgaaactactcatgtttcactgtcttccttcaatgtggtttgcctgtgactggagagattctggctctgagatcatttcccagctgccaggtgcgccaggggcaggatggaggtgcctaatgagggtttaaccaaaggacgctctgcatttgaagccctctygcagttgacagcttttctccttcttgtcttcagctgtgaggtgggcagggggctcagagccctgt

SEQ ID NO: 3469 - DNA, 600 bp, Chicken  19866894100255_6
ttggaatgagaaacgtggcacacttgaattctccatgcaggcttcattcaattggaagaagagattgggtctgtcgctccacgttttaaatggttcatttaaaccacagtgttcctcagttggaaaatacagattttctactytcctgagctctgggacaggctggggggcacaggagtagctcggkgcattacatctgctgtgctgctcccacaccttcaactattcctgcaaattcccaycactgcagctcccactgccttcagtgagatcactgagacagtgtggcagtacaaagasacaacctgtacctggtgaaactactcatgtttcactgtcttccttcaatgtggtttgcctgtgactggagagattctggctctgagatcatttcccagctgccaggtgcgccaggggcaggatggaggtgcctaatgagggtttaaccaaaggacgctctgcatttgaagccctctygcagttgacagcttttctccttcttgtcttcagctgtgaggtgggcagggggctcagagccctgttggtggtgacagcagtgtctcagctggagggatgcagctcggagagccgtgactcagc

SEQ ID NO: 3470 - DNA, 600 bp, Chicken  19866894100255_7
gtagctcggkgcattacatctgctgtgctgctcccacaccttcaactattcctgcaaattcccaycactgcagctcccactgccttcagtgagatcactgagacagtgtggcagtacaaagasacaacctgtacctggtgaaactactcatgtttcactgtcttccttcaatgtggtttgcctgtgactggagagattctggctctgagatcatttcccagctgccaggtgcgccaggggcaggatggaggtgcctaatgagggtttaaccaaaggacgctctgcatttgaagccctctygcagttgacagcttttctccttcttgtcttcagctgtgaggtgggcagggggctcagagccctgttggtggtgacagcagtgtctcagctggagggatgcagctcggagagccgtgactcagccgccttcggcacgcagccgcctcacacgcagccactctgccttccgccatgcgtttatccagcctcattaaagcccgatgtaaaacccaaatcattcatcatctgtgattaaattagtgcccccataaaactttaatacgcctgccgaaaattagccacattcaaaacacgctctcc

SEQ ID NO: 3471 - DNA, 600 bp, Chicken  19866894100257_1
tggccattaagggtcccttccaactcagatgactctcatgagcctatgatactctgcataaatgttaattaagcattttgcaggtcctttctcatgttatttgtcttctcgtaatttccacaccttgagcatcctctgagcgttgctcattgggttagctgcaaaagcatctgaagaccttgcctggggctggtgtgctgacttgtaaaaactgccacaggacacgagcagaggctgcagacttaaaatcagattccagtgatggaggcagaggcagctttaggagccataagtacttaygggctggatggaaagttcttcctctactattggccrtggctgtaggaacttcatcaaagcgtgggtttgatgaagaccagagaaacaactaagcagagttagaaaactgtatcggagcccctggagccaggacccaggcagatgtcatccaaagtcagagtttatggattccctctagcaattaatccatagttatgctttgtgattttaattttgcagactagcccccactttgcataactggagttaaggccggtggcacaacagagagagmtgytctctgcctgtttttattgcggg

SEQ ID NO: 3472 - DNA, 600 bp, Chicken  19866894100257_2
catgagcctatgatactctgcataaatgttaattaagcattttgcaggtcctttctcatgttatttgtcttctcgtaatttccacaccttgagcatcctctgagcgttgctcattgggttagctgcaaaagcatctgaagaccttgcctggggctggtgtgctgacttgtaaaaactgccacaggacacgagcagaggctgcagacttaaaatcagattccagtgatggaggcagaggcagctttaggagccataagtacttaygggctggatggaaagttcttcctctactattggccrtggctgtaggaacttcatcaaagcgtgggtttgatgaagaccagagaaacaactaagcagagttagaaaactgtatcggagcccctggagccaggacccaggcagatgtcatccaaagtcagagtttatggattccctctagcaattaatccatagttatgctttgtgattttaattttgcagactagcccccactttgcataactggagttaaggccggtggcacaacagagagagmtgytctctgcctgtttttattgcgggcctttttgtctcttgttctctaagattttaaggttg

SEQ ID NO: 3473 - DNA, 600 bp, Chicken  19866894100257_3
cagctttaggagccataagtacttaygggctggatggaaagttcttcctctactattggccrtggctgtaggaacttcatcaaagcgtgggtttgatgaagaccagagaaacaactaagcagagttagaaaactgtatcggagcccctggagccaggacccaggcagatgtcatccaaagtcagagtttatggattccctctagcaattaatccatagttatgctttgtgattttaattttgcagactagcccccactttgcataactggagttaaggccggtggcacaacagagagagmtgytctctgcctgtttttattgcgggcctttttgtctcttgttctctaagattttaaggttggttcatgctaaactggtcttcagccaaccaattgttttctcctgtaaataatccttcttcaccttgctggtactgcgtgctgtgaaggacagcagaggagccgcagttcccctggcactgccaatgggagacctttgcttggctttatttactaatattaatgagtaatcaagcctatgtagctactaatcaaatcacatcagagtccataccaaaagcgtggctctgagtacaggac

SEQ ID NO: 3474 - DNA, 600 bp, Chicken  19866894100257_4
ctttaggagccataagtacttaygggctggatggaaagttcttcctctactattggccrtggctgtaggaacttcatcaaagcgtgggtttgatgaagaccagagaaacaactaagcagagttagaaaactgtatcggagcccctggagccaggacccaggcagatgtcatccaaagtcagagtttatggattccctctagcaattaatccatagttatgctttgtgattttaattttgcagactagcccccactttgcataactggagttaaggccggtggcacaacagagagagmtgytctctgcctgtttttattgcgggcctttttgtctcttgttctctaagattttaaggttggttcatgctaaactggtcttcagccaaccaattgttttctcctgtaaataatccttcttcaccttgctggtactgcgtgctgtgaaggacagcagaggagccgcagttcccctggcactgccaatgggagacctttgcttggctttatttactaatattaatgagtaatcaagcctatgtagctactaatcaaatcacatcagagtccataccaaaagcgtggctctgagtacaggactgt

SEQ ID NO: 3475 - DNA, 600 bp, Chicken  19866894100257_5
acatctgcattagcctggagttcattttagagatgttaaattgggcgaaaaggagaacagaagagaggtttggtagaacaaatactgtagttaggtgcagagcacaaaaaaatgctcacgtgtcggaagagccaacaacaacctagcagcctcccaaatatcagggaaatctcagcccattctcctggtgacttcagagggttattttaagatacagctgcctttactttgtttttacttcagttgcagcaatctgtaagggaaggtctgaaaatgactccttgcagcgcaatcgaagcraagggtcatgtgggcggcagctgggtttagagatctgcacagcccatggattttagcctcatttttggaagctgaatcaatattttgttaggttttgcagcagaagtaagcctgggagatcagcactttttcatcccgctgggcttctgcagcttcgcctgggtcacgttagtgctcttctttgggattttccctttcctatgacccatgaaatgatttcacgtctgattttatagagcagtgaagctggctggtagaatttgctaggggtgggaaggaaaacacactccttggatgtca

SEQ ID NO: 3476 - DNA, 600 bp, Chicken  19866894100260_1
ggaattctgggagcttcttccctcattgcacctttgtgaaagcagctgttccatcaatgctgcatattctgttactgatcatgaaggacagcgtgagcatggctctttctgtcctcttcttattcaggggagaattactgataaaatatgttcactgtgagtgattactcacatctgttgattgtacaatttgggactgtttcttatttaaatattgctttgctgttcttcatgcacatgaatcccatgtgacaaaaccattctgaaggcccagtttgcttttctttcagtaaggcaccrctcaattccatcttgcatctgtgtttaaaacataaaattccctcccccaccccaaaagggaggtgatagagatagcagttagaagctctgtaggacgaaagcagagttggcatgacttttagtgaattagtgaatgaaatcagactaagtgctatgtgtgggagccatattctctttcactgggtgtgactgccctgtccaggtgccaaaatatgattcaggacctatgtttgggtgaccctattcttaaaatcgcacattgattatcccattcttgtttcaaaccaagaggtcaagata

SEQ ID NO: 3477 - DNA, 600 bp, Chicken  19866894100260_2
aaaacataaaattccctcccccaccccaaaagggaggtgatagagatagcagttagaagctctgtaggacgaaagcagagttggcatgacttttagtgaattagtgaatgaaatcagactaagtgctatgtgtgggagccatattctctttcactgggtgtgactgccctgtccaggtgccaaaatatgattcaggacctatgtttgggtgaccctattcttaaaatcgcacattgattatcccattcttgtttcaaaccaagaggtcaagataaagttggtcacaaaacgcagtctttwttttttttrtactgctgcatcctgatgagcagtttcatgttcgtagatggttctcagtgcatacagtacactaaagttctcctttctgctctgsggtggttgagggttttttggaaacaatagatagatgcaaagatgggagacagatggatagacaaaaagacaggatcagattctagatgagttacagttgtagccttaatgcatgtgctgtcttaatgctgcaatattagcacagcatcagattccctctacatctgccccccttcctccgactgtaccgatttatatgaaaattaa

SEQ ID NO: 3478 - DNA, 600 bp, Chicken  19866894100260_3
aattccctcccccaccccaaaagggaggtgatagagatagcagttagaagctctgtaggacgaaagcagagttggcatgacttttagtgaattagtgaatgaaatcagactaagtgctatgtgtgggagccatattctctttcactgggtgtgactgccctgtccaggtgccaaaatatgattcaggacctatgtttgggtgaccctattcttaaaatcgcacattgattatcccattcttgtttcaaaccaagaggtcaagataaagttggtcacaaaacgcagtctttwttttttttrtactgctgcatcctgatgagcagtttcatgttcgtagatggttctcagtgcatacagtacactaaagttctcctttctgctctgsggtggttgagggttttttggaaacaatagatagatgcaaagatgggagacagatggatagacaaaaagacaggatcagattctagatgagttacagttgtagccttaatgcatgtgctgtcttaatgctgcaatattagcacagcatcagattccctctacatctgccccccttcctccgactgtaccgatttatatgaaaattaagattacaaa

SEQ ID NO: 3479 - DNA, 600 bp, Chicken  19866894100260_4
agtgaattagtgaatgaaatcagactaagtgctatgtgtgggagccatattctctttcactgggtgtgactgccctgtccaggtgccaaaatatgattcaggacctatgtttgggtgaccctattcttaaaatcgcacattgattatcccattcttgtttcaaaccaagaggtcaagataaagttggtcacaaaacgcagtctttwttttttttrtactgctgcatcctgatgagcagtttcatgttcgtagatggttctcagtgcatacagtacactaaagttctcctttctgctctgsggtggttgagggttttttggaaacaatagatagatgcaaagatgggagacagatggatagacaaaaagacaggatcagattctagatgagttacagttgtagccttaatgcatgtgctgtcttaatgctgcaatattagcacagcatcagattccctctacatctgccccccttcctccgactgtaccgatttatatgaaaattaagattacaaattaaaaccaggctatcctggagttttccagttcatcagccatccaataaaaatgatgttgagcctgtatgcataattcccagaag

SEQ ID NO: 3480 - DNA, 562 bp, Chicken  19866894100268_1
gtttgcctggtaagtttggacttcagataataagaacactcaggcctgtgctaaaagtaacagaacaaagaggggaatattttatgtaatgaaacctcaggtacctttgttgcctttacgtaacatggggttatctcggcaccgagctaatggaaagtaacccaatccttgatctggcagtggtttgactttaaaactctcgggcacaaagtttgacgtgactttaacatgtcattgcaaaactgtgtgtgttgtgtgaactgggagctgctttcaggaatcagaggtgtgcacggaacyctttgagtgtagctcagcaaggggggtgacaagcaggggtgggaagtgctgctgcttcgagcttccatgtggttgtcttcccctggcacaagggcgcgaggtggaggctgcaaggtgctgtacatgttgggatgagaagccagcaaaagcacaagggatgcttgtattggtgctttgctccaggatggcactgcccgccctgctggggatgcagcagttaataatgacttgtgccaatacacgttttggggagaaacattcc

SEQ ID NO: 3481 - DNA, 600 bp, Chicken  19866894100269_1
cagatactgaaattaattatctgaaatatgttcctgaaatatttgtggaagaagataaactgtttacatattttcctccgaattcttgatataattaaaatatccttttatattgcatgaaaagtggagaataaaacggcagtaaacatgcaattaggaaaaaaagttctagcctgcatccatctacctcttttgtccctgacacaaaggggaaagaagttagtgttgtgtatggtaactgttgagtcacagcccaacccactgattgagcacctgtggaaaggacccattcagccctgrgagcacaggtgaaggcaattgagctgtgtgaccagaaggggtggagcctggctgcacctcttagacctcatttaagggctgactgcctttraggaacgatttctggttggagaacacatccctcccttgtgtagtctttcctgtgagcctagatcttcagagactggtgagcacctttacttttcctttgaaatgcyatcctatctgtgttggtccctttgcttttacatgctcctctattgcttttccactgtgttaatctttccaattgtaatagtcttatattaggccagaagttct

SEQ ID NO: 3482 - DNA, 600 bp, Chicken  19866894100269_2
taattaaaatatccttttatattgcatgaaaagtggagaataaaacggcagtaaacatgcaattaggaaaaaaagttctagcctgcatccatctacctcttttgtccctgacacaaaggggaaagaagttagtgttgtgtatggtaactgttgagtcacagcccaacccactgattgagcacctgtggaaaggacccattcagccctgrgagcacaggtgaaggcaattgagctgtgtgaccagaaggggtggagcctggctgcacctcttagacctcatttaagggctgactgcctttraggaacgatttctggttggagaacacatccctcccttgtgtagtctttcctgtgagcctagatcttcagagactggtgagcacctttacttttcctttgaaatgcyatcctatctgtgttggtccctttgcttttacatgctcctctattgcttttccactgtgttaatctttccaattgtaatagtcttatattaggccagaagttctcagctgaagtctgtcaagctgtttgagtttctgtcatcctgaagtccaggctgaaactgtttagttcattgtttgttcctaaaatgttaaa

SEQ ID NO: 3483 - DNA, 600 bp, Chicken  19866894100269_3
cctgacacaaaggggaaagaagttagtgttgtgtatggtaactgttgagtcacagcccaacccactgattgagcacctgtggaaaggacccattcagccctgrgagcacaggtgaaggcaattgagctgtgtgaccagaaggggtggagcctggctgcacctcttagacctcatttaagggctgactgcctttraggaacgatttctggttggagaacacatccctcccttgtgtagtctttcctgtgagcctagatcttcagagactggtgagcacctttacttttcctttgaaatgcyatcctatctgtgttggtccctttgcttttacatgctcctctattgcttttccactgtgttaatctttccaattgtaatagtcttatattaggccagaagttctcagctgaagtctgtcaagctgtttgagtttctgtcatcctgaagtccaggctgaaactgtttagttcattgtttgttcctaaaatgttaaagggatattgctttctgctgtaaattctcaggccagtctgtgttggggctggaatgaatgcaaaatgggaaaattttgtatatatatatatatatatacacacacag

SEQ ID NO: 3484 - DNA, 599 bp, Chicken  19866894100270_1
  misc_feature (1)..(16): n is any nucleotide
nnnnnnnnnnnnnnnnctgtcagtggaacttccctcttgccaagatcagaattttgagttttgaccgtgcccaattacaacagtgcaggtaaagaacaaattattgagatatcgatacaaaatgcaaatgcctgcttatccagtaaatcattgggtaaactgaaaatgatttccaatttcagcacatcatggccatgctactgatacagcagctagccctccccactgcatgcgctcacagcacaactctagcatctacggttatgatggaaaacaagttcagaagaagtcccaaacaaygactttagcatttatctttcacatatctgtacaatgaaaacaacgtgcaagaccattttcagctctctacagacgagcctcagccagagcttttttcaccccgcaccaaaamccctaaaactaaggaccacgaaccacacctgagatccactcctcgcaaggaagcgtttctggggattgtaggtatgtacttgctgtcaccggtacggaaacacctccgggcctcgggcacagggcagggtccgctgagctgcccagcacaaagaacacgaggccctgccccaaaggccgcccggcag

SEQ ID NO: 3485 - DNA, 600 bp, Chicken  19866894100270_2
cgatacaaaatgcaaatgcctgcttatccagtaaatcattgggtaaactgaaaatgatttccaatttcagcacatcatggccatgctactgatacagcagctagccctccccactgcatgcgctcacagcacaactctagcatctacggttatgatggaaaacaagttcagaagaagtcccaaacaaygactttagcatttatctttcacatatctgtacaatgaaaacaacgtgcaagaccattttcagctctctacagacgagcctcagccagagcttttttcaccccgcaccaaaamccctaaaactaaggaccacgaaccacacctgagatccactcctcgcaaggaagcgtttctggggattgtaggtatgtacttgctgtcaccggtacggaaacacctccgggcctcgggcacagggcagggtccgctgagctgcccagcacaaagaacacgaggccctgccccaaaggccgcccggcagcgaacaggacggggcgctcagaccaccgacacagacactcaatgaatgagaccaagcgctacacagctcctcgctgccttcctaactctcgtggggggacaaaacaagagaaa

SEQ ID NO: 3486 - DNA, 600 bp, Chicken  19866894100272_1
tttttgaggctcagctttcatccaaaaatcgtgctagaaccacaggacctgaaagctgtgctctatatgaatgaatgcaaagtctgtatgagcgcgcacagctgtgtctccaggctgtgacagacccttcgctttgcttttttccccttcatttacggcctctgctcggtcccactgctcggtccgaacgtctttcagcccctcctgcattgtggcactgagttacgtgtggcagtaccacggttttctgttgccctgcagatagaggtgttacatccgtccgagaacccaaaccccacwtcagggcacrcacttcgtggattgttttcgtcctggtgctcaggagcttcccttgctgttgttggaaatgtttcgttctgcttggccttactggactgttttctttcctcgctctctcacatgccccttccctccaccctgtctcgtgttttgtcttgtcttatttttccaatgaggtgttttcacagcagccatctcaagtggcagcgagaaagagagcaggtggggaaattcagartgggagctgcgcccatgcaagatagagtggaggtggcaatgggaagagcccatggggggagg

SEQ ID NO: 3487 - DNA, 600 bp, Chicken  19866894100272_2
tcagctttcatccaaaaatcgtgctagaaccacaggacctgaaagctgtgctctatatgaatgaatgcaaagtctgtatgagcgcgcacagctgtgtctccaggctgtgacagacccttcgctttgcttttttccccttcatttacggcctctgctcggtcccactgctcggtccgaacgtctttcagcccctcctgcattgtggcactgagttacgtgtggcagtaccacggttttctgttgccctgcagatagaggtgttacatccgtccgagaacccaaaccccacwtcagggcacrcacttcgtggattgttttcgtcctggtgctcaggagcttcccttgctgttgttggaaatgtttcgttctgcttggccttactggactgttttctttcctcgctctctcacatgccccttccctccaccctgtctcgtgttttgtcttgtcttatttttccaatgaggtgttttcacagcagccatctcaagtggcagcgagaaagagagcaggtggggaaattcagartgggagctgcgcccatgcaagatagagtggaggtggcaatgggaagagcccatggggggaggctgggggaaa

SEQ ID NO: 3488 - DNA, 600 bp, Chicken  19866894100272_3
cacggttttctgttgccctgcagatagaggtgttacatccgtccgagaacccaaaccccacwtcagggcacrcacttcgtggattgttttcgtcctggtgctcaggagcttcccttgctgttgttggaaatgtttcgttctgcttggccttactggactgttttctttcctcgctctctcacatgccccttccctccaccctgtctcgtgttttgtcttgtcttatttttccaatgaggtgttttcacagcagccatctcaagtggcagcgagaaagagagcaggtggggaaattcagartgggagctgcgcccatgcaagatagagtggaggtggcaatgggaagagcccatggggggaggctgggggaaaccagagcacagcagagagcgagggggaaagagggcagaaargggtggcaggaggagcaaaagggggggaaaaggaggaggagaggatcgatggaggcagagggcgaggaggaagaggtcaaggactgatggttgaccccggtggaggagtcccactgcactcagcctgccgggcccgtggcggggccgaggctattggagcagtggggaggcagcctgcatttaggca

SEQ ID NO: 3489 - DNA, 600 bp, Chicken  19866894100272_4
cttgctgttgttggaaatgtttcgttctgcttggccttactggactgttttctttcctcgctctctcacatgccccttccctccaccctgtctcgtgttttgtcttgtcttatttttccaatgaggtgttttcacagcagccatctcaagtggcagcgagaaagagagcaggtggggaaattcagartgggagctgcgcccatgcaagatagagtggaggtggcaatgggaagagcccatggggggaggctgggggaaaccagagcacagcagagagcgagggggaaagagggcagaaargggtggcaggaggagcaaaagggggggaaaaggaggaggagaggatcgatggaggcagagggcgaggaggaagaggtcaaggactgatggttgaccccggtggaggagtcccactgcactcagcctgccgggcccgtggcggggccgaggctattggagcagtggggaggcagcctgcatttaggcagcgaaaaagtttatttgctttttctcgcaggatatgctaagtgattttgcagtttgagtggagtggcattattgcacttagctctgcattgattaaataaatttgttctccaa

SEQ ID NO: 3490 - DNA, 600 bp, Chicken  19866894100274_1
gtgttcaaacaagagcgcatgcaacaagctattttcatgaaagcactctgtggtgggacagctcaccctgttggagtgctgcaacagatggacagagggagatgagcccttcctgggagaatggcagaggagacgtggaccattccctgtgggaaagagcagcttagatgtgcagggctcaggccaaagagctcacaagtcaggccaaaggagaggtcacaagtatgacactgtggtgggaatctgctacaggagagaacagattagctatcatagacaatttttggaagtatctgtcayacacccacatcctcattgcaacttttaacaagtacaaacacagcccatccaggagatgtctaaagggtgtcacaggtaacttcttgttatgcagttactaggtgttccagccagagcggacacacagccaacgattctgtagtgaccatggagtcaggttcctgagagaagtgaaagaggaaacagaagacagaaaaaggaatatgagctataagacagaagaaggtgggtttttttgggggtttttttgtttgtttgtttgtttgttttttatggtttacatcagcaagcaactaagca

SEQ ID NO: 3491 - DNA, 600 bp, Chicken  19866894100276_1
aagcaaaggtgtgtcactgaattcctccatgtggaaataatggcacccactgacattcatcaacacttgctgaacgtttatggagatcaaacagcagatgtgaggacggggaggtggtgggtgacagtagttacccccagtggtggaggtttttgagtgcaacatgcaggttcttgttcgttgctggcaaaaaagtataactaatggtggtgaccatgttggaagatagtgttttgtagctgagaacgttttctatccaatagtgttattgtgctctttgtatctgttgtagcttccatrgaaatacatgagacattacttctggagcaacctgcacaatacacagcactcacataactaayagggagccttacacgaaggggtcttcacttctattcaactcagtttgtccttrggttatgcaagccacaggaagaaaagccttcaaataaaacaagagctctgctgtaagcctttactaaagcactacctarcagcataggtagcatttttaacacctgaataaatgattttctaaggggcacatcagcgtccttacgttcagtgcaagttacaacacgtccctaacagcagggtgga

SEQ ID NO: 3492 - DNA, 600 bp, Chicken  19866894100276_2
acacttgctgaacgtttatggagatcaaacagcagatgtgaggacggggaggtggtgggtgacagtagttacccccagtggtggaggtttttgagtgcaacatgcaggttcttgttcgttgctggcaaaaaagtataactaatggtggtgaccatgttggaagatagtgttttgtagctgagaacgttttctatccaatagtgttattgtgctctttgtatctgttgtagcttccatrgaaatacatgagacattacttctggagcaacctgcacaatacacagcactcacataactaayagggagccttacacgaaggggtcttcacttctattcaactcagtttgtccttrggttatgcaagccacaggaagaaaagccttcaaataaaacaagagctctgctgtaagcctttactaaagcactacctarcagcataggtagcatttttaacacctgaataaatgattttctaaggggcacatcagcgtccttacgttcagtgcaagttacaacacgtccctaacagcagggtggagatttgaaaatggtgaagcagttattttccaggacagatcygtgaaactcatcattactgca

SEQ ID NO: 3493 - DNA, 600 bp, Chicken  19866894100276_3
ggtgggtgacagtagttacccccagtggtggaggtttttgagtgcaacatgcaggttcttgttcgttgctggcaaaaaagtataactaatggtggtgaccatgttggaagatagtgttttgtagctgagaacgttttctatccaatagtgttattgtgctctttgtatctgttgtagcttccatrgaaatacatgagacattacttctggagcaacctgcacaatacacagcactcacataactaayagggagccttacacgaaggggtcttcacttctattcaactcagtttgtccttrggttatgcaagccacaggaagaaaagccttcaaataaaacaagagctctgctgtaagcctttactaaagcactacctarcagcataggtagcatttttaacacctgaataaatgattttctaaggggcacatcagcgtccttacgttcagtgcaagttacaacacgtccctaacagcagggtggagatttgaaaatggtgaagcagttattttccaggacagatcygtgaaactcatcattactgcagcattgcttggaagtcaagcagtggttaaaggacacacagtcaggtacttctg

SEQ ID NO: 3494 - DNA, 600 bp, Chicken  19866894100276_4
gtataactaatggtggtgaccatgttggaagatagtgttttgtagctgagaacgttttctatccaatagtgttattgtgctctttgtatctgttgtagcttccatrgaaatacatgagacattacttctggagcaacctgcacaatacacagcactcacataactaayagggagccttacacgaaggggtcttcacttctattcaactcagtttgtccttrggttatgcaagccacaggaagaaaagccttcaaataaaacaagagctctgctgtaagcctttactaaagcactacctarcagcataggtagcatttttaacacctgaataaatgattttctaaggggcacatcagcgtccttacgttcagtgcaagttacaacacgtccctaacagcagggtggagatttgaaaatggtgaagcagttattttccaggacagatcygtgaaactcatcattactgcagcattgcttggaagtcaagcagtggttaaaggacacacagtcaggtacttctgggcccctccgttactacttcagtggctatcgcgccctcactgccatcarcgtgacccggagcaccacgaggacaccagt

SEQ ID NO: 3495 - DNA, 600 bp, Chicken  19866894100276_5
cacagcactcacataactaayagggagccttacacgaaggggtcttcacttctattcaactcagtttgtccttrggttatgcaagccacaggaagaaaagccttcaaataaaacaagagctctgctgtaagcctttactaaagcactacctarcagcataggtagcatttttaacacctgaataaatgattttctaaggggcacatcagcgtccttacgttcagtgcaagttacaacacgtccctaacagcagggtggagatttgaaaatggtgaagcagttattttccaggacagatcygtgaaactcatcattactgcagcattgcttggaagtcaagcagtggttaaaggacacacagtcaggtacttctgggcccctccgttactacttcagtggctatcgcgccctcactgccatcarcgtgacccggagcaccacgaggacaccagtaaagggtgttggatggtgtaaggacaggaggcagcaaatacagctgctttaaaccagttccagattgctcaagaaaggcagttatcacaatctggtaataaggaacggccgatccctttgtgagggatccctgcactctaaagcagg

SEQ ID NO: 3496 - DNA, 527 bp, Chicken  19866894100276_6
gctgtaagcctttactaaagcactacctarcagcataggtagcatttttaacacctgaataaatgattttctaaggggcacatcagcgtccttacgttcagtgcaagttacaacacgtccctaacagcagggtggagatttgaaaatggtgaagcagttattttccaggacagatcygtgaaactcatcattactgcagcattgcttggaagtcaagcagtggttaaaggacacacagtcaggtacttctgggcccctccgttactacttcagtggctatcgcgccctcactgccatcarcgtgacccggagcaccacgaggacaccagtaaagggtgttggatggtgtaaggacaggaggcagcaaatacagctgctttaaaccagttccagattgctcaagaaaggcagttatcacaatctggtaataaggaacggccgatccctttgtgagggatccctgcactctaaagcaggtgatctccaagaagagagccttcccttggggctgccagcccttcagagag

SEQ ID NO: 3497 - DNA, 600 bp, Chicken  19866894100277_1
ttttgtgggattttttttcatatcttatttggagccctaagtgttcttcacacttctcatttatacattcctcccagctacttattcactggtttcatctttttataacagcatttgtgtttgtttccgataagggccaaacattaatttagtaagagtcatgagcattttcatcaaagaaaacactcagactagtcaaatttgaaaacaatatgtaacacctataacaattttaagatactgtttggcacaacaatcttaagaagtagcttaaatttaatcccaatgttcatatctagsttatgttaattttaagcaattggacttctttccagtttgcaagagctgctgtccatcattacaagtgagaccaatttgtaaaagaaaatacatattggctaggactctttatcttgaacctaggattttctacttctgttaacatttctggaatttgaaattgaaaatctaggatcccaattccaaaaacttctatctaggtgacaataattttaacaatgcatttgtgactttaactgaactatttatcacatttagtatgatcagctatttgtcatgtattttatgtgccatgtggaa

SEQ ID NO: 3498 - DNA, 600 bp, Chicken  19866894100278_1
acaaaagtaatcccacctcaaattagaatctctcaacttacgttgtttccttagctgcaaaatatatatacaaaatttctatgaagtttgcgaatacttgagcagcagcactttcactctgataactgaaaataactaagtaaatagaaagtacagaattttaacccatctttagggaaacaaaaagtaggtttcaaaaggataagcaatatgacaaacttaaggccaaacccaaaatttcccatcagttaaaagaaacatttgaagaaaaaaaattgttcataatggaagtgttggcaycatgcacatcatagtgacagcacccccaccaccacaraactgttatgctgactgtacaaaaagaactgcaaaaaccatgataaaatataatccaacattaatttgtctccatcagcatagtatttacgaaattctttcggtgttcttccttcagtttaatctgcttcaataatccaagataaactgcatttttaaatgtttactgcaaaacagatgtcagaataatatgcctagctgtgtgtgtgtgagatgatcagtgactggtgtgatgagagagggaaaatgggaagaaggatgctt

SEQ ID NO: 3499 - DNA, 600 bp, Chicken  19866894100278_2
ttacgttgtttccttagctgcaaaatatatatacaaaatttctatgaagtttgcgaatacttgagcagcagcactttcactctgataactgaaaataactaagtaaatagaaagtacagaattttaacccatctttagggaaacaaaaagtaggtttcaaaaggataagcaatatgacaaacttaaggccaaacccaaaatttcccatcagttaaaagaaacatttgaagaaaaaaaattgttcataatggaagtgttggcaycatgcacatcatagtgacagcacccccaccaccacaraactgttatgctgactgtacaaaaagaactgcaaaaaccatgataaaatataatccaacattaatttgtctccatcagcatagtatttacgaaattctttcggtgttcttccttcagtttaatctgcttcaataatccaagataaactgcatttttaaatgtttactgcaaaacagatgtcagaataatatgcctagctgtgtgtgtgtgagatgatcagtgactggtgtgatgagagagggaaaatgggaagaaggatgcttttcaaaactgaaccatccaggactcaaagccttgatt

SEQ ID NO: 3500 - DNA, 600 bp, Chicken  19866894100278_3
attctggatgagacaagaggaggaaaagatggatataagggttaaaaatcagggcacaaacagacctcaaatgcctgaatcttaatttacaaacacatcgcttagtagtcagagcactgtattttgacctgaaagttcccaaggtgcctagaattcatctgcacacccctaaatgtccagaaatgccttgagctgagcatctaacccacagtctccatctactggagctcagaaatctgatgaccaactcacaccaacaaaagcaaggcgtagcagtagatgccttaattttaaaacccraacacacttttttatatagcaaccaatgagttacagcctcagggagcaaagtatgacctgtatcattttgataaactggttctgagatccagcactgcttctgtgactgtaaattttacattaggtcactgggaagaaaaaaaaaaaaaaaaagaaacaaaaaacactaaaccctagaatgagaagcagagctcatgacgctccaacattatgtcctaaccaccaggcaatcctttggactatctgttcaagcatgcaacttcagcactgggactccacagyggttacaagtacagaatg

SEQ ID NO: 3501 - DNA, 600 bp, Chicken  19866894100278_4
cccaaggtgcctagaattcatctgcacacccctaaatgtccagaaatgccttgagctgagcatctaacccacagtctccatctactggagctcagaaatctgatgaccaactcacaccaacaaaagcaaggcgtagcagtagatgccttaattttaaaacccraacacacttttttatatagcaaccaatgagttacagcctcagggagcaaagtatgacctgtatcattttgataaactggttctgagatccagcactgcttctgtgactgtaaattttacattaggtcactgggaagraaaaaaaaaaaaaaaagaaacaaaaaacactaaaccctagaatgagaagcagagctcatgacgctccaacattatgtcctaaccaccaggcaatcctttggactatctgttcaagcatgcaacttcagcactgggactccacagyggttacaagtacagaatgctgctcttctttacacttctgagtcccggcagacaaagactggattcaatctttcagtggtcattttctgtaggtattaagcaaacccacacgcaggagacaaaattcaggggggtgattttttggaaatacttctt

SEQ ID NO: 3502 - DNA, 600 bp, Chicken  19866894100278_5
ccttaattttaaaacccraacacacttttttatatagcaaccaatgagttacagcctcagggagcaaagtatgacctgtatcattttgataaactggttctgagatccagcactgcttctgtgactgtaaattttacattaggtcactgggaagaaaaaaaaaaaaaaaaagaaacaaaaaacactaaaccctagaatgagaagcagagctcatgacgctccaacattatgtcctaaccaccaggcaatcctttggactatctgttcaagcatgcaacttcagcactgggactccacagyggttacaagtacagaatgctgctcttctttacacttctgagtcccggcagacaaagactggattcaatctttcagtggtcattttctgtaggtattaagcaaacccacacgcaggagacaaaattcaggggggtgattttttggaaatacttcttcccatatgcttacgaaaggagtcaaagtgcttaactctggttcctgatttccactctgtaaaatacatgcctaacacttagacagcaaaccgactaatttacaggcaactaatttcttcacaggagcttcattttatgtctttag

SEQ ID NO: 3503 - DNA, 599 bp, Chicken  19866894100283_1
  misc_feature (1)..(22): n is any nucleotide
nnnnnnnnnnnnnnnnnnnnnntatggttagattagcccatctattataaatatgacacagcagtgcccacaaacattacagagttttcagcatttcagctaaaatccccattttggaaggatttacagcttggctgtaagagtggcgtctggctgaaacgtggcatacaaagtctcgccataagagcccagcagttaataataaatcaatttggctatttttaaattagaaggttgaaaaatacaaatgaagtttaccatttgctgacacatctttgatgtccaaaggaatgtgaattscactggccaacttttcagctgatgtaaatcagcataactacgctggcatcagtggagctccagtgatttccatgctgcaaatctgtccctgtgtttattaatggaacacttgtagttagacttttgggtcacatatttgctgctgatgtgacccactggaatcaaccgggagttgcacatacatatgcagaaaaaatacatatttctttctccttgcctgattatttaatttttaattaaaacaattgcagtgaccaaatctaatcttagtgaattcagagaatttaaggcagtatgta

SEQ ID NO: 3504 - DNA, 600 bp, Chicken  19866894100283_2
cactggccaacttttcagctgatgtaaatcagcataactacgctggcatcagtggagctccagtgatttccatgctgcaaatctgtccctgtgtttattaatggaacacttgtagttagacttttgggtcacatatttgctgctgatgtgacccactggaatcaaccgggagttgcacatacatatgcagaaaaaatacatatttctttctccttgcctgattatttaatttttaattaaaacaattgcagtgaccaaatctaatcttagtgaattcagagaatttaaggcagtatgtaysctgcttggcaccatggtgaaatttacaaggcagatgcagcacatgcatcaattcctactttttatctcttccgattgatccatgtggcaatctgtgctattgttaatccatatttacaacataaacctagatttcagtggtttcacagagaggtcatgctgaaactttaagcgacctctggaaaatacagaggccaaagatttggcattagattccagacattttctttcttcttcctctcctacatactgctttgtcttgcagaaagggcttcatgtctctgcctcacctccttcaac

SEQ ID NO: 3505 - DNA, 600 bp, Chicken  19866894100283_3
actggccaacttttcagctgatgtaaatcagcataactacgctggcatcagtggagctccagtgatttccatgctgcaaatctgtccctgtgtttattaatggaacacttgtagttagacttttgggtcacatatttgctgctgatgtgacccactggaatcaaccgggagttgcacatacatatgcagaaaaaatacatatttctttctccttgcctgattatttaatttttaattaaaacaattgcagtgaccaaatctaatcttagtgaattcagagaatttaaggcagtatgtaysctgcttggcaccatggtgaaatttacaaggcagatgcagcacatgcatcaattcctactttttatctcttccgattgatccatgtggcaatctgtgctattgttaatccatatttacaacataaacctagatttcagtggtttcacagagaggtcatgctgaaactttaagcgacctctggaaaatacagaggccaaagatttggcattagattccagacattttctttcttcttcctctcctacatactgctttgtcttgcagaaagggcttcatgtctctgcctcacctccttcaacc

SEQ ID NO: 3506 - DNA, 600 bp, Chicken  19866894100283_4
tttggcattgtttccatccccttcctccgccataagccaaatgggactgatgatatttactgagcagtggggggagcagggctttatgtatgacatatgctaaacataccatctatttgcatgcttatgattgtacatgccatcataaacacacggtggaactttgcatcattttactgccatttctaaaaacctgagtatcatctgggttattgactaaatccatttaggagtagtattgtgcacttatggtgataataggaacacagaacatatttactaacaccatacatgccatgyccatgtmttacaatgtacacagaaagcatagtagcattaattgatgtaagatagaaatgtttgcttgtttcacccagtgcatttcttcatttgctgaataattcagcccctatacaggcttagctgacctttgcttgataaagtcatatttctaagcatttgcttacatttggtatttttaatcaggttcaagtccactcactgcacatcagagctgagaataatgatgcagatacgtgttttagccaaatgatgttccttgtaacagacacttcccccaaatcactgagttgttaacta

SEQ ID NO: 3507 - DNA, 600 bp, Chicken  19866894100283_5
ttgtttccatccccttcctccgccataagccaaatgggactgatgatatttactgagcagtggggggagcagggctttatgtatgacatatgctaaacataccatctatttgcatgcttatgattgtacatgccatcataaacacacggtggaactttgcatcattttactgccatttctaaaaacctgagtatcatctgggttattgactaaatccatttaggagtagtattgtgcacttatggtgataataggaacacagaacatatttactaacaccatacatgccatgyccatgtmttacaatgtacacagaaagcatagtagcattaattgatgtaagatagaaatgtttgcttgtttcacccagtgcatttcttcatttgctgaataattcagcccctatacaggcttagctgacctttgcttgataaagtcatatttctaagcatttgcttacatttggtatttttaatcaggttcaagtccactcactgcacatcagagctgagaataatgatgcagatacgtgttttagccaaatgatgttccttgtaacagacacttcccccaaatcactgagttgttaactaaagtgta

SEQ ID NO: 3508 - DNA, 600 bp, Chicken  19866894100284_1
aatggcatcaaaataaggaagtacttgctttgcagtaacgtttgtccacagccatctgaagaggcatgcctaaaataactgtttcaaaaggccagcacaattagcacatccagtgcagcagaaacagataatatttgcttagcaaaacaggagtatgggatcttggcagagagaacttattttctcaaacatttgtcactgtttttaaaacatgctgttaccaggtgatcctttggccagcgagcaccactgagcacctctggtcatactacgtcaaactggaagtttgtttgagagagycgtgtcgggtaccaccttttcatatatggcattttaraagttagaaaactttgctgatcagggcagctcttaactttgggaagctgttttctactgctaggaggtggattttcttcttgctgttgactcatactggcactgaagcatcacggctttttttcaggtcgaagtatccggttgcattcttgtttgctcatgcaggtgctttacgtaacagccccaagacaactgacgctattggaaagcagctgcagcataggcagcattgtaggaattcaccacttcagtttagttcagctc

SEQ ID NO: 3509 - DNA, 600 bp, Chicken  19866894100284_2
acgtttgtccacagccatctgaagaggcatgcctaaaataactgtttcaaaaggccagcacaattagcacatccagtgcagcagaaacagataatatttgcttagcaaaacaggagtatgggatcttggcagagagaacttattttctcaaacatttgtcactgtttttaaaacatgctgttaccaggtgatcctttggccagcgagcaccactgagcacctctggtcatactacgtcaaactggaagtttgtttgagagagycgtgtcgggtaccaccttttcatatatggcattttaraagttagaaaactttgctgatcagggcagctcttaactttgggaagctgttttctactgctaggaggtggattttcttcttgctgttgactcatactggcactgaagcatcacggctttttttcaggtcgaagtatccggttgcattcttgtttgctcatgcaggtgctttacgtaacagccccaagacaactgacgctattggaaagcagctgcagcataggcagcattgtaggaattcaccacttcagtttagttcagctctgagatcacgagaaaataagcccgagtgatcccctgg

SEQ ID NO: 3510 - DNA, 600 bp, Chicken  19866894100285_1
gctgagcaaaaggtgaagagcacacagataagcctagtctaaattagaggatttcagtatccagagacctctaatagaaaactgaagtaaatgaacgagtatattccattccatactgcttttccaattaattactttccagctatgaaaaaggtctcccctcctctccctttactttttttctccatgctaactagagattggtacctcctgttagcctttcttttcagactaaattgcaactcagatgtaattcagattctgggctgcatcaaaagaggagtggccaacagggtgagrgaggtgatcgtttccttctactctgcccttgtgaggtctcatcaggagtaccgtgatcagctctggggtcctcaacataagaaagctgtgracctgctggagtaagttcagagtacagatacgaggatgaccagatgagcacctctcctagaaagacagackgagagaattggggttgttcagcctggaraacagaaggcttcagggagaacacactgtggccttccagtactcacagggagcctacaagaaagctggaactctttatcagagaatgtagtgatagaacaaaggcaaatg

SEQ ID NO: 3511 - DNA, 600 bp, Chicken  19866894100285_2
tgaacgagtatattccattccatactgcttttccaattaattactttccagctatgaaaaaggtctcccctcctctccctttactttttttctccatgctaactagagattggtacctcctgttagcctttcttttcagactaaattgcaactcagatgtaattcagattctgggctgcatcaaaagaggagtggccaacagggtgagrgaggtgatcgtttccttctactctgcccttgtgaggtctcatcaggagtaccgtgatcagctctggggtcctcaacataagaaagctgtgracctgctggagtaagttcagagtacagatacgaggatgaccagatgagcacctctcctagaaagacagackgagagaattggggttgttcagcctggaraacagaaggcttcagggagaacacactgtggccttccagtactcacagggagcctacaagaaagctggaactctttatcagagaatgtagtgatagaacaaaggcaaatggctttaaactaaaagacggaatatttacactggatattaggaggaaattctttactcagagactggtgagacactggaacaggctgcccag

SEQ ID NO: 3512 - DNA, 600 bp, Chicken  19866894100285_3
cctctccctttactttttttctccatgctaactagagattggtacctcctgttagcctttcttttcagactaaattgcaactcagatgtaattcagattctgggctgcatcaaaagaggagtggccaacagggtgagrgaggtgatcgtttccttctactctgcccttgtgaggtctcatcaggagtaccgtgatcagctctggggtcctcaacataagaaagctgtgracctgctggagtaagttcagagtacagatacgaggatgaccagatgagcacctctcctagaaagacagackgagagaattggggttgttcagcctggaraacagaaggcttcagggagaacacactgtggccttccagtactcacagggagcctacaagaaagctggaactctttatcagagaatgtagtgatagaacaaaggcaaatggctttaaactaaaagacggaatatttacactggatattaggaggaaattctttactcagagactggtgagacactggaacaggctgcccagagaagctgtagatgtccagtactgggaagtattcaagaccatgttgattgcggccctggacaacctgatct

SEQ ID NO: 3513 - DNA, 600 bp, Chicken  19866894100285_4
taactagagattggtacctcctgttagcctttcttttcagactaaattgcaactcagatgtaattcagattctgggctgcatcaaaagaggagtggccaacagggtgagrgaggtgatcgtttccttctactctgcccttgtgaggtctcatcaggagtaccgtgatcagctctggggtcctcaacataagaaagctgtgracctgctggagtaagttcagagtacagatacgaggatgaccagatgagcacctctcctagaaagacagackgagagaattggggttgttcagcctggaraacagaaggcttcagggagaacacactgtggccttccagtactcacagggagcctacaagaaagctggaactctttatcagagaatgtagtgatagaacaaaggcaaatggctttaaactaaaagacggaatatttacactggatattaggaggaaattctttactcagagactggtgagacactggaacaggctgcccagagaagctgtagatgtccagtactgggaagtattcaagaccatgttgattgcggccctggacaacctgatctggtggaaggtgttcttgcctgcagtaga

SEQ ID NO: 3514 - DNA, 600 bp, Chicken  19866894100285_5
acctttgagcaagccctgtttgggggaactattatagtgtacatcagctttacaaccatggccatgcctgctgcccgaaggcaggagctgtctcaaaagtaactgctgaaacagagcttatgccatgccctacaaaaataatgtcagttatgaaactctatgtgcgatagggcaagattttaacagttttacattaagtatagaagtatagtgctttttgtgtagttatttatcttaggaaaatggggggaaaaacaactttcatgtaacagacctttctttgtgccacttctaccatayggtcaatccattttcactcagtgaaaattgcctacactgcctcaagtggttgcttatttaataaacacagctagttgctctgatcctttcagaccatttttaacagagtgcacattaaagactaataatatgaactatatcccaggatgcaaagcacttgatctatgtgccattcttgcaacacatttgcaagaaaatgtaaacacaaaccatttgtttctccaaggctacatttgcagtcctctcagaagactttttcagatgttaaggcttgctttgctcatatgacgtaaaaaggat

SEQ ID NO: 3515 - DNA, 600 bp, Chicken  19866894100290_1
gccagagttgctctgagctctgccaggaccgctggtgggctctccatgctggaacgtcagcctggaggagggctgcctcctctcaggggagggcagtgtaagactatgccctggaaacatcagctaaaagggtttaactaactctcctgtaacgcagaatcatagaatcatttgagttggaaggggcctttaaaggtcctctagcccaactcccctgcaatgaagagggacacctacagcatgcactatttcaggacagtctttagccagaaggtgcccagacaactcaaaacatgaacygaaagagtcttccttggcagaaacagtagataagagtctcagcccacatcagtcatactgtagtacaactgtgtcacctgttcccacccgtggatagaacagcattatgtggcttggatatgccctacctttcattgtccgtgttgactggcatgcggttcttctgccagaggatgacgggctcagggagaccatggatctggcactggaaccttgcaacaccccccttcctccaccaccgcattctgagggtggatgtggaagtcagacatggctggaagacacaaagagagacaaaaa

SEQ ID NO: 3516 - DNA, 600 bp, Chicken  19866894100299_1
agtatgaaaacttccattactggcttatgattttagtaatttcaggaaaaagtaagtactaatagaggggaaaaaaggtaaagaaaatgagtaaacattccgcatgcacgcatgacaagtctggaaatcaaaatgcagcaccagaggtaacaacaggttacaaaagtcctgcctgatctctcggtgaaggccagtggattttttcctctgtattcacaggctttcatttcagagaaatgcagttatagagagaatgtatacgtagcagaaataagattataccaaaattcagctatgccstatgattcccatayggaggtagaattactacactgactcattctaggaattttgaactcaatcttatgctacagttgatggaaaaccaggcayactcttaagcattaaagaaattataaaattagtagtaggaatatctgtagcaaaaagctaggttccacatgtctagtacttagggaacagagtatgtatgatggctgaaattggtttattgccagtgttttactctattacccgaagcaatttgtcacttttcctctttatgaagctgcagtgtaaaatacagcttgctgattgttt

SEQ ID NO: 3517 - DNA, 600 bp, Chicken  19866894100299_2
cattactggcttatgattttagtaatttcaggaaaaagtaagtactaatagaggggaaaaaaggtaaagaaaatgagtaaacattccgcatgcacgcatgacaagtctggaaatcaaaatgcagcaccagaggtaacaacaggttacaaaagtcctgcctgatctctcggtgaaggccagtggattttttcctctgtattcacaggctttcatttcagagaaatgcagttatagagagaatgtatacgtagcagaaataagattataccaaaattcagctatgccstatgattcccatayggaggtagaattactacactgactcattctaggaattttgaactcaatcttatgctacagttgatggaaaaccaggcayactcttaagcattaaagaaattataaaattagtagtaggaatatctgtagcaaaaagctaggttccacatgtctagtacttagggaacagagtatgtatgatggctgaaattggtttattgccagtgttttactctattacccgaagcaatttgtcacttttcctctttatgaagctgcagtgtaaaatacagcttgctgattgttttacttcataacaaa

SEQ ID NO: 3518 - DNA, 600 bp, Chicken  19866894100299_3
aacattccgcatgcacgcatgacaagtctggaaatcaaaatgcagcaccagaggtaacaacaggttacaaaagtcctgcctgatctctcggtgaaggccagtggattttttcctctgtattcacaggctttcatttcagagaaatgcagttatagagagaatgtatacgtagcagaaataagattataccaaaattcagctatgccstatgattcccatayggaggtagaattactacactgactcattctaggaattttgaactcaatcttatgctacagttgatggaaaaccaggcayactcttaagcattaaagaaattataaaattagtagtaggaatatctgtagcaaaaagctaggttccacatgtctagtacttagggaacagagtatgtatgatggctgaaattggtttattgccagtgttttactctattacccgaagcaatttgtcacttttcctctttatgaagctgcagtgtaaaatacagcttgctgattgttttacttcataacaaacagtaagaaccttttgtatgtaacacttccactgatgttttgtttcctcttgcttttaaagtcagtaacaactgactaa

SEQ ID NO: 3519 - DNA, 600 bp, Chicken  19866894100305_1
gcattatgcaacttaattaactctctaactgttgtgtaaagtaaatgttcataattaattttcagtcacaggaactggaattttacttctattcgtttcctctcaatttaccatgattcagaggtgatctgcagcatggagttgtagtagtaggcaagttgcttcaaggctggtaatgctcctgtactgttgtgatggataggaaatgggtcttttcatcacttttgccacaatcttcctgtatgcaattaggccagtctttggtgtctatctgtgaaatgggagcaaggcttatatcayagatttagaactcagttctgactggatctgtttaagactcgcctacattgtttgtgaaggctttgccttgcaccctgcttgtagggcacactcagcctgtggcattactttagcaagctgtgctgaaatctgtgcattacagtttctgtaaggaataccatttgtctacagaggaattcttaacctatatatcacagagactgtgggcctttccaatctgtgtaacctcctgtaataaagatacagttgctacagttgacctcttgtgaaaagtggatctttgtgctttttttctgtgac

SEQ ID NO: 3520 - DNA, 599 bp, Chicken  19866894100305_2
gctttgccttgcaccctgcttgtagggcacactcagcctgtggcattactttagcaagctgtgctgaaatctgtgcattacagtttctgtaaggaataccatttgtctacagaggaattcttaacctatatatcacagagactgtgggcctttccaatctgtgtaacctcctgtaataaagatacagttgctacagttgacctcttgtgaaaagtggatctttgtgctttttttctgtgacctgaacagaatgtgtaacagaacgggcactgtttgtgctgcgggaactctcccttgctytgatagatgtagagagcagggaggggggaggaaaattagctctgcagatccagtatccaattttgtcatttaaagaacctttttgacctcaactttgtaaagagagtgtttagagctttgataaaagttcctgggaaagatagggctaactattgcattaaaagtgttgtgatgccaagactatgtatttatacttgattgctgtgaggctagcagaattacagaaaattacaggggctggaaaggacctctagagatcattgagtgcagcccccctacagaggctatacaggtaagca

SEQ ID NO: 3521 - DNA, 600 bp, Chicken  19866894100309_1
tcttcatattcatttgacaaacatacataagattacacgttcttatgaatttatttgaccttttagatgctgaaccatatgtatgttcagtgactaatgtggcatgattcctttgtaaacagttttcatttggcctgcagtcaaagcacctgaattaattctaacacctaggtttgacaggaagatgtaactgtattagtttctcagtttttgcaaatatgcttttatttaggtccaaataatgctcaaattccaagcagctcagtgcccacctgagacctcctctgtcatcctgagcawtaattttaggcaaatgtcagctactaatcaacactagggatcagactagttgtagttattccaaactgctgaattaatatggtgttagccttgatgaattgcaatgaaaatgcgttttatatggtgctgtaaattgtgtttaatgcctctgtaacaagagttcacttctctttcttcagaggtgtaatcaatgccaaaacgcaggaagaaagtatgcaagtgtgaaatgaagagaccagctagatttttattaacttttgccttctttgaatttgcaaggaaccctctttaattagcatc

SEQ ID NO: 3522 - DNA, 410 bp, Chicken  19866894100310_1
ttgtttcgggctgcaccagactcccagtgtgacccatgacagctcctgcagcccaaaaccaccaaaagcctggcttcaaaggctctgtcgctggtggctctgctgtgggtggctcctctgcattactgtggaagaaatgagggtgaaatctctgccagagtgctggcatttgggctcagcatgtccaaactgtgttcctgcacggaggagagcttcccgtggatcccagtgtatgctttctcagctcagtcaacgcgggtgcctcggtaacaggggtgtttgtatgcacacagcagagcrgaggcagatgtctgcatgtcctctgtatgctgggctgcaccttggggcacgcaggtgccggggacaagcagggaggatgctttgcatggagatcctcaaatctctgccag

SEQ ID NO: 3523 - DNA, 600 bp, Chicken  19866894100314_1
tttacctcacccctgaaacagacactggaaaataggtgtttagatggtataattgtttggctctgtctacagacagagagaggtcagatcacagagtcatagagttgattgagttggaagggacctttaaaggtcatcaagtctggtatcatcctttccaagatcagacttaaggtagatcagttggtggtctactttatacagaggcaacatctttccatcagcagcaattctttggtgatttgcatccatctggatcctaccttcctgagaggtaaatcccattgcaactcttttaaygtagtatttacagaagtgatttacaattctttagagctacattggtcacaatttccatttccagcactgtttagagtcattttctttagggaactgagagtaaaagtgtgcttacagaatgaatgccaacccaccgcatttcaaaccaggctcaatctgagccacaggctgctgctggaccctctgtaccctgttggccagagttaatgagccctgagctactggtacccctgaagtcacccctgaatttcccatgctgttgcatagcttcccttaggcaggcacttaactttatcaaat

SEQ ID NO: 3524 - DNA, 600 bp, Chicken  19866894100315_1
atatttgcttgtgttactacagtaaaatatctgcatgactttttagactcgagtcatgtatcccaggccctgatcactcagagtctgtgtaaatgagcttctatctgactacagtctcccttgccccttgaccaaccttttccatagactaacgtcagtgcaatttctagtctgtcacaagtgtcagtaggctgcagttttcagagtattgtacctttgctcccacctcttctaaaatctgattatagtaccagcccttctgaaatatcagacacttttatactcatctgcagttctctyctaagtgratataactcataagccataggaagaactctcacaggccagctggagctggcagcagtctgtttcatttcataatcatacagcacagaaaaaaaaataggaaccatttattataaattcttaattagaatttaataggaatgatgtagtattaagattattattaataagaagtatttcttatgggaatataggaatagtcaggctcagagggttgtggtcagtaggacaaagtctagctgaagagtacccaaggggtcaatactgagtccagtcttgtttgacattttcttt

SEQ ID NO: 3525 - DNA, 600 bp, Chicken  19866894100315_2
ttgtgttactacagtaaaatatctgcatgactttttagactcgagtcatgtatcccaggccctgatcactcagagtctgtgtaaatgagcttctatctgactacagtctcccttgccccttgaccaaccttttccatagactaacgtcagtgcaatttctagtctgtcacaagtgtcagtaggctgcagttttcagagtattgtacctttgctcccacctcttctaaaatctgattatagtaccagcccttctgaaatatcagacacttttatactcatctgcagttctctyctaagtgratataactcataagccataggaagaactctcacaggccagctggagctggcagcagtctgtttcatttcataatcatacagcacagaaaaaaaaataggaaccatttattataaattcttaattagaatttaataggaatgatgtagtattaagattattattaataagaagtatttcttatgggaatataggaatagtcaggctcagagggttgtggtcagtaggacaaagtctagctgaagagtacccaaggggtcaatactgagtccagtcttgtttgacattttctttagaggatg

SEQ ID NO: 3526 - DNA, 600 bp, Chicken  19866894100323_1
tttcctgatacaactattaatctttagttacagatagtattattacctattatctactcttttgccataatccttcggacctttcaggcaaagctgggactcccctccacttagtcctaaaacaaacaaactacatcaaagaatttttgatataaataaataaataaaatccaggagatgataaaaatgtggtcactgaatacaaaatacacggaattctggagactctgtacagttggcaagagaaacagcagattgatccgtacttctttctcttaatgaacgttacattgttgtagmttactgtcagaccattgaaagtaaaataccaaagagacaaaagaaactcaacccctttgtctgctcacctgttctatattgactgtatctttccatcaccttctgtactggtcccatagccacctataccagtgatgctctgtttacccaaaagagagtgctcaatattcaatattcagtgcatgatgttacacttcctaaggcacagctacctggaagaccatcaactgcgctgctaaaaacagaatcagtcagtcaatttcacatgaaccttctgttgtaaccccagtcagctctccc

SEQ ID NO: 3527 - DNA, 599 bp, Chicken  19866894100324_1
  misc_feature (1)..(71): n is any nucleotide
nnnnnnnnnnnnnnnnnnnnnnnnnnnnnnnnnnnnnnnnnnnnnnnnnnnnnnnnnnnnnnnnnnnnnnncaaaaatgtaattaaatattagctctcagctaattaaaaagtctgatattccaagtgtcattttccttaactattactaaggtcatttcacttgtctaatcatttctcttgtctctggaaattgatggctgcagagtgtcagctatcagaggattcacttagcattgagcattgcatagaagaacctgaatgatagaatcacagaatatctcgagttagaagggacccrtaaggacatctagtccaactgctgggtccacacaggaccattcaaaaatcagatgttatatctgagagccttgttcaaatgcttatttaagactgacaggcttgctgccatgactactgccctgggcagcctgttgctttggttttcaaatcctagttagcgtataagaaaaatatccttttccttctcttctgctgcatggtgcctaaatctgtggggtacagctcctgccacctggtaaggctgtccccaaggagggggctctccctgtgagaccacagctctgtctattcctgaag

SEQ ID NO: 3528 - DNA, 600 bp, Chicken  19866894100324_2
ggtaaggctgtccccaaggagggggctctccctgtgagaccacagctctgtctattcctgaagatgcagctgtatttgctgctcagtgctgcgatgggtatgagggcatttgtagttaggacagaaaaacgagcatccctgaaacaggactcatctgcccttgttttacatgtctattttagatgaggtgaagccaacaagaaatacttccatttgttgggtggaagtgttgatctgcctgcaggtaggaaggctctgcagagggatctgcataggctggggccaactgtatgagcttcwgcatgtccaaatgccaggtcttgcactttggtcacaacaatccattgcaacgctacaggcttggggcagagtagctggaaagctgcacagaggaaaaggtcaatgctcagctgaacaccagccaccagcgtgcccaggtggccaataagggcaacagcatcctgtcttgtatcagaaatagtgtagctggcaggagcacggaggtgatcgtccccctgtactcagctctggtgaggccacacctcaagtgttgtgttcacttttgggcccctcactacaagaaatgccttgaggctctgg

SEQ ID NO: 3529 - DNA, 600 bp, Chicken  19866894100325_1
atgcaggtcaataatcttatgctgctctctttaagagctatacatatttcattctgttaatggttccatccagcacattctctccaatttcacttctgtctttcacagcagatgcctcagactgcaggaagtaatcttacagggatctgattgcattaaggggaaaaaaaatacttctgtttttcttgcaactgatatttcacgattcccaatacaatatttgattcttaaatagtctgctcgttactttaattcatgacaagatcagttactaataaattaggcacttcttctgtttgyttacatacagatttgattcatatttattgtgtggatgatcatamaattacacttactaaatctaacatttatttwtttctttttctaagtgtcaggggatcattctggaaacacttttaaattattaatatatcctttctcctctgcttcagctatcaayrcaatcaattatatttcagttttattgtcagggagcactgtacacaacctaacacagaattccaagcagccgatccccccgagatgtctctacttaaaaatcacttaattgcatcgctactgtcagcttccttgcatgag

SEQ ID NO: 3530 - DNA, 600 bp, Chicken  19866894100325_2
tatttcattctgttaatggttccatccagcacattctctccaatttcacttctgtctttcacagcagatgcctcagactgcaggaagtaatcttacagggatctgattgcattaaggggaaaaaaaatacttctgtttttcttgcaactgatatttcacgattcccaatacaatatttgattcttaaatagtctgctcgttactttaattcatgacaagatcagttactaataaattaggcacttcttctgtttgyttacatacagatttgattcatatttattgtgtggatgatcatamaattacacttactaaatctaacatttatttwtttctttttctaagtgtcaggggatcattctggaaacacttttaaattattaatatatcctttctcctctgcttcagctatcaayrcaatcaattatatttcagttttattgtcagggagcactgtacacaacctaacacagaattccaagcagccgatccccccgagatgtctctacttaaaaatcacttaattgcatcgctactgtcagcttccttgcatgagactgcgtgacaaacatactctgatgacataaatgttccctaaga

SEQ ID NO: 3531 - DNA, 600 bp, Chicken  19866894100325_3
cattctctccaatttcacttctgtctttcacagcagatgcctcagactgcaggaagtaatcttacagggatctgattgcattaaggggaaaaaaaatacttctgtttttcttgcaactgatatttcacgattcccaatacaatatttgattcttaaatagtctgctcgttactttaattcatgacaagatcagttactaataaattaggcacttcttctgtttgyttacatacagatttgattcatatttattgtgtggatgatcatamaattacacttactaaatctaacatttatttwtttctttttctaagtgtcaggggatcattctggaaacacttttaaattattaatatatcctttctcctctgcttcagctatcaayrcaatcaattatatttcagttttattgtcagggagcactgtacacaacctaacacagaattccaagcagccgatccccccgagatgtctctacttaaaaatcacttaattgcatcgctactgtcagcttccttgcatgagactgcgtgacaaacatactctgatgacataaatgttccctaagatggcattctggaggagagggagacagaagga

SEQ ID NO: 3532 - DNA, 600 bp, Chicken  19866894100325_4
gggaaaaaaaatacttctgtttttcttgcaactgatatttcacgattcccaatacaatatttgattcttaaatagtctgctcgttactttaattcatgacaagatcagttactaataaattaggcacttcttctgtttgyttacatacagatttgattcatatttattgtgtggatgatcatamaattacacttactaaatctaacatttatttwtttctttttctaagtgtcaggggatcattctggaaacacttttaaattattaatatatcctttctcctctgcttcagctatcaayrcaatcaattatatttcagttttattgtcagggagcactgtacacaacctaacacagaattccaagcagccgatccccccgagatgtctctacttaaaaatcacttaattgcatcgctactgtcagcttccttgcatgagactgcgtgacaaacatactctgatgacataaatgttccctaagatggcattctggaggagagggagacagaaggaacaactctatgagatacttcagctcctttctgctgagctatactgaagtgggtgcaaaggactgaatcctcaatagacccaaggg

SEQ ID NO: 3533 - DNA, 600 bp, Chicken  19866894100325_5
ggaaaaaaaatacttctgtttttcttgcaactgatatttcacgattcccaatacaatatttgattcttaaatagtctgctcgttactttaattcatgacaagatcagttactaataaattaggcacttcttctgtttgyttacatacagatttgattcatatttattgtgtggatgatcatamaattacacttactaaatctaacatttatttwtttctttttctaagtgtcaggggatcattctggaaacacttttaaattattaatatatcctttctcctctgcttcagctatcaayrcaatcaattatatttcagttttattgtcagggagcactgtacacaacctaacacagaattccaagcagccgatccccccgagatgtctctacttaaaaatcacttaattgcatcgctactgtcagcttccttgcatgagactgcgtgacaaacatactctgatgacataaatgttccctaagatggcattctggaggagagggagacagaaggaacaactctatgagatacttcagctcctttctgctgagctatactgaagtgggtgcaaaggactgaatcctcaatagacccaagggc

SEQ ID NO: 3534 - DNA, 600 bp, Chicken  19866894100325_6
aaatcacttaattgcatcgctactgtcagcttccttgcatgagactgcgtgacaaacatactctgatgacataaatgttccctaagatggcattctggaggagagggagacagaaggaacaactctatgagatacttcagctcctttctgctgagctatactgaagtgggtgcaaaggactgaatcctcaatagacccaagggctatatagattggtattacagaggctttgtacactgttctgttctaatccagggttttgatgcgtagagcagtagggattaatttgtgtactctcayagtgctggcccaacagccgtggcatatacccaaatcccttcctccacaatataaatgcagtttccttcagccatctgcttattatgcagtagaaactcaatggagctaaagaacattatttagagagcaaagaaagcataatgtttgtctgaaaacatcttttgaaaacatttaaatatgtagtaagaacaaaataatttcattttgatattaaatccagcaaattaaagcacatactcaaatttaaattaacaggtagaattatgaaagttaagagaagaatttacaaatgagatttcg

SEQ ID NO: 3535 - DNA, 600 bp, Chicken  19866894100332_1
agagaggagtcataatgtgaattgaccttacttgagcatacactaatctcactcctcccagtcttcatcttcttcatctgtattcatccctttccatgccttattttcaaccaaaacccaagtggaacaagggctttctattaagcacctgttgacatttttacccctgtgaccatttgacatttagacccagttaatttttgacccccttgaccatttgaccatttgaattcttgacaacttgatcttttgacctcttaattttttgaccccttgacctttacacccacttgacctttrgactccttgaccttttgaccatttgacctcttgacaccttgacctttgaacctcttaaatttttaccccttgaccttctcattttctgaccttttgaccttttaacttttccaccttctgatgccctgaccttttgacccttctatcactttggcctttgattcctttgaaccctgactttttgatcttttgactcctcaacttttttctcatcttgtcctcttgaccctattctcctttgacctttttacccttygctctttggtttttgactctatgggaatccttaggtcacagtct

SEQ ID NO: 3536 - DNA, 600 bp, Chicken  19866894100332_2
cttaattttttgaccccttgacctttacacccacttgacctttrgactccttgaccttttgaccatttgacctcttgacaccttgacctttgaacctcttaaatttttaccccttgaccttctcattttctgaccttttgaccttttaacttttccaccttctgatgccctgaccttttgacccttctatcactttggcctttgattcctttgaaccctgactttttgatcttttgactcctcaacttttttctcatcttgtcctcttgaccctattctcctttgacctttttacccttygctctttggtttttgactctatgggaatccttaggtcacagtctgaaacagtgattgatcacctggtaaagaggtttggccagccctgggagcacaggttcaagtaatttgtaacaggtgcaaaaaaagcctgggtccactcctccctaatctcatttaagggctcatttaagcaaagagggaaacatctctacttggagtttgctagtgagttcttatctttggaatgggggggggggggggggtatgctattctttttttgttacaagcttgtgactaacgcctttctcatgttatcc

SEQ ID NO: 3537 - DNA, 600 bp, Chicken  19866894100334_1
aaagctactacttaaattatttttttcaaagttgctcagactgatatcacctagaaatgggttaaaatcagacctttgttttagaggctaaggagcataggagcatcctgtggtcactggaggaggctgtgtgccaggacacaagcagtctgatcagctggaggtcttcctaagcacgtgcttggtggtgtgtgtagttcattgctgtaagctgttgctgcatctctagagaggtataaatgcaacctgctggactgagagcagtatgagcactgatctgccttgagagctcgattcagwtgctgcccacgttagttggggccttctgcctttcctagggcmgagggactggtcagaatggtgccagctgttgtgtggccccaagctcctgctctgtgcaattccagctttcacctcatgtgcaggggctgctataagccttgtgagaaatgctgcttctgcaggaaacctgataaactcatatggagaagctttttttcaaatattaatttcagaaaacagcaactcccatccttcttctggctttttgcctcttaggaacttgtgtagacgcaagtgaagcccaagctttccattttc

SEQ ID NO: 3538 - DNA, 600 bp, Chicken  19866894100334_2
gatatcacctagaaatgggttaaaatcagacctttgttttagaggctaaggagcataggagcatcctgtggtcactggaggaggctgtgtgccaggacacaagcagtctgatcagctggaggtcttcctaagcacgtgcttggtggtgtgtgtagttcattgctgtaagctgttgctgcatctctagagaggtataaatgcaacctgctggactgagagcagtatgagcactgatctgccttgagagctcgattcagwtgctgcccacgttagttggggccttctgcctttcctagggcmgagggactggtcagaatggtgccagctgttgtgtggccccaagctcctgctctgtgcaattccagctttcacctcatgtgcaggggctgctataagccttgtgagaaatgctgcttctgcaggaaacctgataaactcatatggagaagctttttttcaaatattaatttcagaaaacagcaactcccatccttcttctggctttttgcctcttaggaacttgtgtagacgcaagtgaagcccaagctttccattttccatttgctaaactcgtgtccgggccaggcccagcaggctttg

SEQ ID NO: 3539 - DNA, 600 bp, Chicken  19866894100338_1
cgcacaactcagattgcttcaagctgaacaaaggcaacaaaaaacctccagcatattgcattaccaaagtccgtcacagaaaattaggtaatgctagtacaccaggaatagccacacagatctgatttcatggaccagtggttcttggacactagaaatgatgggagaaaaaaacctatgcatataaaatggtctgtcacaaggcagaatactgctattacagaattgtgttgctctcaaccacagcaaattgatatataatttacatgtaagagaagactgcagagattcatttaaatktgcagttaatatcacgagcaacgagacatccagaaattacacttttactaattaaaaattcagtaaaagactctttagtgtctaaaataatatggttaacaaataactacttggcagctacatcatgttctcccctttcgtacagtgttaaaacagaaataaattcatcctccaataattggagctggttgaagttccaagcccggtagggaggaaaagagatctctctttttagtcacgctgccagtggattaaactaaagcttattatcatacacaaaaaggaacaactcctagcttt

SEQ ID NO: 3540 - DNA, 600 bp, Chicken  19866894100339_1
ttaatttcatgattcgaaagagcagtagccatgagatattgtgatatgctgtgcatgttatagtagggatgctccaggagctgtgtatgtgtactctgatggctggagagttggtttgtttttgtggccactttcaaaaagcaaaaatgcattacagtgctgcatgaagcacagggctgtcttttatctctgataggctgacctatcttcatgtactgcaatggcaggagatgactacattcctttgaaaagaacaattgtgggaagttgaagggaggagtgaagaagggccttaccacygccacctgcctttctcctgcattgctccaaaagtcagagctgagacttcgtgccttttacttctcatcttgagcttgtcattagcaatccyccatgcttcttagcttcatacagtcccttctgcaagtgcagttgcgtgagactatgacagtttattttcatacatgtgtagggttaagctgtatctgtggttaacaggtaaagccagcatccttaatgcacgggagtaacttggggcagataacttctaagacggtgagatgcaaggtgtgactggaaggaaaaataatgaatagcagc

SEQ ID NO: 3541 - DNA, 600 bp, Chicken  19866894100339_2
tactctgatggctggagagttggtttgtttttgtggccactttcaaaaagcaaaaatgcattacagtgctgcatgaagcacagggctgtcttttatctctgataggctgacctatcttcatgtactgcaatggcaggagatgactacattcctttgaaaagaacaattgtgggaagttgaagggaggagtgaagaagggccttaccacygccacctgcctttctcctgcattgctccaaaagtcagagctgagacttcgtgccttttacttctcatcttgagcttgtcattagcaatccyccatgcttcttagcttcatacagtcccttctgcaagtgcagttgcgtgagactatgacagtttattttcatacatgtgtagggttaagctgtatctgtggttaacaggtaaagccagcatccttaatgcacgggagtaacttggggcagataacttctaagacggtgagatgcaaggtgtgactggaaggaaaaataatgaatagcagctgtggagtgaatgcaaagagttgggagctacagagacatttttttttaagaccaagagcatgtggaaagcacttgtaaatatggagaggta

SEQ ID NO: 3542 - DNA, 600 bp, Chicken  19866894100340_1
ggaaacagatctcttcagaaatactcagttcatttttgtatgtttgatctcatttacatgaatgtcagtaatcaggtaattaaatattatttaaatagcattcagatcctggtgggatgggactttgagcaacctgttctagagggaggtggagtccctgcctatagcagggggctggaactagatgatcttaaaggtcccttccaacccaaaccattctatgattctattctgtgattgtttaagtaaatgttccctttataaaagtacagtgagagaaatgattatttatttcttctygtttatgtttagctgttgctactgagtatctgatctaaatgtacagaaaacagaagatgaaatgaatctataagtatagcaacaaactcaactaaccactttaatgcctttgctctagtttaccatacaaagaatgtattttttcaatatattactctgcagaagtgatgaagagattaatgaccggtagaatattctatctcctttgcagaaaggatatgataagaaaagagaaatgcagtaacagtaagtaacgagtaatattctatttaagtttattaacctaaagtttttcatcca

SEQ ID NO: 3543 - DNA, 599 bp, Chicken  19866894100348_1
  misc_feature (1)..(110): n is any nucleotide
nnnnnnnnnnnnnnnnnnnnnnnnnnnnnnnnnnnnnnnnnnnnnnnnnnnnnnnnnnnnnnnnnnnnnnnnnnnnnnnnnnnnnnnnnnnnnnnnnnnnnnnnnnnnnnaaacagtgccagtcaacttgcaggtcattatcttctcaagtgaaagacacacagaagaaacttctcccgaagactcagagctttaagatttggtggcaaaaatgaaaaaatacctctggggctctattcttttaaatcttcactttggatacgacaatcaagctaaagccttacttgataatttcacttmaaaacagctttagatggtatacttatgttttagtccaaaacccaaatgcaaaactaaactatccaagtttttgaagctcttctcaaggaaaagctattgtaatagaaacttcgacaygctgtatatggcrtgccactgtcaatgatgcattgctctgccacctacaaaacattacacgcacccaatatgcaggcacaggaactagttctgctgtctcacaaaaagtctgagcattcaactttacagggagtaatgaatacccccaaaaayttagggagaaacaaatgaaatgtaagaat

SEQ ID NO: 3544 - DNA, 600 bp, Chicken  19866894100348_2
gccagtcaacttgcaggtcattatcttctcaagtgaaagacacacagaagaaacttctcccgaagactcagagctttaagatttggtggcaaaaatgaaaaaatacctctggggctctattcttttaaatcttcactttggatacgacaatcaagctaaagccttacttgataatttcacttmaaaacagctttagatggtatacttatgttttagtccaaaacccaaatgcaaaactaaactatccaagtttttgaagctcttctcaaggaaaagctattgtaatagaaacttcgacaygctgtatatggcrtgccactgtcaatgatgcattgctctgccacctacaaaacattacacgcacccaatatgcaggcacaggaactagttctgctgtctcacaaaaagtctgagcattcaactttacagggagtaatgaatacccccaaaaayttagggagaaacaaatgaaatgtaagaattttccttggatagtttccatattgcttttcttcacttcacggcattgaaaccaaccttgattttaacatgataaaagaagtctgtggaactaatcctagaaacctctttctgtttcct

SEQ ID NO: 3545 - DNA, 600 bp, Chicken  19866894100348_3
caggtcattatcttctcaagtgaaagacacacagaagaaacttctcccgaagactcagagctttaagatttggtggcaaaaatgaaaaaatacctctggggctctattcttttaaatcttcactttggatacgacaatcaagctaaagccttacttgataatttcacttmaaaacagctttagatggtatacttatgttttagtccaaaacccaaatgcaaaactaaactatccaagtttttgaagctcttctcaaggaaaagctattgtaatagaaacttcgacaygctgtatatggcrtgccactgtcaatgatgcattgctctgccacctacaaaacattacacgcacccaatatgcaggcacaggaactagttctgctgtctcacaaaaagtctgagcattcaactttacagggagtaatgaatacccccaaaaayttagggagaaacaaatgaaatgtaagaattttccttggatagtttccatattgcttttcttcacttcacggcattgaaaccaaccttgattttaacatgataaaagaagtctgtggaactaatcctagaaacctctttctgtttccttgcttaacacctc

SEQ ID NO: 3546 - DNA, 600 bp, Chicken  19866894100348_4
agctaaagccttacttgataatttcacttmaaaacagctttagatggtatacttatgttttagtccaaaacccaaatgcaaaactaaactatccaagtttttgaagctcttctcaaggaaaagctattgtaatagaaacttcgacaygctgtatatggcrtgccactgtcaatgatgcattgctctgccacctacaaaacattacacgcacccaatatgcaggcacaggaactagttctgctgtctcacaaaaagtctgagcattcaactttacagggagtaatgaatacccccaaaaayttagggagaaacaaatgaaatgtaagaattttccttggatagtttccatattgcttttcttcacttcacggcattgaaaccaaccttgattttaacatgataaaagaagtctgtggaactaatcctagaaacctctttctgtttccttgcttaacacctccaggcgacagaagagacaaaatgcttcatttgcatccttaaacattagaaactgcgaatgagccttttcagctgcaaatgttattgcatctacatttccagaagagaaagaaggttaagcagcctactcaggtttacgtt

SEQ ID NO: 3547 - DNA, 600 bp, Chicken  19866894100350_1
cttcatgttaccttcctagacgttatgtgagccaggacagtaacttgcccattcttgtaatcctcatcacagtaaggactcagtactaggtactcatctggttaaaaaaataattagaagacacatactgactgactcccacatgcttactaccagtaacaagctgacagcaaggaagagagacattaaaaattagagtaccaacatgtttagtgcttttctctggcctccaaactatccttttctctctttaattactctgatatttttttgctgttgttgctgttattcatttgttcrggagaaagatgggatagttttgttttcctagttgtccataatttttttttcccagataagttgatgttattgccaaggtagttctaaaacaagccatcctcttcacattgctcagagatatgtyagtactttccagctacagaaaaggtatacaaatataccttcatataggtatagcaaatcttaaatgtctccttcaggtgctcagcaaaaccatcttaaggaccatatttaagttcagctatgttaaacagactaacattaacattaatagaactattatcccatgtactgattatc

SEQ ID NO: 3548 - DNA, 515 bp, Chicken  19866894100350_2
atactgactgactcccacatgcttactaccagtaacaagctgacagcaaggaagagagacattaaaaattagagtaccaacatgtttagtgcttttctctggcctccaaactatccttttctctctttaattactctgatatttttttgctgttgttgctgttattcatttgttcrggagaaagatgggatagttttgttttcctagttgtccataatttttttttcccagataagttgatgttattgccaaggtagttctaaaacaagccatcctcttcacattgctcagagatatgtyagtactttccagctacagaaaaggtatacaaatataccttcatataggtatagcaaatcttaaatgtctccttcaggtgctcagcaaaaccatcttaaggaccatatttaagttcagctatgttaaacagactaacattaacattaatagaactattatcccatgtactgattatctcctgctgaagtcaaggaatcacagaaccatagaatcac

SEQ ID NO: 3549 - DNA, 600 bp, Chicken  19866894100352_1
aaagccccacactgatagggcagctcacagtggggctggaggaagcagagaggcacttaatgatcacaaggcagcccctgcatcttcagtccatggatcccaaatgggccctctgccctttgtcatgcacgctgtttggtgttcccctggctgaggaatgctgccatctgcacaaggttgcaggggtaaggaccccatcccctaatctgtcttgatcaggaaggagaacaggacgttggagaagcagagctctcagcgaaagactgaaccacagatctgcatgttgtggatgttttgccrtggacatcctcctcccttgagccccatccattaaccgtgcttgctttggagacagttccagggagttccaggggttcaaatgagctgcccaaatgggaagagttgagaaaggctatgaacatcctgcagcccaagatgttctgccacctctgggccctgcttgacttttcctatgtatttttccttcagttttccctaattttctatttaattttgctgatgtgaatgagttcctgatgcctgaagtagctgctgatgcattaagctcagaaaaagctgagatgtgttaggttgatttct

SEQ ID NO: 3550 - DNA, 599 bp, Chicken  19866894100362_1
  misc_feature (1)..(81): n is any nucleotide
nnnnnnnnnnnnnnnnnnnnnnnnnnnnnnnnnnnnnnnnnnnnnnnnnnnnnnnnnnnnnnnnnnnnnnnnnnnnnnnnnggtgggtatgactcaggtttcctttatactgtgcattctcctcaaatgagcaccaagaagaccctgaaaataggcaagatgaaccttttgaagtgattcctattgagggcactgatgacaaccccatccaccagatctccttctggtaaaacagtttaaaagatagtctttagtttaaaagataactttgttattaagcttgatgaaactgaactcgaraaggaggagagtacactacttggttcctttttaattgtgggtcaattcaagtgtacaggaactcttcctagttcttctggcaccaattttcacttagtgcttactggagaaccattagaagcttctgctacccttctagatggattgtagatcaccactggttctcttcgctacttagcaaagaaaggacacggttagctctgaaggagaatactgagggatcagtccatctcctttctccggagaacactgacttctcaggacattctgtgaagtgtatgaacgaaaagagtgagcta

SEQ ID NO: 3551 - DNA, 600 bp, Chicken  19866894100362_2
gatgttctgtgggatgcagaatggtgccctgcgtgtttatcctctccaagataaagacctctcagtgaataccctgaaggcatactggtcgctcagtgtacatgacaatgattatggccagatccgggggatctgctgtagttatgatgataggtttctgattacctgtggtggagatggaaacatttttaccttcaacatcttgtctccagaggatgttcacgaagagttaaaagccaaaatccctcctcctagggtaagtcactaaatgaaaatcccccaaactcttcgttttatcayatggattgttgcagctccagttccagaacaattctgaatacatgccctgttaccttatttcagtgaattaggcctagttgctctgaagctacagcaaatggctaaaatccagttcaataatttggcatcatagatctttcgtagcaaaagctaagatttcccaaacaatttggacgaagagttcttgcaaagcctttcctagtaaaggggtgatatgactgcattgctccttctcagtcttttatgtttttctccaaatacacatagtatgtgtggttcatatgtaatattctactatct

SEQ ID NO: 3552 - DNA, 600 bp, Chicken  19866894100365_1
cagttgcctagggcagtagataggaggctagtggcagccagacgtcagtcttggtgtatttattgcaatgaattctttgctcttgttaacctcctccatactgagtactgacttacctttttggtgttgaagaaagagatatgactgcagcagtttgctctcagaacactgatccaagatcattctcccttttccccctttcctgcatagctaaagccatcaaggtaatactttatggagctcctgactcattgagcaaggctgtgatgaagtccaaactttgggtactggatgttgcaygaacattcatggacgtattatgttaaatacatatatattgtaaatatgtaaatatatgatgtctatttggatctttgcacagagtaatgcttaccttctcaagcagttatattggaccagatggttggtaactgggcagtggcaggagtctcctgcacaagtccttcagctgcatatagtgagtcgtctcaaaatgctgttctactaagtccatatacatagcttgctggctagcccatgtaaccactccagtatttgaataatccatygttctagattgtcttcaaaaatatacaaaac

SEQ ID NO: 3553 - DNA, 600 bp, Chicken  19866894100365_2
aagtccaaactttgggtactggatgttgcaygaacattcatggacgtattatgttaaatacatatatattgtaaatatgtaaatatatgatgtctatttggatctttgcacagagtaatgcttaccttctcaagcagttatattggaccagatggttggtaactgggcagtggcaggagtctcctgcacaagtccttcagctgcatatagtgagtcgtctcaaaatgctgttctactaagtccatatacatagcttgctggctagcccatgtaaccactccagtatttgaataatccatygttctagattgtcttcaaaaatatacaaaacatctcctagtcttcaaaaatatacaaaacatctcctatcttaagtatgtaccaaagactgcagtatgtgaccatttcggcatttgcagtatcagtttctactgactactgaaagtgccctatctatttacaatttgtcytattttgcaacagcaacaacacagggattctaaggacggccacactctccactcaggttgctaatcaataaatgaagcatgcagataatgcctaggagtttgtctaggtgcagcaagtctgcaaatgttt

SEQ ID NO: 3554 - DNA, 600 bp, Chicken  19866894100365_3
tggcaggagtctcctgcacaagtccttcagctgcatatagtgagtcgtctcaaaatgctgttctactaagtccatatacatagcttgctggctagcccatgtaaccactccagtatttgaataatccatygttctagattgtcttcaaaaatatacaaaacatctcctagtcttcaaaaatatacaaaacatctcctatcttaagtatgtaccaaagactgcagtatgtgaccatttcggcatttgcagtatcagtttctactgactactgaaagtgccctatctatttacaatttgtcytattttgcaacagcaacaacacagggattctaaggacggccacactctccactcaggttgctaatcaataaatgaagcatgcagataatgcctaggagtttgtctaggtgcagcaagtctgcaaatgttttcatgtgaaaatgggaagcacttcagttagtcctgttgtctcaagtcagtgcatttgtttctctgtgcagaaagtagctgtggagttgctggaccacccagggaactcataactgaatgcaatgtgtgtgtatgcaggcacagccctaacaccctgctacatcatgttaa

SEQ ID NO: 3555 - DNA, 599 bp, Chicken  19866894100371_1
  misc_feature (1)..(117): n is any nucleotide
nnnnnnnnnnnnnnnnnnnnnnnnnnnnnnnnnnnnnnnnnnnnnnnnnnnnnnnnnnnnnnnnnnnnnnnnnnnnnnnnnnnnnnnnnnnnnnnnnnnnnnnnnnnnnnnnnnnnncccacatttttttcatttttaagctgtattcatgaatgcgagagtccgttttacagaaaaggcaacagacagaacaacaaaaagaatgaacatgcaagaaaagaagctcaaccaaaatctattttagaatgtagacaaaaacataagtctacaaagtacaaaagatcgtgtttatcagttcastgacccagcagtcaaaaatccaatccgactacctactattctgtctgaatgagaaaagtgaacaggtgttagacattataaatgaggcaaagagaagcaggctagtccgctggcacaggttgcccagagaggtgatggatgctccatccctggagacttggctggttcaggccctgggcaacctgatatagctgtagatgsccatgttcactgcargggagttgggctagatggcccctaaagatcccttccaactctaaggagtttttgattaattaaataaatgcatgaagaaaata

SEQ ID NO: 3556 - DNA, 600 bp, Chicken  19866894100371_2
aatgaacatgcaagaaaagaagctcaaccaaaatctattttagaatgtagacaaaaacataagtctacaaagtacaaaagatcgtgtttatcagttcastgacccagcagtcaaaaatccaatccgactacctactattctgtctgaatgagaaaagtgaacaggtgttagacattataaatgaggcaaagagaagcaggctagtccgctggcacaggttgcccagagaggtgatggatgctccatccctggagacttggctggttcaggccctgggcaacctgatatagctgtagatgsccatgttcactgcargggagttgggctagatggcccctaaagatcccttccaactctaaggagtttttgattaattaaataaatgcatgaagaaaatagacctaactaaaacaagaacaaacagaragggaccagggctgagcagtgacactcagcacctgtctgggtacaagcacagcattaacgctttcgtttagagcaggagattctcacagtcatacgctggaacacagaaagcagtttttaatttaaggtgcacagcacttggtgcttgactttcccaactcaccattatgaagc

SEQ ID NO: 3557 - DNA, 600 bp, Chicken  19866894100371_3
aaagaagctcaaccaaaatctattttagaatgtagacaaaaacataagtctacaaagtacaaaagatcgtgtttatcagttcastgacccagcagtcaaaaatccaatccgactacctactattctgtctgaatgagaaaagtgaacaggtgttagacattataaatgaggcaaagagaagcaggctagtccgctggcacaggttgcccagagaggtgatggatgctccatccctggagacttggctggttcaggccctgggcaacctgatatagctgtagatgsccatgttcactgcargggagttgggctagatggcccctaaagatcccttccaactctaaggagtttttgattaattaaataaatgcatgaagaaaatagacctaactaaaacaagaacaaacagaragggaccagggctgagcagtgacactcagcacctgtctgggtacaagcacagcattaacgctttcgtttagagcaggagattctcacagtcatacgctggaacacagaaagcagtttttaatttaaggtgcacagcacttggtgcttgactttcccaactcaccattatgaagcttcgtaacaatgagt

SEQ ID NO: 3558 - DNA, 600 bp, Chicken  19866894100371_4
actacctactattctgtctgaatgagaaaagtgaacaggtgttagacattataaatgaggcaaagagaagcaggctagtccgctggcacaggttgcccagagaggtgatggatgctccatccctggagacttggctggttcaggccctgggcaacctgatatagctgtagatgsccatgttcactgcargggagttgggctagatggcccctaaagatcccttccaactctaaggagtttttgattaattaaataaatgcatgaagaaaatagacctaactaaaacaagaacaaacagaragggaccagggctgagcagtgacactcagcacctgtctgggtacaagcacagcattaacgctttcgtttagagcaggagattctcacagtcatacgctggaacacagaaagcagtttttaatttaaggtgcacagcacttggtgcttgactttcccaactcaccattatgaagcttcgtaacaatgagttccacatctgccaatgagtgtatgctgatgaggttacttttatttgccttgcacaattgatcctgctgtactccaagatgcctggttgtgtatcagcatgtagcaaaaacc

SEQ ID NO: 3559 - DNA, 600 bp, Chicken  19866894100375_1
gtactgtttttgtttattttgtttttatttacagtacttcttttgaatagccctgcctcatagccctgatttgcttgagtagctgtgtagtacttcacaggtatgctgtcatagctctgcagtactgctctatgacatttgtagccacagctccagttatcaagcttctgaatgtggaatatgatttatatcggtagcagacagcagttttggaccacatctgttacatattttggctgcatgaaggtgtactatcccattgtcattaagatgagaaggcacttcagttactaacttccytttccattggttgtaactttggtgaagcaaatagcgcatgaaagttggcatactctctacactggagttagtctctcctccttttactcgtaccccacagctggaaatggttattacatctttttgatatgctgaatcacaaacctaagggctatacctgccaagycagtctgatgaacagttttgtcaaagatggttgaggaattggagtaagttaagtgcggagactaagtaaagatttactaactggtatagtaggtcttgtgaactgctgtcactggggagagcaaggtttatgca

SEQ ID NO: 3560 - DNA, 600 bp, Chicken  19866894100375_2
tctgaatgtggaatatgatttatatcggtagcagacagcagttttggaccacatctgttacatattttggctgcatgaaggtgtactatcccattgtcattaagatgagaaggcacttcagttactaacttccytttccattggttgtaactttggtgaagcaaatagcgcatgaaagttggcatactctctacactggagttagtctctcctccttttactcgtaccccacagctggaaatggttattacatctttttgatatgctgaatcacaaacctaagggctatacctgccaagycagtctgatgaacagttttgtcaaagatggttgaggaattggagtaagttaagtgcggagactaagtaaagatttactaactggtatagtaggtcttgtgaactgctgtcactggggagagcaaggtttatgcacctgagtctgyatttggcagaagctttccgcactccctggtcatattttccaggtgtacataatccaaaatttcctaacaattttgagttcataatttcttctttttaacaagaatattcacgttctacttgaaaagtggtaaacatatcactctgttcttccaaa

SEQ ID NO: 3561 - DNA, 600 bp, Chicken  19866894100375_3
tgtaactttggtgaagcaaatagcgcatgaaagttggcatactctctacactggagttagtctctcctccttttactcgtaccccacagctggaaatggttattacatctttttgatatgctgaatcacaaacctaagggctatacctgccaagycagtctgatgaacagttttgtcaaagatggttgaggaattggagtaagttaagtgcggagactaagtaaagatttactaactggtatagtaggtcttgtgaactgctgtcactggggagagcaaggtttatgcacctgagtctgyatttggcagaagctttccgcactccctggtcatattttccaggtgtacataatccaaaatttcctaacaattttgagttcataatttcttctttttaacaagaatattcacgttctacttgaaaagtggtaaacatatcactctgttcttccaaatggaaaggagggaaggggagagctgcctcttttcccacgtttgaaactcacctctgttgatgccctttaacttctctcatgtgaacatgtctacataacagttacaccaacataaacagtaacataaggtattcmaaccaggcca

SEQ ID NO: 3562 - DNA, 600 bp, Chicken  19866894100375_4
ctgagtctgyatttggcagaagctttccgcactccctggtcatattttccaggtgtacataatccaaaatttcctaacaattttgagttcataatttcttctttttaacaagaatattcacgttctacttgaaaagtggtaaacatatcactctgttcttccaaatggaaaggagggaaggggagagctgcctcttttcccacgtttgaaactcacctctgttgatgccctttaacttctctcatgtgaacatgtctacataacagttacaccaacataaacagtaacataaggtattcmaaccaggccacatttcattactttaataaattcaaagactaaatagcaacagggctatcagtaaaaccttattattgcaaaccactgtcttgtaaataatgcatcagtgcaagaactgctgtactaaattaaatcattgttcatcctgtttaatatgctgtctgcagtagtgatcaaaaygtagaaaaaytgcrgaaaaaaaamctttttcctagagtaaaattctgggaacttgcaagtaaatctcataggagttacaggaggaaagttcagcaggtatagttcagcaggccaatcagt

SEQ ID NO: 3563 - DNA, 526 bp, Chicken  19866894100375_5
gggagagctgcctcttttcccacgtttgaaactcacctctgttgatgccctttaacttctctcatgtgaacatgtctacataacagttacaccaacataaacagtaacataaggtattcmaaccaggccacatttcattactttaataaattcaaagactaaatagcaacagggctatcagtaaaaccttattattgcaaaccactgtcttgtaaataatgcatcagtgcaagaactgctgtactaaattaaatcattgttcatcctgtttaatatgctgtctgcagtagtgatcaaaaygtagaaaaaytgcrgaaaaaaaamctttttcctagagtaaaattctgggaacttgcaagtaaatctcataggagttacaggaggaaagttcagcaggtatagttcagcaggccaatcagtagatagtattccaagatgggaaggatttgtattttaggaaatgttggtatccttaactaaacgctacacagtcctactttcagaacgtgtttccaatcacttctaa

SEQ ID NO: 3564 - DNA, 516 bp, Chicken  19866894100375_6
cctcttttcccacgtttgaaactcacctctgttgatgccctttaacttctctcatgtgaacatgtctacataacagttacaccaacataaacagtaacataaggtattcmaaccaggccacatttcattactttaataaattcaaagactaaatagcaacagggctatcagtaaaaccttattattgcaaaccactgtcttgtaaataatgcatcagtgcaagaactgctgtactaaattaaatcattgttcatcctgtttaatatgctgtctgcagtagtgatcaaaaygtagaaaaaytgcrgaaaaaaaamctttttcctagagtaaaattctgggaacttgcaagtaaatctcataggagttacaggaggaaagttcagcaggtatagttcagcaggccaatcagtagatagtattccaagatgggaaggatttgtattttaggaaatgttggtatccttaactaaacgctacacagtcctactttcagaacgtgtttccaatcacttctaa

SEQ ID NO: 3565 - DNA, 512 bp, Chicken  19866894100375_7
ttttcccacgtttgaaactcacctctgttgatgccctttaacttctctcatgtgaacatgtctacataacagttacaccaacataaacagtaacataaggtattcmaaccaggccacatttcattactttaataaattcaaagactaaatagcaacagggctatcagtaaaaccttattattgcaaaccactgtcttgtaaataatgcatcagtgcaagaactgctgtactaaattaaatcattgttcatcctgtttaatatgctgtctgcagtagtgatcaaaaygtagaaaaaytgcrgaaaaaaaamctttttcctagagtaaaattctgggaacttgcaagtaaatctcataggagttacaggaggaaagttcagcaggtatagttcagcaggccaatcagtagatagtattccaagatgggaaggatttgtattttaggaaatgttggtatccttaactaaacgctacacagtcctactttcagaacgtgtttccaatcacttctaa

SEQ ID NO: 3566 - DNA, 502 bp, Chicken  19866894100375_8
tttgaaactcacctctgttgatgccctttaacttctctcatgtgaacatgtctacataacagttacaccaacataaacagtaacataaggtattcmaaccaggccacatttcattactttaataaattcaaagactaaatagcaacagggctatcagtaaaaccttattattgcaaaccactgtcttgtaaataatgcatcagtgcaagaactgctgtactaaattaaatcattgttcatcctgtttaatatgctgtctgcagtagtgatcaaaaygtagaaaaaytgcrgaaaaaaaamctttttcctagagtaaaattctgggaacttgcaagtaaatctcataggagttacaggaggaaagttcagcaggtatagttcagcaggccaatcagtagatagtattccaagatgggaaggatttgtattttaggaaatgttggtatccttaactaaacgctacacagtcctactttcagaacgtgtttccaatcacttctaa

SEQ ID NO: 3567 - DNA, 600 bp, Chicken  19866894100380_1
aatgatccttccaaagaagacaaaagcattaaaatacctgaaatagctacattcggaggttaaaaacttgccacagtttgttggatttatagagttaacaaactaattgatagcatggtgtcctctcttagcaatttactgtgtttccaaaaaagcttattaactggagcatatttttcagtgtctttttagagtagataacaaatccaaattccttagccatctaaaaacatcacaagaggaacttgtaaaatctattttactcacactccataggaatggtgaaattggggaaaacawggaaaatatagtgttctaaataaaataaaaagcataaagactttttctgaatctgagaagagagctctgaagtacttatttttgctataggtctaaagtcaatcctcctcatttaccaaaaatcgtcagaaaagttttccagtttgggcgtatggcatatcatccgacaattggcacaaataaagaaaatctacctgaattttcttactattgatcatactacagatcagtttgcagtgttagcaatgcactttatggcatcactgtcatgggagagaagtttaagatagttttcaactc

SEQ ID NO: 3568 - DNA, 600 bp, Chicken  19866894100380_2
aagcataaagactttttctgaatctgagaagagagctctgaagtacttatttttgctataggtctaaagtcaatcctcctcatttaccaaaaatcgtcagaaaagttttccagtttgggcgtatggcatatcatccgacaattggcacaaataaagaaaatctacctgaattttcttactattgatcatactacagatcagtttgcagtgttagcaatgcactttatggcatcactgtcatgggagagaagtttaagatagttttcaactcctatgaaagtgagatgtggggagaaacaytggggtaaatcttatacagcatgcctggagatatataatgaaggaatgacatttttttttttttcagaggatcagtaatgcgagactgacacatatcccttggaaaaaatacttttaccacaaaattttctacatttctggaaagtgcagtttgcccagaagcatgaaaattttctctccttttaaatgtaaagataacaaacattttctagaaatcaagttactcatcaagatcaaagccatttgccaaagtataatctttttggatgctgcattcatcaacatggttgtggaaacaaa

SEQ ID NO: 3569 - DNA, 600 bp, Chicken  19866894100383_1
gaatatggttacagacatggaacttgagcccagagcggatgaacccagcatttggttgaagtattccctgctgagagagcgtgatgatggctggaatcctgtggcacttgtgttctacccatctgcaccctttacccagctgtactaaggagcgcgagtggcatcaatcaccgctggggagacatctgcacatgttatagttcagcttggctccatttcagcttccagttgttgatgcttgctgtgctttcctcagtaaagaagtactatggcacccgatggtttctcctatggataatyccaaactatacttttaaactacagatgttcccagcagtgatcctggctgtcaggactgctgctagagttaggcatggcagagccagacaaacccaccatgtctgttttgtgtgtgtccacgttcyagatctgcctggcattgactaattaatttccaaaaggagctgactgtggcaaggccctgtcagttcatcagggctcaaaccggtactcagttgctgtaggaagcttaataataccttggtggtattaccaaattgtgacctcttaaaaaataataacaataaatgacctgagatt

SEQ ID NO: 3570 - DNA, 600 bp, Chicken  19866894100383_2
caccctttacccagctgtactaaggagcgcgagtggcatcaatcaccgctggggagacatctgcacatgttatagttcagcttggctccatttcagcttccagttgttgatgcttgctgtgctttcctcagtaaagaagtactatggcacccgatggtttctcctatggataatyccaaactatacttttaaactacagatgttcccagcagtgatcctggctgtcaggactgctgctagagttaggcatggcagagccagacaaacccaccatgtctgttttgtgtgtgtccacgttcyagatctgcctggcattgactaattaatttccaaaaggagctgactgtggcaaggccctgtcagttcatcagggctcaaaccggtactcagttgctgtaggaagcttaataataccttggtggtattaccaaattgtgacctcttaaaaaataataacaataaatgacctgagattatctagcaaggactgttttctgaaagaatgcattggcttgcttttagtttagtttatttttgtttattttaatgtattagtttattttaatgtattttattcttacagccttctgtgtagcacag

SEQ ID NO: 3571 - DNA, 600 bp, Chicken  19866894100392_1
ccttgtagaaatcaagggtatgttttggatgggtttccaaagacctatgaccaggcaagagacctttttaactgtaagtactgctgctttttgtttttattgctgctaatactgtcataacttttatttttcttagtatcttattagcttaagtgtatcagcactgttttgactgtagagcaagatgtttctgagatgatcctagcgggcaacatactaagtaaatacacaaataagaatgatacttgtgttgaactactctacacaagaaagttctaagtcagattttcttcataatayacaagagatacttagtgaggggattcagccaattcatgttctgtgagttacagtcagtgtattagatgagcttcaatgggtgcaacttaaatgaaattctgcaatatacatttcaaattgttagccagaactgtctatgtatgaaaagcaaaaatcaactccataaattaaagggtagaattttaagaaaaacaaagcctagtcttgttcatcttaatgtggttggttataaaccttgttcagctgatacttatcaagcagttgagccagctggtggagaagagcagacaacatcagaaa

SEQ ID NO: 3572 - DNA, 600 bp, Chicken  19866894100393_1
cctgaattgaaaacagatagtgtggctggtcgctggaagggggagtactgtgttttcttgtcctgtttgtactcttttctatgtatttattcatagctgttgctgctggaagcaagatgctgacctgaatgaatctttggtcttgatctagtacaaatgagagagtgtctcgctccatgtgttcctgcttccactgggattgataatttcacatgactagaaagaaagaacagacaggaaagatttcaactgctggtattgaaacaacagatcctgtttatgccttttattagtccccakaaatctacctaacaagacaaatctgtttttgaggcttcatgattcactggcgatattaacttttgggctatggccttttgctgtttgacatttaattttttaaggagaacagttctttaaatgttaatttctgcttctttttctgaagttctaaactgctaagaattatttaatcttcaatttgaacagttttactaatgaatggtaatgccktctgatttagtaggcataagcattcattgctgtcatcttacagattgtgcagctgtgattgggatcaccagtggcatttcctttcag

SEQ ID NO: 3573 - DNA, 600 bp, Chicken  19866894100393_2
tgactagaaagaaagaacagacaggaaagatttcaactgctggtattgaaacaacagatcctgtttatgccttttattagtccccakaaatctacctaacaagacaaatctgtttttgaggcttcatgattcactggcgatattaacttttgggctatggccttttgctgtttgacatttaattttttaaggagaacagttctttaaatgttaatttctgcttctttttctgaagttctaaactgctaagaattatttaatcttcaatttgaacagttttactaatgaatggtaatgccktctgatttagtaggcataagcattcattgctgtcatcttacagattgtgcagctgtgattgggatcaccagtggcatttcctttcagtagatgaaaatggcrctgatatcttgagccagaatttacgttcttcatagctgttccaaagtcaagctggtatttatcagatgatcttctttgggagcctgaagaacagttaaactttctttcatggatgatttccttttgattaatctggatttatcttgtcctcattaaggtactctgagaaaacaagggtattgttccttatatagtaca

SEQ ID NO: 3574 - DNA, 600 bp, Chicken  19866894100393_3
gacaaatctgtttttgaggcttcatgattcactggcgatattaacttttgggctatggccttttgctgtttgacatttaattttttaaggagaacagttctttaaatgttaatttctgcttctttttctgaagttctaaactgctaagaattatttaatcttcaatttgaacagttttactaatgaatggtaatgccktctgatttagtaggcataagcattcattgctgtcatcttacagattgtgcagctgtgattgggatcaccagtggcatttcctttcagtagatgaaaatggcrctgatatcttgagccagaatttacgttcttcatagctgttccaaagtcaagctggtatttatcagatgatcttctttgggagcctgaagaacagttaaactttctttcatggatgatttccttttgattaatctggatttatcttgtcctcattaaggtactctgagaaaacaagggtattgttccttatatagtacatagttcatacttatttgcagcattctaatgtcctgtaggttgacaaagaggacttcaggtcttattctaaagaggcagtaaaagccttctttctcaaaaatg

SEQ ID NO: 3575 - DNA, 600 bp, Chicken  19866894100393_4
tgtgacagcttgatcaaattcattgcatgttctcgtatttagttgatgaggttgtgtgaaataacttacaagtgccaccttcctgggacatgacttcagctgaagggcattggcaaagatcccactgagtgttagcctgggtaatgagaggagctaattgcctctggaagttcatatgtggaaaggtggtgtggagcttgcttattctgagaggaaggatttggtgttgatgttgtggttctgaatctcaagtgaggctggtagataaaaatgcaattacttacattgaaataatcacargatatagcatatttttaatgcatctcatggaatcctagaatggcttgcattggaagggacctcaaggatcacgaagctccaacctctactgccacatgcagggctgccaacctccatatctaatactagaccaggctgcccaggcccccatccagcctggccttaaacacctccagggatgagacatccacagcctctctggacagcctgttccagcacctcaccacatcatgtatttgctcatgaaaaatgttatcgactctttcagtctcaatcttttttcattctgaaagtggtatc

SEQ ID NO: 3576 - DNA, 600 bp, Chicken  19866894100400_1
aaggtgtacatattgctttaccttaagatatactatcaacaaattgacagatacttccagtttggaaacacatgatttcactacttagcagcctggctttgttcagatgctgctttagactaattcgattacaaattggagacaagaaatctcattataggcaaatcaccaaaggtactttagttcaatatttattttaactaaaagcattactaaaaggaggacacgtgagtcactgacaaaacatgattgtactctacattatgtaattgctggaattcctgttggttaccctaaaamtgtatgaagactagcactattaaaatttgaaatgcaagtgcttaagtaagaaacactgctgcttagcattcctgaaaataaagtcagatagtctagcttcagaaatgtacaataaacaggtacacttctgtattataacttgtctaatgtctgcttatacctaaaatcttaatattgtttgttgtctaggttataataaactagttattgttagcttattaactaaaacattacctgaaagagaaatacacgcatacacaaatacacacaaatgcttaccgaacttaattgctcccaggc

SEQ ID NO: 3577 - DNA, 600 bp, Chicken  19866894100418_1
aaaaggagacagttgttctctacttcctatcggcaagaaatgttcagctatgacttgggaaacaggggctcaatacacataagttacttgagaagactcaacaccttcataacaagagtctctaccttcttctttcctttcacagcttctaatgctgactgtgacattgtgtggtctgtctgctctcatgatatccactccctaacttttgccaaccgcagctaattggctattggggcagtgagttggagagacagctttgatgctgtctcagcactgctcagcaatagccaaaatatyggtgcaatattgaaagtgcaaagccaagtactatatgggctgctgtggggaaagttaactacaggcacaccaagtacaacatggaacagtccctgagttagtagctttacttggagtccttgctacaactctgcaaacccctggaccaattttgcccctattctatgatataaaccacaacactgccttctccttgatgcagtattttctgcttcagtgtaccctttctcactcaagccataatgctccatctggaaatagtgacttgggcacgagtttgtgtatgttttaatccataag

SEQ ID NO: 3578 - DNA, 600 bp, Chicken  19866894100421_1
cagcacagtacacagaaagggaaaagtagaagtttatttagcaggaaacctcctggcagatgctagcacaactggggcagctaaattggcttgtatcaataactctttcagccagcttgtaaaaatccttctgggcctaagcccctgcatattcacacttactaactgatatttcatgtgtggcttaaaaatgcttgcatacactttatccccaaagctttttcttttatcattcataattgctcttgattatggccttatctcctctataggaagtttctagatttgaaaatatttttrttttaagctctctttcccaagaagctcagtgacatttcacccgtgcactggataaacatttcattctttggctgaattgctagacaacagcactgatatatctgcaggtttaaatataagaattgtgactttaacattttttgcacagagacaggaaggtctctgacttcccttatgcatcgtttgcttctgtcctccatatctcattcacacagaggcagatcactaccttgatttccagtatggttttattcaaattgtttcattgtcttgggatgctttattccacagccattttct

SEQ ID NO: 3579 - DNA, 600 bp, Chicken  19866894100423_1
aaacagcactgaagaagccctcagcagcccaccacgcagccctgctctcccatctgctcatgtggccaccaggatatgttttcctatttttctcccccagtagccaaggaagcaatctctaatcaataagatactccttgccaagaccaaatgattcaaggggaagccatgacctgtctgctacgccaatgagtcagtcccttcccttcctagaaatataactaacgtcagcaaatatgacaaaatgatgtactgacagcgctgtcacgttagtgatgtgagggcaggaagctgggaagsagcgctcccctgcagccgaagcacaaagaaacttacagcttgtgccacaacgtagagctgctcttgccctgctgccccacaaaaagccagcagtgtgccccttagcactcygctacacactgctttaacatgcacactgcttcctgcagaagcgctgggtgctgcacaccacctgtgctgacatctcgaggatggagatgtcctgcctttctcgtgcctcgttctgtcatctctgggaaggagactcagggagggcattttctcccagaaacgaccacccagagagaagcccttatttga

SEQ ID NO: 3580 - DNA, 600 bp, Chicken  19866894100423_2
gcaatctctaatcaataagatactccttgccaagaccaaatgattcaaggggaagccatgacctgtctgctacgccaatgagtcagtcccttcccttcctagaaatataactaacgtcagcaaatatgacaaaatgatgtactgacagcgctgtcacgttagtgatgtgagggcaggaagctgggaagsagcgctcccctgcagccgaagcacaaagaaacttacagcttgtgccacaacgtagagctgctcttgccctgctgccccacaaaaagccagcagtgtgccccttagcactcygctacacactgctttaacatgcacactgcttcctgcagaagcgctgggtgctgcacaccacctgtgctgacatctcgaggatggagatgtcctgcctttctcgtgcctcgttctgtcatctctgggaaggagactcagggagggcattttctcccagaaacgaccacccagagagaagcccttatttgagcaaggaagttatcacagacagtgatggctgtggacaagcagcaccttcagacgcagagaggcagactaacactttcctgccctatgagaaataacctagagcaaaatccc

SEQ ID NO: 3581 - DNA, 600 bp, Chicken  19866894100428_1
ttaaaacctcagctgtgctgggctaggagtgatcaaggctgtacaagtgtactgggagtcaggaccacactcccaacaatttagcacatcattctgggttaggaaaggacagtctgacatggttccacctttgcaaaagacagtttgtacattccatttccatgtgagatcaaaggtgggaaccacaaacctcactacacagtggaattccctttttccaatcactgcagctattggcaccagtacagctactacccagcacccacggtgtctgcagtgtgtgtcagatccaggcttcasaaaatattctgaaaccagatcctcctctgaggaaaactggcaatgctccaccgaagtcaacagaactttaatttccaccatcttagaataacagttggaatacttgggtattgagccaaagtgtcagagacatttttgaaacacacgcagaaaaggaataggttgatatttaaaatgaaaatatacatttaaagttcaccatcaaggacaaatgcctgttccctacccttggtccctcaaagtatcaggagaagcatggattgtcaagaggtagacagctgtgttttgtgtaatgctaaa

SEQ ID NO: 3582 - DNA, 600 bp, Chicken  19866894100429_1
gaaggcgttctgggccacaatgaccacggggcgtgagctccctgagcacgtgggcacagcgttcaggccagtggaactgggtgcttggtggggggtgcccagtatcaagctgctgcttaagagcaactgagcacctatttaggagttgtttgaaaccacagtaagctgtattttttgtaagagatgggctttgtaaacacagaggaagtaaacacttctcagaacacttcagtgttgaattcactcgtgttggccgtcctggaagctcctacaaaaggaacgtcacgcagaacgctgtgmgtatctctgaggctgggctcagatttccagtgcaaaatgagcacgtaagcacacastaataaagctcctgggttgaccttgcccgyccgagccccgggctctgagggggagatgcagttttatgaggcagaaggtgcaaagatgagtgagtgcagctgggctcgggtggctttgtccttcacgtaaggtcaacacataaagcaaacattgcacaacgcagccgacagcagctcggttcagcccaaccagagagatctttccattcggaaagggaatccctctgtgcagagcgccaggcaa

SEQ ID NO: 3583 - DNA, 600 bp, Chicken  19866894100429_2
cagcgttcaggccagtggaactgggtgcttggtggggggtgcccagtatcaagctgctgcttaagagcaactgagcacctatttaggagttgtttgaaaccacagtaagctgtattttttgtaagagatgggctttgtaaacacagaggaagtaaacacttctcagaacacttcagtgttgaattcactcgtgttggccgtcctggaagctcctacaaaaggaacgtcacgcagaacgctgtgmgtatctctgaggctgggctcagatttccagtgcaaaatgagcacgtaagcacacastaataaagctcctgggttgaccttgcccgyccgagccccgggctctgagggggagatgcagttttatgaggcagaaggtgcaaagatgagtgagtgcagctgggctcgggtggctttgtccttcacgtaaggtcaacacataaagcaaacattgcacaacgcagccgacagcagctcggttcagcccaaccagagagatctttccattcggaaagggaatccctctgtgcagagcgccaggcaagcgccgcatccttctcctccccgtctccgtttgcaaagcagaaaatcaaagccttc

SEQ ID NO: 3584 - DNA, 600 bp, Chicken  19866894100429_3
ggtggggggtgcccagtatcaagctgctgcttaagagcaactgagcacctatttaggagttgtttgaaaccacagtaagctgtattttttgtaagagatgggctttgtaaacacagaggaagtaaacacttctcagaacacttcagtgttgaattcactcgtgttggccgtcctggaagctcctacaaaaggaacgtcacgcagaacgctgtgmgtatctctgaggctgggctcagatttccagtgcaaaatgagcacgtaagcacacastaataaagctcctgggttgaccttgcccgyccgagccccgggctctgagggggagatgcagttttatgaggcagaaggtgcaaagatgagtgagtgcagctgggctcgggtggctttgtccttcacgtaaggtcaacacataaagcaaacattgcacaacgcagccgacagcagctcggttcagcccaaccagagagatctttccattcggaaagggaatccctctgtgcagagcgccaggcaagcgccgcatccttctcctccccgtctccgtttgcaaagcagaaaatcaaagccttccagtaacgctgcgtgctgagatgtggctgt

SEQ ID NO: 3585 - DNA, 600 bp, Chicken  19866894100431_1
tagtcctcagttgatgtagtagcccagtcatatttcatgatgcaggtctctgtcaccctgcagtttgagtgcatacatttcagtgtaagtcagtgtccaactgcatcagtccatccagtagagtgcaatacacagaaaacgaaccacatccaggactctactcaccatcattaaggcataaacacagaagctttatccattaaggtgccagtgctatcagacagcagacaatcaacaagtgttcttgcttagttctagtgtgagtttgcttttggctcccttagtaaccgtctcatcccraataagattactaccatcaatttacagccagatattaaacattaagaaaaaatttcagcagctatactgtacagttgttatgttatactgtaacgttcaatgtttgctctggtctcagttttgcatgyaggtttgcaccaaagtttgggaatcaccaccttaacaatatcaacagactaacaagcaactgtaagacctcagagcacatgtgagtactctttccttatgaatcaagccaatatttcccaagagcttaaaaagaaaagtgaccaacaactttacacgatttacacaacagac

SEQ ID NO: 3586 - DNA, 600 bp, Chicken  19866894100431_2
tacacagaaaacgaaccacatccaggactctactcaccatcattaaggcataaacacagaagctttatccattaaggtgccagtgctatcagacagcagacaatcaacaagtgttcttgcttagttctagtgtgagtttgcttttggctcccttagtaaccgtctcatcccraataagattactaccatcaatttacagccagatattaaacattaagaaaaaatttcagcagctatactgtacagttgttatgttatactgtaacgttcaatgtttgctctggtctcagttttgcatgyaggtttgcaccaaagtttgggaatcaccaccttaacaatatcaacagactaacaagcaactgtaagacctcagagcacatgtgagtactctttccttatgaatcaagccaatatttcccaagagcttaaaaagaaaagtgaccaacaactttacacgatttacacaacagacaaatcaacttccttccttccatcctattcgacacacaaagtgttaagcagacacagcaattctatacttcaattatcagccccgcatcatacccttgcagacaacaatctgcatctgcaaggacaaaa

SEQ ID NO: 3587 - DNA, 600 bp, Chicken  19866894100431_3
taacaagcaactgtaagacctcagagcacatgtgagtactctttccttatgaatcaagccaatatttcccaagagcttaaaaagaaaagtgaccaacaactttacacgatttacacaacagacaaatcaacttccttccttccatcctattcgacacacaaagtgttaagcagacacagcaattctatacttcaattatcagccccgcatcatacccttgcagacaacaatctgcatctgcaaggacaaaactcttcactttgtcaaatgttatgtcaaaatagtgtcacattcaagttscatttatttttccaatccttattttgcatgtctttactaaccacctgtaagcacccttcaaaaataataataaaacattctgttgtatcgccataatttaaagtcaaaaacaaacactcagagaatgaattctaaaacaaactcctcaagctgaaacttgatcaagtgaccaacagcttttaagccaaataaccacacagttctggtcttttctccttggaaaccttttgcccaattggacatcactattgactttagatagcagcctcttaccaagacgagctgtgtatgctgtaatcc

SEQ ID NO: 3588 - DNA, 600 bp, Chicken  19866894100436_1
cccatcacccattgggattccaccacccacacccactgaggtctccatcatgcattggatgccatcacccactgagattgcattacctgtagagatctccatcacccactgagatcccactatgtattgggactccatcacccattgggatcccatcaaccattgagatcttcatcagtcattgaggtcctcccatcaccaacaggaacaccactactcactgggaccccatcacccactggaatctcaccacccacacccactgaggtcttcatcacccactggaaccccatcacccaytggggcctcatcacccattgaagtcccccatcaccccttggtatcccgtcagccattgggatccaaccacccacatccaccgatgtcttcatcacccactgggatgccatcacccattggaatcccaccacccacacccactgagaccccactacgcattcggaccccatcatccatttggatcccattacccgttgagatctccatcacccactgagatcccatcacacaatgagatcccactacgcatttggaccctatcgccattgggatcccattacccattgagatctccatcat

SEQ ID NO: 3589 - DNA, 600 bp, Chicken  19866894100437_1
cttttatatatctcagtttcagcatgcaacaattgactggataatttccttttatactctctgactttaaaacaagagaggacaattgtgaatatcaatgacaaccaccacgtgccaaccttttgagagtatgattcataattctcacagatcctccattgtgtatcaacgctgtgtatcacagtgtagaaacaggttcattttgttggaaagcaatttaaaagttttctccatccagcagtcatattaccatacttatttgctgctgcatttagtctgccttgtttgccctgctcacaygtattacagcttgtgaggccggggaagggggaatgaaggaaaggaacaaaggaggaaggatctggaaaataaagggctatgaaaattttactctatttcattaaaccctrtgcactgggggttaagatgtattttggcaaatgaatgtgctttgatgcatctgtaaccccagcacacttttatgaataggtattatggactaaaaactgattattttctgcttagctgagtgaactacaaggagaagaataatcctacaaccttaaaggtaatggtctgaagaaaaacaaatatcagaaa

SEQ ID NO: 3590 - DNA, 600 bp, Chicken  19866894100437_2
cgtgccaaccttttgagagtatgattcataattctcacagatcctccattgtgtatcaacgctgtgtatcacagtgtagaaacaggttcattttgttggaaagcaatttaaaagttttctccatccagcagtcatattaccatacttatttgctgctgcatttagtctgccttgtttgccctgctcacaygtattacagcttgtgaggccggggaagggggaatgaaggaaaggaacaaaggaggaaggatctggaaaataaagggctatgaaaattttactctatttcattaaaccctrtgcactgggggttaagatgtattttggcaaatgaatgtgctttgatgcatctgtaaccccagcacacttttatgaataggtattatggactaaaaactgattattttctgcttagctgagtgaactacaaggagaagaataatcctacaaccttaaaggtaatggtctgaagaaaaacaaatatcagaaagcaatcatggaaggggcaaaaggagatcagccattctgctaaggaagaagcagccttcaattagatatctattcattggaaatgaatgccaaataacattaaataagcat

SEQ ID NO: 3591 - DNA, 600 bp, Chicken  19866894100442_1
tttgttgtgctgtttgacccacgcgagcagcacaaacaatgaggtgaattccctgctttaagaggccaaactttagaaataaggcagcgttccctttggctgttaataaagcacatcgttagcacggagaacttactgccacagaactaccagcgccaagcaggcattcagggagccaaagcccaggagctaaaagggctgtgccatcttttagaatgcaagtccacccctagctatagaaccatttgaggtggaagggacccttaagggccatccggtccaattcccctgcagtgaacrgggacacctacagctccaccgggtgctcagagccccatccagcctggccttgaagaacacaggtcagtgggctacagcacttcatcacaaccttactctgaagcgtctgccctggcgaaggggaggacagctttgaggactgcattatgaggatcaagcgtcccatacgactgttgtaacctgtcatccaacctgccatccacaagctcgctgcaaactctatcctaagcctcaccacctgaaacactgctgcttcagcagcccaaggagtgctgacaggtccccacgatgcacctgaag

SEQ ID NO: 3592 - DNA, 600 bp, Chicken  19866894100453_1
accatggttatggaatttttttttacatggttcattttaaatacacaaataacatgcagagaaaaagccacagcacaaaggaaattcagcaatagaatgcgaaaggaagactgaatgataccaaagatataagcgtaataacatgcaagatccagttactaacagctggtccgtatccgggctgggtttgtgaaggaggtgtgaatgatacaaccaatactttatcacataacattatttatgaaagtcactaaaaccataacttcgcattaggaagtatttgacataaaaatctaagamgaattgcccaggtttatatacatagtttagtgatcatgcacagcatatgtactacagagcctctttcaaatgaaggtctggttttcaggtatgtttccaagagaggagattacagcaattgtatccacatgcgatagtttcaaactatgttctgtcattctggctttcctctgaatttaggtggcagtaacacaactgttgcagagtttgttgttgttggttttttttactttgtgcaatttccccagaatggaaaaagaacttgcaactaacaagctacgcacattagttctgattcag

SEQ ID NO: 3593 - DNA, 600 bp, Chicken  19866894100453_2
tgcccaggtttatatacatagtttagtgatcatgcacagcatatgtactacagagcctctttcaaatgaaggtctggttttcaggtatgtttccaagagaggagattacagcaattgtatccacatgcgatagtttcaaactatgttctgtcattctggctttcctctgaatttaggtggcagtaacacaactgttgcagagtttgttgttgttggttttttttactttgtgcaatttccccagaatggaaaaagaacttgcaactaacaagctacgcacattagttctgattcagttgycccataatttcttaataacagtaattcaagtaagaagcacttgcagtctttgtaagtttgttgcgctaacaagaacttctgtagctcatttactttgcagtaagttgaataaatggtcaataatgaaatagagcagaaaaggttgaccatggcgctatgtcaacacctttcacaaggacatgcaatttcaaatgaacccttgcacaaaatataaaaggcatgatctatatattatttgtcttttttcttttcccaaacaggtttttcttttctttctctgaagttatgtactttcctaat

SEQ ID NO: 3594 - DNA, 600 bp, Chicken  19866894100453_3
aataacagtaattcaagtaagaagcacttgcagtctttgtaagtttgttgcgctaacaagaacttctgtagctcatttactttgcagtaagttgaataaatggtcaataatgaaatagagcagaaaaggttgaccatggcgctatgtcaacacctttcacaaggacatgcaatttcaaatgaacccttgcacaaaatataaaaggcatgatctatatattatttgtcttttttcttttcccaaacaggtttttcttttctttctctgaagttatgtactttcctaatagcctaagtaaartactgtaacagtttttctgatgagctgttgctactataaaagtactattgctttatttatggtctacatatgcaactgaagaggcctatttccatcagtgctatgttacagatttcaggagtaagttctggctgtttgaaaaccttaataagaaggtagagaagtatataaaaattagcagattgaaggcccttaaatttcttactctgaatactagattaagaaccttcacaatttctctccattgctcacgtgccctgtgagctatacagaatcatgctgattgggtgaatttgcatg

SEQ ID NO: 3595 - DNA, 600 bp, Chicken  19866894100456_1
gtcaccaggagcgagtacaaggtgcataggatctcctacactgctgtatggaaggaagcatgggaaccaacagtccctcagaaacaatcatttccagaaagaaaaattatctgtgtaaagttggcagctgtcagtattactgtgtgaaacaacctgacagctttttgctacatttgggttttgggggttttttggttgtttttttttccctgcatttttcttcctttcttcagcatttttaagggattttttagtggaacaccaagttcttgtcacgttaagattaagccaggacagcartgttgctggaggcaggatgccagaacatcacttgagcactgaggaatactacctgaactgcctgtcttgttaaaatacaataggaaatttgtatacataccttccaagtacttaactgcactggaaggtatttctagcttccagtcacaaaaccaggacatggttttgtgagaacgattggtgatgggtggatggttgaactgggtgatcctgtgggtcttttccaaccttggtgattctatgattctttgattccatcttctagctctctccttccaggctcacttttcccccatatgc

SEQ ID NO: 3596 - DNA, 600 bp, Chicken  19866894100456_2
catcactcttccttccagtcttctaattttctcattctttctacttctcccaagtctaacactgtttatttaattatatgttcaatctgcttctcaacacaattaataagaaaggaatcagaacaatgaggtaaatgatctcagctacaaaacactggccatgcatggccttgaaagataaggaaaacacagcagttggcataacagagtatcgcttacacagtaactacctgaaaacaatgagacagagcacaggtaaagcagtgctgtttctatgcagtagttcctgccttctgtctkttaattaatcagcctgtactccctgaggataggtcttgtatgtaattaaaggctatttttaggaggaacaaaacaaagcacttaatgctgttaaatactaaaaacctccaagctggaggtgatgcttacctcccattattttcacaataattctgctttgcaaaatgaccacagagctgacacaattgaaccaaacgttgattctcactcatacaagtcatccacacacacaaaaatctcccctcacatcttcttctctgcaaattcaggatctggacagaacagagcaagttttatgtg

SEQ ID NO: 3597 - DNA, 600 bp, Chicken  19866894100460_1
ataaggttagggagtggcagacccagcgttcactccttttggccacgcatgtgaattgcttccacctgtgctcccagagctggctacgccccttcaccaggtgctcaaccactgcttcaagtcataacctaacatttcccatacatgagatatttgtactatgagttaaacataaaattatcttgttttaaatgaaataaattcctgaataaattgtatataaaaaatactccatgttgaacttggcctttatttacttcattgttgtaggattttctttagactgtttctagctgtcaytagtgtcattcgttgcacactgtgtgagcagaatatattctgtcatttctgcagataaggtttttgaccttgtgaaattctgaaattttatttcattaccttgaaagctacgatttagcatagtgaacatcaggcaatctgtagtacttaatctactagctcagcagaacaccaaattaattcaaatttgaaaaaaacctctccatctgtagcaaaagcatgttctcaattacatactgaattaaataagaggtagaaatatttctgaaagcttgaaatttatagtttcattagactgaa

SEQ ID NO: 3598 - DNA, 600 bp, Chicken  19866894100469_1
acatatatggtaaggatatacaacgctttcttcttttctttcttgctgatattttgacaaacagcttggtaaagcaaattataaacatctgtagcgggtgtgctttgcattatgattcatttggttcatcaaataagtccctacaactgccacagaaaaatgcagaaatattctaattcagagcactaaagctaaacacaaattccaatggcatgatcattttcttcacactttttgctttatctcatcaatccgaacagatggaagtttctttagaatcaaaactagacctatatatcratgtcaatctatacaggaactaagctcaaggaagaatatatttaatatacaactatagcaaagatgtgtcttctgtttccaacttatgatatgcaaatgagagaagaaaagattgtatccaatatttttaaattagcatcttaaaattaaagattcaagtagaatgttcatgaaaatcctatgttttgatcatcactccaattcctggaatagtatttatctacttagcttactttcaacttagggctacctcaatccagaatttcacattctaacccaagacagatgttttaacaagag

SEQ ID NO: 3599 - DNA, 600 bp, Chicken  19866894100476_1
gcactcccagcgagcaaacagcattagtttctcctgacaagatttgcttaatttcttcagaacttccattccaatgacatttctttgtcaccaggccaatttcaacagtttattgctaaacattatcaccttggctgcaattgagctttcacaatccttttgtatcttgaatactgctcattcatgtgtgaagctcacagagatgctgacatgaagactttattcttggggataggcaggaaggtctgaagaccagaacaagaaatatacatattcttgtatcacgtacacaagaagacmatttttcatttttacaaaatgcagaaatgaaaattgagaagtcaaatacttgcaaattaggtacataaagaatcattacayrtgcatccttaaattggcctttttcagcatgtatatttcttatgcacatacacatgctttaattataacgtatgcctttaccaatgcaaaacaagacatctttcatgggtcatccttgctttgccagtgattttccactataactgcgggttggactagatgaactccagtagtcctttccaacccctatgattctgtgactctgtgaaaccagacttg

SEQ ID NO: 3600 - DNA, 600 bp, Chicken  19866894100476_2
tctttgtcaccaggccaatttcaacagtttattgctaaacattatcaccttggctgcaattgagctttcacaatccttttgtatcttgaatactgctcattcatgtgtgaagctcacagagatgctgacatgaagactttattcttggggataggcaggaaggtctgaagaccagaacaagaaatatacatattcttgtatcacgtacacaagaagacmatttttcatttttacaaaatgcagaaatgaaaattgagaagtcaaatacttgcaaattaggtacataaagaatcattacayrtgcatccttaaattggcctttttcagcatgtatatttcttatgcacatacacatgctttaattataacgtatgcctttaccaatgcaaaacaagacatctttcatgggtcatccttgctttgccagtgattttccactataactgcgggttggactagatgaactccagtagtcctttccaacccctatgattctgtgactctgtgaaaccagacttggatgtaaagatgcaaccctaatgggtstcctgtggcaaagttcmagataagccgaagygggaggtggagcatcagccaccc

SEQ ID NO: 3601 - DNA, 600 bp, Chicken  19866894100476_3
ctttgtcaccaggccaatttcaacagtttattgctaaacattatcaccttggctgcaattgagctttcacaatccttttgtatcttgaatactgctcattcatgtgtgaagctcacagagatgctgacatgaagactttattcttggggataggcaggaaggtctgaagaccagaacaagaaatatacatattcttgtatcacgtacacaagaagacmatttttcatttttacaaaatgcagaaatgaaaattgagaagtcaaatacttgcaaattaggtacataaagaatcattacayrtgcatccttaaattggcctttttcagcatgtatatttcttatgcacatacacatgctttaattataacgtatgcctttaccaatgcaaaacaagacatctttcatgggtcatccttgctttgccagtgattttccactataactgcgggttggactagatgaactccagtagtcctttccaacccctatgattctgtgactctgtgaaaccagacttggatgtaaagatgcaaccctaatgggtstcctgtggcaaagttcmagataagccgaagygggaggtggagcatcagccaccct

SEQ ID NO: 3602 - DNA, 600 bp, Chicken  19866894100476_4
tgaaaattgagaagtcaaatacttgcaaattaggtacataaagaatcattacayrtgcatccttaaattggcctttttcagcatgtatatttcttatgcacatacacatgctttaattataacgtatgcctttaccaatgcaaaacaagacatctttcatgggtcatccttgctttgccagtgattttccactataactgcgggttggactagatgaactccagtagtcctttccaacccctatgattctgtgactctgtgaaaccagacttggatgtaaagatgcaaccctaatgggtstcctgtggcaaagttcmagataagccgaagygggaggtggagcatcagccaccctagcatacatgctggctttgcccatacacatgcatttccaaggagccatctgggtctaactcacacctgaaaataaaacacagaagaaaaaatgtgcattgcggaggtgtgtgtgagtgatgctatgggagcaactgacttcacatatacttctgctgtgcaaaactttcccagttccatcttagtgacaaatgataataattcccaaatcctcagattaattccagctcctagcaccaagataaa

SEQ ID NO: 3603 - DNA, 600 bp, Chicken  19866894100476_5
aatacttgcaaattaggtacataaagaatcattacayrtgcatccttaaattggcctttttcagcatgtatatttcttatgcacatacacatgctttaattataacgtatgcctttaccaatgcaaaacaagacatctttcatgggtcatccttgctttgccagtgattttccactataactgcgggttggactagatgaactccagtagtcctttccaacccctatgattctgtgactctgtgaaaccagacttggatgtaaagatgcaaccctaatgggtstcctgtggcaaagttcmagataagccgaagygggaggtggagcatcagccaccctagcatacatgctggctttgcccatacacatgcatttccaaggagccatctgggtctaactcacacctgaaaataaaacacagaagaaaaaatgtgcattgcggaggtgtgtgtgagtgatgctatgggagcaactgacttcacatatacttctgctgtgcaaaactttcccagttccatcttagtgacaaatgataataattcccaaatcctcagattaattccagctcctagcaccaagataaaagatctcagtgagagct

SEQ ID NO: 3604 - DNA, 600 bp, Chicken  19866894100476_6
aggtacataaagaatcattacayrtgcatccttaaattggcctttttcagcatgtatatttcttatgcacatacacatgctttaattataacgtatgcctttaccaatgcaaaacaagacatctttcatgggtcatccttgctttgccagtgattttccactataactgcgggttggactagatgaactccagtagtcctttccaacccctatgattctgtgactctgtgaaaccagacttggatgtaaagatgcaaccctaatgggtstcctgtggcaaagttcmagataagccgaagygggaggtggagcatcagccaccctagcatacatgctggctttgcccatacacatgcatttccaaggagccatctgggtctaactcacacctgaaaataaaacacagaagaaaaaatgtgcattgcggaggtgtgtgtgagtgatgctatgggagcaactgacttcacatatacttctgctgtgcaaaactttcccagttccatcttagtgacaaatgataataattcccaaatcctcagattaattccagctcctagcaccaagataaaagatctcagtgagagctctgttgccaggctg

SEQ ID NO: 3605 - DNA, 600 bp, Chicken  19866894100478_1
aacagtaattcaatgctgggactaaatggaggaactgaatgggacaagttatgtcccaagttggagtaaaagctttatcttttcaacaaagggttaaaagaaccaatttcttcagcgtcttccaaaagggctttgtttgactgatttcaactgcccaaatgatcatctgtttatatctacttctttataactattctttctgatagaggcattgttgtgcatctactgaactgtcagccagtagtggatgaaaaatctaaaagataagatcagactgtatgaaattgctttgtaaaagcraatgactactagcagtgtcatgctcacaactgcaatgtgacatctatctccttactacattttctggcaaaacaattttgtttattccactgctttttttttctctctttctgttttgaatagtaaaggtatttcagtagaatgtatgtatctggactgtactgaaacctctttcaatgtgttgttgttaagttgctgcgctgctcagagaaaatgataggagaatgtcactgaatattaaaaatcctcgcttagagcttcattttgtgtacttgaatatattacgtatatcctaaatgt

SEQ ID NO: 3606 - DNA, 600 bp, Chicken  19866894100478_2
ggagtgctcgcttgttggtttaacctccctccctccactagcagcagcaggctgtcacaactagatgggagcagctttttctggaacaaactggtttgaagaagttgccaattttgcagcaccaggattggcttaatgagaaacaagaggaaagcagcaattacctttaaaattgatgcagatattattgcaaatgataccatctctcaagtttaagtgtttgtttttaacagaagagcataacctgtgtatgtatatccagtttcacctcaaccctgtgcatatctaatgaaaaacctygccaatatgaatggtgtgcatctacacaatgagagcaaaacaagtctgtgggtcctaactgaaatgcccaaatgttttgtgtggttacacagtaaatcttctatctggcactgtcttcagtctctaagataccttctcttaatgttaactattctgcacatttgtaaaaacaaacaaacaaaaaccaacacaaagctgtgtgtgagtcactcttaagtgttttctgttctgaaatctcagaagctaatatttcaataaagacttctgtacagttgaggaaaatcgccttatgcgagctga

SEQ ID NO: 3607 - DNA, 600 bp, Chicken  19866894100478_3
gagagcttcattacacaaaatttgtatgcgtttgaataggattggtaagtactgaataaggggaactgttaatctctcacctcttttagcaaaacactttgcatctgcaaacaaaactacagttgtgtatccccagctgattgtccagtggctttattaaattggctctgtaaactgtttgttgcagtgaagatacaaacaagctgaaactgggtcagagcagacccgtctcctcctattgtctctgaatgcttcagtagtctcgaatgtactcccaggaaattgagaattgagttggarataatacaatgtatgtcttaaatccattttgctgaatggctggaggtggctttcctgtggatgcagaatgtgatttgtgaagaagcacaagaatgcttcgccttacatgcataaaacgtaggctagtgttccttgaagagacgcatttcatcaggagtctgttgagagtgagagctggcacactggaaactaactcttctctccccaaacaaacccctagattaatccatgctgtattccccagtccgcttcatcccatgttggcatgaatctcggtgatggctcgaggggttggtgtag

SEQ ID NO: 3608 - DNA, 600 bp, Chicken  19866894100481_1
gtgtgctgttgcttgggaatgcctgctttgagactttccacttggtggcctggcactgccgttgctgcgagctctgggcaccgtgctgcccacacctacccctgtgagtgaccaccagctcggcaccacgcacaaacaaaacctgatagctcattcagaatacttccaaagtaatctctgtgagaatactttcaggatttgttttatgagctggaagcagtgaacactatcataaatgctaacatataacgctgagagaggaataattgtagcacatagttacttatgttaatactatcrcattatcttgtgatagctgtgcaattaaatgagtcaccactacgccaaatctcatttgtctccaagcaccccacaaatacgctgcattcaccgtctgtgcttcagtctgatagctttttgggcgttgctttctctttgtgtttggagagcaacagagctctggcacctttgaaaagatggagcatattgtttggaatttaatagtagaatgatatgatattaaattcaggaatgtttttgccaagatttatttctagaagatgtttttctgagtgatactgacagggcaaattccaaaca

SEQ ID NO: 3609 - DNA, 600 bp, Chicken  19866894100483_1
aatctatatatttaatttcacaaacaaatagccttgacagtcagccaagaacacttaatcacacatgcctacaggctggctccttgcatgaatggctctccctgatgcaccagtgaaactgaattaaattctgggaagaacaacagacctttgataagagaatctaaagcatcattacctcagttgcactgaatatgctgacctcctgtaaaagcaaaagagtagggacttctcttgaaagatgtgctttcaattgtgtattcattgtgggtacacttttttttttctttcccttcaggycttcccttccrttattccatatttaaatataaaaatcttgtttattttggccagtattaatgacttcatattttatctttcatttgctagtaggctggaactttctgcatgtgccacaacagagacaatcttctttttctttgtgaaatgaataacattaattctgatcattttcctaattagtagagctcttcacaggagcattatttttaagtgttgttaccagaattactcaggagagcttagaggtttagattactgatgtttaaattaattaaagagatctatctgtggattttc

SEQ ID NO: 3610 - DNA, 600 bp, Chicken  19866894100483_2
ttaatttcacaaacaaatagccttgacagtcagccaagaacacttaatcacacatgcctacaggctggctccttgcatgaatggctctccctgatgcaccagtgaaactgaattaaattctgggaagaacaacagacctttgataagagaatctaaagcatcattacctcagttgcactgaatatgctgacctcctgtaaaagcaaaagagtagggacttctcttgaaagatgtgctttcaattgtgtattcattgtgggtacacttttttttttctttcccttcaggycttcccttccrttattccatatttaaatataaaaatcttgtttattttggccagtattaatgacttcatattttatctttcatttgctagtaggctggaactttctgcatgtgccacaacagagacaatcttctttttctttgtgaaatgaataacattaattctgatcattttcctaattagtagagctcttcacaggagcattatttttaagtgttgttaccagaattactcaggagagcttagaggtttagattactgatgtttaaattaattaaagagatctatctgtggattttcccatctgagtt

SEQ ID NO: 3611 - DNA, 599 bp, Chicken  19866894100484_1
  misc_feature (1)..(20): n is any nucleotide
nnnnnnnnnnnnnnnnnnnnatttttattctgtgttcttagtgatggttctattcttggattttgctgtgccatttgagtttgaacatatcttggtactttagtttatgctcatttagttaagctcatcctagtcagaggtgttacttaaacacataatattaaatatatgcttaagtgctttgctatatcaattccctgcttcacctgccacttcttttgcagcatagtgtaggccagagagattctgtactttgcctgttctataacatttgacactttacaaattcttcaggatcgrtttctagactatggtgattaaagactataattcctattggcagcatgcaaacttgcatgatccctacacatctctgtatgcttctgaaacatggcwgaagaacataagaatataaagcacattgtcaattactgataatgtctacaagtaggatttactagcttttagatcttgatagttcataaagaaagtgttctgtttaagttaaaccattgtattattctcctagatttcatctaaagaaattctctttggccatactgcttctgtaacttgtttggcaaaagcaagagagtttg

SEQ ID NO: 3612 - DNA, 600 bp, Chicken  19866894100484_2
actttagtttatgctcatttagttaagctcatcctagtcagaggtgttacttaaacacataatattaaatatatgcttaagtgctttgctatatcaattccctgcttcacctgccacttcttttgcagcatagtgtaggccagagagattctgtactttgcctgttctataacatttgacactttacaaattcttcaggatcgrtttctagactatggtgattaaagactataattcctattggcagcatgcaaacttgcatgatccctacacatctctgtatgcttctgaaacatggcwgaagaacataagaatataaagcacattgtcaattactgataatgtctacaagtaggatttactagcttttagatcttgatagttcataaagaaagtgttctgtttaagttaaaccattgtattattctcctagatttcatctaaagaaattctctttggccatactgcttctgtaacttgtttggcaaaagcaagagagtttgagaaacagccatatgtagtaagtgctactgaaaatgggtaggtaactgaatactcaattcatttttcgaatcatgaaatgtacagcaaacgtagatc

SEQ ID NO: 3613 - DNA, 600 bp, Chicken  19866894100484_3
cattgtattattctcctagatttcatctaaagaaattctctttggccatactgcttctgtaacttgtttggcaaaagcaagagagtttgagaaacagccatatgtagtaagtgctactgaaaatgggtaggtaactgaatactcaattcatttttcgaatcatgaaatgtacagcaaacgtagatcaaattctgcatttggcagagagtttttaatccactttcttgattatataaaaagaatagcaattatgataatgactatttctcatatacgataggctaaccaagaattcatctyttaggcaatagaagagtttggcaaattcatgtatccagttagtagtcaggagaatgagttattcgagagtcagggccattcayatggaagaaaacagactgtggggggaggggttgggaggttcagaatttaatatcatgatgacttttttcttcctgagtttgatctcaagaattgaatcaagaaggagactaatgtacttgatgcaggttgtgcttgctcagtgaccacatctggaagcacagaaaaaactactctcaaataaaaggtgttaatgttctttgtctttacttaaattgc

SEQ ID NO: 3614 - DNA, 600 bp, Chicken  19866894100484_4
agtttgagaaacagccatatgtagtaagtgctactgaaaatgggtaggtaactgaatactcaattcatttttcgaatcatgaaatgtacagcaaacgtagatcaaattctgcatttggcagagagtttttaatccactttcttgattatataaaaagaatagcaattatgataatgactatttctcatatacgataggctaaccaagaattcatctyttaggcaatagaagagtttggcaaattcatgtatccagttagtagtcaggagaatgagttattcgagagtcagggccattcayatggaagaaaacagactgtggggggaggggttgggaggttcagaatttaatatcatgatgacttttttcttcctgagtttgatctcaagaattgaatcaagaaggagactaatgtacttgatgcaggttgtgcttgctcagtgaccacatctggaagcacagaaaaaactactctcaaataaaaggtgttaatgttctttgtctttacttaaattgcatcagctgtcttggagtatgttccttgagcttcctgatctttcacattttcttgtatgtttgttgtgatttggcacactactt

SEQ ID NO: 3615 - DNA, 600 bp, Chicken  19866894100485_1
attgatgaatgctatagaaaaacctaccagtacttttacagaagttattttaaaagaaaaaaagtcaaaggtaacaactattatagccttcaggcactgacacagataaaaaatacttcttttcaatagaaatcaggcagtgtttcaagcagtaattacagaggactcatgattggctgcagttcaattaattacaggtctactcaaatgctttgcattaagcatagtcttaaattcattgtgaaatcagggaacatttgatattctaaatatatggcaatcagctttcattaatttatwttaactaacccttatattaatttatattaagtaattaattacaattaatattaattaacactaactaacctttccaacttttagtattttttacttgtacttctgttcgttattaaaatgcacaagagaatgcacagtcatttttattacttaagccattttgtgcatgtttaaawagagactgtaaaatctagtcacctgcactgtggtgtcttctgtgttcaaatctctggctagcatcacccggttgctttttcatggttctttcattcacttctgataagtagaagctgacctttg

SEQ ID NO: 3616 - DNA, 600 bp, Chicken  19866894100485_2
ctgcagttcaattaattacaggtctactcaaatgctttgcattaagcatagtcttaaattcattgtgaaatcagggaacatttgatattctaaatatatggcaatcagctttcattaatttatwttaactaacccttatattaatttatattaagtaattaattacaattaatattaattaacactaactaacctttccaacttttagtattttttacttgtacttctgttcgttattaaaatgcacaagagaatgcacagtcatttttattacttaagccattttgtgcatgtttaaawagagactgtaaaatctagtcacctgcactgtggtgtcttctgtgttcaaatctctggctagcatcacccggttgctttttcatggttctttcattcacttctgataagtagaagctgacctttggcacagctattaccattycctttatggagaatyccttttatgtttgtcggtgcattcagatataaaaatttatgcccaaaaataaagtaaaattttcagtaattctatctggcaaggcaaaatgattcagtaaagtagactgttggtcaaggtaattttagttccgttttgttgtt

SEQ ID NO: 3617 - DNA, 600 bp, Chicken  19866894100485_3
aatttatattaagtaattaattacaattaatattaattaacactaactaacctttccaacttttagtattttttacttgtacttctgttcgttattaaaatgcacaagagaatgcacagtcatttttattacttaagccattttgtgcatgtttaaawagagactgtaaaatctagtcacctgcactgtggtgtcttctgtgttcaaatctctggctagcatcacccggttgctttttcatggttctttcattcacttctgataagtagaagctgacctttggcacagctattaccattycctttatggagaatyccttttatgtttgtcggtgcattcagatataaaaatttatgcccaaaaataaagtaaaattttcagtaattctatctggcaaggcaaaatgattcagtaaagtagactgttggtcaaggtaattttagttccgttttgttgttttcttggcatgctaaggatgtgtcattttttgaaatacatgtcatttcagtttgttgaaactggaagtcctatttgatatgtccagcagaatacttgcaacagtcctgctttgtttaaggttgttggttatgaaaagaaagt

SEQ ID NO: 3618 - DNA, 600 bp, Chicken  19866894100485_4
attaattacaattaatattaattaacactaactaacctttccaacttttagtattttttacttgtacttctgttcgttattaaaatgcacaagagaatgcacagtcatttttattacttaagccattttgtgcatgtttaaawagagactgtaaaatctagtcacctgcactgtggtgtcttctgtgttcaaatctctggctagcatcacccggttgctttttcatggttctttcattcacttctgataagtagaagctgacctttggcacagctattaccattycctttatggagaatyccttttatgtttgtcggtgcattcagatataaaaatttatgcccaaaaataaagtaaaattttcagtaattctatctggcaaggcaaaatgattcagtaaagtagactgttggtcaaggtaattttagttccgttttgttgttttcttggcatgctaaggatgtgtcattttttgaaatacatgtcatttcagtttgttgaaactggaagtcctatttgatatgtccagcagaatacttgcaacagtcctgctttgtttaaggttgttggttatgaaaagaaagtcagttatgtctgtgt

SEQ ID NO: 3619 - DNA, 600 bp, Chicken  19866894100490_1
caaatgctctcattaccttaaagttaggggtgtttcacaggtgacagtcgagatgtcaatatgtgttaaaattgcatttatgagggctgctctgaaagtaatgcttcctactttattctgttggcccatgacatcagagacagatggtggtgatgtggcactcctctgctggtgaggagtgtggcatgcagtctcttgttcgttgctggcaaaaatgcatagctaatggtatgactattgaaaaagagggttttgtagctgagaacttgctctatcaaatagtgttattgtgctctttgyagctactgtagtttctgcggaagttaataagaggcattacttttggrgcgacctacatatttatggggatgctgggacaaagctgtctcgtattccacaactgtaaggcatactattctctacagctgaggtctcttacatgaatagattgagagaatagttgggttgcttccttaatctttaaattgaaatatgaatgasaagtgctttaatatttgtatttgcataagattctttcttctagttgatttatttaatacttttgtattgacataattgtttagtatgtttattctctat

SEQ ID NO: 3620 - DNA, 600 bp, Chicken  19866894100490_2
tcgagatgtcaatatgtgttaaaattgcatttatgagggctgctctgaaagtaatgcttcctactttattctgttggcccatgacatcagagacagatggtggtgatgtggcactcctctgctggtgaggagtgtggcatgcagtctcttgttcgttgctggcaaaaatgcatagctaatggtatgactattgaaaaagagggttttgtagctgagaacttgctctatcaaatagtgttattgtgctctttgyagctactgtagtttctgcggaagttaataagaggcattacttttggrgcgacctacatatttatggggatgctgggacaaagctgtctcgtattccacaactgtaaggcatactattctctacagctgaggtctcttacatgaatagattgagagaatagttgggttgcttccttaatctttaaattgaaatatgaatgasaagtgctttaatatttgtatttgcataagattctttcttctagttgatttatttaatacttttgtattgacataattgtttagtatgtttattctctatgtcttggaaagaaattacagaaacagtggcttacagttttgctattt

SEQ ID NO: 3621 - DNA, 600 bp, Chicken  19866894100490_3
gttgctggcaaaaatgcatagctaatggtatgactattgaaaaagagggttttgtagctgagaacttgctctatcaaatagtgttattgtgctctttgyagctactgtagtttctgcggaagttaataagaggcattacttttggrgcgacctacatatttatggggatgctgggacaaagctgtctcgtattccacaactgtaaggcatactattctctacagctgaggtctcttacatgaatagattgagagaatagttgggttgcttccttaatctttaaattgaaatatgaatgasaagtgctttaatatttgtatttgcataagattctttcttctagttgatttatttaatacttttgtattgacataattgtttagtatgtttattctctatgtcttggaaagaaattacagaaacagtggcttacagttttgctatttttcaacatgctttgaaatacttaataagaagttgatgagaaggcaaaacgtatacttgcactgtattatttccatttctgttagctctcacatttcttgtgtgaaagcctgcagctactgcctgacattattacttgggaggaagatatacaga

SEQ ID NO: 3622 - DNA, 599 bp, Chicken  19866894100500_1
  misc_feature (1)..(33): n is any nucleotide
nnnnnnnnnnnnnnnnnnnnnnnnnnnnnnnnnttctgctacttttattaatgatataggaaagtataataagtccattatgatgtatgtacagaatgaaagctaatgtttggaaaaatcactgctcaattgcatagaaggctctcttctttgatacgcaactataattctgtgagggctctccaaaagtaacggtgttttgaagctgatgattttctctatcaagcagtgttattttgttcttcgtatctgttgcagtttctgtggaaataaataggaggcattacttttggagcatcytacatacctcttataattttgtgtgcagtaacagcaatcaaaatgttaagctagaaatgtgactggcacttcagctggaacattaatcttgcttgatattttttgctgctactttttgcttcagttcttgctgkttttttttcctcatgaattcttcagtttttgaacccaaacaaaatcatttgttctggtttacagctgtcaactgcctcaaagaaatgaagacctaagcctaatttttggcttttcatcagatcaatgcctgctgaacaggcctacctcatccccttttatatctg

SEQ ID NO: 3623 - DNA, 600 bp, Chicken  19866894100500_2
tagaaggctctcttctttgatacgcaactataattctgtgagggctctccaaaagtaacggtgttttgaagctgatgattttctctatcaagcagtgttattttgttcttcgtatctgttgcagtttctgtggaaataaataggaggcattacttttggagcatcytacatacctcttataattttgtgtgcagtaacagcaatcaaaatgttaagctagaaatgtgactggcacttcagctggaacattaatcttgcttgatattttttgctgctactttttgcttcagttcttgctgkttttttttcctcatgaattcttcagtttttgaacccaaacaaaatcatttgttctggtttacagctgtcaactgcctcaaagaaatgaagacctaagcctaatttttggcttttcatcagatcaatgcctgctgaacaggcctacctcatccccttttatatctgagataggtgcctgtgctggttgggaatcctagaagtggtcctctgctgggggtggtggggagggtaacrtggctttctctgagagaaacagtgggctaaatagagtgaaacagtgctcactttcttgggaatggt

SEQ ID NO: 3624 - DNA, 600 bp, Chicken  19866894100500_3
cttcagctggaacattaatcttgcttgatattttttgctgctactttttgcttcagttcttgctgkttttttttcctcatgaattcttcagtttttgaacccaaacaaaatcatttgttctggtttacagctgtcaactgcctcaaagaaatgaagacctaagcctaatttttggcttttcatcagatcaatgcctgctgaacaggcctacctcatccccttttatatctgagataggtgcctgtgctggttgggaatcctagaagtggtcctctgctgggggtggtggggagggtaacrtggctttctctgagagaaacagtgggctaaatagagtgaaacagtgctcactttcttgggaatggtctttccttgcaattatgttcttcagcatatacagattccttgtccagcactgtaatctgtcaccatggggcgagatcaggaaatcccaagtcttgtctctttaggagaagcttgtccccttaaagcttgttttggtggcttgtggaatagagatgtagtctctgaaagcttttttagaaaacatgaataaagatagatgggtctcatttatcttaatgtttacagctatttttc

SEQ ID NO: 3625 - DNA, 600 bp, Chicken  19866894100500_4
atgaataaagatagatgggtctcatttatcttaatgtttacagctatttttccccatgataaggagcagcttctccttgttatgagcttcctaagtggttttttaccaatgatgatcttgcattaaattaatgcaattgtttgtgcttatcttttctacagagagtgcttaactaggtacacgaaagttcagattgactatacgtagcttgttggtgcacaagatagggttttcagaccttgtgtaaaagaggtgatagagatttgagcttctttgctcagggcatttgatgtattgtgygtactcagattttacttttttgtatatccctatggagagagatttactgatacggagctaggttgtgatttgaaaatcttctcttgcactggtatgtgatatcattcttcatgtactggttaccttccgaattagcacagcaggccttctggatctcaggtgatacttgtattgatctaacaacttaaaattaaaaactatgtgacatatacaagactaccagcacaaacattagcaaaattgtagcagatttagtaaataaacctttatcccttctacttatctaatgcaagtacaggc

SEQ ID NO: 3626 - DNA, 563 bp, Chicken  19866894100502_1
ccatcttacagggacatttttgatgctagcaggccagaggatatcactaccacctattttgtctcttatttgaaacacctggagaccgtggtctcccatgctaatctgtgtgcctgaaaattcttccccttctgagaacccgatggcttcaaaatgttgatgcctccaccaccaggcagtacccaccacatcaggcagccctcgttcaccttaaaccaaacaactccacagccctaaaaagaagagccgaggaccaactgccttgccaggcaggtgaggagcgcacacacaccacaaacyggcatgatttcctcatgactttgcagaactactcacacgtttcagttccctgaaagatgcaaagagctcagccaccagtaggaccgagccttgccgtaataccatgcaaccagacaggaagaaagcaaatctctacttctggagtcagccaccattctcacattactgcttcccccactcctatataaatatcttaaatcggaaagacttttaatgtgatcttgtttccttagcggccagaagcctcctcaactccatctcca

SEQ ID NO: 3627 - DNA, 599 bp, Chicken  19866894100504_1
  misc_feature (1)..(271): n is any nucleotide
nnnnnnnnnnnnnnnnnnnnnnnnnnnnnnnnnnnnnnnnnnnnnnnnnnnnnnnnnnnnnnnnnnnnnnnnnnnnnnnnnnnnnnnnnnnnnnnnnnnnnnnnnnnnnnnnnnnnnnnnnnnnnnnnnnnnnnnnnnnnnnnnnnnnnnnnnnnnnnnnnnnnnnnnnnnnnnnnnnnnnnnnnnnnnnnnnnnnnnnnnnnnnnnnnnnnnnnnnnnnnnnnnnnnnnnnnnnnnnnnnnnnnnnnnnnnnnnnnnnnnnnnnnnnnnnaagcaactcaacctctcactttcctgttwatttacatttctgtaaatatacagaaatcaagaaatggaatacatttttatatagggaaactactatatagggagaccgcaaatgctagcaaaactcgagtcatttcactaagcagctagcatggattttaaagaatggtgctttatcttgagagtattcagatgtgacatcttgactaaagatagttttggatggcgttggctttattttacttttcttgggatacatccagacctagtgagttattaaagaatagggctgtaccagcagcttctcaaataagtcatagcaaatcatc

SEQ ID NO: 3628 - DNA, 600 bp, Chicken  19866894100504_2
tgtgacatcttgactaaagatagttttggatggcgttggctttattttacttttcttgggatacatccagacctagtgagttattaaagaatagggctgtaccagcagcttctcaaataagtcatagcaaatcatctaagacaggtgaattaatacaacaaaattccagtgggtcacaatgtaaattagataacaggaatcttgctgtagacatgtagtcccttgacacattccctaacccagagaggggactcttgccccccttgccttctcccctttacccctttctgaaagagcagkataatgcatgttgtccaagccaccaggttgggatggtcacttttaatttgctttaaggtttagctttcaaagcccagccatgtgtcacagctagcagtacactcttgccgtaatgtgcagagagattttgttgagatcagatggcaatggcaataatagcaaataaaaatctaaattaaggaagagagagtaaataaatttttaatcatacaaaatttaatacttatgttaaggaaaagaatattaaaagtcattttatagagagtgaatttatattggagctgattttaaagttgtgcg

SEQ ID NO: 3629 - DNA, 600 bp, Chicken  19866894100506_1
tctgctactgtgatgccaaactgctgagagggtggaatatctgcctctggaaaaaatgctagaaagcttaatgtttgcattagaatatctggattaataaaggatgggtagaaccagacctgtggctacagtgatttttctgcccataattaggagaggtacaacagaaataattctatctttaagtagaactttgttgacaaaaagccacaacaaaacatgaacaagacagatgaaaacagaaagggctgtgtagtatttctttcatattttcaattatttttgcaggtaggactgtasataggtttattaataattgcttaaaaaayaacaacaaaaaaacctttgcacaagctttcmttccaagtccttgcattttaattaggttgtgcagygcatcaacatttcaacaccagaaaatcgcaagagactgcaatgatgatgagaagcaacaaggggtgtgtaatatattgagaacatgaaaaggggataaagcaatcaagaaacaaattagtgcactagattggaagctagcagataagaacagggaagagacagtgtgatacataagggtcgtttagctgtttaataacttaccaa

SEQ ID NO: 3630 - DNA, 600 bp, Chicken  19866894100506_2
gggtggaatatctgcctctggaaaaaatgctagaaagcttaatgtttgcattagaatatctggattaataaaggatgggtagaaccagacctgtggctacagtgatttttctgcccataattaggagaggtacaacagaaataattctatctttaagtagaactttgttgacaaaaagccacaacaaaacatgaacaagacagatgaaaacagaaagggctgtgtagtatttctttcatattttcaattatttttgcaggtaggactgtasataggtttattaataattgcttaaaaaayaacaacaaaaaaacctttgcacaagctttcmttccaagtccttgcattttaattaggttgtgcagygcatcaacatttcaacaccagaaaatcgcaagagactgcaatgatgatgagaagcaacaaggggtgtgtaatatattgagaacatgaaaaggggataaagcaatcaagaaacaaattagtgcactagattggaagctagcagataagaacagggaagagacagtgtgatacataagggtcgtttagctgtttaataacttaccaagaaaaatctactgacctcaaaacagctgc

SEQ ID NO: 3631 - DNA, 600 bp, Chicken  19866894100506_3
agaaagcttaatgtttgcattagaatatctggattaataaaggatgggtagaaccagacctgtggctacagtgatttttctgcccataattaggagaggtacaacagaaataattctatctttaagtagaactttgttgacaaaaagccacaacaaaacatgaacaagacagatgaaaacagaaagggctgtgtagtatttctttcatattttcaattatttttgcaggtaggactgtasataggtttattaataattgcttaaaaaayaacaacaaaaaaacctttgcacaagctttcmttccaagtccttgcattttaattaggttgtgcagygcatcaacatttcaacaccagaaaatcgcaagagactgcaatgatgatgagaagcaacaaggggtgtgtaatatattgagaacatgaaaaggggataaagcaatcaagaaacaaattagtgcactagattggaagctagcagataagaacagggaagagacagtgtgatacataagggtcgtttagctgtttaataacttaccaagaaaaatctactgacctcaaaacagctgccaaagtttaaataggcatgtcaccctacttc

SEQ ID NO: 3632 - DNA, 600 bp, Chicken  19866894100506_4
aataaaggatgggtagaaccagacctgtggctacagtgatttttctgcccataattaggagaggtacaacagaaataattctatctttaagtagaactttgttgacaaaaagccacaacaaaacatgaacaagacagatgaaaacagaaagggctgtgtagtatttctttcatattttcaattatttttgcaggtaggactgtasataggtttattaataattgcttaaaaaayaacaacaaaaaaacctttgcacaagctttcmttccaagtccttgcattttaattaggttgtgcagygcatcaacatttcaacaccagaaaatcgcaagagactgcaatgatgatgagaagcaacaaggggtgtgtaatatattgagaacatgaaaaggggataaagcaatcaagaaacaaattagtgcactagattggaagctagcagataagaacagggaagagacagtgtgatacataagggtcgtttagctgtttaataacttaccaagaaaaatctactgacctcaaaacagctgccaaagtttaaataggcatgtcaccctacttcaaattataactatcatcagccagttactcatgaag

SEQ ID NO: 3633 - DNA, 600 bp, Chicken  19866894100509_1
gaaaaatgtaagtaggtcatctttgttaacttccttgttaggctggtctggatccaccagactaatcaccttttcccttttgtaacccggattgggtttctattgaaagacgtacaaccacagctgcttgttctatatatagtagcaggagtttccaaaagtacagcccattcagattcttaacagcacagtcagcagtccttgggtttcgtgatccacagcacactcagtactgaccactcactgctgatcagctgctctgggctccgtagtgttggacacagttatggtaatcaagtytctgccctttctgtcagacctctctgttgtgaaggaactgactgcttctgtttgtgaagggtcacagacatacagttgagataaaacttactgggtattgagagaagctgagctgtaattccgattaactcttcagtcaaggcagtctttagcttacattsagtctgctgggctgaaatgcattcagaatatccctttatttaaaagatttattataggaaaaatatccttttattgtgaacaatagaggatactactgtgaccatgaacagaaaccacgagttgccttggattcttaaa

SEQ ID NO: 3634 - DNA, 600 bp, Chicken  19866894100509_2
tacagcccattcagattcttaacagcacagtcagcagtccttgggtttcgtgatccacagcacactcagtactgaccactcactgctgatcagctgctctgggctccgtagtgttggacacagttatggtaatcaagtytctgccctttctgtcagacctctctgttgtgaaggaactgactgcttctgtttgtgaagggtcacagacatacagttgagataaaacttactgggtattgagagaagctgagctgtaattccgattaactcttcagtcaaggcagtctttagcttacattsagtctgctgggctgaaatgcattcagaatatccctttatttaaaagatttattataggaaaaatatccttttattgtgaacaatagaggatactactgtgaccatgaacagaaaccacgagttgccttggattcttaaataccttatgaaaataaaggtaactacatctattcaagaaagtaagattctgagtctttccaacagcagtagaaaataccattatcaccttcccacagtgacatttttattcccatacataaatagaatactgcagtgagagcagaatcctcaaaaatccac

SEQ ID NO: 3635 - DNA, 600 bp, Chicken  19866894100509_3
gaatcctcaaaaatccacatcaggtgtatttgcaacacatagtgcatcatgggtgctaactgtgattacagatgcacattttctataaatattctgtatgtatttgtgctctgagttgtaccaaatttatttccatcactcctgataaagcaacatgtctggcattaaggccagtaagtctgtgtattgcctttcaagtagtcttcattttccttaagcacactgcagggtgtagagtgtgtatctaagtattcaggttttctgtgttgtttgagaatcagctggtgtttctgacagttyaaaggtcttggcaaccacttgaaattcttgacttagttgttggcttctcagtaacgtttgccatacgctagttcacttaggctggtatccccttacataaagccataccccttaaattttttcctttgttcaaatgcagaaggctccatttacccctgcaggacaatggaattctctttcctgtcatcgtgtgtcaacaggagttgagctacacactcctctttccttccatcttcctcttcccttttgtccctattatccaaacttagattgccagttatggtctgaaaagctttattg

SEQ ID NO: 3636 - DNA, 599 bp, Chicken  19866894100511_1
  misc_feature (1)..(53): n is any nucleotide
nnnnnnnnnnnnnnnnnnnnnnnnnnnnnnnnnnnnnnnnnnnnnnnnnnnnntacaaccctggctctttgttctgctgactggaactggactcagtgcatgtaatctacatgctgccaagcacagaagggtgtcacaggtaacttagaattgatcctcttgaggcaaaggaacatgttcttatgtttctccaggcaatatccttgtatacaactcatactttcaggagaataggagaacttgagtaggaacaccattaacagcatagaagacagtggtaactaagactcattaaggatrcctgcacagcttatggagaccacaaacacgttatcttctttttacctcatttgctgtgaagcagaaaaaccaaactgtattcactaaatgaacactcacacaaatgggactctgcataccaaacaaatatgctatgatgcattagtttactccttcaaaaatcactcagtcacagatattgttcctgtgtccccttcagcataacaggcagctacctgctggcaggctacagaaactctggaattctacattggcattcaataatatttttaatgcaatgatctaaaagctctttatga

SEQ ID NO: 3637 - DNA, 599 bp, Chicken  19866894100512_1
  misc_feature (1)..(187): n is any nucleotide
nnnnnnnnnnnnnnnnnnnnnnnnnnnnnnnnnnnnnnnnnnnnnnnnnnnnnnnnnnnnnnnnnnnnnnnnnnnnnnnnnnnnnnnnnnnnnnnnnnnnnnnnnnnnnnnnnnnnnnnnnnnnnnnnnnnnnnnnnnnnnnnnnnnnnnnnnnnnnnnnnnnnnnnnnnnnnnnnnnnnnnnnnnnttgcacgctggcagataggaactggccatgagaggagctgcttcttgcagccatggggtgggctaccagccagagccagccctacagaccccccctcagctcctgggacaccragggctctgtcctgccccagcacctctgctgggatgacagcrgcacggcacagcccccacccagggctcagcggtgatgcagcacagcagaatccaacagccttgagctgggaaaggcacagccgggacgggagagctgcgggcatgcaggggaggacaaagcctggaggagaatccagctctttgggaacaggctggaggacagagataactgcaggcgctagctcaccatcctctctcctctttgtatgcagggatcttttaaggcaactgatgcgtaaaaacaaaaaaaaaagtta

SEQ ID NO: 3638 - DNA, 599 bp, Chicken  19866894100512_2
  misc_feature (1)..(145): n is any nucleotide
nnnnnnnnnnnnnnnnnnnnnnnnnnnnnnnnnnnnnnnnnnnnnnnnnnnnnnnnnnnnnnnnnnnnnnnnnnnnnnnnnnnnnnnnnnnnnnnnnnnnnnnnnnnnnnnnnnnnnnnnnnnnnnnnnnnnnnnnnnnnnnnnnttgcacgctggcagataggaactggccatgagaggagctgcttcttgcagccatggggtgggctaccagccagagccagccctacagaccccccctcagctcctgggacaccragggctctgtcctgccccagcacctctgctgggatgacagcrgcacggcacagcccccacccagggctcagcggtgatgcagcacagcagaatccaacagccttgagctgggaaaggcacagccgggacgggagagctgcgggcatgcaggggaggacaaagcctggaggagaatccagctctttgggaacaggctggaggacagagataactgcaggcgctagctcaccatcctctctcctctttgtatgcagggatcttttaaggcaactgatgcgtaaaaacaaaaaaaaaagttaccaggaggccctgccccctccctgacaaacttctgaacatgc

SEQ ID NO: 3639 - DNA, 600 bp, Chicken  19866894100512_3
ctcctgggacaccragggctctgtcctgccccagcacctctgctgggatgacagcrgcacggcacagcccccacccagggctcagcggtgatgcagcacagcagaatccaacagccttgagctgggaaaggcacagccgggacgggagagctgcgggcatgcaggggaggacaaagcctggaggagaatccagctctttgggaacaggctggaggacagagataactgcaggcgctagctcaccatcctctctcctctttgtatgcagggatcttttaaggcaactgatgcgtaaaaacraaaaaaaaagttaccaggaggccctgccccctccctgacaaacttctgaacatgctgtcatcaagaaaaatgatgctggcaagagagaaatccgctggggttgctggcaatttaccaggctccagccccaatgagtgtttatcaataatttcaggatctgcctgtcgcagccaccgactccgcgctcaggcagagatctccgagcagcgccgggtgtcagcaccgccacgggggagaggaggcacgatgaaaagggaaatcaattaactgctcctcaggagcgggggatttgccagcctt

SEQ ID NO: 3640 - DNA, 600 bp, Chicken  19866894100514_1
caccaccactcaccagcctgcacacaggcacccatacactgatgcctatgcttatgcccactgctgtaggtttccctcctggaaaggataaaaagccaacaacaaagaatagtcactgcagtaaatattgttgtctccaatcttactgtttggcaactggtggcatttttatttcattagtatttttcaaactatttaccaccaaaatcatccatcttgtcacagtgagacttctgaactcactggatttgctgttggaaggatttctgattcaaacctacgcgtaacacataaaatgascataccagacactggaacaaagaaagaaactgaattttttgcagagctacccaaagtatgcagactgtttcattatcccattttctcccagtttacagctttgcttacggaaaaaaagaaagtacagggcaatatttaaatccaaaagaagaccatcaaatcagaaaagaggccatatacatgagaagttctttagtgctgcaaacttcccttacaggctgaacttaagtcaaaactattgaaaaatatttcattttctaaatgttgaagtgtacttctgacaaataacactaattttaa

SEQ ID NO: 3641 - DNA, 600 bp, Chicken  19866894100517_1
aaatgttagaacacaggaacatgattttcagacttgtaataacagacagtgttttacttttgtttctctgtgttaaaaaaaagaaaagaaaagcagtgtaataacactagtgagcacacagtataagaatacacaattactaaatgagattgtttatctgctacgacataaagattccagcttgcgttttgaaatctatattgcacttcattttcctaaaatgacctacgatcacactagggtttcccttggccatgtttccacccccccaccccagcgatatctgtgtgtattatgaayagtgtgtttgcataactttagatcttagggttttccattcgtgcccagacctaattaagagcatcccattttttccaaaggtgctgaactcccgtgactcccacagaaagggatcactaatgctcagcacttctgcaaatactttactggaaatctaggcgcttttattttatgtggttaaatgctgatattgaaagcttgtgttaaaccttttcatttgaaaacataccttttgtcagtttctttaatgtagagactgtgtgcttctgtagctttaaatgtactgctgctgggactaag

SEQ ID NO: 3642 - DNA, 600 bp, Chicken  19866894100532_1
ctctgtataattcaagaactgcttttccccctgtacagggaactacatatacagtgctatgggcacaggtgattgtttacatgcatttcacgtgtttgcacagccaactaagtccagttgttgataacacaatgtcttgagaaagatactggataaactgaacttgaggaagagaagctcatgcacgtgtgtgtgtatacatacatatgtatgtatgtatatgtgtgtatatatgtatgtatacacacatatatatatacacacacagacacacttgttatgcagttcaggcccacagcwtaagtaaatacaaatccacagtacccaaactgggctagtgcctacatggctagcagtacacttcccatggctagcagtacacttccaagyacacttcaaatataggcttagctaaggtgaatcacatcgtctcaggcttacagtgcaaggttttggtagcgaagggctgaaagggtggcctccgtaagcagagccccacactgtcctgtgccatgtcacagctmgcaccggctgcttcaaagggattgccaatgagctgagctacaagtgatgctgggtgtgctctgggagagcagattg

SEQ ID NO: 3643 - DNA, 600 bp, Chicken  19866894100532_2
cgtgtttgcacagccaactaagtccagttgttgataacacaatgtcttgagaaagatactggataaactgaacttgaggaagagaagctcatgcacgtgtgtgtgtatacatacatatgtatgtatgtatatgtgtgtatatatgtatgtatacacacatatatatatacacacacagacacacttgttatgcagttcaggcccacagcwtaagtaaatacaaatccacagtacccaaactgggctagtgcctacatggctagcagtacacttcccatggctagcagtacacttccaagyacacttcaaatataggcttagctaaggtgaatcacatcgtctcaggcttacagtgcaaggttttggtagcgaagggctgaaagggtggcctccgtaagcagagccccacactgtcctgtgccatgtcacagctmgcaccggctgcttcaaagggattgccaatgagctgagctacaagtgatgctgggtgtgctctgggagagcagattgaggaaagggaaaaaatgctgtgcaatgggagctgcagtggccaggagagagaagtgagaaatgggaaagaaacagacctacagctaccaa

SEQ ID NO: 3644 - DNA, 600 bp, Chicken  19866894100532_3
gtgtatatatgtatgtatacacacatatatatatacacacacagacacacttgttatgcagttcaggcccacagcwtaagtaaatacaaatccacagtacccaaactgggctagtgcctacatggctagcagtacacttcccatggctagcagtacacttccaagyacacttcaaatataggcttagctaaggtgaatcacatcgtctcaggcttacagtgcaaggttttggtagcgaagggctgaaagggtggcctccgtaagcagagccccacactgtcctgtgccatgtcacagctmgcaccggctgcttcaaagggattgccaatgagctgagctacaagtgatgctgggtgtgctctgggagagcagattgaggaaagggaaaaaatgctgtgcaatgggagctgcagtggccaggagagagaagtgagaaatgggaaagaaacagacctacagctaccaaggtaagtgcagaaggagggcaggcacacaatggaagttccctgcagccctggagaggtccatgttggagcagcctctttccacaacagagcagttctccacatgtagcctgcacaggagcccacagcacagcag

SEQ ID NO: 3645 - DNA, 599 bp, Chicken  19866894100540_1
  misc_feature (1)..(19): n is any nucleotide
nnnnnnnnnnnnnnnnnnnttctttgtgtgtgcagtaagaagatgtattttattgtagcacaacaagtcctgagatttactgtgtgttgtttagctcagtattttcaggatctaaatgggaaatcagaattttcctaaagcttcactacattttgtggtgctttatgggcagaatgataatttggatgttttgacaatgcatcagctacatagaccagtacaaaaatcaatcaagacttatgacaggcctttggcatgatccccatcacctccttatctctgtggagagttgtgtgagayggatttgaagggtggactgctcattggataagaaattggttggaaggtcgcagccaaagtactgtggtaaatggctgtctgggaattgggctccaccaggtggaggccgatcacaagtggtgtccccagggatcagccytgggaccagagctcttcaacgcctagcagtggcatggatcatgaaatacagcacaccctcagcaagattgaagggctctatcaacakggaggtggccatcagaatgagggagggcattgtcattttgagtcagcttgcacttgtgcatggcattgctctg

SEQ ID NO: 3646 - DNA, 600 bp, Chicken  19866894100540_2
gcttcactacattttgtggtgctttatgggcagaatgataatttggatgttttgacaatgcatcagctacatagaccagtacaaaaatcaatcaagacttatgacaggcctttggcatgatccccatcacctccttatctctgtggagagttgtgtgagayggatttgaagggtggactgctcattggataagaaattggttggaaggtcgcagccaaagtactgtggtaaatggctgtctgggaattgggctccaccaggtggaggccgatcacaagtggtgtccccagggatcagccytgggaccagagctcttcaacgcctagcagtggcatggatcatgaaatacagcacaccctcagcaagattgaagggctctatcaacakggaggtggccatcagaatgagggagggcattgtcattttgagtcagcttgcacttgtgcatggcattgctctgacccatgtgaacatccttgcacatggtcttgttgatcttcacaatgttctcatagacccacctctgtagcttgtcacggtccctctgtatggcaycccttatctttmctgtattgaccacatcatagaaattgatgtcac

SEQ ID NO: 3647 - DNA, 600 bp, Chicken  19866894100540_3
tcaatcaagacttatgacaggcctttggcatgatccccatcacctccttatctctgtggagagttgtgtgagayggatttgaagggtggactgctcattggataagaaattggttggaaggtcgcagccaaagtactgtggtaaatggctgtctgggaattgggctccaccaggtggaggccgatcacaagtggtgtccccagggatcagccytgggaccagagctcttcaacgcctagcagtggcatggatcatgaaatacagcacaccctcagcaagattgaagggctctatcaacakggaggtggccatcagaatgagggagggcattgtcattttgagtcagcttgcacttgtgcatggcattgctctgacccatgtgaacatccttgcacatggtcttgttgatcttcacaatgttctcatagacccacctctgtagcttgtcacggtccctctgtatggcaycccttatctttmctgtattgaccacatcatagaaattgatgtcacccacaaactcgctgaaggtgcactcagcagcgctgtccaagtcagtgacgaaagaggttgaatcgcaccagttgcacttgcagactc

SEQ ID NO: 3648 - DNA, 600 bp, Chicken  19866894100540_4
accaggtggaggccgatcacaagtggtgtccccagggatcagccytgggaccagagctcttcaacgcctagcagtggcatggatcatgaaatacagcacaccctcagcaagattgaagggctctatcaacakggaggtggccatcagaatgagggagggcattgtcattttgagtcagcttgcacttgtgcatggcattgctctgacccatgtgaacatccttgcacatggtcttgttgatcttcacaatgttctcatagacccacctctgtagcttgtcacggtccctctgtatggcaycccttatctttmctgtattgaccacatcatagaaattgatgtcacccacaaactcgctgaaggtgcactcagcagcgctgtccaagtcagtgacgaaagaggttgaatcgcaccagttgcacttgcagactccttaaaaaatactattgtctccacacagccactgagctgttgtccacaactcgggctgtgaccatccacccattccacgtacagtgagtggtccgtccatcaattcatacaggtctcatacagggcattaccaaatgtcttccaccagtcccggtagacggaaagtgc

SEQ ID NO: 3649 - DNA, 600 bp, Chicken  19866894100540_5
ccgatcacaagtggtgtccccagggatcagccytgggaccagagctcttcaacgcctagcagtggcatggatcatgaaatacagcacaccctcagcaagattgaagggctctatcaacakggaggtggccatcagaatgagggagggcattgtcattttgagtcagcttgcacttgtgcatggcattgctctgacccatgtgaacatccttgcacatggtcttgttgatcttcacaatgttctcatagacccacctctgtagcttgtcacggtccctctgtatggcaycccttatctttmctgtattgaccacatcatagaaattgatgtcacccacaaactcgctgaaggtgcactcagcagcgctgtccaagtcagtgacgaaagaggttgaatcgcaccagttgcacttgcagactccttaaaaaatactattgtctccacacagccactgagctgttgtccacaactcgggctgtgaccatccacccattccacgtacagtgagtggtccgtccatcaattcatacaggtctcatacagggcattaccaaatgtcttccaccagtcccggtagacggaaagtgccatcatctcaca

SEQ ID NO: 3650 - DNA, 599 bp, Chicken  19866894100542_1
  misc_feature (1)..(34): n is any nucleotide
nnnnnnnnnnnnnnnnnnnnnnnnnnnnnnnnnncttcttttaacaggttggcacgtgcatgtttgtctcttaacaagtattgttgctgttagtggcaatagcaggcactggattttcagtcagttaaattctcccttctggatgattccctatgtttcctttagaaagtatttccattaaagtaatgagaaatagcagtgagagtgaatttggagaaggaatggcaccttctgcactatggtgctggtgtgaatgtggcttgccatgctgggatcttttctgatgtcacctgaatcagwacctggtacctgagagctgcagctagttctatatgatatctaaatatatatgcataataacatacaatggtttgaatatattacccatatgttctcagtataataaccttggtttactcctctcagtgtctgttasgtgtacatcattttcctgtcatacatctgagtttaggggtatagttccaaaaagaccaaaatacctacttgcacataattgcttagtctcattgggttcaaccaggcaactcatatacataaagttaaacacatgcatatgcctggggtctatcttcatgagc

SEQ ID NO: 3651 - DNA, 564 bp, Chicken  19866894100542_2
ttctggatgattccctatgtttcctttagaaagtatttccattaaagtaatgagaaatagcagtgagagtgaatttggagaaggaatggcaccttctgcactatggtgctggtgtgaatgtggcttgccatgctgggatcttttctgatgtcacctgaatcagwacctggtacctgagagctgcagctagttctatatgatatctaaatatatatgcataataacatacaatggtttgaatatattacccatatgttctcagtataataaccttggtttactcctctcagtgtctgttasgtgtacatcattttcctgtcatacatctgagtttaggggtatagttccaaaaagaccaaaatacctacttgcacataattgcttagtctcattgggttcaaccaggcaactcatatacataaagttaaacacatgcatatgcctggggtctatcttcatgagctttccaggcttgaggcattctttctgcctccaaatctctatccacctttaatgagctgtataaataaatacagagtactcttgatcattccatatccataa

SEQ ID NO: 3652 - DNA, 599 bp, Chicken  19866894100545_1
  misc_feature (1)..(161): n is any nucleotide
nnnnnnnnnnnnnnnnnnnnnnnnnnnnnnnnnnnnnnnnnnnnnnnnnnnnnnnnnnnnnnnnnnnnnnnnnnnnnnnnnnnnnnnnnnnnnnnnnnnnnnnnnnnnnnnnnnnnnnnnnnnnnnnnnnnnnnnnnnnnnnnnnnnnnnnnnnnnnnnnntttctaagaacagcagggaaaagcacagcattgcagtacttagcttaaaagctttgaaaatctcagcttcaccagatggagactgagctgatctaacagctcctaacaacagtgctgcttctccatctccctttgctcstagctctctcccttatctcaagccaactccaaacctggtacagtccttccctgagcaagttcagctcattaacccagcagtaagaagcttctcttcagttggctgaattcacccatcagacaattaatgagcaccaccagaagaagtgcaaacaaagttctcagagaactcctgtttggcagtaaggaatcatgagctcagcccagatgattgtgaagcacactcctgttgtgcaaggggcacaggcagggaggaggtaaggaatgcaaactgaaaggcaactgagagacagatcaccc

SEQ ID NO: 3653 - DNA, 600 bp, Chicken  19866894100545_2
tagctctctcccttatctcaagccaactccaaacctggtacagtccttccctgagcaagttcagctcattaacccagcagtaagaagcttctcttcagttggctgaattcacccatcagacaattaatgagcaccaccagaagaagtgcaaacaaagttctcagagaactcctgtttggcagtaaggaatcatgagctcagcccagatgattgtgaagcacactcctgttgtgcaaggggcacaggcagggaggaggtaaggaatgcaaactgaaaggcaactgagagacagatcacccrtggaaggcatgaggctactgttcaacatcagcagttattactgctcaaaccttatgttttatgtttacagaagacaggtcataatcagctcctccagtatctatctccgtgctgcagataactggttgcaataaaccttttgctattcagaagcaagatctttgtggctggactgttagaaaggaaggtcccagcagtactgccattacccaagggaaataatggtgtttgtagcagatgggagggaaacagccatagaaatatgaagcagccctacaatgtgtctgtatggtgtcatta

SEQ ID NO: 3654 - DNA, 600 bp, Chicken  19866894100546_1
cctgtttttgctcccaagctttctctagagcctgaaggactggctgtgtccttgagatgtttggctttggctgcagatgccaagatgcttcaaataagaaaaactatcaggtggcacattctaagcaaatagaagaagctcttattaacccaatgcatagttaggctatgtttcctctgttgtgcagatgtgcatcagtccaaaaaaagcagtagggcatattcatggaggaatccaatcaagggctattaaacacaaaaatattgcttctcactccagcaatctcagagttgtaggtasgagaggagtttatttcttcaaacttctaggaaaagtggatttttgacagcttctctcaattatgaatggatacagaccmgtttacaaagtatgagagagtaaggacaggaartttagatagactttttggtgattattctgaccagctgaggacaccacacaaatctgtgattgtagcttggattcatgatgttctgagttgacaaatgtgtgtctttactcatgcwatgcatacccttcttctgttattgcatactgtcctgtggtgtattaaaccataagacayctgtccagatttct

SEQ ID NO: 3655 - DNA, 600 bp, Chicken  19866894100546_2
ccaagatgcttcaaataagaaaaactatcaggtggcacattctaagcaaatagaagaagctcttattaacccaatgcatagttaggctatgtttcctctgttgtgcagatgtgcatcagtccaaaaaaagcagtagggcatattcatggaggaatccaatcaagggctattaaacacaaaaatattgcttctcactccagcaatctcagagttgtaggtasgagaggagtttatttcttcaaacttctaggaaaagtggatttttgacagcttctctcaattatgaatggatacagaccmgtttacaaagtatgagagagtaaggacaggaartttagatagactttttggtgattattctgaccagctgaggacaccacacaaatctgtgattgtagcttggattcatgatgttctgagttgacaaatgtgtgtctttactcatgcwatgcatacccttcttctgttattgcatactgtcctgtggtgtattaaaccataagacayctgtccagatttctctagaagarcttgctatgctgggaatcccttttgttatttcaggttcaggtttgattatatcaattctgatacattaag

SEQ ID NO: 3656 - DNA, 600 bp, Chicken  19866894100546_3
ggcacattctaagcaaatagaagaagctcttattaacccaatgcatagttaggctatgtttcctctgttgtgcagatgtgcatcagtccaaaaaaagcagtagggcatattcatggaggaatccaatcaagggctattaaacacaaaaatattgcttctcactccagcaatctcagagttgtaggtasgagaggagtttatttcttcaaacttctaggaaaagtggatttttgacagcttctctcaattatgaatggatacagaccmgtttacaaagtatgagagagtaaggacaggaartttagatagactttttggtgattattctgaccagctgaggacaccacacaaatctgtgattgtagcttggattcatgatgttctgagttgacaaatgtgtgtctttactcatgcwatgcatacccttcttctgttattgcatactgtcctgtggtgtattaaaccataagacayctgtccagatttctctagaagarcttgctatgctgggaatcccttttgttatttcaggttcaggtttgattatatcaattctgatacattaagtgaatgtcagaggatgatctgtaattacatata

SEQ ID NO: 3657 - DNA, 600 bp, Chicken  19866894100546_4
gaggaatccaatcaagggctattaaacacaaaaatattgcttctcactccagcaatctcagagttgtaggtasgagaggagtttatttcttcaaacttctaggaaaagtggatttttgacagcttctctcaattatgaatggatacagaccmgtttacaaagtatgagagagtaaggacaggaartttagatagactttttggtgattattctgaccagctgaggacaccacacaaatctgtgattgtagcttggattcatgatgttctgagttgacaaatgtgtgtctttactcatgcwatgcatacccttcttctgttattgcatactgtcctgtggtgtattaaaccataagacayctgtccagatttctctagaagarcttgctatgctgggaatcccttttgttatttcaggttcaggtttgattatatcaattctgatacattaagtgaatgtcagaggatgatctgtaattacatataggttttgctgtatgaaattcttgagtctgacaaaatcaacaccacgtaattcatgaccattaacctcaaggagaaattcatgaccattaacctcaaggagagcaaggcattgagg

SEQ ID NO: 3658 - DNA, 600 bp, Chicken  19866894100546_5
agagttgtaggtasgagaggagtttatttcttcaaacttctaggaaaagtggatttttgacagcttctctcaattatgaatggatacagaccmgtttacaaagtatgagagagtaaggacaggaartttagatagactttttggtgattattctgaccagctgaggacaccacacaaatctgtgattgtagcttggattcatgatgttctgagttgacaaatgtgtgtctttactcatgcwatgcatacccttcttctgttattgcatactgtcctgtggtgtattaaaccataagacayctgtccagatttctctagaagarcttgctatgctgggaatcccttttgttatttcaggttcaggtttgattatatcaattctgatacattaagtgaatgtcagaggatgatctgtaattacatataggttttgctgtatgaaattcttgagtctgacaaaatcaacaccacgtaattcatgaccattaacctcaaggagaaattcatgaccattaacctcaaggagagcaaggcattgaggatgaaggcccaccacatagcaagtgcccacactgaggaaggtgggagtgaggccacttt

SEQ ID NO: 3659 - DNA, 600 bp, Chicken  19866894100546_6
ttatttcttcaaacttctaggaaaagtggatttttgacagcttctctcaattatgaatggatacagaccmgtttacaaagtatgagagagtaaggacaggaartttagatagactttttggtgattattctgaccagctgaggacaccacacaaatctgtgattgtagcttggattcatgatgttctgagttgacaaatgtgtgtctttactcatgcwatgcatacccttcttctgttattgcatactgtcctgtggtgtattaaaccataagacayctgtccagatttctctagaagarcttgctatgctgggaatcccttttgttatttcaggttcaggtttgattatatcaattctgatacattaagtgaatgtcagaggatgatctgtaattacatataggttttgctgtatgaaattcttgagtctgacaaaatcaacaccacgtaattcatgaccattaacctcaaggagaaattcatgaccattaacctcaaggagagcaaggcattgaggatgaaggcccaccacatagcaagtgcccacactgaggaaggtgggagtgaggccactttctgaacatcttgggaaaccaaca

SEQ ID NO: 3660 - DNA, 600 bp, Chicken  19866894100548_1
ccactcacgccaaggcaaaggccaccagagctcccaccaccacgatgaaatccaggatgttccagaggtctcggaagtaggagccatcctgcaggatcaagccctggtcgatcatctggggagataaatacaggcagaagggcagcagctcagccacagagataagcagtcccgctgcccagctggggtagagtgtcgatccaggagcactgcatttcaagggggtctggatgctgatgtaagcagtactgagttctctcatctcctactgctaagaaccaggctttcaagtttccatcrtacaaattcaggaccagggtggaaaacctgagctatttccyaygcaagatgctcgctcccctcaccaccaccagcacagccagctgtcttaccttgataaccatctcgaaggtgaagacaccggtgaaaacgtaatcaaaatacctcagcacctgcagagagagggcatgggtgctctgcagaagcttcccagraaaggggctcaccgaggctcctccagagcagccacgagccccgttttggaggtacacaaaggggatttgcaatcactttgttacggtcggagttggtgaggacggg

SEQ ID NO: 3661 - DNA, 600 bp, Chicken  19866894100548_2
acgatgaaatccaggatgttccagaggtctcggaagtaggagccatcctgcaggatcaagccctggtcgatcatctggggagataaatacaggcagaagggcagcagctcagccacagagataagcagtcccgctgcccagctggggtagagtgtcgatccaggagcactgcatttcaagggggtctggatgctgatgtaagcagtactgagttctctcatctcctactgctaagaaccaggctttcaagtttccatcrtacaaattcaggaccagggtggaaaacctgagctatttccyaygcaagatgctcgctcccctcaccaccaccagcacagccagctgtcttaccttgataaccatctcgaaggtgaagacaccggtgaaaacgtaatcaaaatacctcagcacctgcagagagagggcatgggtgctctgcagaagcttcccagraaaggggctcaccgaggctcctccagagcagccacgagccccgttttggaggtacacaaaggggatttgcaatcactttgttacggtcggagttggtgaggacgggatcctcggccgcgagggcgatgctgctggcggcgatgacca

SEQ ID NO: 3662 - DNA, 600 bp, Chicken  19866894100548_3
gatgaaatccaggatgttccagaggtctcggaagtaggagccatcctgcaggatcaagccctggtcgatcatctggggagataaatacaggcagaagggcagcagctcagccacagagataagcagtcccgctgcccagctggggtagagtgtcgatccaggagcactgcatttcaagggggtctggatgctgatgtaagcagtactgagttctctcatctcctactgctaagaaccaggctttcaagtttccatcrtacaaattcaggaccagggtggaaaacctgagctatttccyaygcaagatgctcgctcccctcaccaccaccagcacagccagctgtcttaccttgataaccatctcgaaggtgaagacaccggtgaaaacgtaatcaaaatacctcagcacctgcagagagagggcatgggtgctctgcagaagcttcccagraaaggggctcaccgaggctcctccagagcagccacgagccccgttttggaggtacacaaaggggatttgcaatcactttgttacggtcggagttggtgaggacgggatcctcggccgcgagggcgatgctgctggcggcgatgaccagg

SEQ ID NO: 3663 - DNA, 506 bp, Chicken  19866894100548_4
gtcgatccaggagcactgcatttcaagggggtctggatgctgatgtaagcagtactgagttctctcatctcctactgctaagaaccaggctttcaagtttccatcrtacaaattcaggaccagggtggaaaacctgagctatttccyaygcaagatgctcgctcccctcaccaccaccagcacagccagctgtcttaccttgataaccatctcgaaggtgaagacaccggtgaaaacgtaatcaaaatacctcagcacctgcagagagagggcatgggtgctctgcagaagcttcccagraaaggggctcaccgaggctcctccagagcagccacgagccccgttttggaggtacacaaaggggatttgcaatcactttgttacggtcggagttggtgaggacgggatcctcggccgcgagggcgatgctgctggcggcgatgaccaggaggatgcacatctcaaagtagcgcaggttcacaatgtagtggcaggctctgcgcacc

SEQ ID NO: 3664 - DNA, 600 bp, Chicken  19866894100553_1
gtctgcaaaatgctgcatttcttctgagtaagctattactgtcaattcccaagataaataatattgaccggcattggactttcccagtgtcataatgttcagccaacataaacacttcaaatcaagtcattgtttgtctcatttccaagacagttttccaacatatgctaatttgtttagagaaaagaactgcatggaggaggatgcctatttaagctcagtatcagtgattttccccaggcacctaggaggaaaaacttgatagaagaaactttcggcattcaaaatagccactagagraaggctggctctggaaagggaatcaaaaggctattttttgggctgaaatgagctggttttgaccagggtttgggaccagaggaggggagtgggagaaaggagacacatcttcatgttccttggtctgcttgttcattcttgggggaatctgtcacacccctggggatgctctgatcccagccagctggatcagccttccaatgagtcctgccagccccgactgtgagaatgtcctgagcctttttcagccatgctctcggccttccactctttacagggcaaggaaaacatggcaaaggc

SEQ ID NO: 3665 - DNA, 598 bp, Chicken  19866894100557_1
agaaaacaaaagcttgcgctcagcgcgcaattttaggcaaattatatattacaaaagactgccaattgggtgttcggtcccaggtgcccctctcctcagcgcctcggttaaccctttgggtgagttagcgctagccgccgccgtccttcccctcgccttttggtttcgctttaagcgcatttccgccagttttccatcacaccggtgacccgggcacggcacggcacacctcggctttccccgcagcggggctttacggaactatcgcctctcacggagccgctccgtgcaaacccaagrgacaccccgggcagcgcgcttcgggagacgcctggcctgcgtttgctcttacaaagaagcaaaacgccgtctcccgcgttattccttcgcgacaatttcatgtcggtgttttattgctagcattaacgatcggttctacagcgacaggacgcgatgccctaagcggggaaagcgcgcaggcaggagccggcccggccgtgccccgcgcctcacggcgcctcagcggagggccgcccctgccacctgccggcccaaggcggaacggcgcctcgtccggctgggcacggagcgggtcggg

SEQ ID NO: 3666 - DNA, 600 bp, Chicken  19866894100558_1
tatttcagaacctaattatagtgttttatcaacttatagatggaaaattgcatctgtgactttctcaggaacactggcaaggagccacatcgcaaaaatacttctttgcacatacatcaagaagagatcaaatgcatttatgatacgtatattaattattcctagatatctcaaccactgctcaagtgaggatcacaagcctgaccctgaaagctgttgagtactaataactttcacaaacctcaggaagaagagtaggtggtcggtgatttagctacatcacctggaaagtctggcaaytgtgtaggcacccatatactgggacaaatatcaccagggccaagttttgacccraccaggttctgaaacggctgatcggaaaatgtctgtcccatttcagtgaggatttcagtaagtggcaatatggcctccttcagatttgggtgtctttcccacacaaatctttccaagatctcattcaaattggggaggcaccccatgtcactgatttgcagatcctgggcctgtgcmcwgagatctgaccaagcgtgttygtaggaaattgctgcttcgctgagagcagagcacctttagcaaagg

SEQ ID NO: 3667 - DNA, 600 bp, Chicken  19866894100558_2
tgtgactttctcaggaacactggcaaggagccacatcgcaaaaatacttctttgcacatacatcaagaagagatcaaatgcatttatgatacgtatattaattattcctagatatctcaaccactgctcaagtgaggatcacaagcctgaccctgaaagctgttgagtactaataactttcacaaacctcaggaagaagagtaggtggtcggtgatttagctacatcacctggaaagtctggcaaytgtgtaggcacccatatactgggacaaatatcaccagggccaagttttgacccraccaggttctgaaacggctgatcggaaaatgtctgtcccatttcagtgaggatttcagtaagtggcaatatggcctccttcagatttgggtgtctttcccacacaaatctttccaagatctcattcaaattggggaggcaccccatgtcactgatttgcagatcctgggcctgtgcmcwgagatctgaccaagcgtgttygtaggaaattgctgcttcgctgagagcagagcacctttagcaaaggcatcagctgagctacaaaaaggtttatctgtgtttggttttttttttccaagca

SEQ ID NO: 3668 - DNA, 600 bp, Chicken  19866894100558_3
tttcacaaacctcaggaagaagagtaggtggtcggtgatttagctacatcacctggaaagtctggcaaytgtgtaggcacccatatactgggacaaatatcaccagggccaagttttgacccraccaggttctgaaacggctgatcggaaaatgtctgtcccatttcagtgaggatttcagtaagtggcaatatggcctccttcagatttgggtgtctttcccacacaaatctttccaagatctcattcaaattggggaggcaccccatgtcactgatttgcagatcctgggcctgtgcmcwgagatctgaccaagcgtgttygtaggaaattgctgcttcgctgagagcagagcacctttagcaaaggcatcagctgagctacaaaaaggtttatctgtgtttggttttttttttccaagcagctctgytaatttggagtaaggagtaacctggctttctgaagtaattgcttttctgttctctctccatatctcttcttcagaggccaggtttacaagacactttgtctgtttcccattttcatgccaaattgcttcttctggtccattcactgccccaggctgagagaagtacatgg

SEQ ID NO: 3669 - DNA, 600 bp, Chicken  19866894100558_4
tcacaaacctcaggaagaagagtaggtggtcggtgatttagctacatcacctggaaagtctggcaaytgtgtaggcacccatatactgggacaaatatcaccagggccaagttttgacccraccaggttctgaaacggctgatcggaaaatgtctgtcccatttcagtgaggatttcagtaagtggcaatatggcctccttcagatttgggtgtctttcccacacaaatctttccaagatctcattcaaattggggaggcaccccatgtcactgatttgcagatcctgggcctgtgcmcwgagatctgaccaagcgtgttygtaggaaattgctgcttcgctgagagcagagcacctttagcaaaggcatcagctgagctacaaaaaggtttatctgtgtttggttttttttttccaagcagctctgytaatttggagtaaggagtaacctggctttctgaagtaattgcttttctgttctctctccatatctcttcttcagaggccaggtttacaagacactttgtctgtttcccattttcatgccaaattgcttcttctggtccattcactgccccaggctgagagaagtacatgggg

SEQ ID NO: 3670 - DNA, 600 bp, Chicken  19866894100558_5
gtaggtggtcggtgatttagctacatcacctggaaagtctggcaaytgtgtaggcacccatatactgggacaaatatcaccagggccaagttttgacccraccaggttctgaaacggctgatcggaaaatgtctgtcccatttcagtgaggatttcagtaagtggcaatatggcctccttcagatttgggtgtctttcccacacaaatctttccaagatctcattcaaattggggaggcaccccatgtcactgatttgcagatcctgggcctgtgcmcwgagatctgaccaagcgtgttygtaggaaattgctgcttcgctgagagcagagcacctttagcaaaggcatcagctgagctacaaaaaggtttatctgtgtttggttttttttttccaagcagctctgytaatttggagtaaggagtaacctggctttctgaagtaattgcttttctgttctctctccatatctcttcttcagaggccaggtttacaagacactttgtctgtttcccattttcatgccaaattgcttcttctggtccattcactgccccaggctgagagaagtacatggggggcagcgagcagaaaagccca

SEQ ID NO: 3671 - DNA, 600 bp, Chicken  19866894100558_6
tctgaaacggctgatcggaaaatgtctgtcccatttcagtgaggatttcagtaagtggcaatatggcctccttcagatttgggtgtctttcccacacaaatctttccaagatctcattcaaattggggaggcaccccatgtcactgatttgcagatcctgggcctgtgcmcwgagatctgaccaagcgtgttygtaggaaattgctgcttcgctgagagcagagcacctttagcaaaggcatcagctgagctacaaaaaggtttatctgtgtttggttttttttttccaagcagctctgytaatttggagtaaggagtaacctggctttctgaagtaattgcttttctgttctctctccatatctcttcttcagaggccaggtttacaagacactttgtctgtttcccattttcatgccaaattgcttcttctggtccattcactgccccaggctgagagaagtacatggggggcagcgagcagaaaagcccatctggctgatgttttctgacagccctgtacagcatggggctgggggtttactgactgctttaaaaggaaaataaagcccagctgtcctgggccagtcctgcaactga

SEQ ID NO: 3672 - DNA, 600 bp, Chicken  19866894100564_1
agaatcagtaagactctaagggcagctaagtcgaatcatagaattgctcaggttggaaaagaccttaaagatcatcaagtccaaccgcaacctaaccatactaccctaactctaacaaccctcctctaaatcatgtccctgagcaccacatccttttaaacacatccagggatggtgactcaacctcctccctggggagcctattccagtgcttaaccctttctgtaaagaagtttttcctgataatccttccataatcttcccttgaagagagagatttgcttggagatgtactatggsttcttattttaattataatgaaggaagcatattagaaaattgcttttttaagacagtgattgaaaaaaaaaataaatgtgtgtagaatgactgacttccaactgtgtcagtacaacaaagagtttttctgtcctggaagagggtattgagtctgagacaaaaggagggtgagggcacagtgaattaaaacacagaaatattaagtaattggggcaagatcgtgcagaagacgaaaatcactgtcaaaaacaaatcttaaccactagaacattcttcccctatgttttcactgattagaag

SEQ ID NO: 3673 - DNA, 600 bp, Chicken  19866894100565_1
atgtcactaatgctcagttgttgaatgctttgttggaattgttttaacagtggttttctccttgggaatggagttatcctatccacgaatataaaatagtatactttggatataaagtacctctaacttcttcaagttacatttaaccataaagctttaaaagctaaataaaggcagaggatagtactgctagcaaatctcactcatctttcattgtctgtcatttcagtagccaaaggtaaggagtatttcttttaaacttttccagattatttgaaatgagaacgcactaaatatttyctaaatattctttagaagaacataggcaaaggcaaaaaccaaacaataaaaccaccaaaagccaagagataaaaaagcttcttatgttttcagcggtactgcagagacggtccctgtcctctgttctctttttgcgtggtstgggatcagtgggcacttggagtacagagagctgctttgggctgagattgcttgagcagtcaacagcagagtgaaaaggggctgaactgctgaaagaacagaatcccttcctggccccacctgtgagtgcacagccatctgctccttgaagggcagtca

SEQ ID NO: 3674 - DNA, 600 bp, Chicken  19866894100565_2
tttaaccataaagctttaaaagctaaataaaggcagaggatagtactgctagcaaatctcactcatctttcattgtctgtcatttcagtagccaaaggtaaggagtatttcttttaaacttttccagattatttgaaatgagaacgcactaaatatttyctaaatattctttagaagaacataggcaaaggcaaaaaccaaacaataaaaccaccaaaagccaagagataaaaaagcttcttatgttttcagcggtactgcagagacggtccctgtcctctgttctctttttgcgtggtstgggatcagtgggcacttggagtacagagagctgctttgggctgagattgcttgagcagtcaacagcagagtgaaaaggggctgaactgctgaaagaacagaatcccttcctggccccacctgtgagtgcacagccatctgctccttgaagggcagtcatcagaacctttggatttagttaagtctccagttggcatctgagctgctatcttaaaacagagacccaacttaaagcttacggtaattacttaattagatactgtttcttgctgtgttgttatagtttggatattttaaaat

SEQ ID NO: 3675 - DNA, 600 bp, Chicken  19866894100569_1
accagcagtttgcaggctgtccctttgattttattgcctgttatcttgcttttaaattacaaggggaatagtaatgtcctattgactttcaccatacatcttgtgttttaatgctttttatcatgttattctttttctgctggagagttcttgatctttttttgcatttggttggttggggtcttttgtggagaggttgtgtgtggattgtttatcttcagtctagtgataattgtctctctcttggcttcatagattggcacggaaaaataggtttccagtggctgcaaaaagttttcytttaggaattcattttctctgtttcttgcaagatgtcaaaatggaaaactttacttaagtaagtatctgagcatgtgagacaatcctagaatcgttaagattgggaaagatctctaagaacatcttgtccagccatcaacccatcgccacatgcccactgatcatgtccctcagtgatacatcaaccctcttctctaacaccttcagggacagtgactcctccacctccttgggcagcctgtgccactgcctcaccaccctgtctgaggagaagttttccctaatatccagcctgaacct

SEQ ID NO: 3676 - DNA, 600 bp, Chicken  19866894100573_1
aagtcacaactgcacttacttttctttttcttcttcttcttctttttctgcctagatttatattagctccttatttctaggttctgtgcttacatttctaaggtattgagtccttgcctacgaaattgcacagcaggatttgttaaaggaattaatatttactgacagcactaatgccagtcagtcactgcttgttgtttgaggagcttgttcaagaagccattaccaacaggctgtgatttggattctccaggagacctttctggattttctcataggaacgacagaagcaagaaaggrgtctggacaaagtgctctgctctgctgcagtctatgrgctgcaggcagggcatttacctttgtacagatcattgacatgctcctaagccctttgttgaagcaaaaggtaaggtatgttgcatatttaatgtggtttgtaaagtatcaggtaatttatgttaaaaagttgaggaagttttcctgttatctagaaaacctaatttcaaacaaacaagcaaaaccccacaaaaccaaaaacctgacttccctatatgcaagtatattacattttcttacattattgctgcttatatgtaatgc

SEQ ID NO: 3677 - DNA, 600 bp, Chicken  19866894100573_2
tcttctttttctgcctagatttatattagctccttatttctaggttctgtgcttacatttctaaggtattgagtccttgcctacgaaattgcacagcaggatttgttaaaggaattaatatttactgacagcactaatgccagtcagtcactgcttgttgtttgaggagcttgttcaagaagccattaccaacaggctgtgatttggattctccaggagacctttctggattttctcataggaacgacagaagcaagaaaggrgtctggacaaagtgctctgctctgctgcagtctatgrgctgcaggcagggcatttacctttgtacagatcattgacatgctcctaagccctttgttgaagcaaaaggtaaggtatgttgcatatttaatgtggtttgtaaagtatcaggtaatttatgttaaaaagttgaggaagttttcctgttatctagaaaacctaatttcaaacaaacaagcaaaaccccacaaaaccaaaaacctgacttccctatatgcaagtatattacattttcttacattattgctgcttatatgtaatgcattagtaaaaattaaaaatagttttttacttgatttg

SEQ ID NO: 3678 - DNA, 449 bp, Chicken  19866894100574_1
agataactgtaaaaagggtggagaacaaatgacaagaagtgaaaataagaaaaacaggaaaagcaatattaaaacctttgggaaagggcatactaatgtggtaccattcagttgtccaataaacaccctgcatcatttctacagtgatctgacacaagtagttgacacctgcaaatgaaagtacataacacagaccacggtatatcagatggaaagggatctagggaataggactgtgaatgaaaccctgagagacctgtattaaattacaagttttgccattatcttcctatgtgataygaaaaatgagaatataatacctcctaccttgttgtgaagataaaacccattaattatcatgaagtgctcacatattacagcactgtgggggaaatgagcaagtagaatctaattactgctgtagtataaagtgtaagaaagttatatta

SEQ ID NO: 3679 - DNA, 600 bp, Chicken  19866894100576_1
agtgactttacaggctttgtggcagagattatttaaaggagattaacccttctaaaccccttagattttaattatttctgtatgtatttataaaacctgcagtctgctggttccagggcacaactgccccagtccccatccttaacctggattcggggatacacaacgcagccatattacagtgcagggctgggctggacaggggtcactctgcttatttatttattgccttcgtagcgcagttcaatccgggatgaaaatgaaacattatggtatcaaattgccaagggagctaataakgagggtggcgttaaaataacagcactgacacctcattaattgaattgtttggttcagcgcagcgtcgctcgctaattgtttgcttagggcagctctgctgttggtgcagcctgttgcctccccgctgcccgtgctgtgaacagggagcacctctgaaggggtggccaaaggcaaggatgggcccaaagaggatgctttgtttgctcagccttttgtatgcatattaagtgttgtgcgatggcagtctggaagatcatggtggctaacaggtgctgctggaagggaaaaaacaaagggcgt

SEQ ID NO: 3680 - DNA, 600 bp, Chicken  19866894100576_2
caacctggccagtctcaggtgacccacgctgtgctttgcagaggtgggaagaacactgaaggggtgggaggccaatcctacttagaccagagatgttgtagagaccacttctttgtatgggttaccaccttggcatggtggccgtagccccgtttctgtgtattctgggactgctgctgagaaattgcagtatttgaaggttggtttaagtatttgtgaatgcaaacgtaaagggtggctgttggaagggagcagaacccagagcacgtgggatgccaatgacattaaaaaaacaggtcrttctgaacgygtttcctcaaatcacatgatttttatttttccttacaccttgagcaaggaaacaaaagcaagccgagccaagaagttcatagatacatttttttgggggggagaatctctttcatatgcacgcgatcctcctcttccagcactgaacgtttgaccaatagcaattaatttctgatcacggtctttctatgaggcaagaaagcattaatgtctccattaggagtgctgaaccagagctctgcaaggtgggattgatcaccgggcatcccagccaggacggaggcagggctg

SEQ ID NO: 3681 - DNA, 600 bp, Chicken  19866894100576_3
agtctcaggtgacccacgctgtgctttgcagaggtgggaagaacactgaaggggtgggaggccaatcctacttagaccagagatgttgtagagaccacttctttgtatgggttaccaccttggcatggtggccgtagccccgtttctgtgtattctgggactgctgctgagaaattgcagtatttgaaggttggtttaagtatttgtgaatgcaaacgtaaagggtggctgttggaagggagcagaacccagagcacgtgggatgccaatgacattaaaaaaacaggtcrttctgaacgygtttcctcaaatcacatgatttttatttttccttacaccttgagcaaggaaacaaaagcaagccgagccaagaagttcatagatacatttttttgggggggagaatctctttcatatgcacgcgatcctcctcttccagcactgaacgtttgaccaatagcaattaatttctgatcacggtctttctatgaggcaagaaagcattaatgtctccattaggagtgctgaaccagagctctgcaaggtgggattgatcaccgggcatcccagccaggacggaggcagggctgagtgatgcac

SEQ ID NO: 3682 - DNA, 600 bp, Chicken  19866894100577_1
gggtgacatcagggaatgaagaagctctcacatccacttctgttatgacaaaattcaagcttatttatagctggcttttttctggctgtggttacattgtgtaggcaccctgcttgttcctaactaacaaattatgagccctgacatcatctttaaatcccacttcaggtgattctgctttgccacagctcccactggctctgcagagctggtggcactgcttctctgccctgccctgctccctcctcatgagccacaagacctgcactgggctgggctgctggtctgcctggaggaggkgacagagcatgttcagcctggccacggactgaacccttcatctctggtgttcagacaggtacacagcacaaaaacagttcagcagcattcacctacagctaaatcttgctagtcacagccaagccaacaggtagagacgtggcagggaggcactgctgtcccagaacctgctcctgagccctgctgtgatccctgagcttgctggcagcacaaacagtgccacagtgcagtatcccaagaggaagaagggcaagaggttggcacatacaaccccactcacaccagaaatgccatctccaa

SEQ ID NO: 3683 - DNA, 600 bp, Chicken  19866894100580_1
ggggagcctcagccctttaatgagaatctgccagtagcaacgtgtgctgttcagatacactaatgaaaaaaatgttcccttcccagtgacaaagcttccagctctccctgggcacgctgcttccaggagccagggaatttcaggacaggcaatgaaccctgagcaacacggacccaatgaggcacgctaggtgctggagccggtggggttactacagcagtcattgtccctgggtgcaaagcccagtggggacctcccttccccctttcctcagtttcaagcccagatcagcagaaatgkcaggaagtcccactgacttcccagacttgatcccaacagacccaatagcagatctggatggttcctccctcttttttctaatacacggctggggagtagtaggaaagacagaatgggagacactgagagaccgagggatgaaaaggaacatgggaaggcagaaaggtggagaagaaatgaagactgaaaagggatggatgcaatttagccaaaactctttagcaggagtagccctgtgcagacaggttaaagattgtcctgaagggaacatgggatggggaaagggcactctacagctta

SEQ ID NO: 3684 - DNA, 600 bp, Chicken  19866894100590_1
tgcagcagtggagaaagaggctgcaggagctgaaggctttaaatggctcgggaaaagcagcgatggtaagtgttgaggaaaggtaaagcatttgtgttcctgatgttgcttttccataagcctggagtgaaggttttccttaggattcacatttagacagtgctcattaagctgccttgctgtcaccaacattggtttcagttgtaaaggctgttaatgtaaccacgtctaagacgtgatagcacagcagaacagttgaggccaacactgagtgatcagggagatggcgtaagtcgattkaggtggcgtctgcatgaagtgcattgaagttgcagtagcgtgattggacctcttgctcagtttggttgtgaaggtgaggaggtggggttcagagttcagcacagccgatggttgtgcaacagacagagagctgagaaggggatgagagctgcatgaggtttaggtcattccaattcctttttgcccatcagtcrtcagattgrtggtgctagggtgtttgacagagaatagcctgagagcatttttstatagctgcaattgctggtggtcagtgtccaattaagtttctcggggttaggt

SEQ ID NO: 3685 - DNA, 600 bp, Chicken  19866894100590_2
gtttcagttgtaaaggctgttaatgtaaccacgtctaagacgtgatagcacagcagaacagttgaggccaacactgagtgatcagggagatggcgtaagtcgattkaggtggcgtctgcatgaagtgcattgaagttgcagtagcgtgattggacctcttgctcagtttggttgtgaaggtgaggaggtggggttcagagttcagcacagccgatggttgtgcaacagacagagagctgagaaggggatgagagctgcatgaggtttaggtcattccaattcctttttgcccatcagtcrtcagattgrtggtgctagggtgtttgacagagaatagcctgagagcatttttstatagctgcaattgctggtggtcagtgtccaattaagtttctcggggttaggttaaattgggtggcacacgcatgtttttgctttaagagtggattgaaagagacttgcccgtgttggcatgtagttttcatggacgtatttggaattttttcagcaatctccgaccaagaatgcagtcactcaacctctgccttcccttggcttcgcaggacagcaagccccaagcactgggttcccaggtaagct

SEQ ID NO: 3686 - DNA, 600 bp, Chicken  19866894100590_3
gtaaaggctgttaatgtaaccacgtctaagacgtgatagcacagcagaacagttgaggccaacactgagtgatcagggagatggcgtaagtcgattkaggtggcgtctgcatgaagtgcattgaagttgcagtagcgtgattggacctcttgctcagtttggttgtgaaggtgaggaggtggggttcagagttcagcacagccgatggttgtgcaacagacagagagctgagaaggggatgagagctgcatgaggtttaggtcattccaattcctttttgcccatcagtcrtcagattgrtggtgctagggtgtttgacagagaatagcctgagagcatttttstatagctgcaattgctggtggtcagtgtccaattaagtttctcggggttaggttaaattgggtggcacacgcatgtttttgctttaagagtggattgaaagagacttgcccgtgttggcatgtagttttcatggacgtatttggaattttttcagcaatctccgaccaagaatgcagtcactcaacctctgccttcccttggcttcgcaggacagcaagccccaagcactgggttcccaggtaagcttctgcataa

SEQ ID NO: 3687 - DNA, 600 bp, Chicken  19866894100590_4
cagaacagttgaggccaacactgagtgatcagggagatggcgtaagtcgattkaggtggcgtctgcatgaagtgcattgaagttgcagtagcgtgattggacctcttgctcagtttggttgtgaaggtgaggaggtggggttcagagttcagcacagccgatggttgtgcaacagacagagagctgagaaggggatgagagctgcatgaggtttaggtcattccaattcctttttgcccatcagtcrtcagattgrtggtgctagggtgtttgacagagaatagcctgagagcatttttstatagctgcaattgctggtggtcagtgtccaattaagtttctcggggttaggttaaattgggtggcacacgcatgtttttgctttaagagtggattgaaagagacttgcccgtgttggcatgtagttttcatggacgtatttggaattttttcagcaatctccgaccaagaatgcagtcactcaacctctgccttcccttggcttcgcaggacagcaagccccaagcactgggttcccaggtaagcttctgcataaagagccagcacttaaacaggcgttgctaagttttsttcagcagg

SEQ ID NO: 3688 - DNA, 600 bp, Chicken  19866894100590_5
gcatttttstatagctgcaattgctggtggtcagtgtccaattaagtttctcggggttaggttaaattgggtggcacacgcatgtttttgctttaagagtggattgaaagagacttgcccgtgttggcatgtagttttcatggacgtatttggaattttttcagcaatctccgaccaagaatgcagtcactcaacctctgccttcccttggcttcgcaggacagcaagccccaagcactgggttcccaggtaagcttctgcataaagagccagcacttaaacaggcgttgctaagttttsttcagcaggattgaagtgcagcagcgttgcagtatcacaggtgtgcccattctgaccgttcttatccatttcataattgcaggctttcctgtgagcagcagcagcggtgctgccagtttctcctttaaggccaatcccagtgtcccacctggaaacgctgcggctgttgggagctctgctgctgcctccaatcctcctacgcttggggtgacgtcctcgcccagcgttcccaatcctgttggctctggcaattcttcagccccatctgcagccccctcgtcacttaacgctcctggagca

SEQ ID NO: 3689 - DNA, 600 bp, Chicken  19866894100618_1
gaacatggctggcctgataaggtttttgtttctctgggtagtggtacccattcctcctccagctcctcctccacctgctgccgtgtgctggaacatggctggctggataaggttggtgtttgtctggctagaagcacccattcctcctcctgttcctcctcctcctgctcctgctcctcctcctgccgtgtgttggaacatggctggcctgataaggttggtgtttctctgggtggcagcacccattcctcctcctcctccaccgccattctgctggaacacaaaatgctctcaggctaytctctgtcaaacaccctagcaccatcaatcygacgactgatgggcaaaaaggaattggagtgaccaaaacctcatgcagctctcatccccttctcagcctgctctctgtctcttgcacaaccatcgcctgtgctgaactctgaaccccacctcctcaccttcacaaccaaactgagcaagaggtccaatcacgctactgcaacttcaatgcacttcatgcagacgccacctcaatcgacttacgccatctccctgatcactcagtgttggcctcaactgttctgctgtgctatcacgtct

SEQ ID NO: 3690 - DNA, 600 bp, Chicken  19866894100618_2
ctctgggtagtggtacccattcctcctccagctcctcctccacctgctgccgtgtgctggaacatggctggctggataaggttggtgtttgtctggctagaagcacccattcctcctcctgttcctcctcctcctgctcctgctcctcctcctgccgtgtgttggaacatggctggcctgataaggttggtgtttctctgggtggcagcacccattcctcctcctcctccaccgccattctgctggaacacaaaatgctctcaggctaytctctgtcaaacaccctagcaccatcaatcygacgactgatgggcaaaaaggaattggagtgaccaaaacctcatgcagctctcatccccttctcagcctgctctctgtctcttgcacaaccatcgcctgtgctgaactctgaaccccacctcctcaccttcacaaccaaactgagcaagaggtccaatcacgctactgcaacttcaatgcacttcatgcagacgccacctcaatcgacttacgccatctccctgatcactcagtgttggcctcaactgttctgctgtgctatcacgtcttagacgtggttacattaacagcctttacaac

SEQ ID NO: 3691 - DNA, 600 bp, Chicken  19866894100625_1
caagcaccgctctgctccctggaagttctgctgctgcaaactcttcaagcactgctcctctccctgggagttctgctgctgcaaactcttcaagcaccgctctgctccctggaagttcttctactgcgaactcttcaagcaccgctctgctccctggaagttctgctgctgcaaactcttcaagcaccgctccgctgccagtttctgcaattcccagtgcagcgacaggaacttcccagtcaggtgcaagcagtgcttcggctgcacagactgccggtgcctctggacataacgtaacgyccgcgccttctgcagtccgagacggtatcagaccagaccggttatatacaccaaggagtgaattaacagctgaagagttgcggcagtttgcagccaaaaggttcacgctaggaaagatacctctgaaaccaccacccgcagacatgttacatggttcggactcgagtttattctgaagttatatgtcttagttgttgttttgtgacactttcaataaacaatgttgtgttggagccaggagttggaatgctttcttctgacttaacttttccttgaatctcttcagtctttgcagcgatg

SEQ ID NO: 3692 - DNA, 600 bp, Chicken  19866894100625_2
gttttgtgacactttcaataaacaatgttgtgttggagccaggagttggaatgctttcttctgacttaacttttccttgaatctcttcagtctttgcagcgatgagctcacaggtgtaaacgtttcagcagtgtattttctcaggctttattcctttttttgagtggggcttttaaatcccagtaagttagtgaaagtaaaatgacgtagtaaagggtccttttgtatttccctctgtgaacctgggggaaagaccttttgtgaaacgtaggaatgctttggtgcggtcttcagagcctmgtgtgagtgaagtgctagagagagctgcatgcggggcacaactgcttgctgtcggaccgccttggctttggcttcatgtcaagagggcttgtgcaacttctgacagctgtggttgggcgtggagctctcctgtgttgcctgtaccttccgtgactgtgggaccccttccctggacgatgcattttaacttctgttggttgttgtgcccgaggtcataatgcacgcatcagcgtactgcagctggtgagggacagtgctgaaagtgttcctccttsctaacaaacctgtgctttgttactt

SEQ ID NO: 3693 - DNA, 600 bp, Chicken  19866894100625_3
gctttggtgcggtcttcagagcctmgtgtgagtgaagtgctagagagagctgcatgcggggcacaactgcttgctgtcggaccgccttggctttggcttcatgtcaagagggcttgtgcaacttctgacagctgtggttgggcgtggagctctcctgtgttgcctgtaccttccgtgactgtgggaccccttccctggacgatgcattttaacttctgttggttgttgtgcccgaggtcataatgcacgcatcagcgtactgcagctggtgagggacagtgctgaaagtgttcctccttsctaacaaacctgtgctttgttactttgacacctcttggatacaacctttcaagcaactgtaagaccacccccctcatttatgtggcttggtacactttagttgtctagttctcaaatcttggtgggggcatatattagtgatacctatactgagcggatgctgttaaggtacgtatttkgccaaggtgctataaagcaggggtcagacattttccaaaggagatactagagttgggtggagagaatatttgtttgttctggaccaggttctcctgttggtgtttcacaatcacgtaacct

SEQ ID NO: 3694 - DNA, 600 bp, Chicken  19866894100625_4
tgtgggaccccttccctggacgatgcattttaacttctgttggttgttgtgcccgaggtcataatgcacgcatcagcgtactgcagctggtgagggacagtgctgaaagtgttcctccttsctaacaaacctgtgctttgttactttgacacctcttggatacaacctttcaagcaactgtaagaccacccccctcatttatgtggcttggtacactttagttgtctagttctcaaatcttggtgggggcatatattagtgatacctatactgagcggatgctgttaaggtacgtatttkgccaaggtgctataaagcaggggtcagacattttccaaaggagatactagagttgggtggagagaatatttgtttgttctggaccaggttctcctgttggtgtttcacaatcacgtaacctcttatgcctcttacgacacctctttatgggaaataaaacaatcattctaggagataattcctgcaattgggtgtttcttccacgcttgaagaaacctacagccttagaacttccctatggatgcatggattcctaccagaaggccatagcacgctggatgacgccttgtgtcacggcct

SEQ ID NO: 3695 - DNA, 599 bp, Chicken  19866894100638_1
  misc_feature (1)..(93): n is any nucleotide
nnnnnnnnnnnnnnnnnnnnnnnnnnnnnnnnnnnnnnnnnnnnnnnnnnnnnnnnnnnnnnnnnnnnnnnnnnnnnnnnnnnnnnnnnnnnnacaaaagaagaaatacacggtcagaagcagaaactttgccaaaggcaaagtccaactcaagtagacaaagccattccaattcattccatagggcgctgcgcaggggcaacaactgaactattccgttatctgtcaaagacacgacagtcactgtgctggacacacagatgtcccactaagcatttcaccttatccttgaaccgcaamaacatcacatcaggtcttgaagagaaaccaaaccccagggcttcctatgggtctccccacacggcccagcttccaccctccggatcgcatcctctccattaagcataggacgcctgtaagcacttcagcagcccattgcaagcgctttccaggggacaggggcatcacttacagaaggctctgctgtccatctctctggccatcagcagggtgtgcactgcttaacgcagagaatgcgttctgcgagaggaccgcaccgttgctgcccgctggtccaaaaccggaggcaccagagagtc

SEQ ID NO: 3696 - DNA, 447 bp, Chicken  19866894100643_1
caaccttatccagccagccatgttccagcacacggcagcaggtggaggaggagctggaggaggaatgggtaccactacccagagaaacaaaaaccttatcaggccagccatgttccagcacacggcaggaggtggaggaggaggaggaatgggtgcttctacccagacaaacaccaaccttacccagccagccatgctccagcacacggcaggagctggaggaggaggaggaatgggtgcttctacccagacaaacacaaaccttacccagccagccatgctccagcacacggcaggagstggaggaggaggaggaatgggtgcttctacccagacaaacacaaaccttacccagccagccatgctccagcacacggcaggagctggaggaggaggaggaatgggtgcttctacccagacaaacacaaaccttacccagccagccat

SEQ ID NO: 3697 - DNA, 599 bp, Chicken  19866894100662_1
  misc_feature (1)..(157): n is any nucleotide
nnnnnnnnnnnnnnnnnnnnnnnnnnnnnnnnnnnnnnnnnnnnnnnnnnnnnnnnnnnnnnnnnnnnnnnnnnnnnnnnnnnnnnnnnnnnnnnnnnnnnnnnnnnnnnnnnnnnnnnnnnnnnnnnnnnnnnnnnnnnnnnnnnnnnnnnnnnnnggtggaggaggagctggaggaggaatgggtaccactacccagagaaacaaaaaccttatcaggccagccatgttccagcacacggcaggaggtggaggaggaggaggaatgggtgcttctacccagacaaacacaaaccttayccagccagccatgctccagcacacggcaggagctggaggaggaggaggaatgggtgcttctacccagacaaacacaaaccttacccagccagccatgctccagcacacggcaggagctggaggaggaggaggaatgggtgcttctacccagacaaacacaaaccttacccagccagccatgctccagcacacggcaggagctggaggaggaggaggaatgggtgcttctacccagacaaacacaaaccttatccagccagccatgttccagcacacggcagcaggtggaggaggcgctg

SEQ ID NO: 3698 - DNA, 600 bp, Chicken  19866894100672_1
accctccggatcgcgtcctctccattaagcacaggacgcctgtaagcacttcagcagcccattgcaagcgctttccaggggacaggggcatcacttacagaaggctctgctgtccatctctctggccatcagcaggctgtgcactgcttaacgcagagaatgcgttctgcgagaggaccgcaccgttgttgcccgctggtccaaaaccggaggcaccagagagtcctcctccatcaccgctgccacccgatgtgctgtttgcaaacacaggaggctgcgtaacggctgcgggagcgcccsatcctcctcctcctcctgccgtgtgctggaaaacggctggctggagaaggtttgtgtttctctgggtagaagcacccattcctcctcctcctccagctccctgccgtgcgctggaacacccgcggccggatatggtttgcgtatctccgggtagcggcaccccatcctcgtctggctcctctgacgggagctgctaacgaagaagaaaggacgcaaagcgtctcagacgggtcgcgattcgcacaacgcccacgaagccagcgagaagtcgcaaagaaaacgttctcccagcgagtcacc

SEQ ID NO: 3699 - DNA, 332 bp, Chicken  19866894100690_1
aaccagttcaaaagtgtttgcgacattaaagtttactgtgtgtgaaggtgagctacaaatctagctgcagtgctgtcagtattgtctgtgttttgtgactgctctcctgcagcagctctttgtcatgccagccctcttccattatgcacagggtcactgttgatagtaaattgaggctctgggtttgtattttgttaccaagtgctaaatgagaactatccgctgcatctctgatagggggtgtagttcttcatctgtttttcttgctggtggcacctatcaaagatttgattttgatgytgggaaacttggtgctgtgactggtacgcgct

SEQ ID NO: 3700 - DNA, 599 bp, Chicken  19866894100693_1
  misc_feature (1)..(77): n is any nucleotide
nnnnnnnnnnnnnnnnnnnnnnnnnnnnnnnnnnnnnnnnnnnnnnnnnnnnnnnnnnnnnnnnnnnnnnnnnnnnnttattattagcaatcagctgtcttttgaaagtatatctcctggttcagacgagatatctttgtttttctcccagttcatgagagatttacttatgaaaaaggccaaagtcagaaaaacagagagaactcgagagctgacagccctcaccaactgggaagcaggctggctctgccatctccctagtttacaaatgtcctctgtttctctccatttttagtttcrtgttgtgccctatctttgtaccatgtaggctgggaaaacaccaacgatccttcagataccaggcaaacactcagcagcacatcctccacagcagcatcacctctcagaaagctgctccagcagccctagcrtggcttcctgggcacatgttccatttctcctgttttccagagatgcttaataaccagcagcagatccttgcagcacaacatggagagaaatgagcctcaaacagctctcctcacctcaactgcctgtctacaatttatacatccatggaaaggagatagraaggacgg

SEQ ID NO: 3701 - DNA, 600 bp, Chicken  19866894100693_2
tatctttgtttttctcccagttcatgagagatttacttatgaaaaaggccaaagtcagaaaaacagagagaactcgagagctgacagccctcaccaactgggaagcaggctggctctgccatctccctagtttacaaatgtcctctgtttctctccatttttagtttcrtgttgtgccctatctttgtaccatgtaggctgggaaaacaccaacgatccttcagataccaggcaaacactcagcagcacatcctccacagcagcatcacctctcagaaagctgctccagcagccctagcrtggcttcctgggcacatgttccatttctcctgttttccagagatgcttaataaccagcagcagatccttgcagcacaacatggagagaaatgagcctcaaacagctctcctcacctcaactgcctgtctacaatttatacatccatggaaaggagatagraaggacggaggattgggctgagctccaggatacccatttgtggagctgctgctgcattaaccttccttggaagccaggagtttactttctactgctttacccaaaataattcacaaatttcttaaaatgtatcccacaca

SEQ ID NO: 3702 - DNA, 600 bp, Chicken  19866894100693_3
ttagtttcrtgttgtgccctatctttgtaccatgtaggctgggaaaacaccaacgatccttcagataccaggcaaacactcagcagcacatcctccacagcagcatcacctctcagaaagctgctccagcagccctagcrtggcttcctgggcacatgttccatttctcctgttttccagagatgcttaataaccagcagcagatccttgcagcacaacatggagagaaatgagcctcaaacagctctcctcacctcaactgcctgtctacaatttatacatccatggaaaggagatagraaggacggaggattgggctgagctccaggatacccatttgtggagctgctgctgcattaaccttccttggaagccaggagtttactttctactgctttacccaaaataattcacaaatttcttaaaatgtatcccacacatgctaagcagggaagcccagtgcccatgaaggaaggtatgagaaaatagaatatagaaggaggtgttaacatttttattgggtcttgatggccaggggaaaagttttaaaggctgctggaagaaagaggtttcttttttccgagcataacatcacagtgc

SEQ ID NO: 3703 - DNA, 600 bp, Chicken  19866894100693_4
gagcaccttgcttttggcagtcaggttggtcacagcacatcagctgtcctgcttctatgccagcacataggcgcttacagcattaacagtctgtaaaacccagatatcataccatcgcacataatacaaggaacaagacagcataaaaaggagctgttggagcaagaaaagggccacagatttgatcagagggctggagcacctctcctgtgaagaaaggttgagggatttggaattgttcagcctggaggatccagggagacctcactgcagccttccagtacttgaagggagctcatragcaggaggggaactgacattttacacagtctgacagtgataggacaagggggagcggttttaaactaagggaggggagatttacgttagatggtaggaaaaaagatttcactcagagggccgtgaggccctggcacaggctgcccagagaagctgtggatgccccatctctggaagtgttcaagaccaggttggacagaggtctaggcagtctgatctggtgggtggcaaccagcccatggcagggggtttggaactrcatgatctttaagaacccccctggacctagccattctgtga

SEQ ID NO: 3704 - DNA, 600 bp, Chicken  19866894100693_5
agacctcactgcagccttccagtacttgaagggagctcatragcaggaggggaactgacattttacacagtctgacagtgataggacaagggggagcggttttaaactaagggaggggagatttacgttagatggtaggaaaaaagatttcactcagagggccgtgaggccctggcacaggctgcccagagaagctgtggatgccccatctctggaagtgttcaagaccaggttggacagaggtctaggcagtctgatctggtgggtggcaaccagcccatggcagggggtttggaactrcatgatctttaagaacccccctggacctagccattctgtgatgctggkwttctgcaccatcaaaccaagactggccttccgatggctaaaggggtttgaagcttatgctgcaaaggaaatccagagatttcctagggcagcacagataaggcaaatagctccaaggacaggaaatgcaaaggatttcctttttttttccttctggttatggtagcccttgtaaacttgcttgttaaaacgttaacaacgttaacatgttgaaatgttaaaatagttatttctcctggcatgcaactaacg

SEQ ID NO: 3705 - DNA, 593 bp, Chicken  19866894100693_6
ggggaactgacattttacacagtctgacagtgataggacaagggggagcggttttaaactaagggaggggagatttacgttagatggtaggaaaaaagatttcactcagagggccgtgaggccctggcacaggctgcccagagaagctgtggatgccccatctctggaagtgttcaagaccaggttggacagaggtctaggcagtctgatctggtgggtggcaaccagcccatggcagggggtttggaactrcatgatctttaagaacccccctggacctagccattctgtgatgctggkwttctgcaccatcaaaccaagactggccttccgatggctaaaggggtttgaagcttatgctgcaaaggaaatccagagatttcctagggcagcacagataaggcaaatagctccaaggacaggaaatgcaaaggatttcctttttttttccttctggttatggtagcccttgtaaacttgcttgttaaaacgttaacaacgttaacatgttgaaatgttaaaatagttatttctcctggcatgcaactaacggtcctctgcttggcttgctcttgcattgtgctgctatttat

SEQ ID NO: 3706 - DNA, 592 bp, Chicken  19866894100693_7
gggaactgacattttacacagtctgacagtgataggacaagggggagcggttttaaactaagggaggggagatttacgttagatggtaggaaaaaagatttcactcagagggccgtgaggccctggcacaggctgcccagagaagctgtggatgccccatctctggaagtgttcaagaccaggttggacagaggtctaggcagtctgatctggtgggtggcaaccagcccatggcagggggtttggaactrcatgatctttaagaacccccctggacctagccattctgtgatgctggkwttctgcaccatcaaaccaagactggccttccgatggctaaaggggtttgaagcttatgctgcaaaggaaatccagagatttcctagggcagcacagataaggcaaatagctccaaggacaggaaatgcaaaggatttcctttttttttccttctggttatggtagcccttgtaaacttgcttgttaaaacgttaacaacgttaacatgttgaaatgttaaaatagttatttctcctggcatgcaactaacggtcctctgcttggcttgctcttgcattgtgctgctatttat

SEQ ID NO: 3707 - DNA, 600 bp, Chicken  19866894100694_1
tagttaggcagcttctgcttgaagtagcagagggtgtttgagagctgcaggctgtgtggagcagccctagctgcatggtttgttctgtgcgtgaccaggggtgaaaaaggtgaagtctgcaaacaaaataatagaagtgtatgtgtcccattagagtgcccaggaacgtacatttttcttatcctgacagctcaaactgtgttcctgttaggtgcctgttgttttccaagtccacttgtaaacagatgcagattcctggtgctgaggtttgagtatcggataatgataagcaagatgttyttgttttgtttctttgaagcacttaatccattatggtcaactaattacacttgagattgcctgcaaagcttgccattttaggraagctctgttgtttgcaggagtggcaagaaaaaaaccttttatgtttctttccttatctagagttaaagtaggtcaaactgttgtgtttttttttcctttgcaagaaattatttcttgaaagtatttctgtttagcaaatttaagtgcgagagtatgagcctgaagcatwcatatagataatttataaacctgttgtttggggggcttataaaaggc

SEQ ID NO: 3708 - DNA, 600 bp, Chicken  19866894100694_2
tctgtgcgtgaccaggggtgaaaaaggtgaagtctgcaaacaaaataatagaagtgtatgtgtcccattagagtgcccaggaacgtacatttttcttatcctgacagctcaaactgtgttcctgttaggtgcctgttgttttccaagtccacttgtaaacagatgcagattcctggtgctgaggtttgagtatcggataatgataagcaagatgttyttgttttgtttctttgaagcacttaatccattatggtcaactaattacacttgagattgcctgcaaagcttgccattttaggraagctctgttgtttgcaggagtggcaagaaaaaaaccttttatgtttctttccttatctagagttaaagtaggtcaaactgttgtgtttttttttcctttgcaagaaattatttcttgaaagtatttctgtttagcaaatttaagtgcgagagtatgagcctgaagcatwcatatagataatttataaacctgttgtttggggggcttataaaaggctgtcagatcttsagctgtagatgtgccaccatctgctgcgctgatacaagccttagtaaggctaaatatgctgggtttagctg

SEQ ID NO: 3709 - DNA, 600 bp, Chicken  19866894100694_3
tcctggtgctgaggtttgagtatcggataatgataagcaagatgttyttgttttgtttctttgaagcacttaatccattatggtcaactaattacacttgagattgcctgcaaagcttgccattttaggraagctctgttgtttgcaggagtggcaagaaaaaaaccttttatgtttctttccttatctagagttaaagtaggtcaaactgttgtgtttttttttcctttgcaagaaattatttcttgaaagtatttctgtttagcaaatttaagtgcgagagtatgagcctgaagcatwcatatagataatttataaacctgttgtttggggggcttataaaaggctgtcagatcttsagctgtagatgtgccaccatctgctgcgctgatacaagccttagtaaggctaaatatgctgggtttagctgtgtatagctcgtgaatggagactgctctccttcttaggtgactgggaaaggtatttcccttgctatgactaatggacaactggcttagtccttacactccaaatctgggctgtaaatatgcatcacaacttctcacgcttagaagaaagcagaagtgttctaatggaggc

SEQ ID NO: 3710 - DNA, 600 bp, Chicken  19866894100694_4
tttgaagcacttaatccattatggtcaactaattacacttgagattgcctgcaaagcttgccattttaggraagctctgttgtttgcaggagtggcaagaaaaaaaccttttatgtttctttccttatctagagttaaagtaggtcaaactgttgtgtttttttttcctttgcaagaaattatttcttgaaagtatttctgtttagcaaatttaagtgcgagagtatgagcctgaagcatwcatatagataatttataaacctgttgtttggggggcttataaaaggctgtcagatcttsagctgtagatgtgccaccatctgctgcgctgatacaagccttagtaaggctaaatatgctgggtttagctgtgtatagctcgtgaatggagactgctctccttcttaggtgactgggaaaggtatttcccttgctatgactaatggacaactggcttagtccttacactccaaatctgggctgtaaatatgcatcacaacttctcacgcttagaagaaagcagaagtgttctaatggaggctcagtatgttgaattactggagtgagcatctgcttcgattcagccactgattttcatca

SEQ ID NO: 3711 - DNA, 600 bp, Chicken  19866894100699_1
ttctaacaaagtgcctttgcattgatctcggagtacaaaggtgattgattgaaaactgcctaacgagacaagcaagaattccatcagctgtgtgggagtggctggctggcacatagatctcctcactttcaacacctacaaatcaccctgggagccagggatatgaagaagtgggaaaaagaagagagccagagctctcagacctctgcttactccagagggtaatgtgtgaaccgtgagtgggagaatggatttcatcctcactatccaaatgttactaagaaaaaatgcagctctccrtttcgtaaaagttgctttccaaattccwtccagtctcagtctctcaatcagtggtaagtttttatgtaaattcctctcggtctggctaatctctgtctgatctcaacctgaagatagttatcttctcaggaaaagaccattatgtgctcaaaattttaaatattcttggagcatataggagaactaaagcattcataaaccagctttgtgctaacatgagcatgatataatgctgtctgtggtctgatcagaaactacatgcaaaaaaaaaccagcaggggcttggaaagtctggattgc

SEQ ID NO: 3712 - DNA, 600 bp, Chicken  19866894100699_2
cggagtacaaaggtgattgattgaaaactgcctaacgagacaagcaagaattccatcagctgtgtgggagtggctggctggcacatagatctcctcactttcaacacctacaaatcaccctgggagccagggatatgaagaagtgggaaaaagaagagagccagagctctcagacctctgcttactccagagggtaatgtgtgaaccgtgagtgggagaatggatttcatcctcactatccaaatgttactaagaaaaaatgcagctctccrtttcgtaaaagttgctttccaaattccwtccagtctcagtctctcaatcagtggtaagtttttatgtaaattcctctcggtctggctaatctctgtctgatctcaacctgaagatagttatcttctcaggaaaagaccattatgtgctcaaaattttaaatattcttggagcatataggagaactaaagcattcataaaccagctttgtgctaacatgagcatgatataatgctgtctgtggtctgatcagaaactacatgcaaaaaaaaaccagcaggggcttggaaagtctggattgctgcctgagtctggaataccaagtaggtt

SEQ ID NO: 3713 - DNA, 600 bp, Chicken  19866894100705_1
tatgggaccctggagttcacgtcctttgtagcatacgctcagaaggaacgtatggagatccagaacactcattcaagagaaataacagcacagcaaatgaaatccacaactgactttctgccaagagcatcactgacaccctgctggggaagggcatcaatgcttcctctaatgatgaggcatatgaacctacgacccccagagctctctgcactgatccagggaagaaagtcctgtgctaagccagccacattatttcctgcctccttcttgtcaaactcccttttgaatatcagcctytcctttccacttctgcccatgtttctactactattcatggctctactctgatccatctgctctttttacagtttgtttattctccgtcccttcctcctcttcttcccatgtttcttcccttgccctcagatcttgttgggctgccaggtctctagttcagtgacataactcagctgatttaccctccttaaagcagtgtctactctcatgtaaatcaccctccaaaacccgcctgtgaaatgggcttgttcactaaactctatgaatagggaaagtaggcacagctggcctattcataat

SEQ ID NO: 3714 - DNA, 600 bp, Chicken  19866894100713_1
ttttcatagaatatgtacctattcaaaccaaaacaccacaagaatcagaactattttatagatagctagtggcacttctatgtttctataatgctgtacttctaagtaataattcagttccagaaaagcaaagcttatcataatacagaactcatggagaagagctggcaacttcattgctcacaaatacaattttgcagtacatctgtgaaacaatgtagttcccattttgaagaatacctgaagtttctgcctacaattcttcgaagttactctaaatgatacaattaatgctttgartaacccagaagtgactctgaaatatcaggttgagctctacccccaatatctgctgcaaagagttcactccacttcttgcctcctcacaacaatgtgtagcagtatctccaaataatcacctttcacactgttaattagaaactttaaatgactccagtagttaaggaatggaaagtgtttcagaaatctaaatgacaaagggcacacatgacttacatcagtaccatgttttcttgttgcttgtgttgcaagagatttaatcttctccttgtaaagctgcgcagctcgactgttatactt

SEQ ID NO: 3715 - DNA, 600 bp, Chicken  19866894100726_1
ttaaatggatgatatgtctgaggaatttctttcacttgagagagttcttgttgaaaaatagcactaagaaagagtagctactgaaataattggcaactaatgcactgattcattttacacattatttaatcagtaaaaaagtcttcagacttcttaattttattttacatttattttctaatattagtgtaccgaataggaaaaatcaaaggccgatcctacaatttgaaaaccataaaattcatcacatttcataggcaacacatactggggaaaatgaaggaagtgagaaatagttgktgctctttaccaacacagattgtctcactgttttacgagagttgcatgattgggcttgcggacacagacatattttgttggcattacttttttggctcaagaatgtgagaagttatattagtaagacaattattagaatacttctttttttttctggttttgatgccaacagaagaacgaaattctcacagctgaagaatacatcccaatcaacagtgaaactttttggatcagattttggatgaattaacttagagtcaaattctttcagatagagtacgttagcagaagagagagcca

SEQ ID NO: 3716 - DNA, 600 bp, Chicken  19866894100730_1
ttgttgttaatgtgtctgaaaaaagcacttaattgaggtcataataatattagcagttatcaccatcaataattcagccttatttattactacacggtaaagttctgtcaaacgggagccgctcaggctttgttctacatgttaacatgaagctagctgttggatgattggtatatatttcaccagctgctcaaaactgcgggacggcgagaactaatgatactccttcttggtccgtgcattacacaatagttaatttgctgtatgcagaaatatatgttacaaatataatagtcccayataaagtatgcgtaataaaaaaggcattatatctgaaacagtgactgactaatcttgcctgagctatctgtcataaggaaaacaatttcaattcctgcatgatttagtgctcctgcagctggagaaacataaattctgcctcttcacacagttgcagtcacctgagattagttatctttaaaaaaactaaatgaacgtataattgtacaattatagatgctaactccggtgttaaaatttaaaatgtattagtctcataaaatgcctcattaatctccacgtcttaaaggacacacttgt

SEQ ID NO: 3717 - DNA, 600 bp, Chicken  19866894100731_1
tgccctttgccagcttgcaggggggcagcctccaaatccactctcccattcctcccagtggcgtgggagagagatggacactgacaccctgacacccctttgcaggttctttccagagaatacatggttctttgcgacactaagatatccacctgcagcctcgtgagtgtgatttgctgcactgatgagctgcaggtttcttcagacttgccttgtggtgccgaggtggctccagacctgcctgctcacccccatcaccaccgctttctgccttgcctttccccagcagcatctggctgygggatgctgcaaaggcttagtttctctgcaggggctttttggagagggagcagagctctgacacatgtcatcgctgtttgatctccggcatgcttggctccctgttggaggattcatgcataacgatgcygcttcatttgtgtgtctgttatcacattgtgctgaggctgacagatgcttccaagcacagttaatgcctgtcggcagccccgagcctgcaggctgtagtgtgggaggacctggaatcctgctggggtgccagaggttgtttttcccttcccggaaggttggaaatatacc

SEQ ID NO: 3718 - DNA, 600 bp, Chicken  19866894100731_2
tttgcgacactaagatatccacctgcagcctcgtgagtgtgatttgctgcactgatgagctgcaggtttcttcagacttgccttgtggtgccgaggtggctccagacctgcctgctcacccccatcaccaccgctttctgccttgcctttccccagcagcatctggctgygggatgctgcaaaggcttagtttctctgcaggggctttttggagagggagcagagctctgacacatgtcatcgctgtttgatctccggcatgcttggctccctgttggaggattcatgcataacgatgcygcttcatttgtgtgtctgttatcacattgtgctgaggctgacagatgcttccaagcacagttaatgcctgtcggcagccccgagcctgcaggctgtagtgtgggaggacctggaatcctgctggggtgccagaggttgtttttcccttcccggaaggttggaaatatacccagtgattcttagtatcacccctctcacttaacatccagatatttatgtgcccctgctgcctacaatccrtggctgaattgctgaaggagttgagcaggcttttcttctcagtcatccatccaacaactg

SEQ ID NO: 3719 - DNA, 600 bp, Chicken  19866894100731_3
tcgctgtttgatctccggcatgcttggctccctgttggaggattcatgcataacgatgcygcttcatttgtgtgtctgttatcacattgtgctgaggctgacagatgcttccaagcacagttaatgcctgtcggcagccccgagcctgcaggctgtagtgtgggaggacctggaatcctgctggggtgccagaggttgtttttcccttcccggaaggttggaaatatacccagtgattcttagtatcacccctctcacttaacatccagatatttatgtgcccctgctgcctacaatccrtggctgaattgctgaaggagttgagcaggcttttcttctcagtcatccatccaacaactgaaaatctctttctgcacttggagagccttgcaacttcattaaatgcacctggagaagtgaggctttctcctytcttccctgctgcaggctggggaacagcttttgttcctcatatctgctctttgccgagcccaagtgtccttgaattgctttaagctgcttcatagggtcaaagtatccaggacaaagagttacagacccccctattctgcccccagcacagtgtcactgagctgttat

SEQ ID NO: 3720 - DNA, 600 bp, Chicken  19866894100731_4
ggcagccccgagcctgcaggctgtagtgtgggaggacctggaatcctgctggggtgccagaggttgtttttcccttcccggaaggttggaaatatacccagtgattcttagtatcacccctctcacttaacatccagatatttatgtgcccctgctgcctacaatccrtggctgaattgctgaaggagttgagcaggcttttcttctcagtcatccatccaacaactgaaaatctctttctgcacttggagagccttgcaacttcattaaatgcacctggagaagtgaggctttctcctytcttccctgctgcaggctggggaacagcttttgttcctcatatctgctctttgccgagcccaagtgtccttgaattgctttaagctgcttcatagggtcaaagtatccaggacaaagagttacagacccccctattctgcccccagcacagtgtcactgagctgttatacgctctcctcatttccgctcatttggtccaaaacattaaaaagaagccccaccctgggaaaatccaatcccttaggctaagtacccttctttctaccccaccccaggcttactcactccctagtccttcac

SEQ ID NO: 3721 - DNA, 599 bp, Chicken  19866894100736_1
  misc_feature (1)..(25): n is any nucleotide
nnnnnnnnnnnnnnnnnnnnnnnnnaatatatacaattgctatgcaaaatgttgaagatcactgcaacagaaagtaggaaaccagaagtaaccataagtagccaggacactaaaaactgaaattgattctttgacccaagtaagttgttgaagttatataaacagatgatctacattatacagacagttcttcattcattagttttatttgttttatgcctaacctttcactgccttgtcacttgcaatactgatcaagacttttaaaaccactgttataaaagtgattatttaatgggyaaaaaaaaaaaagtattcataaataccttaaytaaaagaactcttacctgacaagttgctgacaaatctgacatcctggaaggcatctgtaagaagtatttaaatacatgagtaaacatcagcttaaattttaagagatgagtgggagtaggtggagaaacaaacaaacaaacacggatccaatgccactcataccacttcatctgcttacaaaaagattactgcgctacagtaaaaggaaaacaagctgcagaggtttgtccattttaaacatggtaacttctctagtctatgtgact

SEQ ID NO: 3722 - DNA, 599 bp, Chicken  19866894100736_2
  misc_feature (1)..(24): n is any nucleotide
nnnnnnnnnnnnnnnnnnnnnnnnaatatatacaattgctatgcaaaatgttgaagatcactgcaacagaaagtaggaaaccagaagtaaccataagtagccaggacactaaaaactgaaattgattctttgacccaagtaagttgttgaagttatataaacagatgatctacattatacagacagttcttcattcattagttttatttgttttatgcctaacctttcactgccttgtcacttgcaatactgatcaagacttttaaaaccactgttataaaagtgattatttaatgggayaaaaaaaaaaagtattcataaataccttaaytaaaagaactcttacctgacaagttgctgacaaatctgacatcctggaaggcatctgtaagaagtatttaaatacatgagtaaacatcagcttaaattttaagagatgagtgggagtaggtggagaaacaaacaaacaaacacggatccaatgccactcataccacttcatctgcttacaaaaagattactgcgctacagtaaaaggaaaacaagctgcagaggtttgtccattttaaacatggtaacttctctagtctatgtgactg

SEQ ID NO: 3723 - DNA, 599 bp, Chicken  19866894100736_3
  misc_feature (1)..(23): n is any nucleotide
nnnnnnnnnnnnnnnnnnnnnnnaatatatacaattgctatgcaaaatgttgaagatcactgcaacagaaagtaggaaaccagaagtaaccataagtagccaggacactaaaaactgaaattgattctttgacccaagtaagttgttgaagttatataaacagatgatctacattatacagacagttcttcattcattagttttatttgttttatgcctaacctttcactgccttgtcacttgcaatactgatcaagacttttaaaaccactgttataaaagtgattatttaatgggaayaaaaaaaaaagtattcataaataccttaaytaaaagaactcttacctgacaagttgctgacaaatctgacatcctggaaggcatctgtaagaagtatttaaatacatgagtaaacatcagcttaaattttaagagatgagtgggagtaggtggagaaacaaacaaacaaacacggatccaatgccactcataccacttcatctgcttacaaaaagattactgcgctacagtaaaaggaaaacaagctgcagaggtttgtccattttaaacatggtaacttctctagtctatgtgactgc

SEQ ID NO: 3724 - DNA, 599 bp, Chicken  19866894100736_4
  misc_feature (1)..(22): n is any nucleotide
nnnnnnnnnnnnnnnnnnnnnnaatatatacaattgctatgcaaaatgttgaagatcactgcaacagaaagtaggaaaccagaagtaaccataagtagccaggacactaaaaactgaaattgattctttgacccaagtaagttgttgaagttatataaacagatgatctacattatacagacagttcttcattcattagttttatttgttttatgcctaacctttcactgccttgtcacttgcaatactgatcaagacttttaaaaccactgttataaaagtgattatttaatgggaaayaaaaaaaaagtattcataaataccttaaytaaaagaactcttacctgacaagttgctgacaaatctgacatcctggaaggcatctgtaagaagtatttaaatacatgagtaaacatcagcttaaattttaagagatgagtgggagtaggtggagaaacaaacaaacaaacacggatccaatgccactcataccacttcatctgcttacaaaaagattactgcgctacagtaaaaggaaaacaagctgcagaggtttgtccattttaaacatggtaacttctctagtctatgtgactgct

SEQ ID NO: 3725 - DNA, 600 bp, Chicken  19866894100736_5
acaattgctatgcaaaatgttgaagatcactgcaacagaaagtaggaaaccagaagtaaccataagtagccaggacactaaaaactgaaattgattctttgacccaagtaagttgttgaagttatataaacagatgatctacattatacagacagttcttcattcattagttttatttgttttatgcctaacctttcactgccttgtcacttgcaatactgatcaagacttttaaaaccactgttataaaagtgattatttaatgggaaaaaaaaaaaaagtattcataaataccttaaytaaaagaactcttacctgacaagttgctgacaaatctgacatcctggaaggcatctgtaagaagtatttaaatacatgagtaaacatcagcttaaattttaagagatgagtgggagtaggtggagaaacaaacaaacaaacacggatccaatgccactcataccacttcatctgcttacaaaaagattactgcgctacagtaaaaggaaaacaagctgcagaggtttgtccattttaaacatggtaacttctctagtctatgtgactgctgtagacatttcaagcaaaaatgcacaaatg

SEQ ID NO: 3726 - DNA, 600 bp, Chicken  19866894100736_6
aagactgaaatacaggttttctatagctcagaaggaacagtttctcaactgctaaaaagaaaatgctgatgtgaaattaacaagggcaatagttcatgctttgattagacaaaactgcctaaaataccaacttagaatctacttgacttccatctgcaacacagatgttgtgactatgcacatcaagttcacgtattgtaagatttaagaaatcatctttataacaattggtgaaagtaaatgttatgtttctgttgcttgatttcttatctctgaattagtatacagtaaaaaagaacyagagacatgcaagatgtccttcattagtctcagcttccctcctagaaatgcatttccccatttttcaaattcattttttccttacagatcctaaaggatgaaaaacaactagaagcgacatggaatcttttgatacattaactatttttcgtttgtttatattccctgaaattggagctctctccgaagtctggtttggaagtaactactcccaccttcaaccccatcataatcttcatttttctttgttctttctacaaattcttcatcacttcttatttcactgccaggtctgccttt

SEQ ID NO: 3727 - DNA, 599 bp, Chicken  19866894100741_1
  misc_feature (1)..(120): n is any nucleotide
nnnnnnnnnnnnnnnnnnnnnnnnnnnnnnnnnnnnnnnnnnnnnnnnnnnnnnnnnnnnnnnnnnnnnnnnnnnnnnnnnnnnnnnnnnnnnnnnnnnnnnnnnnnnnnnnnnnnnnnntattaacctctctatctccatctcattcaactcgcgtgtaaacacacatacgtgtgccatgttgaagtagtttgcattctgttcctaaaagctgtatttgcaaccagggctgagtgtgaaacacacaagagggtgaacatgtgttcaaggctgatgggtttggtttcgttcggtttttcytcataccctggaaatatcactgtgcagattcaccctaagctgaaaggaactgaataacatgatgggcctctcttgcagtgctgagatcaactagctcctaatgtgttttgaaaattttggatatggattggtatgcagccagtagatctaagcagtcagggtttgaccttcacacctgttttctccttgctgtgtaaagatggttccttgtcatatataggattattggagcagccctgttggaggaggtctgaactgttagaaatgagctttcttgtggaatgatgcacgggaaaaaa

SEQ ID NO: 3728 - DNA, 600 bp, Chicken  19866894100752_1
ttagcatagttttatgatccatctcctggaacaagaagattttgcaagttttcttcattgtaacttgctgaaaaacaggaagaaatgcctcatttacaaaggagctttatggctagcgtgtgttgatgatgactacattacagcattgatctggaagttcttaggtgtttttgtactctttggctgcagtttgtgcaagctgccataactgtgtctgggctgttggacatagaggcctttacagttttaaggtctggctgtatttctcatcagtgacccaaatctacattccacacagasttatttgtaagactatatgctcacttgtatgttcctgaatttattttatttctgaccataactgcagacagaataaaagggagacagataaaactaactctctaaaagtggtttacactgaatgctgatccttcttcatattccttagcctgcctttgctaacatctgcacattgcaaagtaaatcagctggttagtagctcaatggaacaagactttaaatcatagatttaaatcacagaatcattgaatggcttaggttggaagggaccttcaacccaggccattctgtgattctatt

SEQ ID NO: 3729 - DNA, 600 bp, Chicken  19866894100752_2
ttttctcccagttgtcaccagatggatcaccacagttatgtagcaccagtcatctgtcttatatctactttatattatccagtaggaagcaaacagcactaagtaaacaacagcatggttcaataccctgtgctgatttatgaacacgtgcaatatagcaacgaagttagaagcaattgcagtgcaaatgaaaaaaatgtcattttcatgtacaccaggaaacctgaagttgtattcctagtttggagccagtgcactatgaagccctttctcaggagagaatttcagcatctgtgtccyggtgctgtttyttgcaatgattcagactcccarcccrtatgcactgaccagtgtgctacacagttgcccgagaaagcaaaggattgtgtagtcactgtgacctctgtgtttcatacagatgaccttcacatttttctctgtgggcatgtggggtctctgtagggagaaagatacggaggatctcctgcttaagatgtgtttacttacctcctgttaatccctttgggagctacactgtgatatcaaagtaagcatatactgttaatctctaaagcagaacttctaacaggttactggaat

SEQ ID NO: 3730 - DNA, 600 bp, Chicken  19866894100752_3
ttgtcaccagatggatcaccacagttatgtagcaccagtcatctgtcttatatctactttatattatccagtaggaagcaaacagcactaagtaaacaacagcatggttcaataccctgtgctgatttatgaacacgtgcaatatagcaacgaagttagaagcaattgcagtgcaaatgaaaaaaatgtcattttcatgtacaccaggaaacctgaagttgtattcctagtttggagccagtgcactatgaagccctttctcaggagagaatttcagcatctgtgtccyggtgctgtttyttgcaatgattcagactcccarcccrtatgcactgaccagtgtgctacacagttgcccgagaaagcaaaggattgtgtagtcactgtgacctctgtgtttcatacagatgaccttcacatttttctctgtgggcatgtggggtctctgtagggagaaagatacggaggatctcctgcttaagatgtgtttacttacctcctgttaatccctttgggagctacactgtgatatcaaagtaagcatatactgttaatctctaaagcagaacttctaacaggttactggaatttatagctctt

SEQ ID NO: 3731 - DNA, 600 bp, Chicken  19866894100752_4
agttatgtagcaccagtcatctgtcttatatctactttatattatccagtaggaagcaaacagcactaagtaaacaacagcatggttcaataccctgtgctgatttatgaacacgtgcaatatagcaacgaagttagaagcaattgcagtgcaaatgaaaaaaatgtcattttcatgtacaccaggaaacctgaagttgtattcctagtttggagccagtgcactatgaagccctttctcaggagagaatttcagcatctgtgtccyggtgctgtttyttgcaatgattcagactcccarcccrtatgcactgaccagtgtgctacacagttgcccgagaaagcaaaggattgtgtagtcactgtgacctctgtgtttcatacagatgaccttcacatttttctctgtgggcatgtggggtctctgtagggagaaagatacggaggatctcctgcttaagatgtgtttacttacctcctgttaatccctttgggagctacactgtgatatcaaagtaagcatatactgttaatctctaaagcagaacttctaacaggttactggaatttatagctcttaacaatttgcagcagtgtaggt

SEQ ID NO: 3732 - DNA, 600 bp, Chicken  19866894100752_5
atgtagcaccagtcatctgtcttatatctactttatattatccagtaggaagcaaacagcactaagtaaacaacagcatggttcaataccctgtgctgatttatgaacacgtgcaatatagcaacgaagttagaagcaattgcagtgcaaatgaaaaaaatgtcattttcatgtacaccaggaaacctgaagttgtattcctagtttggagccagtgcactatgaagccctttctcaggagagaatttcagcatctgtgtccyggtgctgtttyttgcaatgattcagactcccarcccrtatgcactgaccagtgtgctacacagttgcccgagaaagcaaaggattgtgtagtcactgtgacctctgtgtttcatacagatgaccttcacatttttctctgtgggcatgtggggtctctgtagggagaaagatacggaggatctcctgcttaagatgtgtttacttacctcctgttaatccctttgggagctacactgtgatatcaaagtaagcatatactgttaatctctaaagcagaacttctaacaggttactggaatttatagctcttaacaatttgcagcagtgtaggtgaat

SEQ ID NO: 3733 - DNA, 599 bp, Chicken  19866894100759_1
  misc_feature (1)..(82): n is any nucleotide
nnnnnnnnnnnnnnnnnnnnnnnnnnnnnnnnnnnnnnnnnnnnnnnnnnnnnnnnnnnnnnnnnnnnnnnnnnnnnnnnnngtcgggccttgtgctcctcctgtgagctgaatttatcagatcacacgtgcagccgagcagtgtgcagcaattataacctgctgtctaccgacttgtggaagtgcaggactggaatagagcttagtgttgttttttccccccatagatgccccacatctcttaaaatgctaattgatttcttaattatttttgtttgggtgtgctgtggggaggctttrtctgtcttttgcagttccccttctcccaggtcagtcccagccatgctgaaggcactctgtggcctgaagcaggatggggcaattagcgccttaattctcatcaaacgccatttaaccctttgttctgggcttggtgtaagattccaaagctcccgactccttgaagtttgagctgtgaagggtaaggccatttttgtgagagcttgttcctctccgtgtgttcagttatttatctgcacacctgaacggctgcagttcaacaaaaagagaactgtcatttctytgtgggttgtgataga

SEQ ID NO: 3734 - DNA, 600 bp, Chicken  19866894100759_2
gctgtggggaggctttrtctgtcttttgcagttccccttctcccaggtcagtcccagccatgctgaaggcactctgtggcctgaagcaggatggggcaattagcgccttaattctcatcaaacgccatttaaccctttgttctgggcttggtgtaagattccaaagctcccgactccttgaagtttgagctgtgaagggtaaggccatttttgtgagagcttgttcctctccgtgtgttcagttatttatctgcacacctgaacggctgcagttcaacaaaaagagaactgtcatttctytgtgggttgtgatagaaataattgggattggtacctaatgagcgtccagtattttaccatgcacacccagtttttgtgatgggcttgtaagggacctgaaaacaaggataaaaggttttcctggtggcatctctgaggagatgtaatagccatgcagcctgcagctatgagacacctcacttggtgtctccaaagatgtgttcccgcctccgtggccctgaaattttggctatctggggaggagaaattccctctgttcgtgtattgacagttccttgtgttttccttagatttctgatg

SEQ ID NO: 3735 - DNA, 600 bp, Chicken  19866894100764_1
tgtgggccttctgaacgctttctgttctgcgagctgctgtgtgagatttgcaaggtgaaaggtttggtgggcaggagagccaggaagcagattcaaaccgagaggcaaatgctgatctcttttccacaagcttgatcgaccccagggttgaggcaactccattttgttatgcctttcctctcagctggaagcctggtagtgctcaggaccataattaggaggacttgattaggaggactcttctcacaaattggttgggactacagtgagcttggagatagcaggctgaattacatcccrtttatttattctgctaggcggtcagaaccaggcccacatatttggtttctagggttaatgccacctacattttcttcttttccaccccactatgatgaatctgagacagcacttgaataaaagctggtgctgacacaaaccttttcacctgagcttcctcacagagctgggtgttgtcgcactgtaagggctggcgagmggcagtgctgagggtgcagctccatggtctgggccttcgtccccgcagctcccctcattcccacctctctcaacacacctcacacagctgcttagctgcat

SEQ ID NO: 3736 - DNA, 600 bp, Chicken  19866894100764_2
tgctcaggaccataattaggaggacttgattaggaggactcttctcacaaattggttgggactacagtgagcttggagatagcaggctgaattacatcccrtttatttattctgctaggcggtcagaaccaggcccacatatttggtttctagggttaatgccacctacattttcttcttttccaccccactatgatgaatctgagacagcacttgaataaaagctggtgctgacacaaaccttttcacctgagcttcctcacagagctgggtgttgtcgcactgtaagggctggcgagmggcagtgctgagggtgcagctccatggtctgggccttcgtccccgcagctcccctcattcccacctctctcaacacacctcacacagctgcttagctgcatgaaggccgtggcagatgcgagggatttttattactttatgtactacagggttaattcttagccagatctgttcttgatttaaactgcaaaatgtaagtctctcaaattcctcggtgagtgggaaggagctgagggtactcagcccttacaagaagccctcggtgttctgcaggatgagaccacaaagtgctgtggtgat

SEQ ID NO: 3737 - DNA, 539 bp, Chicken  19866894100764_3
tttaaactgcaaaatgtaagtctctcaaattcctcggtgagtgggaaggagctgagggtactcagcccttacaagaagccctcggtgttctgcaggatgagaccacaaagtgctgtggtgattcgcatcgtgttcatatttagatcagactgagatattttggatcgaagtttatttggggaaaagtgggggagttcctgcttttctggtacaggaaaaattcatttctcagaactccaggctgtgaaggttttgttttagcagcgtgcatgtgatgggtgtacccagtgaggaaagaartggtgtttgtctaccatgcaaggcagtgaatgacaggacaaaggttaggtgtgcgttgaaaggctgggcatcgatttcctaaagaggctttttgaaggcttcagctacctgggagcgtgagatctcagtctgcacagagaggcatgttttgatggaaaaaatctctgaaaaggatgcgtcagtctcactcttgatctcttttgcagagatgacaatactgtcagctttctgatactttg

SEQ ID NO: 3738 - DNA, 600 bp, Chicken  19866894100768_1
cctcatcttctctttaaaagcaggcttttcttttttaacaagatagaatcgaaaatggagtataaagtctgatttgatcggtacccgtttattctaatgtccttttgggagcattaggaatgggcagtgtcagacgatatggcatccctagcttcaaaaatgtgcaggtttttattacacactgtagtctcataagttggtttccgtagatactgatgaataattatgctacccaaccattgttgttattctttgtctagaaaagtggttgagaaaaatgaggagcactgaaaagcaagytgtcaaagtgttmgtgtggaatttatgatcttcaaatgcttacagtgttctctgctcattggttccaactctcttgtagttaagtatcaaggatgaaattgaggatgaggaggcgactatagaggattatgttgacgtaaagatgagtgactgggatgcaacttcagttcataaaatgtactcacttgctgatcagtgtctgaatgagaaaaaaaacaggaggccaaacatgaagatggtatgtagcctgtcaggttgaaggcttatttttagccattggtgtttgtcgctgtggtgtca

SEQ ID NO: 3739 - DNA, 600 bp, Chicken  19866894100768_2
ttaaaagcaggcttttcttttttaacaagatagaatcgaaaatggagtataaagtctgatttgatcggtacccgtttattctaatgtccttttgggagcattaggaatgggcagtgtcagacgatatggcatccctagcttcaaaaatgtgcaggtttttattacacactgtagtctcataagttggtttccgtagatactgatgaataattatgctacccaaccattgttgttattctttgtctagaaaagtggttgagaaaaatgaggagcactgaaaagcaagytgtcaaagtgttmgtgtggaatttatgatcttcaaatgcttacagtgttctctgctcattggttccaactctcttgtagttaagtatcaaggatgaaattgaggatgaggaggcgactatagaggattatgttgacgtaaagatgagtgactgggatgcaacttcagttcataaaatgtactcacttgctgatcagtgtctgaatgagaaaaaaaacaggaggccaaacatgaagatggtatgtagcctgtcaggttgaaggcttatttttagccattggtgtttgtcgctgtggtgtcagttacttgtactt

SEQ ID NO: 3740 - DNA, 599 bp, Chicken  19866894100773_1
  misc_feature (1)..(194): n is any nucleotide
nnnnnnnnnnnnnnnnnnnnnnnnnnnnnnnnnnnnnnnnnnnnnnnnnnnnnnnnnnnnnnnnnnnnnnnnnnnnnnnnnnnnnnnnnnnnnnnnnnnnnnnnnnnnnnnnnnnnnnnnnnnnnnnnnnnnnnnnnnnnnnnnnnnnnnnnnnnnnnnnnnnnnnnnnnnnnnnnnnnnnnnnnnnnnnnnnntaacgtctcagtgtttatagatctacttagatattgctaaagttatatagaatacccagaatatctcaaaggaagatacttatttatcaaacctagtaaaaaccamatttttcctgtaatgatwtgggaaggaaccaaatttgcaatatatagaacacatacaactgtttcctaaatgtcacattcaaatgttcaagtaaatatccatatcctattacattttaaaatgtgaatgaatccttcagcatagtgtctaatttatttgcatttctttttgttgctatttgtttgaaaatacttgttcgttcctagtttagtataaacaccaggggtccattatacctgtggcaaattttgctgctgtacaaaatgtacaaataacagttagccctacaacaaagaaac

SEQ ID NO: 3741 - DNA, 599 bp, Chicken  19866894100773_2
  misc_feature (1)..(176): n is any nucleotide
nnnnnnnnnnnnnnnnnnnnnnnnnnnnnnnnnnnnnnnnnnnnnnnnnnnnnnnnnnnnnnnnnnnnnnnnnnnnnnnnnnnnnnnnnnnnnnnnnnnnnnnnnnnnnnnnnnnnnnnnnnnnnnnnnnnnnnnnnnnnnnnnnnnnnnnnnnnnnnnnnnnnnnnnnnnnnnnntaacgtctcagtgtttatagatctacttagatattgctaaagttatatagaatacccagaatatctcaaaggaagatacttatttatcaaacctagtaaaaaccamatttttcctgtaatgatwtgggaaggaaccaaatttgcaatatatagaacacatacaactgtttcctaaatgtcacattcaaatgttcaagtaaatatccatatcctattacattttaaaatgtgaatgaatccttcagcatagtgtctaatttatttgcatttctttttgttgctatttgtttgaaaatacttgttcgttcctagtttagtataaacaccaggggtccattatacctgtggcaaattttgctgctgtacaaaatgtacaaataacagttagccctacaacaaagaaactgatttatatctcctaag

SEQ ID NO: 3742 - DNA, 600 bp, Chicken  19866894100780_1
aaagaaaacaattacttgtttggtatcaaaatatttgagacattggtgagatgcaggtgttccagggcacactgaattattctgtgtaaaaatattgatttacaaacatgatacatatataattttcttcataaatatgatctcttagaatattgatatatatatatatatattgtttgtttgtttgtttcctatggtaacattttctaagaaaacatctatgtgtttaggaaatatttaatttatgttactgtaggatagatttattaaataccacatcaccattagagcaaaaaatartatatatatattattaaatgaaataaaccctgtctctagaacaggaagagctgcagagagatacaataagcagttttgtcttaaaagaccgaacaataagcatatagcacagtatttcaagacaaagtaaaaygaatgatttttttttccattgtttgagttttaaaaatagatgcaaattcagagttaatcaaatctagaaacaaattaaactgctctgtatcaaaataaatgtagtttgacaatgttaaacagatagcccgggatctgctgggaatacataccttggtttcatttgat

SEQ ID NO: 3743 - DNA, 600 bp, Chicken  19866894100780_2
aatatgatctcttagaatattgatatatatatatatatattgtttgtttgtttgtttcctatggtaacattttctaagaaaacatctatgtgtttaggaaatatttaatttatgttactgtaggatagatttattaaataccacatcaccattagagcaaaaaatartatatatatattattaaatgaaataaaccctgtctctagaacaggaagagctgcagagagatacaataagcagttttgtcttaaaagaccgaacaataagcatatagcacagtatttcaagacaaagtaaaaygaatgatttttttttccattgtttgagttttaaaaatagatgcaaattcagagttaatcaaatctagaaacaaattaaactgctctgtatcaaaataaatgtagtttgacaatgttaaacagatagcccgggatctgctgggaatacataccttggtttcatttgattgacctcatatcatcactatggcatgtaactgcacctgacaggccattgattcagcagtatgtaaagtggatccttaaggaaatagcttggcagagagcagcttcccatgtttttcaaattcccacagcaaaa

SEQ ID NO: 3744 - DNA, 599 bp, Chicken  19866894100784_1
  misc_feature (1)..(193): n is any nucleotide
nnnnnnnnnnnnnnnnnnnnnnnnnnnnnnnnnnnnnnnnnnnnnnnnnnnnnnnnnnnnnnnnnnnnnnnnnnnnnnnnnnnnnnnnnnnnnnnnnnnnnnnnnnnnnnnnnnnnnnnnnnnnnnnnnnnnnnnnnnnnnnnnnnnnnnnnnnnnnnnnnnnnnnnnnnnnnnnnnnnnnnnnnnnnnnnnntgtgtgctgcctgaaatgacatgctacttaggatgccttttgttttatgctaaaaatacagcactccagcactgctgagtacctgcacagagcatggggatgctgtrgttggagaggatgtgtgacattgccatggggcattgccatggggcacagcatcaccatggagcattgccatggggcacagcactgcagggaacctggggccgtggatggtaggctgtgcagagagagatccttgtcttgctgtggttgtgtacagggagatggtgacagtgttggggctgaggggagcagagctggcaccaggctcatttctggctttgctcctgatgagagaacagattggaacataaaatacaaagctcactggaataaatgcattcttttgggaatgtctgcaaat

SEQ ID NO: 3745 - DNA, 600 bp, Chicken  19866894100784_2
agtgttggggctgaggggagcagagctggcaccaggctcatttctggctttgctcctgatgagagaacagattggaacataaaatacaaagctcactggaataaatgcattcttttgggaatgtctgcaaatattaggatccaggtgtgttcccatgtgcacatttcatttgctccatctcacttcgtttccctcacatctaattgtggcatcagccaggcatcaaagcagcacaaagcaagcagtgcacggctgcaggaagcgtgctgccatgtgccatgagcccacgtgcagccgtgmcatggaaccatcggatggggcttccctgtgtcaccacttgtgacagctgcatcaccatggggcaggatggggtctgcctggctrggtgcgttgggttctgtctaggagtgcagcatccttcctccttgcctggggggtggtgaggctrcagggctgcaatcctctgtactggccctgggaacacagtgcaggcacaggtgggtgctgcagtgggtgtggggctcccacctccctgcccccccacagctctgtgccatgggacagagccacgtgccagacttcccttgctctgtgagggaa

SEQ ID NO: 3746 - DNA, 600 bp, Chicken  19866894100784_3
tacaaagctcactggaataaatgcattcttttgggaatgtctgcaaatattaggatccaggtgtgttcccatgtgcacatttcatttgctccatctcacttcgtttccctcacatctaattgtggcatcagccaggcatcaaagcagcacaaagcaagcagtgcacggctgcaggaagcgtgctgccatgtgccatgagcccacgtgcagccgtgmcatggaaccatcggatggggcttccctgtgtcaccacttgtgacagctgcatcaccatggggcaggatggggtctgcctggctrggtgcgttgggttctgtctaggagtgcagcatccttcctccttgcctggggggtggtgaggctrcagggctgcaatcctctgtactggccctgggaacacagtgcaggcacaggtgggtgctgcagtgggtgtggggctcccacctccctgcccccccacagctctgtgccatgggacagagccacgtgccagacttcccttgctctgtgagggaaggcatgacaaatagggtgccagaaaatcccaccagccagatcagtgtccattgcaaacgcaattggtgcatgcagtgaggataa

SEQ ID NO: 3747 - DNA, 600 bp, Chicken  19866894100784_4
gttcccatgtgcacatttcatttgctccatctcacttcgtttccctcacatctaattgtggcatcagccaggcatcaaagcagcacaaagcaagcagtgcacggctgcaggaagcgtgctgccatgtgccatgagcccacgtgcagccgtgmcatggaaccatcggatggggcttccctgtgtcaccacttgtgacagctgcatcaccatggggcaggatggggtctgcctggctrggtgcgttgggttctgtctaggagtgcagcatccttcctccttgcctggggggtggtgaggctrcagggctgcaatcctctgtactggccctgggaacacagtgcaggcacaggtgggtgctgcagtgggtgtggggctcccacctccctgcccccccacagctctgtgccatgggacagagccacgtgccagacttcccttgctctgtgagggaaggcatgacaaatagggtgccagaaaatcccaccagccagatcagtgtccattgcaaacgcaattggtgcatgcagtgaggataaacccccattgttgtcccattgttctctctgcacagtgctgcagggcaccctttcctcacatcac

SEQ ID NO: 3748 - DNA, 600 bp, Chicken  19866894100786_1
cagtgtggctgctgcaggccagtcaccgtacttttccttgcaccagacccagtgatacaaaacacttgattattaaggaaaacatatttcaagcctgttgttgatccaaagcctgcagtcttacaagcgctatgtcatttatcttccttctaagtgggaaaattcctggatgctattttttctccacagaaactacagaattgaagtatatgaaattaataaaaagcagtagcactgagtgaacaagaacaaggcacatactcagctctttcttcaggcatccagtctaatgggaaataygccacgtgccaaagcttgaacttcttgtaaagcagaccaatagttttgctcaaggagctgttaactatcagcacaaagagaaaggtgctgagtacctgggccagagattgtttgattgttgtgtgggaacaacctctgtgatggcatccgcttctgtgcaaatgagggcagagcgtggccccatgtccccagttccctgagttgtctatgggcaggaggaacaacacttagggatgggcacttgggcaatagctaatggcaggaaaatccagttctctgacattaaggcattgtatacac

SEQ ID NO: 3749 - DNA, 600 bp, Chicken  19866894100789_1
tttccttatctaaaattggcacttttggattgaggctatatgataaacatgtttgtctgctgaataaattaccgtaatctgtaatgaaacaatataggaaatggcatacatgctttgatgacttcataggaatattcttagtatgaactgatcaagagaaaaagggaaaatttccctttttactcacctgaattacacagcctgaccaaaaaagaagaaattcaacagaaggtatttctgtaattttctgatcactcatgactttctaagtgcttcttgttttctgcctagcgattatcytactcaaagattcttaaccttattcctgtccttactcccactaatttttaggccagttgttctgttctgaacccatcctacctttcacccaagcaaacaggcttcagtttcctgcaaccttatctagcaataatgcttccagaaagtttccttcctygaacacttctacatcaacttatcaacagtcttctttctccacagtgaacagccaaaccacagttagtaccgcaatggataaaaggtgtgctttttgtgattttcacagcatttgagtgaggctggtcttcattcacaaaaaga

SEQ ID NO: 3750 - DNA, 524 bp, Chicken  19866894100789_2
gaaaaagggaaaatttccctttttactcacctgaattacacagcctgaccaaaaaagaagaaattcaacagaaggtatttctgtaattttctgatcactcatgactttctaagtgcttcttgttttctgcctagcgattatcytactcaaagattcttaaccttattcctgtccttactcccactaatttttaggccagttgttctgttctgaacccatcctacctttcacccaagcaaacaggcttcagtttcctgcaaccttatctagcaataatgcttccagaaagtttccttcctygaacacttctacatcaacttatcaacagtcttctttctccacagtgaacagccaaaccacagttagtaccgcaatggataaaaggtgtgctttttgtgattttcacagcatttgagtgaggctggtcttcattcacaaaaagatatatcaacacatttgagggagatgtttgattgacacagaacactcaaaattctaattaatcttcttgggcaaatgacaaa

SEQ ID NO: 3751 - DNA, 599 bp, Chicken  19866894100797_1
  misc_feature (1)..(154): n is any nucleotide
nnnnnnnnnnnnnnnnnnnnnnnnnnnnnnnnnnnnnnnnnnnnnnnnnnnnnnnnnnnnnnnnnnnnnnnnnnnnnnnnnnnnnnnnnnnnnnnnnnnnnnnnnnnnnnnnnnnnnnnnnnnnnnnnnnnnnnnnnnnnnnnnnnnnnnnnnntttttttttcctggagagagcctctgaagcatttgcaggcaatttaagagccgtcatggactccgtacgcatcagaaagatggaagaattctcatgttcagactgataacaaaagcaaaagattttactgggcctccttatcccaygcttgcagaaccaaagagtgctgtccctcttatggttaagaaagcctgatgccaattctctatgcagaaattcagcatgaggctttgttttctgttctttggtcttccagagagaaagaatgtgtgtattttgttttcaaattacaacagctggaattggaccactactcttggctctatgcatcttagaacgatctttgcatyacaatggtacatgctgctgttcttactgtaaacgggaaaatgaggagagtaagcctaatgatcttgcaaagctttgatccaaacagaaggacaac

SEQ ID NO: 3752 - DNA, 600 bp, Chicken  19866894100797_2
ccgtcatggactccgtacgcatcagaaagatggaagaattctcatgttcagactgataacaaaagcaaaagattttactgggcctccttatcccaygcttgcagaaccaaagagtgctgtccctcttatggttaagaaagcctgatgccaattctctatgcagaaattcagcatgaggctttgttttctgttctttggtcttccagagagaaagaatgtgtgtattttgttttcaaattacaacagctggaattggaccactactcttggctctatgcatcttagaacgatctttgcatyacaatggtacatgctgctgttcttactgtaaacgggaaaatgaggagagtaagcctaatgatcttgcaaagctttgatccaaacagaaggacaactgtcagggtcactttgttgttgtgtctggcacaatatcagttttgcaggcctccagacacttctgcaatgccaataataattggataaaataaccatatgcataatttgtgagtgttaccctttagctcacagaaaacaatgcaagctctcctggggcttctaaatcagatttctgactgggaaacaaagttattttgcatttat

SEQ ID NO: 3753 - DNA, 600 bp, Chicken  19866894100802_1
aggtagacaggcttttaatggcatgatcaagaatccccctgttaataacaaatctaatgacaactgtgtctggtatgaacaagaaatggcatcatcgtatattctttttaagacgtgatctgaaggtatgagcaatgccaggtggatctgtacacagacggggcctctgtgatgcatgccagattcgatggccaagaaatttgccatgcagttgaaccggattgtggttcctggtcggagttgtacattctgtttgcagtgtgtaaacattctcgagctgctttcctaaagaatgcaaargagataatgtagagagattcagccttaggacccagtcgcgttcccagacagtaccaaggagcaggagtcctgtctccgggccagaagactttggcggactgtgtcggaggcraaggaaaaccacgtcggtgcgccagctgtgatgtctgagtgtagagtcccatgctaatgtgttaaaaggagatttacaaaattatctgcgttttcagctccaattcctgtccggagaagcagcagcccaggttgcacaggacagcggtgtccctgacacctgttctcacgcatgggctggtttaaaat

SEQ ID NO: 3754 - DNA, 600 bp, Chicken  19866894100802_2
acgtgatctgaaggtatgagcaatgccaggtggatctgtacacagacggggcctctgtgatgcatgccagattcgatggccaagaaatttgccatgcagttgaaccggattgtggttcctggtcggagttgtacattctgtttgcagtgtgtaaacattctcgagctgctttcctaaagaatgcaaargagataatgtagagagattcagccttaggacccagtcgcgttcccagacagtaccaaggagcaggagtcctgtctccgggccagaagactttggcggactgtgtcggaggcraaggaaaaccacgtcggtgcgccagctgtgatgtctgagtgtagagtcccatgctaatgtgttaaaaggagatttacaaaattatctgcgttttcagctccaattcctgtccggagaagcagcagcccaggttgcacaggacagcggtgtccctgacacctgttctcacgcatgggctggtttaaaatgcggactccttgcctaaccccatgtcctgcagagctcttcacaccacctgcggatgccggtcttgggagtctctgccttggcagccatgtccccaagtgccaccagctcctg

SEQ ID NO: 3755 - DNA, 582 bp, Chicken  19866894100805_1
gaaataaatcttttctccccccgtgcaaagtaacaattgtcagctcacacgaaacagcatatcaagcttaaaagagttttcatttatttaaaaccaaagtcattccagtgagggcaggaactccaggatacctgcgcatttggtctgggacaaatgtgacaattccagacctctacatataagaagagagaagacaggaacagccttgttatactcagcttctcctctgccactaagattcaaaaggaagccaaaaaagcaacttggcacctcaagatttgtttgccaccaggttaacayrtagcaggcatctttaaatcttagatataggttgactacattccattaaagaaagtggataaaattaaagtaggtcttatctaagcaaagtagaaaaatactccagtacttgaaggtctcacctcacagccagaaggtacaaaactgatgtttcatacataaaataatcagagtagatgaaggatatgccagcagtctgccccctgccctcatcctgtttccctttgttagaaggaacaagcagcagcagcaaattaactgctcagtattcaagcacttttt

SEQ ID NO: 3756 - DNA, 581 bp, Chicken  19866894100805_2
aaataaatcttttctccccccgtgcaaagtaacaattgtcagctcacacgaaacagcatatcaagcttaaaagagttttcatttatttaaaaccaaagtcattccagtgagggcaggaactccaggatacctgcgcatttggtctgggacaaatgtgacaattccagacctctacatataagaagagagaagacaggaacagccttgttatactcagcttctcctctgccactaagattcaaaaggaagccaaaaaagcaacttggcacctcaagatttgtttgccaccaggttaacayrtagcaggcatctttaaatcttagatataggttgactacattccattaaagaaagtggataaaattaaagtaggtcttatctaagcaaagtagaaaaatactccagtacttgaaggtctcacctcacagccagaaggtacaaaactgatgtttcatacataaaataatcagagtagatgaaggatatgccagcagtctgccccctgccctcatcctgtttccctttgttagaaggaacaagcagcagcagcaaattaactgctcagtattcaagcacttttt

SEQ ID NO: 3757 - DNA, 600 bp, Chicken  19866894100814_1
gttattcagtcccactggagccctctccttcaaattctattttaaagcttctcccacatttcacactccagcttgcagtcatctgcagccatgctggaacaccctttcctttttagcagatggcagtgcagtactaccaactttcaagatgggccagttcttttttccatcatatgcattttactatgaagcaatagaaagagaggaaaacaaaacaaaacaaaacaaataaaaaagcaacacttggcagatggtctgtggcaggaaactcctgtggagctcttacttacccgagcacaytgatacagatagctaggaagtaagcaaatgaagaagtccctcatgccagcttttactgaaatgtttgatataaccataaaaataaactactgaattagataaaatcccaaccctttattctttaacaactcttattctctcatgctactggtagagtgactttccagatgtgtggagagagcatgttaccctcaacactgtatttgaattgaaccatcaaaccagcaaaccatcagactttccagtttctgagacagagctgtagcagcacaggtattcctgtcataaagacattagtaa

SEQ ID NO: 3758 - DNA, 600 bp, Chicken  19866894100814_2
taaccataaaaataaactactgaattagataaaatcccaaccctttattctttaacaactcttattctctcatgctactggtagagtgactttccagatgtgtggagagagcatgttaccctcaacactgtatttgaattgaaccatcaaaccagcaaaccatcagactttccagtttctgagacagagctgtagcagcacaggtattcctgtcataaagacattagtaaaattatttcactgaatcctggttttcaccctgactggtgaacaaagcagtcagtgaagttgtacgatagygtgtgtagttctgtgacaaatgtaatttaagtatctcttgattaagcttgccaaaatggggtattctggtattgtgagaatgtcatatgtaccaattgtgatgcaatttctgacaatgtggtgcttagtttagctacatgccaggttaaaccacaacagtacttttggtgccaatatgggtctcaaagtgttgagataacaggaaacctgacctaaacatgttgtggtagtttgataatttctaatcatgatgttattttttaaaaactattttctgagttcttacagcatcttttcttg

SEQ ID NO: 3759 - DNA, 600 bp, Chicken  19866894100822_1
ccacagagataatgaatggtgctggtatttttttttctgttaaaatatgatttgcctactgaccacaggtgttccagccatgcattgcctcaatagcaatatctctatacagtgcttataaaagaagaatgaaaaaaagctgcctttccacaaaaatatttaagcaagaaacaaacattgtggaattagccatacatgcactgtgatcatttaaagaggtgatacatgctaaccaaagaagcaagagctagcatttctgtcccaaaatgctgctcctgggggaaaaaaaaagaaaaaaayaaaaaggaaaaaaaaaagatttaaagtaagtaatttaagatatataaattgcagaaaaaaaaataataagtactggataaggtatggaaagtgggacgaaaccgtctctgaacactgtaccaccacagttamagagtctgaaatgtggaaatgaaaaaagagctctttcagaagcaattcaaaaagaatagctacagatactgctcaagaagtggagagatttaaaagaattaagtcaacatgaataatgttgtactagaaaaggtgaggacaagaaatgctccacctccgcacataaat

SEQ ID NO: 3760 - DNA, 600 bp, Chicken  19866894100822_2
agataatgaatggtgctggtatttttttttctgttaaaatatgatttgcctactgaccacaggtgttccagccatgcattgcctcaatagcaatatctctatacagtgcttataaaagaagaatgaaaaaaagctgcctttccacaaaaatatttaagcaagaaacaaacattgtggaattagccatacatgcactgtgatcatttaaagaggtgatacatgctaaccaaagaagcaagagctagcatttctgtcccaaaatgctgctcctgggggaaaaaaaaagaaaaaaagaaaaaygaaaaaaaaaagatttaaagtaagtaatttaagatatataaattgcagaaaaaaaaataataagtactggataaggtatggaaagtgggacgaaaccgtctctgaacactgtaccaccacagttamagagtctgaaatgtggaaatgaaaaaagagctctttcagaagcaattcaaaaagaatagctacagatactgctcaagaagtggagagatttaaaagaattaagtcaacatgaataatgttgtactagaaaaggtgaggacaagaaatgctccacctccgcacataaatctgaaa

SEQ ID NO: 3761 - DNA, 600 bp, Chicken  19866894100822_3
gataatgaatggtgctggtatttttttttctgttaaaatatgatttgcctactgaccacaggtgttccagccatgcattgcctcaatagcaatatctctatacagtgcttataaaagaagaatgaaaaaaagctgcctttccacaaaaatatttaagcaagaaacaaacattgtggaattagccatacatgcactgtgatcatttaaagaggtgatacatgctaaccaaagaagcaagagctagcatttctgtcccaaaatgctgctcctgggggaaaaaaaaagaaaaaaagaaaaagyaaaaaaaaaagatttaaagtaagtaatttaagatatataaattgcagaaaaaaaaataataagtactggataaggtatggaaagtgggacgaaaccgtctctgaacactgtaccaccacagttamagagtctgaaatgtggaaatgaaaaaagagctctttcagaagcaattcaaaaagaatagctacagatactgctcaagaagtggagagatttaaaagaattaagtcaacatgaataatgttgtactagaaaaggtgaggacaagaaatgctccacctccgcacataaatctgaaaa

SEQ ID NO: 3762 - DNA, 600 bp, Chicken  19866894100822_4
aaaaaagctgcctttccacaaaaatatttaagcaagaaacaaacattgtggaattagccatacatgcactgtgatcatttaaagaggtgatacatgctaaccaaagaagcaagagctagcatttctgtcccaaaatgctgctcctgggggaaaaaaaaagaaaaaaagaaaaaggaaaaaaaaaagatttaaagtaagtaatttaagatatataaattgcagaaaaaaaaataataagtactggataaggtatggaaagtgggacgaaaccgtctctgaacactgtaccaccacagttamagagtctgaaatgtggaaatgaaaaaagagctctttcagaagcaattcaaaaagaatagctacagatactgctcaagaagtggagagatttaaaagaattaagtcaacatgaataatgttgtactagaaaaggtgaggacaagaaatgctccacctccgcacataaatctgaaaaccacatggcaatgcttgtcctagctctgacctacaccagactgtctggccataaaagaacaagtctattgacagcttcagaagacagtatggatataccaacatcagagagaaacgagaacatta

SEQ ID NO: 3763 - DNA, 600 bp, Chicken  19866894100823_1
cctgtttgtagacaggagtctacatggtgagaaagaatcttctaagcttgattgagatgctgtacagaggacaatatatactcctctataagataagatttcatattgttgcaaatatgtattagtttcatcacttaagaaatggagaacagtggtagcatctgcacctcttgccctaagcatagttcaaaaaggaaaataatattctttttaaaaacacaactgaagaactcacaaatgatgaaataacaaggttttggacttcgtataacctgaacatggtctcctttccagagaccrtaatcyaatttcacccacagcaagatctgaaataatttcattactagacgggtaaaatatactgcacatctgtaaattaatcatgggagatagagggaatgttttcatgtggctcacacaggaatatggggttatgataaatgtaatcacttcccactctgttgaatagtgctctccagtttaacatatgtggatacacagcacttacagcccctacccgaacagctcacaatacagattagtaatttcttgggtaacagctcagtgatgttacaaagaacggtgtctgtcatactatca

SEQ ID NO: 3764 - DNA, 600 bp, Chicken  19866894100823_2
tgtagacaggagtctacatggtgagaaagaatcttctaagcttgattgagatgctgtacagaggacaatatatactcctctataagataagatttcatattgttgcaaatatgtattagtttcatcacttaagaaatggagaacagtggtagcatctgcacctcttgccctaagcatagttcaaaaaggaaaataatattctttttaaaaacacaactgaagaactcacaaatgatgaaataacaaggttttggacttcgtataacctgaacatggtctcctttccagagaccrtaatcyaatttcacccacagcaagatctgaaataatttcattactagacgggtaaaatatactgcacatctgtaaattaatcatgggagatagagggaatgttttcatgtggctcacacaggaatatggggttatgataaatgtaatcacttcccactctgttgaatagtgctctccagtttaacatatgtggatacacagcacttacagcccctacccgaacagctcacaatacagattagtaatttcttgggtaacagctcagtgatgttacaaagaacggtgtctgtcatactatcaaattcc

SEQ ID NO: 3765 - DNA, 600 bp, Chicken  19866894100826_1
gacctgcaggactggccccgggccaacatcaccctgcaggtgagggcacgaggcaacgcagggtgacggggggtggctgccgggtatggggtcccacctctcctacccccaggtctccacggctgaggacaacggcatcctgctgtacaacggtgacagcgatcacatggctgtggagctgtaccagggccatgtcagggtcagctatgaccccggcacccaccccagctcagccatatacaggtaccgtgggcctccaccccctgtgtcctgaccgtattgcgtgggcacagtgatgckatgggggacggagctcacccggtgacacagccctccctgccagtgccgagaccatcaacgacgggcagttccacactgtggagctggtgaccttcgaccaaatggtgaacctctccatcgatggtggcagccccatgaccatggacaactcgggcaagcactacacgctgaacagcgaggccccactctatgtcgggggtacggggctgatggggcactgggggcacggggtctgctgggcgtgtgctgacagccctgctctccccagggatgcctgtggatgtcaactcagccgccttc

SEQ ID NO: 3766 - DNA, 600 bp, Chicken  19866894100826_2
cgggcaagcactacacgctgaacagcgaggccccactctatgtcgggggtacggggctgatggggcactgggggcacggggtctgctgggcgtgtgctgacagccctgctctccccagggatgcctgtggatgtcaactcagccgccttccgcctctggcagctcctcaatggcaccagcttccacgggtgcatccgcaacctctacatcaacaatgagctgcaggacttcaccaagacacggatgacacccggcgtggtgccgggctgtgagccctgccgcaaactgtactgcctgcayggcatctgccagcccaccggcgcccagggacccgtctgccattgcgagcctggctgggatgggccccactgtgaccaaccccgtggtggcccctgccaggggcacaagtgagtgtcccctccctgcctgctgtcctgcagcaagggctgcaccccatagcagtggctctgyccygtttggtgccccatagtggctcacctgccccattcacagctgaccactgagggttgtggttagtggatgtgctaatggttgaacttggaggtcttttgcaaccgtagtggttctatgaatctgtgg

SEQ ID NO: 3767 - DNA, 600 bp, Chicken  19866894100826_3
ggcaccagcttccacgggtgcatccgcaacctctacatcaacaatgagctgcaggacttcaccaagacacggatgacacccggcgtggtgccgggctgtgagccctgccgcaaactgtactgcctgcayggcatctgccagcccaccggcgcccagggacccgtctgccattgcgagcctggctgggatgggccccactgtgaccaaccccgtggtggcccctgccaggggcacaagtgagtgtcccctccctgcctgctgtcctgcagcaagggctgcaccccatagcagtggctctgyccygtttggtgccccatagtggctcacctgccccattcacagctgaccactgagggttgtggttagtggatgtgctaatggttgaacttggaggtcttttgcaaccgtagtggttctatgaatctgtggctcattgctacgctgtgccatactggtgccacactgtgccagagccacaccactgctgtggctgcagtgaccgtgcctgacccatgctgagctgtgcctacccrtgtcatggtgtgctgtgccacacctgtgtcgtgctctacctatgtcatgccttagccacgctgtgcc

SEQ ID NO: 3768 - DNA, 600 bp, Chicken  19866894100826_4
accagcttccacgggtgcatccgcaacctctacatcaacaatgagctgcaggacttcaccaagacacggatgacacccggcgtggtgccgggctgtgagccctgccgcaaactgtactgcctgcayggcatctgccagcccaccggcgcccagggacccgtctgccattgcgagcctggctgggatgggccccactgtgaccaaccccgtggtggcccctgccaggggcacaagtgagtgtcccctccctgcctgctgtcctgcagcaagggctgcaccccatagcagtggctctgyccygtttggtgccccatagtggctcacctgccccattcacagctgaccactgagggttgtggttagtggatgtgctaatggttgaacttggaggtcttttgcaaccgtagtggttctatgaatctgtggctcattgctacgctgtgccatactggtgccacactgtgccagagccacaccactgctgtggctgcagtgaccgtgcctgacccatgctgagctgtgcctacccrtgtcatggtgtgctgtgccacacctgtgtcgtgctctacctatgtcatgccttagccacgctgtgcctga

SEQ ID NO: 3769 - DNA, 382 bp, Chicken  19866894100826_5
caagtgagtgtcccctccctgcctgctgtcctgcagcaagggctgcaccccatagcagtggctctgyccygtttggtgccccatagtggctcacctgccccattcacagctgaccactgagggttgtggttagtggatgtgctaatggttgaacttggaggtcttttgcaaccgtagtggttctatgaatctgtggctcattgctacgctgtgccatactggtgccacactgtgccagagccacaccactgctgtggctgcagtgaccgtgcctgacccatgctgagctgtgcctacccrtgtcatggtgtgctgtgccacacctgtgtcgtgctctacctatgtcatgccttagccacgctgtgcctgacccacaccgtgt

SEQ ID NO: 3770 - DNA, 600 bp, Chicken  19866894100831_1
cggggctgaactgtgcaccctctaaaacactgtgcaaattaatagcagccatatgatgatctgatatgacagcactgaaaaactgctgctgtcccccataagggaattctatacaagagacactcccggaaggtacaccaaaacttccagctactcacgtggattccatttctcgtagcttagctccagctgtgagctgcatgttctttcgttgccagttcagatcctgaatgcttttcctgagggggaaaaaaaaaacccaacacaaaaagagacccgtgttgtttctttccttcttcrtctcatttattcaagaatatttaaacctgctgcttgaaattcactgccctggaagtacccaccagggtactggtgcagccagcatctaaccaccacaaagcaacaatgcaacactcagaatcctgacaggagttaaaacacatcatttcagtgtcccacctccatccctcagtaatccacctctgcaaacttgctaaagcattcacttcaaaatgaaacctaacatcagccaagctgggccaactgcatgctaaataaaatggtatcagcagtgaaaaggaaatgtggctgcatttgaaa

SEQ ID NO: 3771 - DNA, 600 bp, Chicken  19866894100841_1
tcttatctaaattatgatccttccacatagcttcaggctaatcacagcagctctgtactccagaaggaagaggaaccttccattttggcccaaacatgagctaccttgctagaagacatctcagtaaaatatatgctgaaatgtctgtttttgggaagcagatctacagttctcctcccctcttctcaatgcatcttcactatatccatggttatattaaacatactaatagttcttccttgtctgtggagacatttcacagagatctggaagtgttgatgctgacgcttcagtggtttragcaccrttatttctaacctctactggaaagcagatccactcctagtgtggcaaataaatatcaaaagatcattttttgtgctcttagaatagaatggtttgtgcctctctcccattgcaccacacagcagttttctgtcttcaacagcctctacccttaatcatcgttgcatcctgtttttagattagttccttggttttacttacttcatatcttcatataaagacaaacgtcttctatttccaggatacttggtaggtagaaataactagtctgcaagtctaaatgcttttgacgtc

SEQ ID NO: 3772 - DNA, 600 bp, Chicken  19866894100841_2
taaattatgatccttccacatagcttcaggctaatcacagcagctctgtactccagaaggaagaggaaccttccattttggcccaaacatgagctaccttgctagaagacatctcagtaaaatatatgctgaaatgtctgtttttgggaagcagatctacagttctcctcccctcttctcaatgcatcttcactatatccatggttatattaaacatactaatagttcttccttgtctgtggagacatttcacagagatctggaagtgttgatgctgacgcttcagtggtttragcaccrttatttctaacctctactggaaagcagatccactcctagtgtggcaaataaatatcaaaagatcattttttgtgctcttagaatagaatggtttgtgcctctctcccattgcaccacacagcagttttctgtcttcaacagcctctacccttaatcatcgttgcatcctgtttttagattagttccttggttttacttacttcatatcttcatataaagacaaacgtcttctatttccaggatacttggtaggtagaaataactagtctgcaagtctaaatgcttttgacgtccattgga

SEQ ID NO: 3773 - DNA, 600 bp, Chicken  19866894100842_1
cagaggcaaattaaagaacttgaaaatggaggaacagttgtgaatgaaacaagagcctttgattctaagctcgggtgagttcttattttggagaaatatcagtaataacagctttagagtgctagggatgcctagtgacctgattgggggagataacttgatattgctccacttctgtcttctgaagataatgttcacgagcatgctctcttcaatgggagaaacttattcttgaagttgaggcttttttacaacagtttgtgtgctacctcaagcagcgactgggtgaaaatgactgcmcttttacatacgcgctttcctgatcttcatgagcaaggcttatgttttatctttttgctgggaatccagtggtgtaccacttctcacatctcatctcttttgttttattttaggtgcaccgtaccaatgagagacaaagagggaaagcaagattatcggtatttttttttttaaataaagttactttttcaggaactgaaaacttattaaatatattaagtgtagtcagtgtaacaagcttgtaaagttaatcagtataatgcgtgtggagattgaccttcccgtggaaagagacctatc

SEQ ID NO: 3774 - DNA, 600 bp, Chicken  19866894100842_2
tctcatctcttttgttttattttaggtgcaccgtaccaatgagagacaaagagggaaagcaagattatcggtatttttttttttaaataaagttactttttcaggaactgaaaacttattaaatatattaagtgtagtcagtgtaacaagcttgtaaagttaatcagtataatgcgtgtggagattgaccttcccgtggaaagagacctatcagaatcagtacgagtctgagaagttcacatctagattccatagcctctattggatttagcagtgatgagacacaaaaacctttcctawgaactaatstggagtactttagctcaaagtggctaatttgaaggtttgctttgtggccagtgcacatatattgttaagaatacctaacgttaaatgtaagaatattctgagatgatcactgctcctgctttaaatatgtactgagagaaatgattctcatgtagcaggccctgcctcttcacgcttaaattctgtgatcatagacactgtttgaaaatcctaactactgttgaggagtgtcagcattcatagatagatttctaccttaagatctacgaagacctactaaagttgtcactc

SEQ ID NO: 3775 - DNA, 600 bp, Chicken  19866894100842_3
ttttgttttattttaggtgcaccgtaccaatgagagacaaagagggaaagcaagattatcggtatttttttttttaaataaagttactttttcaggaactgaaaacttattaaatatattaagtgtagtcagtgtaacaagcttgtaaagttaatcagtataatgcgtgtggagattgaccttcccgtggaaagagacctatcagaatcagtacgagtctgagaagttcacatctagattccatagcctctattggatttagcagtgatgagacacaaaaacctttcctawgaactaatstggagtactttagctcaaagtggctaatttgaaggtttgctttgtggccagtgcacatatattgttaagaatacctaacgttaaatgtaagaatattctgagatgatcactgctcctgctttaaatatgtactgagagaaatgattctcatgtagcaggccctgcctcttcacgcttaaattctgtgatcatagacactgtttgaaaatcctaactactgttgaggagtgtcagcattcatagatagatttctaccttaagatctacgaagacctactaaagttgtcactcggctaaata

SEQ ID NO: 3776 - DNA, 600 bp, Chicken  19866894100851_1
cctggacctttggccacatctcacagcttcacccatgttcctggatactcactttgtctcccttggggcccaccagtccacgtctcccagggcatccctacaaggaaagaagagctgtgtcacccggccctgctcccgtccccagcagaaagtgaaccaacaaactggatataaggaaggtttgtacactcagggtggtgaggcactggcacaggttgcccagcaaacatccaaggtaaggctggaggggctctgagcaccggatgcggggtgtccctgtgcactgcagggagtgggacmagatggcctttaagcatcctttctgtctcaaactatgataccgtgaccaccattctgtcctgcaggctgcccagctgagccctgcagcctgaggtcagaagcaccgagttgccccagttagcatggatgcagccacatactcactgcagccaaggcagccccagctgtcaccaaagggacacccatsccctgcagtgccctcagcaggtctcaggcacactcaccttcccaacacatttctggaggtggagatacccaaggtgatgcagctcaagggagtgctatggacctgacacacat

SEQ ID NO: 3777 - DNA, 600 bp, Chicken  19866894100851_2
actcagggtggtgaggcactggcacaggttgcccagcaaacatccaaggtaaggctggaggggctctgagcaccggatgcggggtgtccctgtgcactgcagggagtgggacmagatggcctttaagcatcctttctgtctcaaactatgataccgtgaccaccattctgtcctgcaggctgcccagctgagccctgcagcctgaggtcagaagcaccgagttgccccagttagcatggatgcagccacatactcactgcagccaaggcagccccagctgtcaccaaagggacacccatsccctgcagtgccctcagcaggtctcaggcacactcaccttcccaacacatttctggaggtggagatacccaaggtgatgcagctcaagggagtgctatggacctgacacacatcacaccaccaacccagcaggaaggcaaagccacgtttccaaaagaaaaatcctagttttctttgaatgaaggttttgggtattacagcggcagggaagcaaaagagatggaccatgggctgacatgctatggggacttctcctctccatctgccatggagctgcaaccagcatacaccacccatcca

SEQ ID NO: 3778 - DNA, 527 bp, Chicken  19866894100858_1
atttagagctcaccaaatctaaatatcctattcctatcaaatgctgcctttgagcctcccatgtcttctcatgctgtgcatctgcccttgaaatgctgatacaggttatttgcttggggaggtgggggaaaaaagatgggtagaacttaaaggtaaagtcaggcatccaagagccaaggtgaacaaacagaaagcctggtaagccatctaactgcataagccaggttctcaggagttctccatgctgttgaatactttggtgtccaacaaaaaaagaagtgtctgcttttcctttggggraaatattaaccatgtctcttgtctctctcatttcgtcttttagaggaaactggtaagaacatagtaactttaagagctgtactatttacttccttacccctccaaatagcaacctttttgtatattcaaagatccatctgggtaaaacttaatattttcatcacaacgaagaatttgtttttgtgaggataacaggtaacaagcatggttaaagaaacaaacaagga

SEQ ID NO: 3779 - DNA, 600 bp, Chicken  19866894100859_1
tcatgggagtcccctgaaagctgctgtgtgaacacaaccttcctgtcagttgtgtgaatgtctttttcacaaagcaatgcaaatccagggagcttccagttagttcacaggaaatatgaagttattcctgttgttctatatttgcacaaaaatgacatttatagtgtttcttctaagtaaagttctttacaggaagctctggaaagaatcaaggtttttgcttatttagtgaaattttcagaatatcacattataccacgcaattccacacagctccaacagctaaatactagctatcaytgtaacactaacctcccccatcagcctatctacaagcagatctacttccacagactgacaggtactttttagcccccatcaagcagagaatactgtatttaccaagtgactactatctattcagctgttttgtgtaccttttccctatttaagaaccccactgtcagttatattttcaaagtagcaaatattccaggtttcagtaggatacaagactagatggattctctggtattcccatcactgcttttcaccagcagctgagaactagagtacagtctgggaccatcttctattcag

SEQ ID NO: 3780 - DNA, 600 bp, Chicken  19866894100860_1
aacagaaagtaatatttaatcttcttgtctgaaacttcattttctaaatttcagcctgtagtaaatcttctgaactgatttataaatatctaaaaataaaattaatatggtacacgaaaataagggcagatcatcaactgcaggaacaccaaaggaacactgcaaaaattagaatgtaatgttttcctacataaatgtattccttctgctccctggaaaaggacattcttgtttccattcagcgctgaaattgcaacattcaaacttttaaatgcataaatggcctcttgaaggcacttyttttgtgaatgaactatgtaagaaatggcataatacttaagttgtctctaaatataatatgtagattctgtttccactgacatcagtgataaagtattggtttcacactcgtaggactattcttacagtaggaaattaaaagtccaagatgttcatttwaaaaaaaaagttccttattaacaggtttatgagtaggatttggagaaatgcatggacactattttttttcccactgaaacaagcttataatgaaaaaaattgctttggaaagctttccatcagactatttgcaacagggaa

SEQ ID NO: 3781 - DNA, 505 bp, Chicken  19866894100860_2
ctgcaaaaattagaatgtaatgttttcctacataaatgtattccttctgctccctggaaaaggacattcttgtttccattcagcgctgaaattgcaacattcaaacttttaaatgcataaatggcctcttgaaggcacttyttttgtgaatgaactatgtaagaaatggcataatacttaagttgtctctaaatataatatgtagattctgtttccactgacatcagtgataaagtattggtttcacactcgtaggactattcttacagtaggaaattaaaagtccaagatgttcatttwaaaaaaaaagttccttattaacaggtttatgagtaggatttggagaaatgcatggacactattttttttcccactgaaacaagcttataatgaaaaaaattgctttggaaagctttccatcagactatttgcaacagggaagtgctaaaagcatctgttgtcaaaaccatgtttaatctacatatagttatataagggttgtgtg

SEQ ID NO: 3782 - DNA, 600 bp, Chicken  19866894100864_1
ttcagcatcctatatattgaagctgtgtaacccatcctgacaaatcacaagcctccagagattttgtgcctgataaggcaaagctctcatcatggagctagctaatctacctggaagtccttaaacatttgcaaagaatactcaagtcttcacagcttaaccatggagattagattgctattctgaacagatactctcagcaagcctgccactgagctgccatagatgtaaacagcaatactgagcaccaaaaccattgctgtgggcaacaagcaataaacaaacaaaaaactttcaagracacactgagaagatattccaaagagtcaaaatgaaatactggaatggtccacagagagcagcttgctagcttacaaggcamaggaggatagcccttgaacagagaccttcagcacagagacctaaggatgtcaaacttggaagcatcragacrccatcagcagtattggagaaagctttatggcacattaagaaagctaaatatcctagatatattaccttctttaaagacaacatctattattttaactatgttagtgtttgtatacatatctactgtgtcwgaccttgaagtgagat

SEQ ID NO: 3783 - DNA, 600 bp, Chicken  19866894100864_2
gctctcatcatggagctagctaatctacctggaagtccttaaacatttgcaaagaatactcaagtcttcacagcttaaccatggagattagattgctattctgaacagatactctcagcaagcctgccactgagctgccatagatgtaaacagcaatactgagcaccaaaaccattgctgtgggcaacaagcaataaacaaacaaaaaactttcaagracacactgagaagatattccaaagagtcaaaatgaaatactggaatggtccacagagagcagcttgctagcttacaaggcamaggaggatagcccttgaacagagaccttcagcacagagacctaaggatgtcaaacttggaagcatcragacrccatcagcagtattggagaaagctttatggcacattaagaaagctaaatatcctagatatattaccttctttaaagacaacatctattattttaactatgttagtgtttgtatacatatctactgtgtcwgaccttgaagtgagatctcatcactcaatgccytgggacaccaacattttccaggatctctaatcatttttgttgcacctctaaactcctttcatgtc

SEQ ID NO: 3784 - DNA, 600 bp, Chicken  19866894100864_3
tcacagcttaaccatggagattagattgctattctgaacagatactctcagcaagcctgccactgagctgccatagatgtaaacagcaatactgagcaccaaaaccattgctgtgggcaacaagcaataaacaaacaaaaaactttcaagracacactgagaagatattccaaagagtcaaaatgaaatactggaatggtccacagagagcagcttgctagcttacaaggcamaggaggatagcccttgaacagagaccttcagcacagagacctaaggatgtcaaacttggaagcatcragacrccatcagcagtattggagaaagctttatggcacattaagaaagctaaatatcctagatatattaccttctttaaagacaacatctattattttaactatgttagtgtttgtatacatatctactgtgtcwgaccttgaagtgagatctcatcactcaatgccytgggacaccaacattttccaggatctctaatcatttttgttgcacctctaaactcctttcatgtcaatcaggacagtcaaaataaactccaatactgtgggtgagaccagaggaatttccaggattaagagc

SEQ ID NO: 3785 - DNA, 600 bp, Chicken  19866894100864_4
gcttaaccatggagattagattgctattctgaacagatactctcagcaagcctgccactgagctgccatagatgtaaacagcaatactgagcaccaaaaccattgctgtgggcaacaagcaataaacaaacaaaaaactttcaagracacactgagaagatattccaaagagtcaaaatgaaatactggaatggtccacagagagcagcttgctagcttacaaggcamaggaggatagcccttgaacagagaccttcagcacagagacctaaggatgtcaaacttggaagcatcragacrccatcagcagtattggagaaagctttatggcacattaagaaagctaaatatcctagatatattaccttctttaaagacaacatctattattttaactatgttagtgtttgtatacatatctactgtgtcwgaccttgaagtgagatctcatcactcaatgccytgggacaccaacattttccaggatctctaatcatttttgttgcacctctaaactcctttcatgtcaatcaggacagtcaaaataaactccaatactgtgggtgagaccagaggaatttccaggattaagagccaatt

SEQ ID NO: 3786 - DNA, 600 bp, Chicken  19866894100864_5
caaaaaactttcaagracacactgagaagatattccaaagagtcaaaatgaaatactggaatggtccacagagagcagcttgctagcttacaaggcamaggaggatagcccttgaacagagaccttcagcacagagacctaaggatgtcaaacttggaagcatcragacrccatcagcagtattggagaaagctttatggcacattaagaaagctaaatatcctagatatattaccttctttaaagacaacatctattattttaactatgttagtgtttgtatacatatctactgtgtcwgaccttgaagtgagatctcatcactcaatgccytgggacaccaacattttccaggatctctaatcatttttgttgcacctctaaactcctttcatgtcaatcaggacagtcaaaataaactccaatactgtgggtgagaccagaggaatttccaggattaagagccaattttataacaataaaaagtccactctgattttaacagacaatacaatccacccaacctaataagtaaaatactgcctcatttttttttcccccaacagtaccacattctgtactttgtccttaaagtaagct

SEQ ID NO: 3787 - DNA, 600 bp, Chicken  19866894100864_6
tccaaagagtcaaaatgaaatactggaatggtccacagagagcagcttgctagcttacaaggcamaggaggatagcccttgaacagagaccttcagcacagagacctaaggatgtcaaacttggaagcatcragacrccatcagcagtattggagaaagctttatggcacattaagaaagctaaatatcctagatatattaccttctttaaagacaacatctattattttaactatgttagtgtttgtatacatatctactgtgtcwgaccttgaagtgagatctcatcactcaatgccytgggacaccaacattttccaggatctctaatcatttttgttgcacctctaaactcctttcatgtcaatcaggacagtcaaaataaactccaatactgtgggtgagaccagaggaatttccaggattaagagccaattttataacaataaaaagtccactctgattttaacagacaatacaatccacccaacctaataagtaaaatactgcctcatttttttttcccccaacagtaccacattctgtactttgtccttaaagtaagctgtttatactgtccttgttttcaaaacttaaacc

SEQ ID NO: 3788 - DNA, 600 bp, Chicken  19866894100866_1
tttgaaatttccctatccacacaataacaattgcagaacatttgaagaatatcaagttaaacacccccttttaacagcatctcaagaagaattactttgtacaccattgtataggttttgtgtagctctggctcttagggagcaagcattccccagccctggcccttgtccttccagagcactcttaccttccttcatcaatgaagtctactaaaagcgtgctgaggatgaagacgatgagaagggcgatgaacatgtggtagattgtcctgatgtgactcacttcaaacagctcactaygggagagattcaaaagctatcaggccattcccacagcacatcacrcatcacacttgcgttatgttagctttcaaatgaagtatctcaaagtaraggctggttagtttactgtcaagcgtactttcagtcaatttaatggaaaaagtgaagctaaactactcactccaagagggaccttctggcagtgaagatcttcccrtgttctggaggggctctcaaggccctgcaaattagaagtagaacattcaaggaaaaggaaataaggcttccaggaaacaatcctgttatagaactaacata

SEQ ID NO: 3789 - DNA, 600 bp, Chicken  19866894100866_2
agaatatcaagttaaacacccccttttaacagcatctcaagaagaattactttgtacaccattgtataggttttgtgtagctctggctcttagggagcaagcattccccagccctggcccttgtccttccagagcactcttaccttccttcatcaatgaagtctactaaaagcgtgctgaggatgaagacgatgagaagggcgatgaacatgtggtagattgtcctgatgtgactcacttcaaacagctcactaygggagagattcaaaagctatcaggccattcccacagcacatcacrcatcacacttgcgttatgttagctttcaaatgaagtatctcaaagtaraggctggttagtttactgtcaagcgtactttcagtcaatttaatggaaaaagtgaagctaaactactcactccaagagggaccttctggcagtgaagatcttcccrtgttctggaggggctctcaaggccctgcaaattagaagtagaacattcaaggaaaaggaaataaggcttccaggaaacaatcctgttatagaactaacataaacctgacttacttggctttgtgtagctccttctcagagcaggaa

SEQ ID NO: 3790 - DNA, 600 bp, Chicken  19866894100866_3
actttgtacaccattgtataggttttgtgtagctctggctcttagggagcaagcattccccagccctggcccttgtccttccagagcactcttaccttccttcatcaatgaagtctactaaaagcgtgctgaggatgaagacgatgagaagggcgatgaacatgtggtagattgtcctgatgtgactcacttcaaacagctcactaygggagagattcaaaagctatcaggccattcccacagcacatcacrcatcacacttgcgttatgttagctttcaaatgaagtatctcaaagtaraggctggttagtttactgtcaagcgtactttcagtcaatttaatggaaaaagtgaagctaaactactcactccaagagggaccttctggcagtgaagatcttcccrtgttctggaggggctctcaaggccctgcaaattagaagtagaacattcaaggaaaaggaaataaggcttccaggaaacaatcctgttatagaactaacataaacctgacttacttggctttgtgtagctccttctcagagcaggaagctgggaagagggaagctgaagatgaggaatccaggagtgctgacttt

SEQ ID NO: 3791 - DNA, 600 bp, Chicken  19866894100866_4
aatgaagtctactaaaagcgtgctgaggatgaagacgatgagaagggcgatgaacatgtggtagattgtcctgatgtgactcacttcaaacagctcactaygggagagattcaaaagctatcaggccattcccacagcacatcacrcatcacacttgcgttatgttagctttcaaatgaagtatctcaaagtaraggctggttagtttactgtcaagcgtactttcagtcaatttaatggaaaaagtgaagctaaactactcactccaagagggaccttctggcagtgaagatcttcccrtgttctggaggggctctcaaggccctgcaaattagaagtagaacattcaaggaaaaggaaataaggcttccaggaaacaatcctgttatagaactaacataaacctgacttacttggctttgtgtagctccttctcagagcaggaagctgggaagagggaagctgaagatgaggaatccaggagtgctgactttgccaccaaactgttcacaaactctgtgaagtgactgtccacctccttcatgaaaactggtttcagttgctgacagagcaagaatagagcagcaggttactaaaacg

SEQ ID NO: 3792 - DNA, 599 bp, Chicken  19866894100872_1
  misc_feature (1)..(37): n is any nucleotide
nnnnnnnnnnnnnnnnnnnnnnnnnnnnnnnnnnnnntggaaaaagggagagttgcttttagtggaggatgatcaggttagggaacatttaaatggacccacaagtgctgagtgagctggctaattgtattgtgaagccactcttggttatcttcagaaggtcttggtaatcaggagaggatccagagaaccagaggaaaggaaatagaagatcttctttcttgaagattggagtgggaaactacaggctgatcagcctcacctatggaggtaatggtgaaaatccttctggaaagcagytccagacaggcaaaggacgagaagayggcatgaagttatggaggggaaattgtgcttcatcaacctgacagctttctacagtgagatgaatggcttggtggctggggtgagcagtggatgttgcttgtcttgactttagccaggytttcagcactgtctcccatatcctcatggacaagctgagaaagtatgggctggataagtgaacagtgaggtggactgaaaaaaggctgacttgccaggctcaagaacagtcatctgtgctgtaaagtccaggtggaggtcattccctattggtg

SEQ ID NO: 3793 - DNA, 599 bp, Chicken  19866894100872_2
  misc_feature (1)..(11): n is any nucleotide
nnnnnnnnnnntggaaaaagggagagttgcttttagtggaggatgatcaggttagggaacatttaaatggacccacaagtgctgagtgagctggctaattgtattgtgaagccactcttggttatcttcagaaggtcttggtaatcaggagaggatccagagaaccagaggaaaggaaatagaagatcttctttcttgaagattggagtgggaaactacaggctgatcagcctcacctatggaggtaatggtgaaaatccttctggaaagcagytccagacaggcaaaggacgagaagayggcatgaagttatggaggggaaattgtgcttcatcaacctgacagctttctacagtgagatgaatggcttggtggctggggtgagcagtggatgttgcttgtcttgactttagccaggytttcagcactgtctcccatatcctcatggacaagctgagaaagtatgggctggataagtgaacagtgaggtggactgaaaaaaggctgacttgccaggctcaagaacagtcatctgtgctgtaaagtccaggtggaggtcattccctattggtgtaaccagacattaatactgaggtcag

SEQ ID NO: 3794 - DNA, 600 bp, Chicken  19866894100872_3
ggttatcttcagaaggtcttggtaatcaggagaggatccagagaaccagaggaaaggaaatagaagatcttctttcttgaagattggagtgggaaactacaggctgatcagcctcacctatggaggtaatggtgaaaatccttctggaaagcagytccagacaggcaaaggacgagaagayggcatgaagttatggaggggaaattgtgcttcatcaacctgacagctttctacagtgagatgaatggcttggtggctggggtgagcagtggatgttgcttgtcttgactttagccaggytttcagcactgtctcccatatcctcatggacaagctgagaaagtatgggctggataagtgaacagtgaggtggactgaaaaaaggctgacttgccaggctcaagaacagtcatctgtgctgtaaagtccaggtggaggtcattccctattggtgtaaccagacattaatactgaggtcagcgttacttaacatcttcattaataacctgagtgatgggacagtgctccaacagcaagtttgcaaatgagacaaaactgggaggaggggctgatccatcagagggttgttctgcgatccag

SEQ ID NO: 3795 - DNA, 600 bp, Chicken  19866894100876_1
tattgtagatttttattagatactgtcattctgttgacagtataatactaagaaacagctcttttgcaagaaagactcaaagatgcatcatctgaagtctgaataaaggagctggaactgaaaatattcatctgagaatgctaactggtcagatctttggctgtaatggcttggtccagcttagcagcattgggccatggataacataattctccagctgttttagaataatgtggagggaagcagtacactaaattggagacagatggatagcaagacatttaatcattgaatattttktgtagcagattcaagtcaggtgtctgacatkatgcttttgttttcacaggaaaagagaacaacacccagaaaccaagtggctaatggtggtgagttttcatttttatctttttttctgcaattattttctgtcttttttcttctttgatgtgagctttgctttgcaaatggatttttaagctatttcgtctaggtcttcagtatggatgggagtcttttccatctgatcacgtccattatgtttaaaaagcacgagcaggttgtatgacctctggtattttctagtaaggtattgtgctc

SEQ ID NO: 3796 - DNA, 600 bp, Chicken  19866894100876_2
tgttgacagtataatactaagaaacagctcttttgcaagaaagactcaaagatgcatcatctgaagtctgaataaaggagctggaactgaaaatattcatctgagaatgctaactggtcagatctttggctgtaatggcttggtccagcttagcagcattgggccatggataacataattctccagctgttttagaataatgtggagggaagcagtacactaaattggagacagatggatagcaagacatttaatcattgaatattttktgtagcagattcaagtcaggtgtctgacatkatgcttttgttttcacaggaaaagagaacaacacccagaaaccaagtggctaatggtggtgagttttcatttttatctttttttctgcaattattttctgtcttttttcttctttgatgtgagctttgctttgcaaatggatttttaagctatttcgtctaggtcttcagtatggatgggagtcttttccatctgatcacgtccattatgtttaaaaagcacgagcaggttgtatgacctctggtattttctagtaaggtattgtgctctattttattaaattacacaagtgagcagtcc

SEQ ID NO: 3797 - DNA, 599 bp, Chicken  19866894100883_1
  misc_feature (1)..(54): n is any nucleotide
nnnnnnnnnnnnnnnnnnnnnnnnnnnnnnnnnnnnnnnnnnnnnnnnnnnnnnataaggaagttgtctggcttcacatcccggtggatgaagttcttggaatgaatgtactcaatacgactaatctgaaggggaacaaaaagaagaaaaaaagttcaaattaaacaaagtgatagaaatgaaaagtaagctcattatagttgcatgtattaaaaagataccctaccctgtcaaagaaggaaaaggtatcccttgtagtggataccagagatggcagctgaagaaaaagatgaccctccycaccctctggaggcagcactakctggaggaagtaaaccccacacaccagcagtcctcagcctggaaaggtcaccattagcaccacaaaggaggtatggggattgactttctatggattaaaactcttgagtttcaggactgacatcagtcagcttccaaacctagccaggctgggaaaggagagggtccagaagggtcctaagcgcagggcatgtgctgtttactcaaratgggtagcggtgtcagtcattcaccacataggtaaaagcatctctgcacgtaacacatgcacagatgtg

SEQ ID NO: 3798 - DNA, 599 bp, Chicken  19866894100883_2
  misc_feature (1)..(32): n is any nucleotide
nnnnnnnnnnnnnnnnnnnnnnnnnnnnnnnnataaggaagttgtctggcttcacatcccggtggatgaagttcttggaatgaatgtactcaatacgactaatctgaaggggaacaaaaagaagaaaaaaagttcaaattaaacaaagtgatagaaatgaaaagtaagctcattatagttgcatgtattaaaaagataccctaccctgtcaaagaaggaaaaggtatcccttgtagtggataccagagatggcagctgaagaaaaagatgaccctccycaccctctggaggcagcactakctggaggaagtaaaccccacacaccagcagtcctcagcctggaaaggtcaccattagcaccacaaaggaggtatggggattgactttctatggattaaaactcttgagtttcaggactgacatcagtcagcttccaaacctagccaggctgggaaaggagagggtccagaagggtcctaagcgcagggcatgtgctgtttactcaaratgggtagcggtgtcagtcattcaccacataggtaaaagcatctctgcacgtaacacatgcacagatgtgagggtgagcaaaagaggaagga

SEQ ID NO: 3799 - DNA, 530 bp, Chicken  19866894100883_3
gtcaaagaaggaaaaggtatcccttgtagtggataccagagatggcagctgaagaaaaagatgaccctccycaccctctggaggcagcactakctggaggaagtaaaccccacacaccagcagtcctcagcctggaaaggtcaccattagcaccacaaaggaggtatggggattgactttctatggattaaaactcttgagtttcaggactgacatcagtcagcttccaaacctagccaggctgggaaaggagagggtccagaagggtcctaagcgcagggcatgtgctgtttactcaaratgggtagcggtgtcagtcattcaccacataggtaaaagcatctctgcacgtaacacatgcacagatgtgagggtgagcaaaagaggaaggaaggagggatagagatcagaaacacccagcagcgcctaggatccaggccttcatcaagaaagaaaaacctggcagtcacttgctgctaaatgaaaaagcctgggatgtagcatttcttgagcagaggggaagggggggg

SEQ ID NO: 3800 - DNA, 600 bp, Chicken  19866894100891_1
cctaaagttaaacataggatacaatcagcaagaaagttctctgtgtgccatcaggattctcagtgtatcttcactgtgcacccatgcaagaagttgcatgtataattttttatgcataagttctgctcaacaacatcattataaaagcaattttatacacatcagaaaataaataggagtcctattttctaataccattatgcagttttgcatgattaattctgtatcttgaagaatgaatattttcacaggtatttttcttgtttagccacatgtatggtatatgacactgcacttcayaatgttgatttcactcttccataattgagtacagttctgtccctaacctctatgccagaaaagaaacagcaagaaaaatatacaaaaatgactctgttgaagaatgtgattacaagctgttccacttgggattagctacaactgtgagatctctccagttttctgtagaactttaaaagctcacctactaggaatccatgcaaaagaaagagctttccatacatgagtaattattacagtaaacactgtgcacaaagttgtccattatgagaatatcacatttctgagggtttatcataa

SEQ ID NO: 3801 - DNA, 599 bp, Chicken  19866894100892_1
  misc_feature (1)..(239): n is any nucleotide
nnnnnnnnnnnnnnnnnnnnnnnnnnnnnnnnnnnnnnnnnnnnnnnnnnnnnnnnnnnnnnnnnnnnnnnnnnnnnnnnnnnnnnnnnnnnnnnnnnnnnnnnnnnnnnnnnnnnnnnnnnnnnnnnnnnnnnnnnnnnnnnnnnnnnnnnnnnnnnnnnnnnnnnnnnnnnnnnnnnnnnnnnnnnnnnnnnnnnnnnnnnnnnnnnnnnnnnnnnnnnnnnnnnnnnnnnnnnnnnctccgcttccttccttccctggcagttttgctccatggctttacctggctgtggaagcatygggttttatttttgagctctagcacaaggaatgaaagtaactgctgctgcatggcatgggctcacaaccaatgagggtgtcacagcctggtctggggatgcccttcagtcctgaattggtgctgcagccaygatytgttgtgtgcacttttgtgccacttcctcaggagtggttttcaagcaagcaaacaaacaagaagcaaagccagacaaagttctgtgcagtgcacacccgcagggtgagctgggaggttgtgctcagaagaggaaggcgccacctgagatgaagggacacaaygc

SEQ ID NO: 3802 - DNA, 599 bp, Chicken  19866894100892_2
  misc_feature (1)..(108): n is any nucleotide
nnnnnnnnnnnnnnnnnnnnnnnnnnnnnnnnnnnnnnnnnnnnnnnnnnnnnnnnnnnnnnnnnnnnnnnnnnnnnnnnnnnnnnnnnnnnnnnnnnnnnnnnnnnnctccgcttccttccttccctggcagttttgctccatggctttacctggctgtggaagcatygggttttatttttgagctctagcacaaggaatgaaagtaactgctgctgcatggcatgggctcacaaccaatgagggtgtcacagcctggtctggggatgcccttcagtcctgaattggtgctgcagccaygatytgttgtgtgcacttttgtgccacttcctcaggagtggttttcaagcaagcaaacaaacaagaagcaaagccagacaaagttctgtgcagtgcacacccgcagggtgagctgggaggttgtgctcagaagaggaaggcgccacctgagatgaagggacacaaygcctcagggcaggctgggggmgctggggggatcctgaggcactctgggctgtccccagagggaaatgtttcccraagcatgtccccttgctgatgctttcaggtggctcccagtgccggcagccaactcatgg

SEQ ID NO: 3803 - DNA, 599 bp, Chicken  19866894100892_3
  misc_feature (1)..(104): n is any nucleotide
nnnnnnnnnnnnnnnnnnnnnnnnnnnnnnnnnnnnnnnnnnnnnnnnnnnnnnnnnnnnnnnnnnnnnnnnnnnnnnnnnnnnnnnnnnnnnnnnnnnnnnnnctccgcttccttccttccctggcagttttgctccatggctttacctggctgtggaagcatygggttttatttttgagctctagcacaaggaatgaaagtaactgctgctgcatggcatgggctcacaaccaatgagggtgtcacagcctggtctggggatgcccttcagtcctgaattggtgctgcagccaygatytgttgtgtgcacttttgtgccacttcctcaggagtggttttcaagcaagcaaacaaacaagaagcaaagccagacaaagttctgtgcagtgcacacccgcagggtgagctgggaggttgtgctcagaagaggaaggcgccacctgagatgaagggacacaaygcctcagggcaggctgggggmgctggggggatcctgaggcactctgggctgtccccagagggaaatgtttcccraagcatgtccccttgctgatgctttcaggtggctcccagtgccggcagccaactcatggcagc

SEQ ID NO: 3804 - DNA, 569 bp, Chicken  19866894100892_4
atygggttttatttttgagctctagcacaaggaatgaaagtaactgctgctgcatggcatgggctcacaaccaatgagggtgtcacagcctggtctggggatgcccttcagtcctgaattggtgctgcagccaygatytgttgtgtgcacttttgtgccacttcctcaggagtggttttcaagcaagcaaacaaacaagaagcaaagccagacaaagttctgtgcagtgcacacccgcagggtgagctgggaggttgtgctcagaagaggaaggcgccacctgagatgaagggacacaaygcctcagggcaggctgggggmgctggggggatcctgaggcactctgggctgtccccagagggaaatgtttcccraagcatgtccccttgctgatgctttcaggtggctcccagtgccggcagccaactcatggcagcctatgagrgctgtctttgggatggaaccattgcaccagcactttgctttctgcagtagttcaccgctgacttctgttttgtaatttgcttcagcttttaatatctattgacctggttctacatgaataattt

SEQ ID NO: 3805 - DNA, 548 bp, Chicken  19866894100892_5
ctagcacaaggaatgaaagtaactgctgctgcatggcatgggctcacaaccaatgagggtgtcacagcctggtctggggatgcccttcagtcctgaattggtgctgcagccaygatytgttgtgtgcacttttgtgccacttcctcaggagtggttttcaagcaagcaaacaaacaagaagcaaagccagacaaagttctgtgcagtgcacacccgcagggtgagctgggaggttgtgctcagaagaggaaggcgccacctgagatgaagggacacaaygcctcagggcaggctgggggmgctggggggatcctgaggcactctgggctgtccccagagggaaatgtttcccraagcatgtccccttgctgatgctttcaggtggctcccagtgccggcagccaactcatggcagcctatgagrgctgtctttgggatggaaccattgcaccagcactttgctttctgcagtagttcaccgctgacttctgttttgtaatttgcttcagcttttaatatctattgacctggttctacatgaataattt

SEQ ID NO: 3806 - DNA, 495 bp, Chicken  19866894100892_6
tgagggtgtcacagcctggtctggggatgcccttcagtcctgaattggtgctgcagccaygatytgttgtgtgcacttttgtgccacttcctcaggagtggttttcaagcaagcaaacaaacaagaagcaaagccagacaaagttctgtgcagtgcacacccgcagggtgagctgggaggttgtgctcagaagaggaaggcgccacctgagatgaagggacacaaygcctcagggcaggctgggggmgctggggggatcctgaggcactctgggctgtccccagagggaaatgtttcccraagcatgtccccttgctgatgctttcaggtggctcccagtgccggcagccaactcatggcagcctatgagrgctgtctttgggatggaaccattgcaccagcactttgctttctgcagtagttcaccgctgacttctgttttgtaatttgcttcagcttttaatatctattgacctggttctacatgaataattt

SEQ ID NO: 3807 - DNA, 424 bp, Chicken  19866894100892_7
tgcacttttgtgccacttcctcaggagtggttttcaagcaagcaaacaaacaagaagcaaagccagacaaagttctgtgcagtgcacacccgcagggtgagctgggaggttgtgctcagaagaggaaggcgccacctgagatgaagggacacaaygcctcagggcaggctgggggmgctggggggatcctgaggcactctgggctgtccccagagggaaatgtttcccraagcatgtccccttgctgatgctttcaggtggctcccagtgccggcagccaactcatggcagcctatgagrgctgtctttgggatggaaccattgcaccagcactttgctttctgcagtagttcaccgctgacttctgttttgtaatttgcttcagcttttaatatctattgacctggttctacatgaataattt

SEQ ID NO: 3808 - DNA, 600 bp, Chicken  19866894100895_1
tgcctcctattcatttccatggaaaaaacagatacaaagagcactgataggtacagatagaaataacactgcttggtaaagcaaatctcgtctaaagaccaatatttttcaacaaaattgccaccattagttacgtatttttaccaacaataaacaagagtctgcatgccacactcataaaaatcgacaccagtggaagtgaatcactgtcactgtcaccactgctggaacacaccatccaccaacctcagtctgctcacacccactatttggtcttcagaaacattcagcaagtatcartgaatgttaatggctgctatttttttccacacagaggatttcaatgacaaatctttgcttcacctgcacttgcatgtcagatgccattttgtcaaactgcccctctgttgacatctgtcacaggacaacagaatgtaatggaatattggtgggaaggttcaaactctactgttataccaccaacatctgcctctgacaccatgggccaacatcacaaaatgggaagcattactttcagagcagtcctcataaaatatataatttttatttgggatgttttttattaaaacataaaaaaga

SEQ ID NO: 3809 - DNA, 600 bp, Chicken  19866894100901_1
ttaaccctctccttacttacaatgggtgcattcagctgtgatgtcctcatgacaattaggagaacgtttaaatgtcagcataccatatttacatgaaaccaggaggcagtgagggcagaaaacttcgcagcccttgagttgctgtgggaaattcagtcactcttgcaaataatagcaagatacctcaccaacacttcaccctggttcactgagaaaactcctcccacctaactactgcatttgttttctttgtttctcattgtaactaccaaccctgtgtagcttcttaacacacattamagtatctgtgagaatggagagaatatgaaacactgaccgaacatacagaaacttaattgcattaggtcagggttcagacctaagctgggcggtcattgtgcaacaggtrgaggcagaccctggttttactttctgggagattcattgatgccatttcagacagaaacagaacaaagcgttacatgtgaggaaatagtaacatctctattttgtgactgaggaaagcagagtgatgccaacagcgaaggaaaagtttcaggtaaggaagcagcataagatggaggtttcagaaacaaacat

SEQ ID NO: 3810 - DNA, 600 bp, Chicken  19866894100901_2
tgagggcagaaaacttcgcagcccttgagttgctgtgggaaattcagtcactcttgcaaataatagcaagatacctcaccaacacttcaccctggttcactgagaaaactcctcccacctaactactgcatttgttttctttgtttctcattgtaactaccaaccctgtgtagcttcttaacacacattamagtatctgtgagaatggagagaatatgaaacactgaccgaacatacagaaacttaattgcattaggtcagggttcagacctaagctgggcggtcattgtgcaacaggtrgaggcagaccctggttttactttctgggagattcattgatgccatttcagacagaaacagaacaaagcgttacatgtgaggaaatagtaacatctctattttgtgactgaggaaagcagagtgatgccaacagcgaaggaaaagtttcaggtaaggaagcagcataagatggaggtttcagaaacaaacatgcatgtaatttgtcaaatgtagacaaggccaagatctcattgcacttgccttcagtgtaaggcagggtgtcgttttctgtttgacgcatgcagtgattcctgtgtttgg

SEQ ID NO: 3811 - DNA, 600 bp, Chicken  19866894100902_1
tacttgaagggagcatataaacaggaaggggaacagctgtttcggagggtggatagtgataggacaaggggaaaggtcttaaactgagatgggagatttaggttagatattaggaggaagtgtttcacacagagggtggtgaagcactggaacaggttacccaaggaggttgtggatgccccgttgctggaggcattcaaggccaggctggatgtggctctgggcagcctggtcctgtggttggtgaccctgcacatatcagggggattgaaactagataatcattgtggttcttttcarcccaggccattctatgattctatgattctaatctctttggacagactatgtgatctaacctgaaaacaaattaaaggtaaataagggtgagctggaggatgtaaccagaggaaaaacacatagtgctgagatgtatctaaaccaatataatgtgggtgagagaagagataaggtgatggattgtatgtggtaagcacatttttctaaccctgtgttttctccacttcctctgccattcttagctacaaagaatcaattcttaccctgcagcccagaagaaggaagaaagtctgaaaaaca

SEQ ID NO: 3812 - DNA, 600 bp, Chicken  19866894100905_1
cagtgggtcatctccgttggtgcaggttttaaggaacacagcatgcagctcctggtcatggctggcaaaaatgcccagctaatggtagtgactgtgttgaaaattagttttgtagctgaaaatttcctctatcaaatagtgttgttgtactctgtgcattggttttattttctagggaaataaacaggaggcattacttttggagagacctacatgaaagcacacaagtgtgatctgcatagaaacacttctgagcaaagcaagatgaattcaagggacgtagagagcaatgagcatccwgcttattccaaactccagcagattgagaagctgaactgaggactcctcacttctaagactgaagtagaaaataatatttatggaataaaacaatatttttgcctctgactcatgggtcttatctgatgcacataattccgagtgcgtggttggtaactcttgttctgtatgttcacaggttatggagtcagagcagatcacctagatcctctggtttacagaatcgtagtaaactagctatgggattctctgaatgaaacatataccaaaaaataatttctgatgagtttgaaaggtctg

SEQ ID NO: 3813 - DNA, 599 bp, Chicken  19866894100908_1
  misc_feature (1)..(129): n is any nucleotide
nnnnnnnnnnnnnnnnnnnnnnnnnnnnnnnnnnnnnnnnnnnnnnnnnnnnnnnnnnnnnnnnnnnnnnnnnnnnnnnnnnnnnnnnnnnnnnnnnnnnnnnnnnnnnnnnnnnnnnnnnnnnnnnnntatgtttggttggctttccttcctcagggtgataaacttcaaaacccagtctttggagagtgaaaaacttgggttctcaggactgtacacatagaaatcctgggagaagagtattggagggtttttgaccaatgtagttttgtgtaataagaattctttgaagacgttagmttttgtatggtaaatatatgcagtrtaagtcaatgagaacatacaagaacaattagttgcttatatgcctaataggaatagtcatcattatcaaaattatggaataagraaggagacaaaaagcagatactgtagacatagcagtaatcagctgcttataatagaaatattttttatttgttctacatrgtaatatgcaagtatttcagtttagcagagttccatgtcacaggcggttttcctaagatttatcaaaagatcaagaaccagagttgtagaaaagcagccaagttgagcat

SEQ ID NO: 3814 - DNA, 599 bp, Chicken  19866894100908_2
  misc_feature (1)..(104): n is any nucleotide
nnnnnnnnnnnnnnnnnnnnnnnnnnnnnnnnnnnnnnnnnnnnnnnnnnnnnnnnnnnnnnnnnnnnnnnnnnnnnnnnnnnnnnnnnnnnnnnnnnnnnnnntatgtttggttggctttccttcctcagggtgataaacttcaaaacccagtctttggagagtgaaaaacttgggttctcaggactgtacacatagaaatcctgggagaagagtattggagggtttttgaccaatgtagttttgtgtaataagaattctttgaagacgttagmttttgtatggtaaatatatgcagtrtaagtcaatgagaacatacaagaacaattagttgcttatatgcctaataggaatagtcatcattatcaaaattatggaataagraaggagacaaaaagcagatactgtagacatagcagtaatcagctgcttataatagaaatattttttatttgttctacatrgtaatatgcaagtatttcagtttagcagagttccatgtcacaggcggttttcctaagatttatcaaaagatcaagaaccagagttgtagaaaagcagccaagttgagcatagtgctgctgagaaccaacactgtc

SEQ ID NO: 3815 - DNA, 599 bp, Chicken  19866894100908_3
  misc_feature (1)..(20): n is any nucleotide
nnnnnnnnnnnnnnnnnnnntatgtttggttggctttccttcctcagggtgataaacttcaaaacccagtctttggagagtgaaaaacttgggttctcaggactgtacacatagaaatcctgggagaagagtattggagggtttttgaccaatgtagttttgtgtaataagaattctttgaagacgttagmttttgtatggtaaatatatgcagtrtaagtcaatgagaacatacaagaacaattagttgcttatatgcctaataggaatagtcatcattatcaaaattatggaataagraaggagacaaaaagcagatactgtagacatagcagtaatcagctgcttataatagaaatattttttatttgttctacatrgtaatatgcaagtatttcagtttagcagagttccatgtcacaggcggttttcctaagatttatcaaaagatcaagaaccagagttgtagaaaagcagccaagttgagcatagtgctgctgagaaccaacactgtcctcggttacacatccacacatcgtgagctagaaggcagagcgagccagaagtcacatggaattacagagcaccactatacctag

SEQ ID NO: 3816 - DNA, 600 bp, Chicken  19866894100908_4
tgaaaaacttgggttctcaggactgtacacatagaaatcctgggagaagagtattggagggtttttgaccaatgtagttttgtgtaataagaattctttgaagacgttagmttttgtatggtaaatatatgcagtrtaagtcaatgagaacatacaagaacaattagttgcttatatgcctaataggaatagtcatcattatcaaaattatggaataagraaggagacaaaaagcagatactgtagacatagcagtaatcagctgcttataatagaaatattttttatttgttctacatrgtaatatgcaagtatttcagtttagcagagttccatgtcacaggcggttttcctaagatttatcaaaagatcaagaaccagagttgtagaaaagcagccaagttgagcatagtgctgctgagaaccaacactgtcctcggttacacatccacacatcgtgagctagaaggcagagcgagccagaagtcacatggaattacagagcaccactatacctagtattattattcagatattatgttgtctgcaattcatagatactgaaagaattttaagacaggcacagtcaaatttcttgag

SEQ ID NO: 3817 - DNA, 600 bp, Chicken  19866894100908_5
cagagttccatgtcacaggcggttttcctaagatttatcaaaagatcaagaaccagagttgtagaaaagcagccaagttgagcatagtgctgctgagaaccaacactgtcctcggttacacatccacacatcgtgagctagaaggcagagcgagccagaagtcacatggaattacagagcaccactatacctagtattattattcagatattatgttgtctgcaattcatagatactgaaagaattttaagacaggcacagtcaaatttcttgagaataagaccaggagccaaaaatttygaccccaacagggacttgctttggacaaaatatccagtctcattgcatgctgtccgtaaaagaggactaatatttgtgtctcctgggatgttgtaaaatgaattattattttttacatgcataaattgcattgcatgtggagaggtscgtgtttatacacagtagctttgcaattgcactacacatagagcagaccctgcctctcctcagcaggggacagacagcttggaactcggcaagtactctatccagctagaacaaatacaattttgcagcccattgatttccatttacaacgcc

SEQ ID NO: 3818 - DNA, 600 bp, Chicken  19866894100908_6
gagcgagccagaagtcacatggaattacagagcaccactatacctagtattattattcagatattatgttgtctgcaattcatagatactgaaagaattttaagacaggcacagtcaaatttcttgagaataagaccaggagccaaaaatttygaccccaacagggacttgctttggacaaaatatccagtctcattgcatgctgtccgtaaaagaggactaatatttgtgtctcctgggatgttgtaaaatgaattattattttttacatgcataaattgcattgcatgtggagaggtscgtgtttatacacagtagctttgcaattgcactacacatagagcagaccctgcctctcctcagcaggggacagacagcttggaactcggcaagtactctatccagctagaacaaatacaattttgcagcccattgatttccatttacaacgccaagttttatttgatttatttttttaatatccgtgtgccayragactaacttctttcttttttttcctttttaaatgaagtgccactggcacgtggtcctcattagcctagcagtattttggataagttaagataaaggatcagaaga

SEQ ID NO: 3819 - DNA, 590 bp, Chicken  19866894100908_7
cattgcatgctgtccgtaaaagaggactaatatttgtgtctcctgggatgttgtaaaatgaattattattttttacatgcataaattgcattgcatgtggagaggtscgtgtttatacacagtagctttgcaattgcactacacatagagcagaccctgcctctcctcagcaggggacagacagcttggaactcggcaagtactctatccagctagaacaaatacaattttgcagcccattgatttccatttacaacgccaagttttatttgatttatttttttaatatccgtgtgccayragactaacttctttcttttttttcctttttaaatgaagtgccactggcacgtggtcctcattagcctagcagtattttggataagttaagataaaggatcagaagacaaacaaaacctgaccatttatgacagctttaatgatacagccccaaatttacttctatttgtttaactctaagacatatgtgagtgaatgtggggatttctgagcatatcaggtgactacataccttcatggactacatagagaaactccacacatatgcagtaaggacaaattaaacatca

SEQ ID NO: 3820 - DNA, 589 bp, Chicken  19866894100908_8
attgcatgctgtccgtaaaagaggactaatatttgtgtctcctgggatgttgtaaaatgaattattattttttacatgcataaattgcattgcatgtggagaggtscgtgtttatacacagtagctttgcaattgcactacacatagagcagaccctgcctctcctcagcaggggacagacagcttggaactcggcaagtactctatccagctagaacaaatacaattttgcagcccattgatttccatttacaacgccaagttttatttgatttatttttttaatatccgtgtgccayragactaacttctttcttttttttcctttttaaatgaagtgccactggcacgtggtcctcattagcctagcagtattttggataagttaagataaaggatcagaagacaaacaaaacctgaccatttatgacagctttaatgatacagccccaaatttacttctatttgtttaactctaagacatatgtgagtgaatgtggggatttctgagcatatcaggtgactacataccttcatggactacatagagaaactccacacatatgcagtaaggacaaattaaacatca

SEQ ID NO: 3821 - DNA, 600 bp, Chicken  19866894100911_1
acagcagcctttcagtatctaaagggtactataagaaagaaggggatagaccctttagcagggtctgtggtgataggacaaggagaaacagtttcaaactagaaggggagaagtagattgggtaaagaaaaaagtattttatgataagggtagtgaggcaccagcagaggttgcccagagatgtggtggattaacctgtccctgaagacattcaaggtcaggttggacaaggctctgagcaatgtgacctagctgtaggtgtccctgttcattgcaggaggattgggcttgatgacattyaaaggtcccttccaacaaataattctatgactctatatttgctcccaaatatggaagcttgcttacagagcatctaagagtgatctacccagattgttcacatctttccaatcatacaaaagaatttcctggcaccaataaaggcaatatgaaaactggattagtttcaatttcagtgactgaactcagacagaaattcatctctgcaacagaaagcatacaagtaccatgacttctgaaggaagttagagatcttcacagtacgatggaattgatcctgtatcctgccacatctcaagt

SEQ ID NO: 3822 - DNA, 600 bp, Chicken  19866894100917_1
agaagatgaaactcccaggaacttgtaatggacagccctgaagacacatgcaataaccactgagtctcatccaagagagcagggtaggtttttttgttttggtttggtttgggttttttgttttaaataaaacttgtggattagcatctagccagattaaacagaaattaagaaggccaggcaggataaaagagattaaggtatagctttaaataggaatgcttgccctgggacatctgtattatcctagacaaagtcagaagatggaaacaagccaactttttgtggatgttaaaaagsagacagagcatcaatagtcaccgtttaggctacttgccttctctgtcttgggcttgctttacacgcttaaaattacgtatgtttatgtgtgtatacacacattttacacagaagtatatataatgaagctttgggaatcaagcatataaatattactttggttttgtagcagattttccaatatactagtcattatattataggacagaattatcaggccaagaaaggaatattttgctctcactgttctgctgtttccttccctgaagcatcacttaatctcctgaattactaaattaa

SEQ ID NO: 3823 - DNA, 600 bp, Chicken  19866894100929_1
gactctgtgcctcgaaggtttgcaccctctaaaaatccatgccttgttttaaaacgaggtgagggctgggtgcagctgcactgtgcctctggttggctgcatggtgaggtcccgtggcacagcagcgtggttgcctgcagggagtagaagcatgcaccgtggtcctgagcctctccccatggtctgtcccttctgcagacgtcagccttggtggtttaggggttgtttttataatcaaatcaaatgcaagcaagttctgatctgcaataaccaagcaccaaaaggacggcgtgctgggaktgcctgtcccatactgtttcagctggagcaaggcactcctcttctcattctgctccagactcaaagaggaggcggtgcagggaggagcaggttgctgctggatgggctgtgtttgatcacttctcgcagacctggctttcagaagttagagtttttcttcctgtctccccagctctgccgtctgtcctcagcatctgctcgggagtaatgtcttttcatgtgtgtggggagaaagaagagatggaaccggagcctgtcatatttacttatattcccgggtcccagggaaagcacttgctc

SEQ ID NO: 3824 - DNA, 534 bp, Chicken  19866894100929_2
ggcggtgcagggaggagcaggttgctgctggatgggctgtgtttgatcacttctcgcagacctggctttcagaagttagagtttttcttcctgtctccccagctctgccgtctgtcctcagcatctgctcgggagtaatgtcttttcatgtgtgtggggagaaagaagagatggaaccggagcctgtcatatttacttatattcccgggtcccagggaaagcacttgctcctttcagtatgcctgcagcacaggaagggtttaaaagcttcagcctggaatacagaggggccgtcaaacrgcactgatgaataaatgattaaaaccagagtcacgcagagcacaaacagtttggggttgcaacacacacgaggagaagccaccgagggcctggtttccctttgaagagaggactgtttcccttggtgtgtgctgctccccagcagcagccctctttggctgcagccactgttgctctcacacagatccatgggcagcgctacctgcgtggcagagatcgatgcacaacacaaag

SEQ ID NO: 3825 - DNA, 599 bp, Chicken  19866894100933_1
  misc_feature (1)..(93): n is any nucleotide
nnnnnnnnnnnnnnnnnnnnnnnnnnnnnnnnnnnnnnnnnnnnnnnnnnnnnnnnnnnnnnnnnnnnnnnnnnnnnnnnnnnnnnnnnnnnnctgagatcaaaactgaagagacagaaaatagacaggagtttcctagaggatgcccctaagctcccaagtcttctctcagcaacagaagcaccaacagaagggagctaagcaggtttgtctcccaggtttgtctctgtggctgtgtaacaggggtgttcagcttgtcctacaccagctgaactgaacactgaatgcacagagctgctkgtttggcctggcatccctggaaaaccactcatctgctgccstgccagagttcaaacacaaagacctcccaacacagctcttctgtggcagggtcagcagcagcagagcagtatttctgtgccaaggacatctgcactatgtttggagtgtggtgtatgtaaaattcctgcacgcaggagagcaacagaagtccccacaacaccacagaatcgyaggggctggaagggacctctagagctcacggagtccaaccccttgctgaaacagytccctrcagcataccacacaggtgggtgtcc

SEQ ID NO: 3826 - DNA, 599 bp, Chicken  19866894100933_2
  misc_feature (1)..(52): n is any nucleotide
nnnnnnnnnnnnnnnnnnnnnnnnnnnnnnnnnnnnnnnnnnnnnnnnnnnnctgagatcaaaactgaagagacagaaaatagacaggagtttcctagaggatgcccctaagctcccaagtcttctctcagcaacagaagcaccaacagaagggagctaagcaggtttgtctcccaggtttgtctctgtggctgtgtaacaggggtgttcagcttgtcctacaccagctgaactgaacactgaatgcacagagctgctkgtttggcctggcatccctggaaaaccactcatctgctgccstgccagagttcaaacacaaagacctcccaacacagctcttctgtggcagggtcagcagcagcagagcagtatttctgtgccaaggacatctgcactatgtttggagtgtggtgtatgtaaaattcctgcacgcaggagagcaacagaagtccccacaacaccacagaatcgyaggggctggaagggacctctagagctcacggagtccaaccccttgctgaaacagytccctrcagcataccacacaggtgggtgtccagccgcgtcctgagcatctccgaagaaggctccaccacctc

SEQ ID NO: 3827 - DNA, 585 bp, Chicken  19866894100933_3
cccaggtttgtctctgtggctgtgtaacaggggtgttcagcttgtcctacaccagctgaactgaacactgaatgcacagagctgctkgtttggcctggcatccctggaaaaccactcatctgctgccstgccagagttcaaacacaaagacctcccaacacagctcttctgtggcagggtcagcagcagcagagcagtatttctgtgccaaggacatctgcactatgtttggagtgtggtgtatgtaaaattcctgcacgcaggagagcaacagaagtccccacaacaccacagaatcgyaggggctggaagggacctctagagctcacggagtccaaccccttgctgaaacagytccctrcagcataccacacaggtgggtgtccagccgcgtcctgagcatctccgaagaaggctccaccacctctctgagcagcctgttccagggccctgtcaccccacagtaaagaagttcttctacaaatttgtgaggaacttcctctgctccagtttttggccgctgccccttgtcctatcaatacacaccactgcacagagtctggcctcatcctcttgcctcccatg

SEQ ID NO: 3828 - DNA, 530 bp, Chicken  19866894100933_4
ctgaactgaacactgaatgcacagagctgctkgtttggcctggcatccctggaaaaccactcatctgctgccstgccagagttcaaacacaaagacctcccaacacagctcttctgtggcagggtcagcagcagcagagcagtatttctgtgccaaggacatctgcactatgtttggagtgtggtgtatgtaaaattcctgcacgcaggagagcaacagaagtccccacaacaccacagaatcgyaggggctggaagggacctctagagctcacggagtccaaccccttgctgaaacagytccctrcagcataccacacaggtgggtgtccagccgcgtcctgagcatctccgaagaaggctccaccacctctctgagcagcctgttccagggccctgtcaccccacagtaaagaagttcttctacaaatttgtgaggaacttcctctgctccagtttttggccgctgccccttgtcctatcaatacacaccactgcacagagtctggcctcatcctcttgcctcccatg

SEQ ID NO: 3829 - DNA, 524 bp, Chicken  19866894100933_5
tgaacactgaatgcacagagctgctkgtttggcctggcatccctggaaaaccactcatctgctgccstgccagagttcaaacacaaagacctcccaacacagctcttctgtggcagggtcagcagcagcagagcagtatttctgtgccaaggacatctgcactatgtttggagtgtggtgtatgtaaaattcctgcacgcaggagagcaacagaagtccccacaacaccacagaatcgyaggggctggaagggacctctagagctcacggagtccaaccccttgctgaaacagytccctrcagcataccacacaggtgggtgtccagccgcgtcctgagcatctccgaagaaggctccaccacctctctgagcagcctgttccagggccctgtcaccccacagtaaagaagttcttctacaaatttgtgaggaacttcctctgctccagtttttggccgctgccccttgtcctatcaatacacaccactgcacagagtctggcctcatcctcttgcctcccatg

SEQ ID NO: 3830 - DNA, 600 bp, Chicken  19866894100939_1
ggtgggaaaggtccagaaaagaaaaaaagtgtgagtaggaacagaaagcgcagagctcttcccttccttccctgaggagattactccctatcaggccctgctcccgtttcctcctgggataaaccaggagcaggcgggtttcatttcctttggtctcgctgctatcaggtggttcaggagctggctgcacattggggatggccccagaatggggaaacactcttaccagggcctcttcttccacaggaaggtggaggcaccggggctccaattacagtgtgtttaacgtttcccagctcrctggggccttgctgtctcataactgggtcacataatcagctccaagctgcaatgtcaacccggctcaaggattaagtgtgttgtaaccggagctgagagcccggtgcgcgggagtgggagattttatctcactgtgattgcaacgtgggcacaggagtgagctcggaaagagcagagcatccatacagcagcatccctgtgtcagggagctgagccatgctgcagaactccctgtcttgtccctgcaggacagtagagctggtcttcagcccccaaagtaatgcttgtcaggatttcctc

SEQ ID NO: 3831 - DNA, 600 bp, Chicken  19866894100942_1
cttgtccctcctcattatctcccttatgtctttcccatagctgcttatatccccatacccccaacaggtctgggtgtcggggggtccggggtttgtggggagcagcagtggatatcatatatccgtatccatcccatattcatcccgagtccctatccccatatccatcccatgtccattccatatccttatcccatcccattatcatcccaatcccctctcatgttcttctcctactgatcccaaatccaccccatatccagagcccatcccctatatatctgacttccccatatcccrtcctgtatccatgcatatcctcacatcccagtcccacatctttaatcccaaccccatatccaaatcccaaccccactcccaacccctcaccgcacagggaggtgggttatggccgcgcaggtgtttttccctgtcccggtgccgctctccctcccttccggctccggcgctgctgtcctcagcaccactcgcgtcgtgccgcggttccgtctcggttctgcycggacagctccggcgcacagcggctgcagcggcgctcccgtgctgcggtcccgggcccgggctgcggcagcggcgctg

SEQ ID NO: 3832 - DNA, 600 bp, Chicken  19866894100942_2
atgttcttctcctactgatcccaaatccaccccatatccagagcccatcccctatatatctgacttccccatatcccrtcctgtatccatgcatatcctcacatcccagtcccacatctttaatcccaaccccatatccaaatcccaaccccactcccaacccctcaccgcacagggaggtgggttatggccgcgcaggtgtttttccctgtcccggtgccgctctccctcccttccggctccggcgctgctgtcctcagcaccactcgcgtcgtgccgcggttccgtctcggttctgcycggacagctccggcgcacagcggctgcagcggcgctcccgtgctgcggtcccgggcccgggctgcggcagcggcgctgtctgaggggacagtcgggcggctccgagccggctggcaacggccgctcccgcgcgctgcggctcagccaatcggagcaggggacgctgccgctgaccaatgagagtccgggggcggggcgatgcggggccgttggttgggggcgcgagggcggggggcggggcggagcggcggtgggggcggggcctccggggtgcgtcctattgcgatagggggtgggatc

SEQ ID NO: 3833 - DNA, 600 bp, Chicken  19866894100947_1
aatgagcacagtcaagactttgtgtgtgctggcctccatcggcctaacagggaactgaactaacatctgtactcccagaacccacgcaagtcttctggacacttgacacagtcatcaggctttagtgagagtcatctactccctccacaactctcttcaaatcctaagagacagtaggaaggcaatgcaagtgaaacactagggaataaaaggtactgtagaaaaagaaaggcaaagggaagaacggagcatgatgcccaaaacgcgtggaagaaaaagaggagtgtcaaatgcgaccayctttaaagraagaacacttcgtttcactacataacacttgctttagttgccttcttgatctcctggagttctgctttcgatcattgcacaacgaaatgcagcatgtayatccaaaccaccataagcccaataacctccacaagccatctctgctctccaacttccagtcatgaaactccttccagcatagcaggaattatgtttgcaaaacattatcagggcatcatacagtcaataacaaagcagcggctgtttgctttcattaataaaggctgctctccccacaaagtttgttttctc

SEQ ID NO: 3834 - DNA, 600 bp, Chicken  19866894100947_2
agtcaagactttgtgtgtgctggcctccatcggcctaacagggaactgaactaacatctgtactcccagaacccacgcaagtcttctggacacttgacacagtcatcaggctttagtgagagtcatctactccctccacaactctcttcaaatcctaagagacagtaggaaggcaatgcaagtgaaacactagggaataaaaggtactgtagaaaaagaaaggcaaagggaagaacggagcatgatgcccaaaacgcgtggaagaaaaagaggagtgtcaaatgcgaccayctttaaagraagaacacttcgtttcactacataacacttgctttagttgccttcttgatctcctggagttctgctttcgatcattgcacaacgaaatgcagcatgtayatccaaaccaccataagcccaataacctccacaagccatctctgctctccaacttccagtcatgaaactccttccagcatagcaggaattatgtttgcaaaacattatcagggcatcatacagtcaataacaaagcagcggctgtttgctttcattaataaaggctgctctccccacaaagtttgttttctccagagaaca

SEQ ID NO: 3835 - DNA, 600 bp, Chicken  19866894100947_3
cagtcatcaggctttagtgagagtcatctactccctccacaactctcttcaaatcctaagagacagtaggaaggcaatgcaagtgaaacactagggaataaaaggtactgtagaaaaagaaaggcaaagggaagaacggagcatgatgcccaaaacgcgtggaagaaaaagaggagtgtcaaatgcgaccayctttaaagraagaacacttcgtttcactacataacacttgctttagttgccttcttgatctcctggagttctgctttcgatcattgcacaacgaaatgcagcatgtayatccaaaccaccataagcccaataacctccacaagccatctctgctctccaacttccagtcatgaaactccttccagcatagcaggaattatgtttgcaaaacattatcagggcatcatacagtcaataacaaagcagcggctgtttgctttcattaataaaggctgctctccccacaaagtttgttttctccagagaacaaagaagtcacagcacactcagaggaaacaacagagtaaggaaaacaacaacagctggcagaagcaaagcattttctttcctgttgaaagaccaaggcct

SEQ ID NO: 3836 - DNA, 600 bp, Chicken  19866894100950_1
catttgacataaatacatttcctatcaattttcaaatggaatgtatagagttgcaatcagacattcaactcaatgaaaaatttgatcatgtctcttttactagacttttataagacctatcttacatgaaaaaaaaatatcccttgattcacagtgatgtcatcactttttggcattacatatatttgcaaacaacacttttcaagaacaaaccacaggaagattaaaatttcataaagaaatctctgatggaacaccttgagaactcactaagaatcacaaccacttccattgagccakacatgratgaattattttcacaaaaataaggtcaattatcccgctagttttatgattttgtcacattctatttttaatgttttaatttaagaaaatataaaaaaaagttttgttactcatatgttatcccatattatacattttgtatgcagcccaagacaattccttttcactcagtgtggctcagggaagccaaaaagtgggatactcatgcactcactcaacaaaataggattcaacagaaactgttagaaaaaatgagagaaaacttttcaagatctaggcctccttttggatctg

SEQ ID NO: 3837 - DNA, 600 bp, Chicken  19866894100950_2
acataaatacatttcctatcaattttcaaatggaatgtatagagttgcaatcagacattcaactcaatgaaaaatttgatcatgtctcttttactagacttttataagacctatcttacatgaaaaaaaaatatcccttgattcacagtgatgtcatcactttttggcattacatatatttgcaaacaacacttttcaagaacaaaccacaggaagattaaaatttcataaagaaatctctgatggaacaccttgagaactcactaagaatcacaaccacttccattgagccakacatgratgaattattttcacaaaaataaggtcaattatcccgctagttttatgattttgtcacattctatttttaatgttttaatttaagaaaatataaaaaaaagttttgttactcatatgttatcccatattatacattttgtatgcagcccaagacaattccttttcactcagtgtggctcagggaagccaaaaagtgggatactcatgcactcactcaacaaaataggattcaacagaaactgttagaaaaaatgagagaaaacttttcaagatctaggcctccttttggatctgactgcc

SEQ ID NO: 3838 - DNA, 600 bp, Chicken  19866894100957_1
ccagactttagcttctccaggcagcccttacaggtataaacaaaaaatcaaatggctcaccagtcattttcagattcaaagtagcacacagatataagtcgagctccgcttccgacagcaaatttattctccaaaggagaccatttcacaaaggtggctgcacggttaattctcaggatcacaagtgttggtttccacacgccatccttctgactccagacataggcgttgcggtctgcaccgcaggttacaatgcgatcacttttgggagcccagtcaatacctgcaattcagacttcrtgttaatatttcccatttcctttatagtaattcaaaacagacagtcttatagccttctcctttagagacagttattggtcttacgttggtattccccttgctcccttattctccaggtgctgttttaaactgttatggatatcagctcctccatccaacttgcaccgaaagtgcatatcccaaattttgagattcagaatagacaatctgctcactgagcaagctagccaacaggtggagctctgcaggctggctaaaatccagccacaggcactcttcaaaccactgacttctgcatga

SEQ ID NO: 3839 - DNA, 599 bp, Chicken  19866894100959_1
  misc_feature (1)..(137): n is any nucleotide
nnnnnnnnnnnnnnnnnnnnnnnnnnnnnnnnnnnnnnnnnnnnnnnnnnnnnnnnnnnnnnnnnnnnnnnnnnnnnnnnnnnnnnnnnnnnnnnnnnnnnnnnnnnnnnnnnnnnnnnnnnnnnnnnnnnnnnnnntttaaaggtaaatcaccaaatgatggtgttgcatagaaaaacattgtcaagaagtcttttaaaggttcttattctgggtccactctcagcttcacatagagcagctgaagtccatcaccctcacatcctgagatcatctggtagaatcaaactctaagttacrtgcttgctttttctaagtaggtcaaatttctcgcaagtaaacattgtatgacccattactgcaggttttgttacccaaagatctgtattatatgaaaattacccatttctcacagtaggttttgttgccctcaaagactacttatattttcggaaacgtccccagcttttaaaatagcatcttatcctagaataatcttcaaaatgttactctgcgtgcatcctgagcagtgttatcttaaaaaataattgtaaggttttcttctacactgtgcatttcgctggttgataacaccaatt

SEQ ID NO: 3840 - DNA, 600 bp, Chicken  19866894100959_2
aggctgtaatcctgctgtgaactctgcatgggtgaaccactggtgcccaaatgacactgcggcagaagcagaattaaacgtgtaactccttgattgttccagtgaaactgatagtctagcctcagataaatctatctgcaactcagcatatccttggaaggagcagatctggacaggaaaaagtcctctggtacaagccataggttgaagctcctataacggagctttcagtcagctaacctaggaagctagttcagactagtccattttaatttcttacaacaccaggaaatgtcaacygtatatcttcaggtccacaccttatgtaccttccagaggtacacaaaaaggaagtggtacaaatcctagtagctgccattcacagwcaagtttctactccagcacacatggaaagcastaaagggtgttgttttgctttgttttgttttcccactgractgaatcctctgcacacagacaatcattccagtgctggtattgcatgcagtataattactttaaaacaatgaatagactttgagaaattacatactatttttaaagtcatattcacatttttataagcaaacattttataaa

SEQ ID NO: 3841 - DNA, 540 bp, Chicken  19866894100959_3
tccttgattgttccagtgaaactgatagtctagcctcagataaatctatctgcaactcagcatatccttggaaggagcagatctggacaggaaaaagtcctctggtacaagccataggttgaagctcctataacggagctttcagtcagctaacctaggaagctagttcagactagtccattttaatttcttacaacaccaggaaatgtcaacygtatatcttcaggtccacaccttatgtaccttccagaggtacacaaaaaggaagtggtacaaatcctagtagctgccattcacagwcaagtttctactccagcacacatggaaagcastaaagggtgttgttttgctttgttttgttttcccactgractgaatcctctgcacacagacaatcattccagtgctggtattgcatgcagtataattactttaaaacaatgaatagactttgagaaattacatactatttttaaagtcatattcacatttttataagcaaacattttataaatgtccccacttttaggtgaaattttt

SEQ ID NO: 3842 - DNA, 508 bp, Chicken  19866894100959_4
gcctcagataaatctatctgcaactcagcatatccttggaaggagcagatctggacaggaaaaagtcctctggtacaagccataggttgaagctcctataacggagctttcagtcagctaacctaggaagctagttcagactagtccattttaatttcttacaacaccaggaaatgtcaacygtatatcttcaggtccacaccttatgtaccttccagaggtacacaaaaaggaagtggtacaaatcctagtagctgccattcacagwcaagtttctactccagcacacatggaaagcastaaagggtgttgttttgctttgttttgttttcccactgractgaatcctctgcacacagacaatcattccagtgctggtattgcatgcagtataattactttaaaacaatgaatagactttgagaaattacatactatttttaaagtcatattcacatttttataagcaaacattttataaatgtccccacttttaggtgaaattttt

SEQ ID NO: 3843 - DNA, 469 bp, Chicken  19866894100959_5
aaggagcagatctggacaggaaaaagtcctctggtacaagccataggttgaagctcctataacggagctttcagtcagctaacctaggaagctagttcagactagtccattttaatttcttacaacaccaggaaatgtcaacygtatatcttcaggtccacaccttatgtaccttccagaggtacacaaaaaggaagtggtacaaatcctagtagctgccattcacagwcaagtttctactccagcacacatggaaagcastaaagggtgttgttttgctttgttttgttttcccactgractgaatcctctgcacacagacaatcattccagtgctggtattgcatgcagtataattactttaaaacaatgaatagactttgagaaattacatactatttttaaagtcatattcacatttttataagcaaacattttataaatgtccccacttttaggtgaaattttt

SEQ ID NO: 3844 - DNA, 600 bp, Chicken  19866894100966_1
catgctttgccacatccctacacagtgaaaaaggaaatttaactgagaaaggggattcagtgttgtgatgtaaactgcaatttctgttgaaatgagtttatctaaaactgcttggccttactgaggtcagaggtgcagcccagcacggagcacagtgcagcctgggtgtgctatgaggcacccacagccatccatccctttgtcttttatagcatatgttgcagaaacattaagtaacatacagcagatgcttattgctggtgttatcttgctataaatgtgctacaaagccattccttyttgataaatcaattttagttacttgaaacacgatttcctgagctggaggctgcatccaatctgcccattaaacaaaaggtggagactgagctggatttcagttagatttgtttggcaatgcaaaatgcagagcccgcagtgaagtaagactacatacatttcggcggcagctttcgccatgggtgtgatgttcagccagggctgggtgtgtgcccgggggtccctctgctctgtgggcccctcgtgccccatgcgtggccctgccagggcagcaccgactgctcagaaactgcacagaca

SEQ ID NO: 3845 - DNA, 600 bp, Chicken  19866894100967_1
cagcaccacacaccctcgctgactgctattccgttcagcagtgaattggctctgcagggctgccaatggcccctgccaggatttcagccttccatcagcactgtgctgaatgacagcctctccttctgggctgtcagcagcgctgctcccaacacagcgcacactgtgtggttctgagcccaaggcattcctgggggggaagggcacacagtgccacttttcagctcctcaggaacaggggagcagcccagcactggcatttcccaggcagccatgtcttggccctgctcgggcctgtcmcagcatggagccttcctggggtagagctgagaggtcacctctgcacctttccacacggaggggatctgacagcaccgccccgtgagtgttacgtcctgtgcatggagggtgggagagagagagcagagggactgcggtgctgtcacacaacagcagctcagcaccacacagctttcattctcactgacccctcccagtgggtttggggtgagaaatggagagagagaggaagaatttgtaggttccgataaaatctatttactgagaccaaaaacgaagagagacataacagtaatgatg

SEQ ID NO: 3846 - DNA, 600 bp, Chicken  19866894100968_1
tccatgcttgcagaaaacatctatgtaatatccttaattcctctaattcttcttgagcttgtttgggaagacagaaagcacttccaatgagtataaacagatctcccatttatacaagttacagaaatctacgggtcgcccagagaagttgtggatgccctatccctggaggtgtgcaaccagtccacattagagggttggaactcaatgatctttaaagtccttccaacctaagccattctgtgactgcatacttagaacaaacaaacaaaaacagcagccattaagccacaaagcaakgtaatgccacagttaacctctttctccctaagcttggctgaattctgaagttttcctgctacatcactgagaaaatttttaatgtcctttaacaactttggcttacaccttgagcctgtgccagctgaaagcattctccatccacagctcaatcctccttcctatggtgagccacagctgcctgcacggatctccccacttcagaagcatctcaaaagcagtgccagaatccagcttttcttacagagctcaaaacctccactaagtttcatactcaacctctgcaaacacaggattaaa

SEQ ID NO: 3847 - DNA, 599 bp, Chicken  19866894100970_1
  misc_feature (1)..(9): n is any nucleotide
nnnnnnnnnattcaatctttattgccatattgccacccaacatctgcctctgatgttgtaggtcaacataataaaataggaggcgttccttttggagcaccctcattgatacatatatgcgtgcatcccatgtgtgcagactatgtatagatgaagatgtgagcacatgcatcatatatatatatataaataggcaggtagatccactgatagattgattaatggatggatgaatgaaatcatcaagtactttctcacatacacagtgaaagaaggtacagcaattttttgcagtcattkaagacagtctaccattcctgcagagaactacagtctctgtgcattgtattctaaccaagatgggatccgcatttccgattttccattaatcttaactttgcttatcatattcaaaatgaaacactatatcatattcactaagcaaagaaaaagtagctcataagtaccttgctctcatcataggttttgagagaaggaagcagtttctacttataaatttcatgcctgtcaaaggccctggaaagtattttcctttttttgttgttttggtttgtgtaattttttttttaatatatttt

SEQ ID NO: 3848 - DNA, 556 bp, Chicken  19866894100970_2
actttgcttatcatattcaaaatgaaacactatatcatattcactaagcaaagaaaaagtagctcataagtaccttgctctcatcataggttttgagagaaggaagcagtttctacttataaatttcatgcctgtcaaaggccctggaaagtattttcctttttttgttgttttggtttgtgtaattttttttttaatatattttttttacccctgctgttttattcacgatgctattcagatgattttatatctttcattctcccttttgttttctgcaattttgtcaacccctaatakgacagagaacttcccttcccccctttgcaatttagaattcttccaaggaggccaggaaacttgtactcttcttcaggactttaatgtattttcaaagcacttctgatgatgtttgaaaacaggaaaagtaaaattaaatgaacaaagaataaaagacaatatctaaaaatagcatagtaatgaatattttcaatactaacagtttcccatagacccattgcagccatacagagctctcccttgttctgttccacaa

SEQ ID NO: 3849 - DNA, 600 bp, Chicken  19866894100979_1
tcaagaaagctttcacaactgcgttatttgtaattttgtttttagcatcatgaacgacacagttgttttgtttttattttcctgtcctgttgaacaggacaccttaaattcacaggtgaagcttttgggagcaaacagtgttttcactgttctcctgaatatattgtagggggacacaaggtaaaagtagctgagcactcactctctggtaaggagttccttctaacaagacccagaccatgactcatttctaaaaatcttccagcagcagagtagtacctttattttggaggccagaaygttgcgtgcctctttttagcttcttattttcaaagagccaagggaagaaatttaaacaataacacacagagtttggcttgtcgcgttcctacagcattagtcagagaggatgggaggagtgcgagaacagaaaccacagcagtgtaagaggtgttgcaacaacacacgttctcatttcaatgcctcaggcttgccccagctcctcaagggctcctgcctgcaccacaatggctgtttcacgagtatcggtcgggaatggtgcaaacagcttccaccctgggctccatgaaggtggaagga

SEQ ID NO: 3850 - DNA, 600 bp, Chicken  19866894100984_1
aaacccagctcaactgctcttggcagtggagggaggaaacccaggcaggccacaaaggcttccctagatactaagtaaacatttgggctgcaggccagaagtcgtctacacactaccagaatcacactgtttgtggtaagagatctaagcgctatgaagccagcccagaacttctacttgagatactgtgactgcagtacagacataaccttttaaaatgagaacaagacgttttgaaatcctaatctgcctcagagttgtgtagcaattcacatttgatctgtactccaagctggggargaaaagcaagttctcacaagctcgtcttttgtcctttcagcctcaaggtgaatgrggtgctgcagcaatcagccccacagctacatttcttcaccttggattttagcatctttttagagaagggaatatccacgcgccggagagatttaatagagctattcattgcaaattcacgaagggcacattttaaaatgccaggtgcrgtaagagttgtgtccggttgtgtgtgtgtgagacacgtaatgcttgttgttcttatcgcacaccaygcaggatcgatctcaagacaaagctatggca

SEQ ID NO: 3851 - DNA, 600 bp, Chicken  19866894100984_2
aggcttccctagatactaagtaaacatttgggctgcaggccagaagtcgtctacacactaccagaatcacactgtttgtggtaagagatctaagcgctatgaagccagcccagaacttctacttgagatactgtgactgcagtacagacataaccttttaaaatgagaacaagacgttttgaaatcctaatctgcctcagagttgtgtagcaattcacatttgatctgtactccaagctggggargaaaagcaagttctcacaagctcgtcttttgtcctttcagcctcaaggtgaatgrggtgctgcagcaatcagccccacagctacatttcttcaccttggattttagcatctttttagagaagggaatatccacgcgccggagagatttaatagagctattcattgcaaattcacgaagggcacattttaaaatgccaggtgcrgtaagagttgtgtccggttgtgtgtgtgtgagacacgtaatgcttgttgttcttatcgcacaccaygcaggatcgatctcaagacaaagctatggcagctcaggatttgtaggggtaagctgtgctatttgctttgtttcacttcttgccat

SEQ ID NO: 3852 - DNA, 600 bp, Chicken  19866894100984_3
cataaccttttaaaatgagaacaagacgttttgaaatcctaatctgcctcagagttgtgtagcaattcacatttgatctgtactccaagctggggargaaaagcaagttctcacaagctcgtcttttgtcctttcagcctcaaggtgaatgrggtgctgcagcaatcagccccacagctacatttcttcaccttggattttagcatctttttagagaagggaatatccacgcgccggagagatttaatagagctattcattgcaaattcacgaagggcacattttaaaatgccaggtgcrgtaagagttgtgtccggttgtgtgtgtgtgagacacgtaatgcttgttgttcttatcgcacaccaygcaggatcgatctcaagacaaagctatggcagctcaggatttgtaggggtaagctgtgctatttgctttgtttcacttcttgccatttgcaagagcaaaggatgtctcagtgtcgctgcctttgaagaacttaaatttactggcatttaaaggctggtagcgttcagttgttagactgttggagtgtagtttgattctgacaagcattagagaagcttaaggaaacatgcagaa

SEQ ID NO: 3853 - DNA, 600 bp, Chicken  19866894100984_4
tcacatttgatctgtactccaagctggggargaaaagcaagttctcacaagctcgtcttttgtcctttcagcctcaaggtgaatgrggtgctgcagcaatcagccccacagctacatttcttcaccttggattttagcatctttttagagaagggaatatccacgcgccggagagatttaatagagctattcattgcaaattcacgaagggcacattttaaaatgccaggtgcrgtaagagttgtgtccggttgtgtgtgtgtgagacacgtaatgcttgttgttcttatcgcacaccaygcaggatcgatctcaagacaaagctatggcagctcaggatttgtaggggtaagctgtgctatttgctttgtttcacttcttgccatttgcaagagcaaaggatgtctcagtgtcgctgcctttgaagaacttaaatttactggcatttaaaggctggtagcgttcagttgttagactgttggagtgtagtttgattctgacaagcattagagaagcttaaggaaacatgcagaactttactgaagactgtgcaggttggtctagaagattcaggagacccacttctacttgaaatccaaa

SEQ ID NO: 3854 - DNA, 599 bp, Chicken  19866894100992_1
  misc_feature (1)..(168): n is any nucleotide
nnnnnnnnnnnnnnnnnnnnnnnnnnnnnnnnnnnnnnnnnnnnnnnnnnnnnnnnnnnnnnnnnnnnnnnnnnnnnnnnnnnnnnnnnnnnnnnnnnnnnnnnnnnnnnnnnnnnnnnnnnnnnnnnnnnnnnnnnnnnnnnnnnnnnnnnnnnnnnnnnnnnnnnnttgtgatcccctcctccaaccggccgggcacacgcagtgtgctctgtagtgcaggcaggcaggagggacagaagcactgagcagggtgtgaggtctacatggctgtcagtggggcacacagatgcaaagggygcaggatatggggcaggagaagtgagctgaggctgcaggagtcacctttcatcttctgagcccagctcacaggagggagctgagaggcagagagatgggagaagtggatractgcaagggtgtctgtgctgccagcatctatcagttcagcaacaggagtggcagtgggctcacagcagcagccagcaacatcccagcagcggtgcagctgggcactcacctcacttaaaccactactgtgctactttggaaaggaaccagggtggcacacaagttctgctgctggttcatcacagcat

SEQ ID NO: 3855 - DNA, 599 bp, Chicken  19866894100992_2
  misc_feature (1)..(58): n is any nucleotide
nnnnnnnnnnnnnnnnnnnnnnnnnnnnnnnnnnnnnnnnnnnnnnnnnnnnnnnnnnttgtgatcccctcctccaaccggccgggcacacgcagtgtgctctgtagtgcaggcaggcaggagggacagaagcactgagcagggtgtgaggtctacatggctgtcagtggggcacacagatgcaaagggygcaggatatggggcaggagaagtgagctgaggctgcaggagtcacctttcatcttctgagcccagctcacaggagggagctgagaggcagagagatgggagaagtggatractgcaagggtgtctgtgctgccagcatctatcagttcagcaacaggagtggcagtgggctcacagcagcagccagcaacatcccagcagcggtgcagctgggcactcacctcacttaaaccactactgtgctactttggaaaggaaccagggtggcacacaagttctgctgctggttcatcacagcatcccgcttctcttgccatccagggctccagcacagacaggtctctggcatctcacttaacacaaagtctgatatcactcacttatctgttttgccagatgcctttggtttc

SEQ ID NO: 3856 - DNA, 600 bp, Chicken  19866894100993_1
attaaaaatataactggcattcctaacttctgagtgtttggcttcataaaatgactttcagcaatattgttttatgccttatcctagattatctttgccttaaaaggtcaaagctgaaaaccaactctttctctctcctcccttctaaaacagtttggggaactccagccaacatgcttccttggagaagggtgaaggaaagatgtagcaaaacactttctgacaactgctgatgagactgagtatggaacctccttttattcctccatcttacattctctacagttaaaacccccagakgatcctaatagcacacatttgattgccaggaaagctctctcattaatgagtcctgatattattccagcattttttcycttaaagaaaagtagtatcagagaagtagaatatatctttattcctaaccacaaaaccaggccataattttctgtgacaaaggaaatgccatttctggatctcaagaacaatgcatggatgacatcaaagttctcccacaagccagaaaagtatcagcttcttctagaattaataaataatcacaagatkgttttataaattaagtatgagattattttcaag

SEQ ID NO: 3857 - DNA, 600 bp, Chicken  19866894100993_2
cttatcctagattatctttgccttaaaaggtcaaagctgaaaaccaactctttctctctcctcccttctaaaacagtttggggaactccagccaacatgcttccttggagaagggtgaaggaaagatgtagcaaaacactttctgacaactgctgatgagactgagtatggaacctccttttattcctccatcttacattctctacagttaaaacccccagakgatcctaatagcacacatttgattgccaggaaagctctctcattaatgagtcctgatattattccagcattttttcycttaaagaaaagtagtatcagagaagtagaatatatctttattcctaaccacaaaaccaggccataattttctgtgacaaaggaaatgccatttctggatctcaagaacaatgcatggatgacatcaaagttctcccacaagccagaaaagtatcagcttcttctagaattaataaataatcacaagatkgttttataaattaagtatgagattattttcaagtgtaggaatgtgcaccaggccctgtactgaatacataaccaaaaatattctcagcctggaaaaatccttcagcatga

SEQ ID NO: 3858 - DNA, 600 bp, Chicken  19866894100993_3
atcttacattctctacagttaaaacccccagakgatcctaatagcacacatttgattgccaggaaagctctctcattaatgagtcctgatattattccagcattttttcycttaaagaaaagtagtatcagagaagtagaatatatctttattcctaaccacaaaaccaggccataattttctgtgacaaaggaaatgccatttctggatctcaagaacaatgcatggatgacatcaaagttctcccacaagccagaaaagtatcagcttcttctagaattaataaataatcacaagatkgttttataaattaagtatgagattattttcaagtgtaggaatgtgcaccaggccctgtactgaatacataaccaaaaatattctcagcctggaaaaatccttcagcatgaaagttttggtattcaccaataaaatcctttgtctctgatttgaaataaaagaatgagtaaaaaatcttgacaccagtattactgaggcactattctcaatgaaatccataaaatctcacattaaaaaaggcctggttcwcttagtatcacaagctttttttgtgccatttcactgactcgcgaaaagtca

SEQ ID NO: 3859 - DNA, 442 bp, Chicken  19866894100993_4
aagccagaaaagtatcagcttcttctagaattaataaataatcacaagatkgttttataaattaagtatgagattattttcaagtgtaggaatgtgcaccaggccctgtactgaatacataaccaaaaatattctcagcctggaaaaatccttcagcatgaaagttttggtattcaccaataaaatcctttgtctctgatttgaaataaaagaatgagtaaaaaatcttgacaccagtattactgaggcactattctcaatgaaatccataaaatctcacattaaaaaaggcctggttcwcttagtatcacaagctttttttgtgccatttcactgactcgcgaaaagtcattcctgcttcatttcagagtgagagatgactatacagtacattgaactattcccagaatgcctagacatgaccataaagcatcctcagtca

SEQ ID NO: 3860 - DNA, 600 bp, Chicken  19866894100994_1
atgaagactgcttagtaaacatatttgcttaaacacagctattttgattaattattggggtgctgttgtggtattctctatccatcaaaggaaaaattttacacagaagagccggagcttatacccctaagtatatttaggtattggctttcagtggagttgggtgcaaaaggaacagcacaaactactattcagggtgaaactataggtcttcatgccaagtttgagtgctggtgctgtgcatggttgcagaaatcctatgttgcctatgatgtgagaagagaagcctaccactgccaytgtgaaagagtatggaggggctgcaacatggacagggcaacatgggcatcttacagatttacacatttagtgtaccttacctctcatgcttgtagaacagaaggatatatatatacatatatattttttttattaatacagaaataaagagtgggggagcaatttccaggcccctcctctttatttctcacccttaggaggagcaacacaaagtgacacaacaaaagatgagatcttctccaagtgtacttttctcacaccccttaggctagtacgcatggaaaatagtctcaatgcact

SEQ ID NO: 3861 - DNA, 600 bp, Chicken  19866894101000_1
ataggggcacatctgctagatagtctggattcttagccagtcatttactcctgtggttagttctctgttaaaatgactccttatttccaacctgaatacatttgggttttggtcgcagccagtagttattattttaattctgcaagacgaaaaaacctttaaacattaccttagccactacaattatttgttttaatgtaaaacattttctgcagcttctagtcagtgtttccattactatgtgagggattgctattaaggtaactagaataatttttgcttggatcagactgctttggyctttgaagatgactacagcattaatattctttccagctgacttaagttttcccttctattcacaacattaaaagtaacatcaaccaaagttcttggaatactttatcaaggctttgagttcagaatgttgttcygaatataaattgcaaggtatattattatattcccccctattggaacacagatttcattgtttttgcataagtgttaataacctgggctttgtgttgatagatagatagaaacaagttgtagttacagttttcagctcaatgataaacttatggaaggaaataaatt

SEQ ID NO: 3862 - DNA, 600 bp, Chicken  19866894101000_2
taattctgcaagacgaaaaaacctttaaacattaccttagccactacaattatttgttttaatgtaaaacattttctgcagcttctagtcagtgtttccattactatgtgagggattgctattaaggtaactagaataatttttgcttggatcagactgctttggyctttgaagatgactacagcattaatattctttccagctgacttaagttttcccttctattcacaacattaaaagtaacatcaaccaaagttcttggaatactttatcaaggctttgagttcagaatgttgttcygaatataaattgcaaggtatattattatattcccccctattggaacacagatttcattgtttttgcataagtgttaataacctgggctttgtgttgatagatagatagaaacaagttgtagttacagttttcagctcaatgataaacttatggaaggaaataaattaaacttarcttgcagctgaaaaaagctttgttctgcagaggatctttccaacttctgtacggtctacagatatttcacaagagctcagttagtaagactgatttatcacagtgtgttcctccacatcgtatgtg

SEQ ID NO: 3863 - DNA, 600 bp, Chicken  19866894101000_3
atgactacagcattaatattctttccagctgacttaagttttcccttctattcacaacattaaaagtaacatcaaccaaagttcttggaatactttatcaaggctttgagttcagaatgttgttcygaatataaattgcaaggtatattattatattcccccctattggaacacagatttcattgtttttgcataagtgttaataacctgggctttgtgttgatagatagatagaaacaagttgtagttacagttttcagctcaatgataaacttatggaaggaaataaattaaacttarcttgcagctgaaaaaagctttgttctgcagaggatctttccaacttctgtacggtctacagatatttcacaagagctcagttagtaagactgatttatcacagtgtgttcctccacatcgtatgtgtctcttgaggaaaaatgttcataaggttcctctctgggccttgtcagttgccacatcagtctgtaagcctctgagcttctagtaaacgtgacctaagcgatgtatttcctgtaaagcatttgctttcaccaagtatttcgaagcacatctcctcttcttcgtctgcaagtttta

SEQ ID NO: 3864 - DNA, 599 bp, Chicken  19866894101019_1
  misc_feature (1)..(176): n is any nucleotide
nnnnnnnnnnnnnnnnnnnnnnnnnnnnnnnnnnnnnnnnnnnnnnnnnnnnnnnnnnnnnnnnnnnnnnnnnnnnnnnnnnnnnnnnnnnnnnnnnnnnnnnnnnnnnnnnnnnnnnnnnnnnnnnnnnnnnnnnnnnnnnnnnnnnnnnnnnnnnnnnnnnnnnnnnnnnnnnnatggggagacacaggaaacgttcagttacaaaaatgtgaaggccgtgttcacggggaaaaaagcctgtaggacatacttccttttaatgctaatgcatgcttcctggctgaagccctgcacagygcagatggaagcagaggytygctaagagagctgggatttggaaagaaagtaaaaaacaaaaccaggaaagctgctttgtcatgatactgtcgactccctctggccatgctgtgaagaaggcagcacaaacgctcggctagctcccttgttctatcatctgaagaagaggatattgatttcttttccatatttcagaacaggagagaagagcagcatccatctgtgcaccacttggatattctgcattacccactgtgcaagggagccctctgtgcagtttaaaatcaaaagacttggca

SEQ ID NO: 3865 - DNA, 599 bp, Chicken  19866894101019_2
  misc_feature (1)..(158): n is any nucleotide
nnnnnnnnnnnnnnnnnnnnnnnnnnnnnnnnnnnnnnnnnnnnnnnnnnnnnnnnnnnnnnnnnnnnnnnnnnnnnnnnnnnnnnnnnnnnnnnnnnnnnnnnnnnnnnnnnnnnnnnnnnnnnnnnnnnnnnnnnnnnnnnnnnnnnnnnnnnnnnatggggagacacaggaaacgttcagttacaaaaatgtgaaggccgtgttcacggggaaaaaagcctgtaggacatacttccttttaatgctaatgcatgcttcctggctgaagccctgcacagygcagatggaagcagaggytygctaagagagctgggatttggaaagaaagtaaaaaacaaaaccaggaaagctgctttgtcatgatactgtcgactccctctggccatgctgtgaagaaggcagcacaaacgctcggctagctcccttgttctatcatctgaagaagaggatattgatttcttttccatatttcagaacaggagagaagagcagcatccatctgtgcaccacttggatattctgcattacccactgtgcaagggagccctctgtgcagtttaaaatcaaaagacttggcatcacatttatacgctttt

SEQ ID NO: 3866 - DNA, 599 bp, Chicken  19866894101019_3
  misc_feature (1)..(156): n is any nucleotide
nnnnnnnnnnnnnnnnnnnnnnnnnnnnnnnnnnnnnnnnnnnnnnnnnnnnnnnnnnnnnnnnnnnnnnnnnnnnnnnnnnnnnnnnnnnnnnnnnnnnnnnnnnnnnnnnnnnnnnnnnnnnnnnnnnnnnnnnnnnnnnnnnnnnnnnnnnnnatggggagacacaggaaacgttcagttacaaaaatgtgaaggccgtgttcacggggaaaaaagcctgtaggacatacttccttttaatgctaatgcatgcttcctggctgaagccctgcacagygcagatggaagcagaggytygctaagagagctgggatttggaaagaaagtaaaaaacaaaaccaggaaagctgctttgtcatgatactgtcgactccctctggccatgctgtgaagaaggcagcacaaacgctcggctagctcccttgttctatcatctgaagaagaggatattgatttcttttccatatttcagaacaggagagaagagcagcatccatctgtgcaccacttggatattctgcattacccactgtgcaagggagccctctgtgcagtttaaaatcaaaagacttggcatcacatttatacgcttttct

SEQ ID NO: 3867 - DNA, 600 bp, Chicken  19866894101019_4
gaaagctgctttgtcatgatactgtcgactccctctggccatgctgtgaagaaggcagcacaaacgctcggctagctcccttgttctatcatctgaagaagaggatattgatttcttttccatatttcagaacaggagagaagagcagcatccatctgtgcaccacttggatattctgcattacccactgtgcaagggagccctctgtgcagtttaaaatcaaaagacttggcatcacatttatacgcttttctctacaagcatgagaactaccagcttgggatttctacacaaaatgcytcaccagacacgagaaggrgttgaaaagcagagtagtttccctgcagaaaggcacagagggctcattcacttcatctgttccagtatgttatattttgaccagaggtgttgagagaaagatagaatttaaaacaaagcctaaatatcacaagccattaatgtcattacttaattccgactgtttttgagaaagctgaaaagagaagtcagaatttaagtactactttcagaactgtgcagaataaagctcccaattaacaataattctgaagtaccagcactgctaattgagctattttc

SEQ ID NO: 3868 - DNA, 600 bp, Chicken  19866894101019_5
tactgtcgactccctctggccatgctgtgaagaaggcagcacaaacgctcggctagctcccttgttctatcatctgaagaagaggatattgatttcttttccatatttcagaacaggagagaagagcagcatccatctgtgcaccacttggatattctgcattacccactgtgcaagggagccctctgtgcagtttaaaatcaaaagacttggcatcacatttatacgcttttctctacaagcatgagaactaccagcttgggatttctacacaaaatgcytcaccagacacgagaaggrgttgaaaagcagagtagtttccctgcagaaaggcacagagggctcattcacttcatctgttccagtatgttatattttgaccagaggtgttgagagaaagatagaatttaaaacaaagcctaaatatcacaagccattaatgtcattacttaattccgactgtttttgagaaagctgaaaagagaagtcagaatttaagtactactttcagaactgtgcagaataaagctcccaattaacaataattctgaagtaccagcactgctaattgagctattttcttcctggtgagggaataaa

SEQ ID NO: 3869 - DNA, 599 bp, Chicken  19866894101020_1
  misc_feature (1)..(8): n is any nucleotide
nnnnnnnnatgcttgtaataagtttgcaaagcctgaagcagctccagtcaccctggactagagctttggatgacagtaaactcaggcaaccgcaaggcttcaaaggacttattcaaatattccagctctattcttaccaggcattgcaggcaaacttttgaatacatttctccatatcaaagattatttctagcttgagctgttcataataattttgatcataagaaaattccaaaccttccagactgaaaaggatggtcagatgtgtccctctgccccacccttgtgcaaacaagaagwgggaaagaaagagcatagcagggcaaagagaaaggaaaactgcctcttggatctgtatgctgctcactgctctgtgtaactacctcaggtcccacctgggaagtccaccagaccaaaggtaaaaagaatatagtcatagagcatgacagcaacaaatagacgaagagttgctgtaagcaacacattcccttctgtgcacttactgtgtctgttagtgcctaatgtttcaactaatcctgcatgttctgtgacaagggagaaagcatttggctgccagatgctagcaatgagacagagag

SEQ ID NO: 3870 - DNA, 600 bp, Chicken  19866894101036_1
gtgagctttatacatcatcttttaaattgacctatgagtacaaaaattgttgtgagacacatttttctaaccagtctcatttcccagacatgtgaaacagcagattcaatcagaatggttcagttaagcagtctggttcagaaggagaacctggggctcctgggattcaattccctctcaaagtagaggcagttaggtgagatatcccagaatgatccttggtcaagctttaaatatctccaaaaaaatgcaacaacctctctggaaaacctgttccaatatttgggagaatgttttggytccattttcctcatgtctccctatcagacagttgaaaggcacatcctaaatttgaaacatttttcaaatctgtagttccatgagagctttctgacactctttgtgaacttcacttgggcttgattcatagaatcatagaatcataaaggttggaaaagacaactgagagcatctagtacaatcccaacctttctccacagtgcccactaaccatattcctcagtgccatagtagcggaagattgcagcctgtatattcagttttccattcagcctcagtctacaggtaaaattgcttcaa

SEQ ID NO: 3871 - DNA, 600 bp, Chicken  19866894101037_1
tccacttggcaacaattgatggccctcaatgtgtttgtcaggtaaccctgtgcttaacattatgttgtaagacatagctacatagcataaactctcagctaggcttaataacgacaacgggagtataatttacagatgttaaggctactgatggtgttgtgttttgatcacattctgctagcattatcatgtcttaaattaagaaagagagacttctttattctctcccttcagctgcaagccctctgagtggtcctgttttctgcaaacaagacaaagcaaggaaatgggccatcatcyctgcctttcagtgcagcatgtcctctgtcctcttgacaggtaaatcttgtgaacgtgttcaccagggatgtgttgttattgtttcacattcctcttgtaacagcatgagatccaagtgaatctgagatactttggtgtagtacaataaagaccttgtttgtttgctgctgtactgtcagagggaatattttagcacctgataacactgcatagattaggtttgagaggttgtccatccctaactgaaacaatggcaatctacatcttttctgtggttggcttctacctgtgctctgggcc

SEQ ID NO: 3872 - DNA, 599 bp, Chicken  19866894101050_1
  misc_feature (1)..(66): n is any nucleotide
nnnnnnnnnnnnnnnnnnnnnnnnnnnnnnnnnnnnnnnnnnnnnnnnnnnnnnnnnnnnnnnnnntacttttttcatcactctggtgattaaaatcaccatactcagctgaagaattctccagaggagacttcaggaagaactttttcttaaacaacttcctagagaaaacagtagatgatcacacaggaagcatcacagtcataatgagcataactcatgtaacttatattgaactggaattacatttacccttaaatatgaaaattttaagatgtctgaaaaatattatgattgagygggaatggtgcaatgtgttccaaaattatgagtaatatttgaagagttagtcttcttgcccttagattaaaatgtacctatattctagaaaacaaaagatttgagaatgatttagatttcagaatgcttcatcacattttgaaaccatgatatcctggacaccattaattaacaaatttgtttacataacaaatgaattttattttaaaaaatacatgttatactacctgaaaatgttgtaaaatattaataaaatctggcatttatatttagaaaggtgaatttactgtgaataatgc

SEQ ID NO: 3873 - DNA, 600 bp, Chicken  19866894101066_1
tgtgctcatcattacgtagcaactatctctatatatctaaaatgagtcgttacacttaacataaaagcattcagtaagagaaatccctttaaatgtggactgtgcacacatgcattttcaatacagaatagtaacaggtagtctctggacctccacatacttgccaactgtgtgatagaggtttgcaaagctcctgacctcaaaagttagcactccttttgctcctatcctctgatcttgttagtttttcagactgattactcactgtaacagttacaggtgcttctcttcctgaaattyaacctcagtttttgcccagcaatatctgctttgcccacttgtttccttccacttctaccttctgctgaacctgtaaactcacaagccacccacaatcacaggggatgatgtaagttaagcaaaagaagatctagatgaaaagcagaaatcgttctttgagccgactgtcattggaaggccacagtggtgtgcaaaattaggaaccttctatgttccaaccaaagtttactaaagcctaccctactgtaatcactcgtgtttacgttttgccttctcagcttctaagtaggaagcaaagaa

SEQ ID NO: 3874 - DNA, 600 bp, Chicken  19866894101066_2
tgcagacagatgctgcttatcattatgagcacagaactattaccattacattttaaaatgctaacatatggagatattcaagacagttataagtcctttctctgtttcttttagggacagtctgttctacctaactttgacattaaacatacaattaaatagaggaaatagaaacatttccatcaatgaaaaatccttgagggtgatgagctgatgctgatttctgacttaacatatatctaaaatgaataggcacaaagtaaatccagatgaagttgacagatctcacaactgggccayggcatgagctgaaacatcactggaagcaaaccrtacaatgccgcagatgaaaagagagcgacgtaatcattaagtatctacatgagtaataagcaatactgcagctctgtcaaaagatgatcaattaagcccttgaccagaaaattgcacagatgctgttaaatctgaaaaggatgcagcctggctctgctaaagcagatgaaaagccatgaggagtgtgagctgtataagcaagcacatgtgaagatagcatctgatctgaaaaccagcctttattttcaccctgggtttatcctcaca

SEQ ID NO: 3875 - DNA, 600 bp, Chicken  19866894101066_3
gaactattaccattacattttaaaatgctaacatatggagatattcaagacagttataagtcctttctctgtttcttttagggacagtctgttctacctaactttgacattaaacatacaattaaatagaggaaatagaaacatttccatcaatgaaaaatccttgagggtgatgagctgatgctgatttctgacttaacatatatctaaaatgaataggcacaaagtaaatccagatgaagttgacagatctcacaactgggccayggcatgagctgaaacatcactggaagcaaaccrtacaatgccgcagatgaaaagagagcgacgtaatcattaagtatctacatgagtaataagcaatactgcagctctgtcaaaagatgatcaattaagcccttgaccagaaaattgcacagatgctgttaaatctgaaaaggatgcagcctggctctgctaaagcagatgaaaagccatgaggagtgtgagctgtataagcaagcacatgtgaagatagcatctgatctgaaaaccagcctttattttcaccctgggtttatcctcacatgtgtcacactgtctggagccgaaggtagggaa

SEQ ID NO: 3876 - DNA, 600 bp, Chicken  19866894101068_1
ctgtcggagagacatctggaatttgctgtgaacagaaaggaaaagagatgctcattttatttctaaaataagtttctagcaaattcagcattttatgcaaagttaccagcagaaaaagagagcttaaattctgatttgtacttgattaccatttaagttcagtggacacaccagactacgctctcaaccaacttgaagaagcgacagctatgaatgtatatgattatgttgctgtacatcccttttattttacttgttcttaacaagaaaagcattcgattgatgaatatcactgactcrgggtgagtatcagtactatttaaacaatcagcacattcacaagaatctatgcacgtttttcccagtatggtcagtagttccatattttgtgatactactacattgagaatataactagcttgattttaggaattatgttggaaaaaacagctcgaataccctctactttcaattattaagtacatatctcatcaatgttcctacctaacattcatttgagaatttctttgcagttgactatgaacattcaaataagtttaactacattcagttatttaataaatgaaagtaaaacaataa

SEQ ID NO: 3877 - DNA, 452 bp, Chicken  19866894101068_2
tcgaataccctctactttcaattattaagtacatatctcatcaatgttcctacctaacattcatttgagaatttctttgcagttgactatgaacattcaaataagtttaactacattcagttatttaataaatgaaagtaaaacaataaaactatacctgcagtaaggcaatgaagaggaagaacgcatttgcagcttttcttatctgctcatacaggaatcgaggtagaaaagtcaccacactgtacttggctgtgctgcgggttagaagatttttattttaatccttcatctgaacakaatatcaaatttgaagaaggcttctaatgttagaaaatgatttgaagatcatacagtaaagacaaatacattatgaaggaattcagctgtctgtattacaatgaagagctgtacagaacaagaggtaacacacagatccagaaggcggacag

SEQ ID NO: 3878 - DNA, 600 bp, Chicken  19866894101072_1
gtcactatagcccagcaaggaaccaaacaagtgattgacgcgtcctttccttgccatcgtagtcctactgacaagattgtaagcacaggctttccaagttaattgtcatctgttcggggaattggctcacttccccgggtgctaaggaagtatgggtggtggacagtgctttgaaacaccaaaaagctgtttctcaaaggctgcaccttctgctgtagcgcagctggacaaaggcacgagcaacctgctactcagcttcgggcctggtttgagtagcaagttgcagtgggtatgtcccamggtcccctccaggctgaacggctctgtgatgctttgcacaggagtgagaaggtaacagtgcaacatacacagcacatagcactgactgagagtcaaccgtcagtgaaacaggcctgtactattgtgtgatgtcgagcttgcaaagacatcggcctctaattaacgagcagaaaagggacagagtttgaaccttgctttctactggggtcccagatccgtgaatcaagatgagaagcttggtaattgtttggtctcctctctagtggaaaatattgagctatgtactttggtggttgcttg

SEQ ID NO: 3879 - DNA, 600 bp, Chicken  19866894101072_2
actgcagcaaggacaccagtaggtaaaataaatgttagagaatgaaaattaaagtgcaacttctctctctttttttgtcctttccaatttcttatcagtactgttacaagagtttattattaaatatattgatctctgtgaaggagtttgcacacaggtaacttatatttatgtagctctagctatttttcttgctggaaaatggaaactaattaaaagataatctgagtttaaaacaatttcttgataacagttcagattctaaatttctaaatgacattacaaaaatgtcattattakcttaatgcttaagtttggtgtggtcttttttyccccagtgttaactaaaattaaaaactaaaaaaggttctgtgcaggcaactttctgaagaccaactgaaaacataatgcaggtagtaagaggctgagcagtttgtttattgactggatacccagccgtgcatcatctttaggcatcgtccttggtagtacgtcttgtactacctggtttctcctcgtgtgttcagtcaagagtcaaaacagctttgagcattcatcacagaagcctttgtccttcggtcccttctttagctggttcct

SEQ ID NO: 3880 - DNA, 600 bp, Chicken  19866894101072_3
tgttagagaatgaaaattaaagtgcaacttctctctctttttttgtcctttccaatttcttatcagtactgttacaagagtttattattaaatatattgatctctgtgaaggagtttgcacacaggtaacttatatttatgtagctctagctatttttcttgctggaaaatggaaactaattaaaagataatctgagtttaaaacaatttcttgataacagttcagattctaaatttctaaatgacattacaaaaatgtcattattakcttaatgcttaagtttggtgtggtcttttttyccccagtgttaactaaaattaaaaactaaaaaaggttctgtgcaggcaactttctgaagaccaactgaaaacataatgcaggtagtaagaggctgagcagtttgtttattgactggatacccagccgtgcatcatctttaggcatcgtccttggtagtacgtcttgtactacctggtttctcctcgtgtgttcagtcaagagtcaaaacagctttgagcattcatcacagaagcctttgtccttcggtcccttctttagctggttcctagttgtctacagctttgttttggataccagcc

SEQ ID NO: 3881 - DNA, 600 bp, Chicken  19866894101075_1
ataaacatataaccagttcctccatgtattctgttggctgtttttaaatataacaactgcttggtgcctaattttccacccaaatgatatttgcagtactttttattttcttgtataaccaactaatttcatgtacttgcttcctacccaagagaaacccaacagagctttgtgattctcctggaggatgcgtctgctggacttgctcacttcctcccaggagtccaccctaggacagatctccccttctcattccttcaacccatctgctttaatgatgacttgtttccaacacacatmaatttccagcccatccctgtttgccagtttgtgttctgtggcacatacctccttacctgttcatgtaaccagctgccactccttttgatgatctctacyaagattgctgcaccacatcttccagactgtacaaatccatgtagtaaatgcagtgattttggcaccaggctakcccagcccactcctgagataacagggcacaaggaaggatttataacaagcgctggcttwgatgttggcttcccacacgctctgttgcctcatgtctggggctgtacatacccacagatgggttcagca

SEQ ID NO: 3882 - DNA, 600 bp, Chicken  19866894101075_2
tttttattttcttgtataaccaactaatttcatgtacttgcttcctacccaagagaaacccaacagagctttgtgattctcctggaggatgcgtctgctggacttgctcacttcctcccaggagtccaccctaggacagatctccccttctcattccttcaacccatctgctttaatgatgacttgtttccaacacacatmaatttccagcccatccctgtttgccagtttgtgttctgtggcacatacctccttacctgttcatgtaaccagctgccactccttttgatgatctctacyaagattgctgcaccacatcttccagactgtacaaatccatgtagtaaatgcagtgattttggcaccaggctakcccagcccactcctgagataacagggcacaaggaaggatttataacaagcgctggcttwgatgttggcttcccacacgctctgttgcctcatgtctggggctgtacatacccacagatgggttcagcaagggcagcttgaggagggcttgtctggtgggactgttccgggaagatgagtgtttctggtctccattatctgcaggagaaacacagaggacatgccagt

SEQ ID NO: 3883 - DNA, 600 bp, Chicken  19866894101075_3
tgattctcctggaggatgcgtctgctggacttgctcacttcctcccaggagtccaccctaggacagatctccccttctcattccttcaacccatctgctttaatgatgacttgtttccaacacacatmaatttccagcccatccctgtttgccagtttgtgttctgtggcacatacctccttacctgttcatgtaaccagctgccactccttttgatgatctctacyaagattgctgcaccacatcttccagactgtacaaatccatgtagtaaatgcagtgattttggcaccaggctakcccagcccactcctgagataacagggcacaaggaaggatttataacaagcgctggcttwgatgttggcttcccacacgctctgttgcctcatgtctggggctgtacatacccacagatgggttcagcaagggcagcttgaggagggcttgtctggtgggactgttccgggaagatgagtgtttctggtctccattatctgcaggagaaacacagaggacatgccagtgagagttgataggtagcactgagctaaggagaacacacacagctctggtgggctttcaaccactccagcttaa

SEQ ID NO: 3884 - DNA, 600 bp, Chicken  19866894101075_4
aggacagatctccccttctcattccttcaacccatctgctttaatgatgacttgtttccaacacacatmaatttccagcccatccctgtttgccagtttgtgttctgtggcacatacctccttacctgttcatgtaaccagctgccactccttttgatgatctctacyaagattgctgcaccacatcttccagactgtacaaatccatgtagtaaatgcagtgattttggcaccaggctakcccagcccactcctgagataacagggcacaaggaaggatttataacaagcgctggcttwgatgttggcttcccacacgctctgttgcctcatgtctggggctgtacatacccacagatgggttcagcaagggcagcttgaggagggcttgtctggtgggactgttccgggaagatgagtgtttctggtctccattatctgcaggagaaacacagaggacatgccagtgagagttgataggtagcactgagctaaggagaacacacacagctctggtgggctttcaaccactccagcttaacaggcaggggtctggtaacacaggggaatgtcattgccagatgctgtagcccctacttg

SEQ ID NO: 3885 - DNA, 517 bp, Chicken  19866894101088_1
ccattattttgtttgttatagactgtgaatacaaacagaacaggaatgcggttcttctacacattgtttcagcatttacttcatctgaaactttatctgaaagcttcttgccaatctgtgttggacactggttttcttttttttcccttcccctccttttttttgtttaaagaagaaacttcatctgtaagctagtaattcttgtcacatttgttcatcataagaggagtctgcattaaaaaagtggacatgtagctgcagtgtccttggctcttagcattgccagactcatttttctcmatccagcacctgtctgacgtgttctgtgtccaaaaactgaagttgagcagtttgtggcacttcatgttacaccatattgcagcctagaaggccaattgtatcctggtctgaattctgaatcagaggaaggatggccagcaaggcaagcgaggtgattatctgcccttgtgaggcctcacctggagtactgcgccctcatctgcggacacaggaaaga

SEQ ID NO: 3886 - DNA, 600 bp, Chicken  19866894101091_1
tgtactcacttgaaaaaacaacaaaacaaaaaatcctggggagacaagtgaggacgtgaagttaaaatgagtctgctgactgctgtaatcacttagtacaagtctagtaatcatactcatatcatttctttttatactgcagtagaacactacgttgcagcaccaccagggacttctatgaatacctatatctctacacacagataactgcatttttttggatgaaaattccctgtgtggtttcaaccctaaaagatctctttttcccccaggttggtatataatttatccactagtttkgggttgcaatgaagaaaaaatcctttttcacccatgcaataatcagcctcgttttcagaagtgtcaagcagtcagaaatcccacagaagttcacaggagctgcaggtgctgaatgctttttcaatcaagctcttccatttctgtgttcacttgcataaccaaaatgacaccattacaagctgaaactttctgcgtaaccagtctctaaggagagtcaggctgaagtctggttttctgactgaataagtgaaatgattgtggtgttacacagtgagttttactctcagatacccacaggtg

SEQ ID NO: 3887 - DNA, 599 bp, Chicken  19866894101092_1
  misc_feature (1)..(59): n is any nucleotide
nnnnnnnnnnnnnnnnnnnnnnnnnnnnnnnnnnnnnnnnnnnnnnnnnnnnnnnnnnnactggaattttagattgtatctacataagtaccacagtaaatggcactgtttagctttcaagcatctggtgtttggactggcatccaattttgtattatgcgttgtgaactaaagtgatgtgttcctgcatccaggcattcaggactactggtcacaggaaaaatctggcaaaaagagatatgctataagtagtatgttcttggactgcaaagggccatttttgccaaagtaggagtttcrgctattagaagtaactgcaagaaaggttgtgaaggcaaggatgtccattttcacatctaagttttatctgtagctctctgaccggttgaaatgatagatttctggcccctgctgtatcactctgtatctgactgcacacagatgccttcccgcgatgactgtgtggggaggttctgaatgagctccatagctccacctgggtagacacacagtctagacatcagttgtatggaagtctcctatttttcttgctagcactgaggaactttagaaaatgaaaaggaacaggaggggaagaa

SEQ ID NO: 3888 - DNA, 600 bp, Chicken  19866894101093_1
ctataggaaattattactttgttttcaaagcagaaatattaatgtaagcttcctttcccttcagtgtacgtctttgtcttgcctctggatgtgtacagcagcttccttactttggcagccattttctttagctacatataagggagcctcctgcatttctgtaatgttctggctttttttttcttttcctgaaagtatctaatttgtctgagagaaggaaaaaaataatgttatggtactgttcttaaatcagcgagctgggaactgctgtagtctgaaatccaaagctaacatcaacgwatgtatttttaagaatgtattactccagtagttattaaagcatagtaagtaactttgtgttgtactgctgtgttttacatgtatttgctcctctggtaagtgatataatttttacatttaatacactgaataaccatggacaagttcagttttttccacactttttattattatttttgattagtacttatgttttgggaaagaaattgaaatgtttttggggctgccagtgcagggatgacagagtgtaaggtcagcgtgagaagactgggctgtgcctggctacctacttactgtcag

SEQ ID NO: 3889 - DNA, 600 bp, Chicken  19866894101095_1
ttattagatcagaagatgagaaaagctttcttgtgaagaagtgcaagcaggcaagtgagaaagcagtaagctccctgccttttgcaaggttaccacaaaaacaaacaaacaaacaaacaaaaaaacattaaacatgttaaatgctgattatttttcaccccattcctgtcaccccattatgttcaaaggagaattcctctggatttctctgctacataggaggaagaagcaccgaagtgaacactgaacagacggtgtatggtgaggtaccagccagctcctgtcacggcacaacaaacrtacatgggctcttgtgataagggatcaccctttctgctttaaaacacttgatgtgctttcagtgtctcctcttggcctcacagctgttatctgcaagtggttacatgggcgtgtgccattcaagtgggaaggacactttccatctagggcaatatcaaagactctggggaaagacaaaacaaaataaaatttcctagagtttgggagcacaaatctctcagccacagcaaagctttgagctgggagagctggccgtgctgcatgaaggagctattccgggggctgggaagtgtacatgcc

SEQ ID NO: 3890 - DNA, 600 bp, Chicken  19866894101095_2
ctttctgctttaaaacacttgatgtgctttcagtgtctcctcttggcctcacagctgttatctgcaagtggttacatgggcgtgtgccattcaagtgggaaggacactttccatctagggcaatatcaaagactctggggaaagacaaaacaaaataaaatttcctagagtttgggagcacaaatctctcagccacagcaaagctttgagctgggagagctggccgtgctgcatgaaggagctattccgggggctgggaagtgtacatgcccggactcgtgggcagcggtatctccacarggcagccagccactggctgtctaaatttggatcccctaaattagaggcagtttttgaaaatatgagcctgggtggaaggctttgcgctgtgcataagcaacgtgccattttcgtgggcttatagcaacttactcctaagccaacttcttttcaaacatgacaaaaatacccgcttctaggcagratattgctatttgaatagccagggttcacaaactaaggtgaacaaaasmcaaacacaaatagctgcaggattacagtccagtatgtggaaaaatagtcaccttgagttgggcgagc

SEQ ID NO: 3891 - DNA, 600 bp, Chicken  19866894101095_3
tctctcagccacagcaaagctttgagctgggagagctggccgtgctgcatgaaggagctattccgggggctgggaagtgtacatgcccggactcgtgggcagcggtatctccacarggcagccagccactggctgtctaaatttggatcccctaaattagaggcagtttttgaaaatatgagcctgggtggaaggctttgcgctgtgcataagcaacgtgccattttcgtgggcttatagcaacttactcctaagccaacttcttttcaaacatgacaaaaatacccgcttctaggcagratattgctatttgaatagccagggttcacaaactaaggtgaacaaaasmcaaacacaaatagctgcaggattacagtccagtatgtggaaaaatagtcaccttgagttgggcgagctcatcagagcttcaccaaggggcatctgtgcaaggagtctcggagcaccaaccttacattttctcagtttaagcttcattgttctcttgtgtctttcctcattccagtggcctccaaagacattctgtaggctgctgccctcactgtgtaaggctgaagcccctcagcagggagtgcagccctg

SEQ ID NO: 3892 - DNA, 600 bp, Chicken  19866894101095_4
atgaaggagctattccgggggctgggaagtgtacatgcccggactcgtgggcagcggtatctccacarggcagccagccactggctgtctaaatttggatcccctaaattagaggcagtttttgaaaatatgagcctgggtggaaggctttgcgctgtgcataagcaacgtgccattttcgtgggcttatagcaacttactcctaagccaacttcttttcaaacatgacaaaaatacccgcttctaggcagratattgctatttgaatagccagggttcacaaactaaggtgaacaaaasmcaaacacaaatagctgcaggattacagtccagtatgtggaaaaatagtcaccttgagttgggcgagctcatcagagcttcaccaaggggcatctgtgcaaggagtctcggagcaccaaccttacattttctcagtttaagcttcattgttctcttgtgtctttcctcattccagtggcctccaaagacattctgtaggctgctgccctcactgtgtaaggctgaagcccctcagcagggagtgcagccctgcacatctccatggcagttcatggctgctggtgttggccctcagctcag

SEQ ID NO: 3893 - DNA, 600 bp, Chicken  19866894101095_5
tgaaggagctattccgggggctgggaagtgtacatgcccggactcgtgggcagcggtatctccacarggcagccagccactggctgtctaaatttggatcccctaaattagaggcagtttttgaaaatatgagcctgggtggaaggctttgcgctgtgcataagcaacgtgccattttcgtgggcttatagcaacttactcctaagccaacttcttttcaaacatgacaaaaatacccgcttctaggcagratattgctatttgaatagccagggttcacaaactaaggtgaacaaaasmcaaacacaaatagctgcaggattacagtccagtatgtggaaaaatagtcaccttgagttgggcgagctcatcagagcttcaccaaggggcatctgtgcaaggagtctcggagcaccaaccttacattttctcagtttaagcttcattgttctcttgtgtctttcctcattccagtggcctccaaagacattctgtaggctgctgccctcactgtgtaaggctgaagcccctcagcagggagtgcagccctgcacatctccatggcagttcatggctgctggtgttggccctcagctcaga

SEQ ID NO: 3894 - DNA, 599 bp, Chicken  19866894101098_1
  misc_feature (1)..(124): n is any nucleotide
nnnnnnnnnnnnnnnnnnnnnnnnnnnnnnnnnnnnnnnnnnnnnnnnnnnnnnnnnnnnnnnnnnnnnnnnnnnnnnnnnnnnnnnnnnnnnnnnnnnnnnnnnnnnnnnnnnnnnnnnnnnnaaaatacagtcactgtctgtattacaaccccctttctagtgatgatattgaaatatgtaggtcgctccaaaagtaatgcctccaatttatttccatgggaaatacaagagataagagcacaataacactatacgatagagcaaattgtcagctacaaaacactattttttttcaaygtagttgccattaccagctatgcattttctccagtgaygaacaagagcctgmatgccacactcgtaaatatctgcactggtgtaggtggcaaactattttacagctgytatgtcagcttctgtaacatccacctctgacatcatggaccaacagaataaaataggaggcattactttcagagcagcccacctatattggtttccagtgataaaacgccttgcacaatctttatttaaagctccagtgtatcttggaaatgccaatctttttgaaaagatctgttttccattaaggtttc

SEQ ID NO: 3895 - DNA, 599 bp, Chicken  19866894101098_2
  misc_feature (1)..(86): n is any nucleotide
nnnnnnnnnnnnnnnnnnnnnnnnnnnnnnnnnnnnnnnnnnnnnnnnnnnnnnnnnnnnnnnnnnnnnnnnnnnnnnnnnnnnnnaaaatacagtcactgtctgtattacaaccccctttctagtgatgatattgaaatatgtaggtcgctccaaaagtaatgcctccaatttatttccatgggaaatacaagagataagagcacaataacactatacgatagagcaaattgtcagctacaaaacactattttttttcaaygtagttgccattaccagctatgcattttctccagtgaygaacaagagcctgmatgccacactcgtaaatatctgcactggtgtaggtggcaaactattttacagctgytatgtcagcttctgtaacatccacctctgacatcatggaccaacagaataaaataggaggcattactttcagagcagcccacctatattggtttccagtgataaaacgccttgcacaatctttatttaaagctccagtgtatcttggaaatgccaatctttttgaaaagatctgttttccattaaggtttctgtaattgttttcccctctcaggctagaaaatccaaga

SEQ ID NO: 3896 - DNA, 599 bp, Chicken  19866894101098_3
  misc_feature (1)..(72): n is any nucleotide
nnnnnnnnnnnnnnnnnnnnnnnnnnnnnnnnnnnnnnnnnnnnnnnnnnnnnnnnnnnnnnnnnnnnnnnnaaaatacagtcactgtctgtattacaaccccctttctagtgatgatattgaaatatgtaggtcgctccaaaagtaatgcctccaatttatttccatgggaaatacaagagataagagcacaataacactatacgatagagcaaattgtcagctacaaaacactattttttttcaaygtagttgccattaccagctatgcattttctccagtgaygaacaagagcctgmatgccacactcgtaaatatctgcactggtgtaggtggcaaactattttacagctgytatgtcagcttctgtaacatccacctctgacatcatggaccaacagaataaaataggaggcattactttcagagcagcccacctatattggtttccagtgataaaacgccttgcacaatctttatttaaagctccagtgtatcttggaaatgccaatctttttgaaaagatctgttttccattaaggtttctgtaattgttttcccctctcaggctagaaaatccaagacatttttttggaca

SEQ ID NO: 3897 - DNA, 599 bp, Chicken  19866894101098_4
  misc_feature (1)..(16): n is any nucleotide
nnnnnnnnnnnnnnnnaaaatacagtcactgtctgtattacaaccccctttctagtgatgatattgaaatatgtaggtcgctccaaaagtaatgcctccaatttatttccatgggaaatacaagagataagagcacaataacactatacgatagagcaaattgtcagctacaaaacactattttttttcaaygtagttgccattaccagctatgcattttctccagtgaygaacaagagcctgmatgccacactcgtaaatatctgcactggtgtaggtggcaaactattttacagctgytatgtcagcttctgtaacatccacctctgacatcatggaccaacagaataaaataggaggcattactttcagagcagcccacctatattggtttccagtgataaaacgccttgcacaatctttatttaaagctccagtgtatcttggaaatgccaatctttttgaaaagatctgttttccattaaggtttctgtaattgttttcccctctcaggctagaaaatccaagacatttttttggacaaagtcccagtaaattaatgaatgtcaatttgcttgctctttacatccttcctcttc

SEQ ID NO: 3898 - DNA, 600 bp, Chicken  19866894101099_1
cgctgcgcgcacattgcgcggctctcagcgcgtggtgatgctgctgctgctgccgctttttttccccctttccttccctgtcctccaaatgctcccccggacgcactgatgaacggtttctcgtctgattccgcggttcaagaggacacagatggaaaatttaatcttacgcagcggggatggattattgggttttgccttccgcagttttatggtgaaaaatccctttaaatctgcccgctaggaacagcccacaggttttaacccggagtgcggaggaatggcagtgtcctcaggtakagcagacgggcagcgtgcaccatgatggagcgtgcctgcaaggtcagttcctatacgtgtctgtgcgtgtaagtgtgtgccagatgggttttatgtgtacgtgctatgtttgaatcgtgtgccacgtacgggccttgtataatccattttcaaacgccctattttccactcggtgccgtttattcccctcccttaccgaccactttccgtctgctgtggttaacgcagctctgctctgcagcagctgtgggtttgggtgtcggagaaccccccgcagagagcggctccgcgctcagctcc

SEQ ID NO: 3899 - DNA, 599 bp, Chicken  19866894101107_1
  misc_feature (1)..(106): n is any nucleotide
nnnnnnnnnnnnnnnnnnnnnnnnnnnnnnnnnnnnnnnnnnnnnnnnnnnnnnnnnnnnnnnnnnnnnnnnnnnnnnnnnnnnnnnnnnnnnnnnnnnnnnnnnnctatttatttccatggaaactataatcaatgtagagcacagtaccactatgtgatagagcaaattctcagctacacaatttgtttcaatatagtcaccagcattacctatacacttttaccagcgatgaaaaagagcctgcatgtcactcctgtaaaaatctgcaccagtggaagtgacccattgtttcacagytgctgttacagtgtctttgctaggcaaacgttgcccatraaattcatcttccatcagcctgaacaaatggaagtcagaaggcatttgacaagcattatttgagcaaaacacaaatatctatcagaaaaacaaaacaaaacaaaaaatccattgcaaattcttaaacagatttgcagttattatcaagaaatataaatatcacagcagaaacatttcaaaagaacttctcactaaaaccttcgtccaactttyttacaggctctctcctctttttgatgttaaagatagtgtggcaagag

SEQ ID NO: 3900 - DNA, 599 bp, Chicken  19866894101107_2
  misc_feature (1)..(67): n is any nucleotide
nnnnnnnnnnnnnnnnnnnnnnnnnnnnnnnnnnnnnnnnnnnnnnnnnnnnnnnnnnnnnnnnnnnctatttatttccatggaaactataatcaatgtagagcacagtaccactatgtgatagagcaaattctcagctacacaatttgtttcaatatagtcaccagcattacctatacacttttaccagcgatgaaaaagagcctgcatgtcactcctgtaaaaatctgcaccagtggaagtgacccattgtttcacagytgctgttacagtgtctttgctaggcaaacgttgcccatraaattcatcttccatcagcctgaacaaatggaagtcagaaggcatttgacaagcattatttgagcaaaacacaaatatctatcagaaaaacaaaacaaaacaaaaaatccattgcaaattcttaaacagatttgcagttattatcaagaaatataaatatcacagcagaaacatttcaaaagaacttctcactaaaaccttcgtccaactttyttacaggctctctcctctttttgatgttaaagatagtgtggcaagagaaaacaaagaataaagcacttttgatcagttgtcaagat

SEQ ID NO: 3901 - DNA, 600 bp, Chicken  19866894101107_3
actcctgtaaaaatctgcaccagtggaagtgacccattgtttcacagytgctgttacagtgtctttgctaggcaaacgttgcccatraaattcatcttccatcagcctgaacaaatggaagtcagaaggcatttgacaagcattatttgagcaaaacacaaatatctatcagaaaaacaaaacaaaacaaaaaatccattgcaaattcttaaacagatttgcagttattatcaagaaatataaatatcacagcagaaacatttcaaaagaacttctcactaaaaccttcgtccaactttyttacaggctctctcctctttttgatgttaaagatagtgtggcaagagaaaacaaagaataaagcacttttgatcagttgtcaagatctcctggacaaaygaccttcaacattttcattgctgccccatttactcccacagaaataattctataatacagtaattaaaaatgagattgacttatctagttccagtctcaatcagagagaagcagcctataattttgtagtcaatattttataataaaattttgttactaattcacagcacacatgtaatacacactcatgcatactgagaa

SEQ ID NO: 3902 - DNA, 600 bp, Chicken  19866894101107_4
catcagcctgaacaaatggaagtcagaaggcatttgacaagcattatttgagcaaaacacaaatatctatcagaaaaacaaaacaaaacaaaaaatccattgcaaattcttaaacagatttgcagttattatcaagaaatataaatatcacagcagaaacatttcaaaagaacttctcactaaaaccttcgtccaactttyttacaggctctctcctctttttgatgttaaagatagtgtggcaagagaaaacaaagaataaagcacttttgatcagttgtcaagatctcctggacaaaygaccttcaacattttcattgctgccccatttactcccacagaaataattctataatacagtaattaaaaatgagattgacttatctagttccagtctcaatcagagagaagcagcctataattttgtagtcaatattttataataaaattttgttactaattcacagcacacatgtaatacacactcatgcatactgagaaaatctttcacgtgtggtaaactcaagtcatttctattttactatgtccctctgcaactctctaacaaagtatatctacaagacacaacactgccaaaaa

SEQ ID NO: 3903 - DNA, 600 bp, Chicken  19866894101108_1
ctatctttctcccagctttaagctcctagaactggctgctcttacacctttctgcccaggattaaagagcctcaggctacctgatgcatcctccatgaagaacaccagctcagacaccaagtcatcccttgatcttcttttgggcaaacagagcagatggagctcctaaatctgtgggacatttttggtgggcctcaactcatgtcttgctttcccttcccaccaacatcagctcagcccagtttccaagttttctaaatgcaaacatgcaaatgggatgttgcagttcagccatcaaarataaaagctcactaccacactgctctccatctatcctggctatttggctgcagtcatgtttaacattgcatctgtcttctcaaacgtagatcttatttgcctcaatcagcttattaagtcatttatctcatgctttgtgacattccccctctttaggaggatgggtttttaatcaaaattgtcctctcgcatcacggtgaaatcaaggtgctgttcagctcaagaaatcctcttatacaaagcccaactttcattctttgctattctgcttcagcactgggaaattaccccttttgaaca

SEQ ID NO: 3904 - DNA, 600 bp, Chicken  19866894101113_1
tcacacagtaggagttttgaagggggtaggagttatttctcttctcttctgctgctgctaagactagctgggcactggtcagagggtggtgagcaattgctcatgcacttgttatatacattcatatacatacacgtatagtgataattattatcctttccctcttctttatctttacctctctctcaaaataaatgaagatctcaaagaactagcttatctgagtttcttgatcagccactgcaggtcaagaaaaaatgacacactgaaatgacactctggagatggctacttcatagwgtccattacagtattaccaaaaactagtcttgctcaacagtacagaccaaaatatcgacatcccaaggtctctcttgaagacacaacaggtatgccaaatcccagctatttctgctccgttctctctgtgtgcagaagcatcagaagccagcttgaactttttctccacactgtggctgtgaagagaggatgacatatctgaacacggagatagtgcttgggatgacacggtgcttgttaaaggagctgtgcagactctgtgctggggagaaaaaaacctaaatcttcagtccatctgag

SEQ ID NO: 3905 - DNA, 600 bp, Chicken  19866894101114_1
tcttcctaattttgttgtattgctctattcaaatcaagtcttaactggaacaacgctggtatctttttaatttgtgtaactccttcactggcttttctgcagtacttggctaaagtcaccctctatataacagccatctctttcaaggagcaagcatccttaactactgatgaccttaaaatagtaaagtttttattcattataatgaaaactgtgttgtaattcagtatcttactttctagagctttatcccatatttgttactaaaatccttgcctttctgagtatttttttttttawggataagtgtattaccatgacagtgatttgccgcttccccattgtatccccttctttatcaaactagaacaccaccttcagtgttgctttctttctcttctccttcagcgatgtcactgctattttcattaacctgattgacttactttcattgtacaaattcatctctctcattttctagcacgatatratttcaccactctgcatctctgctgtgtttcttgcactgctaatctgacttgctttgccyttatatctacttttaccatctttcccatgcttgaagtaagctttcacaat

SEQ ID NO: 3906 - DNA, 600 bp, Chicken  19866894101114_2
ttttattcattataatgaaaactgtgttgtaattcagtatcttactttctagagctttatcccatatttgttactaaaatccttgcctttctgagtatttttttttttawggataagtgtattaccatgacagtgatttgccgcttccccattgtatccccttctttatcaaactagaacaccaccttcagtgttgctttctttctcttctccttcagcgatgtcactgctattttcattaacctgattgacttactttcattgtacaaattcatctctctcattttctagcacgatatratttcaccactctgcatctctgctgtgtttcttgcactgctaatctgacttgctttgccyttatatctacttttaccatctttcccatgcttgaagtaagctttcacaatccagtctgcctaagaggatgttgtcaggccccaaacatgtattatcatactaatgcttcagttgagcagtcttgatctcaagcatttcagatttcatttaaaaaataataagaaaagaaaaagaatttccaactagggtgattttctgaaagattttgaagtcatggattaagtacaaaccatgatggta

SEQ ID NO: 3907 - DNA, 600 bp, Chicken  19866894101114_3
cccatatttgttactaaaatccttgcctttctgagtatttttttttttawggataagtgtattaccatgacagtgatttgccgcttccccattgtatccccttctttatcaaactagaacaccaccttcagtgttgctttctttctcttctccttcagcgatgtcactgctattttcattaacctgattgacttactttcattgtacaaattcatctctctcattttctagcacgatatratttcaccactctgcatctctgctgtgtttcttgcactgctaatctgacttgctttgccyttatatctacttttaccatctttcccatgcttgaagtaagctttcacaatccagtctgcctaagaggatgttgtcaggccccaaacatgtattatcatactaatgcttcagttgagcagtcttgatctcaagcatttcagatttcatttaaaaaataataagaaaagaaaaagaatttccaactagggtgattttctgaaagattttgaagtcatggattaagtacaaaccatgatggtagaacatagagaagctctccttgtgttaaagccccagcaaaaaggaactaattctatatag

SEQ ID NO: 3908 - DNA, 600 bp, Chicken  19866894101114_4
agaagctctccttgtgttaaagccccagcaaaaaggaactaattctatatagcatatgggaatgatatcttaaatatctatacagccagctggtagaattactctattttcatttattaaattcactttcatacttctgtgggtagaatttagaagagcatctgtgctgacagcttccacgttattatctgatcttttctagctccacttccatagcaataatttttcaggctgatagcagtgaattaataagacaataaagggattctgttgtataaaaaaaagactcagagattttgytgggaaggcagactgaagccgaacagcttctaaacatgttttaggacagttggacccatcaaagcaagtactttgttcaggcaggagcagaggttgtttttgacagaatgttgttccrtgttgttggatatttggctgctttaagttgacttaattatcttgtttttcaagtgctagcttagttttacatacttttaccaatgataactctctctctcattttattttcttcaagtaataggtgaaatttttttcagcatttgaacttgtaaataatgattgtgtcttaaatacgtgctt

SEQ ID NO: 3909 - DNA, 600 bp, Chicken  19866894101114_5
aaattcactttcatacttctgtgggtagaatttagaagagcatctgtgctgacagcttccacgttattatctgatcttttctagctccacttccatagcaataatttttcaggctgatagcagtgaattaataagacaataaagggattctgttgtataaaaaaaagactcagagattttgytgggaaggcagactgaagccgaacagcttctaaacatgttttaggacagttggacccatcaaagcaagtactttgttcaggcaggagcagaggttgtttttgacagaatgttgttccrtgttgttggatatttggctgctttaagttgacttaattatcttgtttttcaagtgctagcttagttttacatacttttaccaatgataactctctctctcattttattttcttcaagtaataggtgaaatttttttcagcatttgaacttgtaaataatgattgtgtcttaaatacgtgcttcttacgaaacatggtactatatatggtgggttgtgagtttatctgaatagatttcattctgtttcacttactattgttcctttagcatgtgtagcattgtggcatccctcagtgcaca

SEQ ID NO: 3910 - DNA, 432 bp, Chicken  19866894101116_1
cgagcagctctcggccgcgtccaccgaagcagagatatcctttggcggcagcgagcacagctgcggcgcctccgcccggagccctttatgtgccgccgggcccagctggcggtcatcatacaccagagctgctgctcggccgtgcgtccgtggtacagcgtttgggttggctcctttttagtcacaaatgaggcagaaccgcacttctgatgggcagggtgggggtggaactgcaaaatccaatttgcagtgtcctgcctctctggaggaagtgtctgcccatttcctgccatgtgtccygtgtcacctctgcagggatctgaggttttgttgagctgtgagacttttaagctccgctgtgttattgctgttgcctttgtgcaatgcgtttcttgcatttggtttgtggaagcaccttgactcacacacagg

SEQ ID NO: 3911 - DNA, 600 bp, Chicken  19866894101117_1
tagatgcgtgaggttttgcatcaaaggcaacttctgcacacctgtaggtaagccagtccagaagaattaatttgtgcgctgccttactattatcattcacaaggaaagcaactgttttgttttgtttccctccccaactcaactacaaaaaaagacctgccctcctgagtgaatcagaacattccagcacttagaaacttgtttacaccatgaactttccttcagcttttcttcagggatgttagctgtgactcatctgtcagaagtcccctccagtcctagcttttattacctctgtgyatgttttctttctcccaaagaatgaaaagtacattgagactttaaggcgtacattacaaaggaactctgctacagtattaaaataaaacccttcatctctctcttaaactttgaagggttgtgggagatactggatgagtttgggtctcttgggactacgtaggtagttcgttgagagggtgcagcccagttgctggtggagtagaagggttgggtgaggattttgtctttcctacacagagarcaaaagtgggaagctgtaaatgcagaaagccacccgtcctcgtgatgtaagtgcag

SEQ ID NO: 3912 - DNA, 600 bp, Chicken  19866894101117_2
gctgtgactcatctgtcagaagtcccctccagtcctagcttttattacctctgtgyatgttttctttctcccaaagaatgaaaagtacattgagactttaaggcgtacattacaaaggaactctgctacagtattaaaataaaacccttcatctctctcttaaactttgaagggttgtgggagatactggatgagtttgggtctcttgggactacgtaggtagttcgttgagagggtgcagcccagttgctggtggagtagaagggttgggtgaggattttgtctttcctacacagagarcaaaagtgggaagctgtaaatgcagaaagccacccgtcctcgtgatgtaagtgcaggaagctttcataaattttgcaaggtgtatttgtgtgagcctccagactgatcttggacagtgcacttctctgcagctttttagggagcgatacccaatgttactctcctatggcagagagttttacactggctcagaaagccagttctggattatttgattgatttgggtagactgaaactcccataatttcccataggagcccagtgttcctgattcagtattcaagaggcgttcaagatgaa

SEQ ID NO: 3913 - DNA, 600 bp, Chicken  19866894101126_1
gccattgctgatacaggaagactgttgcaagaacgcatattcctacttgacctccctgttagttactgttgtaacacaattctggctcctccctgctatttctgctctgtgtatagttaatttctgtggagcaggtgtctgcatgtgctcttgaactcctgcaggctgaggccagcagccacaatgccatgtgcggcacagctcctttctcaagtcctatcagtgcccttttgtcctggggacattgctgtctacatctccacccttccctgtgggcctcagggaggcactgctgggctyaccagggctgcattgcctggactactcaacaaacggcttccttctgtcccacagatacccccacgatgttgtgaatcacctgagctgtgacgaagcaaagaatcactttggaggtgtggtgagcctcatccccattgtcctagatggtgtgaaggagtggctatcccacactgagaagctgccgcggcgcatgctgtgtaatgtgagtggtgggaagtgctgtcactgagaagagggcaccccaggatgcagcagctagggcagctatttcccccaaaataccttccgtccaccctgaag

SEQ ID NO: 3914 - DNA, 496 bp, Chicken  19866894101127_1
aatagctgaatactaccagagagtgtaagtgcagtgacatcacaaagactgatctaatcattaaaaagaaaaggtcaggtacttctttaacaatgcaacaagagtcatcccaagtcctccaaacctacaagacagtgcatagcagtaagaagaatttcagagaaaaataggcatcagcgttaatgcccaactaagatgcataatctctttgttctacaaaactcaccaaagaagcttgctgtcagctcagagtgggcaagttacaaacagatgggtgtttgttcttgttagctcaataamacaacatcaccsaaacagttctggtgccatacacagcacaaagggctggatcaaacacagyagagtgaacttggatasgaatagaacaggccacttttcccctcctgccccaaagaccgcttttgtacttagagagacagagagtttattggagggacctgtaattcactctcacaatggggatatgggcaaagca

SEQ ID NO: 3915 - DNA, 484 bp, Chicken  19866894101127_2
ctaccagagagtgtaagtgcagtgacatcacaaagactgatctaatcattaaaaagaaaaggtcaggtacttctttaacaatgcaacaagagtcatcccaagtcctccaaacctacaagacagtgcatagcagtaagaagaatttcagagaaaaataggcatcagcgttaatgcccaactaagatgcataatctctttgttctacaaaactcaccaaagaagcttgctgtcagctcagagtgggcaagttacaaacagatgggtgtttgttcttgttagctcaataamacaacatcaccsaaacagttctggtgccatacacagcacaaagggctggatcaaacacagyagagtgaacttggatasgaatagaacaggccacttttcccctcctgccccaaagaccgcttttgtacttagagagacagagagtttattggagggacctgtaattcactctcacaatggggatatgggcaaagca

SEQ ID NO: 3916 - DNA, 435 bp, Chicken  19866894101127_3
taaaaagaaaaggtcaggtacttctttaacaatgcaacaagagtcatcccaagtcctccaaacctacaagacagtgcatagcagtaagaagaatttcagagaaaaataggcatcagcgttaatgcccaactaagatgcataatctctttgttctacaaaactcaccaaagaagcttgctgtcagctcagagtgggcaagttacaaacagatgggtgtttgttcttgttagctcaataamacaacatcaccsaaacagttctggtgccatacacagcacaaagggctggatcaaacacagyagagtgaacttggatasgaatagaacaggccacttttcccctcctgccccaaagaccgcttttgtacttagagagacagagagtttattggagggacctgtaattcactctcacaatggggatatgggcaaagca

SEQ ID NO: 3917 - DNA, 418 bp, Chicken  19866894101127_4
gtacttctttaacaatgcaacaagagtcatcccaagtcctccaaacctacaagacagtgcatagcagtaagaagaatttcagagaaaaataggcatcagcgttaatgcccaactaagatgcataatctctttgttctacaaaactcaccaaagaagcttgctgtcagctcagagtgggcaagttacaaacagatgggtgtttgttcttgttagctcaataamacaacatcaccsaaacagttctggtgccatacacagcacaaagggctggatcaaacacagyagagtgaacttggatasgaatagaacaggccacttttcccctcctgccccaaagaccgcttttgtacttagagagacagagagtttattggagggacctgtaattcactctcacaatggggatatgggcaaagca

SEQ ID NO: 3918 - DNA, 600 bp, Chicken  19866894101135_1
atctttagcttctcctggggtcataagcagcatctacaaattcagcacgtaaaaaccatccttaagactaattagatttaaagcagtgaggcagggggaaggaggaacggtggtttcctgtttattctctttttatatactgatagatccaacaaggtgaatggcaagaagtttgttactccaggatatagctactgccaagtataacaatttgaaggtacttcctattaaacgtggtaacatccatatcctgggctgatacagtcagaacaaatggtgtgcctctagtgtaattactayattggaaacaggaagtagctttgggctgtagcataaacataattatatcacatcttgaagttacagaaggctggagtaaaagctttcttgccagtagcttaacaaatgccaccattactctgggcattccctcttcactgctccctcctaaagctttcaagagccttactccaaaataaaggttctgtttttatttagcttgcacttcacaccagatgtggaagaggggtttggacttcctccagtgcaaatctggattccccacacctcagcatggcagaaatgcctcatttgcatcct

SEQ ID NO: 3919 - DNA, 600 bp, Chicken  19866894101139_1
atctctggggaggaaaaggaagcgggagggagatgcacatccatccctgtctcctggctgcctgcagtgacaccttgctgtaacagagagcgccaagccacctcctggccagccctctgcatgcctgctcgcagccagagcctctctgcaagaatgcacctttgactttcctaaataacaatgcaattaccttcaaaagctggcagccaaagtacgtgctgagaaatggctaccattaagaagaaattatccgctctcagggaacggccgatttgttaacttgtgaaggaggagaaagarcccagctccagactatgtaggcgttgaggttgagaatgaggtgggagagctgctgttttcaaccagcctgggcacagagctggagaaagcccatggggtttgaaggaagagccctggatgaattggatcaaatgtgttttgctgctgtcttgtacaggtgcagatcaacagctacatgctgggcaatcctcctctatgcatggggcaggtgtcttggggtcatgccctacatgactcttcaggagttggactcaatgacccttatgggtcccttctaactggagacattctatgattcta

SEQ ID NO: 3920 - DNA, 599 bp, Chicken  19866894101140_1
  misc_feature (1)..(26): n is any nucleotide
nnnnnnnnnnnnnnnnnnnnnnnnnncattacacgtaggcactgaggaaacaccatctgcaagtaagtcctaaagcatactatctgcttatgaatagatgccattcttcaaaggtaaagatatgttgtacctcaaaagcagttctgctacttctttagtatcactttaatatatcttcaactttataaaacatcacagacctggcatctacttcaagagaaaacagtattggctgcttttattttttgtttcatgtcctgactacagtttggttaacatcattttcctccccaaattccyttagatgcattctgggtaaacactttgagctctttaatacatattgccactctatktacacaatttccacaaatacactttctgccagcacagcaagatctacacartggcattacacagtataaaaaataaccaaagaatcacaattwcatattgtgattaaatttggtacttttgtaatgaagaccttgtctaacttaacacaatacaagctcgcttaaagcagccttaaaaactccactattaccatgagtaaaaaagctctacactagactgaatcagaaacaaagttactgtgc

SEQ ID NO: 3921 - DNA, 600 bp, Chicken  19866894101140_2
ctgcaagtaagtcctaaagcatactatctgcttatgaatagatgccattcttcaaaggtaaagatatgttgtacctcaaaagcagttctgctacttctttagtatcactttaatatatcttcaactttataaaacatcacagacctggcatctacttcaagagaaaacagtattggctgcttttattttttgtttcatgtcctgactacagtttggttaacatcattttcctccccaaattccyttagatgcattctgggtaaacactttgagctctttaatacatattgccactctatktacacaatttccacaaatacactttctgccagcacagcaagatctacacartggcattacacagtataaaaaataaccaaagaatcacaattwcatattgtgattaaatttggtacttttgtaatgaagaccttgtctaacttaacacaatacaagctcgcttaaagcagccttaaaaactccactattaccatgagtaaaaaagctctacactagactgaatcagaaacaaagttactgtgctccagggaagagaaaagcacttctagcacaacatttcaccaagagcagcaaaactta

SEQ ID NO: 3922 - DNA, 600 bp, Chicken  19866894101140_3
tcaaaggtaaagatatgttgtacctcaaaagcagttctgctacttctttagtatcactttaatatatcttcaactttataaaacatcacagacctggcatctacttcaagagaaaacagtattggctgcttttattttttgtttcatgtcctgactacagtttggttaacatcattttcctccccaaattccyttagatgcattctgggtaaacactttgagctctttaatacatattgccactctatktacacaatttccacaaatacactttctgccagcacagcaagatctacacartggcattacacagtataaaaaataaccaaagaatcacaattwcatattgtgattaaatttggtacttttgtaatgaagaccttgtctaacttaacacaatacaagctcgcttaaagcagccttaaaaactccactattaccatgagtaaaaaagctctacactagactgaatcagaaacaaagttactgtgctccagggaagagaaaagcacttctagcacaacatttcaccaagagcagcaaaacttataatcaaaatgtatctggcagaatttgttcaagatcaatccaaaacaagcc

SEQ ID NO: 3923 - DNA, 600 bp, Chicken  19866894101140_4
cttctttagtatcactttaatatatcttcaactttataaaacatcacagacctggcatctacttcaagagaaaacagtattggctgcttttattttttgtttcatgtcctgactacagtttggttaacatcattttcctccccaaattccyttagatgcattctgggtaaacactttgagctctttaatacatattgccactctatktacacaatttccacaaatacactttctgccagcacagcaagatctacacartggcattacacagtataaaaaataaccaaagaatcacaattwcatattgtgattaaatttggtacttttgtaatgaagaccttgtctaacttaacacaatacaagctcgcttaaagcagccttaaaaactccactattaccatgagtaaaaaagctctacactagactgaatcagaaacaaagttactgtgctccagggaagagaaaagcacttctagcacaacatttcaccaagagcagcaaaacttataatcaaaatgtatctggcagaatttgttcaagatcaatccaaaacaagcctaggcttgggggggtgaggagagcttgattagaaggaattat

SEQ ID NO: 3924 - DNA, 599 bp, Chicken  19866894101142_1
  misc_feature (1)..(132): n is any nucleotide
nnnnnnnnnnnnnnnnnnnnnnnnnnnnnnnnnnnnnnnnnnnnnnnnnnnnnnnnnnnnnnnnnnnnnnnnnnnnnnnnnnnnnnnnnnnnnnnnnnnnnnnnnnnnnnnnnnnnnnnnnnnnnnnnnnnntactttctgtaattgtgcttgcttctggttccttctgttttcttttgttttgttgttgttttgttttgttgttgttttgttttgtttttgagcagtatcagctgacagactcccacatacatctaagtagacccctttagagcaccttgtcatagttactgattgtgstctactgtattagaaattaccctagaaataactagtttcagcattttagataggtatattcagaggtgctcaaaaaacattttgctcaaatgaagaactcaacatctacagtaaagagctgttgataaaattgtttggcatcagtgcctaaaaattgtagtcacctatttgttcagggaaagagttgtcaaatagtcccagatcccaatcaactctacataatccatttctctctttctcttcctttttgtaagatgttttcctatgggaaacagtcttttatgagagctgtctcctat

SEQ ID NO: 3925 - DNA, 599 bp, Chicken  19866894101145_1
  misc_feature (1)..(59): n is any nucleotide
nnnnnnnnnnnnnnnnnnnnnnnnnnnnnnnnnnnnnnnnnnnnnnnnnnnnnnnnnnnttctgggacagttctttcatcctgttgctgcgcagccaatgctgccaagtcttgtatctgaattggttgtggagggttcatcttttatctcttgggagattcattttattttctccaaccactccaaaagatttgtcttcatgagtgaaggcttgagaagtgatgcagaactgtctgggtttcaccatggaatatctggttgtcatagtttgattctctaccttcagattgcaaacttgakagtaacaattaaacacaaaaacatttattgattaagcaacatactattgagaaacaaataagataactttaaaatcagtaatttaaacaactaataaatgcacaactgttactaatttacagttagtacttttgcataccatataataataactcttaagagttattattattgaatgttatgagtcataactgctactgaattacaaacccttcagccttctctcctaaaagtcttagtattagggttcaagtctattcatctttactccaaccttcctttccaacttcttcgggcat

SEQ ID NO: 3926 - DNA, 599 bp, Chicken  19866894101149_1
  misc_feature (1)..(146): n is any nucleotide
nnnnnnnnnnnnnnnnnnnnnnnnnnnnnnnnnnnnnnnnnnnnnnnnnnnnnnnnnnnnnnnnnnnnnnnnnnnnnnnnnnnnnnnnnnnnnnnnnnnnnnnnnnnnnnnnnnnnnnnnnnnnnnnnnnnnnnnnnnnnnnnnnntttctgcagatattctgcatgtattttcttttttagtgatctgtatgcaggataaatatggatttcagtagatcacctatgtcctgtggtggtgtgccattcccaaagctcattgtttagggaggagagcagtgcaggctatagtttccaatgrcaagctgatccctcatgatactctttctcactgaaagttgtctgggctgttggtatcacttcagccttagaatctgatatacaccamagaggctctcaaaatcttgtgctgtctcactaaatgccagtggcagattcatagaaagagcctgatcaagagattcaacaaggaagcttttcttaatcatcccacttatgcactgaataatttgcattcagagagtgttcacacttgtaaaaattaactaaagttggaaaaatagtcccataattattctgggtttattttctaagaaaaaa

SEQ ID NO: 3927 - DNA, 599 bp, Chicken  19866894101149_2
  misc_feature (1)..(59): n is any nucleotide
nnnnnnnnnnnnnnnnnnnnnnnnnnnnnnnnnnnnnnnnnnnnnnnnnnnnnnnnnnntttctgcagatattctgcatgtattttcttttttagtgatctgtatgcaggataaatatggatttcagtagatcacctatgtcctgtggtggtgtgccattcccaaagctcattgtttagggaggagagcagtgcaggctatagtttccaatgrcaagctgatccctcatgatactctttctcactgaaagttgtctgggctgttggtatcacttcagccttagaatctgatatacaccamagaggctctcaaaatcttgtgctgtctcactaaatgccagtggcagattcatagaaagagcctgatcaagagattcaacaaggaagcttttcttaatcatcccacttatgcactgaataatttgcattcagagagtgttcacacttgtaaaaattaactaaagttggaaaaatagtcccataattattctgggtttattttctaagaaaaaagaaatctatggcctttcagagaactcagcaggaagttgcctttactttgtttcctttatagttcattgtattcaggaaggaactaat

SEQ ID NO: 3928 - DNA, 600 bp, Chicken  19866894101150_1
tctctgagcctccttttatggcatcttttgtgagtggtgcagtagtattaattttgacttcttcccatcgtgaattccagcacacagtgcagacaactgcctgggaagttatgctgtgtaataatctgttccaacacgagctgaagcctcctgggtaaggagtgaggtgggagagcgacccagatacatggctcttttgttaactgttactgaggaaggatggggctgacattcaagcagtgagacttcattgacagggggaactgcagtaatgtacttgtttgtttggatgaaagtccrgggaaaagtgagagatttttgttggcatttcccccactcagtactgatcttatcatgctgctttggtagcagtgcccctatggcttcttgccagatgataccattggagtccatctgagatgtgcaggataaaggatcttagggaattacaagtattatgactttccagttatacagttctgatgagtagagtcttctgacctagaaaactcacttgcttttaaaaattctattattgaaaggaaaggcaatgcaagagctggaaagtggagcctgatgttcataagggtcctgagagca

SEQ ID NO: 3929 - DNA, 600 bp, Chicken  19866894101151_1
taacggccttatggtactcagagcaccagttaaacactgtggtcattaaaacgtagtgtccataggtcacaactgttgttcagggaggccaggacaacagggaaagcaaaataacgggcacgttgaaacagaagtgactgacgttattttgagcaagcagtcaggagagtacatttactccagctcacaggcatcacacttcagtgacagtgagaaatgcagtgctgctggactgactgaaaacagcagctggaggtggaagacggtactgtaaaccaacctactgaaagggatggagtrgacatggccagatcagatttagaagagttaccaactgaatgcactaataataggggcrtgaggacattccaggcaggatctctaaacaggatatcctgtgcatatggatgtgtatgaaaggggacacaaatgcaaaaattgaatgaggatgttgactaatgaggctgcaacaaattttcaaacacaagaaacatatccttgtaatctggacttgatcatgatctcactgaaagaagtggacaaatttgtgccaacatggaaatggaaaataagtctttcaaccaactaatttcttcctga

SEQ ID NO: 3930 - DNA, 600 bp, Chicken  19866894101151_2
tccataggtcacaactgttgttcagggaggccaggacaacagggaaagcaaaataacgggcacgttgaaacagaagtgactgacgttattttgagcaagcagtcaggagagtacatttactccagctcacaggcatcacacttcagtgacagtgagaaatgcagtgctgctggactgactgaaaacagcagctggaggtggaagacggtactgtaaaccaacctactgaaagggatggagtrgacatggccagatcagatttagaagagttaccaactgaatgcactaataataggggcrtgaggacattccaggcaggatctctaaacaggatatcctgtgcatatggatgtgtatgaaaggggacacaaatgcaaaaattgaatgaggatgttgactaatgaggctgcaacaaattttcaaacacaagaaacatatccttgtaatctggacttgatcatgatctcactgaaagaagtggacaaatttgtgccaacatggaaatggaaaataagtctttcaaccaactaatttcttcctgaagccgctaaatgacaatgaactgcagcagcatttttgcagaccacaagctattccatt

SEQ ID NO: 3931 - DNA, 600 bp, Chicken  19866894101154_1
agggaagaaattcagggatttgccactgtgaatattcctttccttctctttcaggaggaaccaagagtgttggcaagcattggagtacaaagtaagggaagatctggtaaccaaaagtttggaaaggatcctttctctaaataggagaaaagacaggtaagtgaaaaacaggaggaagtatatgattatttatttcatctccaaagatgcttacttttatatcagagaacaagttcctaagtatgcattttctgatgttcttcaactgtttggtgcttgtttcctacagcatatttacayataatgtgcaataatagtagaagtctaaaaagatttttacacacttatctgcaaaattcacayattttgcatacacgttgcccaccttccctatgttacttatcataaggttaacttttcttatgtgattttatatctcataaaatgatttgtaaattatagtagactggaacagaaattacgctttgatctgtctgaaatacgattatgttaattttcagtggagagtcactacttctgtgtcatggtgtgatagagaaggtgatcctatttttctgccaggtttttatttatttcttt

SEQ ID NO: 3932 - DNA, 600 bp, Chicken  19866894101154_2
agagtgttggcaagcattggagtacaaagtaagggaagatctggtaaccaaaagtttggaaaggatcctttctctaaataggagaaaagacaggtaagtgaaaaacaggaggaagtatatgattatttatttcatctccaaagatgcttacttttatatcagagaacaagttcctaagtatgcattttctgatgttcttcaactgtttggtgcttgtttcctacagcatatttacayataatgtgcaataatagtagaagtctaaaaagatttttacacacttatctgcaaaattcacayattttgcatacacgttgcccaccttccctatgttacttatcataaggttaacttttcttatgtgattttatatctcataaaatgatttgtaaattatagtagactggaacagaaattacgctttgatctgtctgaaatacgattatgttaattttcagtggagagtcactacttctgtgtcatggtgtgatagagaaggtgatcctatttttctgccaggtttttatttatttctttatttcattaatgtagcttgataaagaagaagcaacttgcccttctggaaagaccatcattcrt

SEQ ID NO: 3933 - DNA, 600 bp, Chicken  19866894101154_3
yattttgcatacacgttgcccaccttccctatgttacttatcataaggttaacttttcttatgtgattttatatctcataaaatgatttgtaaattatagtagactggaacagaaattacgctttgatctgtctgaaatacgattatgttaattttcagtggagagtcactacttctgtgtcatggtgtgatagagaaggtgatcctatttttctgccaggtttttatttatttctttatttcattaatgtagcttgataaagaagaagcaacttgcccttctggaaagaccatcattcrttcaccttgaaagtttgcctacacgtcctcctgtggaacggtccactccacatgtttcttttaacagtgtgacagctgaagccatagaggtattagacacaggggaaaagatatttttgtttcgtgaccggagtgatccaacactttcttttcataactatccgagaaaaaagaagaagaactttcttaattccaaaaaggctgctcgtgcaaatatcaactaatgagggagacctccagttgaagaatcaactggggaagaaggaagttatttaaaaatcagaagaataatgagaaata

SEQ ID NO: 3934 - DNA, 600 bp, Chicken  19866894101164_1
gtggcctcctatggaaatgaacacagcttcagcatagtctataggtctgtgggtagttgttgcttgagtcttagctggtctagactaatgatgagcctgtctgcctctgtctgaacaccccaatttttccatgaagtgcaccaaatgatagcatggcctaaaataaatattttttttggacttcccctgcccggtcaccctgcttttttaccttcagaccatagagtattaatcaaaacctgtttgcctgcctttttaaggctttgcttttttctgactaatgtctcattacctttgctkttgccttcctttcctcttctgcccactgctgcacgtctctctctctttttttttttaatcaggccttttgcctggaaaaagcaggctgtgccttctgccttgcacacctgccctcatctgtgttggccacttaggtatttttgcctttttttattggcccgttgcatgcatgttgatcgtctgtgcagctgaggtcaaggaatttccatgtcgtacttggagagagggtttccccttcacagcctctgcctcaaccaggcaccagttcatgtagaaatagcttggcctctcttggaaata

SEQ ID NO: 3935 - DNA, 600 bp, Chicken  19866894101164_2
ggtctgtgggtagttgttgcttgagtcttagctggtctagactaatgatgagcctgtctgcctctgtctgaacaccccaatttttccatgaagtgcaccaaatgatagcatggcctaaaataaatattttttttggacttcccctgcccggtcaccctgcttttttaccttcagaccatagagtattaatcaaaacctgtttgcctgcctttttaaggctttgcttttttctgactaatgtctcattacctttgctkttgccttcctttcctcttctgcccactgctgcacgtctctctktctttttttttttaatcaggccttttgcctggaaaaagcaggctgtgccttctgccttgcacacctgccctcatctgtgttggccacttaggtatttttgcctttttttattggcccgttgcatgcatgttgatcgtctgtgcagctgaggtcaaggaatttccatgtcgtacttggagagagggtttccccttcacagcctctgcctcaaccaggcaccagttcatgtagaaatagcttggcctctcttggaaataggtctgtgtgaaataataaaataatattgtctttttgaggtca

SEQ ID NO: 3936 - DNA, 600 bp, Chicken  19866894101164_3
tctgtgggtagttgttgcttgagtcttagctggtctagactaatgatgagcctgtctgcctctgtctgaacaccccaatttttccatgaagtgcaccaaatgatagcatggcctaaaataaatattttttttggacttcccctgcccggtcaccctgcttttttaccttcagaccatagagtattaatcaaaacctgtttgcctgcctttttaaggctttgcttttttctgactaatgtctcattacctttgctkttgccttcctttcctcttctgcccactgctgcacgtctctctctktttttttttttaatcaggccttttgcctggaaaaagcaggctgtgccttctgccttgcacacctgccctcatctgtgttggccacttaggtatttttgcctttttttattggcccgttgcatgcatgttgatcgtctgtgcagctgaggtcaaggaatttccatgtcgtacttggagagagggtttccccttcacagcctctgcctcaaccaggcaccagttcatgtagaaatagcttggcctctcttggaaataggtctgtgtgaaataataaaataatattgtctttttgaggtcagg

SEQ ID NO: 3937 - DNA, 600 bp, Chicken  19866894101167_1
gcgctccggggcttcgcgcagcccgggggatcccaaacccggcggggtcggggctgcgctcagtactttgtgcccaccgagccgggctggggccgatccctgctggctgctggtgccgctgctcggtcctgccgcaatgtgttgcttttctcacctattttttcccattggtgccccacgtcggtcctgggagaggaccatcaccgttgggttttcttttgaaattctttttgcacgcagttctcttgaaagggtttgttctgagctcctgctcagcgctgaatcccctctggggcgtcrggggcagctttggctccagacctctgcacctcaaatggatgcccgacagtcgcatctaaaagcaaatataatttctcgcccctgttactaatggcaacgaagattgccaaagtgaacaaactctcaggagtgagtgaggccgtccccgtggatgcacatcgcttcctgccggcctgtccgtgccccaccggggggcagctccactgctttggctctcatcgatggcagcagctggcggtgaatgccggtgtgggcaagggagtccctcctgggttccccacatccaggactgctttacgt

SEQ ID NO: 3938 - DNA, 599 bp, Chicken  19866894101168_1
  misc_feature (1)..(61): n is any nucleotide
nnnnnnnnnnnnnnnnnnnnnnnnnnnnnnnnnnnnnnnnnnnnnnnnnnnnnnnnnnnnntggcactgtaggggacggtgtccctttttacagagggcagttgctggtttctttttcttctctgttcctgtagaactatattctgagtaaaggaggctggtgctgagtgaatgtgctatatatgaatgcctggtgggttattttagtttacctcaatacacaggttattcttaattagctaacactgtttctatcacagaaaccccccaaaataaaactctaataccttgacatcaaaratctgtttgtgcagccagatgtgctgacgacagtctggcttcagagctgtgatgagtctttttgcagggacactcagcctcagytttttctgggtaagtggtgtcctgggtgactgcaggtccatcaagaggaccttcagcttcatgaagtgcctgtgtagattttgggatacctctcatgggctgaagcttctgccacgaacactcttcctgtcattgatctggaccatttcagctagaggatggttctgaggtgacacaaccctcttgtccaggctgaagtccctttgatgcctcca

SEQ ID NO: 3939 - DNA, 600 bp, Chicken  19866894101168_2
ctttttacagagggcagttgctggtttctttttcttctctgttcctgtagaactatattctgagtaaaggaggctggtgctgagtgaatgtgctatatatgaatgcctggtgggttattttagtttacctcaatacacaggttattcttaattagctaacactgtttctatcacagaaaccccccaaaataaaactctaataccttgacatcaaaratctgtttgtgcagccagatgtgctgacgacagtctggcttcagagctgtgatgagtctttttgcagggacactcagcctcagytttttctgggtaagtggtgtcctgggtgactgcaggtccatcaagaggaccttcagcttcatgaagtgcctgtgtagattttgggatacctctcatgggctgaagcttctgccacgaacactcttcctgtcattgatctggaccatttcagctagaggatggttctgaggtgacacaaccctcttgtccaggctgaagtccctttgatgcctccatgagatagcattttgagccatgagaaaggtgtgtacaacaccattacatgccagaacaaaatcctcacgtcctcccatccttgct

SEQ ID NO: 3940 - DNA, 600 bp, Chicken  19866894101168_3
gaagcttctgccacgaacactcttcctgtcattgatctggaccatttcagctagaggatggttctgaggtgacacaaccctcttgtccaggctgaagtccctttgatgcctccatgagatagcattttgagccatgagaaaggtgtgtacaacaccattacatgccagaacaaaatcctcacgtcctcccatccttgctgctctaccatgagtgactggggactatcagcacactatggatgtgatcaatattgttgaaactcaaggctctatctgctcaccttcagaggatttggaagycactgagtgactgttaggagaggcacagaagtgtgaggtgcagaggcagctttgctgagctatgctggggtggagggctgggtgttgtgctcttgaaagaaatagggcaatgaggcagcgaggagacagcaaagcaccaggctcaggcacacaggcagggtggccctgagcaagagccagagagcaccctgaagggcttctgccaggaaggggtgcagaatgggtggaactggagcatctgaggacaacacagacgccagcaaatgcagcgctgagtgcactgtgccacacgtcctcttc

SEQ ID NO: 3941 - DNA, 575 bp, Chicken  19866894101169_1
cttcaggaggagaaggggggctgttttcagcctgtgagaaggctttgtcaggtttgggtcaggcagagcacagggctgtgtgtgctcagagggcggacgagccgggtgtcacacggcagcctgcaggcaccgctcagaaaggcaagagacagcagtgtgcgtgcggggtgtgggggtgagggctgccatgtcttgttttggtgcaaggctgtttgctacaacaatgatccctctggaaagcagtctcagaaagatggattgaataaagagcagagagagaaatggccgtttccatactcmctgtgctgttgtctgagctgttacaagcattgcttaacaagatacctgcatggtcgtgatcccagtctggtacatatgaggcctgatcctgtggtcatacatatccagtgaagctggtgtcagtggagccatgtaactacataactgaaaaggatgggggggagaagaaaggatcctctttgttctgtttgtttcttctgcaacgtggttgcatctatttttatgctttgaaattctcaggtttatttcactcacagcttgtctagtgaatcaca

SEQ ID NO: 3942 - DNA, 599 bp, Chicken  19866894101174_1
  misc_feature (1)..(128): n is any nucleotide
nnnnnnnnnnnnnnnnnnnnnnnnnnnnnnnnnnnnnnnnnnnnnnnnnnnnnnnnnnnnnnnnnnnnnnnnnnnnnnnnnnnnnnnnnnnnnnnnnnnnnnnnnnnnnnnnnnnnnnnnnnnnnnnntccaagttcttaatcttttttttcttgttttgtttcagtggttttttgttttgttttattttagggctggttgggttgctattagcctagggaaagaggagctaatcgtaacaatcagtactggagagttgactgtgaagacaggaagaaaagattatagtagttcagatartttatggtttatgttaaaggtggcttacarttgagggaacattgtgtaaacttaatggcatgagctagctttttctgtaggattgttgattatcatctgaggtggcgaatacccattggattagtccactgaattatgcatrttattctgtgctctgttatgtagttaaaggtaaactcaggttgaaatagggaagtgaagaaaacaagaattaatccagagactttaatttgagctcttattgatgacatctataaacttaaactctgtacttctgttcttgtgtggaaatgtctagg

SEQ ID NO: 3943 - DNA, 599 bp, Chicken  19866894101174_2
  misc_feature (1)..(98): n is any nucleotide
nnnnnnnnnnnnnnnnnnnnnnnnnnnnnnnnnnnnnnnnnnnnnnnnnnnnnnnnnnnnnnnnnnnnnnnnnnnnnnnnnnnnnnnnnnnnnnnnnntccaagttcttaatcttttttttcttgttttgtttcagtggttttttgttttgttttattttagggctggttgggttgctattagcctagggaaagaggagctaatcgtaacaatcagtactggagagttgactgtgaagacaggaagaaaagattatagtagttcagatartttatggtttatgttaaaggtggcttacarttgagggaacattgtgtaaacttaatggcatgagctagctttttctgtaggattgttgattatcatctgaggtggcgaatacccattggattagtccactgaattatgcatrttattctgtgctctgttatgtagttaaaggtaaactcaggttgaaatagggaagtgaagaaaacaagaattaatccagagactttaatttgagctcttattgatgacatctataaacttaaactctgtacttctgttcttgtgtggaaatgtctaggccagagcaaatgtgtcagtggctcagcagg

SEQ ID NO: 3944 - DNA, 600 bp, Chicken  19866894101174_3
cttttttttcttgttttgtttcagtggttttttgttttgttttattttagggctggttgggttgctattagcctagggaaagaggagctaatcgtaacaatcagtactggagagttgactgtgaagacaggaagaaaagattatagtagttcagatartttatggtttatgttaaaggtggcttacarttgagggaacattgtgtaaacttaatggcatgagctagctttttctgtaggattgttgattatcatctgaggtggcgaatacccattggattagtccactgaattatgcatrttattctgtgctctgttatgtagttaaaggtaaactcaggttgaaatagggaagtgaagaaaacaagaattaatccagagactttaatttgagctcttattgatgacatctataaacttaaactctgtacttctgttcttgtgtggaaatgtctaggccagagcaaatgtgtcagtggctcagcaggtayagtgagcaccttactctcagctgaaagtgaaaataaatgggcagtgttaagaataamccaataagccccrtaaattaagactaggatttgtaagtctagtctaatagtca

SEQ ID NO: 3945 - DNA, 578 bp, Chicken  19866894101174_4
gagggaacattgtgtaaacttaatggcatgagctagctttttctgtaggattgttgattatcatctgaggtggcgaatacccattggattagtccactgaattatgcatrttattctgtgctctgttatgtagttaaaggtaaactcaggttgaaatagggaagtgaagaaaacaagaattaatccagagactttaatttgagctcttattgatgacatctataaacttaaactctgtacttctgttcttgtgtggaaatgtctaggccagagcaaatgtgtcagtggctcagcaggtayagtgagcaccttactctcagctgaaagtgaaaataaatgggcagtgttaagaataamccaataagccccrtaaattaagactaggatttgtaagtctagtctaatagtcagagcaggtcctcaggaagacattaaaacctgtagaccaaatctgtttcttggtcaatgaagtgtgaccccattatggctggtggagctatgcctgctgacaattgtagtgccagctagtcattagaaatgttaacatcatgttttcatgctctgagataacactaatt

SEQ ID NO: 3946 - DNA, 521 bp, Chicken  19866894101174_5
ttatcatctgaggtggcgaatacccattggattagtccactgaattatgcatrttattctgtgctctgttatgtagttaaaggtaaactcaggttgaaatagggaagtgaagaaaacaagaattaatccagagactttaatttgagctcttattgatgacatctataaacttaaactctgtacttctgttcttgtgtggaaatgtctaggccagagcaaatgtgtcagtggctcagcaggtayagtgagcaccttactctcagctgaaagtgaaaataaatgggcagtgttaagaataamccaataagccccrtaaattaagactaggatttgtaagtctagtctaatagtcagagcaggtcctcaggaagacattaaaacctgtagaccaaatctgtttcttggtcaatgaagtgtgaccccattatggctggtggagctatgcctgctgacaattgtagtgccagctagtcattagaaatgttaacatcatgttttcatgctctgagataacactaatt

SEQ ID NO: 3947 - DNA, 508 bp, Chicken  19866894101174_6
tggcgaatacccattggattagtccactgaattatgcatrttattctgtgctctgttatgtagttaaaggtaaactcaggttgaaatagggaagtgaagaaaacaagaattaatccagagactttaatttgagctcttattgatgacatctataaacttaaactctgtacttctgttcttgtgtggaaatgtctaggccagagcaaatgtgtcagtggctcagcaggtayagtgagcaccttactctcagctgaaagtgaaaataaatgggcagtgttaagaataamccaataagccccrtaaattaagactaggatttgtaagtctagtctaatagtcagagcaggtcctcaggaagacattaaaacctgtagaccaaatctgtttcttggtcaatgaagtgtgaccccattatggctggtggagctatgcctgctgacaattgtagtgccagctagtcattagaaatgttaacatcatgttttcatgctctgagataacactaatt

SEQ ID NO: 3948 - DNA, 599 bp, Chicken  19866894101176_1
  misc_feature (1)..(110): n is any nucleotide
nnnnnnnnnnnnnnnnnnnnnnnnnnnnnnnnnnnnnnnnnnnnnnnnnnnnnnnnnnnnnnnnnnnnnnnnnnnnnnnnnnnnnnnnnnnnnnnnnnnnnnnnnnnnnncagcaatctccagggagtctgtatgtttcttcttggcttacactatcttatacatggacaacttccctttggatagcaaccaccacttgttctctgggtagtatctaacttcatggtaggttgttacatggctgaatttcctgggcactgtggtcaggtgaaaaacagatcagctctactttcatgaggragggaagcctacataattcattgttcttcaagtgtactttgtcatctactgaacttatcctatgtgtatcttatcacctgcctaccctggcttctaacctctttctgataggacatccagaatttgacagaatcacagaaaaacctagattgtaagggaaccctggaccaacccactattgaaagcagggccttaggtttggttatccagggccctgtcaagccacatccatagcagtgaagaatgatgctgccactgaagtcagtgattttaccacttckccaagcaaccactttcaa

SEQ ID NO: 3949 - DNA, 600 bp, Chicken  19866894101176_2
agctctactttcatgaggragggaagcctacataattcattgttcttcaagtgtactttgtcatctactgaacttatcctatgtgtatcttatcacctgcctaccctggcttctaacctctttctgataggacatccagaatttgacagaatcacagaaaaacctagattgtaagggaaccctggaccaacccactattgaaagcagggccttaggtttggttatccagggccctgtcaagccacatccatagcagtgaagaatgatgctgccactgaagtcagtgattttaccacttckccaagcaaccactttcaatgtgtaggtctcatggtgaatttatttactaattttttttttttttttggtgtgacatttttcctctggtaacttgtgtccgttgcaccttacctttttgccgtgcattcctgtgaggagtgtacttctctgtacatatacctacgtctctaaaactaccttttagaatcgtacaattgtctaggttggaaaagaccttcaagactgtcaaggagaatcctgaactaacgagtcccatcactaaactgtgtcccttagagctcacgtatctaagtgctcttg

SEQ ID NO: 3950 - DNA, 600 bp, Chicken  19866894101177_1
ctcaggcttaaactgtgtctttttttttttgtccaatggattttcttccagttttgctgtgatttgaaatatgaaggcaatacgtcccttctctcatttcccagaaaacacgcagtgatccgtagaaacataaaccaaataccttagttcttccaaaagcagaacttcagcagcaataggattcctaatggggagatggaaaggaaagatagcttggatgagagtttccaatcctggtcacacaagctatatttactaataaacaaaagaggatcataccttgggtttttgtaattatayacaattatctatgctgcttaatgattttcctgtttcctggaacagtatcttcctgtaccagcttgmactgatggtaagagttttattttagagagaaatccctgataaatccaccawataatagattcttcccctttctcaccctttcatccccatttttataacacagagtgagagctgctttgtttgttaggcaaacttttacatataacactatctgccatgatcctcttcactaccattttgcttcatccgctttgattctgtgctcagtttctttgtagactgcttttgaatgtc

SEQ ID NO: 3951 - DNA, 600 bp, Chicken  19866894101177_2
aaatatgaaggcaatacgtcccttctctcatttcccagaaaacacgcagtgatccgtagaaacataaaccaaataccttagttcttccaaaagcagaacttcagcagcaataggattcctaatggggagatggaaaggaaagatagcttggatgagagtttccaatcctggtcacacaagctatatttactaataaacaaaagaggatcataccttgggtttttgtaattatayacaattatctatgctgcttaatgattttcctgtttcctggaacagtatcttcctgtaccagcttgmactgatggtaagagttttattttagagagaaatccctgataaatccaccawataatagattcttcccctttctcaccctttcatccccatttttataacacagagtgagagctgctttgtttgttaggcaaacttttacatataacactatctgccatgatcctcttcactaccattttgcttcatccgctttgattctgtgctcagtttctttgtagactgcttttgaatgtcttgtataattgtttattactctactgtctgctatggcactgagattgtgctatgctagcatattag

SEQ ID NO: 3952 - DNA, 600 bp, Chicken  19866894101177_3
atccgtagaaacataaaccaaataccttagttcttccaaaagcagaacttcagcagcaataggattcctaatggggagatggaaaggaaagatagcttggatgagagtttccaatcctggtcacacaagctatatttactaataaacaaaagaggatcataccttgggtttttgtaattatayacaattatctatgctgcttaatgattttcctgtttcctggaacagtatcttcctgtaccagcttgmactgatggtaagagttttattttagagagaaatccctgataaatccaccawataatagattcttcccctttctcaccctttcatccccatttttataacacagagtgagagctgctttgtttgttaggcaaacttttacatataacactatctgccatgatcctcttcactaccattttgcttcatccgctttgattctgtgctcagtttctttgtagactgcttttgaatgtcttgtataattgtttattactctactgtctgctatggcactgagattgtgctatgctagcatattagaaacaagcctctatggtcaaaccacagtctgtcagtgccatgagcttttca

SEQ ID NO: 3953 - DNA, 600 bp, Chicken  19866894101182_1
accacctggtgaaaggatggggtctttagtagatgcccacggcagcaagaaggcagcacaggcactgagcagctctgctctccaattcctgcttcgtgcacatggtgtgactttcccagcttgaattcctcatgtctattcagaccatgtctgactcccatcccaggcacgtccgtgcgaccgcttagggaaaacaaaagctgggaggatggagataacgttgctgatgttggaaatctgtgtatccccttggtgctgggagatacccacagcaagtggggagctttctatgaaaaatcmcaggttttgctaaggctctcaggaaaacactgctctcctgccagcctcacattgcatcagtgctttgtggaccagatctccctctgtgccctgcacggatggatgtgtttttgccttggccccaccaaacagccgtgagtcagctaatccaaaccaaacagcacggggagcgggaggtcagcccagtgcacggccgtgagctcagaaagcagcacctcgagcacaaccagggacaaaatgacaaccccacgggcagggcagtgctgggtgtcagcaaggactggtgccaggtcagggagc

SEQ ID NO: 3954 - DNA, 600 bp, Chicken  19866894101183_1
ctgcatagaaaagattttcctcctacctttggtaggtgaccaatttctgctctgaaccaggaagacccacggcacttgcaattgttacccaagctggtgaaactgcaggtgttactctttcttattcatcagtgactaatcaacttttgagcttcactatcccctgtatgccatcaacaggctgtagttttcgaggccccagtcatcactctggaatctattgaccaacaggtacaaagcacaggttgataaataacagggcttgcgtttccccactgtttttcagttcacatgacaacygcatgagagagaggtacagaacaggatgaagcmtttgagttgttctggctcccagggcacctagggaggtgaaatgaggggaggggagaaaaatgaaaacaaaacgtttcctgctactcctttccgcagcaaagttcagcctggggaatccactggcacagtagatcaaaggaggtatgtcaaacaactgatgaccaggatcatttagctaacagctgacacaacaacaaaatggctagttacagctacaggacctgggaaaggatggcttgagagaacacacctttctgtatacactca

SEQ ID NO: 3955 - DNA, 600 bp, Chicken  19866894101183_2
aggtgaccaatttctgctctgaaccaggaagacccacggcacttgcaattgttacccaagctggtgaaactgcaggtgttactctttcttattcatcagtgactaatcaacttttgagcttcactatcccctgtatgccatcaacaggctgtagttttcgaggccccagtcatcactctggaatctattgaccaacaggtacaaagcacaggttgataaataacagggcttgcgtttccccactgtttttcagttcacatgacaacygcatgagagagaggtacagaacaggatgaagcmtttgagttgttctggctcccagggcacctagggaggtgaaatgaggggaggggagaaaaatgaaaacaaaacgtttcctgctactcctttccgcagcaaagttcagcctggggaatccactggcacagtagatcaaaggaggtatgtcaaacaactgatgaccaggatcatttagctaacagctgacacaacaacaaaatggctagttacagctacaggacctgggaaaggatggcttgagagaacacacctttctgtatacactcaggagaaggccaaatgtgccgcacctgctggctg

SEQ ID NO: 3956 - DNA, 599 bp, Chicken  19866894101186_1
  misc_feature (1)..(102): n is any nucleotide
nnnnnnnnnnnnnnnnnnnnnnnnnnnnnnnnnnnnnnnnnnnnnnnnnnnnnnnnnnnnnnnnnnnnnnnnnnnnnnnnnnnnnnnnnnnnnnnnnnnnnnaaattgacctcacttcccttgctagagcactgcctaaaacagagggtggctgccaaatgcatgctagctacttgctcctttgctaagaaatgaaaaataagcattttccaactgggagtggattcctcttgcttaagggctgaagaatcagttagatataccacacttctgggtcacctccagcagaagtggcagctwaaaaaggkctgtgggatgcacaggctgacaacaggctgtatgccatacccattgcaatagaaatcctggtgtgttaacctttctctgaagatgcttggtgaccagtctctggtcttttaacagaagactgttttgtgaagctctagtgcatgaagtatgacttacacctaggtaccttgtcgggagttaaatcagtcattgcaatgaataggaatataatgtttttatgagactgctcactgtgtgccttggatacccatcactttggatgtatgttgggattgttcagtgccagcaat

SEQ ID NO: 3957 - DNA, 599 bp, Chicken  19866894101186_2
  misc_feature (1)..(94): n is any nucleotide
nnnnnnnnnnnnnnnnnnnnnnnnnnnnnnnnnnnnnnnnnnnnnnnnnnnnnnnnnnnnnnnnnnnnnnnnnnnnnnnnnnnnnnnnnnnnnnaaattgacctcacttcccttgctagagcactgcctaaaacagagggtggctgccaaatgcatgctagctacttgctcctttgctaagaaatgaaaaataagcattttccaactgggagtggattcctcttgcttaagggctgaagaatcagttagatataccacacttctgggtcacctccagcagaagtggcagctwaaaaaggkctgtgggatgcacaggctgacaacaggctgtatgccatacccattgcaatagaaatcctggtgtgttaacctttctctgaagatgcttggtgaccagtctctggtcttttaacagaagactgttttgtgaagctctagtgcatgaagtatgacttacacctaggtaccttgtcgggagttaaatcagtcattgcaatgaataggaatataatgtttttatgagactgctcactgtgtgccttggatacccatcactttggatgtatgttgggattgttcagtgccagcaatggtgtctc

SEQ ID NO: 3958 - DNA, 600 bp, Chicken  19866894101187_1
ttgaaaattttcacaaggcagagaaatcgtttcctgcctggctccatttcatggctctttggtctcctggacccttgcaaaggttaattaaataatgctcagatatttatgatgcgtaaagtcccagactagtattcatgctaagaagcgtaaacaggtcactcagagaaaataatctggcagaaatttagaggaaaatattgttgacctatacataaatatacgtttatttgctattaatgtaaaaaaggctaagctttgttaccagtacaaagatcaatttttaggagaaaactgtaygattctgaccatacagaaattggacagaaaagcattaatctgaggcattttggttttaaatgttccgaacggaagctgcgcttttagacagctttccaatatccctattagatataatgttatagtcctattacacatgttgcctactagacgtgctctgacttttatagatgtcaactccatttcttaattcaagccatttgtctcctgtgatctctgcgcctctgggttagagttccagccaaagaggtgagccagctcctatctgcaacgcggccataaaatcctccggcgctgcat

SEQ ID NO: 3959 - DNA, 600 bp, Chicken  19866894101191_1
tattgaggtttgtagcaaaataaacaagactgttttttaatattaacaacaagcctgaaagctgttgtttgtgtttatggcaggtcattgaatggaaagcaatatcttggtggtccaagggtcagcgttagttcattttgcttgaggtgcttgttagtagaatattgctctggtctaagatacagtttttgcaggaccatccaactgcagtaatgatgcatatttctattatttccacagagtaacctaatttcacctgaaaagaattaaaatttcttttctatttggcagtaattatakacttaaaaagcaaatgctgaaaaagtttcaatccttataggcttccaatacagtaagtgtgatgaaaacagctttttgaaggttgtagaagagtcaaattatggcaaggtcatttcttctctggtggtaaagcctacaaattgtaatggactgttaatgggctaacaggcggaaatttggaaacagtgcagcaactgctcatgatacattcctgcgcatattacayagacagacaaagatgtaactggttataatagagacaacaacgtccttcctttgtgtggcagatcaatcaatagc

SEQ ID NO: 3960 - DNA, 600 bp, Chicken  19866894101191_2
tattatttccacagagtaacctaatttcacctgaaaagaattaaaatttcttttctatttggcagtaattatakacttaaaaagcaaatgctgaaaaagtttcaatccttataggcttccaatacagtaagtgtgatgaaaacagctttttgaaggttgtagaagagtcaaattatggcaaggtcatttcttctctggtggtaaagcctacaaattgtaatggactgttaatgggctaacaggcggaaatttggaaacagtgcagcaactgctcatgatacattcctgcgcatattacayagacagacaaagatgtaactggttataatagagacaacaacgtccttcctttgtgtggcagatcaatcaatagccaggcatgtgatcttgttcactattatgttagtaatgaaaccttcttgtgatgtgacaactgtggaataacatttggtcacaaagctggtgttaacaagcacaactggcactctggtaattagactgatttctggtctactttcacagattgtcgataaatgcagtaaacaacaggctgctttctttcagaacaagttatatgaagtcgtcatccatttggcggtg

SEQ ID NO: 3961 - DNA, 600 bp, Chicken  19866894101193_1
aaccagctttcagaccttaaggggattttggagagatttttttttttccctagggagttacaaatgttaaccaagtcatcccatttgaaatggcagctgaagaaatggagtcacagattttgcaaatgatagcaagttctttcagtcaaatcctctgcaatccataaggacttcaccaaactgagctcgcactgagatggcagatgacctttaatatagataaacacagggcaaaggacctaggaaaaaatgatctctaccaaatttagaacaaagagttacaacttaggaaagacatcwtggagccattgctgatggctgtctgaaatcatcagctcagtatgcgatggcaagcaaaagtcaataaaatgttggagctcctaagaaagttattgggaacaggacagagggtgtaatgttgctgctatattaaaaawtaaatacacacacacaaaaaaactgtgttcttgtagtagaggaaaaaggaagcaaaacttgttggagggttgaagctgctatcttacagactgaaaacactgggattttggtctgaagagaaggaggcaatggaggggtgtaatcgtgatttacaaagtgatg

SEQ ID NO: 3962 - DNA, 600 bp, Chicken  19866894101193_2
tctttcagtcaaatcctctgcaatccataaggacttcaccaaactgagctcgcactgagatggcagatgacctttaatatagataaacacagggcaaaggacctaggaaaaaatgatctctaccaaatttagaacaaagagttacaacttaggaaagacatcwtggagccattgctgatggctgtctgaaatcatcagctcagtatgcgatggcaagcaaaagtcaataaaatgttggagctcctaagaaagttattgggaacaggacagagggtgtaatgttgctgctatattaaaaawtaaatacacacacacaaaaaaactgtgttcttgtagtagaggaaaaaggaagcaaaacttgttggagggttgaagctgctatcttacagactgaaaacactgggattttggtctgaagagaaggaggcaatggaggggtgtaatcgtgatttacaaagtgatgagtgtgctgattgaactgctcttgcatcttgtttcccagatcgtgatataggatctaggaacaytggaggcaaccagcaaaagatgaagttaaagcagaaaataaagtacttgcttacacagtgagtagtaactctc

SEQ ID NO: 3963 - DNA, 600 bp, Chicken  19866894101193_3
taaaatgttggagctcctaagaaagttattgggaacaggacagagggtgtaatgttgctgctatattaaaaawtaaatacacacacacaaaaaaactgtgttcttgtagtagaggaaaaaggaagcaaaacttgttggagggttgaagctgctatcttacagactgaaaacactgggattttggtctgaagagaaggaggcaatggaggggtgtaatcgtgatttacaaagtgatgagtgtgctgattgaactgctcttgcatcttgtttcccagatcgtgatataggatctaggaacaytggaggcaaccagcaaaagatgaagttaaagcagaaaataaagtacttgcttacacagtgagtagtaactctctgggcttactgtcacaggattttgtggaaatgctcttatagccctcatccaactgctgtggatgctgagtgctaagggaaagggctgcagataacaacccgcctcatagttcctcctagacgggtgtcctcttgccaccatcagaaacgaagcagtgggtgagatggctcacctggtgtggcccacagggaatttattgcattctgtgggtcaaaaaagaagtttgt

SEQ ID NO: 3964 - DNA, 599 bp, Chicken  19866894101195_1
  misc_feature (1)..(14): n is any nucleotide
nnnnnnnnnnnnnnccgcaaactccatgaaaaaaaattttttttatatgtttgatataaaaatgttctctttgaaaacagctaaaaattggtcaacctaaaaacttttcctacataagtaagaaaatgagttgctaaaaaattataaataacaaaaaccgcctgttttgcacagccttatataaacgcttcattaaaaaagcaacgcacaaaagaaaacgaacacacacacacacacacacacaaagccaccaaacaacaaatctctatgctggggaggcagcattacatttctgaagtyggaacctttcttccaagagtatgttcctctgtgttaacctctgttttatcctaagaaaatttattctgtgatttatttttgatttcttatttaggtaggctttactattaggcttgttactttgattatactgtgagtaaattcagtcatatccatgcatgagagtaaggtttaccagcttagagctagctaggatcttagtagtttcagttcatttaattcaaggtttcaaagcaatgttgtttttagcactgatgtcttccgttgttgtcactttttttattttgttccttttttaa

SEQ ID NO: 3965 - DNA, 600 bp, Chicken  19866894101195_2
ttcctctgtgttaacctctgttttatcctaagaaaatttattctgtgatttatttttgatttcttatttaggtaggctttactattaggcttgttactttgattatactgtgagtaaattcagtcatatccatgcatgagagtaaggtttaccagcttagagctagctaggatcttagtagtttcagttcatttaattcaaggtttcaaagcaatgttgtttttagcactgatgtcttccgttgttgtcactttttttattttgttccttttttaaataaaaaggattgagatgcccttrcctggtctcaggaaaggtctttgttcaggtatcaagatggagtattccagtttggttgtggacttaaataatcattagatacacagcagagagtggaggtacaagattacccacaggcaaatgagcagtgaaaagtcaaaaacagtgagagaagaatatgaagaaaagtggaaagtgagaaactttccagaacagaatgcaggaggaagaagattaaaaacagagaaattagcttttgtaccttgtaaatattttgtggaagttttcagtgtgactgaaaagtgctgaaacagaaacatc

SEQ ID NO: 3966 - DNA, 600 bp, Chicken  19866894101196_1
tgctcaaagcaaggtcagctcgagcaggctgcctaaggtcactgctttgttggagtcttgaaaatctctaagatggacttgacaaaagtgcactctgttccattgccattctgaccttccattaggaagtttgagtattgaacccagtactaatctctggggtgcactgctggtcactagtctccaaaaaggacttgtgccagtgttaacaaccaggttttgagtctgcttcactgtctgcttatctaccccatgcttcatcagtttgcccatgaagatatgggagacagtattgaaacyctgataaatgtaggtgtgtaacatcagctgtcatccaccaaaccagtcatttaattktagaaagctatcaggttgttcaggcatgattgccactttttaagttaatgctgactaagctcagtcatcttcatgtccttcatatgattggaaatgcctctaggaagacaaacttcatctccttcccaggtataatgcgagactgatcagcctgtgtctccgcagttttaaggtacaaactgcaaagtatgtgctgcaattagattttcatttttatttttagctttgacataatttattatc

SEQ ID NO: 3967 - DNA, 600 bp, Chicken  19866894101196_2
ttgaaaatctctaagatggacttgacaaaagtgcactctgttccattgccattctgaccttccattaggaagtttgagtattgaacccagtactaatctctggggtgcactgctggtcactagtctccaaaaaggacttgtgccagtgttaacaaccaggttttgagtctgcttcactgtctgcttatctaccccatgcttcatcagtttgcccatgaagatatgggagacagtattgaaacyctgataaatgtaggtgtgtaacatcagctgtcatccaccaaaccagtcatttaattktagaaagctatcaggttgttcaggcatgattgccactttttaagttaatgctgactaagctcagtcatcttcatgtccttcatatgattggaaatgcctctaggaagacaaacttcatctccttcccaggtataatgcgagactgatcagcctgtgtctccgcagttttaaggtacaaactgcaaagtatgtgctgcaattagattttcatttttatttttagctttgacataatttattatcactaaaacttcagcgtcttaactgcttggatttgccaggaggctctggaaacccttc

SEQ ID NO: 3968 - DNA, 600 bp, Chicken  19866894101198_1
ttgtgctttgctgacagtcttttcaggttgttttagtgcagggtgaggataagactagatgtgaaagaacaaagtttgtttttccaacactttattgtcctattgatcatttgcaattattgcttatttgaagaagcaaagctcagagctcagcatgtggctggggttagcgtcagcgcagggcctcagtggtgcttcctggggattgaccttggggatccctttttccattcctcccttctggctctgctcacagccaggggcccaggtgtgccagctctggtgcctgcctcagctcgstgtcacagccccagagtgacaccaggcagcagatgctgggatgtggaccccaagggcccttgcctttagggagaaacgggctcaaaacaaactctgttattgtagcagctcccagaaggctgtgaagtggcttaggttggtacagattatgttgatttgaagcagaatattacaaatctttggtattctggtttgtcactgttctgctgctggggtagcactgagacgtgtgcaaggcttctatcaagtaatgtgaagaagaggattttaagttactgtgcgtccagcgctaagcctcag

SEQ ID NO: 3969 - DNA, 600 bp, Chicken  19866894101200_1
cacccagaaactgaaagtaggctttttacttgaggggtatttcagtaaataagcttcattaaaactttgctatctgcctctgctcttctgctaccttacagaaaagtgagcactgctttgtaggaaatcatcttctgatagagaattagtgttctgattctcatttatctctttccattacctttattggaaatagagataaaaaatttaacttcagaaggtctgaatcatcctgctggggaatttggaaaaagatattctgaatgtagtcctgagatctttatatgtgatgtgttgttytaataactrcaacatgttaaatattttttgcatatttataataaatttaaaagtataaataatcaaatttctaatgagaaacactggaaaaaatagacagtatcggacaaaaaaaaaamacaaaaaaaaaaggctgtctttcaaagacatttattgatttagtcaagcatgccagatgtttctagaaaataattcattgataatatcgagaatgcagacttttaaattcattttacaaaaatcttttaaaaaataattaggtagaaattagtaaagatccttactatcatttatgaccaa

SEQ ID NO: 3970 - DNA, 600 bp, Chicken  19866894101200_2
actgaaagtaggctttttacttgaggggtatttcagtaaataagcttcattaaaactttgctatctgcctctgctcttctgctaccttacagaaaagtgagcactgctttgtaggaaatcatcttctgatagagaattagtgttctgattctcatttatctctttccattacctttattggaaatagagataaaaaatttaacttcagaaggtctgaatcatcctgctggggaatttggaaaaagatattctgaatgtagtcctgagatctttatatgtgatgtgttgttytaataactrcaacatgttaaatattttttgcatatttataataaatttaaaagtataaataatcaaatttctaatgagaaacactggaaaaaatagacagtatcggacaaaaaaaaaamacaaaaaaaaaaggctgtctttcaaagacatttattgatttagtcaagcatgccagatgtttctagaaaataattcattgataatatcgagaatgcagacttttaaattcattttacaaaaatcttttaaaaaataattaggtagaaattagtaaagatccttactatcatttatgaccaatagattcat

SEQ ID NO: 3971 - DNA, 600 bp, Chicken  19866894101200_3
gtaggaaatcatcttctgatagagaattagtgttctgattctcatttatctctttccattacctttattggaaatagagataaaaaatttaacttcagaaggtctgaatcatcctgctggggaatttggaaaaagatattctgaatgtagtcctgagatctttatatgtgatgtgttgttytaataactrcaacatgttaaatattttttgcatatttataataaatttaaaagtataaataatcaaatttctaatgagaaacactggaaaaaatagacagtatcggacaaaaaaaaaamacaaaaaaaaaaggctgtctttcaaagacatttattgatttagtcaagcatgccagatgtttctagaaaataattcattgataatatcgagaatgcagacttttaaattcattttacaaaaatcttttaaaaaataattaggtagaaattagtaaagatccttactatcatttatgaccaatagattcatacaaatggcacgtttgtcttccatgtgtgggaaacttgcttctcgtttgcatattttacataacctgcattatcccaaatgttcccttttcatatccaagtgcaattatt

SEQ ID NO: 3972 - DNA, 600 bp, Chicken  19866894101200_4
cttttaaattcattttacaaaaatcttttaaaaaataattaggtagaaattagtaaagatccttactatcatttatgaccaatagattcatacaaatggcacgtttgtcttccatgtgtgggaaacttgcttctcgtttgcatattttacataacctgcattatcccaaatgttcccttttcatatccaagtgcaattatttttcaaactgcgaaccatataatcaccatctgaagtaatcccagctctggaaagtctggaagagctgcaacaaaacaaattcagacctcatgaaaacaytctcacatgcatattcctcagccaggttctatttgagcgagtaaagcaaaatgtggttgtagcagcacgtcatcatgtgcaatgcttagccatgcatcttccaggctaccatcttgctctcaagccccactttcagactcctccagcagcacagaaaattactcatcccacagtctgttttatggcttatccagctttcattgccactattgtcagctgtcatctgagccaggtaaatgcctgttaaaacaacagcaaaatccaacaaacttttccaattgtcagtgccctaaaacaaat

SEQ ID NO: 3973 - DNA, 600 bp, Chicken  19866894101202_1
gtcgtaccgaagccgctgagtcagtgtggggtggccgggggctgccacggtgctgtgccctccccatggccagcagccacccggcttttgcatggctgtgggtggacagggcaccccgtgttgtgcttctgctttgctatttttggaaggggcattcacagcgtgtgaaactgagctgcgtgtgagcacgctgtcagcagctgtgtctgtgcccgcggtgtggcggaccttcagcatcccagagcagtgatttcagcctcccgttgaatctaaaacagaaaagcacaccgtgctcctgcrctgcctcattcctctcccctttgggggctccgtctcctgcctttagaagaacttcagctgcggtggcattggttgacattggcagggcacgtgcactcacacagtgtggcagagcagccctcctcccggccgtgggtttgcagcacctcacactgcagcagctttccctacggttgataattactcacctcaggaataaataatcacgaagtggaggatacagagagtccttcgcagaaaaagggaactgagaacactttgtctgtgtctcctgcagagtccccgtgttgggctggggcg

SEQ ID NO: 3974 - DNA, 600 bp, Chicken  19866894101202_2
ctctgaatgcggtgtttggtaattataagcacaggaacattttgttgttgttgttgctgttttattttacctgcaggcagttacacgtgagagcctcgttcatcagcctcccactgtgctgctctcatttcttgtcatacctgggacagaggatggggcctgctttgaagtggtgcaacccagggtgatgccagccatgagagccagcccgaaataccctctagatgaagcccaaaagccagctgcagtgtaagaataactgcacctagaagtgtctttaaaagaagacgaagaaaaaasgtgcctgccaagtttatggctgtgaccttgaggcgtaggtcacagatctcactgcatcttgtggcagtggtggtgcgaggggcggctcagaagtgagcacggggtgggctgagtcatttcaaggagaggtttgctgctaacagagctttgggtgttctcagcattgctgaattctgctgctactttcacctgagcatccacaaccagtgaagtaaatgaagtcacaggagttctgcatccgtgttgctggccccttgcatccaaattttgtcgcaagtcagggttgggtcccaagctgtc

SEQ ID NO: 3975 - DNA, 600 bp, Chicken  19866894101203_1
actgttggtttactctttgaaattaatggctgtgacagaactaacttcctgtttagtgttccagacatagaccatttaacatggtatgttggggttactgtggcagtcattgatctacaaggatgagcagccagttttcctttattcacctgtcaccactgaagcaacctcatgaactgtaattcctctacaggtataagctcacttgcacttaatggaattgttttagcttaataatttaattattattttttaaacagtgaaaaaggaacatactcgtgattgacagctgcagcagtyctgggaccaagtctctacagccagttttcaacacctgaaattactgatgactgacggagacatcccacctccaaacattgcccgttaccagcyatctccttttgcttggatctccctaactctgagcagtgctacaagaaagagagccttgatccagcaagcagctgtagcaccttgggaaatcactcagcacatagccatgcaccagagagatctaattaacataatgataggggctataagaggcagctgccaacagggaacccaaaagaaaagtagtttgaagggtggagttgtatg

SEQ ID NO: 3976 - DNA, 600 bp, Chicken  19866894101203_2
gttactgtggcagtcattgatctacaaggatgagcagccagttttcctttattcacctgtcaccactgaagcaacctcatgaactgtaattcctctacaggtataagctcacttgcacttaatggaattgttttagcttaataatttaattattattttttaaacagtgaaaaaggaacatactcgtgattgacagctgcagcagtyctgggaccaagtctctacagccagttttcaacacctgaaattactgatgactgacggagacatcccacctccaaacattgcccgttaccagcyatctccttttgcttggatctccctaactctgagcagtgctacaagaaagagagccttgatccagcaagcagctgtagcaccttgggaaatcactcagcacatagccatgcaccagagagatctaattaacataatgataggggctataagaggcagctgccaacagggaacccaaaagaaaagtagtttgaagggtggagttgtatgtttgtctgcctggttgcttayaccttctgagggaaattggtatttttggggaaatctggagtgacaaactacttagaagaagygtggaggyga

SEQ ID NO: 3977 - DNA, 600 bp, Chicken  19866894101203_3
cagttttcaacacctgaaattactgatgactgacggagacatcccacctccaaacattgcccgttaccagcyatctccttttgcttggatctccctaactctgagcagtgctacaagaaagagagccttgatccagcaagcagctgtagcaccttgggaaatcactcagcacatagccatgcaccagagagatctaattaacataatgataggggctataagaggcagctgccaacagggaacccaaaagaaaagtagtttgaagggtggagttgtatgtttgtctgcctggttgcttayaccttctgagggaaattggtatttttggggaaatctggagtgacaaactacttagaagaagygtggaggygagcatggagaccatgaaagcagaactgccttgttagaggtaagtgtgtactgcttaaattcctttctgagagagaataggaccaatgggtctgaggtggaaagcagytgcaggcccaggaaaatgatgacttgggggtatcttgctgtggggtaggaggttggttccaggtctggttatggatatagatatgtagggagttctatgagttccagaaataattcttctgt

SEQ ID NO: 3978 - DNA, 600 bp, Chicken  19866894101203_4
gttaccagcyatctccttttgcttggatctccctaactctgagcagtgctacaagaaagagagccttgatccagcaagcagctgtagcaccttgggaaatcactcagcacatagccatgcaccagagagatctaattaacataatgataggggctataagaggcagctgccaacagggaacccaaaagaaaagtagtttgaagggtggagttgtatgtttgtctgcctggttgcttayaccttctgagggaaattggtatttttggggaaatctggagtgacaaactacttagaagaagygtggaggygagcatggagaccatgaaagcagaactgccttgttagaggtaagtgtgtactgcttaaattcctttctgagagagaataggaccaatgggtctgaggtggaaagcagytgcaggcccaggaaaatgatgacttgggggtatcttgctgtggggtaggaggttggttccaggtctggttatggatatagatatgtagggagttctatgagttccagaaataattcttctgtactgtgggaaataactaaagaatggtgagagaaagggagtactgagggtactggtgatcact

SEQ ID NO: 3979 - DNA, 600 bp, Chicken  19866894101203_5
cyatctccttttgcttggatctccctaactctgagcagtgctacaagaaagagagccttgatccagcaagcagctgtagcaccttgggaaatcactcagcacatagccatgcaccagagagatctaattaacataatgataggggctataagaggcagctgccaacagggaacccaaaagaaaagtagtttgaagggtggagttgtatgtttgtctgcctggttgcttayaccttctgagggaaattggtatttttggggaaatctggagtgacaaactacttagaagaagygtggaggygagcatggagaccatgaaagcagaactgccttgttagaggtaagtgtgtactgcttaaattcctttctgagagagaataggaccaatgggtctgaggtggaaagcagytgcaggcccaggaaaatgatgacttgggggtatcttgctgtggggtaggaggttggttccaggtctggttatggatatagatatgtagggagttctatgagttccagaaataattcttctgtactgtgggaaataactaaagaatggtgagagaaagggagtactgagggtactggtgatcactacaaagtg

SEQ ID NO: 3980 - DNA, 600 bp, Chicken  19866894101203_6
atgcaccagagagatctaattaacataatgataggggctataagaggcagctgccaacagggaacccaaaagaaaagtagtttgaagggtggagttgtatgtttgtctgcctggttgcttayaccttctgagggaaattggtatttttggggaaatctggagtgacaaactacttagaagaagygtggaggygagcatggagaccatgaaagcagaactgccttgttagaggtaagtgtgtactgcttaaattcctttctgagagagaataggaccaatgggtctgaggtggaaagcagytgcaggcccaggaaaatgatgacttgggggtatcttgctgtggggtaggaggttggttccaggtctggttatggatatagatatgtagggagttctatgagttccagaaataattcttctgtactgtgggaaataactaaagaatggtgagagaaagggagtactgagggtactggtgatcactacaaagtgaagaagtgttatcaacatcaggttgtgaagctttggcctctttgtttgttcagagtttacagcggtagcaccaataaggggacaaagaggatttgttactgtgcacta

SEQ ID NO: 3981 - DNA, 600 bp, Chicken  19866894101206_1
gcaccgtgtggagtgagccatgtctgcaaggggaaggaaggggctggcagcagggagggcacacttgtcacctcatccctgagaggagcagtgggaggtgtgaacagcgtggagagtgttgatgggctgcagcctgcaaaaggcaagaagcctggaaaccagatctgagctgggctcagaggtctggaaattagtggactgtgtgacaggctattgagcaccaaggcacagtatggggagggagacagcagcctgctctttcttgggtaagccctgttagcacagagccgtgggaggaargggcaggagagaggctcacgcagccatgccrctttggcacatgtagtgatgctcaggagcaccatcctgactccagctgcttgctttataccttcagtttcacatttaatatttactggccatcaatgtcaggttagctctttcttccttattctggaggctggacgtgctgttatccatgaatgagatttctaggtctgttggtagattaaggtaaacctggggctgcccaggatattcctgatgactatgacacctaccaggttcctggctcttcctcacagtgtttgttggccagac

SEQ ID NO: 3982 - DNA, 600 bp, Chicken  19866894101206_2
ggaaggaaggggctggcagcagggagggcacacttgtcacctcatccctgagaggagcagtgggaggtgtgaacagcgtggagagtgttgatgggctgcagcctgcaaaaggcaagaagcctggaaaccagatctgagctgggctcagaggtctggaaattagtggactgtgtgacaggctattgagcaccaaggcacagtatggggagggagacagcagcctgctctttcttgggtaagccctgttagcacagagccgtgggaggaargggcaggagagaggctcacgcagccatgccrctttggcacatgtagtgatgctcaggagcaccatcctgactccagctgcttgctttataccttcagtttcacatttaatatttactggccatcaatgtcaggttagctctttcttccttattctggaggctggacgtgctgttatccatgaatgagatttctaggtctgttggtagattaaggtaaacctggggctgcccaggatattcctgatgactatgacacctaccaggttcctggctcttcctcacagtgtttgttggccagaccagctgcgtctcaaggagaggaccttcctac

SEQ ID NO: 3983 - DNA, 600 bp, Chicken  19866894101210_1
attctgaaccggtctagcaacagcagtgcttacatattgtgcaagagcacaatcgggtgtttgttcttgcagcagcggataactgatactgcattggtatctgtagaattgttaatatatgctgtaatttaacaaatgtcttgtgggtggagcagatgtctttttttttttctttctaaaatcacagtctcttaaaaatttattcgcgagccttccttgtgtgctgtcctgcatccatagagggcactcagagacagaaggagtttgtttttgaaagcttaccctgcgagcagacccccrcagcccacagaaggaaactgctgactgttcttaatggccttgctcttgcaaggcgctgttgtcctggctgtgctccaacaaatcacttaagcaattgaagtcaatgggactataatatgcttaaacattcttctggattgatccctagctctctatactttcacaggccgtttcccatcttctaaaagcaaggtggggtacacatgagtttcttaatggggttctctagtcagcctaagaaagtagtggtaagcccatttgtgttcgagattattgtttgttgggtttcattgtttgttt

SEQ ID NO: 3984 - DNA, 600 bp, Chicken  19866894101212_1
ttgtttgtttgtttgttatttgtctttatgttacaatggctttttcctgctgccagtcaaagtgaaaacttggagaaacagtgaaacgatcacagatgatgcttaacaaaaatggtgaagatccctcaggtggcagtgccgccacagcagtctgaggccaggcatttatctcagcagtactgttaagtcactggtctgcttcctagaagatgctcctctgctgccaggatggctttgttcttctccgttccccatctttgcctctcttgtctcctcaaccctcctttctccctgttactyccatgggtaagtacgctgtgttttgttgcrgttatccagtgttcccagtgaaatctgggactaaaactggtatgcatatttcytcccatcagtgttcttccttctcttatggggccagaagtgagtaaataagacctgagggtagaaaatgcaatcttctgacagacacctgacacgattacaaagtgattgtcctctgaagtgctttctgtctgcaacaatcatttgttggtagccaggctctacacatgacagtttataaccgaggaaggccgttggatgccatcatcagggagcggg

SEQ ID NO: 3985 - DNA, 600 bp, Chicken  19866894101212_2
ttacaatggctttttcctgctgccagtcaaagtgaaaacttggagaaacagtgaaacgatcacagatgatgcttaacaaaaatggtgaagatccctcaggtggcagtgccgccacagcagtctgaggccaggcatttatctcagcagtactgttaagtcactggtctgcttcctagaagatgctcctctgctgccaggatggctttgttcttctccgttccccatctttgcctctcttgtctcctcaaccctcctttctccctgttactyccatgggtaagtacgctgtgttttgttgcrgttatccagtgttcccagtgaaatctgggactaaaactggtatgcatatttcytcccatcagtgttcttccttctcttatggggccagaagtgagtaaataagacctgagggtagaaaatgcaatcttctgacagacacctgacacgattacaaagtgattgtcctctgaagtgctttctgtctgcaacaatcatttgttggtagccaggctctacacatgacagtttataaccgaggaaggccgttggatgccatcatcagggagcggggctggaacttgaagcttggatgcaattcag

SEQ ID NO: 3986 - DNA, 600 bp, Chicken  19866894101212_3
aaacgatcacagatgatgcttaacaaaaatggtgaagatccctcaggtggcagtgccgccacagcagtctgaggccaggcatttatctcagcagtactgttaagtcactggtctgcttcctagaagatgctcctctgctgccaggatggctttgttcttctccgttccccatctttgcctctcttgtctcctcaaccctcctttctccctgttactyccatgggtaagtacgctgtgttttgttgcrgttatccagtgttcccagtgaaatctgggactaaaactggtatgcatatttcytcccatcagtgttcttccttctcttatggggccagaagtgagtaaataagacctgagggtagaaaatgcaatcttctgacagacacctgacacgattacaaagtgattgtcctctgaagtgctttctgtctgcaacaatcatttgttggtagccaggctctacacatgacagtttataaccgaggaaggccgttggatgccatcatcagggagcggggctggaacttgaagcttggatgcaattcagggcagtgctgcaaacttggcagcgtgcctgggggaggttacccaagctgccta

SEQ ID NO: 3987 - DNA, 600 bp, Chicken  19866894101214_1
agccatccagaaccacacatagcagccagcagaaccctgctgggtgacacaaaccaagcgccgaagcccaaggacctccctgtccctggatggggaggttggtccaggtgagcaccatgaggagcaaaccctcagagcctctccatgtgggactatgggagccagcttcaggctcctcctgacccccaccccacagctgagcaccccagccctgccaatgcagaccaaggacaccccccgctgtccctggcagccccaaggcatataaatagaagacgggacgtgaaggaggtcaatgascaggggattttacataatctcatcttgcctgtgctgtatggttgtgtcctttgcccaggacgcacgggaacgtcagagccggggacgttcctgcaccgcagcggctttatcccatgtgctgcgctccagtcttcagcacgcactggatttcagagacatccttaatccagggctcatcccaatggcaacrttggcctttatcgcggtgtatggaatccaggggctgcctggcccaaagcgaccccgaccccaacacaaccgscaccaccaccacccaactgcacccaacggaggaggctg

SEQ ID NO: 3988 - DNA, 600 bp, Chicken  19866894101214_2
ccacagctgagcaccccagccctgccaatgcagaccaaggacaccccccgctgtccctggcagccccaaggcatataaatagaagacgggacgtgaaggaggtcaatgascaggggattttacataatctcatcttgcctgtgctgtatggttgtgtcctttgcccaggacgcacgggaacgtcagagccggggacgttcctgcaccgcagcggctttatcccatgtgctgcgctccagtcttcagcacgcactggatttcagagacatccttaatccagggctcatcccaatggcaacrttggcctttatcgcggtgtatggaatccaggggctgcctggcccaaagcgaccccgaccccaacacaaccgscaccaccaccacccaactgcacccaacggaggaggctgcccgccctgtgccgtgcccatccaaagcgtgctctgctctgccctggttgcctctcacattgctccacagtccctgaccagcagcacttcctcctctccctcttgtcacttctattttcaaggctggagacgaattctctcctggtataaacctgtcagtggagctgcagtgatttatgccagcacagag

SEQ ID NO: 3989 - DNA, 600 bp, Chicken  19866894101214_3
atataaatagaagacgggacgtgaaggaggtcaatgascaggggattttacataatctcatcttgcctgtgctgtatggttgtgtcctttgcccaggacgcacgggaacgtcagagccggggacgttcctgcaccgcagcggctttatcccatgtgctgcgctccagtcttcagcacgcactggatttcagagacatccttaatccagggctcatcccaatggcaacrttggcctttatcgcggtgtatggaatccaggggctgcctggcccaaagcgaccccgaccccaacacaaccgscaccaccaccacccaactgcacccaacggaggaggctgcccgccctgtgccgtgcccatccaaagcgtgctctgctctgccctggttgcctctcacattgctccacagtccctgaccagcagcacttcctcctctccctcttgtcacttctattttcaaggctggagacgaattctctcctggtataaacctgtcagtggagctgcagtgatttatgccagcacagagcgaggtgggtagatggatgtccaaaatagagcaagcaaaaaacctgttaccttcccctgcagaaacagcttt

SEQ ID NO: 3990 - DNA, 599 bp, Chicken  19866894101220_1
  misc_feature (1)..(45): n is any nucleotide
nnnnnnnnnnnnnnnnnnnnnnnnnnnnnnnnnnnnnnnnnnnnnactgcagccatttacattcactatagcagatatttcttgtgtttctaacttgggctatagcattgccacaaaatctgccggaacaaaaccaaccaaacaaagccttattctgcaagagcagaagcagaaaagcgcgtatcttcaactgtgtgcatcatcgcatgcggataaaaaatgagcaaaataaagtgtattgatatttttgctttttgtgtctctaaatatacaggttgaggtactgctgtctgtaaagcstgtttattcctgccaggaaaataattatatgcttgttatgaccccactttctctcttgggcagcattaagtctgcactgtgttctttgtgctgctgtaaggggtcagttccacagctggtgtaaatcagtgcagctttgctagstttgacactgttgcagccacttctgtccctcctctctgagtttctagatttccaaatataaaaatactgcatgtggccctttctcttccatactcagagcatgttaatattgatcagtaggaacgtcttcttagaagatgttagttctaatatta

SEQ ID NO: 3991 - DNA, 600 bp, Chicken  19866894101220_2
aagccttattctgcaagagcagaagcagaaaagcgcgtatcttcaactgtgtgcatcatcgcatgcggataaaaaatgagcaaaataaagtgtattgatatttttgctttttgtgtctctaaatatacaggttgaggtactgctgtctgtaaagcstgtttattcctgccaggaaaataattatatgcttgttatgaccccactttctctcttgggcagcattaagtctgcactgtgttctttgtgctgctgtaaggggtcagttccacagctggtgtaaatcagtgcagctttgctagstttgacactgttgcagccacttctgtccctcctctctgagtttctagatttccaaatataaaaatactgcatgtggccctttctcttccatactcagagcatgttaatattgatcagtaggaacgtcttcttagaagatgttagttctaatattatgtacaaaaacacaaaacatgagaaccacgttgcttggcttcggtgcttggtttaggggcaagcttccctcattgctggatcagtggctcggtttgttagagataattaatagctataattcagtgagggcttgtgaaataagtc

SEQ ID NO: 3992 - DNA, 600 bp, Chicken  19866894101221_1
atcagaagaaattccttgtactcagaagggaccagaatgacgatttctgatgattttcattttttctattgggaaaactgaaacagagaaagacgagtggctttgtcagtactacctcagtgtataacaggattggatccatcaatgtttgacacataaatacagcctttcgtgaattgggctcaccactgtcttagcgctgaatcacagcatgtttaggaagtaaaacaaaaatatgaggaggataatatagtaatcctgtgttgtttggctattcacactgcttctttgggcaggaaratgtttcatccttagtctgtactgaaaccttctgttaatgttgttacaatgtcatcttctgagacaaaggcaacctggtcataagtgcaacaaagacactaagcacccctgtgtcatttagtactcaagaatacacagacctgaagctaacaataactgctgttaatcaacaagtaatctttwatagcttgataaggttggtatagctagtttatagtccttcaaaaaagaayttcattcctcttctttgttacattacatacattcaagcatctgatgatactgtcattcagatattcg

SEQ ID NO: 3993 - DNA, 600 bp, Chicken  19866894101221_2
caccactgtcttagcgctgaatcacagcatgtttaggaagtaaaacaaaaatatgaggaggataatatagtaatcctgtgttgtttggctattcacactgcttctttgggcaggaaratgtttcatccttagtctgtactgaaaccttctgttaatgttgttacaatgtcatcttctgagacaaaggcaacctggtcataagtgcaacaaagacactaagcacccctgtgtcatttagtactcaagaatacacagacctgaagctaacaataactgctgttaatcaacaagtaatctttwatagcttgataaggttggtatagctagtttatagtccttcaaaaaagaayttcattcctcttctttgttacattacatacattcaagcatctgatgatactgtcattcagatattcgctataatctagtctacttgctaatttatgaaatggcatgctactgcaataaagtaacccagtacatatgggttcattaataacacagtgtggcagaggtagagtaggccagatgtcatgctgatataagtcattgtggcttcagaaaagtgattttctattctcagtggatctcatgatgtgt

SEQ ID NO: 3994 - DNA, 600 bp, Chicken  19866894101221_3
atatgaggaggataatatagtaatcctgtgttgtttggctattcacactgcttctttgggcaggaaratgtttcatccttagtctgtactgaaaccttctgttaatgttgttacaatgtcatcttctgagacaaaggcaacctggtcataagtgcaacaaagacactaagcacccctgtgtcatttagtactcaagaatacacagacctgaagctaacaataactgctgttaatcaacaagtaatctttwatagcttgataaggttggtatagctagtttatagtccttcaaaaaagaayttcattcctcttctttgttacattacatacattcaagcatctgatgatactgtcattcagatattcgctataatctagtctacttgctaatttatgaaatggcatgctactgcaataaagtaacccagtacatatgggttcattaataacacagtgtggcagaggtagagtaggccagatgtcatgctgatataagtcattgtggcttcagaaaagtgattttctattctcagtggatctcatgatgtgtgcctattgtatctgaccatgaaggcctagaacgctgttcctttcttagct

SEQ ID NO: 3995 - DNA, 600 bp, Chicken  19866894101228_1
ttcaaatcagagtattattttcatctttagcaagggattaatgacatgcaatttatacagtttcttgacatcatcacaaggttctataaaatatggcctctatacaagcatatccttgtacaataaatgtttttctctccatcagaatccccagttaacagacgagtttttaaaagtttccacaaaagaaaataacaagtgcacataatgtttgggatgtaaggaaatcattttaactactgaatacttttatctcacctataattcagtgacacatttatcttacatgaatcatttgtrtttatttagacagcagactaaaagaaatttgaaattgaggaaaagaatgacagaggtgagcatagtctaataaaagcataagcaaaaaatgatggttcttcagaatcaaaagcttttgtggtaactaagataggtcttgaaaatgctttgcaaaaacatctggaaatgtgagaacattcttttgcaaaatccttaatagaaaatttgggattattcaaaatcacccatttctatactgatattttctacactgagatctcttttaatttcaatatttatttcattcacttcatttcaatt

SEQ ID NO: 3996 - DNA, 600 bp, Chicken  19866894101237_1
atgaaggggcacagagcgttgctaggaagtcatgttggcattctatgaagtcaatttcatgtacccactgaaagagttctttgcagtcccaacacccattccactcttgtccttaattctgttaagatttacatagcaatgtctgtgtgcatggatgtcttactctgcaacatctttcttgattcatcgcttaatactttacaaagatgaactgaaagggaaggctggggctgcaggctcaggagaaccttgttttgactctagtgtccttgtataactttgcttatgacagcactggtrcctttccagtgtaaaaggtcttgtctccccaaaagtttgtgagtgctttttgattaggaacatgaagtactgccataaatcaccttgagattaaaaaaaggaacctattttaatttagttctgatgataaatatgtcttgggaaaattgatgaagtcactctttcaactggattttgtgtttgattggatggactaggcagagtgatatagagaaaatatactttatagyttaaatgcttatatgtatcagatcttcctttatatctgtgtagttgtatttgtctttcatcttttattca

SEQ ID NO: 3997 - DNA, 600 bp, Chicken  19866894101237_2
ctgcaggctcaggagaaccttgttttgactctagtgtccttgtataactttgcttatgacagcactggtrcctttccagtgtaaaaggtcttgtctccccaaaagtttgtgagtgctttttgattaggaacatgaagtactgccataaatcaccttgagattaaaaaaaggaacctattttaatttagttctgatgataaatatgtcttgggaaaattgatgaagtcactctttcaactggattttgtgtttgattggatggactaggcagagtgatatagagaaaatatactttatagyttaaatgcttatatgtatcagatcttcctttatatctgtgtagttgtatttgtctttcatcttttattcatgtcttttatacgtgtggatataaacgtttgttgattgccatatcaaaagccagaagtaacatcataacagtctggatgatatgcacagtaagactttatggtactcaaaaatttgcaagaattatgctcttgatatttcactgcttgagcctagatatggtatgtgagatcactagtgatttataaaacacaaaagagtttggtttaggaagatattagtggaagcctt

SEQ ID NO: 3998 - DNA, 599 bp, Chicken  19866894101238_1
  misc_feature (1)..(101): n is any nucleotide
nnnnnnnnnnnnnnnnnnnnnnnnnnnnnnnnnnnnnnnnnnnnnnnnnnnnnnnnnnnnnnnnnnnnnnnnnnnnnnnnnnnnnnnnnnnnnnnnnnnnnatcttggagctaaagcccctggttaacactgatggcagcagcccctgctgcccacagaggtcgaggtgcccagactgatgggctcttccatgaggtaacgaggccctgaaatggcagcttatttcttcctctttttgccctgcccatcattggagtttttatgtttctcatccttgcatgtgaaggagggaaagggggrtgaagctctcgtagtcctggcatagttcactttatttccaggcccaggagttgttctggttttgccagacatctttccgtcttgctctgcagggttgtcttgattccaccagacatccttcctgcctgccttgcctcctccactcataccttgcaggagttactgcttgcatatatttcccagtactgcctttgtgccgctctaccaccagtctccttctgcccctttggtgacatattatttatgtatttgtgcttagctgtytctcaaaacacatacacactatggctggtgatgct

SEQ ID NO: 3999 - DNA, 600 bp, Chicken  19866894101238_2
tttctcatccttgcatgtgaaggagggaaagggggrtgaagctctcgtagtcctggcatagttcactttatttccaggcccaggagttgttctggttttgccagacatctttccgtcttgctctgcagggttgtcttgattccaccagacatccttcctgcctgccttgcctcctccactcataccttgcaggagttactgcttgcatatatttcccagtactgcctttgtgccgctctaccaccagtctccttctgcccctttggtgacatattatttatgtatttgtgcttagctgtytctcaaaacacatacacactatggctggtgatgctgtttcaaaatgtgtcacttgcacagtgctgctggcagggctgttttatcactctgctgtctgaggcaagtaaatactaattttactgtgtgcttctgctaccaagagcagcgggcttgtgctttggtgacagcctgcacagctgctggtctggcagggcagtttctgagaagccatatactgcttcataaattccaaatgtccatctcattagcataggggcagcctttttacctatgactttgtattgtcccaacaaatccttc

SEQ ID NO: 4000 - DNA, 600 bp, Chicken  19866894101240_1
tccttaagcatttctgtagatgagcggggatcactcttccaattagccacaggcctttaagtgcacaccaaaatcccacagaaaaccgccttgaatgggcgaactacatttccaacatagttatatagcgagtagttagtagaagtgtacatttttaatgtacctcttaacgcaataaagaatcaatggcatatctgaactgtatatatgtgtacttaaataaacctgcacgtacatagacaatagtaaattacctacctgcatttgttctctgaaggcagcactggacatgcacccacrctccattctggcagccttgtctctggcagcacccctctgtcccccatcacctgggcattgtrgggtrgaggtggcatcactgccgtgcctccaaccaaggcatgcaggcagcagtgctgccgcagagaggaatcagagcctgcyctagctcatggcatcctggggaggatctgtgactgctaagggggttacaacaacacgtctgcatcygagcrcccaccaggcgggcatgtaccgtgagaaccccctgcagcagagggagcttctcccacaacgtcaggcaggctcgtgaagagggga

SEQ ID NO: 4001 - DNA, 600 bp, Chicken  19866894101240_2
gcacaccaaaatcccacagaaaaccgccttgaatgggcgaactacatttccaacatagttatatagcgagtagttagtagaagtgtacatttttaatgtacctcttaacgcaataaagaatcaatggcatatctgaactgtatatatgtgtacttaaataaacctgcacgtacatagacaatagtaaattacctacctgcatttgttctctgaaggcagcactggacatgcacccacrctccattctggcagccttgtctctggcagcacccctctgtcccccatcacctgggcattgtrgggtrgaggtggcatcactgccgtgcctccaaccaaggcatgcaggcagcagtgctgccgcagagaggaatcagagcctgcyctagctcatggcatcctggggaggatctgtgactgctaagggggttacaacaacacgtctgcatcygagcrcccaccaggcgggcatgtaccgtgagaaccccctgcagcagagggagcttctcccacaacgtcaggcaggctcgtgaagaggggacaaagaacgagctggaaaagcaaaagcaattaaaggtagaaatcagacaccatctttggaag

SEQ ID NO: 4002 - DNA, 600 bp, Chicken  19866894101240_3
ccaaaatcccacagaaaaccgccttgaatgggcgaactacatttccaacatagttatatagcgagtagttagtagaagtgtacatttttaatgtacctcttaacgcaataaagaatcaatggcatatctgaactgtatatatgtgtacttaaataaacctgcacgtacatagacaatagtaaattacctacctgcatttgttctctgaaggcagcactggacatgcacccacrctccattctggcagccttgtctctggcagcacccctctgtcccccatcacctgggcattgtrgggtrgaggtggcatcactgccgtgcctccaaccaaggcatgcaggcagcagtgctgccgcagagaggaatcagagcctgcyctagctcatggcatcctggggaggatctgtgactgctaagggggttacaacaacacgtctgcatcygagcrcccaccaggcgggcatgtaccgtgagaaccccctgcagcagagggagcttctcccacaacgtcaggcaggctcgtgaagaggggacaaagaacgagctggaaaagcaaaagcaattaaaggtagaaatcagacaccatctttggaagaggtt

SEQ ID NO: 4003 - DNA, 600 bp, Chicken  19866894101240_4
gtgtacatttttaatgtacctcttaacgcaataaagaatcaatggcatatctgaactgtatatatgtgtacttaaataaacctgcacgtacatagacaatagtaaattacctacctgcatttgttctctgaaggcagcactggacatgcacccacrctccattctggcagccttgtctctggcagcacccctctgtcccccatcacctgggcattgtrgggtrgaggtggcatcactgccgtgcctccaaccaaggcatgcaggcagcagtgctgccgcagagaggaatcagagcctgcyctagctcatggcatcctggggaggatctgtgactgctaagggggttacaacaacacgtctgcatcygagcrcccaccaggcgggcatgtaccgtgagaaccccctgcagcagagggagcttctcccacaacgtcaggcaggctcgtgaagaggggacaaagaacgagctggaaaagcaaaagcaattaaaggtagaaatcagacaccatctttggaagaggttctgaaagagctttttgtttttaaaacagattttttttgtaaacctctggattggatcctttgaggcttgctacccac

SEQ ID NO: 4004 - DNA, 600 bp, Chicken  19866894101240_5
tgtacttaaataaacctgcacgtacatagacaatagtaaattacctacctgcatttgttctctgaaggcagcactggacatgcacccacrctccattctggcagccttgtctctggcagcacccctctgtcccccatcacctgggcattgtrgggtrgaggtggcatcactgccgtgcctccaaccaaggcatgcaggcagcagtgctgccgcagagaggaatcagagcctgcyctagctcatggcatcctggggaggatctgtgactgctaagggggttacaacaacacgtctgcatcygagcrcccaccaggcgggcatgtaccgtgagaaccccctgcagcagagggagcttctcccacaacgtcaggcaggctcgtgaagaggggacaaagaacgagctggaaaagcaaaagcaattaaaggtagaaatcagacaccatctttggaagaggttctgaaagagctttttgtttttaaaacagattttttttgtaaacctctggattggatcctttgaggcttgctacccacccttctaataaatatcatttaccaccaacaataaagtctcccacattaaaaagctctcactaaata

SEQ ID NO: 4005 - DNA, 600 bp, Chicken  19866894101240_6
ttaaataaacctgcacgtacatagacaatagtaaattacctacctgcatttgttctctgaaggcagcactggacatgcacccacrctccattctggcagccttgtctctggcagcacccctctgtcccccatcacctgggcattgtrgggtrgaggtggcatcactgccgtgcctccaaccaaggcatgcaggcagcagtgctgccgcagagaggaatcagagcctgcyctagctcatggcatcctggggaggatctgtgactgctaagggggttacaacaacacgtctgcatcygagcrcccaccaggcgggcatgtaccgtgagaaccccctgcagcagagggagcttctcccacaacgtcaggcaggctcgtgaagaggggacaaagaacgagctggaaaagcaaaagcaattaaaggtagaaatcagacaccatctttggaagaggttctgaaagagctttttgtttttaaaacagattttttttgtaaacctctggattggatcctttgaggcttgctacccacccttctaataaatatcatttaccaccaacaataaagtctcccacattaaaaagctctcactaaataaaacc

SEQ ID NO: 4006 - DNA, 600 bp, Chicken  19866894101240_7
aataaagtctcccacattaaaaagctctcactaaataaaacccttctacagaaaaagcttggcaaaaataagaagctgtgactactctccataaatacatcagcgggtaaacaccaaaaactatttaagttaagggacaatgttggctccaaaacaaaccaggaacgaaccggccacgaattaatccaaactagaaatttaaagaaagtttctaaccatacaaaggcagcggagctctggagcagccttccaagagcaaaagtgaaggcaagacatggaaccaattttgagctgggaagygatccgtttacgacaggacggtctgacacagcacttggctgggctgtagctcagtcctcctctagaccttgtgttctgtcagggagggatattaaaaaaggcttcaagcagccacatcacgcagcaaccaccragacaaggggagcacatcaaaaaaggagcagggtgtggaagcagagaggttaacagagaaacctgcgtggctctgtcatgcgaaggcagaactgctgtggatggaaaaaaccaaaagatggaaaaagcaaatacttgaagttatcagcaccgctgctggaggatcac

SEQ ID NO: 4007 - DNA, 526 bp, Chicken  19866894101240_8
gggacaatgttggctccaaaacaaaccaggaacgaaccggccacgaattaatccaaactagaaatttaaagaaagtttctaaccatacaaaggcagcggagctctggagcagccttccaagagcaaaagtgaaggcaagacatggaaccaattttgagctgggaagygatccgtttacgacaggacggtctgacacagcacttggctgggctgtagctcagtcctcctctagaccttgtgttctgtcagggagggatattaaaaaaggcttcaagcagccacatcacgcagcaaccaccragacaaggggagcacatcaaaaaaggagcagggtgtggaagcagagaggttaacagagaaacctgcgtggctctgtcatgcgaaggcagaactgctgtggatggaaaaaaccaaaagatggaaaaagcaaatacttgaagttatcagcaccgctgctggaggatcactcatagtcacagagggctgaaagtgggaaacttcccgactgctgctgcctctcagagcc

SEQ ID NO: 4008 - DNA, 599 bp, Chicken  19866894101245_1
  misc_feature (1)..(192): n is any nucleotide
nnnnnnnnnnnnnnnnnnnnnnnnnnnnnnnnnnnnnnnnnnnnnnnnnnnnnnnnnnnnnnnnnnnnnnnnnnnnnnnnnnnnnnnnnnnnnnnnnnnnnnnnnnnnnnnnnnnnnnnnnnnnnnnnnnnnnnnnnnnnnnnnnnnnnnnnnnnnnnnnnnnnnnnnnnnnnnnnnnnnnnnnnnnnnnnnggagcgtgtatcatttcacttataaatagccggtatccattcacagttgattatttttatccaattaagcccgttttacattttaaattcctatgaatgcactcactyacccacctcccagccccagccttctcacatctgttgctgcaaaactctgcagcccttctgctcttgggctgttggtggctgaagctctctcagctaacacagatttacttaaggatgtggattacagcctccaggaagcagcaagcactggggaagtcgtgcccaattgcttgcactgctaaggggkttcatatattattactttattttgggctggttgsttatgggtgcaaactgttttcttttccagcctactgaatcaaagacagtcatctttaggtttgcgtgtgcgtagacat

SEQ ID NO: 4009 - DNA, 599 bp, Chicken  19866894101245_2
  misc_feature (1)..(5): n is any nucleotide
nnnnnggagcgtgtatcatttcacttataaatagccggtatccattcacagttgattatttttatccaattaagcccgttttacattttaaattcctatgaatgcactcactyacccacctcccagccccagccttctcacatctgttgctgcaaaactctgcagcccttctgctcttgggctgttggtggctgaagctctctcagctaacacagatttacttaaggatgtggattacagcctccaggaagcagcaagcactggggaagtcgtgcccaattgcttgcactgctaaggggkttcatatattattactttattttgggctggttgsttatgggtgcaaactgttttcttttccagcctactgaatcaaagacagtcatctttaggtttgcgtgtgcgtagacatgacatacttaatatgttattgataaaacttactccaagttgtaggtagaggcctcagcatcccacactccacctatttctccaaaagccagctggtgttggctttcaggacagtatcaccacctcagagccacagaatacattggctgaaccgttcagcagctacacgacaaatcccttgatgaaaa

SEQ ID NO: 4010 - DNA, 600 bp, Chicken  19866894101245_3
ccggtatccattcacagttgattatttttatccaattaagcccgttttacattttaaattcctatgaatgcactcactyacccacctcccagccccagccttctcacatctgttgctgcaaaactctgcagcccttctgctcttgggctgttggtggctgaagctctctcagctaacacagatttacttaaggatgtggattacagcctccaggaagcagcaagcactggggaagtcgtgcccaattgcttgcactgctaaggggkttcatatattattactttattttgggctggttgsttatgggtgcaaactgttttcttttccagcctactgaatcaaagacagtcatctttaggtttgcgtgtgcgtagacatgacatacttaatatgttattgataaaacttactccaagttgtaggtagaggcctcagcatcccacactccacctatttctccaaaagccagctggtgttggctttcaggacagtatcaccacctcagagccacagaatacattggctgaaccgttcagcagctacacgacaaatcccttgatgaaaacacatggaatttgcccaccagaggatccacgttgg

SEQ ID NO: 4011 - DNA, 600 bp, Chicken  19866894101245_4
ctgttttcttttccagcctactgaatcaaagacagtcatctttaggtttgcgtgtgcgtagacatgacatacttaatatgttattgataaaacttactccaagttgtaggtagaggcctcagcatcccacactccacctatttctccaaaagccagctggtgttggctttcaggacagtatcaccacctcagagccacagaatacattggctgaaccgttcagcagctacacgacaaatcccttgatgaaaacacatggaatttgcccaccagaggatccacgttggcactggatgcccycaggcatggccagcagtgtcacagccagcagagaaggctccttgggctctggggaggtaccgagatgtaaaatagccacagccaaaaggaaaaataggcattgtaaggaaaaaaaaaaccctcaggaggggggcagtggtaagcaaaccatgatagctttaatgagattgaagataaatatcacaaaaagcaaggatcagctaatttttcaccttattgctgcagcactaagaaagactgagttcgaaatggcaataaccagcaccttcaatgttgcaagagaaggcaaagagatgagga

SEQ ID NO: 4012 - DNA, 599 bp, Chicken  19866894101247_1
  misc_feature (1)..(215): n is any nucleotide
nnnnnnnnnnnnnnnnnnnnnnnnnnnnnnnnnnnnnnnnnnnnnnnnnnnnnnnnnnnnnnnnnnnnnnnnnnnnnnnnnnnnnnnnnnnnnnnnnnnnnnnnnnnnnnnnnnnnnnnnnnnnnnnnnnnnnnnnnnnnnnnnnnnnnnnnnnnnnnnnnnnnnnnnnnnnnnnnnnnnnnnnnnnnnnnnnnnnnnnnnnnnnnnnnnnnnnnctttgtgtcataaatggttttatttatttccctctttgggggaaaataaaagaaaattagtggggaataacggcagtggaggagrgatctcctcagaggggagcgctggaacagagacctctggcataacccttgataatccatggcatttagatctgccttccatgttatattaaggtcttatattgtttggtagtttatttttggtaggctctgtcttttccttcgggatttggggtaatgtttttctgcagaggtcgagcattaaggggctgccctcaatctgcttcagcagagctgctgagctcactgttgaagtgtcgggtgggattctttcctcattagaraaaagcaaatctttggtctccctggcagcctttcttc

SEQ ID NO: 4013 - DNA, 600 bp, Chicken  19866894101247_2
aaaagaaaattagtggggaataacggcagtggaggagrgatctcctcagaggggagcgctggaacagagacctctggcataacccttgataatccatggcatttagatctgccttccatgttatattaaggtcttatattgtttggtagtttatttttggtaggctctgtcttttccttcgggatttggggtaatgtttttctgcagaggtcgagcattaaggggctgccctcaatctgcttcagcagagctgctgagctcactgttgaagtgtcgggtgggattctttcctcattagaraaaagcaaatctttggtctccctggcagcctttcttccagcctccaggaggactgagatgtacttttgttgcccatttcagccaatagatatttaaaagggcttacatgcaggaaaagctgrggtggttcagggagcacatccttctcattagggtgttgggtccacctggaacaacacacacatctgccccgagctcatggctgagcagagtattaaagtcagttgggctcytggagtttcaggtgcaagagaaaatgattggtttttcaaaagtgggtgcatttgtggggtggggcgg

SEQ ID NO: 4014 - DNA, 600 bp, Chicken  19866894101247_3
atattaaggtcttatattgtttggtagtttatttttggtaggctctgtcttttccttcgggatttggggtaatgtttttctgcagaggtcgagcattaaggggctgccctcaatctgcttcagcagagctgctgagctcactgttgaagtgtcgggtgggattctttcctcattagaraaaagcaaatctttggtctccctggcagcctttcttccagcctccaggaggactgagatgtacttttgttgcccatttcagccaatagatatttaaaagggcttacatgcaggaaaagctgrggtggttcagggagcacatccttctcattagggtgttgggtccacctggaacaacacacacatctgccccgagctcatggctgagcagagtattaaagtcagttgggctcytggagtttcaggtgcaagagaaaatgattggtttttcaaaagtgggtgcatttgtggggtggggcggcgagggaagttgggcaaaggagcaccacaaaggcagctgcagaagtgcwgatttgagggcagagtgcttggagatggcaccgcccaatacatggactgtggtgaggcagagggaaacgtgag

SEQ ID NO: 4015 - DNA, 600 bp, Chicken  19866894101247_4
aatctgcttcagcagagctgctgagctcactgttgaagtgtcgggtgggattctttcctcattagaraaaagcaaatctttggtctccctggcagcctttcttccagcctccaggaggactgagatgtacttttgttgcccatttcagccaatagatatttaaaagggcttacatgcaggaaaagctgrggtggttcagggagcacatccttctcattagggtgttgggtccacctggaacaacacacacatctgccccgagctcatggctgagcagagtattaaagtcagttgggctcytggagtttcaggtgcaagagaaaatgattggtttttcaaaagtgggtgcatttgtggggtggggcggcgagggaagttgggcaaaggagcaccacaaaggcagctgcagaagtgcwgatttgagggcagagtgcttggagatggcaccgcccaatacatggactgtggtgaggcagagggaaacgtgagggatcctggcaggttgaagaggtgctcagagtgtttgtgtgctgaacggctgtggatctgagtgccgcactgggatttgttggccgatgctgagctctgtttctgtcccgc

SEQ ID NO: 4016 - DNA, 600 bp, Chicken  19866894101247_5
ggactgagatgtacttttgttgcccatttcagccaatagatatttaaaagggcttacatgcaggaaaagctgrggtggttcagggagcacatccttctcattagggtgttgggtccacctggaacaacacacacatctgccccgagctcatggctgagcagagtattaaagtcagttgggctcytggagtttcaggtgcaagagaaaatgattggtttttcaaaagtgggtgcatttgtggggtggggcggcgagggaagttgggcaaaggagcaccacaaaggcagctgcagaagtgcwgatttgagggcagagtgcttggagatggcaccgcccaatacatggactgtggtgaggcagagggaaacgtgagggatcctggcaggttgaagaggtgctcagagtgtttgtgtgctgaacggctgtggatctgagtgccgcactgggatttgttggccgatgctgagctctgtttctgtcccgcacagctggatgacggtgtgggcgcagctggcggctggcacacagtgcgcgtcccgggcagcgagaatgagctgcggctcagtgagttggagccctccagcctctacgaagtgctga

SEQ ID NO: 4017 - DNA, 600 bp, Chicken  19866894101250_1
acctaaaaatgtgtcacataccaacattgtgatcaataagcttttagattgtatgagtagtagaactttttgctgtagatggctttgtgctaagtgtgtcacaacaagttttgttacttccatttgcaagaataccttttattttactgaaataaactttttatataaacatcattttaaagatgaagctatttatcctacattattcctcagcacttaagggcttgcttttctttgtaaccatcaaaatccttagtctccagttgtgtactcaagttatggaaaaagatcttgtcctgytatcttgagatcatagtttttccrtctctattgctgttttcagcaatttgtccacattattgtgtgatatatactgcctgacttgttctaatgtgacattcactcacttgtccggcaattttggtttccttttgctccctcatgacctatcattattacagactttcattatccattccacttctccttcctgggaactaatcttctttacaaccataaccactgtttcctaatacaagctgatctattgtcataactgaaatgtgattcatatctaccaatcttattaccactactgaa

SEQ ID NO: 4018 - DNA, 600 bp, Chicken  19866894101250_2
cattgtgatcaataagcttttagattgtatgagtagtagaactttttgctgtagatggctttgtgctaagtgtgtcacaacaagttttgttacttccatttgcaagaataccttttattttactgaaataaactttttatataaacatcattttaaagatgaagctatttatcctacattattcctcagcacttaagggcttgcttttctttgtaaccatcaaaatccttagtctccagttgtgtactcaagttatggaaaaagatcttgtcctgytatcttgagatcatagtttttccrtctctattgctgttttcagcaatttgtccacattattgtgtgatatatactgcctgacttgttctaatgtgacattcactcacttgtccggcaattttggtttccttttgctccctcatgacctatcattattacagactttcattatccattccacttctccttcctgggaactaatcttctttacaaccataaccactgtttcctaatacaagctgatctattgtcataactgaaatgtgattcatatctaccaatcttattaccactactgaacattaagtctgactcagtgccagc

SEQ ID NO: 4019 - DNA, 599 bp, Chicken  19866894101252_1
  misc_feature (1)..(19): n is any nucleotide
nnnnnnnnnnnnnnnnnnntcagtctgttaaatattctgtcttatttaggggagaagaatgctatcttctgaatggaaagtactcatccaaatatgtaacccaatccatttctctagctgagcactaagagcatctcctggagaagcctgaattctgtctcagcagctcattctatgtactgctcatagctcaacccacgtccgtcagtgtggattcaaagagttttcagtcactttgtgatcaccctgtattttcagaagcaatggaaagacacgcaaataattttcagagcagaaaaytgaacctagcaagaaccatctctctgacaggatgggccaatggtgacttaaagcagagctcccatcttgcagtcttccaaacttgctcttattcctgtaagaaaaaggtgcatccaaatcttacagcccttcactaatggactagatgacctttaaagatcccttccagctcaaatgattctatgaatgttgagaaatgttgggaaaatgttgagatttaaagaaaaaagagagaaaaaaattgacatgaaagtgtgaaattattctagatgcgctgtcaatttcccaaagattggaag

SEQ ID NO: 4020 - DNA, 600 bp, Chicken  19866894101252_2
ctgcttcactgatcaaaggggtgtttctgtttaactgacctggcacgattcactttcacatgtaagatcagctgtatgtacatactgaattctcaaacttgtagaaataaactgggcatcacactgtgccctgaaggggaaacaaatctaataatttggagtgacctatttgatataatagtcaacatttagtgcagacatgtgccttcacatatctgaaaaataggtgtactaaatgcaaggtctatttggaaatatgtaaaaaaaagctttcagaagaactgaaaatacctcaattakwtgaggcaaaagcataaggataaaatggggcaggaatgcaattaatagtttttaaaggtgcggtgtgctcattgctcagtgatttactaatagatttatggcagagagcagactttcatgagctcagctatttcaggcagtgaatgattctgtttgtattcttttgtatcacaggcaaataaatacagaactgcttttatctaatatttctgcttgttcgctggtcagtcaattaactcctttagtgcaaaatccactttcctttttttttttttttactattacaaaaatattgtttcc

SEQ ID NO: 4021 - DNA, 600 bp, Chicken  19866894101252_3
tgcttcactgatcaaaggggtgtttctgtttaactgacctggcacgattcactttcacatgtaagatcagctgtatgtacatactgaattctcaaacttgtagaaataaactgggcatcacactgtgccctgaaggggaaacaaatctaataatttggagtgacctatttgatataatagtcaacatttagtgcagacatgtgccttcacatatctgaaaaataggtgtactaaatgcaaggtctatttggaaatatgtaaaaaaaagctttcagaagaactgaaaatacctcaattakwtgaggcaaaagcataaggataaaatggggcaggaatgcaattaatagtttttaaaggtgcggtgtgctcattgctcagtgatttactaatagatttatggcagagagcagactttcatgagctcagctatttcaggcagtgaatgattctgtttgtattcttttgtatcacaggcaaataaatacagaactgcttttatctaatatttctgcttgttcgctggtcagtcaattaactcctttagtgcaaaatccactttcctttttttttttttttactattacaaaaatattgtttcct

SEQ ID NO: 4022 - DNA, 599 bp, Chicken  19866894101257_1
  misc_feature (1)..(44): n is any nucleotide
nnnnnnnnnnnnnnnnnnnnnnnnnnnnnnnnnnnnnnnnnnnngggacggcgttcgctgccggtaagtgcgcccgttcagtcccggagggactctttggtttactctttcgtcttcggaaggcgctccgtccctccggtgctccccgcgcggtgccgcgccgttctcggctcccctcctcggcaaagcgagaggcgaagcgtggcggggcgcgcagctccgaggcctcgcagcgtgcggccgtcccgccgcccacagggacccctttgtgtgtgtgtatgcgtgtatatgtgtgtgtgygcgyatctgtttcccacgctgcagacgccgttatttcgtgacgcgcagcggctctgcccggagcgcccctttcgcacggcttcgggctcgcgtgtgcgatcgcagcaacgtgagacggggaaaccgctccattttgtgccggagcggcgcgcgtggagcgcggtgagaaatggccgtgtttcaccccgcgccgtgggcaggcggagcggctccgtgccgcaggtaacgctgacgtcggggctccggctcggagctcgcagcagctgcgctgactcagagccgttaaagggacgcagtaa

SEQ ID NO: 4023 - DNA, 599 bp, Chicken  19866894101257_2
  misc_feature (1)..(40): n is any nucleotide
nnnnnnnnnnnnnnnnnnnnnnnnnnnnnnnnnnnnnnnngggacggcgttcgctgccggtaagtgcgcccgttcagtcccggagggactctttggtttactctttcgtcttcggaaggcgctccgtccctccggtgctccccgcgcggtgccgcgccgttctcggctcccctcctcggcaaagcgagaggcgaagcgtggcggggcgcgcagctccgaggcctcgcagcgtgcggccgtcccgccgcccacagggacccctttgtgtgtgtgtatgcgtgtatatgtgtgtgtgygcgyatctgtttcccacgctgcagacgccgttatttcgtgacgcgcagcggctctgcccggagcgcccctttcgcacggcttcgggctcgcgtgtgcgatcgcagcaacgtgagacggggaaaccgctccattttgtgccggagcggcgcgcgtggagcgcggtgagaaatggccgtgtttcaccccgcgccgtgggcaggcggagcggctccgtgccgcaggtaacgctgacgtcggggctccggctcggagctcgcagcagctgcgctgactcagagccgttaaagggacgcagtaaatga

SEQ ID NO: 4024 - DNA, 600 bp, Chicken  19866894101257_3
tcggggcctgcagagaccacagcgcgtcccgtggcaccgggaagcggcagcttgttgtgtttgagtgtattttgtgctgcgttaacggtgtgaggagtggactggtaaaagcagggactgcaggaagtgtggggcatcgtttgttcaaacgctgatggtgggagagctgttggaagctctcctggaaggagggcccttccagcaccgttccctgggagcaatcagctgtcagctgtgcggagcctcagagtcagaggcacctgggggtgtcgtggctgtgggtgtgcagggacagatgtrtgccggctgcccctgcagcccctccattgttccacacaccttctgtcacagcacggggtgctttggtctccgtgtgctgaacgatgccctttgctgtccgtgtgtggggaagccgtactgaggcccacatagaggtggtggccccatgcacagcttcagcatcagctcacggctgcaggacggcaccccccgatttcatttcagtccctgtttgcagcgagcagccatcggcccatcgcggctctgggaacggaggccgcccctccccccatttacggtaattcttaaatagttcatttg

SEQ ID NO: 4025 - DNA, 600 bp, Chicken  19866894101258_1
tgaagaaaagtcagtatgttagtctagcccagaatgctctatgcctttgctgctactcttgatgatttctctgaattaatgtaggcgggtagatatctccaaaggataatgcatcccaactgaagataggtgcataagatttagggcttttgaattgctctcctgagtttcttttgcatctctgagggaaaactagacagtttggattaggcagtagacttttagatcgctttagtttggtgagatgaacatgccagtggtagattcattctaacaacatagcaacaaagaaaggcagtyagatttcagagctgatttatactttgttaatcaatatgaaggaaaagatgtaaacttttcatttttcccattgctaactagcaataaagaaaatcatgttaggtttcagctgtaagcaataatgaaataatagcaggcaagtgagcattcgaataactagtaaataccaaataaacactaaacagtgtttgtgaaataaagaaatgactatctatgccagtagcttggaaatgtgtttcagtgcatttcttattctgcaatccagacagacatagctgaactgattttagaaaagctaat

SEQ ID NO: 4026 - DNA, 600 bp, Chicken  19866894101259_1
ctgcaacttcaacaactgaaacaccggtaggacaaccaagtggaaatctatttcttgccccattccttgtgacataaaaacttcgttctttactgttggttcacaaagcagatgctaacaagtactgtggaatactctcagagctataagtttgagggagaaatggactgctctgctgcaatgctggcaacatcttattagatatatatatatagttatggagcagactgctttttctgtaattttctgtaattttgccagattgctatgtctgtcctgtatgtgttttgctgtcatatygatatttatgtagtaatgagatgtttataatgatgctctttctaaaatgcattattcaagatgataatttcaaaataggtattatctgtctgtttagattaaaaactaactcctgatttctggagtgtgctaacaggaatttttgtaggaactgagaattatactgctggtttatatataatcaaaaagaacagcttactttattttgcatttatattacatctgtctactgtaattcatatcataagcgctcttctgaactttttagctgcatcaagggtaacacttgtgttaattgct

SEQ ID NO: 4027 - DNA, 600 bp, Chicken  19866894101260_1
aaagttactcattagaatgttcatggaattcattctgtgaaacaacaaatacctgcttaatatttgtagcaagttcagacccacagctatgaagattcttactaggactttattatgttacactaatacaaatactcatgacacagagaacggtgtcataaatacattcaaaggaatcatgatgctagtgaaatcacagagcaatacagattacaatcacaaaaatatggacacttgctatatatgtggcatacttaaagattgattacgtgcaatactaaatactatcctttggatccracttgatactaaaatcattactggagtgtttacctgacactatataaactggctaagaaaacatctgaaatgtgtggatgtcttacaataaataaatacatgaataaatcatagaatcaccaaggttggagaagacctccaagatcatccagtccaaccatccacctaccaccattatttccccactaaagcatgtcccttagtacatctgcaggtccagggatggtgactccaccacctccctgggcagcccattccagcatctgaccactcttttagagaagaaatttctcctaaaat

SEQ ID NO: 4028 - DNA, 599 bp, Chicken  19866894101264_1
  misc_feature (1)..(30): n is any nucleotide
nnnnnnnnnnnnnnnnnnnnnnnnnnnnnncactgagagtacattaggcagctatctaattattttcattgcatctaaaacacatagtagctctttgttgctaataaagtacactgcagtcagtttgctgcagatactgtattgccactcttatgccaaaccttgtacattctgaataggatacaaacataatgtaaaaagtaacacttatctctgattttgcgaagtattatcctatttattttaagtgtcatataattatcaattcatttactacctattgtaatgccatgaatcatratgaatatatttgcataataggtagtatcacatgagctcaattataattcagtattagctaaatgtaccatgaaaacaaaatgtttcccataaagataggctgaggttgatatataacctgtctcatacatggtgtctcacgaaatctgycaagagaaattgttccgtttatggtcttgctctcagtggggaatgtttggcagctctgaacttcatacatttcttctcccacctccaggcctcaaatttcaaatgatcctcagccatgtcagtctagcagatgaggttactgaacatag

SEQ ID NO: 4029 - DNA, 600 bp, Chicken  19866894101264_2
ttatgccaaaccttgtacattctgaataggatacaaacataatgtaaaaagtaacacttatctctgattttgcgaagtattatcctatttattttaagtgtcatataattatcaattcatttactacctattgtaatgccatgaatcatratgaatatatttgcataataggtagtatcacatgagctcaattataattcagtattagctaaatgtaccatgaaaacaaaatgtttcccataaagataggctgaggttgatatataacctgtctcatacatggtgtctcacgaaatctgycaagagaaattgttccgtttatggtcttgctctcagtggggaatgtttggcagctctgaacttcatacatttcttctcccacctccaggcctcaaatttcaaatgatcctcagccatgtcagtctagcagatgaggttactgaacatagcatgctcagaagcctgtctttgcactttgctgatatgccratagtgctctgctaagtcaagtcaagaagcccraaagactgaaattattaccccagagatgctccaaaatcagcatgtgctgtgctgagcaactggggttttgtctccaga

SEQ ID NO: 4030 - DNA, 600 bp, Chicken  19866894101264_3
aattataattcagtattagctaaatgtaccatgaaaacaaaatgtttcccataaagataggctgaggttgatatataacctgtctcatacatggtgtctcacgaaatctgycaagagaaattgttccgtttatggtcttgctctcagtggggaatgtttggcagctctgaacttcatacatttcttctcccacctccaggcctcaaatttcaaatgatcctcagccatgtcagtctagcagatgaggttactgaacatagcatgctcagaagcctgtctttgcactttgctgatatgccratagtgctctgctaagtcaagtcaagaagcccraaagactgaaattattaccccagagatgctccaaaatcagcatgtgctgtgctgagcaactggggttttgtctccagaggatagtttcagctctgagtagacttcaaaactctgcttttagacaaaacttattttttagataaaaaatggctctgaagtaacacgtgcaggagtcaactttgctttaccatgtggcagaattcagtatggaaaggctcctggctatgtcagttacttggtttgttctggttatgttcagtgtctgaa

SEQ ID NO: 4031 - DNA, 600 bp, Chicken  19866894101264_4
aaaacaaaatgtttcccataaagataggctgaggttgatatataacctgtctcatacatggtgtctcacgaaatctgycaagagaaattgttccgtttatggtcttgctctcagtggggaatgtttggcagctctgaacttcatacatttcttctcccacctccaggcctcaaatttcaaatgatcctcagccatgtcagtctagcagatgaggttactgaacatagcatgctcagaagcctgtctttgcactttgctgatatgccratagtgctctgctaagtcaagtcaagaagcccraaagactgaaattattaccccagagatgctccaaaatcagcatgtgctgtgctgagcaactggggttttgtctccagaggatagtttcagctctgagtagacttcaaaactctgcttttagacaaaacttattttttagataaaaaatggctctgaagtaacacgtgcaggagtcaactttgctttaccatgtggcagaattcagtatggaaaggctcctggctatgtcagttacttggtttgttctggttatgttcagtgtctgaactggtctctgctcaccacttactcatcagagtt

SEQ ID NO: 4032 - DNA, 599 bp, Chicken  19866894101265_1
  misc_feature (1)..(67): n is any nucleotide
nnnnnnnnnnnnnnnnnnnnnnnnnnnnnnnnnnnnnnnnnnnnnnnnnnnnnnnnnnnnnnnnnnntacttattttttagtctgtcatctaagatgtagacagaaatttattcttcaagctcttggttgtaagactaagattttaaaaaaagtcgtattttgtactcagtgattcggttcaggacaagttgtttttatcctctttattacagtatctattacaatatctattacaatactgcatgcaccagtacaggttaggggatgacctgctggagtggagctctgcggagaaggayttgtgtgtcctggtggactacaggttggccatgagccagcagtgyacctgcgtgggtaagaaggcaaatgctatcctgaagtgcatgaaaatgagcacggccagcagagtaaggaaggtgattctcctcctctgctctgcaccagggtgaggccacatgtagaatactgtgtccagttatagtcttctcagtaaaaacaagattgggatctcctagaaggagtccagtagagggycacagatggtaaagggtctggagcatctccttgtatgaggaaaggctgagcaacctgggtctgt

SEQ ID NO: 4033 - DNA, 599 bp, Chicken  19866894101265_2
  misc_feature (1)..(22): n is any nucleotide
nnnnnnnnnnnnnnnnnnnnnntacttattttttagtctgtcatctaagatgtagacagaaatttattcttcaagctcttggttgtaagactaagattttaaaaaaagtcgtattttgtactcagtgattcggttcaggacaagttgtttttatcctctttattacagtatctattacaatatctattacaatactgcatgcaccagtacaggttaggggatgacctgctggagtggagctctgcggagaaggayttgtgtgtcctggtggactacaggttggccatgagccagcagtgyacctgcgtgggtaagaaggcaaatgctatcctgaagtgcatgaaaatgagcacggccagcagagtaaggaaggtgattctcctcctctgctctgcaccagggtgaggccacatgtagaatactgtgtccagttatagtcttctcagtaaaaacaagattgggatctcctagaaggagtccagtagagggycacagatggtaaagggtctggagcatctccttgtatgaggaaaggctgagcaacctgggtctgttcagcctggggaaaaagaagactgagggggggatctgatcaatgt

SEQ ID NO: 4034 - DNA, 529 bp, Chicken  19866894101265_3
aatactgcatgcaccagtacaggttaggggatgacctgctggagtggagctctgcggagaaggayttgtgtgtcctggtggactacaggttggccatgagccagcagtgyacctgcgtgggtaagaaggcaaatgctatcctgaagtgcatgaaaatgagcacggccagcagagtaaggaaggtgattctcctcctctgctctgcaccagggtgaggccacatgtagaatactgtgtccagttatagtcttctcagtaaaaacaagattgggatctcctagaaggagtccagtagagggycacagatggtaaagggtctggagcatctccttgtatgaggaaaggctgagcaacctgggtctgttcagcctggggaaaaagaagactgagggggggatctgatcaatgtttataaatatctgaagggaggtgggaggcaaatggatgaggccaggctcttcttggtggtacacagcaatagaactaggagtaatagcctaaaacttgaacataggaagtgctacacaaa

SEQ ID NO: 4035 - DNA, 600 bp, Chicken  19866894101269_1
gggagcaatggtaatgggagcatagttggactagatgatcttgtaggtcctttccaaccttgtgattccatgattctatgattctatgacttgttggtttgcctgacagaagggcacacgcttttcttaacaaaatgataaaacacatgttttaggttgaactgtgttcagacaagccagtaagaacattttatcatcaggtttcctttgtagcacattactgaagttacgctctgatgacactaagacttccaagatagctgtaaggtcaaggataatgatgtactacattaccatagyaatattcttcatactgaagtaatgtatatgcaatgtcttagcaacagtattaatctcctaagtatatattattggatatatgaccatgtgttgttcattaattcatctgtatactsaatgggtgacaagagaaaaagattcatttgatgggttcttcttctgaacctgctttctaaaatgggctcttccacccatcacatcatattcctaccaagtcacagaggaggttgttaagtattgttaaaaaaacaaactgcctctatgtttctttgattttaatcaacaacaagcattatctta

SEQ ID NO: 4036 - DNA, 600 bp, Chicken  19866894101269_2
cacgcttttcttaacaaaatgataaaacacatgttttaggttgaactgtgttcagacaagccagtaagaacattttatcatcaggtttcctttgtagcacattactgaagttacgctctgatgacactaagacttccaagatagctgtaaggtcaaggataatgatgtactacattaccatagyaatattcttcatactgaagtaatgtatatgcaatgtcttagcaacagtattaatctcctaagtatatattattggatatatgaccatgtgttgttcattaattcatctgtatactsaatgggtgacaagagaaaaagattcatttgatgggttcttcttctgaacctgctttctaaaatgggctcttccacccatcacatcatattcctaccaagtcacagaggaggttgttaagtattgttaaaaaaacaaactgcctctatgtttctttgattttaatcaacaacaagcattatcttatttggaatcatatacaattatagtaactacaaactttcatgttattacttagaaaatgaacctgtctctatccaatggcaaacatatcaagagggactgagtaatacaggttcagc

SEQ ID NO: 4037 - DNA, 599 bp, Chicken  19866894101279_1
  misc_feature (1)..(226): n is any nucleotide
nnnnnnnnnnnnnnnnnnnnnnnnnnnnnnnnnnnnnnnnnnnnnnnnnnnnnnnnnnnnnnnnnnnnnnnnnnnnnnnnnnnnnnnnnnnnnnnnnnnnnnnnnnnnnnnnnnnnnnnnnnnnnnnnnnnnnnnnnnnnnnnnnnnnnnnnnnnnnnnnnnnnnnnnnnnnnnnnnnnnnnnnnnnnnnnnnnnnnnnnnnnnnnnnnnnnnnnnnnnnnnnnnntcctgaagagaatgtggatagcttctcactttctgggctttggattacatttttcacatctcccctctagtctraatttcctcaagcctaaatttccttggagtttgaacttcagcccttaacatagatctttgttgagcatccttctctctgcctagacactagaagggtgagcatcaggtcctgaagacagtctgagatcttgcaaaacagctcaaaactgagcatgtcctttcctctcctcttcacagagtcaccatggcagttgagaggatccatgcccgagagatcctggattctcgtgggaaccccactgtagaggtggacctgtacacacacaaaggtatggggcgaagatgagagatgaagggga

SEQ ID NO: 4038 - DNA, 600 bp, Chicken  19866894101279_2
tttccttggagtttgaacttcagcccttaacatagatctttgttgagcatccttctctctgcctagacactagaagggtgagcatcaggtcctgaagacagtctgagatcttgcaaaacagctcaaaactgagcatgtcctttcctctcctcttcacagagtcaccatggcagttgagaggatccatgcccgagagatcctggattctcgtgggaaccccactgtagaggtggacctgtacacacacaaaggtatggggcgaagatgagagatgaaggggaagttctgcgttaccaaagragctggatctgcacagcagcctagagcaggggggatctcccactgaaggtgctccagtgagcaaccagagacatcaggccgggsagatagatctcctggtgtctacctgtggtcctgcatgacatgcacagcgactgctgactgccgtgcatgtggcttgccccatgtctgattgtatcagaggcagttagtttctttaaaatagatgaatttaccttcatgtcctatccacacaatgctctcttgcagctatactttcactcctggggcacattaggaagtgcttccttggccatgctc

SEQ ID NO: 4039 - DNA, 600 bp, Chicken  19866894101279_3
tcaggtcctgaagacagtctgagatcttgcaaaacagctcaaaactgagcatgtcctttcctctcctcttcacagagtcaccatggcagttgagaggatccatgcccgagagatcctggattctcgtgggaaccccactgtagaggtggacctgtacacacacaaaggtatggggcgaagatgagagatgaaggggaagttctgcgttaccaaagragctggatctgcacagcagcctagagcaggggggatctcccactgaaggtgctccagtgagcaaccagagacatcaggccgggsagatagatctcctggtgtctacctgtggtcctgcatgacatgcacagcgactgctgactgccgtgcatgtggcttgccccatgtctgattgtatcagaggcagttagtttctttaaaatagatgaatttaccttcatgtcctatccacacaatgctctcttgcagctatactttcactcctggggcacattaggaagtgcttccttggccatgctcttgaggttgagggaagatttgtttctgagataagtgtgcaatcatgtatgcacaattatgtgtttcatctggaagaactgcagc

SEQ ID NO: 4040 - DNA, 600 bp, Chicken  19866894101279_4
tgtgcaatcatgtatgcacaattatgtgtttcatctggaagaactgcagctacgttaggctgaaagctaggtgggatgagatatgtgaggagtatgagtgaccagagcagacttccaaccaggctcttcctccttcactgaggcaataatccagccctggacagaagggaaggaagcctctgacagctgtgagtagggctgcctgtggagggatgcaggcagggtaccaggacgagggatttctgcatgtcatttatagttgtgggactggcacagacctctgcatggctgagatccagrtttcccagtctggaaacactggatggacttctttctgtcagacactctgctattccacctctgagaggtgttcacctgtgagaagactagccatgagcagccagccactggggctatctgttggcagaggcgggtggctctatcctttccttaaagtagaataaagacagatgcatgagggctttccttccttttaatcctccgctctactcatacccatgttttgctgtccctcaggcatgtttcgagcagcggtccccagcggagcatccactggcatctatgaagcattggagctac

SEQ ID NO: 4041 - DNA, 552 bp, Chicken  19866894101279_5
aataaagacagatgcatgagggctttccttccttttaatcctccgctctactcatacccatgttttgctgtccctcaggcatgtttcgagcagcggtccccagcggagcatccactggcatctatgaagcattggagctacgagataatgacaagtcacgtttcctcggaaaaggtggggaggtgcctgctccacaccctgtacctggggctgccacacgtggggcttcaccagagggtaccactcatccactaatgaaacataccctccaagggaccctgcaggcacagatccagtgtygagtgaaatatcaggccttgatcttccctccctgtttccccctctcagcctttctgttggacttctccctccctctcttcattctcttctttgcctcaacctttgtctctctccttctttctctgtctattcctttatttaggggtcctgcaggccgtggatcatatcaacagcactgtcgccccagctatcgtgggctctgtaaggatttctctttgttcttccttattgaacgcttactctgttccgtct

SEQ ID NO: 4042 - DNA, 473 bp, Chicken  19866894101285_1
caaggctatggtcgtactctgatgggaacatccccaaggtggtaatcagtattcaagagaaaaaaataaaaggtgatgatattacatccttgtggaggagggggaataccttccatctgagaactgcacctgaattcagaaaccatcggtggatacatatgtactcactttgaagaaatctgcatttggctttcttgggaataattcacgtccacagaaaaggccactctagttttttaatttttggaaaaatatctaattacaccaggtccaaaaattctatcctaatgaagttcaaascctttttttccccagagcaatgccatcttaagtcagttaatgtcctcatgacaaatacccaataaacaccttcaattattccaccgcctgggaaacacgcttaacagcattcttagcacattcatttccctgctgatatgattctaagacatcactttacaagatgatcatta

SEQ ID NO: 4043 - DNA, 600 bp, Chicken  19866894101287_1
aagcacccgagcaaagtgacatcaaaatagcatgacagtcccacaactccactcattagaaatcttggaaaagtaagacttctgttaacttgctgctagccctaaccaccagctgatgtgctgaacacgacctgcagagtcaagcctgaattacagctccatccagcatgttgatggcattgccagggtaccaccatactagtttatgcaccaaagcagccagcatttcccttcccctacctgtaacctctggcagagcaagggaaagataacccttggacatcccctcaaattcacttyaatctctcttgcacaggtaytgtaaaatactagtgaaaatcatactagtgaaaatcttcaacaccgacattaacagctccgagtcacagtgcacgcctggcatggaagcattcagccagcatgttgcatgtctcaccatggaactgggacaacatgcttggggatgaaccacagcctgaccagcacagctctcgtgaacatacatcctgcagtagccagaaaaaagctgaaactacttccaagaatttatttcaagcttccaactactgactgctccgagctcctcacctcccaacagcc

SEQ ID NO: 4044 - DNA, 600 bp, Chicken  19866894101287_2
atcaaaatagcatgacagtcccacaactccactcattagaaatcttggaaaagtaagacttctgttaacttgctgctagccctaaccaccagctgatgtgctgaacacgacctgcagagtcaagcctgaattacagctccatccagcatgttgatggcattgccagggtaccaccatactagtttatgcaccaaagcagccagcatttcccttcccctacctgtaacctctggcagagcaagggaaagataacccttggacatcccctcaaattcacttyaatctctcttgcacaggtaytgtaaaatactagtgaaaatcatactagtgaaaatcttcaacaccgacattaacagctccgagtcacagtgcacgcctggcatggaagcattcagccagcatgttgcatgtctcaccatggaactgggacaacatgcttggggatgaaccacagcctgaccagcacagctctcgtgaacatacatcctgcagtagccagaaaaaagctgaaactacttccaagaatttatttcaagcttccaactactgactgctccgagctcctcacctcccaacagccgacaccaaagatggtttagg

SEQ ID NO: 4045 - DNA, 600 bp, Chicken  19866894101287_3
cgagtcacagtgcacgcctggcatggaagcattcagccagcatgttgcatgtctcaccatggaactgggacaacatgcttggggatgaaccacagcctgaccagcacagctctcgtgaacatacatcctgcagtagccagaaaaaagctgaaactacttccaagaatttatttcaagcttccaactactgactgctccgagctcctcacctcccaacagccgacaccaaagatggtttaggggcaggcagtttagagagccattacactcttcgtgtactacagctgtgcacattctccrtcctacgatgcacagaaattgccctagctttccttcggggagctgttcagaggcagtaacccggatttacaagcgctgccctgctgcagcagagccgctctcccctcctccctttcaggggtcacagagccgggcccaccgcctgcagcccacggccgccccggtcacgccgtgcgccatcaggagcagcgagcagttcgccttacgtaaacgcagggcggtgcgctgcagatgcgtgtgtgccatcacgccgaggtcggcttcgcgagaagcttcctgaacaacacagcagcgagctcc

SEQ ID NO: 4046 - DNA, 599 bp, Chicken  19866894101287_4
caagcgctgccctgctgcagcagagccgctctcccctcctccctttcaggggtcacagagccgggcccaccgcctgcagcccacggccgccccggtcacgccgtgcgccatcaggagcagcgagcagttcgccttacgtaaacgcagggcggtgcgctgcagatgcgtgtgtgccatcacgccgaggtcggcttcgcgagaagcttcctgaacaacacagcagcgagctccgctacgacgcaacccgtcgaaaaatagaagtgagacaccaaaacccgagctccttcccaacagcaaacrccgctgcccgcctttctcccccgtcttcccctcggagaagcactgccgaacgccaacgccgccccagatcgcgtgatttcctcaggaaacggcacgggacgacggccgcggcccttaccgtgtaggtctccacgagctcggagcccaggacccgtgcgctccgcaggggctcttcgccgtcctcgcccgccgccgccgcctccatgacgcgggagaaacgcgcagccgccttcacgccgccgccgctcccctccacccgccgctgccgcctcccgccccggctccccgcccgccccgcg

SEQ ID NO: 4047 - DNA, 600 bp, Chicken  19866894101288_1
cacttaatttgcaaaacaaagctaaaaacacaattctccaggcaccagaggccacaattccacaggaaagcagcaaacatcacaagaaatgctggagagaccacatccaacaccctgctcacaggaaaaaaagcactgaaagaggccagacgcttttgaagcagctgtcaacacagatccttattaatttggggctgtgctgccacatggggtcatgaacagtctggcagaaatcaaatacagctacagaaatagaggtcaacattaagagagaaggggcactggattacgagtactccragtgccacactgcatctcctgcttgcactgaagagcaaaggtttcacatcaactcctcgtgcttccacactacaccatggcagccttcagcaacagaccacttccagtgcatggtaacacaaataactgcactcttgttagagtggagtttgcattagtgacatgcaaaacatgacagagcattacaaggccagcaaagcagtgtattataaagcaccttgccactggtgcatattgactgtaactgagctgctattttcagagcagtaagaataattagttgcattagaactaaaaatt

SEQ ID NO: 4048 - DNA, 535 bp, Chicken  19866894101292_1
cgtaagagggcaggcatgtggcatgaggactggagaatgttcctgctgcaaccgtatggctctcacatacacacagttttgtttttctggctaatgtacttcactttctccattgcacgatgctgcctctttaatgacaacatagccactaaccgtcatacgcgatgggaagccatgagggttcattatgatatctggacagatccctgtatcacaaaatggcatgtcctcctgaggaacaatcagtccgcacacccctgcagaagagagaacatttcaattcaccaacagcaaaccacsaacagggctgacgcctcatcaccagattttcttcggtgtttttctcctcctctctttctcatggatcactttttacccagactcattaccgtgaccactgctcggacctgcaggctgcaagagagcccttgtgacaggactggctgcattagcatagccctgcataatgctcccccgtgacatgtcagctagcaattagggaagaaagcttcagatacagttttcagatgcacca

SEQ ID NO: 4049 - DNA, 600 bp, Chicken  19866894101296_1
tttgtccccgcggagctcaggccgcagcccggcccggcgctgccgatggctgcgcgcagtgatggcggagcggtgtgtgcagggcccgagtacggcggccagcagagctgcggcgcgacgccgcttgtttcatttttatctttttaataattcatttaacttctagagactgtcaaattctagggccgaaagcgggctttcttccctctcgatataaatacggctgtgttcgtgtgcggccgtccctcccggcatcggtgcactcgggtccctcctccctctcgcgcagcagcatgaagsagcgcgatgggccgctctgctgctgtcacgctctggtgacctcccccggccctttgctgcatggctgccgtttatttaatttaacctttaagaaatgggtagagcgtgtgcaaggttctgttcttctgtggtgtacacagtgaaaggtgaaactgttcaggaaatgatctgaaggtggcactgaggctttccttcagtgctgcctttggttccggttctttgagacsgggtaggtggctgtgttgggtctgcatatagtgtagcagaagtcctttaaactaacttgttttgcagggttaa

SEQ ID NO: 4050 - DNA, 557 bp, Chicken  19866894101296_2
gttcgtgtgcggccgtccctcccggcatcggtgcactcgggtccctcctccctctcgcgcagcagcatgaagsagcgcgatgggccgctctgctgctgtcacgctctggtgacctcccccggccctttgctgcatggctgccgtttatttaatttaacctttaagaaatgggtagagcgtgtgcaaggttctgttcttctgtggtgtacacagtgaaaggtgaaactgttcaggaaatgatctgaaggtggcactgaggctttccttcagtgctgcctttggttccggttctttgagacsgggtaggtggctgtgttgggtctgcatatagtgtagcagaagtcctttaaactaacttgttttgcagggttaatgcccctgatcagatctagttttatgtacactctttaacttttatactttttaaggaaagctgcggtagggaatgggcgctgctcggggacaccaagtgtttttgcattgctgaggccaagaatggtgggttttggtgtgtgaccaggtagtcttttgtccgggcaacataaaaagctcattgt

SEQ ID NO: 4051 - DNA, 599 bp, Chicken  19866894101299_1
  misc_feature (1)..(107): n is any nucleotide
nnnnnnnnnnnnnnnnnnnnnnnnnnnnnnnnnnnnnnnnnnnnnnnnnnnnnnnnnnnnnnnnnnnnnnnnnnnnnnnnnnnnnnnnnnnnnnnnnnnnnnnnnnnaatccccatctgtgtagatattaagctgctaatcccagaggagaaagctcaaaaaccatcaattcagacactctgtgctgtgtatcattgtacagcattggagttgcatcagttttaatgggcttctccttcatgaggaaagagttagcccagaggttgcagctcctgtttccgattcagttccccacattgrcttctccaagttgcctcctgcagctcagccctcaggtgttctgaagcttccttcttcatgataatgcttcttcccacccaactcctttgaagtcccaagtcttactctgcagcatccagtaatttatgtaatttcctgacttaatgaggtttaaaaaaaggttaatgaagatagaacatgaaggagcataagagacagatggttgctgaagatgtggcaggacatttscaagctacttaagaaaaagctatctctaagagtcaaaatgtcctcttcccattgcaaggtggatcctggaa

SEQ ID NO: 4052 - DNA, 600 bp, Chicken  19866894101299_2
gcttctccttcatgaggaaagagttagcccagaggttgcagctcctgtttccgattcagttccccacattgrcttctccaagttgcctcctgcagctcagccctcaggtgttctgaagcttccttcttcatgataatgcttcttcccacccaactcctttgaagtcccaagtcttactctgcagcatccagtaatttatgtaatttcctgacttaatgaggtttaaaaaaaggttaatgaagatagaacatgaaggagcataagagacagatggttgctgaagatgtggcaggacatttscaagctacttaagaaaaagctatctctaagagtcaaaatgtcctcttcccattgcaaggtggatcctggaatgagagcacctgaagcaaagttttcctgtgatrgttaatatatccttttgaccagaacaaccaagaagaacaatcatcaaattattgcctggtaaatccaagaaagacttaccgttcaccagcacaagtgagtgagggagtagacaaatgaactgatgcgggcagcaaaatgcaaacctttttatatggcgtgagtggcgtcacctccggaaacgagggagcccagggg

SEQ ID NO: 4053 - DNA, 600 bp, Chicken  19866894101299_3
caggtgttctgaagcttccttcttcatgataatgcttcttcccacccaactcctttgaagtcccaagtcttactctgcagcatccagtaatttatgtaatttcctgacttaatgaggtttaaaaaaaggttaatgaagatagaacatgaaggagcataagagacagatggttgctgaagatgtggcaggacatttscaagctacttaagaaaaagctatctctaagagtcaaaatgtcctcttcccattgcaaggtggatcctggaatgagagcacctgaagcaaagttttcctgtgatrgttaatatatccttttgaccagaacaaccaagaagaacaatcatcaaattattgcctggtaaatccaagaaagacttaccgttcaccagcacaagtgagtgagggagtagacaaatgaactgatgcgggcagcaaaatgcaaacctttttatatggcgtgagtggcgtcacctccggaaacgagggagcccaggggtatggagacctgaccactaacaacctgcataggctccacctgcacatgctttacatatttgtccacagcctaatttttgatggaaaccttcttctaggcaaaac

SEQ ID NO: 4054 - DNA, 599 bp, Chicken  19866894101306_1
  misc_feature (1)..(136): n is any nucleotide
nnnnnnnnnnnnnnnnnnnnnnnnnnnnnnnnnnnnnnnnnnnnnnnnnnnnnnnnnnnnnnnnnnnnnnnnnnnnnnnnnnnnnnnnnnnnnnnnnnnnnnnnnnnnnnnnnnnnnnnnnnnnnnnnnnnnnnnntgaattgcatagattatgcaaagattggtggaatagaaaatgataatgagatttagatttctacctagtcactgagaagaataacacaaactaggaaatcccaacaaaacacacaccaacagaaccaaaggcaaagatagaagttcaaagacaagaaatagagrctgtgcttgcactaatacggacctgtgttggggaaagtggagattctgagaagtttcttgggtaataaataacacatgaggaactcaacctgagcttctaactcaatcctgtggcagagagggctagggcaatctttgggtgaataagctaacacgtacagaagggagggmtgtgcctctttacagtgattagatttcttaaatgcagcagtaaaactcttttacgagaaagatattgcaatatcacctatgaaatattgcttcgtgcctctagagccttgagctctggtgcccacatt

SEQ ID NO: 4055 - DNA, 600 bp, Chicken  19866894101306_2
gaaaatgataatgagatttagatttctacctagtcactgagaagaataacacaaactaggaaatcccaacaaaacacacaccaacagaaccaaaggcaaagatagaagttcaaagacaagaaatagagrctgtgcttgcactaatacggacctgtgttggggaaagtggagattctgagaagtttcttgggtaataaataacacatgaggaactcaacctgagcttctaactcaatcctgtggcagagagggctagggcaatctttgggtgaataagctaacacgtacagaagggagggmtgtgcctctttacagtgattagatttcttaaatgcagcagtaaaactcttttacgagaaagatattgcaatatcacctatgaaatattgcttcgtgcctctagagccttgagctctggtgcccacatttttcaaaggatgcyggaaaataaactgcttatagaaggagtataagaaagtattcaaagtctggaaaaaatgctgaatgatagaccatattgtttgatgattaactaatcatataattgtaatatataaaatatccgggaatctcaggattcataatttaccataaaaagac

SEQ ID NO: 4056 - DNA, 600 bp, Chicken  19866894101306_3
aatacggacctgtgttggggaaagtggagattctgagaagtttcttgggtaataaataacacatgaggaactcaacctgagcttctaactcaatcctgtggcagagagggctagggcaatctttgggtgaataagctaacacgtacagaagggagggmtgtgcctctttacagtgattagatttcttaaatgcagcagtaaaactcttttacgagaaagatattgcaatatcacctatgaaatattgcttcgtgcctctagagccttgagctctggtgcccacatttttcaaaggatgcyggaaaataaactgcttatagaaggagtataagaaagtattcaaagtctggaaaaaatgctgaatgatagaccatattgtttgatgattaactaatcatataattgtaatatataaaatatccgggaatctcaggattcataatttaccataaaaagacatacaaaagattagtgattaactattaactgatattaaaaataaataaataaatagagataaacagggaaaacttcctgtcagtgagagtcaggagaactgagggattctacatttcttgatgtctacaaaacaaaaaacca

SEQ ID NO: 4057 - DNA, 548 bp, Chicken  19866894101308_1
tataaaatcatgcatggtgtggactaagctgatatatagttgctcgttttctattctgagaagagaaatcaaatgaaagtagcaggtgtagagtactattatgtgtattatgtgctattatggtttcaatacatatggatgagaaattcatttctgtgaagaaaaatacaattattattgaagagaactgtaggtattatagaggaagatactatcactataggcttagaaagtcctgggtcacaaactgctgaaggatgcactaacattctggggaagcaccattacatggtcttgccraggacactaccattcttggtgacagatgggctttggttggagccagtaaaactggttgcccccatttgaattcacctatctgtatgcatttcttccagtgattgtggcagctttaatacagatcgttgtttggcttacttggcagtcactgccttgatgctgtagctctgctctttgcccaccaggtcctcagatttttcacgattgcttcatacagtgttgtgcaaagagtgagatactgatgacag

SEQ ID NO: 4058 - DNA, 431 bp, Chicken  19866894101317_1
tttttttttgtgcatctcttgcagcaaacttgaggaggccatgaaatctctggttttctataagaagtcgttgactacagagttaggaagaattgtggattgctttgtttacttttggaatacaaaccaaatatgcttattggagagtaccgtaaagtgaaatatgggaataagcttcatcaggaaaaaatggttttgatttgaaacttgaaggaagagaccatagtaattaaggcgaacagactgaattcatactgattagaagttattgaattactacttgagttaattagatgataytgttttccaggagatggtggattcagagtcaaaactgaatatctggtgggtagaaaactgcaaggactctgaaaaagtatcycttcatcatcgtcaaactgctatctttgagctcttagaaggtatttggg

SEQ ID NO: 4059 - DNA, 349 bp, Chicken  19866894101317_2
ttaggaagaattgtggattgctttgtttacttttggaatacaaaccaaatatgcttattggagagtaccgtaaagtgaaatatgggaataagcttcatcaggaaaaaatggttttgatttgaaacttgaaggaagagaccatagtaattaaggcgaacagactgaattcatactgattagaagttattgaattactacttgagttaattagatgataytgttttccaggagatggtggattcagagtcaaaactgaatatctggtgggtagaaaactgcaaggactctgaaaaagtatcycttcatcatcgtcaaactgctatctttgagctcttagaaggtatttggg

SEQ ID NO: 4060 - DNA, 600 bp, Chicken  19866894101318_1
ggcagtggtgtggatcattttgggtggtgtgttgtccttcagtcaaggcaggtttcagtgttccaaaagaacagtgcaaggcagcctaaagaaccatcagagtgggctcagactcgctcctctgtgatgctgcattgctgctgcaggcatgctcatcaacagaaggaggaaacaacatctagaaacatagggagaaagtcagccatatgtacagaaatccctcaccacctgtaagcaatctctcaggacctgttgaccctcataggcactacactatacgttatcctaagccaatatacmaaggcatctaaatctaggggctagagctagctctggaaggtgcagagaacaacaaaatgaccttcatgctttatcatctgcatgcttttgcagtaactgtacacagagtatgtaaagttcaatatcaggagcttcaaacagctttcccacagtgttgtctgtggacagtattggaggtgcagtatgaaggaacaggtggagcaagatccttgaacaagtgacaaccgtggctgctgaaaagctaaattctagcctacaggacttctattcttttccccagtagtagcacaaatagcagct

SEQ ID NO: 4061 - DNA, 553 bp, Chicken  19866894101321_1
tcatttaatgttacgtgagctaacgtgttttaacaaatcttttattgcatattacattctactctcttgacgatgatttcaaaatctggccattaaaacaagactcttttcacaactctttgataatgacgcttaaaactgagcagttcatctttttgcatttgggtagaatttgaaaggtgtaaattacaaatctggcttttatgtgcttgttttattgatcaaactgctccatagaaaccactgcaattccaatagcttaacagtctggattaccttccacccttcttaattagtccyagggtacagttacttttcgatttatgttgagagtccgactaggtgatgtaatacctcttcattgtacttgagtaccatgagattcctcataaattctatatgcacaagctgcttgttgatttagatagagacaagttctggctttatgcgataggcattttagcccaaattctgtgtgtaatcattcttgtgtcctacactgacttctatgaggctacagtaaagttagtaagatttgattgagtggtatggg

SEQ ID NO: 4062 - DNA, 600 bp, Chicken  19866894101322_1
tccaccagatcattcctgttacagaggagatctggcctctttcctttgcattgggcacatggggtaggagctcagtttgcctacattgtggcactttctctctgagaaattttgccagggtttccaatttgagctgacgtccaaccaaaaagagaggttaggaaagaataggaagaaaacactttattagcacagtttataactgaaatcagaattaggaactagcctaaacaaaaagctctttgaaatctgctcagacctaacatagcagaagctgtggaaggctctcaagcacagttwtctcacagaaccaatcatatctaaatggttctggactcagaaaaagtcagtcattttttttaaccagctctgaggttggatacatctttcttataaagatctttatttacagaactcaggcaaatccattctctttctgtgytggctagtaaatgtattaaaaggaagctctagccagatgctttttgattaacaaaagcctaattggagctgttttatgtaattgattacaactgcacaaatcttaaaggagtgtgagtgtkttttaagagcccctgctcctggtttctgccaagtatg

SEQ ID NO: 4063 - DNA, 600 bp, Chicken  19866894101322_2
aaccaaaaagagaggttaggaaagaataggaagaaaacactttattagcacagtttataactgaaatcagaattaggaactagcctaaacaaaaagctctttgaaatctgctcagacctaacatagcagaagctgtggaaggctctcaagcacagttwtctcacagaaccaatcatatctaaatggttctggactcagaaaaagtcagtcattttttttaaccagctctgaggttggatacatctttcttataaagatctttatttacagaactcaggcaaatccattctctttctgtgytggctagtaaatgtattaaaaggaagctctagccagatgctttttgattaacaaaagcctaattggagctgttttatgtaattgattacaactgcacaaatcttaaaggagtgtgagtgtkttttaagagcccctgctcctggtttctgccaagtatgagaaggataaatctgaagttagctggttaaattagctgtttatccccatgtgcagccaatgtccatgagatgcactgaagcatgtgtcctgggtctcagagtggtatctcctggagcttgtttctagctatctgcagggtct

SEQ ID NO: 4064 - DNA, 600 bp, Chicken  19866894101322_3
catagcagaagctgtggaaggctctcaagcacagttwtctcacagaaccaatcatatctaaatggttctggactcagaaaaagtcagtcattttttttaaccagctctgaggttggatacatctttcttataaagatctttatttacagaactcaggcaaatccattctctttctgtgytggctagtaaatgtattaaaaggaagctctagccagatgctttttgattaacaaaagcctaattggagctgttttatgtaattgattacaactgcacaaatcttaaaggagtgtgagtgtkttttaagagcccctgctcctggtttctgccaagtatgagaaggataaatctgaagttagctggttaaattagctgtttatccccatgtgcagccaatgtccatgagatgcactgaagcatgtgtcctgggtctcagagtggtatctcctggagcttgtttctagctatctgcagggtctgacctaaggcatgtgaagaaatagtgattggagccaataggctgggactgcctggaggtggtaacctaaggctgtggccatggtcaaccaggggagggctttgctgtactgagagcctttg

SEQ ID NO: 4065 - DNA, 599 bp, Chicken  19866894101328_1
  misc_feature (1)..(127): n is any nucleotide
nnnnnnnnnnnnnnnnnnnnnnnnnnnnnnnnnnnnnnnnnnnnnnnnnnnnnnnnnnnnnnnnnnnnnnnnnnnnnnnnnnnnnnnnnnnnnnnnnnnnnnnnnnnnnnnnnnnnnnnnnnnnnnnatttcttgtgaagaactggatattaattttccttatagatttaagtgtaatgtaaagaaaataaaactgttcttcaactacagtttagcacagtatcataaatgaagttctgctgccagctgcctgccaggaggtggaacatagcaatgtgtggggtgagcaaaagctggacrtattctgctgtttctaactgtctctccctggaattgtcagcttcccttctaaaggagttttaaaataacagtgagcctcactgaattccttggcagggggaaaaatggctgaccatcaacctccattgatggcaagagttactggctagaagagaatgggagtatctcctcaactgaagggcagagaaagttttaagacttcatcctgcacttaatgtttccttccctatgatggttctgtgaacagtatgctgattggactgaatccctttctgaagcacctgacattcagtaagaac

SEQ ID NO: 4066 - DNA, 600 bp, Chicken  19866894101333_1
gttcagtgcaatctagtcaacaatgtataaattaatcaagaatcctttcctggattctttacttgaattactcatttatcagttgcattgtgttaactccaggaacatgagtcatgatgcagaacttgattatcctaccacctgacaaacacagaagatggtatttccaaggtgctgatggcagcataatgcaactttgcctggaaacatgtaagcctgcagtctgattacagctatgtggacgttcagcagtcctgagctggtggggggtgtaattctcatgcaatataacctcgctcytctccttgtgtccaaatagaggcaaattatattgcctcattattcagctgtgctgtaccrgcaagggcagctgatgttataaatgcataatccaaccacctgctcaggtgacagagagcacgactggggttctgcatagcccgaggaggaatgtaaaggatgctttaatgcatctggagcaggtgtagatccaaaatcacagtctcaccctgaagcagcaatttaatgtatgacacacactgcatacaaatgaggatttgatctgtcctgtttatgtgtccaggtaggttttgaaattaa

SEQ ID NO: 4067 - DNA, 600 bp, Chicken  19866894101333_2
acttgaattactcatttatcagttgcattgtgttaactccaggaacatgagtcatgatgcagaacttgattatcctaccacctgacaaacacagaagatggtatttccaaggtgctgatggcagcataatgcaactttgcctggaaacatgtaagcctgcagtctgattacagctatgtggacgttcagcagtcctgagctggtggggggtgtaattctcatgcaatataacctcgctcytctccttgtgtccaaatagaggcaaattatattgcctcattattcagctgtgctgtaccrgcaagggcagctgatgttataaatgcataatccaaccacctgctcaggtgacagagagcacgactggggttctgcatagcccgaggaggaatgtaaaggatgctttaatgcatctggagcaggtgtagatccaaaatcacagtctcaccctgaagcagcaatttaatgtatgacacacactgcatacaaatgaggatttgatctgtcctgtttatgtgtccaggtaggttttgaaattaagaatctcatggcagtatctataaacactttccccacaattacaggaaaagaggatctggg

SEQ ID NO: 4068 - DNA, 599 bp, Chicken  19866894101334_1
  misc_feature (1)..(36): n is any nucleotide
nnnnnnnnnnnnnnnnnnnnnnnnnnnnnnnnnnnnttgcctctatttggacacaaggagaggagcgaggttatattgcatgagaattacaccccccaccagctcaggactgctgaacgtccatatagctgtaatcagactgcaggcttacatgtttccaggcaaagttgcattatgctgccatcagcaccttggaaataccatcttctgtgtttgtcaggtggtaggataatcaagttctgcatcatgactcatgttcctggagttaacacaatgcaactgataaatgagtaattcaartaaagaatccaggaaaggattctygattaatttatacattgttgactatattgcactgaactgctcatgatggcagttttgcagtatttcactgttgtcctggttctgctactgttacttaagttgaaaaagatatgacagctctgattcaattcgcttttttcrtgacatgcaagacgtagatctgggcttttcagttcacattagttttctaaatagttattaatggacttgaaaaggagaaaatttgtacctaaagtaactttatcaaataatgaaaacaaatattccttgccaag

SEQ ID NO: 4069 - DNA, 599 bp, Chicken  19866894101334_2
  misc_feature (1)..(12): n is any nucleotide
nnnnnnnnnnnnttgcctctatttggacacaaggagaggagcgaggttatattgcatgagaattacaccccccaccagctcaggactgctgaacgtccatatagctgtaatcagactgcaggcttacatgtttccaggcaaagttgcattatgctgccatcagcaccttggaaataccatcttctgtgtttgtcaggtggtaggataatcaagttctgcatcatgactcatgttcctggagttaacacaatgcaactgataaatgagtaattcaartaaagaatccaggaaaggattctygattaatttatacattgttgactatattgcactgaactgctcatgatggcagttttgcagtatttcactgttgtcctggttctgctactgttacttaagttgaaaaagatatgacagctctgattcaattcgcttttttcrtgacatgcaagacgtagatctgggcttttcagttcacattagttttctaaatagttattaatggacttgaaaaggagaaaatttgtacctaaagtaactttatcaaataatgaaaacaaatattccttgccaagtatggtggaagagatcatcaaatg

SEQ ID NO: 4070 - DNA, 600 bp, Chicken  19866894101334_3
agttgcattatgctgccatcagcaccttggaaataccatcttctgtgtttgtcaggtggtaggataatcaagttctgcatcatgactcatgttcctggagttaacacaatgcaactgataaatgagtaattcaartaaagaatccaggaaaggattctygattaatttatacattgttgactatattgcactgaactgctcatgatggcagttttgcagtatttcactgttgtcctggttctgctactgttacttaagttgaaaaagatatgacagctctgattcaattcgcttttttcrtgacatgcaagacgtagatctgggcttttcagttcacattagttttctaaatagttattaatggacttgaaaaggagaaaatttgtacctaaagtaactttatcaaataatgaaaacaaatattccttgccaagtatggtggaagagatcatcaaatgagcatacttcttctttcaaacctctttcactgattggatagaaatatcatttatttttctttctgttttccatctgtgtaagcttacctatgactgaagaatccactttttccccagtccttccccagaaagagaggaaggg

SEQ ID NO: 4071 - DNA, 600 bp, Chicken  19866894101341_1
agtacccaggctctacatgtttctcactccaaccctactgattcacttttttatcctgacctgcaagctaccttgttattctagtccttagcctctcctgtgcagaagctgccaatcatatcacatttgcagtgattcttaccagctgtgggggaaaaaaaaaatcaaggtgaaaatgagactacgcaactaatttttgccactagatctcctgagtaaaagagaatttatttttaattggctccacacacttgggaaatgataacaattccttgtgactttcctgttcaaattacagayctcttctatacagcattctttctcctaaaactaatccaaatgaaactcttaatagtatctttcaaagaaaatataggccttttgtgatacttccttcttttacagggctttttagtcacctcaatcattcaacagcagtgcaagagttatgtttgattctcagagctttcaggcagtaccatgctgatagcatgtttatgcatatttgcatgctatgcacactgtacaaaatgttcctttttttttggtatgtaagaacaggagtgaatttaccttaagatgtcatagaacagaatcttt

SEQ ID NO: 4072 - DNA, 600 bp, Chicken  19866894101347_1
gtaacacctcagaattattcagctgcagtactgccagcctgtgctattattccttgtagctctcttcagaaatctctgggatctttcaacccccatatctgttcatccatgctctctggctgcagtctgggcaggaggtggtgcctgctattgctaaagctgtgctggcagaccaaagagaaagcttaactgctgagtttatgctgcactctggcccccctcaggcaaggttatttggaggtttgttctgccagtcccctcatggagacctcagggaattgtttttatgttaatactttktaattyaaagagtgataagagaggatagcagaggcggatgtaaaagttaatttctaaacattattttccttaggaacaatcaaagcaatgttttctatgtgcaagctgaattgcgtgactgtggcaaatcctgcacagcttttcaggccgcagggagctgcagagcctcctgaagtttgctgatgctctctaatagctgagcaggcctaagtgtctcttcagccagtgcagcataggaagtgtttaattgcatacgtttaatttgcagagtgtgtacaggtgtgtttgaagtattgttaa

SEQ ID NO: 4073 - DNA, 600 bp, Chicken  19866894101347_2
cctcagaattattcagctgcagtactgccagcctgtgctattattccttgtagctctcttcagaaatctctgggatctttcaacccccatatctgttcatccatgctctctggctgcagtctgggcaggaggtggtgcctgctattgctaaagctgtgctggcagaccaaagagaaagcttaactgctgagtttatgctgcactctggcccccctcaggcaaggttatttggaggtttgttctgccagtcccctcatggagacctcagggaattgtttttatgttaatactttktaattyaaagagtgataagagaggatagcagaggcggatgtaaaagttaatttctaaacattattttccttaggaacaatcaaagcaatgttttctatgtgcaagctgaattgcgtgactgtggcaaatcctgcacagcttttcaggccgcagggagctgcagagcctcctgaagtttgctgatgctctctaatagctgagcaggcctaagtgtctcttcagccagtgcagcataggaagtgtttaattgcatacgtttaatttgcagagtgtgtacaggtgtgtttgaagtattgttaatctccc

SEQ ID NO: 4074 - DNA, 600 bp, Chicken  19866894101360_1
aactgcttgagtaaagtcagctgcagtgcatgctgaacacagaacagggtttgacttgtgtaagtccacaggatattctgctaccagcactgctgagctctcagtatatggaaggtcattcccattactctcaggaaagcacaacactgatgggcacgggaagaaaaagtcattcaatactgtatatagtcataacaacatggaaagaacaaagaaagaaaaatgagagtgatctctagcaaagctgtaattgagttttcaaccagaagattaagtggtttaagcataaaataggagggyaaaaacctaatgagggtgtgttttttctatacacctcgtttggtattgtccagttcctaaagaaatgagcatttcagcyrggaattgattgcactgtagtataatatacacacagatggaaacacagaggccacaaaggttaccagtaacrtccaatcaaaattaaccctrtagtcaccrtaactccatttccaccatccataatttctcactcatatcccttctacagcaatatggattcacccccttcaacacaccaccatttactgccctgtgttttcagctattttaatatcatta

SEQ ID NO: 4075 - DNA, 600 bp, Chicken  19866894101360_10
ctacagtaaagctccacatatcaataactttggggaggttttttttttcttgtaatggttttttcataaggatttctactgatagtatgtttcctaattacttaattgcatgatagactaaaatggctctgaaggcgccttgccaatctctcaggtaaattagacagcaccattatctaaattcactttagcaaaattactttattctcttctcaaatagaaatactgtcaaaagcagtgcatctctctcatacttacgtagattcaagtacagatgttctattttcccttaaaagagaygtgagcaagttcatctcttctgtttcatgttcactcatccctattctgccaaagtgtttgccagttgtatcatgttcaagctgaggcttatttggattcctataatgcctatctttgcagaaactctctgaacagcctgatggagttatctgttaaaaaattgcaaatattttcttattagataggtatgcaatgttctattaaattaagggctgtaatctttttgtaatcgggttttgtaattcctgatgccctttatctacattaagcagcatccacagacatttcactgaccattta

SEQ ID NO: 4076 - DNA, 600 bp, Chicken  19866894101360_2
gctaccagcactgctgagctctcagtatatggaaggtcattcccattactctcaggaaagcacaacactgatgggcacgggaagaaaaagtcattcaatactgtatatagtcataacaacatggaaagaacaaagaaagaaaaatgagagtgatctctagcaaagctgtaattgagttttcaaccagaagattaagtggtttaagcataaaataggagggaaaaaacctaatgagggtgtgttttttctatacacctcgtttggtattgtccagttcctaaagaaatgagcatttcagcyrggaattgattgcactgtagtataatatacacacagatggaaacacagaggccacaaaggttaccagtaacrtccaatcaaaattaaccctrtagtcaccrtaactccatttccaccatccataatttctcactcatatcccttctacagcaatatggattcacccccttcaacacaccaccatttactgccctgtgttttcagctattttaatatcattaaaaacaacaacaacaacacaagcagtagcatgtattatcatctgagccctttagcaatgctagtccccgctctgacaac

SEQ ID NO: 4077 - DNA, 600 bp, Chicken  19866894101360_3
ctaccagcactgctgagctctcagtatatggaaggtcattcccattactctcaggaaagcacaacactgatgggcacgggaagaaaaagtcattcaatactgtatatagtcataacaacatggaaagaacaaagaaagaaaaatgagagtgatctctagcaaagctgtaattgagttttcaaccagaagattaagtggtttaagcataaaataggagggaaaaaacctaatgagggtgtgttttttctatacacctcgtttggtattgtccagttcctaaagaaatgagcatttcagcyrggaattgattgcactgtagtataatatacacacagatggaaacacagaggccacaaaggttaccagtaacrtccaatcaaaattaaccctrtagtcaccrtaactccatttccaccatccataatttctcactcatatcccttctacagcaatatggattcacccccttcaacacaccaccatttactgccctgtgttttcagctattttaatatcattaaaaacaacaacaacaacacaagcagtagcatgtattatcatctgagccctttagcaatgctagtccccgctctgacaaca

SEQ ID NO: 4078 - DNA, 600 bp, Chicken  19866894101360_4
gggcacgggaagaaaaagtcattcaatactgtatatagtcataacaacatggaaagaacaaagaaagaaaaatgagagtgatctctagcaaagctgtaattgagttttcaaccagaagattaagtggtttaagcataaaataggagggaaaaaacctaatgagggtgtgttttttctatacacctcgtttggtattgtccagttcctaaagaaatgagcatttcagcyrggaattgattgcactgtagtataatatacacacagatggaaacacagaggccacaaaggttaccagtaacrtccaatcaaaattaaccctrtagtcaccrtaactccatttccaccatccataatttctcactcatatcccttctacagcaatatggattcacccccttcaacacaccaccatttactgccctgtgttttcagctattttaatatcattaaaaacaacaacaacaacacaagcagtagcatgtattatcatctgagccctttagcaatgctagtccccgctctgacaacattcctctctacagtaaagctccacatatcaataactttggggaggttttttttttcttgtaatggtttttt

SEQ ID NO: 4079 - DNA, 600 bp, Chicken  19866894101360_5
attcaatactgtatatagtcataacaacatggaaagaacaaagaaagaaaaatgagagtgatctctagcaaagctgtaattgagttttcaaccagaagattaagtggtttaagcataaaataggagggaaaaaacctaatgagggtgtgttttttctatacacctcgtttggtattgtccagttcctaaagaaatgagcatttcagcyrggaattgattgcactgtagtataatatacacacagatggaaacacagaggccacaaaggttaccagtaacrtccaatcaaaattaaccctrtagtcaccrtaactccatttccaccatccataatttctcactcatatcccttctacagcaatatggattcacccccttcaacacaccaccatttactgccctgtgttttcagctattttaatatcattaaaaacaacaacaacaacacaagcagtagcatgtattatcatctgagccctttagcaatgctagtccccgctctgacaacattcctctctacagtaaagctccacatatcaataactttggggaggttttttttttcttgtaatggttttttcataaggatttctactgata

SEQ ID NO: 4080 - DNA, 600 bp, Chicken  19866894101360_6
tgtatatagtcataacaacatggaaagaacaaagaaagaaaaatgagagtgatctctagcaaagctgtaattgagttttcaaccagaagattaagtggtttaagcataaaataggagggaaaaaacctaatgagggtgtgttttttctatacacctcgtttggtattgtccagttcctaaagaaatgagcatttcagcyrggaattgattgcactgtagtataatatacacacagatggaaacacagaggccacaaaggttaccagtaacrtccaatcaaaattaaccctrtagtcaccrtaactccatttccaccatccataatttctcactcatatcccttctacagcaatatggattcacccccttcaacacaccaccatttactgccctgtgttttcagctattttaatatcattaaaaacaacaacaacaacacaagcagtagcatgtattatcatctgagccctttagcaatgctagtccccgctctgacaacattcctctctacagtaaagctccacatatcaataactttggggaggttttttttttcttgtaatggttttttcataaggatttctactgatagtatgtttc

SEQ ID NO: 4081 - DNA, 600 bp, Chicken  19866894101360_7
aacctaatgagggtgtgttttttctatacacctcgtttggtattgtccagttcctaaagaaatgagcatttcagcyrggaattgattgcactgtagtataatatacacacagatggaaacacagaggccacaaaggttaccagtaacrtccaatcaaaattaaccctrtagtcaccrtaactccatttccaccatccataatttctcactcatatcccttctacagcaatatggattcacccccttcaacacaccaccatttactgccctgtgttttcagctattttaatatcattaaaracaacaacaacaacacaagcagtagcatgtattatcatctgagccctttagcaatgctagtccccgctctgacaacattcctctctacagtaaagctccacatatcaataactttggggaggttttttttttcttgtaatggttttttcataaggatttctactgatagtatgtttcctaattacttaattgcatgatagactaaaatggctctgaaggcgccttgccaatctctcaggtaaattagacagcaccattatctaaattcactttagcaaaattactttattctcttctcaa

SEQ ID NO: 4082 - DNA, 600 bp, Chicken  19866894101360_8
acctaatgagggtgtgttttttctatacacctcgtttggtattgtccagttcctaaagaaatgagcatttcagcyrggaattgattgcactgtagtataatatacacacagatggaaacacagaggccacaaaggttaccagtaacrtccaatcaaaattaaccctrtagtcaccrtaactccatttccaccatccataatttctcactcatatcccttctacagcaatatggattcacccccttcaacacaccaccatttactgccctgtgttttcagctattttaatatcattaaaarcaacaacaacaacacaagcagtagcatgtattatcatctgagccctttagcaatgctagtccccgctctgacaacattcctctctacagtaaagctccacatatcaataactttggggaggttttttttttcttgtaatggttttttcataaggatttctactgatagtatgtttcctaattacttaattgcatgatagactaaaatggctctgaaggcgccttgccaatctctcaggtaaattagacagcaccattatctaaattcactttagcaaaattactttattctcttctcaaa

SEQ ID NO: 4083 - DNA, 600 bp, Chicken  19866894101360_9
cctaatgagggtgtgttttttctatacacctcgtttggtattgtccagttcctaaagaaatgagcatttcagcyrggaattgattgcactgtagtataatatacacacagatggaaacacagaggccacaaaggttaccagtaacrtccaatcaaaattaaccctrtagtcaccrtaactccatttccaccatccataatttctcactcatatcccttctacagcaatatggattcacccccttcaacacaccaccatttactgccctgtgttttcagctattttaatatcattaaaaaraacaacaacaacacaagcagtagcatgtattatcatctgagccctttagcaatgctagtccccgctctgacaacattcctctctacagtaaagctccacatatcaataactttggggaggttttttttttcttgtaatggttttttcataaggatttctactgatagtatgtttcctaattacttaattgcatgatagactaaaatggctctgaaggcgccttgccaatctctcaggtaaattagacagcaccattatctaaattcactttagcaaaattactttattctcttctcaaat

SEQ ID NO: 4084 - DNA, 600 bp, Chicken  19866894101363_1
cactgcatacaagaagctttaagctaacattactatcatctgtcacatccgtggcttttctttcgctttcctctgcagaggaatactgcctgcagacacttattgtttcatataaatacatggcatgtttcctctcactgaagaacaaaccatatacatctgagctaatctagtcaacaaagaacaaccagtgtgtaagaagttggtattggcactcctaaaatcattatcgttgtttattcaaggtacgttgtacagatagggcatattctcaaaaacagagcaggtctatactgctaytaactacagagaatagtatgagctgaaccacatatatcaaacttgaagcctcgtcaacctactcctgctatgaaagtctctttttaaaacacaagcaattctaattctgaaataaagtcatttttcattacttccacaaacagaaagattagcaaagaccacacaacttctgtaactactgtgaataatcaagactattgttttggcatctgattaagaagtgttttctaatcttatttatgtgaagaaaatagctgtggaaaaggaggagaaaaacgaccgactcaattatttcacgta

SEQ ID NO: 4085 - DNA, 600 bp, Chicken  19866894101366_1
tgagcttccgtgtaatttatattcagttcaaagtcctgatgctttgagtcctgacctatcaggctttcctaatgtgctgttggactaatgcaacatctacagccaagtgattcctggtagctctgagtgttgttacagcatgtctgaatttatatttggggagaagtttcagatctacaattagctactgctttagaaaaagttgagttataaaagttatgagaatctcaagatgaagataaaaacaactggaaaatctcaaatagaatgtgaagtgcattcttctatctgaatctattyctcattcctgaatgaactattgggatgaactgtttttgggaggtaccatcttttggataaggcaataaactaattccttgatcatgtaaagagacgttggattttgttacacagcaaaaactgtgattaaattcaggtctgtgggcaatttaagtttaggccaatatatatttctagctaaatcccacatagcattccaccactttttctccaaacttaaacatgatgttaaccagctgtgatttcccagtcaccaacagtagctccgttagtgctaagtgtgaatgcccttcatgtcat

SEQ ID NO: 4086 - DNA, 600 bp, Chicken  19866894101366_2
attaaaagaacactgctactgtaaaacaaaacttcttcagcaccagatgcacttaaggaaacaaattaatgaatgtcagttgtgcagatccgctgtcagccaggctactcctgatgaaaaagctcagctggagttgctggaaaggcagccctcagcacctcatgggactgaacctgattctcagtgtcgtctgcagcgggggcaaaactcagctggcagaacagtcacgcaagaaagaacgcagtaagcctcggagattcacttacaggagaaatttctttctttcttaatctgtagctwattttgtgctttcataatataaactgctgtttcctattttgtggggggkggggaggaacaagtagaattaaagaaaaacaggcatacaagatggaatacaactgttcaaacagaagacagcgtcaagtaaaattgattaaatagtatagatttttccccctgtgagtcattttgccaccgtgataaatatttaatcctgattgatgactgaaagctctggaacatgtatttggatcaaaaggtgctttataaataaagatgttacaatgtcacatatttgactgtttcttcagtaaaata

SEQ ID NO: 4087 - DNA, 600 bp, Chicken  19866894101366_3
cacttaaggaaacaaattaatgaatgtcagttgtgcagatccgctgtcagccaggctactcctgatgaaaaagctcagctggagttgctggaaaggcagccctcagcacctcatgggactgaacctgattctcagtgtcgtctgcagcgggggcaaaactcagctggcagaacagtcacgcaagaaagaacgcagtaagcctcggagattcacttacaggagaaatttctttctttcttaatctgtagctwattttgtgctttcataatataaactgctgtttcctattttgtggggggkggggaggaacaagtagaattaaagaaaaacaggcatacaagatggaatacaactgttcaaacagaagacagcgtcaagtaaaattgattaaatagtatagatttttccccctgtgagtcattttgccaccgtgataaatatttaatcctgattgatgactgaaagctctggaacatgtatttggatcaaaaggtgctttataaataaagatgttacaatgtcacatatttgactgtttcttcagtaaaatatttttttctaaatcaaacatgcaactcagctttcttttgcatcatgtta

SEQ ID NO: 4088 - DNA, 600 bp, Chicken  19866894101369_1
aaaagccccctgatcccaactggctgtagaactgggccactgatcatgctacgttcctgtaacagcttacatagcaactgtgcataggccaccaactatctgaagaggtatttcttaataggtacacttagtaaatctcttcttcctcccaggtacacctgatagcatttaagctggtggtcattccttcaataaatacattatcgcagagatcattgttcaaggaagaatttatgaaatgatgttgagaggaaccttaaagtccacccagttccactgctcctgccaggggcagggacrcctcccactacatcgggttgcccaaactttggtgcttttagttcaaaatggcaaacaccagagaagcacaccaaaggacacggttcaggggagatcaccttgcatggtgagagctaaatccacgcatccacgtaaaacaaacataaaaccctgatgactctggagcagaggtgaaaaacggtttctttcttccaaactgaatgtgctacactgcacccataaagggcagttttgtcctttcaccagaaaacacagcagtcgtctcagtgcccactgcagctggaacaaattctactgtct

SEQ ID NO: 4089 - DNA, 600 bp, Chicken  19866894101369_2
agcaacatgggccccttctgacaagcccctggttcaaacaagacccaccatttacatgcagagaagaaatctggctgggattgttttagcagcctttttcaaacagtgccggcaaaccggcaactcctcagcaaaatcacatcccaagagctaaggcagctgaggattatggctttctcagtattctcagcagaggaaggcagacagaaacactgtgtcccactgtttttactcaagctccctcttctccacaggcagcactttctgcacaactcctccagctttcggcaatggcaataygaagtcctgggaacttctatggaacggggaaaacacagccaggattcagaggaagttcatggaggtaatcctacctgggtgataattagatgaacctaagcttattagatgcgaccaaatctatttagaggaaaccatctcaaagctgaagaagttacagcaaagggatggaatgcaacagcacaacttaggaaacagctttcggttaaaaacttctacacaacccgttttgtttaggctgttttcttggaccatttctaatactctcaaaacttcatttacaaccctggtagggacaat

SEQ ID NO: 4090 - DNA, 599 bp, Chicken  19866894101371_1
  misc_feature (1)..(99): n is any nucleotide
nnnnnnnnnnnnnnnnnnnnnnnnnnnnnnnnnnnnnnnnnnnnnnnnnnnnnnnnnnnnnnnnnnnnnnnnnnnnnnnnnnnnnnnnnnnnnnnnnnnaaacctgttatttgaggagttattttggtgattctgctattttaaaccaaagcagagaactccatgttgaaaaaccacaagattattccactgtatcttgaggcaatggctgaaagggacacgaaggacatggtttagtgagcatgctggacatgggttggtgtttggagtcaatgatcatagaatcgtttaatcgttagkgttggaaatgactactgggatcatctagtccaagcccaaaccatcaccaycaaccttgttgtcttctgcaaccttaacaattccatgaaagtgtttccattggattggtccattgaatcctggcatgacagcctgggacttttagaacaaatacttgcctggagcagaytgatctgatcattgctgacctggagagccaggaatcccaacaggtagttgcagtgttgcttaagaaaagcatatagagatcattagaagttgaactcagtgatccttacgtgtccctttcaactcgggat

SEQ ID NO: 4091 - DNA, 599 bp, Chicken  19866894101371_2
  misc_feature (1)..(49): n is any nucleotide
nnnnnnnnnnnnnnnnnnnnnnnnnnnnnnnnnnnnnnnnnnnnnnnnnaaacctgttatttgaggagttattttggtgattctgctattttaaaccaaagcagagaactccatgttgaaaaaccacaagattattccactgtatcttgaggcaatggctgaaagggacacgaaggacatggtttagtgagcatgctggacatgggttggtgtttggagtcaatgatcatagaatcgtttaatcgttagkgttggaaatgactactgggatcatctagtccaagcccaaaccatcaccaycaaccttgttgtcttctgcaaccttaacaattccatgaaagtgtttccattggattggtccattgaatcctggcatgacagcctgggacttttagaacaaatacttgcctggagcagaytgatctgatcattgctgacctggagagccaggaatcccaacaggtagttgcagtgttgcttaagaaaagcatatagagatcattagaagttgaactcagtgatccttacgtgtccctttcaactcgggatgtactgtgattctatgagtcctgccttacagtcactgatttcagaaggaa

SEQ ID NO: 4092 - DNA, 600 bp, Chicken  19866894101371_3
aaaaccacaagattattccactgtatcttgaggcaatggctgaaagggacacgaaggacatggtttagtgagcatgctggacatgggttggtgtttggagtcaatgatcatagaatcgtttaatcgttagkgttggaaatgactactgggatcatctagtccaagcccaaaccatcaccaycaaccttgttgtcttctgcaaccttaacaattccatgaaagtgtttccattggattggtccattgaatcctggcatgacagcctgggacttttagaacaaatacttgcctggagcagaytgatctgatcattgctgacctggagagccaggaatcccaacaggtagttgcagtgttgcttaagaaaagcatatagagatcattagaagttgaactcagtgatccttacgtgtccctttcaactcgggatgtactgtgattctatgagtcctgccttacagtcactgatttcagaaggaaaaataattcccactgtttgtagaaggcaccacggaaaggagagcactggcagagcactaatacctaaacactgcttgaaaaccacgctgacagcctttataaaaccatgcaaattccccc

SEQ ID NO: 4093 - DNA, 600 bp, Chicken  19866894101377_1
gacagtctctttggtattaactactcttccactcataggagtgggaagcagaagtgatgagaaaagttgctgccctcactactgaaaagaagagggcttagacctctgaagatgaaaccaatctgtgcaagggactgaaaaaggtgttgatgtttctttggcaaaaagcaaaaccgaccaccccacaacagctgatgtcctcttcatcagctattttgagacctgtcaaaatgttctagtttaggtctcttctgaaatgctgctttctgtgttaacgtgtttgcagcaatagcaaaaatygctagctggaaggtgggatgagttctttggaaaaggctgtcaggtgatgatacagttgaagaagatatttgtattgattccctgagggaaataagttgttcatttaaattgcttgctattgaaggcctgaaattgcatactatggggcgtggagtctgcattttgtacttgaacaagttcactattctgtatgcaatgagttgttagctgtatgtacatccagtcttgcatggctcttctggcacgtttaattctttgaatagtaaatgcatgggttgtagctaatataacyccataaac

SEQ ID NO: 4094 - DNA, 600 bp, Chicken  19866894101377_2
caaaaatygctagctggaaggtgggatgagttctttggaaaaggctgtcaggtgatgatacagttgaagaagatatttgtattgattccctgagggaaataagttgttcatttaaattgcttgctattgaaggcctgaaattgcatactatggggcgtggagtctgcattttgtacttgaacaagttcactattctgtatgcaatgagttgttagctgtatgtacatccagtcttgcatggctcttctggcacgtttaattctttgaatagtaaatgcatgggttgtagctaatataacyccataaacagccaaaaatcctctctgtgagttctactttcttacttgtgcggcatatgtcaactaaatctcactggacatgctatgtaaatatgagttatcctcattttgttgatatggtatataaccttatcagtataaggcaacagccatcgtwgttggcacattgctctgtgttctgtatgttgctacaaccagtggcagctcgctccagggtgatcagaggtattaaaatactctaaataagtattttagggtcatagatacagttctcattcaggacttgctggggaataggaaa

SEQ ID NO: 4095 - DNA, 600 bp, Chicken  19866894101377_3
gtggagtctgcattttgtacttgaacaagttcactattctgtatgcaatgagttgttagctgtatgtacatccagtcttgcatggctcttctggcacgtttaattctttgaatagtaaatgcatgggttgtagctaatataacyccataaacagccaaaaatcctctctgtgagttctactttcttacttgtgcggcatatgtcaactaaatctcactggacatgctatgtaaatatgagttatcctcattttgttgatatggtatataaccttatcagtataaggcaacagccatcgtwgttggcacattgctctgtgttctgtatgttgctacaaccagtggcagctcgctccagggtgatcagaggtattaaaatactctaaataagtattttagggtcatagatacagttctcattcaggacttgctggggaataggaaataacacagaggctgtgctaatagtgttgatatttttgagctggtttgcagagctttacaatctgactaaaaaaacttggtaatataaacttgttcttacaaaaataccccattttaaggtaagcagtagatgctgtatttttcgtttacagaaatg

SEQ ID NO: 4096 - DNA, 600 bp, Chicken  19866894101377_4
cttgctggggaataggaaataacacagaggctgtgctaatagtgttgatatttttgagctggtttgcagagctttacaatctgactaaaaaaacttggtaatataaacttgttcttacaaaaataccccattttaaggtaagcagtagatgctgtatttttcgtttacagaaatgaagccttccctatttcttaaagtagagagaggggagagtaagttatccgaattgctgctgccactcaccagtccatacaggcacaaagcttgtcattggatgtagtgacttctgttttcttctawttttttaaacaaacatgaacaggtgtttgctttcaggtattatttaccagaactggccagaatcaaagtggtctctacttgaaaagtgctgatacagtgaagctagagctgcccggggtataacttaaaaatattgtaacaataccagcctacctctgtccygtattcccaccaccacmcatgcagccccatggtaacagaatgatgcaagacagggcacacagagctggggccacttgtgttcatgtggacatggagtggtgcacagctgcagtctatgccaaagcccacctgtgttca

SEQ ID NO: 4097 - DNA, 600 bp, Chicken  19866894101377_5
gtttacagaaatgaagccttccctatttcttaaagtagagagaggggagagtaagttatccgaattgctgctgccactcaccagtccatacaggcacaaagcttgtcattggatgtagtgacttctgttttcttctatttttttaaacaaacatgaacaggtgtttgctttcaggtattatttaccagaactggccagaatcaaagtggtctctacttgaaaagtgctgatacagtgaagctagagctgcccggggtataacttaaaaatattgtaacaataccagcctacctctgtccygtattcccaccaccacmcatgcagccccatggtaacagaatgatgcaagacagggcacacagagctggggccacttgtgttcatgtggacatggagtggtgcacagctgcagtctatgccaaagcccacctgtgttcatgtgtaatgtcaccactgccctcacactgcttgtgcaactgatatgtggtctgatgggtgtatgtggaagaaataaagggaaaaatttattttcatgtcttgaaagaatggcataactcccagtgtttgcctgtttgatcccaagccaatgtcctggtgctg

SEQ ID NO: 4098 - DNA, 600 bp, Chicken  19866894101377_6
cttccctatttcttaaagtagagagaggggagagtaagttatccgaattgctgctgccactcaccagtccatacaggcacaaagcttgtcattggatgtagtgacttctgttttcttctatttttttaaacaaacatgaacaggtgtttgctttcaggtattatttaccagaactggccagaatcaaagtggtctctacttgaaaagtgctgatacagtgaagctagagctgcccggggtataacttaaaaatattgtaacaataccagcctacctctgtccygtattcccaccaccacmcatgcagccccatggtaacagaatgatgcaagacagggcacacagagctggggccacttgtgttcatgtggacatggagtggtgcacagctgcagtctatgccaaagcccacctgtgttcatgtgtaatgtcaccactgccctcacactgcttgtgcaactgatatgtggtctgatgggtgtatgtggaagaaataaagggaaaaatttattttcatgtcttgaaagaatggcataactcccagtgtttgcctgtttgatcccaagccaatgtcctggtgctgcgatgggtgaagtgttg

SEQ ID NO: 4099 - DNA, 599 bp, Chicken  19866894101378_1
  misc_feature (1)..(178): n is any nucleotide
nnnnnnnnnnnnnnnnnnnnnnnnnnnnnnnnnnnnnnnnnnnnnnnnnnnnnnnnnnnnnnnnnnnnnnnnnnnnnnnnnnnnnnnnnnnnnnnnnnnnnnnnnnnnnnnnnnnnnnnnnnnnnnnnnnnnnnnnnnnnnnnnnnnnnnnnnnnnnnnnnnnnnnnnnnnnnnnnnncaaataatatatatttaataacatacatacatacatacatacatacctatatagtactgttacttgcaaaaatcggtgataaactatctcctagtaggctccgctgacttacagaatggatrcagacttctacctcgagacaggaacttttagtaagtgtgattcaaactgtcagagcacaaatccaacattctactacctggttttattgaactttcaagctaggcaagctcctgtgcttgctgatgaaacaaaggattacataggattaaccctttggaaacttagggcacagtgttcatttgattaaaataatcttcctaagcatttggtgactggcaagctggaaaaataccagcttttctttaattcctattgcagttctggaatggagtaagaaagttttgccctcttttcagac

SEQ ID NO: 4100 - DNA, 535 bp, Chicken  19866894101380_1
atggcaacaccaggcttgctgcttcatgctctagcttacccattctcagtattataggtctctggttgtgatgagcaaggctcaaactacccacttggcccaagcaggtcatcacctatctggaaatccattataaataaggacagtcttctggattccaggtggttaaaattgccaaaagacacagaatcacatgaaatcacagaattgtgaatgttggaagggacttctagagatcattgagtcccaccccctgctaaaacaggttccatatagtcagttgcacaggtagtcatccaratgggtccagacagaagggcatcatctagaaaaaaactcagcacaacatagcagaagcagaaaaaaatatatagaaagaaaattatttaaaattacattttttctgatgagacagggaggttgaatgtgttgtacaccacagtgatatagcaggtgatgttgaaataccttccatacaaacatcatacacaggcatatctgcaaattcataaaaggtctgaggcttctgcaagag

SEQ ID NO: 4101 - DNA, 600 bp, Chicken  19866894101383_1
caaataacagagcaggacatggcagagttctcagttctcttccagacaaaatcctcacacagctaatggaatcgatggaactccctcacaccgcaggtgctgagcacccataagctgaagcaaacagcttccaacagcagaagagaagacaaacagctcattcagcttctcctgcagctccagtattgagcttcatcggtctaactgtggagaattaacacggaacgaggaaaaacatgttgctgctgatatactcatgcacaacacaacacgaggtaactccacagcatcagacactcrgcacaatcagaacaaggctacttagaaagaggagaatgtacgtacaggtaactttaagccactttccggtgtcggaagcattttgtatttttcctcttaccagtgcatcagccacagcggcctccagatctgtgcttgtgctcaggactcgcatggcattcacagaagcaggcatcctgcctgactgtccgagtccaaaccggtctgcacaaaagacaacattgaaatggactgttaagtaaattcacattcacttggaatcctaatcaggtgtctgaacagttctccccaaaggatctg

SEQ ID NO: 4102 - DNA, 600 bp, Chicken  19866894101387_1
ccatggaggcattactttcagagcaacatacatgttttaataaaaggatgtacactattgtggaattccgtgttgcatgtttgcctctaatcagcaaaaaatgcttcatagtggagtgaaaaacaagaacaatctcatcagtaaggctgtggacaaatttagcacccacagttagagtcagatctgcagtccattgagcccagtgaaaaaacctcttgaagagttgagcatggccctgattgtgtcaccctctgattaattatgtcctggtagtattataatgcttagaaactgctcccrtgtccagatgagtctcacttattgaatgctgttttttatatcttccttctgattcaattctgattcagggcataaaaactgcagccacagattctcctggagggtttgacagaacactgcaaaagagcatttgattttgtctttattgcagcacacatgagtgcctccatctcattaatgtaggaaatgtgttatctgagggagagcagcctggaagcttggaacagcagtgatctgatttcagagtccctgttttttcattttatctattagatggcacggcaaattaaatgtcccatc

SEQ ID NO: 4103 - DNA, 600 bp, Chicken  19866894101388_1
acttaacctctggttttcagactagggcttctcattcactgtactctgagacttttaaggtgaagcagttgttctaagatactgctagctgcaagggtttctacaaacaagtaaatccaaattcttgtggattagaggaattactcttcatagcacggaagagtaaaagggttgaaatgtctaatccctaaaaattccatttgtgctatgagagagttaagggtgctgcttgtacaagagcaaccaagcctagaatgttctggtgtgtatcattgttgtaatttctttgtagatttataytgakatttaataattgggatgtaagcactgcgttgtgtggttttggatctttaatgaccattaatatattatgggccagacatgaagtgctaggaaagagcacctaggaaaaaaatgtgcttttaatatcttaagtttgctcttcaaagcgaataaaattcctacattccctgtaattcgtgcagaatgcacttcctgcaagtccacccagttcctctgatcctgaattggtgttacagtgctcagcagcagctgggagaatgaaaaatactactcaatctgtaaggaagcatttaaaaa

SEQ ID NO: 4104 - DNA, 600 bp, Chicken  19866894101388_10
tccaagaatatgtaacaaaattkttctttaataaaaaactgcacgaattgcagagacctctctggtggcctcctaaaacttgtgccatctcttatgttacaaggagccagcttccatttctagatcatcttcacacrttgtgttggtgctcaaagaacttccagctctargagttgtagctgcagaacccattagcagcctygtgcccttctctatctgtgttctgctaagtcagtgccactgctgctgaggccagaagcacaaagcctgctcaccagctgggtcattcagcccacgggrttggttgtgaatgagtattgctaattattattagttttggttcttatagttgggaagtttgtgtttctctgttggcagaattgtgcagatgaaatagctagacgtggcagattttattcagaccctcatataaatggcacttggaacttgcctgttgggcctttgacacatgtaaataaaaggagcaggcttttaatttttccaaatacatttttataacagaacactaagccatagggtcaagcttcagctgtttctatattaacaaacatatgggagaggtatatatgtacagctagc

SEQ ID NO: 4105 - DNA, 600 bp, Chicken  19866894101388_2
aacctctggttttcagactagggcttctcattcactgtactctgagacttttaaggtgaagcagttgttctaagatactgctagctgcaagggtttctacaaacaagtaaatccaaattcttgtggattagaggaattactcttcatagcacggaagagtaaaagggttgaaatgtctaatccctaaaaattccatttgtgctatgagagagttaagggtgctgcttgtacaagagcaaccaagcctagaatgttctggtgtgtatcattgttgtaatttctttgtagatttataytgakatttaataattgggatgtaagcactgcgttgtgtggttttggatctttaatgaccattaatatattatgggccagacatgaagtgctaggaaagagcacctaggaaaaaaatgtgcttttaatatcttaagtttgctcttcaaagcgaataaaattcctacattccctgtaattcgtgcagaatgcacttcctgcaagtccacccagttcctctgatcctgaattggtgttacagtgctcagcagcagctgggagaatgaaaaatactactcaatctgtaaggaagcatttaaaaaacag

SEQ ID NO: 4106 - DNA, 600 bp, Chicken  19866894101388_3
aagtgctaggaaagagcacctaggaaaaaaatgtgcttttaatatcttaagtttgctcttcaaagcgaataaaattcctacattccctgtaattcgtgcagaatgcacttcctgcaagtccacccagttcctctgatcctgaattggtgttacagtgctcagcagcagctgggagaatgaaaaatactactcaatctgtaaggaagcatttaaaaaacagtgtgattatactgacctcttggccaaagtgtttgtgacttggaggactaccaaatgatgatcttgtgccagagcttagayctcaaattaagatcactgtttacttacagtggggygtactgtattttcaattaacaatgcattctgttaagcactgtgtgaaattcaatacaaagagaaacaaaatggctttaggcagaactgcttgcatttggggaatgcagttgatagggtttcattcattcaagagcgtacaaaaaatagctgtaagttccttatagatattatataggaacaagtacagcatgaggttaaattgacgtctgtttcctaaagaaggaaagcagtagagctaatgctgttatattccatttcctgctt

SEQ ID NO: 4107 - DNA, 600 bp, Chicken  19866894101388_4
cttttaatatcttaagtttgctcttcaaagcgaataaaattcctacattccctgtaattcgtgcagaatgcacttcctgcaagtccacccagttcctctgatcctgaattggtgttacagtgctcagcagcagctgggagaatgaaaaatactactcaatctgtaaggaagcatttaaaaaacagtgtgattatactgacctcttggccaaagtgtttgtgacttggaggactaccaaatgatgatcttgtgccagagcttagayctcaaattaagatcactgtttacttacagtggggygtactgtattttcaattaacaatgcattctgttaagcactgtgtgaaattcaatacaaagagaaacaaaatggctttaggcagaactgcttgcatttggggaatgcagttgatagggtttcattcattcaagagcgtacaaaaaatagctgtaagttccttatagatattatataggaacaagtacagcatgaggttaaattgacgtctgtttcctaaagaaggaaagcagtagagctaatgctgttatattccatttcctgctttcttaaggctgtgaagcacctttgcttcgctccat

SEQ ID NO: 4108 - DNA, 600 bp, Chicken  19866894101388_5
gtaagttccttatagatattatataggaacaagtacagcatgaggttaaattgacgtctgtttcctaaagaaggaaagcagtagagctaatgctgttatattccatttcctgctttcttaaggctgtgaagcacctttgcttcgctccattcatgactcagatacaaagcctgcctttttatgaactattggaaaacgttttcagagttccagtcactgctgggagtaagttgaatgttcagacagcatccttccagtttaatgccttgtttgttagcatgaatgactatagcacttaaraaaaatgaagaaaaatttaaccttttccttaagcacaacaagtctgctgtttttcaaggttccaagaatatgtaacaaaattkttctttaataaaaaactgcacgaattgcagagacctctctggtggcctcctaaaacttgtgccatctcttatgttacaaggagccagcttccatttctagatcatcttcacacrttgtgttggtgctcaaagaacttccagctctargagttgtagctgcagaacccattagcagcctygtgcccttctctatctgtgttctgctaagtcagtgcca

SEQ ID NO: 4109 - DNA, 600 bp, Chicken  19866894101388_6
gagctaatgctgttatattccatttcctgctttcttaaggctgtgaagcacctttgcttcgctccattcatgactcagatacaaagcctgcctttttatgaactattggaaaacgttttcagagttccagtcactgctgggagtaagttgaatgttcagacagcatccttccagtttaatgccttgtttgttagcatgaatgactatagcacttaaraaaaatgaagaaaaatttaaccttttccttaagcacaacaagtctgctgtttttcaaggttccaagaatatgtaacaaaattkttctttaataaaaaactgcacgaattgcagagacctctctggtggcctcctaaaacttgtgccatctcttatgttacaaggagccagcttccatttctagatcatcttcacacrttgtgttggtgctcaaagaacttccagctctargagttgtagctgcagaacccattagcagcctygtgcccttctctatctgtgttctgctaagtcagtgccactgctgctgaggccagaagcacaaagcctgctcaccagctgggtcattcagcccacgggrttggttgtgaatgagtattgcta

SEQ ID NO: 4110 - DNA, 600 bp, Chicken  19866894101388_7
gttttcagagttccagtcactgctgggagtaagttgaatgttcagacagcatccttccagtttaatgccttgtttgttagcatgaatgactatagcacttaaraaaaatgaagaaaaatttaaccttttccttaagcacaacaagtctgctgtttttcaaggttccaagaatatgtaacaaaattkttctttaataaaaaactgcacgaattgcagagacctctctggtggcctcctaaaacttgtgccatctcttatgttacaaggagccagcttccatttctagatcatcttcacacrttgtgttggtgctcaaagaacttccagctctargagttgtagctgcagaacccattagcagcctygtgcccttctctatctgtgttctgctaagtcagtgccactgctgctgaggccagaagcacaaagcctgctcaccagctgggtcattcagcccacgggrttggttgtgaatgagtattgctaattattattagttttggttcttatagttgggaagtttgtgtttctctgttggcagaattgtgcagatgaaatagctagacgtggcagattttattcagaccctcatataaatgg

SEQ ID NO: 4111 - DNA, 600 bp, Chicken  19866894101388_8
ttgaatgttcagacagcatccttccagtttaatgccttgtttgttagcatgaatgactatagcacttaaraaaaatgaagaaaaatttaaccttttccttaagcacaacaagtctgctgtttttcaaggttccaagaatatgtaacaaaattkttctttaataaaaaactgcacgaattgcagagacctctctggtggcctcctaaaacttgtgccatctcttatgttacaaggagccagcttccatttctagatcatcttcacacrttgtgttggtgctcaaagaacttccagctctargagttgtagctgcagaacccattagcagcctygtgcccttctctatctgtgttctgctaagtcagtgccactgctgctgaggccagaagcacaaagcctgctcaccagctgggtcattcagcccacgggrttggttgtgaatgagtattgctaattattattagttttggttcttatagttgggaagtttgtgtttctctgttggcagaattgtgcagatgaaatagctagacgtggcagattttattcagaccctcatataaatggcacttggaacttgcctgttgggcctttgacaca

SEQ ID NO: 4112 - DNA, 600 bp, Chicken  19866894101388_9
tgccttgtttgttagcatgaatgactatagcacttaaraaaaatgaagaaaaatttaaccttttccttaagcacaacaagtctgctgtttttcaaggttccaagaatatgtaacaaaattkttctttaataaaaaactgcacgaattgcagagacctctctggtggcctcctaaaacttgtgccatctcttatgttacaaggagccagcttccatttctagatcatcttcacacrttgtgttggtgctcaaagaacttccagctctargagttgtagctgcagaacccattagcagcctygtgcccttctctatctgtgttctgctaagtcagtgccactgctgctgaggccagaagcacaaagcctgctcaccagctgggtcattcagcccacgggrttggttgtgaatgagtattgctaattattattagttttggttcttatagttgggaagtttgtgtttctctgttggcagaattgtgcagatgaaatagctagacgtggcagattttattcagaccctcatataaatggcacttggaacttgcctgttgggcctttgacacatgtaaataaaaggagcaggcttttaatttttc

SEQ ID NO: 4113 - DNA, 599 bp, Chicken  19866894101390_1
  misc_feature (1)..(203): n is any nucleotide
nnnnnnnnnnnnnnnnnnnnnnnnnnnnnnnnnnnnnnnnnnnnnnnnnnnnnnnnnnnnnnnnnnnnnnnnnnnnnnnnnnnnnnnnnnnnnnnnnnnnnnnnnnnnnnnnnnnnnnnnnnnnnnnnnnnnnnnnnnnnnnnnnnnnnnnnnnnnnnnnnnnnnnnnnnnnnnnnnnnnnnnnnnnnnnnnnnnnnnnnnnnctgcccctgatctcacacaaatgtgtattatcctccataaaacacaaggtgctgggcttgtgtcacaggtgctggattgctatatggcaaatggtgyrggtaaccagcaccaagtggggaagacacactggagatgcatcattgccatgtgaaggcaaagcagagttgtgaactattctgttagcacagttgtcagagggtgagtaaatagaggtcacagactcctagtctcacctcttttgctggtggattgtttattctatcatgcatgagctgccatggggactttctgcacaattttatgtcttagctcaccaattatctacagtgggaaccaggttgctgtgcctgggttttcttcccatgtaatctaggatgctgctgcacaatgggagg

SEQ ID NO: 4114 - DNA, 599 bp, Chicken  19866894101390_2
  misc_feature (1)..(202): n is any nucleotide
nnnnnnnnnnnnnnnnnnnnnnnnnnnnnnnnnnnnnnnnnnnnnnnnnnnnnnnnnnnnnnnnnnnnnnnnnnnnnnnnnnnnnnnnnnnnnnnnnnnnnnnnnnnnnnnnnnnnnnnnnnnnnnnnnnnnnnnnnnnnnnnnnnnnnnnnnnnnnnnnnnnnnnnnnnnnnnnnnnnnnnnnnnnnnnnnnnnnnnnnnnctgcccctgatctcacacaaatgtgtattatcctccataaaacacaaggtgctgggcttgtgtcacaggtgctggattgctatatggcaaatggtgyrggtaaccagcaccaagtggggaagacacactggagatgcatcattgccatgtgaaggcaaagcagagttgtgaactattctgttagcacagttgtcagagggtgagtaaatagaggtcacagactcctagtctcacctcttttgctggtggattgtttattctatcatgcatgagctgccatggggactttctgcacaattttatgtcttagctcaccaattatctacagtgggaaccaggttgctgtgcctgggttttcttcccatgtaatctaggatgctgctgcacaatgggaggt

SEQ ID NO: 4115 - DNA, 600 bp, Chicken  19866894101390_3
cagagggtgagtaaatagaggtcacagactcctagtctcacctcttttgctggtggattgtttattctatcatgcatgagctgccatggggactttctgcacaattttatgtcttagctcaccaattatctacagtgggaaccaggttgctgtgcctgggttttcttcccatgtaatctaggatgctgctgcacaatgggaggtggtttgctacatggctcatattccatcccactgtgtattcaaatggtgattgttgatcaattttgatatgcaaagtatttttagacaaaaaaaagraaaaaaaaaggacaagcacaattttctaacaagtaatgtcatttaatgaatgatatagtctagaaaatagaaactacccagatgctggttggttggtaggtctgtttggggttggggaggcccttgcttgagcacacaatgccttgtttcaattcttttggcagcatttgtagttgttggaaacaaggagacatccacgtatagaaagagacactaagggggcattttttctctaaagtgtggtaagtatgcagaacgtcttcccaccctgtctcatcaggtgatgtgaagggctcagag

SEQ ID NO: 4116 - DNA, 600 bp, Chicken  19866894101390_4
ggtctgtttggggttggggaggcccttgcttgagcacacaatgccttgtttcaattcttttggcagcatttgtagttgttggaaacaaggagacatccacgtatagaaagagacactaagggggcattttttctctaaagtgtggtaagtatgcagaacgtcttcccaccctgtctcatcaggtgatgtgaagggctcagagctcaccaaggtgttgcagatgattcgttcctagaagggagggactcaaccagcagtacacaccacagtccagtgctccaaagtcgtaagggacttctyactttgcagaaagttttgtggactctgatgttattgcacttctttctaggtgcttttctgcatgtgttgcgtctgttccctcaaggtttggctgctaattccagggaatatgcttttcagaatgtcacaatacactgtgtacaactctgggtctattttgggcctgggcagagatctggcgttgcttgtctgttcggtgaccgagtgctgcagcaaatacacatcgctgaagagtgcagtcaggattttgtgtgcagctttgtaaggatcttcctcagactgcaccattgccttgagctc

SEQ ID NO: 4117 - DNA, 600 bp, Chicken  19866894101391_1
ggtttagaaatagtattaataatagcctagttttcttcaaaatcagaatttggtaagtgaagattgtgtggaataactggcacaagtttgatgtccctgtgaataatggtggagagctccagccgaaagataaagatcatccctgacactgtgtttgaagtttgaagcatcacaacccaaacagtcactccaagaagcagtgttgatttggaacaaatattgagatctgtgtgagaaagctttaatgctttacaacttcgggctgtgtttatccaaaacatgaagagcacgtgttgtaayagcttgcagtgttgcaggaggrgattgcactcatcagcagattcgaagcakaatcctgtgatttacatacgccagttctacaccaacacttttttactttcaggtttaagtttaggggctggggaggcaggattttctcctccagtttgtgaagaaagctttgattccaagagcagacagccaaatagccatcttttttcagtggcactgagtggggttgcttctgattgttttctggggaggaaatttaaacacaactgagaaaaacaaagccatttactactaccattttgcaaaatt

SEQ ID NO: 4118 - DNA, 600 bp, Chicken  19866894101391_2
tagcctagttttcttcaaaatcagaatttggtaagtgaagattgtgtggaataactggcacaagtttgatgtccctgtgaataatggtggagagctccagccgaaagataaagatcatccctgacactgtgtttgaagtttgaagcatcacaacccaaacagtcactccaagaagcagtgttgatttggaacaaatattgagatctgtgtgagaaagctttaatgctttacaacttcgggctgtgtttatccaaaacatgaagagcacgtgttgtaayagcttgcagtgttgcaggaggrgattgcactcatcagcagattcgaagcakaatcctgtgatttacatacgccagttctacaccaacacttttttactttcaggtttaagtttaggggctggggaggcaggattttctcctccagtttgtgaagaaagctttgattccaagagcagacagccaaatagccatcttttttcagtggcactgagtggggttgcttctgattgttttctggggaggaaatttaaacacaactgagaaaaacaaagccatttactactaccattttgcaaaattgtttaaatcttttgtctttctt

SEQ ID NO: 4119 - DNA, 600 bp, Chicken  19866894101391_3
ggtaagtgaagattgtgtggaataactggcacaagtttgatgtccctgtgaataatggtggagagctccagccgaaagataaagatcatccctgacactgtgtttgaagtttgaagcatcacaacccaaacagtcactccaagaagcagtgttgatttggaacaaatattgagatctgtgtgagaaagctttaatgctttacaacttcgggctgtgtttatccaaaacatgaagagcacgtgttgtaayagcttgcagtgttgcaggaggrgattgcactcatcagcagattcgaagcakaatcctgtgatttacatacgccagttctacaccaacacttttttactttcaggtttaagtttaggggctggggaggcaggattttctcctccagtttgtgaagaaagctttgattccaagagcagacagccaaatagccatcttttttcagtggcactgagtggggttgcttctgattgttttctggggaggaaatttaaacacaactgagaaaaacaaagccatttactactaccattttgcaaaattgtttaaatcttttgtctttcttcatctcaaagacattaaaatagatmtgtt

SEQ ID NO: 4120 - DNA, 573 bp, Chicken  19866894101391_4
gcakaatcctgtgatttacatacgccagttctacaccaacacttttttactttcaggtttaagtttaggggctggggaggcaggattttctcctccagtttgtgaagaaagctttgattccaagagcagacagccaaatagccatcttttttcagtggcactgagtggggttgcttctgattgttttctggggaggaaatttaaacacaactgagaaaaacaaagccatttactactaccattttgcaaaattgtttaaatcttttgtctttcttcatctcaaagacattaaaatagatmtgttaacttttaaagctgctcatacaataatcttctagctcagaaacattcctgatgcttatgttgtcttatggctgggttgagattctaaaggtagtgaggaggagggtttgcgttgcttagaagcacacttaattctgctgtgctctgtgctgttctttcctgcttatwtattagcttcttaaaacaaacagaaatccttctgtgctgtttatcctttttgtaaggaaataagctgaagccagtattagtgtctccaaacatgagagtatt

SEQ ID NO: 4121 - DNA, 402 bp, Chicken  19866894101391_5
tgcttctgattgttttctggggaggaaatttaaacacaactgagaaaaacaaagccatttactactaccattttgcaaaattgtttaaatcttttgtctttcttcatctcaaagacattaaaatagatmtgttaacttttaaagctgctcatacaataatcttctagctcagaaacattcctgatgcttatgttgtcttatggctgggttgagattctaaaggtagtgaggaggagggtttgcgttgcttagaagcacacttaattctgctgtgctctgtgctgttctttcctgcttatwtattagcttcttaaaacaaacagaaatccttctgtgctgtttatcctttttgtaaggaaataagctgaagccagtattagtgtctccaaacatgagagtatt

SEQ ID NO: 4122 - DNA, 600 bp, Chicken  19866894101397_1
ggagccccttggaggaatgcaagagcagggcaggtatgtattacagtctttgctgtgttgttgttattattattatttattttgccatgaattctcaaatacaaagctttgcaaagagccttctcaacatcctgaagcagaatgtgacagcttacctgtttgctggataaaaggagtctcctcagtgtgagcctgcctagaaatttcccctgcaaactcactcatattaagtacagccttgcaggttgaagcaaaggcaggtaagcacaaatgctttctgacaggttaggctgggatttycaccaaagatgacttttttttgtgctatgcttgcatcacagccctaactgtgcttgtcacttttcctccaatcctgaaattctgcaggaggaacaaaacatttgcctgacttgaaaaagcaaagacaaaagaagagcactctgcttttgttcctgcgatttgctgaggtgacagacgtcatttttgcacgatgagtactgggtcctactgctgcagctgaacacaccaggaggggaagctgggatgagactcatgctggatcaagcaaagcagcgccctgtgttttctggatacatctat

SEQ ID NO: 4123 - DNA, 600 bp, Chicken  19866894101399_1
taaccagtgttttaaatctagcacactgctaccttgaatataccaaggtttttcatcctaacttcttaagcaaacacttgaggaatgtaagctgctcctttttgtgattcaaaaactggcagtgtcttggaaaagcagtagcttctgtggaatcatgttacacattaccaagcggttatgcgtgttttccctcaggtctggcaaattcgtgtggatctgcacctgttaaatcatgatggtaacattgttgatgctgccagcatagcaggaattgtggctctgtgccattttcgcagaccrgacgtttctgtgcaaggaaaagaagtaacagtggtaagtcataccrggttgcagtaagcctcatactgcaggttgctgttggtttataaaagggaagagttaaatactgacggaagcagataaactccggatgctgaaagarttttaggataaatgtgttcctattcaaaatgtagaagggtagtgaagyaagcctgctgagtgtattgttttagtttcaatttatgggaatgttcygtttacctccgtaagtagtaagcagaaagcattgcacaaggagaacaagaaggttttttttaa

SEQ ID NO: 4124 - DNA, 600 bp, Chicken  19866894101399_2
ggtttttcatcctaacttcttaagcaaacacttgaggaatgtaagctgctcctttttgtgattcaaaaactggcagtgtcttggaaaagcagtagcttctgtggaatcatgttacacattaccaagcggttatgcgtgttttccctcaggtctggcaaattcgtgtggatctgcacctgttaaatcatgatggtaacattgttgatgctgccagcatagcaggaattgtggctctgtgccattttcgcagaccrgacgtttctgtgcaaggaaaagaagtaacagtggtaagtcataccrggttgcagtaagcctcatactgcaggttgctgttggtttataaaagggaagagttaaatactgacggaagcagataaactccggatgctgaaagarttttaggataaatgtgttcctattcaaaatgtagaagggtagtgaagyaagcctgctgagtgtattgttttagtttcaatttatgggaatgttcygtttacctccgtaagtagtaagcagaaagcattgcacaaggagaacaagaaggttttttttaayaaatatttaggtgactaggctttttttgctttctgtttctttaaa

SEQ ID NO: 4125 - DNA, 600 bp, Chicken  19866894101399_3
ttctgtggaatcatgttacacattaccaagcggttatgcgtgttttccctcaggtctggcaaattcgtgtggatctgcacctgttaaatcatgatggtaacattgttgatgctgccagcatagcaggaattgtggctctgtgccattttcgcagaccrgacgtttctgtgcaaggaaaagaagtaacagtggtaagtcataccrggttgcagtaagcctcatactgcaggttgctgttggtttataaaagggaagagttaaatactgacggaagcagataaactccggatgctgaaagarttttaggataaatgtgttcctattcaaaatgtagaagggtagtgaagyaagcctgctgagtgtattgttttagtttcaatttatgggaatgttcygtttacctccgtaagtagtaagcagaaagcattgcacaaggagaacaagaaggttttttttaayaaatatttaggtgactaggctttttttgctttctgtttctttaaatctctcttgtacaatacatccttttaaaataaaatgtcatgaataactgtcttctggaccacttcttttctaagtactctcctgaggagcgcgatc

SEQ ID NO: 4126 - DNA, 600 bp, Chicken  19866894101399_4
ctcaggtctggcaaattcgtgtggatctgcacctgttaaatcatgatggtaacattgttgatgctgccagcatagcaggaattgtggctctgtgccattttcgcagaccrgacgtttctgtgcaaggaaaagaagtaacagtggtaagtcataccrggttgcagtaagcctcatactgcaggttgctgttggtttataaaagggaagagttaaatactgacggaagcagataaactccggatgctgaaagarttttaggataaatgtgttcctattcaaaatgtagaagggtagtgaagyaagcctgctgagtgtattgttttagtttcaatttatgggaatgttcygtttacctccgtaagtagtaagcagaaagcattgcacaaggagaacaagaaggttttttttaayaaatatttaggtgactaggctttttttgctttctgtttctttaaatctctcttgtacaatacatccttttaaaataaaatgtcatgaataactgtcttctggaccacttcttttctaagtactctcctgaggagcgcgatcctgtgcccctgagcatccaccacatgcctatttgtgtcagttttgcct

SEQ ID NO: 4127 - DNA, 600 bp, Chicken  19866894101399_5
ggtaacattgttgatgctgccagcatagcaggaattgtggctctgtgccattttcgcagaccrgacgtttctgtgcaaggaaaagaagtaacagtggtaagtcataccrggttgcagtaagcctcatactgcaggttgctgttggtttataaaagggaagagttaaatactgacggaagcagataaactccggatgctgaaagarttttaggataaatgtgttcctattcaaaatgtagaagggtagtgaagyaagcctgctgagtgtattgttttagtttcaatttatgggaatgttcygtttacctccgtaagtagtaagcagaaagcattgcacaaggagaacaagaaggttttttttaayaaatatttaggtgactaggctttttttgctttctgtttctttaaatctctcttgtacaatacatccttttaaaataaaatgtcatgaataactgtcttctggaccacttcttttctaagtactctcctgaggagcgcgatcctgtgcccctgagcatccaccacatgcctatttgtgtcagttttgccttcttccagcaggggtaagaatttttttcaagcctttcttgacagaaa

SEQ ID NO: 4128 - DNA, 600 bp, Chicken  19866894101399_6
acgtttctgtgcaaggaaaagaagtaacagtggtaagtcataccrggttgcagtaagcctcatactgcaggttgctgttggtttataaaagggaagagttaaatactgacggaagcagataaactccggatgctgaaagarttttaggataaatgtgttcctattcaaaatgtagaagggtagtgaagyaagcctgctgagtgtattgttttagtttcaatttatgggaatgttcygtttacctccgtaagtagtaagcagaaagcattgcacaaggagaacaagaaggttttttttaayaaatatttaggtgactaggctttttttgctttctgtttctttaaatctctcttgtacaatacatccttttaaaataaaatgtcatgaataactgtcttctggaccacttcttttctaagtactctcctgaggagcgcgatcctgtgcccctgagcatccaccacatgcctatttgtgtcagttttgccttcttccagcaggggtaagaatttttttcaagcctttcttgacagaaacaacttactgttagttctgcacagttgttcttacataatgttgtgaaaatactcaatgctgacg

SEQ ID NO: 4129 - DNA, 600 bp, Chicken  19866894101404_1
agcagacaggtccgtggggttgtttaatgcacctcctgtgactcagcctgggaagtgactagctctttccttggtggcagagggaaccttcggggcctggttgcctaacatcagcacctttggcaacactgtttggcgtagaaaatggagtctaatgaaaaatgctacccaatattgttgttgaattcctgcttaaatatatcaactttgggtgagaatgctgagaagcaggagagtgagaaggtagcaaataggatgataaagctctgtgcccgtgatgcgtcatgaaccccagttagygtagggaaaatgcagtcccggcagtcattgtgctgcatggatttccaaattgatgaacagaatctgtgtaagtcccgcataaattaaagtagccctgctagtgcakcaccgcagccttctctatagagtggcatcactggaytgagtgacaggactgtcacacagcagcatcgttatgaagacggaatggtgagaatccattgtaccaatcccagtaccgctgctgaagcaaagcgattcctcagcatttcctgtaagttatcggtgtgaaggtcaaagtacgtttgagtgcaaacctgc

SEQ ID NO: 4130 - DNA, 600 bp, Chicken  19866894101404_2
aacatcagcacctttggcaacactgtttggcgtagaaaatggagtctaatgaaaaatgctacccaatattgttgttgaattcctgcttaaatatatcaactttgggtgagaatgctgagaagcaggagagtgagaaggtagcaaataggatgataaagctctgtgcccgtgatgcgtcatgaaccccagttagygtagggaaaatgcagtcccggcagtcattgtgctgcatggatttccaaattgatgaacagaatctgtgtaagtcccgcataaattaaagtagccctgctagtgcakcaccgcagccttctctatagagtggcatcactggaytgagtgacaggactgtcacacagcagcatcgttatgaagacggaatggtgagaatccattgtaccaatcccagtaccgctgctgaagcaaagcgattcctcagcatttcctgtaagttatcggtgtgaaggtcaaagtacgtttgagtgcaaacctgcttctaattcaggtaaggagttcagctacagagtaaggggaggtaactcagtccctatagctgctgaagtctgcttggcgcttccaagcaggcagaatgagtcacag

SEQ ID NO: 4131 - DNA, 600 bp, Chicken  19866894101404_3
aaatggagtctaatgaaaaatgctacccaatattgttgttgaattcctgcttaaatatatcaactttgggtgagaatgctgagaagcaggagagtgagaaggtagcaaataggatgataaagctctgtgcccgtgatgcgtcatgaaccccagttagygtagggaaaatgcagtcccggcagtcattgtgctgcatggatttccaaattgatgaacagaatctgtgtaagtcccgcataaattaaagtagccctgctagtgcakcaccgcagccttctctatagagtggcatcactggaytgagtgacaggactgtcacacagcagcatcgttatgaagacggaatggtgagaatccattgtaccaatcccagtaccgctgctgaagcaaagcgattcctcagcatttcctgtaagttatcggtgtgaaggtcaaagtacgtttgagtgcaaacctgcttctaattcaggtaaggagttcagctacagagtaaggggaggtaactcagtccctatagctgctgaagtctgcttggcgcttccaagcaggcagaatgagtcacagggagggacagagagaaagaaatgccagctcaaatct

SEQ ID NO: 4132 - DNA, 600 bp, Chicken  19866894101409_1
tcacttcaaccaaactacagctgtaataccttgagatatttctgtagttaaaaggacacaaaaaagaatccattaatttatatcacatttttcttgctggctcattcgaaagctacagtaatacaagtaaaaaaatatgtgaatcatcaaaaaacacctactggtccactttagaatagttactacccagaaaaagaatggaaatcatgccagttcaacaagatggggaactacaggcctgtctgatctcagtactggggaaggtcatgtagcagactgtcttgactacaatcatgctgygtgtgagacaaccaggggatcaagcccagcgagcatggtgggttcttgaaagacaagccctgcttgatccacttcatctccttttatgaccaggtgaccctccttttatgaccctgcccagtaggtgagggtgagggaaaggctgtggatgtaatctacctagactttagtaaagcatttgagtctgtttcccacagtattctagagaagctggcagctcatggtttggacaagtgtactcttcactttaaaaaattggctggatggccagacccagagagtgatggtaaacagagttaa

SEQ ID NO: 4133 - DNA, 600 bp, Chicken  19866894101410_1
gtctgcagatggagggcatttgccttgaagtccactgaaaccgaggccataaagggagaaaaaaggcagtattgtaatggcactagcttaagtcaggtggcaatccttacacatcctccttgcattcgatttcagcaatggctgtcgctgaaagatactgctgctcttctagctcttgcagaaaaagtgctgagactgaaagtttgcatcacactaaccataacataactattaagttaaagtgatagcagataatactgctagaaaatactgacactggtctgattccatcattgatgygctcagtctgaaggatagaggaagggtgagaagctggcacaggctgcacagacagcaaggaaaccctgcaatgaaataaaggctgcttatggaaagtatctaaggccacatgtttgtggtggttttacacagggatgagcagcccatctgctcctggccatgcattcccaatatggtgctagtcccagtgcgctcagctactcagaattcccagttgcaaggagcagtgctcagacccaatctccgcccgtcccccttcgcccaaagcagtgctgccccaaccatgaggatccctttagg

SEQ ID NO: 4134 - DNA, 600 bp, Chicken  19866894101412_1
ccctatttgcagatgctgtttgcaagcaattggttttccttgaacaagtactaccagttccacatgctgctcgtaccgcacagagcaatcaaatagccttagcccaaatataacaaaatcctctcaacatccacacgcaaatgccacacaaatagggattttagaaaagcatgcaaagagatgataaaatcaatccggctcattacagcagcaaacacagcgagtgctttactcccagcttctcaactgcccccaccaaacacgcacagctaagtgcaccgacaccaagcagcggcaaaygcacaatgaagccaaagagcagacatctgttaaggcaccattttctacgtgatacctgagcagacattaccgagcccacaaacagcacgatttcagcagctcgcaggcttaccagcggcgcacccgcacagcccggccagccatctgcccgctgccaccttgagctggggaggaaaccgccgcgtccgcttcacggaaggatcgctccaatagcccccaccttccaagttaatcaattaatgaagcaagactgtttttccttactaggcaccgtacggacactaggtcacttgaaggttg

SEQ ID NO: 4135 - DNA, 600 bp, Chicken  19866894101413_1
cacttcagtgtagctactaagacactcagttaccaaaacattacaaaaagaaaaaaaataaatggaactgcagaagctaacactgaccttcctattctctctcggacatttttgtaaacctgggtgagtttaggctccaagtactttaacagtctgtgcagcagctctggtactctccattcctgctgtgcaaggccgccttgtagcacataaagtcggctagaaatcagaacaagacatttacagtcataccaaactgtttctcccttctttagccaccccaaaatcttgttttcagtkttgagtgtgtccaarcacagaagcgtctttgtgtgggctatgcgcatagatgggttaacatcacagaatggaagaacagcactgctgttgtgccagttccaaaacttcacattctattaactagatttatgggcatgaaacttgatgaataaactgccattgtgttgggaaaactaaccgaaaaggagcagttttgcttcatgcttctataagccagctgccacaatacagtctcaatgtatttcatccatgcttttatttcctgtattcagccacaaatagttacaattaattttacca

SEQ ID NO: 4136 - DNA, 600 bp, Chicken  19866894101413_2
actaagacactcagttaccaaaacattacaaaaagaaaaaaaataaatggaactgcagaagctaacactgaccttcctattctctctcggacatttttgtaaacctgggtgagtttaggctccaagtactttaacagtctgtgcagcagctctggtactctccattcctgctgtgcaaggccgccttgtagcacataaagtcggctagaaatcagaacaagacatttacagtcataccaaactgtttctcccttctttagccaccccaaaatcttgttttcagtkttgagtgtgtccaarcacagaagcgtctttgtgtgggctatgcgcatagatgggttaacatcacagaatggaagaacagcactgctgttgtgccagttccaaaacttcacattctattaactagatttatgggcatgaaacttgatgaataaactgccattgtgttgggaaaactaaccgaaaaggagcagttttgcttcatgcttctataagccagctgccacaatacagtctcaatgtatttcatccatgcttttatttcctgtattcagccacaaatagttacaattaattttaccatgcatcgacaaatga

SEQ ID NO: 4137 - DNA, 600 bp, Chicken  19866894101417_1
agtgcagactatacctgtgcatgaagattgcaaaccatatacttgaatgttaacacacaatactaatctacaaacacaatgtcacatttaagctatctaaacatctaaatagaataaactatgaagagttttaacactaatatgtttccagagttaggttctgacttcttttcaataccttcaatagctttttcttcttttgtcttcactactctcccattttctgtagctttctgcacatacttggtatcctcattctcttcagaggctgtgacagattttgctgtgtaatttggatgyttaggatgaaatgaagctggaggacgagcttctttcctgagttgaacaggagctttctttgatacaggggtgattacctgaaagacattttagacatgagttaaaaaattttcctttaaaagcatgaaaaaaaaaatccagtgcttgctatttgcagaactagtaaccagggctacggggaaagctccacatattctgcagcatgacagctaaaactcctcaagattaagcttttaattctctagcatcatttctgttgtaatgtgctccttctgtagtttaaaaaggaagcagtttaca

SEQ ID NO: 4138 - DNA, 510 bp, Chicken  19866894101417_2
atacaggggtgattacctgaaagacattttagacatgagttaaaaaattttcctttaaaagcatgaaaaaaaaaatccagtgcttgctatttgcagaactagtaaccagggctacggggaaagctccacatattctgcagcatgacagctaaaactcctcaagattaagcttttaattctctagcatcatttctgttgtaatgtgctccttctgtagtttaaaaaggaagcagtttacaacaggccacagttgacatttagttattttcactattttcccacatagtatgacctcattcytaaatacatacttctatctgtgtcagctgagtatatgacaatatatgtcaggcagagacagggcctggaacaagcagggaaggccaatgtgttagtctccacctgtttggatcagtaatgagttcaagctttctaaaggactccacgggaccagacagcagtgcttcatgatggaaagagcgaggaagacaaacatactgcatttcaaca

SEQ ID NO: 4139 - DNA, 600 bp, Chicken  19866894101422_1
tagaatcagagaatgtcttgagctgggagggacccatgaggatcactgagtccaactcctgactccacatgtgaccacccaaaatccaaacccaatgtctgagaatggcgtccagaatggtggcagctcagagccattcccactgcactgggcagcctgttccagggccccactgccctctggtgaagagcctgtccctaactcccacctgaccctcccctgacacagctccatgccattatagcatggagatttctggagatgtgtgtctttatgggaagggagagaggagaataagawtttgaaattagtgttcaggctaggtagtgacttgctgttgttaggtgatcttcccatgccctttttacattcctacgtgaaactgaaaggatatgtatgatgttaataccattccactaccactgacgcttgcagttggaaacattaggcctgagggcttagttcagctagttcctaagcattttctttttctttaggctttttgttttttcattgaaaatagtagttgttgcttaaaactcactcaaaaccaagggttcttcaccttgcaaatcactatcagtactgaggggcatgagg

SEQ ID NO: 4140 - DNA, 600 bp, Chicken  19866894101422_2
aaggaacaaacaccacgtacaccatatttctttgggttttgggcagactcttaccattttgtagaatcatagaatcatggagtggcctggattgaaaaggaccgtaatgatcatctagtttcaacccccctgacatgggcggggtcaccaactgccagaccaggctgcccagagccacatccagcctgcacactcttttaggggggaaacagcaggaaaccaagcgatgcaaggcaatgcctttttcacagaggtgcagacttcagttctcacataactatagctgtcactcttctttcwgcactcacctcactgcctgcttayyttatgatgcaaaatgtgcctcgggatatttgyggtgatgttggtgaaaatattacaaaaacagataattggagaatcaaggcttggcaaactgttgttcgatctggcaatatagcaaagtgtgtcrtttgccaagagcagtctcatctgatrgacttttgggaccaagagctggcaaatgagtaagcctcacatgattacctttatttttgctttatgagcaaacaaaattcagaggtggagggtataaacaaagaaagtgaaactgggagagtt

SEQ ID NO: 4141 - DNA, 600 bp, Chicken  19866894101422_3
tatttctttgggttttgggcagactcttaccattttgtagaatcatagaatcatggagtggcctggattgaaaaggaccgtaatgatcatctagtttcaacccccctgacatgggcggggtcaccaactgccagaccaggctgcccagagccacatccagcctgcacactcttttaggggggaaacagcaggaaaccaagcgatgcaaggcaatgcctttttcacagaggtgcagacttcagttctcacataactatagctgtcactcttctttcwgcactcacctcactgcctgcttayyttatgatgcaaaatgtgcctcgggatatttgyggtgatgttggtgaaaatattacaaaaacagataattggagaatcaaggcttggcaaactgttgttcgatctggcaatatagcaaagtgtgtcrtttgccaagagcagtctcatctgatrgacttttgggaccaagagctggcaaatgagtaagcctcacatgattacctttatttttgctttatgagcaaacaaaattcagaggtggagggtataaacaaagaaagtgaaactgggagagttcatgtgtttacggcctaagagccc

SEQ ID NO: 4142 - DNA, 600 bp, Chicken  19866894101422_4
atttctttgggttttgggcagactcttaccattttgtagaatcatagaatcatggagtggcctggattgaaaaggaccgtaatgatcatctagtttcaacccccctgacatgggcggggtcaccaactgccagaccaggctgcccagagccacatccagcctgcacactcttttaggggggaaacagcaggaaaccaagcgatgcaaggcaatgcctttttcacagaggtgcagacttcagttctcacataactatagctgtcactcttctttcwgcactcacctcactgcctgcttayyttatgatgcaaaatgtgcctcgggatatttgyggtgatgttggtgaaaatattacaaaaacagataattggagaatcaaggcttggcaaactgttgttcgatctggcaatatagcaaagtgtgtcrtttgccaagagcagtctcatctgatrgacttttgggaccaagagctggcaaatgagtaagcctcacatgattacctttatttttgctttatgagcaaacaaaattcagaggtggagggtataaacaaagaaagtgaaactgggagagttcatgtgtttacggcctaagagccca

SEQ ID NO: 4143 - DNA, 600 bp, Chicken  19866894101422_5
tttgtagaatcatagaatcatggagtggcctggattgaaaaggaccgtaatgatcatctagtttcaacccccctgacatgggcggggtcaccaactgccagaccaggctgcccagagccacatccagcctgcacactcttttaggggggaaacagcaggaaaccaagcgatgcaaggcaatgcctttttcacagaggtgcagacttcagttctcacataactatagctgtcactcttctttcwgcactcacctcactgcctgcttayyttatgatgcaaaatgtgcctcgggatatttgyggtgatgttggtgaaaatattacaaaaacagataattggagaatcaaggcttggcaaactgttgttcgatctggcaatatagcaaagtgtgtcrtttgccaagagcagtctcatctgatrgacttttgggaccaagagctggcaaatgagtaagcctcacatgattacctttatttttgctttatgagcaaacaaaattcagaggtggagggtataaacaaagaaagtgaaactgggagagttcatgtgtttacggcctaagagcccacaccttccactgaggcttgtaagaggcttatg

SEQ ID NO: 4144 - DNA, 600 bp, Chicken  19866894101422_6
ctgccagaccaggctgcccagagccacatccagcctgcacactcttttaggggggaaacagcaggaaaccaagcgatgcaaggcaatgcctttttcacagaggtgcagacttcagttctcacataactatagctgtcactcttctttcwgcactcacctcactgcctgcttayyttatgatgcaaaatgtgcctcgggatatttgyggtgatgttggtgaaaatattacaaaaacagataattggagaatcaaggcttggcaaactgttgttcgatctggcaatatagcaaagtgtgtcrtttgccaagagcagtctcatctgatrgacttttgggaccaagagctggcaaatgagtaagcctcacatgattacctttatttttgctttatgagcaaacaaaattcagaggtggagggtataaacaaagaaagtgaaactgggagagttcatgtgtttacggcctaagagcccacaccttccactgaggcttgtaagaggcttatgtgctgtgcacataaggttactttgggagggaggaactgggtagcacagctgcatctgcctcccatacagaaagaatgctgctggatcgtgatgc

SEQ ID NO: 4145 - DNA, 600 bp, Chicken  19866894101422_7
catccagcctgcacactcttttaggggggaaacagcaggaaaccaagcgatgcaaggcaatgcctttttcacagaggtgcagacttcagttctcacataactatagctgtcactcttctttcwgcactcacctcactgcctgcttayyttatgatgcaaaatgtgcctcgggatatttgyggtgatgttggtgaaaatattacaaaaacagataattggagaatcaaggcttggcaaactgttgttcgatctggcaatatagcaaagtgtgtcrtttgccaagagcagtctcatctgatrgacttttgggaccaagagctggcaaatgagtaagcctcacatgattacctttatttttgctttatgagcaaacaaaattcagaggtggagggtataaacaaagaaagtgaaactgggagagttcatgtgtttacggcctaagagcccacaccttccactgaggcttgtaagaggcttatgtgctgtgcacataaggttactttgggagggaggaactgggtagcacagctgcatctgcctcccatacagaaagaatgctgctggatcgtgatgcagcatagtaatgtgcattaacagacc

SEQ ID NO: 4146 - DNA, 584 bp, Chicken  19866894101422_8
ttggaaaagaccgctaagatcatcttgtccaactgtcaacccattgccaccacgcccactagctgtggtacacagaccttctatccactgagcagtttaactgcactggcagaaataaaaactcttctgtttctttcagaagactacaaaaactggtgctgcacttgacctgattggattatttgtaacttaagtggcaggtgttgcaccttaaatggcagtttcagtcagcaccttttgtttccctccttcaaaagacatagactttcagtggttttgatttaaaaagaaaaaaaaagraaaaaaaaaaagaaagaaaaggaaaaaaagaaaaaaaaagaaaaagaaaaaaagaaccaactgtaagctccagtgctttgcttttctgtgctggcacatctgatgggtgaggtggcaaggtgcttcctgtttacctacagaaatctcatcttccaaaccaaaccttgatctctggggaccccttcttaagccatggttcggccttgatctgagagtggaacacagcatgttcagatttctctagcattgcagctggtggctgtgcagtacttctcacagctgtg

SEQ ID NO: 4147 - DNA, 600 bp, Chicken  19866894101425_1
agctacagttcccttttgctcttttctatatattacaatgctactcagtcttatcgtttttctctcatctccagtatttcttacagatgatgaaagaatttttcaggtaattctcagaagacccttaagtgtaacttaatacactgtttagctccagttggtgttcttttcagcatctgggaaatgtttgaggtccatatgaatggaaaatcaggatcaacgtacctgataagcaaaccagaggctgttactggggaatttgaacttattcaaataaggtcagtcagaatagagacatayttatttctaaaacagaaaaagcatccattttgcaccacccaacaaaactaaaaaattgtaaaaatagcattcataaatattaaatacaaatagattaaatgaatattcatttgcttatattttgttttcttctctttttatacttatgtggttgttttgcactgattttccatctacaatctatgcaaaagcattttgattctgatgtttwaaatgtagatttatttgtaatcttctaatacttycagttctaatttcctcactgtttctatctatcctaacccttactgacatactgat

SEQ ID NO: 4148 - DNA, 600 bp, Chicken  19866894101425_2
caggatcaacgtacctgataagcaaaccagaggctgttactggggaatttgaacttattcaaataaggtcagtcagaatagagacatayttatttctaaaacagaaaaagcatccattttgcaccacccaacaaaactaaaaaattgtaaaaatagcattcataaatattaaatacaaatagattaaatgaatattcatttgcttatattttgttttcttctctttttatacttatgtggttgttttgcactgattttccatctacaatctatgcaaaagcattttgattctgatgtttwaaatgtagatttatttgtaatcttctaatacttycagttctaatttcctcactgtttctatctatcctaacccttactgacatactgatacacatgacagcgaatgaacgatcttgtacrcttagcagtaccttcattgtgcttctcactcacattctaaacacttggttagaaaataaacatttaaataagatcmccaagtcaactatctgtactattcacagtctgctgtttaattcatctttccctggattgggggtgctttcacattcttcccaacatttgcccatttccaaactt

SEQ ID NO: 4149 - DNA, 596 bp, Chicken  19866894101425_3
tgttactggggaatttgaacttattcaaataaggtcagtcagaatagagacatayttatttctaaaacagaaaaagcatccattttgcaccacccaacaaaactaaaaaattgtaaaaatagcattcataaatattaaatacaaatagattaaatgaatattcatttgcttatattttgttttcttctctttttatacttatgtggttgttttgcactgattttccatctacaatctatgcaaaagcattttgattctgatgtttwaaatgtagatttatttgtaatcttctaatacttycagttctaatttcctcactgtttctatctatcctaacccttactgacatactgatacacatgacagcgaatgaacgatcttgtacrcttagcagtaccttcattgtgcttctcactcacattctaaacacttggttagaaaataaacatttaaataagatcmccaagtcaactatctgtactattcacagtctgctgtttaattcatctttccctggattgggggtgctttcacattcttcccaacatttgcccatttccaaacttgggaaaacctaatttcagcatcgttctcat

SEQ ID NO: 4150 - DNA, 510 bp, Chicken  19866894101425_4
gcaccacccaacaaaactaaaaaattgtaaaaatagcattcataaatattaaatacaaatagattaaatgaatattcatttgcttatattttgttttcttctctttttatacttatgtggttgttttgcactgattttccatctacaatctatgcaaaagcattttgattctgatgtttwaaatgtagatttatttgtaatcttctaatacttycagttctaatttcctcactgtttctatctatcctaacccttactgacatactgatacacatgacagcgaatgaacgatcttgtacrcttagcagtaccttcattgtgcttctcactcacattctaaacacttggttagaaaataaacatttaaataagatcmccaagtcaactatctgtactattcacagtctgctgtttaattcatctttccctggattgggggtgctttcacattcttcccaacatttgcccatttccaaacttgggaaaacctaatttcagcatcgttctcat

SEQ ID NO: 4151 - DNA, 434 bp, Chicken  19866894101425_5
catttgcttatattttgttttcttctctttttatacttatgtggttgttttgcactgattttccatctacaatctatgcaaaagcattttgattctgatgtttwaaatgtagatttatttgtaatcttctaatacttycagttctaatttcctcactgtttctatctatcctaacccttactgacatactgatacacatgacagcgaatgaacgatcttgtacrcttagcagtaccttcattgtgcttctcactcacattctaaacacttggttagaaaataaacatttaaataagatcmccaagtcaactatctgtactattcacagtctgctgtttaattcatctttccctggattgggggtgctttcacattcttcccaacatttgcccatttccaaacttgggaaaacctaatttcagcatcgttctcat

SEQ ID NO: 4152 - DNA, 600 bp, Chicken  19866894101426_1
aaaatgatgaaaagcgtttatgatttacatacccagccaatggtttgcttcatatacatacatttttctgtaggaaaatgtaaacctgggcattgagaagcatttatagggcattacagcatgtgacattcaagttaaccagttctaggaaatttttgagtaagagaagtgaaccagcaggatagcctttacatggataccatggtatatctctcaggagagacttccaagcacagacttgatgtgtgtttactgtggaaatgaaacttcgtgtagtagatcccactacagggaaaagaygaggtgattttctgagatccttcacagctctataatctgatgtgtggggtttcagtccacacaaatataatttgtcatcatttaaaaatattgatgtggatagagttaagaaatctgtgactttttttgaagatataggccatggaatgtaattgagatgttgaaaatatactttaaaaataaagataatttcatcagttattttggtcatgtaaagtgatgttagtcatgagaactacagagctttgtacatttgtgatttgctgttatccaacaagtgtctacacttcaaggaatgta

SEQ ID NO: 4153 - DNA, 600 bp, Chicken  19866894101427_1
aatgggtggagtggcaggatatacctcaaaactgagacttcagatattacagaacaggagattgcagggagattgatcagagctgttggtcctgatgccatttaactgaggaacaaaaaatgtacaaaaatcatatttgatctgagaaccaaacattgctcggagccttgcacacttcaaggaacttgagtatatttgtcactaagaagatccaaagaggaactcttctccaagcaagtttccaaccaaattgcccagttttcttttcaaaaaaactgctctctgagcaccccaacattytgtggtactcacatctgagatggtcatttgtttttctgattggattttatatgtgytattaaggacagattccattagaaatgcaaattcccctaaaactggttggtattgtgtcaaaaccaatgattgataggatcgcagcccattaccctgtttatctcaatagctgtatcttggctgtttacgatggtggacagtgataggacaagggggaatggttttaaactgagacaggggaggtttaggttggatgttaggaggaagtttttcacacagagggtggtgacgcactggaacagg

SEQ ID NO: 4154 - DNA, 600 bp, Chicken  19866894101427_2
ggagattgcagggagattgatcagagctgttggtcctgatgccatttaactgaggaacaaaaaatgtacaaaaatcatatttgatctgagaaccaaacattgctcggagccttgcacacttcaaggaacttgagtatatttgtcactaagaagatccaaagaggaactcttctccaagcaagtttccaaccaaattgcccagttttcttttcaaaaaaactgctctctgagcaccccaacattytgtggtactcacatctgagatggtcatttgtttttctgattggattttatatgtgytattaaggacagattccattagaaatgcaaattcccctaaaactggttggtattgtgtcaaaaccaatgattgataggatcgcagcccattaccctgtttatctcaatagctgtatcttggctgtttacgatggtggacagtgataggacaagggggaatggttttaaactgagacaggggaggtttaggttggatgttaggaggaagtttttcacacagagggtggtgacgcactggaacaggttgcccaaggaggctgtggatgccccatccctggaggcattcaaggccaggctgga

SEQ ID NO: 4155 - DNA, 507 bp, Chicken  19866894101431_1
cgtgcttaatattgcaagatcactttaagatttattaaaattgatggttcataccagcagacacaagtgaaatttgggaacttctctttttttcacatgaaactccatcttcctttccctgtggagatatctgcatccttggaatgcttccaaagttttgattctgattgaaaagaaactctttattataaaaatttggggtttgctatttgggatggtttacctgaaagcctataggaaatatttaacttttaggaaatactttagcttgaagaagagaaggctccagggagacctcawtataaacaggagggagaatggctctttacgagggtggatagtgataggacaaaggggaatggttttaaactgagacaggggaggtttaagttggatattaggaggaagtttttcacacagagggtggtgacgcactggaacaggttgcccaaggaggctgtggatgccccatccctggaggcattcaaggccaggctggatgtgact

SEQ ID NO: 4156 - DNA, 600 bp, Chicken  19866894101436_1
cccttaaaattctgcatcccatctcaaacgccactctccctccttcttaagatacccatggggatgacagtccagcagaagcctgcaatctgaataatgtttgcatttgtatgggtggggagagaactgagcaggaacatgggctcaagcccacgttgcatagcacagacatacaggtgactgggagtatgaaggacgagcaaccatggggatagacactgattgcctctgcaatcggtacttctgcaaatagctttctcttgtttgagttctgctgttcacaactgaaggtggttatcwrataatcacagaaaaccttgggggaagcagaagaaaggaaaatgcagcgggtagaagggctccaaatgatttaatttaagacagtttgattccaggactcctggcatgaagggaacacacccgtaatagatttattacatataaggtacggtggctggaagataaagctaagcaaactctgatcgtgtatactgaacacattttttacagcaggtagtagtagttcattgggaaaatgttccaagagttgtggtgggatttcccagaaatcgagatctcttgttcctaaaagaggagctc

SEQ ID NO: 4157 - DNA, 600 bp, Chicken  19866894101436_2
ccttaaaattctgcatcccatctcaaacgccactctccctccttcttaagatacccatggggatgacagtccagcagaagcctgcaatctgaataatgtttgcatttgtatgggtggggagagaactgagcaggaacatgggctcaagcccacgttgcatagcacagacatacaggtgactgggagtatgaaggacgagcaaccatggggatagacactgattgcctctgcaatcggtacttctgcaaatagctttctcttgtttgagttctgctgttcacaactgaaggtggttatcwrataatcacagaaaaccttgggggaagcagaagaaaggaaaatgcagcgggtagaagggctccaaatgatttaatttaagacagtttgattccaggactcctggcatgaagggaacacacccgtaatagatttattacatataaggtacggtggctggaagataaagctaagcaaactctgatcgtgtatactgaacacattttttacagcaggtagtagtagttcattgggaaaatgttccaagagttgtggtgggatttcccagaaatcgagatctcttgttcctaaaagaggagctct

SEQ ID NO: 4158 - DNA, 600 bp, Chicken  19866894101436_3
agcgggtagaagggctccaaatgatttaatttaagacagtttgattccaggactcctggcatgaagggaacacacccgtaatagatttattacatataaggtacggtggctggaagataaagctaagcaaactctgatcgtgtatactgaacacattttttacagcaggtagtagtagttcattgggaaaatgttccaagagttgtggtgggatttcccagaaatcgagatctcttgttcctaaaagaggagctctagttcaaacaccagttaactaagggaagtcctacagcatctgcyacccgagaggtcaggctggctggccacattctcttctggccttgtagcctataaatagagtcccagtggggaaaaaattatccttatctcaggccttctcactgtagcaaaaacaatagagatgcagaaagatcaaaagtaggcattttgcagcagttacggctcgtttggtgtttctactaaagacaccaaaacacgtcgcagtccaattccagaatgtcttttgagctcttccttcctcctgtcagaacgcagccatacctcatgcaccacttttcagagctgttaacttgtcagcat

SEQ ID NO: 4159 - DNA, 599 bp, Chicken  19866894101455_1
  misc_feature (1)..(271): n is any nucleotide
nnnnnnnnnnnnnnnnnnnnnnnnnnnnnnnnnnnnnnnnnnnnnnnnnnnnnnnnnnnnnnnnnnnnnnnnnnnnnnnnnnnnnnnnnnnnnnnnnnnnnnnnnnnnnnnnnnnnnnnnnnnnnnnnnnnnnnnnnnnnnnnnnnnnnnnnnnnnnnnnnnnnnnnnnnnnnnnnnnnnnnnnnnnnnnnnnnnnnnnnnnnnnnnnnnnnnnnnnnnnnnnnnnnnnnnnnnnnnnnnnnnnnnnnnnnnnnnnnnnnnnnnnnnnnnnccagcctggccctgaatgcctccagggayggggcatccacagyctccttgggcaacctgttcagtgcgtcaccaccctctgggtgaaaaaattcttccaaatatccaacctaaaccttccctgtctcagtttaaaaccattcccccttgtcctatcactatccacccttgtaaacagctgctccccctcctgtttatatgctcccttcaagtactggaaggccacaatgaggtctccccggagccttctcttctccaaactaaacaagcttacttccctcaacctttcctcacaggagaggtgctccagacctctgatcatcttagtg

SEQ ID NO: 4160 - DNA, 599 bp, Chicken  19866894101455_2
  misc_feature (1)..(257): n is any nucleotide
nnnnnnnnnnnnnnnnnnnnnnnnnnnnnnnnnnnnnnnnnnnnnnnnnnnnnnnnnnnnnnnnnnnnnnnnnnnnnnnnnnnnnnnnnnnnnnnnnnnnnnnnnnnnnnnnnnnnnnnnnnnnnnnnnnnnnnnnnnnnnnnnnnnnnnnnnnnnnnnnnnnnnnnnnnnnnnnnnnnnnnnnnnnnnnnnnnnnnnnnnnnnnnnnnnnnnnnnnnnnnnnnnnnnnnnnnnnnnnnnnnnnnnnnnnnnnnnnnccagcctggccctgaatgcctccagggayggggcatccacagyctccttgggcaacctgttcagtgcgtcaccaccctctgggtgaaaaaattcttccaaatatccaacctaaaccttccctgtctcagtttaaaaccattcccccttgtcctatcactatccacccttgtaaacagctgctccccctcctgtttatatgctcccttcaagtactggaaggccacaatgaggtctccccggagccttctcttctccaaactaaacaagcttacttccctcaacctttcctcacaggagaggtgctccagacctctgatcatcttagtggccctcctctggac

SEQ ID NO: 4161 - DNA, 384 bp, Chicken  19866894101463_1
ctgagtttacttttctgaagcacaggatgaaacctttagaaaaggaaaagttgccttatgaaatattactcatagcaacgggatgttttttccccttttaagacggtgctagggctccgagcagggttagatcctgcccaaagaaaagcagaccctaatgacacgctgttctttgagataaaggggacatcagggacaccacacctcgaggagggggtgagaagggaagcagtgtcctgtggggtcaggaggtttaagccctgtggagccctgtggacagcaagtgctcaggctgcgctrcaactggacttaattaaaggaagcaaaccattaactctgagggcaaggtacaaaggcagcagtggggtacagtccagtcagcag

SEQ ID NO: 4162 - DNA, 600 bp, Chicken  19866894101469_1
tccatctttatatagtggggtaaaagatgtgatagtaactttgtaaggcgggtcatgtcctgctttatctttttttgtttggttggttttttgatccttccccaatcccccttcaataagctgtgtaagccacatccagtcacttcccatatgtaggtatggatgggcagaaacgtgttggtgttgttggagattggaggatgctggtttcccttgcaccagttagaaagctgggcaagtccagtggctggctgacaggagtgttttcaagcaaaataacttttctagctgtttgatccrtggtcaagcagttctaaatgttcatgttgtcgtaggtgttgtcgttacttgcaagcatgaaagggaatctgtggggttcaggtgytccgaagtagttgttccaagctggctggaactgggaggtgtgttcccagaaattggccaaaatgaggttattggagagtggcaccctgggcagcataaggtagcttccagagtgtgctgcagccaaaagaaacaacagtgtgcaagcctctaattttatgctgacgtttaacagaaaataaactgtattctgaattacatgattcatttgtgtta

SEQ ID NO: 4163 - DNA, 600 bp, Chicken  19866894101469_2
gttttttgatccttccccaatcccccttcaataagctgtgtaagccacatccagtcacttcccatatgtaggtatggatgggcagaaacgtgttggtgttgttggagattggaggatgctggtttcccttgcaccagttagaaagctgggcaagtccagtggctggctgacaggagtgttttcaagcaaaataacttttctagctgtttgatccrtggtcaagcagttctaaatgttcatgttgtcgtaggtgttgtcgttacttgcaagcatgaaagggaatctgtggggttcaggtgytccgaagtagttgttccaagctggctggaactgggaggtgtgttcccagaaattggccaaaatgaggttattggagagtggcaccctgggcagcataaggtagcttccagagtgtgctgcagccaaaagaaacaacagtgtgcaagcctctaattttatgctgacgtttaacagaaaataaactgtattctgaattacatgattcatttgtgttaaatgcttttagaagcaagtataaagcttatggaagcartaatagcatggtgaaaccaagtggtcrtgtcagtgatacggtgggat

SEQ ID NO: 4164 - DNA, 600 bp, Chicken  19866894101469_3
ttgtcgttacttgcaagcatgaaagggaatctgtggggttcaggtgytccgaagtagttgttccaagctggctggaactgggaggtgtgttcccagaaattggccaaaatgaggttattggagagtggcaccctgggcagcataaggtagcttccagagtgtgctgcagccaaaagaaacaacagtgtgcaagcctctaattttatgctgacgtttaacagaaaataaactgtattctgaattacatgattcatttgtgttaaatgcttttagaagcaagtataaagcttatggaagcartaatagcatggtgaaaccaagtggtcrtgtcagtgatacggtgggatgatttyatctgaaggtgaattttggccttgctcttctgtttctccaaccttctgagtcttctcrgtgagttgttcactggcaatcaagtggttataaaaagagagccagctgatgttgcaatccaagcagtggccatatagtggaaagactctcctttggcatgtccaccagtgctatttttacccattccagtaagatctgcccttgtgatgttaaattacaggctgttacctggaattattctgttttaca

SEQ ID NO: 4165 - DNA, 600 bp, Chicken  19866894101469_4
aatctgtggggttcaggtgytccgaagtagttgttccaagctggctggaactgggaggtgtgttcccagaaattggccaaaatgaggttattggagagtggcaccctgggcagcataaggtagcttccagagtgtgctgcagccaaaagaaacaacagtgtgcaagcctctaattttatgctgacgtttaacagaaaataaactgtattctgaattacatgattcatttgtgttaaatgcttttagaagcaagtataaagcttatggaagcartaatagcatggtgaaaccaagtggtcrtgtcagtgatacggtgggatgatttyatctgaaggtgaattttggccttgctcttctgtttctccaaccttctgagtcttctcrgtgagttgttcactggcaatcaagtggttataaaaagagagccagctgatgttgcaatccaagcagtggccatatagtggaaagactctcctttggcatgtccaccagtgctatttttacccattccagtaagatctgcccttgtgatgttaaattacaggctgttacctggaattattctgttttacagaagcgctacatgctctgaagaaggtt

SEQ ID NO: 4166 - DNA, 600 bp, Chicken  19866894101469_5
gtagttgttccaagctggctggaactgggaggtgtgttcccagaaattggccaaaatgaggttattggagagtggcaccctgggcagcataaggtagcttccagagtgtgctgcagccaaaagaaacaacagtgtgcaagcctctaattttatgctgacgtttaacagaaaataaactgtattctgaattacatgattcatttgtgttaaatgcttttagaagcaagtataaagcttatggaagcartaatagcatggtgaaaccaagtggtcrtgtcagtgatacggtgggatgatttyatctgaaggtgaattttggccttgctcttctgtttctccaaccttctgagtcttctcrgtgagttgttcactggcaatcaagtggttataaaaagagagccagctgatgttgcaatccaagcagtggccatatagtggaaagactctcctttggcatgtccaccagtgctatttttacccattccagtaagatctgcccttgtgatgttaaattacaggctgttacctggaattattctgttttacagaagcgctacatgctctgaagaaggtttttaataaaatgatcaggcagatcga

SEQ ID NO: 4167 - DNA, 600 bp, Chicken  19866894101469_6
aggttattggagagtggcaccctgggcagcataaggtagcttccagagtgtgctgcagccaaaagaaacaacagtgtgcaagcctctaattttatgctgacgtttaacagaaaataaactgtattctgaattacatgattcatttgtgttaaatgcttttagaagcaagtataaagcttatggaagcartaatagcatggtgaaaccaagtggtcrtgtcagtgatacggtgggatgatttyatctgaaggtgaattttggccttgctcttctgtttctccaaccttctgagtcttctcrgtgagttgttcactggcaatcaagtggttataaaaagagagccagctgatgttgcaatccaagcagtggccatatagtggaaagactctcctttggcatgtccaccagtgctatttttacccattccagtaagatctgcccttgtgatgttaaattacaggctgttacctggaattattctgttttacagaagcgctacatgctctgaagaaggtttttaataaaatgatcaggcagatcgagactaaaattctcacactggaaaatattgtttctcctgtcatcacaaataatatttct

SEQ ID NO: 4168 - DNA, 600 bp, Chicken  19866894101471_1
cagtgctgcaggtgagctgttgacaacaatttcattgtatctaaatttgcttggtttgtctaattgaaaatgtcagaaatcgcacgtgcacaaacacaggtcaattgagcattaaggctgtagtgtcaaacagtcaaaaaacagataatacctaagactgtatttctgaatgagagatgtccttcttccctggtaggtgtccacttagctttcatagaatcatagaatggcccgggttgaaaaggaccacaatgatcattgagtttcaacccccctgctatgtgcagggtcgccaaccascagaccaggctgcccagagccacatccagcctggccttgaatgcctccagggatggggcatccacagcctccttgggcaacctgttccagtgcgtcaccaccctctgtgtgaaaaacttcttcctaatatccaacctaaacctcccttgtcccagtttaaagccattaaaaaaccatttaaaccagctttgtcttttaattatctgggttggcctctgaatagatttttttatgtggcattcatgattcttcgtgcagcacttgtttgtagtacactgtttagtttgtgtagcactgttt

SEQ ID NO: 4169 - DNA, 600 bp, Chicken  19866894101471_2
gcccagagccacatccagcctggccttgaatgcctccagggatggggcatccacagcctccttgggcaacctgttccagtgcgtcaccaccctctgtgtgaaaaacttcttcctaatatccaacctaaacctcccttgtcccagtttaaagccattaaaaaaccatttaaaccagctttgtcttttaattatctgggttggcctctgaatagatttttttatgtggcattcatgattcttcgtgcagcacttgtttgtagtacactgtttagtttgtgtagcactgtttgtagtacactscctagtaaatcctaatggactactaattttttaagatcttaactccctcttcttcacagcttttaaaataaaatgcaatggttatgtttcagtaagacagatccttattaaatctagagctggtctgataatgacttaaattggtactacgtggccatcacatgttatttgataagcattccattataattaagaaggggctaatgggcaattaatatacagaattacacacttagctaattagatgattttacttttttttttttttttcctagattaaaatgtacaggaccccataaa

SEQ ID NO: 4170 - DNA, 599 bp, Chicken  19866894101476_1
  misc_feature (1)..(193): n is any nucleotide
nnnnnnnnnnnnnnnnnnnnnnnnnnnnnnnnnnnnnnnnnnnnnnnnnnnnnnnnnnnnnnnnnnnnnnnnnnnnnnnnnnnnnnnnnnnnnnnnnnnnnnnnnnnnnnnnnnnnnnnnnnnnnnnnnnnnnnnnnnnnnnnnnnnnnnnnnnnnnnnnnnnnnnnnnnnnnnnnnnnnnnnnnnnnnnnnnaaaaggaccacaatgctcatctggttccaaccccctgctatgtgcagggtcgccaaccagcagaccaggctgcccagagccacatccagcctggccttgaatgcctscagggatggggcatccacagcctccttgggcaacctgttcagtgcgtcaccaccctctgggtgaaaaacttcctcctcatatccaacctaaacctcccctgtctcagtttaaaaccattcccccttgtcctaaaagaagaagagaagctgtggtgtgggttagtttaggagcagaggtgttgctgccaaggctggacatctctgtcatcactgtaacagaccacacatggccacccgctccctcttctgtaaatgtttatttttaacttagttgtgtaatggatttcaaatgagctgcc

SEQ ID NO: 4171 - DNA, 600 bp, Chicken  19866894101483_1
gaattagcaaattgagctagtctgacttttggttgagacccatgttttgtatttatatcagaagtagcagcaactaggacgggcaatcaactataatcattttaactgacaaaacaacagtgaagaagcaaatgctaacaagcccatctctttttctgccattgtatttagattctgaagtgcggaagctagtaaccttaaacagtgagttttgattgtttaaacacaaaattccgtactcggaataatgaaatataatcaggttttctcctttacaatacttgtgaatatcttaactgmaatccctaattcaccaacttcttcagaggacagtaagtttggtgttacggacttgtcttgattagttgcgatgtgctaacrtgtaaataacattgtacctgcctgtgatgtgaacatgactgacattgcatgaaggttactagtttgctgccatttctgtccagaatgtttgcttactgttgcagtttatatgcatgaaggatgacattgctaaggcccccctaacttgaaaaaaatatacaaaaaaaggaatgttggttgcatgtggggcatggtcactaactgggctaaccgttatac

SEQ ID NO: 4172 - DNA, 600 bp, Chicken  19866894101483_2
ggcaatcaactataatcattttaactgacaaaacaacagtgaagaagcaaatgctaacaagcccatctctttttctgccattgtatttagattctgaagtgcggaagctagtaaccttaaacagtgagttttgattgtttaaacacaaaattccgtactcggaataatgaaatataatcaggttttctcctttacaatacttgtgaatatcttaactgmaatccctaattcaccaacttcttcagaggacagtaagtttggtgttacggacttgtcttgattagttgcgatgtgctaacrtgtaaataacattgtacctgcctgtgatgtgaacatgactgacattgcatgaaggttactagtttgctgccatttctgtccagaatgtttgcttactgttgcagtttatatgcatgaaggatgacattgctaaggcccccctaacttgaaaaaaatatacaaaaaaaggaatgttggttgcatgtggggcatggtcactaactgggctaaccgttatacatttaccttttaacagtagctgacgagactaagctcagtacaatggatgaccagaaaacaggtaagaattgacagtaaggc

SEQ ID NO: 4173 - DNA, 600 bp, Chicken  19866894101483_3
atgatttattaatacatgttagcttttgacctttgaaatgctgttttaattaggctcgatccagaggacaccataacattacttagctctaattaggaacaattcaccttttaaacctgacaatattatttattttagcatgatttggagaacagagcattccttgcagaatttatgattaataattcacaactgcatctctgtttaactacactttacaacatgagtaggaatgcggagaagttgtaagtaatcaactgataacagtataatttttattaaaacagctaaaacttctakctcgtaaaatgctgtagaatacggtcacagacttgcagctttagaaattgagaacaagcacacaaaattaaaatgcatgagtgttttgaaggattcagaccatcagwgtgtgaaagcatgaaccgtgttaatggtcacactaagaaacagagcttggggacaccttcaccactgaacaatattcacagaaagttacacatcaaactcaaatttattgaaaatarttgttcattttcttattgacctacttattggaatgggatgtgattacaacgaggtaaatcctatattttttaacga

SEQ ID NO: 4174 - DNA, 600 bp, Chicken  19866894101483_4
cttttaaacctgacaatattatttattttagcatgatttggagaacagagcattccttgcagaatttatgattaataattcacaactgcatctctgtttaactacactttacaacatgagtaggaatgcggagaagttgtaagtaatcaactgataacagtataatttttattaaaacagctaaaacttctakctcgtaaaatgctgtagaatacggtcacagacttgcagctttagaaattgagaacaagcacacaaaattaaaatgcatgagtgttttgaaggattcagaccatcagwgtgtgaaagcatgaaccgtgttaatggtcacactaagaaacagagcttggggacaccttcaccactgaacaatattcacagaaagttacacatcaaactcaaatttattgaaaatarttgttcattttcttattgacctacttattggaatgggatgtgattacaacgaggtaaatcctatattttttaacgaaatatgaggcttgggtttaaaagtgcatagcgcttttggtggtatcaacagagtgcagtttttctatatgtgcaacacctggattaaattccaaaaagagacacgtc

SEQ ID NO: 4175 - DNA, 600 bp, Chicken  19866894101483_5
gagtaggaatgcggagaagttgtaagtaatcaactgataacagtataatttttattaaaacagctaaaacttctakctcgtaaaatgctgtagaatacggtcacagacttgcagctttagaaattgagaacaagcacacaaaattaaaatgcatgagtgttttgaaggattcagaccatcagwgtgtgaaagcatgaaccgtgttaatggtcacactaagaaacagagcttggggacaccttcaccactgaacaatattcacagaaagttacacatcaaactcaaatttattgaaaatarttgttcattttcttattgacctacttattggaatgggatgtgattacaacgaggtaaatcctatattttttaacgaaatatgaggcttgggtttaaaagtgcatagcgcttttggtggtatcaacagagtgcagtttttctatatgtgcaacacctggattaaattccaaaaagagacacgtcagacaacttgggtgaatgagcatgactgtaaccatctggactaagcagttacatattttgtgaacagctcagtggcagaaaaaaaaaaggaaaaaaacattttctactatgctttta

SEQ ID NO: 4176 - DNA, 600 bp, Chicken  19866894101488_1
aaaaacagtacatttgggaaacacatttttattccgaggtaaatttcagatacacttcctgctgctgagggttgggggaaatgggagggaatgagagggagagggccatgcttcttgctacaaggtacaagcaattaaaaaacaaatccaatagatcagctttcattaaatggatacaattgaataagaaaaagtaagagaaatgaggggaaaagtgccgaagatgactctgaaacacacagaaacctaagaaacacagaaagctaagaaattacacgaagtgaagatgcaagcatcatyattttctagtgccagaaggtggacactaggtctgattttctgtgtaaatgcacataatgaaatgttaccctactgagacctaatgagrctggccaatgcagtcttatctgcctaagcctyatcttgtaggacaacagtctgcaagtatcttaagtgctagaaaaatgactatttttcacctttttaaagttttctgtagcastacatcaacatggcatatatgtgccaattaatgatttatttttgtaaaagacttgatgccaaaactctgattattaaagctttgattttgtctccaag

SEQ ID NO: 4177 - DNA, 600 bp, Chicken  19866894101488_2
gaatgagagggagagggccatgcttcttgctacaaggtacaagcaattaaaaaacaaatccaatagatcagctttcattaaatggatacaattgaataagaaaaagtaagagaaatgaggggaaaagtgccgaagatgactctgaaacacacagaaacctaagaaacacagaaagctaagaaattacacgaagtgaagatgcaagcatcatyattttctagtgccagaaggtggacactaggtctgattttctgtgtaaatgcacataatgaaatgttaccctactgagacctaatgagrctggccaatgcagtcttatctgcctaagcctyatcttgtaggacaacagtctgcaagtatcttaagtgctagaaaaatgactatttttcacctttttaaagttttctgtagcastacatcaacatggcatatatgtgccaattaatgatttatttttgtaaaagacttgatgccaaaactctgattattaaagctttgattttgtctccaaggatcgctccaagaagacatagtaacctatstacgctaggctgacaactgggcatcgctggtagatctgcatcagcaaaataatgactc

SEQ ID NO: 4178 - DNA, 600 bp, Chicken  19866894101488_3
caaggtacaagcaattaaaaaacaaatccaatagatcagctttcattaaatggatacaattgaataagaaaaagtaagagaaatgaggggaaaagtgccgaagatgactctgaaacacacagaaacctaagaaacacagaaagctaagaaattacacgaagtgaagatgcaagcatcatyattttctagtgccagaaggtggacactaggtctgattttctgtgtaaatgcacataatgaaatgttaccctactgagacctaatgagrctggccaatgcagtcttatctgcctaagcctyatcttgtaggacaacagtctgcaagtatcttaagtgctagaaaaatgactatttttcacctttttaaagttttctgtagcastacatcaacatggcatatatgtgccaattaatgatttatttttgtaaaagacttgatgccaaaactctgattattaaagctttgattttgtctccaaggatcgctccaagaagacatagtaacctatstacgctaggctgacaactgggcatcgctggtagatctgcatcagcaaaataatgactcctacctgcccactgtcagggggcaaaaaagag

SEQ ID NO: 4179 - DNA, 600 bp, Chicken  19866894101488_4
atgaggggaaaagtgccgaagatgactctgaaacacacagaaacctaagaaacacagaaagctaagaaattacacgaagtgaagatgcaagcatcatyattttctagtgccagaaggtggacactaggtctgattttctgtgtaaatgcacataatgaaatgttaccctactgagacctaatgagrctggccaatgcagtcttatctgcctaagcctyatcttgtaggacaacagtctgcaagtatcttaagtgctagaaaaatgactatttttcacctttttaaagttttctgtagcastacatcaacatggcatatatgtgccaattaatgatttatttttgtaaaagacttgatgccaaaactctgattattaaagctttgattttgtctccaaggatcgctccaagaagacatagtaacctatstacgctaggctgacaactgggcatcgctggtagatctgcatcagcaaaataatgactcctacctgcccactgtcagggggcaaaaaagagtgctatgcaacatctgtcctraaaggggaactcttcccaaagcacccactgaatgaaaggtaatgaaaygtatcctgtcctg

SEQ ID NO: 4180 - DNA, 600 bp, Chicken  19866894101488_5
tctgattttctgtgtaaatgcacataatgaaatgttaccctactgagacctaatgagrctggccaatgcagtcttatctgcctaagcctyatcttgtaggacaacagtctgcaagtatcttaagtgctagaaaaatgactatttttcacctttttaaagttttctgtagcastacatcaacatggcatatatgtgccaattaatgatttatttttgtaaaagacttgatgccaaaactctgattattaaagctttgattttgtctccaaggatcgctccaagaagacatagtaacctatstacgctaggctgacaactgggcatcgctggtagatctgcatcagcaaaataatgactcctacctgcccactgtcagggggcaaaaaagagtgctatgcaacatctgtcctraaaggggaactcttcccaaagcacccactgaatgaaaggtaatgaaaygtatcctgtcctgagacagatttttacaacactcatcaagttactttactcttcaggggttcctcagaccagggtttagacaatctgcttttaatacagrcactttcaaaattaagcacagacaaaastgcaccttaactg

SEQ ID NO: 4181 - DNA, 600 bp, Chicken  19866894101488_6
caagtatcttaagtgctagaaaaatgactatttttcacctttttaaagttttctgtagcastacatcaacatggcatatatgtgccaattaatgatttatttttgtaaaagacttgatgccaaaactctgattattaaagctttgattttgtctccaaggatcgctccaagaagacatagtaacctatstacgctaggctgacaactgggcatcgctggtagatctgcatcagcaaaataatgactcctacctgcccactgtcagggggcaaaaaagagtgctatgcaacatctgtcctraaaggggaactcttcccaaagcacccactgaatgaaaggtaatgaaaygtatcctgtcctgagacagatttttacaacactcatcaagttactttactcttcaggggttcctcagaccagggtttagacaatctgcttttaatacagrcactttcaaaattaagcacagacaaaastgcaccttaactgcttggagttgttacggaattgtagattctccacatttaaagaaagatcaggaaaagtacaaagaaattacagaaagtgcacctggaagtcactttgctacttaaggtaaag

SEQ ID NO: 4182 - DNA, 600 bp, Chicken  19866894101488_7
ttttctgtagcastacatcaacatggcatatatgtgccaattaatgatttatttttgtaaaagacttgatgccaaaactctgattattaaagctttgattttgtctccaaggatcgctccaagaagacatagtaacctatstacgctaggctgacaactgggcatcgctggtagatctgcatcagcaaaataatgactcctacctgcccactgtcagggggcaaaaaagagtgctatgcaacatctgtcctraaaggggaactcttcccaaagcacccactgaatgaaaggtaatgaaaygtatcctgtcctgagacagatttttacaacactcatcaagttactttactcttcaggggttcctcagaccagggtttagacaatctgcttttaatacagrcactttcaaaattaagcacagacaaaastgcaccttaactgcttggagttgttacggaattgtagattctccacatttaaagaaagatcaggaaaagtacaaagaaattacagaaagtgcacctggaagtcactttgctacttaaggtaaagctgtttgcaatgctatgaacaggcaagagaaggccaaccaacaaaaaa

SEQ ID NO: 4183 - DNA, 600 bp, Chicken  19866894101488_8
ttgtctccaaggatcgctccaagaagacatagtaacctatstacgctaggctgacaactgggcatcgctggtagatctgcatcagcaaaataatgactcctacctgcccactgtcagggggcaaaaaagagtgctatgcaacatctgtcctraaaggggaactcttcccaaagcacccactgaatgaaaggtaatgaaaygtatcctgtcctgagacagatttttacaacactcatcaagttactttactcttcaggggttcctcagaccagggtttagacaatctgcttttaatacagrcactttcaaaattaagcacagacaaaastgcaccttaactgcttggagttgttacggaattgtagattctccacatttaaagaaagatcaggaaaagtacaaagaaattacagaaagtgcacctggaagtcactttgctacttaaggtaaagctgtttgcaatgctatgaacaggcaagagaaggccaaccaacaaaaaatgacccacagcaagtatctttacaatatattctagcagacatgacaccccacagtgtggagtaaaagcaaactgtcttttaaaggcctctgaagaagagc

SEQ ID NO: 4184 - DNA, 600 bp, Chicken  19866894101488_9
atagtaacctatstacgctaggctgacaactgggcatcgctggtagatctgcatcagcaaaataatgactcctacctgcccactgtcagggggcaaaaaagagtgctatgcaacatctgtcctraaaggggaactcttcccaaagcacccactgaatgaaaggtaatgaaaygtatcctgtcctgagacagatttttacaacactcatcaagttactttactcttcaggggttcctcagaccagggtttagacaatctgcttttaatacagrcactttcaaaattaagcacagacaaaastgcaccttaactgcttggagttgttacggaattgtagattctccacatttaaagaaagatcaggaaaagtacaaagaaattacagaaagtgcacctggaagtcactttgctacttaaggtaaagctgtttgcaatgctatgaacaggcaagagaaggccaaccaacaaaaaatgacccacagcaagtatctttacaatatattctagcagacatgacaccccacagtgtggagtaaaagcaaactgtcttttaaaggcctctgaagaagagcttcatcagattcaaaaatgttctgctta

SEQ ID NO: 4185 - DNA, 600 bp, Chicken  19866894101493_1
tactttttaagaaggaaaagggtattatttctatgttgaaaggaagcctgtgaagaggaaggagaggaccttgcaggctaactacactcagcacttcaccgagctatcactgaatcccaaggaggttgtggatgccccatccctggaggcattcaaagccaggctggatgtgactctgggcagcctggtctagtgcttggcgaccctgcccatggcagggggattgaaactaaatgatcttttgaggtccttttcaacccaggccattctatgattctatgaatcactgaggtaaagaayctgaaaggtataatcatctgaacctggttcccagttagatatctgttaaaatgtaactcttggacacagaaattaaacgtggttttatttgccctataggaagtaaaacaccatacaagaattttctcctcagcagtttcaggaagaacacagtcgtgcacctaggcctggctggtctcatggagcacagacattgctctataccagacagctcctgtttgccctgagaaagggagcagggtggcattttgttcccagggttcctctgtctgctggcctccagttacaaaggctgtcccc

SEQ ID NO: 4186 - DNA, 600 bp, Chicken  19866894101498_1
gtgtattcttttctctcacctgtaccatgtccatgtgcttgaaaaaaaaaatattgacattactttctagaaacagttatacgtcttagttgggtgcatacaaggaacgttatttattgctgaattttctttattatcttagctttggttggcttgacatagtatacattaactgttccagttatttcacctcagtatgtgtggtttactccagtactcacagaaataccctaggagcatagcgatcttatttgctttgagtaaagtgtgtgcttttaaatttctagatactccttctgycttaaaagtctaacttaatcattctattttaatttcatcccaatagctgatacagtgcatagcagtacagagtaagtatattttagtagaggcaataggtagatttttgttttkagagaactgcagttaaaacttaagagtaattgtaaattacacgctgttatttttatttcatcattaagctccggaggcataagcagtcatatataatgttgctctgcaaaatgtctgcttaagtctagttcagctctccaagccctagactatttttctcctttgttattgtaaggacaaatgaag

SEQ ID NO: 4187 - DNA, 582 bp, Chicken  19866894101498_2
tattgctgaattttctttattatcttagctttggttggcttgacatagtatacattaactgttccagttatttcacctcagtatgtgtggtttactccagtactcacagaaataccctaggagcatagcgatcttatttgctttgagtaaagtgtgtgcttttaaatttctagatactccttctgycttaaaagtctaacttaatcattctattttaatttcatcccaatagctgatacagtgcatagcagtacagagtaagtatattttagtagaggcaataggtagatttttgttttkagagaactgcagttaaaacttaagagtaattgtaaattacacgctgttatttttatttcatcattaagctccggaggcataagcagtcatatataatgttgctctgcaaaatgtctgcttaagtctagttcagctctccaagccctagactatttttctcctttgttattgtaaggacaaatgaagaggtacactgtattgaagggaaagagagtgaactctaggcatgtattgtagacgtgccgaagcattcatctgggaatattgtcagctgaaaaaaag

SEQ ID NO: 4188 - DNA, 600 bp, Chicken  19866894101508_1
ataaaatggaagtaaaaccatatcccgtacaacactatgtacactgaaaaaagcgaacactatgtacactgaaaaagcgataagagggagagggagcagaattggaagaggccttgcagaatctgctggtgttctttttttttatttattattatttatttttaatgcatatttttgctgttctgggtaggaaatcctgagagaaaactgttcagtgtgcccgatcttatgggccggcttctgtgtaaggaagggggatctgagggtgaatatggctaggaggagacactcaactcctcyttcaagaagcatggattcacatacactaatgtgctgaatttgctaggatgcttagagcagtctttttcctgaactagctaccatattatgggatacgcagtgactaatgcaaatttcaggcactaagctatgtgcctaaaatctcaggtgttcctaccatcttgtttttgtccacattcataaagaagtgtgtgtaagcataaatactgaacaaactgatctttttggtggggtttgaaccagtccttgggtctgttacagtcytgctattttctaattaatatgtaaggtggtaagatg

SEQ ID NO: 4189 - DNA, 528 bp, Chicken  19866894101508_2
ggtgaatatggctaggaggagacactcaactcctcyttcaagaagcatggattcacatacactaatgtgctgaatttgctaggatgcttagagcagtctttttcctgaactagctaccatattatgggatacgcagtgactaatgcaaatttcaggcactaagctatgtgcctaaaatctcaggtgttcctaccatcttgtttttgtccacattcataaagaagtgtgtgtaagcataaatactgaacaaactgatctttttggtggggtttgaaccagtccttgggtctgttacagtcytgctattttctaattaatatgtaaggtggtaagatgcactcttagcaagactcctttcacagcaataaatatgcagtatgtgatttctgatagagtcccatcaaaaacagtaaaaatatctcactgtatggtcagtggttgatactccgcataaattccatagagacatttaattagatgccactggaactcatagactggaacattcaagttggagtgtcaaaaagt

SEQ ID NO: 4190 - DNA, 600 bp, Chicken  19866894101521_1
gaaagagggagaaggaaaaaagttacatttattctttatgatcagagttattcatttcctgaaacacgaccatactgtacaaactgcaaagtgatgaaattaaacaagcgcaatagctacattatgcactctggatatttgaaacaaatatgtatatgcagaacagccactgaaatgagaggcggctcattctagctgcatgttgcactcatttttcctcagttatgccagcaaatatattaattccccaaacctgcttgctaatcatcttatgcaaacacagaagaaaactcaattggratgcatttaagcaggcaacacaggaggcttattctgggacaatcttgctgacagtcaaagagatattttcatcctatttgagacagaaatacagtcatacgactcacaagtctagtcacagctaaccaaataacataaattgcagatcgccacagtgcagaagacctccttctaataaggatactagctgctaaatcttgaagtgagatgaagaacaggttgttctgtacacctcagtttaatgatgctcatttttgcatggccttgagccatatactgctgtatactgctgccatactt

SEQ ID NO: 4191 - DNA, 600 bp, Chicken  19866894101535_1
gggttaagtgtcaaagtgactctgaggaggctcaagaccactagcttggggttttcttaatgctaaacactggatgaaactactttgtgctttctcccaatgttaataccttaatctctttttcagccatcagacgaatgcacaaaaacgggcagcgtttataaatgagtgccgggagctccgagctggttgtcctttctgaaggtggtttcctgggcagggtcacaaatgcgttttccagggctggcaatcctgttagaagttgaagaggaagatcagaggattaggggctttgtcctyccgtacggtctctttgacacaaaagcacctgccctgcagaggccagcaggaaatggctctttgcaccgtgctatttctgtgagatggtgacctttggaggctctgtctataaaacaatcccttccttctgctccctccctgggctcagtgtggttcttcccggtgggggtggtctccgagctcccgttactgtcggaactcagccttgagggtggcatcctgtgctggggcagtgggagaaccggccctctttcagcccagggggcgtacatcaattagcctggggttaatttcattgcg

SEQ ID NO: 4192 - DNA, 600 bp, Chicken  19866894101540_1
gggaaaaacacatgtgattaaacttaaagtgcagttcgtgtagtaaacacctccacatttatcagcacagtgcaggagagaaagcaaattattaaatcagagtgagaacaaacaggaatgcctgactctggctttgccaagccaaagcagtgtctcactactgcatgaggttcaccatctccatccctgcctatgtgcgtctgcaccttgagcttctgatacctggtttcatctatgaaaaccacagaatgaccactaaaatcacagaaaactttctgagcaaaacgtgaagacgtgtgyatgagcaagaattacctggttggagatgtgctatgggagggagaggctgctgaggatgaggggcaagcaagcagtgatggggargctgccgtaagcaaatgcaaatccatgcttcaggaaaagttttcccacctcttgtctcacaccagcaccaggagccacgctgcttcgtggacacacaggtctgcaggcagtcagaaactgaccccgaaaaatattttaagtcaaatgagctccctaatatggagcctgtggttgtgtgagcgtggtcgggagcgcagagcagcagtcagaacgtgg

SEQ ID NO: 4193 - DNA, 600 bp, Chicken  19866894101540_2
caaattattaaatcagagtgagaacaaacaggaatgcctgactctggctttgccaagccaaagcagtgtctcactactgcatgaggttcaccatctccatccctgcctatgtgcgtctgcaccttgagcttctgatacctggtttcatctatgaaaaccacagaatgaccactaaaatcacagaaaactttctgagcaaaacgtgaagacgtgtgyatgagcaagaattacctggttggagatgtgctatgggagggagaggctgctgaggatgaggggcaagcaagcagtgatggggargctgccgtaagcaaatgcaaatccatgcttcaggaaaagttttcccacctcttgtctcacaccagcaccaggagccacgctgcttcgtggacacacaggtctgcaggcagtcagaaactgaccccgaaaaatattttaagtcaaatgagctccctaatatggagcctgtggttgtgtgagcgtggtcgggagcgcagagcagcagtcagaacgtggctggggaccagggagctgcacaaaagaacacttctcctgtgcagtcttccactgacacgtgtttattaaagagctggactctga

SEQ ID NO: 4194 - DNA, 599 bp, Chicken  19866894101554_1
  misc_feature (1)..(127): n is any nucleotide
nnnnnnnnnnnnnnnnnnnnnnnnnnnnnnnnnnnnnnnnnnnnnnnnnnnnnnnnnnnnnnnnnnnnnnnnnnnnnnnnnnnnnnnnnnnnnnnnnnnnnnnnnnnnnnnnnnnnnnnnnnnnnnnttcctcgttgacatggttaatgtgagtctggaactgatggatccaaaaggaaaagatgagtgcagctctttagccaggtatgagttttcttttgtttctgaatacattatctgaaacacttcatcattataggaaaggaattaacatagtcatgaaattacaattgaatagtrtaataaaacagcatttcttaattggtgcccaagttggcagttgtatctctgtggcatgagatatgattattgctgttttaaaaaataaatggaagagatgagcagtataacatggacacttttgtgcwaagggacatgaagaaataaatgagctacarggttcttcaktgtcttcyttttattctcctagatttgattttaagaaatcgaaattgctttttgaaagctcttcaaatagaacaaagtctgtaaatttggtttcccattccatgatggcgtttgacacgcgttacgctgga

SEQ ID NO: 4195 - DNA, 600 bp, Chicken  19866894101554_2
tcctcgttgacatggttaatgtgagtctggaactgatggatccaaaaggaaaagatgagtgcagctctttagccaggtatgagttttcttttgtttctgaatacattatctgaaacacttcatcattataggaaaggaattaacatagtcatgaaattacaattgaatagtrtaataaaacagcatttcttaattggtgcccaagttggcagttgtatctctgtggcatgagatatgattattgctgttttaaaaaataaatggaagagatgagcagtataacatggacacttttgtgcwaagggacatgaagaaataaatgagctacarggttcttcaktgtcttcyttttattctcctagatttgattttaagaaatcgaaattgctttttgaaagctcttcaaatagaacaaagtctgtaaatttggtttcccattccatgatggcgtttgacacgcgttacgctggacagaaatccacagcaggcatgcccaatgtgttcaattgcatcttccagtcatcaaagaatactagcagtccaggagcaatccagattgagttgcattacaggttggtagttctatggtttaattttttt

SEQ ID NO: 4196 - DNA, 600 bp, Chicken  19866894101554_3
aactgatggatccaaaaggaaaagatgagtgcagctctttagccaggtatgagttttcttttgtttctgaatacattatctgaaacacttcatcattataggaaaggaattaacatagtcatgaaattacaattgaatagtrtaataaaacagcatttcttaattggtgcccaagttggcagttgtatctctgtggcatgagatatgattattgctgttttaaaaaataaatggaagagatgagcagtataacatggacacttttgtgcwaagggacatgaagaaataaatgagctacarggttcttcaktgtcttcyttttattctcctagatttgattttaagaaatcgaaattgctttttgaaagctcttcaaatagaacaaagtctgtaaatttggtttcccattccatgatggcgtttgacacgcgttacgctggacagaaatccacagcaggcatgcccaatgtgttcaattgcatcttccagtcatcaaagaatactagcagtccaggagcaatccagattgagttgcattacaggttggtagttctatggtttaatttttttgttgttgttgtgggctttttgtaatgtttt

SEQ ID NO: 4197 - DNA, 600 bp, Chicken  19866894101554_4
tccaaaaggaaaagatgagtgcagctctttagccaggtatgagttttcttttgtttctgaatacattatctgaaacacttcatcattataggaaaggaattaacatagtcatgaaattacaattgaatagtrtaataaaacagcatttcttaattggtgcccaagttggcagttgtatctctgtggcatgagatatgattattgctgttttaaaaaataaatggaagagatgagcagtataacatggacacttttgtgcwaagggacatgaagaaataaatgagctacarggttcttcaktgtcttcyttttattctcctagatttgattttaagaaatcgaaattgctttttgaaagctcttcaaatagaacaaagtctgtaaatttggtttcccattccatgatggcgtttgacacgcgttacgctggacagaaatccacagcaggcatgcccaatgtgttcaattgcatcttccagtcatcaaagaatactagcagtccaggagcaatccagattgagttgcattacaggttggtagttctatggtttaatttttttgttgttgttgtgggctttttgtaatgttttgaccaagttg

SEQ ID NO: 4198 - DNA, 600 bp, Chicken  19866894101554_5
gaaaagatgagtgcagctctttagccaggtatgagttttcttttgtttctgaatacattatctgaaacacttcatcattataggaaaggaattaacatagtcatgaaattacaattgaatagtrtaataaaacagcatttcttaattggtgcccaagttggcagttgtatctctgtggcatgagatatgattattgctgttttaaaaaataaatggaagagatgagcagtataacatggacacttttgtgcwaagggacatgaagaaataaatgagctacarggttcttcaktgtcttcyttttattctcctagatttgattttaagaaatcgaaattgctttttgaaagctcttcaaatagaacaaagtctgtaaatttggtttcccattccatgatggcgtttgacacgcgttacgctggacagaaatccacagcaggcatgcccaatgtgttcaattgcatcttccagtcatcaaagaatactagcagtccaggagcaatccagattgagttgcattacaggttggtagttctatggtttaatttttttgttgttgttgtgggctttttgtaatgttttgaccaagttgtggcctgt

SEQ ID NO: 4199 - DNA, 600 bp, Chicken  19866894101555_1
agtgaataattgttatattgcacattcattactgatgccaaaattgacttaaaatcccaacaagagattaaaatcacccagcttagcctgaatccaatgaatcatagtcacagaattgctcaggttggaaaagaccctcaagatcatcaagtccaaccacaacctaaccatactaccctaactctaacaacccaccattaaatcatgtccctgagcaccacatcaaaacagattttaaacacattcagggatggtgactcaaccatctcccaggagagcctatcccagtacttaacaacygtgtctgtaaagacatttttcctgatatccaacctaaacacctctcctggagcaacttgaggccatttcccctcatcctgtcacctctcaccagtgagaacacctagtaaccaatacatctrtgatgtgtatgcaatgtatatgaatgtaagattcttcaaatcaatatacaaagtaggaaagaatgcggaaaacagttaaaataattaggctttgttttctccaaaatatttgtcaataaacaaacatatgtacaagtggatttctgtgggtattcctagaccaattcttgatctgtta

SEQ ID NO: 4200 - DNA, 600 bp, Chicken  19866894101555_2
ggttggaaaagaccctcaagatcatcaagtccaaccacaacctaaccatactaccctaactctaacaacccaccattaaatcatgtccctgagcaccacatcaaaacagattttaaacacattcagggatggtgactcaaccatctcccaggagagcctatcccagtacttaacaacygtgtctgtaaagacatttttcctgatatccaacctaaacacctctcctggagcaacttgaggccatttcccctcatcctgtcacctctcaccagtgagaacacctagtaaccaatacatctrtgatgtgtatgcaatgtatatgaatgtaagattcttcaaatcaatatacaaagtaggaaagaatgcggaaaacagttaaaataattaggctttgttttctccaaaatatttgtcaataaacaaacatatgtacaagtggatttctgtgggtattcctagaccaattcttgatctgttatagctatatcagaacatatagcatcctacaatttataaatatctctcataaaactcctttctgacatacattcacttgacataccagctgtagtagaaaacaatgaacatgtgggtttactt

SEQ ID NO: 4201 - DNA, 600 bp, Chicken  19866894101555_3
gtccaggactgagagcattttcctccgtgttcacagtagttaggcaaacatctaattaaagacagtttttaaaaggtaattaattataaatatttcattaaaaataatactaaaaaaaaaaaaaatccacacaaaaagaaccgtctctactcctcatccagggaagaatttcccagagctgtatcgctgtgtagtacctgaaataattacttattcctctgatctttggttcacttcaaacgcaagcactgaagacaacaacatttcataaattcaaaaagcaggtaaagatcactctcyaaaaaatattgaacttgtcctccactctctagcaattaaagtgccacaaactatctgagaacagaagaagaggacaaataacaggtgaaaatgctcctgaaatcttgtttcaaagaagaatccccagttctctcattaaacagggatcattattgaaattaggctgcattacattttgtggtaacgcaaatgacatgaaaatctccaaagtgaagggaaaaatatgcttcaattatgagttctgtattctctcttcctgttttagttggtatgcctccaaagtattattgcaaaacaaat

SEQ ID NO: 4202 - DNA, 599 bp, Chicken  19866894101558_1
  misc_feature (1)..(46): n is any nucleotide
nnnnnnnnnnnnnnnnnnnnnnnnnnnnnnnnnnnnnnnnnnnnnncagagggcacaacacaatctaatccttaatgcagttgagaggatgaggaatgtttaaaattatgttgaaacattcattttcttgactgaaaaacagatttcagaaaagttgtttctcatttcaaattattctactggatactaaattaacaagtcagctgatttttccccttaagtagaaaaggcagttcagtgcaaaggcagtcaatattaggacactcgttacagagcaattacagttgacagctatgacakttctggaacttccatgaaaatcttctgccacttttccactggtcacagatcacattttccaggctcagacatcagaagcctgataagagagtaatccttaaagagttagccttcatcttttgcaacctgcagggaaagggcttctcagagatccaaaagctcactgatggcaaatggttcgggtgagaccattttctccagcagttttaacctcactgaagttcaacccactgcactcagtactctgttgctttttgaaggggaaggaaagaaagaaaaagaagaataaaacgcaatct

SEQ ID NO: 4203 - DNA, 600 bp, Chicken  19866894101564_1
catgtaaaacagccttctcttttctgttggtctctgctttgtggcttcctggaaacatggatttctgaacaggagattgtgctggttaactgcacaaggctgtttccaaagggaaattcaactacagccatttttaagtgtggtaatgaggtggtttgttgccttttctttttctcttgagaacaagattgaaaaacagaccttgatccaaactctgtagctttttgttcataggcagatgagcagtcctcattccccccagagcctctaggaagtctaagtctcagaatgatgctacayggaataaatttcctgtacttcactaaaatttccaaaggaatwctaggaaacttgaggactcttgagtcccacagtttctcccaacagttgtcttgctttcaagcttgcagtccttctggtttataggcaggccacgtctgtgtcttattctttgtgttcaagcaatacaactcccatttcttgcactaacttaacatttattagggagcaaaacggtatgtatgtttttgcagttgctgctgattttatatctgaatgttgtagtttcatagaatattataacagcctgcacagctttaa

SEQ ID NO: 4204 - DNA, 600 bp, Chicken  19866894101564_2
ggcttcctggaaacatggatttctgaacaggagattgtgctggttaactgcacaaggctgtttccaaagggaaattcaactacagccatttttaagtgtggtaatgaggtggtttgttgccttttctttttctcttgagaacaagattgaaaaacagaccttgatccaaactctgtagctttttgttcataggcagatgagcagtcctcattccccccagagcctctaggaagtctaagtctcagaatgatgctacayggaataaatttcctgtacttcactaaaatttccaaaggaatwctaggaaacttgaggactcttgagtcccacagtttctcccaacagttgtcttgctttcaagcttgcagtccttctggtttataggcaggccacgtctgtgtcttattctttgtgttcaagcaatacaactcccatttcttgcactaacttaacatttattagggagcaaaacggtatgtatgtttttgcagttgctgctgattttatatctgaatgttgtagtttcatagaatattataacagcctgcacagctttaacaagtagggtagatcaggatgttaacacaccgattgggccct

SEQ ID NO: 4205 - DNA, 600 bp, Chicken  19866894101564_3
acctattgactgtggcacctagagaagactttgctcggcatccagtcactgagattctctctattccttttttgatgtagaaaactgataacagacttccactgtttaagtcaggaaatctgctcatgcttgaaccgctatctcaataaataaataaataaaaaatcatccttttacagcaaaaaagctgtaagtgtaaaaataccaaaccacacaaatagaagcatacattactgttccttactctggtacctgagtacttttaattcacctgttgggttgtgacagcattgcatttarcagttactgtgaggaatgaagaaataatggatagaccaaagttttacaggtgcccacagatgtagataaatgctgagacttctattcattgaggaggaccacaagctcaaaaaaatgattgcatctgtgtccttgtggttattaatgaatggaaaaggattcagtaagaggaatgagtgttcccagacttctcttaagaaactcaaatgtttcaaaacttgtttaacagcaacaaatgaatttgtggtaagactgcctttcaaattcaggaaagttaagtttgctgcattcttactgaat

SEQ ID NO: 4206 - DNA, 600 bp, Chicken  19866894101564_4
ttcatgcctggttcttggagacattatagaagggattttctgtttttgttgtacttgaactagtacaaatgctcccaagccaaaataaagttctttattctttgcctcatactagaagagtaggtctttctgactgcatgtttgtcacagtaatgagggaaggctgatgtttgcttactaattaacaactattagacatcccattaaaaactattagacaatccattaaagaaaaatgactgaatttttaatacagtccctttcaaatatcaagacagctctgggcttacagtaagtgayaagacatacatttttaaagtcatgaatttaaagcaacgtccttgtgcctatgaagatcttcctaaaacttagggcgaatttgcaattttactacagttcaagttgcttaaaaccaactgtaagactggaccataagattatttttccctctctgtaaaaacctatctgacttctgaaagagtgctgttgcattgcagaatctgagcagtcttctatcaagctatgtatactttaaaaatccaaacactacacttctattgccaacaaaatcttataaagacaagcatcagatawtaatag

SEQ ID NO: 4207 - DNA, 600 bp, Chicken  19866894101564_5
agtgayaagacatacatttttaaagtcatgaatttaaagcaacgtccttgtgcctatgaagatcttcctaaaacttagggcgaatttgcaattttactacagttcaagttgcttaaaaccaactgtaagactggaccataagattatttttccctctctgtaaaaacctatctgacttctgaaagagtgctgttgcattgcagaatctgagcagtcttctatcaagctatgtatactttaaaaatccaaacactacacttctattgccaacaaaatcttataaagacaagcatcagatawtaatagggtgatatttgaaagcacttttccccagtcagaggtggttgttgaactggtccctactggtgatagtgggatgttctcatgtagaagtatcagcggcaggttgcaatagagtaactcagtttatatcaatgtagccagcaagcacactggcaaatctgcactttgatttttttttaaaaaaaccttgaattgtaaatacaatgttaataaagtgatcactaagtctgactgaatcaaaagctttgatcttttacttccattcctttcttttactatcttttattttcaccattc

SEQ ID NO: 4208 - DNA, 599 bp, Chicken  19866894101567_1
  misc_feature (1)..(245): n is any nucleotide
nnnnnnnnnnnnnnnnnnnnnnnnnnnnnnnnnnnnnnnnnnnnnnnnnnnnnnnnnnnnnnnnnnnnnnnnnnnnnnnnnnnnnnnnnnnnnnnnnnnnnnnnnnnnnnnnnnnnnnnnnnnnnnnnnnnnnnnnnnnnnnnnnnnnnnnnnnnnnnnnnnnnnnnnnnnnnnnnnnnnnnnnnnnnnnnnnnnnnnnnnnnnnnnnnnnnnnnnnnnnnnnnnnnnnnnnnnnnnnnnnnnnntatattgtataatttacaaaggctgctccaaaagtaatgtctcctgtttaatgaygttggcctgtgatgtcagaggtggatgttggtggtatggcagtagagaatggaccttcccaccaaygttctgctccgttctgttgctgtgtgacagatggcagcagaggggcactgtgacaaatggcgtctgacacggaaatgcagatgaagcaaaggtgtggaaacaaattcccccatgtagaaaaaatggcccccattgacatgcaytgatatttgctgaacgtttatgaagtctaaggacagtgcatcwcttccgctggtgcagatatttatgggcatggcatacaggctcttatt

SEQ ID NO: 4209 - DNA, 599 bp, Chicken  19866894101567_2
  misc_feature (1)..(179): n is any nucleotide
nnnnnnnnnnnnnnnnnnnnnnnnnnnnnnnnnnnnnnnnnnnnnnnnnnnnnnnnnnnnnnnnnnnnnnnnnnnnnnnnnnnnnnnnnnnnnnnnnnnnnnnnnnnnnnnnnnnnnnnnnnnnnnnnnnnnnnnnnnnnnnnnnnnnnnnnnnnnnnnnnnnnnnnnnnnnnnnnnnntatattgtataatttacaaaggctgctccaaaagtaatgtctcctgtttaatgaygttggcctgtgatgtcagaggtggatgttggtggtatggcagtagagaatggaccttcccaccaaygttctgctccgttctgttgctgtgtgacagatggcagcagaggggcactgtgacaaatggcgtctgacacggaaatgcagatgaagcaaaggtgtggaaacaaattcccccatgtagaaaaaatggcccccattgacatgcaytgatatttgctgaacgtttatgaagtctaaggacagtgcatcwcttccgctggtgcagatatttatgggcatggcatacaggctcttattcrttgctagcaaaaatgagcagctaatgatggtgcctatgttaaaaatggtgttttgaggctgaga

SEQ ID NO: 4210 - DNA, 599 bp, Chicken  19866894101567_3
  misc_feature (1)..(36): n is any nucleotide
nnnnnnnnnnnnnnnnnnnnnnnnnnnnnnnnnnnntatattgtataatttacaaaggctgctccaaaagtaatgtctcctgtttaatgaygttggcctgtgatgtcagaggtggatgttggtggtatggcagtagagaatggaccttcccaccaaygttctgctccgttctgttgctgtgtgacagatggcagcagaggggcactgtgacaaatggcgtctgacacggaaatgcagatgaagcaaaggtgtggaaacaaattcccccatgtagaaaaaatggcccccattgacatgcaytgatatttgctgaacgtttatgaagtctaaggacagtgcatcwcttccgctggtgcagatatttatgggcatggcatacaggctcttattcrttgctagcaaaaatgagcagctaatgatggtgcctatgttaaaaatggtgttttgaggctgagaagtttctctatcaaagagtattattgtgcttttcgtatcagttgtagtctccatggaaataaataggagacattactttaggagcaacatatgtagatgcagcccaagatgattcctcttcacttaatgcagcccaggcgagc

SEQ ID NO: 4211 - DNA, 600 bp, Chicken  19866894101567_4
tataatttacaaaggctgctccaaaagtaatgtctcctgtttaatgaygttggcctgtgatgtcagaggtggatgttggtggtatggcagtagagaatggaccttcccaccaaygttctgctccgttctgttgctgtgtgacagatggcagcagaggggcactgtgacaaatggcgtctgacacggaaatgcagatgaagcaaaggtgtggaaacaaattcccccatgtagaaaaaatggcccccattgacatgcaytgatatttgctgaacgtttatgaagtctaaggacagtgcatcwcttccgctggtgcagatatttatgggcatggcatacaggctcttattcrttgctagcaaaaatgagcagctaatgatggtgcctatgttaaaaatggtgttttgaggctgagaagtttctctatcaaagagtattattgtgcttttcgtatcagttgtagtctccatggaaataaataggagacattactttaggagcaacatatgtagatgcagcccaagatgattcctcttcacttaatgcagcccaggcgagccaaaaggttggacacctgtgtattaggtcaagggaagggcttgt

SEQ ID NO: 4212 - DNA, 600 bp, Chicken  19866894101567_5
ttggcctgtgatgtcagaggtggatgttggtggtatggcagtagagaatggaccttcccaccaaygttctgctccgttctgttgctgtgtgacagatggcagcagaggggcactgtgacaaatggcgtctgacacggaaatgcagatgaagcaaaggtgtggaaacaaattcccccatgtagaaaaaatggcccccattgacatgcaytgatatttgctgaacgtttatgaagtctaaggacagtgcatcwcttccgctggtgcagatatttatgggcatggcatacaggctcttattcrttgctagcaaaaatgagcagctaatgatggtgcctatgttaaaaatggtgttttgaggctgagaagtttctctatcaaagagtattattgtgcttttcgtatcagttgtagtctccatggaaataaataggagacattactttaggagcaacatatgtagatgcagcccaagatgattcctcttcacttaatgcagcccaggcgagccaaaaggttggacacctgtgtattaggtcaagggaagggcttgtccccatgccagtgttgaaggtggttgttctatggtctccactttggagt

SEQ ID NO: 4213 - DNA, 599 bp, Chicken  19866894101572_1
  misc_feature (1)..(205): n is any nucleotide
nnnnnnnnnnnnnnnnnnnnnnnnnnnnnnnnnnnnnnnnnnnnnnnnnnnnnnnnnnnnnnnnnnnnnnnnnnnnnnnnnnnnnnnnnnnnnnnnnnnnnnnnnnnnnnnnnnnnnnnnnnnnnnnnnnnnnnnnnnnnnnnnnnnnnnnnnnnnnnnnnnnnnnnnnnnnnnnnnnnnnnnnnnnnnnnnnnnnnnnnnnnnnaatcccacctggctattctgcacaacttcataagctcaaaatcttcctaaagttcattctaatcattttagagaacttacagtgaacttcaacartgaagtctgtgcccatcactgcaacatctttgcaggaatttattcactgtcagaatgtttttcatttttttttctgcatcaattcatattcctacaattaattctcctgaatttactttcctgattttattatcaccatcacagaatagyrggtgccctgagttcaaacgcttgcatcaagcacggccccattagatgaatttgctctgggctctgtccagccaaattttgaaactctccatggatggaaattccacagcctgctccagtgctcagctgctctcactgtgaggacattt

SEQ ID NO: 4214 - DNA, 599 bp, Chicken  19866894101572_2
  misc_feature (1)..(55): n is any nucleotide
nnnnnnnnnnnnnnnnnnnnnnnnnnnnnnnnnnnnnnnnnnnnnnnnnnnnnnnaatcccacctggctattctgcacaacttcataagctcaaaatcttcctaaagttcattctaatcattttagagaacttacagtgaacttcaacartgaagtctgtgcccatcactgcaacatctttgcaggaatttattcactgtcagaatgtttttcatttttttttctgcatcaattcatattcctacaattaattctcctgaatttactttcctgattttattatcaccatcacagaatagyrggtgccctgagttcaaacgcttgcatcaagcacggccccattagatgaatttgctctgggctctgtccagccaaattttgaaactctccatggatggaaattccacagcctgctccagtgctcagctgctctcactgtgaggacatttttgttaaatctagtcataatatccccatgctgcatcatataagcatcacttctatccttctgctgtgaacctccaagaggagtttgggctacatcttctctgtagcaatccacactaggctgttacaaacagtaattaccctttattccc

SEQ ID NO: 4215 - DNA, 599 bp, Chicken  19866894101572_3
  misc_feature (1)..(54): n is any nucleotide
nnnnnnnnnnnnnnnnnnnnnnnnnnnnnnnnnnnnnnnnnnnnnnnnnnnnnnaatcccacctggctattctgcacaacttcataagctcaaaatcttcctaaagttcattctaatcattttagagaacttacagtgaacttcaacartgaagtctgtgcccatcactgcaacatctttgcaggaatttattcactgtcagaatgtttttcatttttttttctgcatcaattcatattcctacaattaattctcctgaatttactttcctgattttattatcaccatcacagaatagyrggtgccctgagttcaaacgcttgcatcaagcacggccccattagatgaatttgctctgggctctgtccagccaaattttgaaactctccatggatggaaattccacagcctgctccagtgctcagctgctctcactgtgaggacatttttgttaaatctagtcataatatccccatgctgcatcatataagcatcacttctatccttctgctgtgaacctccaagaggagtttgggctacatcttctctgtagcaatccacactaggctgttacaaacagtaattaccctttattcccc

SEQ ID NO: 4216 - DNA, 600 bp, Chicken  19866894101572_4
ttttgaaaataattaagatggcacatgttatttttaacattcaatatattagtgaacgtctttcttgagaaaagtacattttcctagagcagcaaatctaaacacacttttttttttttttgctctgtttatcgcaaggagagcttttctttcttaatgggatcataattcacccagaactgtttggaggtttacttttctcgtaaacatgtgattaaacataatcatatgcataaaaataaacatccatcatgactaaggtgggtttttatcctaaccaagaaagccttctacatttcrtttttttttttttttgctgataatttgaaaggctacttgcaattctgctcataggtaccaaatgggaatctgtaagaartgatctgattttgttaagggtaggatatccagcaccaccaacagtgcttctctgtttctgaaaaatacagcttatgtcatgaatgaatatgaacaagaaagcacagctaaggctcacagccttacatttcatacctttttctttgctcatgcttgaagccatgtagccctcaggatgatcttaacattggtgaggaaggaatagagtctgataatgaagtc

SEQ ID NO: 4217 - DNA, 563 bp, Chicken  19866894101572_5
tttcctagagcagcaaatctaaacacacttttttttttttttgctctgtttatcgcaaggagagcttttctttcttaatgggatcataattcacccagaactgtttggaggtttacttttctcgtaaacatgtgattaaacataatcatatgcataaaaataaacatccatcatgactaaggtgggtttttatcctaaccaagaaagccttctacatttcttttttttttttttttgctgataatttgaaaggctacttgcaattctgctcataggtaccaaatgggaatctgtaagaartgatctgattttgttaagggtaggatatccagcaccaccaacagtgcttctctgtttctgaaaaatacagcttatgtcatgaatgaatatgaacaagaaagcacagctaaggctcacagccttacatttcatacctttttctttgctcatgcttgaagccatgtagccctcaggatgatcttaacattggtgaggaaggaatagagtctgataatgaagtctgcatcaaatgccctcagcatgtaaaatcagtaaacttcaca

SEQ ID NO: 4218 - DNA, 600 bp, Chicken  19866894101573_1
cctactttaataaaattaaggttcactgaaagtattatattagcttctgtgaccaaccagcctagcttaattgctttaggtaaacaaaataaagaatacaaatgaagaaaaaaatggtaaatttaatttggaatggagtctttatagataaccaggatttcacactgcctatttagaagttgcagaataaaggctggactcagtgatctgtagaggtcccttccaacccctgcatttctgtgactctttgaataaatgtacacaacttttttcctgggagtagttaagctaaccaacagygcagagtaagcaggagcatgctaggcagactaaggatcagtctactccaagtattttctgtgtcttgttactcagcagtaagggactgtctgttattaggggggggggacatcatcaaatccttttcaaagtggcaaaaggctttccaaggaacccaagaaagtgcagccataagagaaaagaacaagcacgaatgtcattagaaagtcctttatctggggagcactgtggatttaactgagtttctctgtgaggctgagttttagctttaatactcttttaagaatttattttatttta

SEQ ID NO: 4219 - DNA, 600 bp, Chicken  19866894101586_1
ctctccaatcatagcagcaaatagacatccaaactctgcagaggagctgctctctgtccataaagtgattctgtcagattgtaagcagcaggaaggagtacccaaaaatgtgcaaacaactaatttctgcccagccttgaaagcacgcgcaagttggacttgatggtccttgtgggtcccttccaactcagcatattttatgattctatgaaataattggtccaaacacacagtagtgaagaccagcttgccctatgccccccacttcccagaagtaatagtgaaggctgtgctgtcgtytgtggaatgatctggaaaaccctgaaaaactgggctatttttaacttcctctgataaaggcagtcacttttgtctgtaaatacaagcctgtgtttttggctcgtgtctgttacataaaggtatgaattctagtgcttctttatttggatgtaggagttcagaaaaaaagatggaacacttcagttgaaggtccaagcagagcagcaaagcagcagtgcctcaggagacccatttcagagcagctacagcaacaaactgaaatgttacaggactgacaagctgagggtgagcaataagtag

SEQ ID NO: 4220 - DNA, 592 bp, Chicken  19866894101586_2
attaaagctgtcacacaaagcccagtgttatactttatagccaatgatgccgagctaccaattgaaccatgcctgcccatgtctgcatggtagcacagagctgagatgctgctcctaaataacaaatgatacaggtaaattcaacagcagcctgatctgctccctaaatgacaatcccttcaccttaggctgttaagcaaatactgcttcaagtgcctcaaacaaaaatagcaatgaacacaaaacaatggacaagattaaaaaaaataaagcaaaataattcaaacaatgaatccatayttgaatccaatttgctttcccctcccattggtttacatgactatgtacacccaagctattaggtgcaaaagactatcaaaaaccaagtcctcacctggggcagacatcagtgtaagaactcagcctccagcagagcacttctgcatgcatcagccaagcatctgcaccttgcagggtccaacacaaagagtttcgctgccctcaggagcccctgcccactcacctggaccactgctgctgagagggacagcagcaaccccgacttcaccatgggaaatgctgataagtcatt

SEQ ID NO: 4221 - DNA, 600 bp, Chicken  19866894101588_1
ccgagatgtaaaaatccagcccaaacacctgaaaagtctgtatcctttgagtatctacccaaaacataacctccactttagactcacccaacagagcatttatgacttctcaaaggccaacagcaatgcgctgcaagagactccatgagaaatgtaaaccagctcccaaggaaaatcagctatttcaggcaggacaacaaaccatccctcccaggggagtaagggctgcaaacgtggttatctgccagaagacagagagctgacgactggcagataccagcatgagataggaaaggaaamagtttcttgtcctgcaagtctttctccagcatttcagaaagttttctgattctacagagcatgaagttgggtattcaaagctgtcccaggcaaaggagaccaggcagaacagctctgaatccacagtatcctgcaggagcacccaaactgatgccattgcaaaaaacatggaagaagagggagaagaaaaaaaaatagtaataggaaaaaaatcaccataatgtgagtctgttctttgattactactggtttgagaactcactcttagacagaaggaaaacaagcagcatgaagatctta

SEQ ID NO: 4222 - DNA, 600 bp, Chicken  19866894101591_1
tgaggctatcttgtgaggttctaagccactacagcactgaaagccacaaagatagccacatttaccaaaaacacttcagtagtgaccctagcagagaaatgcaagctcttaggaagcatgcactgcccctttacatttatttcttgagcgaaatattcagtaaccatcaggcatagatgaagtcatcccgtggagtttggccacttcactggcttagggctagtcagtagtagatttctgcagaacctactacaacccaaagaaaatcatcttattagcacagatagctcattttgatgsaatgtgctggcatttttaagctttccaaatagggaattttaagaaagagaragaacttgttgagaaagggcttccagccagaagcggtgatatagataaaaatgtctttcattgtttcctgcccctccagaatctagcataaagcaaargcagtgactgtgataataaagccaaaygataaatgaaagaaggagcacttcaacataatctagataacaggaaaattttaaatggacaatttaacatgagagtctgcatggaattatttttcattaaacaatcaaagcttgtggtaatgca

SEQ ID NO: 4223 - DNA, 600 bp, Chicken  19866894101591_2
atagccacatttaccaaaaacacttcagtagtgaccctagcagagaaatgcaagctcttaggaagcatgcactgcccctttacatttatttcttgagcgaaatattcagtaaccatcaggcatagatgaagtcatcccgtggagtttggccacttcactggcttagggctagtcagtagtagatttctgcagaacctactacaacccaaagaaaatcatcttattagcacagatagctcattttgatgsaatgtgctggcatttttaagctttccaaatagggaattttaagaaagagaragaacttgttgagaaagggcttccagccagaagcggtgatatagataaaaatgtctttcattgtttcctgcccctccagaatctagcataaagcaaargcagtgactgtgataataaagccaaaygataaatgaaagaaggagcacttcaacataatctagataacaggaaaattttaaatggacaatttaacatgagagtctgcatggaattatttttcattaaacaatcaaagcttgtggtaatgcaaatcaaatccatttttagctgcaggaaattttgacaatttcagaggagtaa

SEQ ID NO: 4224 - DNA, 600 bp, Chicken  19866894101591_3
gaaatattcagtaaccatcaggcatagatgaagtcatcccgtggagtttggccacttcactggcttagggctagtcagtagtagatttctgcagaacctactacaacccaaagaaaatcatcttattagcacagatagctcattttgatgsaatgtgctggcatttttaagctttccaaatagggaattttaagaaagagaragaacttgttgagaaagggcttccagccagaagcggtgatatagataaaaatgtctttcattgtttcctgcccctccagaatctagcataaagcaaargcagtgactgtgataataaagccaaaygataaatgaaagaaggagcacttcaacataatctagataacaggaaaattttaaatggacaatttaacatgagagtctgcatggaattatttttcattaaacaatcaaagcttgtggtaatgcaaatcaaatccatttttagctgcaggaaattttgacaatttcagaggagtaaaaaatatgagaataataatatcatgatggtaattcacagtaattacagaaaagcataattgcacaacacaagcactaatcaaagctcagaagagtact

SEQ ID NO: 4225 - DNA, 600 bp, Chicken  19866894101591_4
atgaagtcatcccgtggagtttggccacttcactggcttagggctagtcagtagtagatttctgcagaacctactacaacccaaagaaaatcatcttattagcacagatagctcattttgatgsaatgtgctggcatttttaagctttccaaatagggaattttaagaaagagaragaacttgttgagaaagggcttccagccagaagcggtgatatagataaaaatgtctttcattgtttcctgcccctccagaatctagcataaagcaaargcagtgactgtgataataaagccaaaygataaatgaaagaaggagcacttcaacataatctagataacaggaaaattttaaatggacaatttaacatgagagtctgcatggaattatttttcattaaacaatcaaagcttgtggtaatgcaaatcaaatccatttttagctgcaggaaattttgacaatttcagaggagtaaaaaatatgagaataataatatcatgatggtaattcacagtaattacagaaaagcataattgcacaacacaagcactaatcaaagctcagaagagtactttggcagtcattaggattttagagcca

SEQ ID NO: 4226 - DNA, 600 bp, Chicken  19866894101591_5
tcattgggcaccacacaacaagcattattaatttcatgtcaatctacagcataatttccctgatcaaatatcagttcttaataactaaccgcaaagattggcttatctgacattgatttttgtgaagcatcttagaaagaaagctttgctggtgattgctttggaagcagcaatgctcttgtgaacttgtgttatttctcaaagtttgtggactgacctatttgtgtacaactttcatccatttcatttggacctgctgtcttgaaaaaccttcagaacattgtttgtacttttctcttrgtatcttacaaatataatttttctgaacttcatgcatctgggagtgttagaaactaaagtattattgaactgtgcatatattttgtgctgctgcataacccataatttgtgctcagtatcatttacagtctgatgtgcagctcatcctaaattcttctgagcatagaattcatgccgtttgctttattttttttgccactgactggctatactttgactcagacttaccttgactgccttgacaaaagagaagaacattttacagttgacaccataaagaggtgggagggggaaagaaac

SEQ ID NO: 4227 - DNA, 600 bp, Chicken  19866894101594_1
agattcattagctcaggagcaaaccatttgctctgggaaacagatcggtttcattacatagcaacaggggaatgtgagattctgaacacaaattcctatcttttatttgagcttatctgcataaagctgagtcctaaaaggtttcaaaacagcggacatcagtgatagtgcagaaagtgaagttcacccatggaatacaagttctccaaaaggaaggtctgttcattaaatttgataaagtaatattgaatataaaataaataatgaagagttatgttttcaagcatctgagtacttctyatgtttggagatgaagtttacctgagagctagtgaatacaggttttttggcaagtcttctgtcatcacccttgtcaaatgcagctgtaagaaagaaaagccctttactgaccatttagcagaaaagaaagacagaacaattcagccttctcttgtttgaaatcagaaagcaattcatctttattttatgaaggctaattttggtgacatgggaaatgttaaatgggaaaatatggttttctgtttggaacgagaaatgttatatctgtaatgtcacacggccaaaagcaagttgtttaac

SEQ ID NO: 4228 - DNA, 600 bp, Chicken  19866894101603_1
gcagagatctccagcgtattggaatcaccctggttggtcaccagaaaaagattctaaacagcatccagctcatgaaagttcatttgaaccagcttgaaccagttgaagtgtgatgctttaagtctctatttcaccagactcaaattctgaaagagtcctgaggggattcagaggggttgtcactgtatgaaaaggaaatggcaagatgctccttgaagacttactgcacctagagagtagacattacacattccattccaccagcaaaaagagaatcttgccatcatttaaaagcagagytaaatagctggtggttaaatatgactggcatcatacactaggagtaggtcagggagggaaagttatagtaatgcagagtggagctggtataatagtttggacagaccacaagcacctgctagctcttctycactaaataaaaatcagacaattctccagtgccatcagcaggctttatctgtgactgggaacaaagaaatcacaatttttccaagagagtatcagcacattgtgagagattatcactcagttggaaatggacatcacttgctatgccagatttgtgagaaactggagttc

SEQ ID NO: 4229 - DNA, 575 bp, Chicken  19866894101603_2
tcaccagactcaaattctgaaagagtcctgaggggattcagaggggttgtcactgtatgaaaaggaaatggcaagatgctccttgaagacttactgcacctagagagtagacattacacattccattccaccagcaaaaagagaatcttgccatcatttaaaagcagagytaaatagctggtggttaaatatgactggcatcatacactaggagtaggtcagggagggaaagttatagtaatgcagagtggagctggtataatagtttggacagaccacaagcacctgctagctcttctycactaaataaaaatcagacaattctccagtgccatcagcaggctttatctgtgactgggaacaaagaaatcacaatttttccaagagagtatcagcacattgtgagagattatcactcagttggaaatggacatcacttgctatgccagatttgtgagaaactggagttccactgagtgcaccatatgtggtaaacaataagatacatcacctcgtaatttttacagaggttgagagtaaagggtttagaattctgtgctatatcatatgcagtt

SEQ ID NO: 4230 - DNA, 600 bp, Chicken  19866894101604_1
agcagtgtgtccgtgggtgccagagaagacaaataattgtgtataggctttattgctgacttttttgcaagccttagttacaggcagctataataggttatttgtagctgtgttagagaagtatattgacttttttttccccaaaatcttttccaggtaagagaagatacaacattaagctgtggaagacattcacagattgttttaactgtttaccaattgcagcaattgtggatgagaagatattctgctgtcacggaggtaagttcttcagttgatatgttaagaagatgtaatacyctgtagtacttgaatattggcaatttcatattcatgatgtgtgctcctctgttgctggaaaacattattttgtgttgttttttttgtcttggacctcattactgaggctttgaaacttcggggatttgtctctgcctggctgtgtgttgagagtttgattagtggtagcgttgtaaatagctgagctggtagttctgccttctttatttttagtcaggggatgtctctggtactgactcctttggaataaagagtctctattggctttttgacttgcatgacctgaagttgtataagcat

SEQ ID NO: 4231 - DNA, 477 bp, Chicken  19866894101604_2
ctctggtactgactcctttggaataaagagtctctattggctttttgacttgcatgacctgaagttgtataagcattctgaaaacacggttttagtgcttcatttacagcttggctccgttatgctatgtgatagttgttaattactttgaaaagctgcacaaagcatttaagctgcaatatgtgtagtatcacctgcaagtaataacagttgctcgagaggaatatcagtgaaaaatgctatgagatctgatctcatattctgtgttattcagccctgatctttaaaattaacaagccytgtgatttctggtattaatgcctcttaatagctcttttaacagacacttgcaaattattaaagtaggattgttgtaatcctttacacatggaagtggctttgcttatcttgctcccagtatattttacagtgtcttctgttagaagagcttttaaaaaaaaatgttggattgaaatg

SEQ ID NO: 4232 - DNA, 599 bp, Chicken  19866894101610_1
  misc_feature (1)..(22): n is any nucleotide
nnnnnnnnnnnnnnnnnnnnnncgttcttactgcaacgggaacaaggaacagcccatcctccatcacatcctcccagctctgctaagcccagcactgaagggcagcaccgctctgcttaaccctattttggcaactttcctgtctccccatggccaggagctgggagggaacctcagccccatcccccagggctgatccacatggggcagagcacagccctccagcacagagcgcagccaccatacatcagacagcgctggagcctcatctgcctgtgtgcccctgcatggagatgcccrtggtgggggtgaagcaaggacatggggagaygagcagctgggctgggcagtgaggacaggccctgtgcagggccctgccggcagcacccaccagcagtgggagtgcggttctggtgctctcagctcmcaggacagagccctcagtgctgagttcacagggatgcagagggttaagggccctgctgagctctctggagacagcgaggacaagatagctagtaatgctactaatgaatttcacaaatgtcatttttagactcaacagactcaactattttgagctttgcattggaagcccc

SEQ ID NO: 4233 - DNA, 600 bp, Chicken  19866894101610_2
tgcaacgggaacaaggaacagcccatcctccatcacatcctcccagctctgctaagcccagcactgaagggcagcaccgctctgcttaaccctattttggcaactttcctgtctccccatggccaggagctgggagggaacctcagccccatcccccagggctgatccacatggggcagagcacagccctccagcacagagcgcagccaccatacatcagacagcgctggagcctcatctgcctgtgtgcccctgcatggagatgcccrtggtgggggtgaagcaaggacatggggagaygagcagctgggctgggcagtgaggacaggccctgtgcagggccctgccggcagcacccaccagcagtgggagtgcggttctggtgctctcagctcmcaggacagagccctcagtgctgagttcacagggatgcagagggttaagggccctgctgagctctctggagacagcgaggacaagatagctagtaatgctactaatgaatttcacaaatgtcatttttagactcaacagactcaactattttgagctttgcattggaagccccagggaagagcgcattccacaggcgctcagcac

SEQ ID NO: 4234 - DNA, 600 bp, Chicken  19866894101610_3
ttggcaactttcctgtctccccatggccaggagctgggagggaacctcagccccatcccccagggctgatccacatggggcagagcacagccctccagcacagagcgcagccaccatacatcagacagcgctggagcctcatctgcctgtgtgcccctgcatggagatgcccrtggtgggggtgaagcaaggacatggggagaygagcagctgggctgggcagtgaggacaggccctgtgcagggccctgccggcagcacccaccagcagtgggagtgcggttctggtgctctcagctcmcaggacagagccctcagtgctgagttcacagggatgcagagggttaagggccctgctgagctctctggagacagcgaggacaagatagctagtaatgctactaatgaatttcacaaatgtcatttttagactcaacagactcaactattttgagctttgcattggaagccccagggaagagcgcattccacaggcgctcagcacgcagacccacgcctgtcacagccccgtgtgcagcgctggctgcagagcaactgcagttcttcttgaaggctgacggtccccaaccccccccaccaa

SEQ ID NO: 4235 - DNA, 599 bp, Chicken  19866894101619_1
  misc_feature (1)..(116): n is any nucleotide
nnnnnnnnnnnnnnnnnnnnnnnnnnnnnnnnnnnnnnnnnnnnnnnnnnnnnnnnnnnnnnnnnnnnnnnnnnnnnnnnnnnnnnnnnnnnnnnnnnnnnnnnnnnnnnnnnnnncatactatactttgggcaaaaatttcagcatatgcatctagttctctcttcatatgatcctgagttccttatatgagccaccaaaccaattacttgcctaaccccgaaggttaaccagttccagaaggaagacttcagaatcttgagtcatagaagtaattaggaagcataattcattgtctcyttttcatcattcattcatcctttagatggggccactctaccactgctagtggtagaggrttattggaaatttaagttaacattcgtacaatgtttggaatgtataataaattgatttgacaagctttgtttaggcagcagatgaaatgtgcagatacattcattttaagttgccctactgcattactaaagtgtaacatttcatatgctgacatttatataggaaaggaaacatgtatatggaagtaatagagctgccttatcttgtggaaacctatttattcacctcttgcaagggaa

SEQ ID NO: 4236 - DNA, 599 bp, Chicken  19866894101619_2
  misc_feature (1)..(57): n is any nucleotide
nnnnnnnnnnnnnnnnnnnnnnnnnnnnnnnnnnnnnnnnnnnnnnnnnnnnnnnnncatactatactttgggcaaaaatttcagcatatgcatctagttctctcttcatatgatcctgagttccttatatgagccaccaaaccaattacttgcctaaccccgaaggttaaccagttccagaaggaagacttcagaatcttgagtcatagaagtaattaggaagcataattcattgtctcyttttcatcattcattcatcctttagatggggccactctaccactgctagtggtagaggrttattggaaatttaagttaacattcgtacaatgtttggaatgtataataaattgatttgacaagctttgtttaggcagcagatgaaatgtgcagatacattcattttaagttgccctactgcattactaaagtgtaacatttcatatgctgacatttatataggaaaggaaacatgtatatggaagtaatagagctgccttatcttgtggaaacctatttattcacctcttgcaagggaaagaagtagaagacagaagggtgtttgggccgaggaaacagttgtcagccaattctggaa

SEQ ID NO: 4237 - DNA, 565 bp, Chicken  19866894101621_1
gcttccctagcccccttctccggggaaatcgcctccattgcaaacagcgcttggtccccagcctgccttttcccctcctcttctctaccttccttctccaggtcctcgtacgtgctctgctgcctggtctcgatgtacttggccacgcagtaaatgactgaccccaaggtgttgaccaccacaccggctatgaacagcttggtgggctccacatcattgaacgccaccatgcccaccgtgatggttgctatgcttttcaccacccccacaaagctggtggtcacagctgagttaatgtargtgcagtgaagggtggtaaagttcatagcgcagctgatcaggacacaggcgatgaagatgcataccatagcagggtccttccagcccgggaacgaccagacgttgatggagtccatgctggcaaaggagcagatgatgagaaaaggggtggctgaaacagcaatggcatactgagctgtcaggggtccgtattcactgtcaacgctggtcttctgaatgagcaccaggtatgcggcatggatcagcacagccagcacgccggtca

SEQ ID NO: 4238 - DNA, 600 bp, Chicken  19866894101627_1
tttgtacattttcttatagttctatgtccttcttgtatcatctcatccacaactgcacacagtgctcgagatgaggccataccagtaaagagtaagatgggacaatcccttccctcggccagcagcagtgctgggcctcatacaccctttgaaatggttggccttcttggctgccagagcacactgctgactcattttcaacttgacatcagcctgaatgcccagatccctttcccatggggctgctctccagcctctcatcactcctgtccacagtgctgaagttttttgaagttcacrtggctggtaattgccaagccctctagtttttaaagatgtttctgcaaggcctctgcccttgagggagtcatcagctcctcccaatttagtgatgtctgtagagcaatgattgtgttgtctttcaggtgtttttcaataacgcagaggccttctggattcaaagacatcaaaatactgcttttagaatccttactatcatactgttgttttttgggatagaggcctgactaattgcagagcaattttctgtrtgttctcttttgaagtatgtgaaagagaattttctagratatgatttcc

SEQ ID NO: 4239 - DNA, 600 bp, Chicken  19866894101627_2
agcctctcatcactcctgtccacagtgctgaagttttttgaagttcacrtggctggtaattgccaagccctctagtttttaaagatgtttctgcaaggcctctgcccttgagggagtcatcagctcctcccaatttagtgatgtctgtagagcaatgattgtgttgtctttcaggtgtttttcaataacgcagaggccttctggattcaaagacatcaaaatactgcttttagaatccttactatcatactgttgttttttgggatagaggcctgactaattgcagagcaattttctgtrtgttctcttttgaagtatgtgaaagagaattttctagratatgatttccaaatgaggctaaccacattacatttcacttctgagttgatactcagaagagcctgtttaactttacaataaaaaaaaatctaggttcttttagctgaatttaatttttttaagtgtggaccaagtctcttgccttaaaggtcattcaattagatgtagattctttctgaggtctgctcttattttgagtataaccaatttcaaaacaatattgcattcacaacagagggttttagaatgatacaaaaaata

SEQ ID NO: 4240 - DNA, 600 bp, Chicken  19866894101627_3
tgaagttcacrtggctggtaattgccaagccctctagtttttaaagatgtttctgcaaggcctctgcccttgagggagtcatcagctcctcccaatttagtgatgtctgtagagcaatgattgtgttgtctttcaggtgtttttcaataacgcagaggccttctggattcaaagacatcaaaatactgcttttagaatccttactatcatactgttgttttttgggatagaggcctgactaattgcagagcaattttctgtrtgttctcttttgaagtatgtgaaagagaattttctagratatgatttccaaatgaggctaaccacattacatttcacttctgagttgatactcagaagagcctgtttaactttacaataaaaaaaaatctaggttcttttagctgaatttaatttttttaagtgtggaccaagtctcttgccttaaaggtcattcaattagatgtagattctttctgaggtctgctcttattttgagtataaccaatttcaaaacaatattgcattcacaacagagggttttagaatgatacaaaaaatacatttttccttattacattcttgatttttcaacggagc

SEQ ID NO: 4241 - DNA, 599 bp, Chicken  19866894101632_1
  misc_feature (1)..(44): n is any nucleotide
nnnnnnnnnnnnnnnnnnnnnnnnnnnnnnnnnnnnnnnnnnnntatcttggcacttcaatagtcagcgtatgagaatgctagagcagctgcttaggcctgggaaaagcaatgccaaaacttgcacataccttaggcaagtttgtgccttagggcagaagactattacatggaggaaattttgtttccagatattttgcactgaaaatgaatgaacaactttccctaaaatagcatagcacagaatctatgtgaaattgcatcttttgaaattacctaaacttgcatgtgagtaaatacrgtctgtttggatcgaggggtgtctttctaaacttccttaggaaatatgctctgaaataagtgtgtctatatcagcagctagtatrgtaaagcagaaatgttgaattgtgaagttaacttascaaaaattgcacctctgaatatttggtgagagttcagctcttctaagaagtactcagacatcaccaggtctaagagctcacatactgtatcttggtacatggaaaaagtagcttgcaagaaaggtgaagaatgcttcacttggtttgatttctaagggacagacactcagttatttgt

SEQ ID NO: 4242 - DNA, 523 bp, Chicken  19866894101632_10
agatggaatttcacagctgtgaataaatagcaatatttgctttcacttgcaatttgatatcttcatctgactttttttagcagcaggatgaatatcagaaggcagttttatttctgaaagcgtttctggaaaaagtgcaatttcctgtttaaatcctgatcatttcaagtatgaagaatatctgtccacttcagttttattaatgctttctactgccagtcctgcagagccagtagaagaatggattctttccggcagtytactcttgtaacttgagttatgctttgtttcttgcttctsrctccaccctttgaactgyrggatttgtacaggtgaaaatgtgcaccacaaaaggtttgtcagccaccgcgccactgagatatgctcgagtggagaagatactcctggatttaagacaaggttttggcaagctgcaaatggaaaagaaagaagcgtcagatgacagaggagtaagctagagtttctggtcttcaggtaacctcatctagcataggcagcttgg

SEQ ID NO: 4243 - DNA, 522 bp, Chicken  19866894101632_11
gatggaatttcacagctgtgaataaatagcaatatttgctttcacttgcaatttgatatcttcatctgactttttttagcagcaggatgaatatcagaaggcagttttatttctgaaagcgtttctggaaaaagtgcaatttcctgtttaaatcctgatcatttcaagtatgaagaatatctgtccacttcagttttattaatgctttctactgccagtcctgcagagccagtagaagaatggattctttccggcagtytactcttgtaacttgagttatgctttgtttcttgcttctsrctccaccctttgaactgyrggatttgtacaggtgaaaatgtgcaccacaaaaggtttgtcagccaccgcgccactgagatatgctcgagtggagaagatactcctggatttaagacaaggttttggcaagctgcaaatggaaaagaaagaagcgtcagatgacagaggagtaagctagagtttctggtcttcaggtaacctcatctagcataggcagcttgg

SEQ ID NO: 4244 - DNA, 504 bp, Chicken  19866894101632_12
tgaataaatagcaatatttgctttcacttgcaatttgatatcttcatctgactttttttagcagcaggatgaatatcagaaggcagttttatttctgaaagcgtttctggaaaaagtgcaatttcctgtttaaatcctgatcatttcaagtatgaagaatatctgtccacttcagttttattaatgctttctactgccagtcctgcagagccagtagaagaatggattctttccggcagtytactcttgtaacttgagttatgctttgtttcttgcttctsrctccaccctttgaactgyrggatttgtacaggtgaaaatgtgcaccacaaaaggtttgtcagccaccgcgccactgagatatgctcgagtggagaagatactcctggatttaagacaaggttttggcaagctgcaaatggaaaagaaagaagcgtcagatgacagaggagtaagctagagtttctggtcttcaggtaacctcatctagcataggcagcttgg

SEQ ID NO: 4245 - DNA, 503 bp, Chicken  19866894101632_13
gaataaatagcaatatttgctttcacttgcaatttgatatcttcatctgactttttttagcagcaggatgaatatcagaaggcagttttatttctgaaagcgtttctggaaaaagtgcaatttcctgtttaaatcctgatcatttcaagtatgaagaatatctgtccacttcagttttattaatgctttctactgccagtcctgcagagccagtagaagaatggattctttccggcagtytactcttgtaacttgagttatgctttgtttcttgcttctsrctccaccctttgaactgyrggatttgtacaggtgaaaatgtgcaccacaaaaggtttgtcagccaccgcgccactgagatatgctcgagtggagaagatactcctggatttaagacaaggttttggcaagctgcaaatggaaaagaaagaagcgtcagatgacagaggagtaagctagagtttctggtcttcaggtaacctcatctagcataggcagcttgg

SEQ ID NO: 4246 - DNA, 600 bp, Chicken  19866894101632_2
cagctgcttaggcctgggaaaagcaatgccaaaacttgcacataccttaggcaagtttgtgccttagggcagaagactattacatggaggaaattttgtttccagatattttgcactgaaaatgaatgaacaactttccctaaaatagcatagcacagaatctatgtgaaattgcatcttttgaaattacctaaacttgcatgtgagtaaatacrgtctgtttggatcgaggggtgtctttctaaacttccttaggaaatatgctctgaaataagtgtgtctatatcagcagctagtatrgtaaagcagaaatgttgaattgtgaagttaacttascaaaaattgcacctctgaatatttggtgagagttcagctcttctaagaagtactcagacatcaccaggtctaagagctcacatactgtatcttggtacatggaaaaagtagcttgcaagaaaggtgaagaatgcttcacttggtttgatttctaagggacagacactcagttatttgttaagaaccacgttgaaacatctgtttgaaagggttttactggaatgctcacattttaaatggtaaaaattgtgttaaagggraaga

SEQ ID NO: 4247 - DNA, 600 bp, Chicken  19866894101632_3
tgcacataccttaggcaagtttgtgccttagggcagaagactattacatggaggaaattttgtttccagatattttgcactgaaaatgaatgaacaactttccctaaaatagcatagcacagaatctatgtgaaattgcatcttttgaaattacctaaacttgcatgtgagtaaatacrgtctgtttggatcgaggggtgtctttctaaacttccttaggaaatatgctctgaaataagtgtgtctatatcagcagctagtatrgtaaagcagaaatgttgaattgtgaagttaacttascaaaaattgcacctctgaatatttggtgagagttcagctcttctaagaagtactcagacatcaccaggtctaagagctcacatactgtatcttggtacatggaaaaagtagcttgcaagaaaggtgaagaatgcttcacttggtttgatttctaagggacagacactcagttatttgttaagaaccacgttgaaacatctgtttgaaagggttttactggaatgctcacattttaaatggtaaaaattgtgttaaagggraagatgtctaaaagcagttttctcagatactgtattgtat

SEQ ID NO: 4248 - DNA, 600 bp, Chicken  19866894101632_4
tatrgtaaagcagaaatgttgaattgtgaagttaacttascaaaaattgcacctctgaatatttggtgagagttcagctcttctaagaagtactcagacatcaccaggtctaagagctcacatactgtatcttggtacatggaaaaagtagcttgcaagaaaggtgaagaatgcttcacttggtttgatttctaagggacagacactcagttatttgttaagaaccacgttgaaacatctgtttgaaagggttttactggaatgctcacattttaaatggtaaaaattgtgttaaagggraagatgtctaaaagcagttttctcagatactgtattgtattacgcttgccttgactgaaacttgagcaagtgatgtaattaaactgcttttacaaacttcactagtgctaaataactcccagttaaaataatgtgaacctgcaaaatcttggcacatatycgtaccattgttacttttctttccagaggctacagccattttaactataggatcatgcaggcttagattatacatattgtggaatcatgtagatayggtggtgtttgaggtttccttcgattacaattttgagtatattt

SEQ ID NO: 4249 - DNA, 600 bp, Chicken  19866894101632_5
aaggtgaagaatgcttcacttggtttgatttctaagggacagacactcagttatttgttaagaaccacgttgaaacatctgtttgaaagggttttactggaatgctcacattttaaatggtaaaaattgtgttaaagggraagatgtctaaaagcagttttctcagatactgtattgtattacgcttgccttgactgaaacttgagcaagtgatgtaattaaactgcttttacaaacttcactagtgctaaataactcccagttaaaataatgtgaacctgcaaaatcttggcacatatycgtaccattgttacttttctttccagaggctacagccattttaactataggatcatgcaggcttagattatacatattgtggaatcatgtagatayggtggtgtttgaggtttccttcgattacaattttgagtatattttactttattttacatactgcaagtgtagactgttctgttgacttgttcttctraattattcaggaatctgaagctttgttcctcaaggcaattaaagccaatccaaatgctgccagttatcatggtaatttaggtaagagattttctaactcttctcagc

SEQ ID NO: 4250 - DNA, 600 bp, Chicken  19866894101632_6
ctggaatgctcacattttaaatggtaaaaattgtgttaaagggraagatgtctaaaagcagttttctcagatactgtattgtattacgcttgccttgactgaaacttgagcaagtgatgtaattaaactgcttttacaaacttcactagtgctaaataactcccagttaaaataatgtgaacctgcaaaatcttggcacatatycgtaccattgttacttttctttccagaggctacagccattttaactataggatcatgcaggcttagattatacatattgtggaatcatgtagatayggtggtgtttgaggtttccttcgattacaattttgagtatattttactttattttacatactgcaagtgtagactgttctgttgacttgttcttctraattattcaggaatctgaagctttgttcctcaaggcaattaaagccaatccaaatgctgccagttatcatggtaatttaggtaagagattttctaactcttctcagctgtattgtttgtttgcttcatattcatgggtggtttaaaagaaaaagcaatcttttgagccttcttcctgctgagcagatgctatttgacttcctg

SEQ ID NO: 4251 - DNA, 600 bp, Chicken  19866894101632_7
actgaaacttgagcaagtgatgtaattaaactgcttttacaaacttcactagtgctaaataactcccagttaaaataatgtgaacctgcaaaatcttggcacatatycgtaccattgttacttttctttccagaggctacagccattttaactataggatcatgcaggcttagattatacatattgtggaatcatgtagatayggtggtgtttgaggtttccttcgattacaattttgagtatattttactttattttacatactgcaagtgtagactgttctgttgacttgttcttctraattattcaggaatctgaagctttgttcctcaaggcaattaaagccaatccaaatgctgccagttatcatggtaatttaggtaagagattttctaactcttctcagctgtattgtttgtttgcttcatattcatgggtggtttaaaagaaaaagcaatcttttgagccttcttcctgctgagcagatgctatttgacttcctggtaaaactgccagccggtgaagaacagggcactaacccagagaagctgtcacatgatatgacagatcaagagggctgcacaatccagcccagaggta

SEQ ID NO: 4252 - DNA, 600 bp, Chicken  19866894101632_8
tctgaagcttgatcctatggcacctgggaccaaggaaaactacaatctcttaagacgaaaattggagcaattgcaaaagaaaggcggtgcctgatatttcttttcaggttgtccatgcatgccctttactatcagtgttacatggttacttttgaccatgtaaaggattcagtcattgtttctcaaaaagaacaacaccagcaatgcacacttggatgtccaattatgccctcctgcagattctaacatttcagctggagtttggagatcttttttatttttactcttgaactgcatttsaagtcccttagaacacttttgtaggtattcaaaggcaacgcagatggaatttcacagctgtgaataaatagcaatatttgctttcacttgcaatttgatatcttcatctgactttttttagcagcaggatgaatatcagaaggcagttttatttctgaaagcgtttctggaaaaagtgcaatttcctgtttaaatcctgatcatttcaagtatgaagaatatctgtccacttcagttttattaatgctttctactgccagtcctgcagagccagtagaagaatggattctttccggcagt

SEQ ID NO: 4253 - DNA, 563 bp, Chicken  19866894101632_9
agtcccttagaacacttttgtaggtattcaaaggcaacgcagatggaatttcacagctgtgaataaatagcaatatttgctttcacttgcaatttgatatcttcatctgactttttttagcagcaggatgaatatcagaaggcagttttatttctgaaagcgtttctggaaaaagtgcaatttcctgtttaaatcctgatcatttcaagtatgaagaatatctgtccacttcagttttattaatgctttctactgccagtcctgcagagccagtagaagaatggattctttccggcagtytactcttgtaacttgagttatgctttgtttcttgcttctsrctccaccctttgaactgyrggatttgtacaggtgaaaatgtgcaccacaaaaggtttgtcagccaccgcgccactgagatatgctcgagtggagaagatactcctggatttaagacaaggttttggcaagctgcaaatggaaaagaaagaagcgtcagatgacagaggagtaagctagagtttctggtcttcaggtaacctcatctagcataggcagcttgg

SEQ ID NO: 4254 - DNA, 599 bp, Chicken  19866894101633_1
  misc_feature (1)..(18): n is any nucleotide
nnnnnnnnnnnnnnnnnnattgtagccagggtttttaatggataataagctttctgagagtacactaacccacgtaggtcacgaatgaatttgaacatgactggaccgagtacttagccctgggatacagtgctggtaactggcctccaactagacttcgtaccaccgatcaccaccctctgggcccaaccattcagccagttttcaatccacctcaccatattcatacttcatcagcttccctgtgagtgttttatgggagatggtgatgaaagacttactgaagtctaggcagacaayatctgttgctygctcctcattggcaaagctagtcacctcatagtaggttatcaggttggttttgaaagtgatgctgctatagaggttaattattactgagatctcaagggctggtatattttgcttttaatacatgagtgcatgttcttgtttttcttcaggaattttgtgaatacttttattcagtttaagaagcctatcattgtagcagtaaatggcccagccattggacttggagcatctatattgcctctgtgtgacgtggtttgggctaatgagaaggcttggtttcagacacc

SEQ ID NO: 4255 - DNA, 599 bp, Chicken  19866894101633_2
  misc_feature (1)..(7): n is any nucleotide
nnnnnnnattgtagccagggtttttaatggataataagctttctgagagtacactaacccacgtaggtcacgaatgaatttgaacatgactggaccgagtacttagccctgggatacagtgctggtaactggcctccaactagacttcgtaccaccgatcaccaccctctgggcccaaccattcagccagttttcaatccacctcaccatattcatacttcatcagcttccctgtgagtgttttatgggagatggtgatgaaagacttactgaagtctaggcagacaayatctgttgctygctcctcattggcaaagctagtcacctcatagtaggttatcaggttggttttgaaagtgatgctgctatagaggttaattattactgagatctcaagggctggtatattttgcttttaatacatgagtgcatgttcttgtttttcttcaggaattttgtgaatacttttattcagtttaagaagcctatcattgtagcagtaaatggcccagccattggacttggagcatctatattgcctctgtgtgacgtggtttgggctaatgagaaggcttggtttcagacaccatacactactt

SEQ ID NO: 4256 - DNA, 599 bp, Chicken  19866894101641_1
  misc_feature (1)..(106): n is any nucleotide
nnnnnnnnnnnnnnnnnnnnnnnnnnnnnnnnnnnnnnnnnnnnnnnnnnnnnnnnnnnnnnnnnnnnnnnnnnnnnnnnnnnnnnnnnnnnnnnnnnnnnnnnnnttccagcagttcctgaaagtagactgagttgacataagcattcatcccaccatcaggtgcctgtaacttctccctgtagtgaaagtgagaaactgcagcatagtagttctgccatgcttgatagtaagatttccagtagtcttcgtaactccacgcctcatgaggaaagccagtaacaccatcatcccaagagscacaggagcagtcatctccagttttccttggtgcaggattagggtactgatgggaatgttttttcttttctttggcattttgtttcagagctttctttttcacctgattttgctttgggacttgtgatagctccttcagcttccctggtgtgggacagaagcctgtaagaccctgacaggcagtggggacagcattttttgcctgcctgtctgaaaatgcttcaaagcaagagttattttcactaccgtgagaggaagcccttgaaatgtatgaagcatcactgtcatcagacagaaca

SEQ ID NO: 4257 - DNA, 600 bp, Chicken  19866894101641_2
tctgaaaatgcttcaaagcaagagttattttcactaccgtgagaggaagcccttgaaatgtatgaagcatcactgtcatcagacagaacatcatttgctactgtgtctctattacattccacctctttccactctataccaccatttctggggagttcacgttgatctcctgggcctgaaaagcttcttaaaatttcaacatctctctccaacccttctttaataaagtactcataatcttcaacaaactctgagaagttccagggactgttctgttggtttttgaaagatgataagcayggaattctgggcagatttctttttaaggcttcctcatctggaacctctgtgttactctgcccagccattctggagacagtttctacttgattcttctgctttgtattgcagctggaggttttggagtttctgctgcttttttccaccttagcagaatttgtgtgctttttcaccagcttttgttccaaagcattttttggcttctctacagaagaattaccaactggaaggttagaatgaggctgaggtacctctgcagaattattttggacaggctgaagtactggttcttcggtttaa

SEQ ID NO: 4258 - DNA, 599 bp, Chicken  19866894101644_1
  misc_feature (1)..(147): n is any nucleotide
nnnnnnnnnnnnnnnnnnnnnnnnnnnnnnnnnnnnnnnnnnnnnnnnnnnnnnnnnnnnnnnnnnnnnnnnnnnnnnnnnnnnnnnnnnnnnnnnnnnnnnnnnnnnnnnnnnnnnnnnnnnnnnnnnnnnnnnnnnnnnnnnnnnaccggccttgagtacctccagggatggaacatccacaacctctctgggcaaaatattccgacacttttccaccttttcaatgaaaattttcccctgatatttagtgaaaatctcccgtcctttggtttaaaaccactgccccttaacctatayggaatgagacttcacttctcccttaaaccaaaacgttaatgtaagcatagcctcattagctgtggatatttatatacctgtctccagatccactttatagtgtgtcattggaattttgtgttgtgcccatctcaacatactaatgttgtagctctgcaggacatgttaagctaattctactgcctaataagaagctaagcattttagtcatctatttttaaccccctgttgttgacaggaaaaataaagtcaaagatggcagttaatttccccaaggtatggaatgcaagcatattgca

SEQ ID NO: 4259 - DNA, 600 bp, Chicken  19866894101646_1
cctggggtgtcccatgctgctcccagccagcgccccgcagcccctctgtgatgcttggtgacaaacatgccgtaaaatagctgaattgtaccattcaccagtggtgtgctgggccaagggagagctgccggtggtcttttctttttgccagttgtttgaaagtccaatgaacttcagtgttctgcagaaacaaaagcacttggatgtgctgtttacagccaattccctcatccttcaacgagtggacaggtttacaagccacttatttaaaaaagaagaggccctcattaatcagcagcrcttttattgtttcttaatcatttgacagcaattcagaaccgtttcttgtattctattatgggcatgtttgcattgctggtgctcattccccatctactatctctgaagatgattttcgtgttgagaaccgctcgtattcttccaaataaaggatggtatttacatggaaaatatccctttcagatgactgctttcaaacagccagtcccttgccctgtttggaatcattaaagttcttgtttgtttgttttattgcaggctcttttagctcaagcctccagaaatatgggtagcagaggc

SEQ ID NO: 4260 - DNA, 600 bp, Chicken  19866894101652_1
ctgtgtggcgaagcagaggtgggccctttcctattgctgtccactaagtagcagctttgtttgcacagtccatttggaagatccaaatttagatggggacaaagtgtgaacttcgtgtccccagggtgctcagtggcagctgggggctgttgggatagcaatgtttggtcctcatgctgagcactgtagatgttactgtgtctttgcaggcagtgtagacgtggatttccctcaggcagttccctgggcggtgaggacataacgcagttcctcctgcaggtggtagataaggaaaccaamtattttcattgtacctgttctgttgttgcttgcagtttgctctagattttatcactttgctacaagatctgcgtaggaaggtggatctaggtaggagtttgtggcaaatatagagtgggtcacagtggagatatgctgagatggttccagaagtcacctttatgaagtgcttgtgctaagcaggcagtccatcctgccygtgcttatgagctggtttgtgtgaggtgtgtgaagctgaatctctactgctcagctgtctcagatgtgagcaatccccactatgtggctgaccgcggcaca

SEQ ID NO: 4261 - DNA, 500 bp, Chicken  19866894101652_2
gtctttgcaggcagtgtagacgtggatttccctcaggcagttccctgggcggtgaggacataacgcagttcctcctgcaggtggtagataaggaaaccaamtattttcattgtacctgttctgttgttgcttgcagtttgctctagattttatcactttgctacaagatctgcgtaggaaggtggatctaggtaggagtttgtggcaaatatagagtgggtcacagtggagatatgctgagatggttccagaagtcacctttatgaagtgcttgtgctaagcaggcagtccatcctgccygtgcttatgagctggtttgtgtgaggtgtgtgaagctgaatctctactgctcagctgtctcagatgtgagcaatccccactatgtggctgaccgcggcacagagcagtgtctctgtgctgtctaatcaacaccagtatcttttctaagaacgaagaggcagacccgaggcctgcccaagcattgcttcctggtctttgtg

SEQ ID NO: 4262 - DNA, 600 bp, Chicken  19866894101654_1
gctggtcctgagccagcaatctctgcctttcaccagggcaagaaggagctaaaagaaagatttgtttgtaatgaattggcaggcttagtgcctgctttccccagggatggctctgcactgtgactgactcagtaacctcacagtgaggaggcagaggtggaacggatacccccggagcaagcgtgaatcaagctgtgttttagtagttgaaaataatgcacctggcaccacacgtggggcaacactgacacaaggcacttgcatgcagagggctcctaaaaggttcttgtgaagctgttktacctcacagccacatcctcagggtggtgggtttcatagaatcgtaggatggttgggatggaagggacctcaaaagcccacccagctccaacccctgctgcgggctggttgccacccaccagatcatgttgcccagggccccatccagcctrgccttgggcacctccagggatgggatgtccatagcttctctctatttaattattagtatgtcattacatcratgagaagctttcaggcacaatgcatctctastcttcccagagaaaacaggcgttaaaattttagcaggaggattct

SEQ ID NO: 4263 - DNA, 600 bp, Chicken  19866894101654_2
agaggtggaacggatacccccggagcaagcgtgaatcaagctgtgttttagtagttgaaaataatgcacctggcaccacacgtggggcaacactgacacaaggcacttgcatgcagagggctcctaaaaggttcttgtgaagctgttktacctcacagccacatcctcagggtggtgggtttcatagaatcgtaggatggttgggatggaagggacctcaaaagcccacccagctccaacccctgctgcgggctggttgccacccaccagatcatgttgcccagggccccatccagcctrgccttgggcacctccagggatgggatgtccatagcttctctctatttaattattagtatgtcattacatcratgagaagctttcaggcacaatgcatctctastcttcccagagaaaacaggcgttaaaattttagcaggaggattctgaaagcagcagtttgggaaaatctgctcctacaaatcagtttcccgaggccatctgcttgaagatcagactgctggaaagctaccagcagccagatgaacagggagaagaaagraggtcataaagggaggtgtggagagataagcaaggcct

SEQ ID NO: 4264 - DNA, 600 bp, Chicken  19866894101654_3
ggcaccacacgtggggcaacactgacacaaggcacttgcatgcagagggctcctaaaaggttcttgtgaagctgttktacctcacagccacatcctcagggtggtgggtttcatagaatcgtaggatggttgggatggaagggacctcaaaagcccacccagctccaacccctgctgcgggctggttgccacccaccagatcatgttgcccagggccccatccagcctrgccttgggcacctccagggatgggatgtccatagcttctctctatttaattattagtatgtcattacatcratgagaagctttcaggcacaatgcatctctastcttcccagagaaaacaggcgttaaaattttagcaggaggattctgaaagcagcagtttgggaaaatctgctcctacaaatcagtttcccgaggccatctgcttgaagatcagactgctggaaagctaccagcagccagatgaacagggagaagaaagraggtcataaagggaggtgtggagagataagcaaggccttctggatggagtgaggtgatgggctggaattgatggcaggtagaaaagaggtagctgcagagtctggagat

SEQ ID NO: 4265 - DNA, 600 bp, Chicken  19866894101654_4
cacttgcatgcagagggctcctaaaaggttcttgtgaagctgttktacctcacagccacatcctcagggtggtgggtttcatagaatcgtaggatggttgggatggaagggacctcaaaagcccacccagctccaacccctgctgcgggctggttgccacccaccagatcatgttgcccagggccccatccagcctrgccttgggcacctccagggatgggatgtccatagcttctctctatttaattattagtatgtcattacatcratgagaagctttcaggcacaatgcatctctastcttcccagagaaaacaggcgttaaaattttagcaggaggattctgaaagcagcagtttgggaaaatctgctcctacaaatcagtttcccgaggccatctgcttgaagatcagactgctggaaagctaccagcagccagatgaacagggagaagaaagraggtcataaagggaggtgtggagagataagcaaggccttctggatggagtgaggtgatgggctggaattgatggcaggtagaaaagaggtagctgcagagtctggagataaactgtggtctgccgaccgctctgattcaga

SEQ ID NO: 4266 - DNA, 600 bp, Chicken  19866894101654_5
cccaccagatcatgttgcccagggccccatccagcctrgccttgggcacctccagggatgggatgtccatagcttctctctatttaattattagtatgtcattacatcratgagaagctttcaggcacaatgcatctctastcttcccagagaaaacaggcgttaaaattttagcaggaggattctgaaagcagcagtttgggaaaatctgctcctacaaatcagtttcccgaggccatctgcttgaagatcagactgctggaaagctaccagcagccagatgaacagggagaagaaagraggtcataaagggaggtgtggagagataagcaaggccttctggatggagtgaggtgatgggctggaattgatggcaggtagaaaagaggtagctgcagagtctggagataaactgtggtctgccgaccgctctgattcagatgtcctccaaggaatctgaagaggcagatgaggttcaggtagagggctgtggcaactaggaactcaactcttgtgctcctttcttttaagcaaggagcaatggcgtctggagaattagtgcaaagcccacctgtgtgtagcttccaggggatgaaaggt

SEQ ID NO: 4267 - DNA, 483 bp, Chicken  19866894101655_1
taaacacgtaagatacgaattccgttgtgcaacggcgctccccgcgcccaacggaacaagcgagggcttgtcctgtgcccggcccgtccctgccccaaccccgggaaaacggagagcggccccggggcccgacgtgagagcgacggcgggaacgcgtgagctcccccgcgtgctgcggcaacgatggcgctccggcggccgtcagcccgccgcacagctccgggacgggaggcggagactgtcgctgtgcggtattcctcggatgcccctttgtcagggggtcccatagtgaccctccckcccggctcccggcgctgtggggagcagggggtggccttggaagctcggggtgcacccgagccacgtgcaaaggcagctgaagttcctttaaagcgatgcggagttgtgacaccgacaacaccgagcgcagcaaaacatcctgagcgcgcctggtgccaggcagctctgagagttccaaggatg

SEQ ID NO: 4268 - DNA, 600 bp, Chicken  19866894101656_1
ccagtatcccatggcaaaatttaaggagcatcctggtggtcacaggcactggttgaacttcaaacacctacttccttggcatatgtacagatgtctctgaagaggtgcaaaggaaacctcatgacctgtagggatagaactgctaattagagtgaggcttccccaagatttaagcagtgcttgacaaaacatattttgtgacttattcaagaacttagcagtccacatctagcctgttatcatacctactgtataaatgcatgttctggtacatgtttaagtgactgtttcaggataagrgtatgcggtataatagtggcactaataatgttcagtagcttcctagttacagcaaatttttaattgcaatttctataacttattattccagaaactgcataggtaatgttgccattgccttaaagcataatgaacttctacaaggcatgcytcttgtgtaaagtaaaaataataataataataataatttctaacaaaatgaattcatttttctggatgccagtgatccttaagtagttcaaccttctggagagagtttttgatgggctttttgtgatttaggaaattattgtccgagta

SEQ ID NO: 4269 - DNA, 600 bp, Chicken  19866894101656_2
gtgaggcttccccaagatttaagcagtgcttgacaaaacatattttgtgacttattcaagaacttagcagtccacatctagcctgttatcatacctactgtataaatgcatgttctggtacatgtttaagtgactgtttcaggataagrgtatgcggtataatagtggcactaataatgttcagtagcttcctagttacagcaaatttttaattgcaatttctataacttattattccagaaactgcataggtaatgttgccattgccttaaagcataatgaacttctacaaggcatgcytcttgtgtaaagtaaaaataataataataataataatttctaacaaaatgaattcatttttctggatgccagtgatccttaagtagttcaaccttctggagagagtttttgatgggctttttgtgatttaggaaattattgtccgagtaaagggcttttctgtttctacttgtactaaatgcacaccttagcacatacaaatgtatgtgaaaatatgttgcagtaaaccaaatatattaacagaagaatggaaaaaatttaggaactccatctgttgaatacattatttcaagttgttta

SEQ ID NO: 4270 - DNA, 600 bp, Chicken  19866894101675_1
gcaggaaatctgtgttatgggatttccagtggtgtagattgcagcaaaagccagtagtgaccacaaatgacctgtagtgtaagaggcctgtagaggagggagcaaggagcttcccaagggcatagatggagggagatctgagttgcactgggtaatgagctagcccctgccatttacagaactgtcatttcctgcctaattactcaaacttcttcagcttgagtacagctctcaatctctaagatcctcaccagtaacattcatctccaggaatcttccctgaactgctgagtgcagaargccaaagcaatttgcttctggccagaagaatactgagagtggaagctaaaatgctggatcctaaacgctggctgggacttgcaggcatcagagtcacctttgcctgcaaggctggcagaatgggagaaaaagtctgttgtcccactgctgctgatccagcaggtccattggaggcaggctgaagaaaagtatttatctctgtataaagcaaagtcaaattccatctccacgcctgacaacttgttactggaaagaaacactggaaagcatttaggatagaccaggaactggcaaaaaggg

SEQ ID NO: 4271 - DNA, 600 bp, Chicken  19866894101681_1
agtggccaggtgtagggcaacagggacacctgcagagggcctgcagatggtattttcatccagttgtaggcctcaatttcatttctctatgccctcagagatgctgcatcccattggcctcctgactggaaggaggtggtggataagagctttcctccttaggaagctctgcagcccatcagcgagacgaggagctcaggtagggaaggtagagaggcaaagtggaggtagactgacaggaaggggaggccaacagcactcctgagactgcaagcctgcaggagcagctacttgtatcayagtaacaaacagacttaagatgccctgccctccacctcagctttccatccttctctgagcttgcacagggagctttgcrcggctcctggcctgcttcaccagcagcctacacgtggccaccatcaggatgtctgtggagaatttaagaggctgcttttactgagacaaatggtacttctacacatccagaggctgaggcagggttattttgctgaaagcttgtccygcaaatcataaagcattgctgtaagtggaggcctacgagaggagctcctgcagactgttgaggtggcagactga

SEQ ID NO: 4272 - DNA, 600 bp, Chicken  19866894101681_2
catttctctatgccctcagagatgctgcatcccattggcctcctgactggaaggaggtggtggataagagctttcctccttaggaagctctgcagcccatcagcgagacgaggagctcaggtagggaaggtagagaggcaaagtggaggtagactgacaggaaggggaggccaacagcactcctgagactgcaagcctgcaggagcagctacttgtatcayagtaacaaacagacttaagatgccctgccctccacctcagctttccatccttctctgagcttgcacagggagctttgcrcggctcctggcctgcttcaccagcagcctacacgtggccaccatcaggatgtctgtggagaatttaagaggctgcttttactgagacaaatggtacttctacacatccagaggctgaggcagggttattttgctgaaagcttgtccygcaaatcataaagcattgctgtaagtggaggcctacgagaggagctcctgcagactgttgaggtggcagactgaggccctgttttaccttttgcctctctacactacctgaagtggttttgctagctgcatcctatctcacaagaaccaaaag

SEQ ID NO: 4273 - DNA, 600 bp, Chicken  19866894101681_3
ggtagactgacaggaaggggaggccaacagcactcctgagactgcaagcctgcaggagcagctacttgtatcayagtaacaaacagacttaagatgccctgccctccacctcagctttccatccttctctgagcttgcacagggagctttgcrcggctcctggcctgcttcaccagcagcctacacgtggccaccatcaggatgtctgtggagaatttaagaggctgcttttactgagacaaatggtacttctacacatccagaggctgaggcagggttattttgctgaaagcttgtccygcaaatcataaagcattgctgtaagtggaggcctacgagaggagctcctgcagactgttgaggtggcagactgaggccctgttttaccttttgcctctctacactacctgaagtggttttgctagctgcatcctatctcacaagaaccaaaaggagtgactttgccttgttttcctcctgcctgatctgcacaagcccactttgcacacatggcctgcccacctagcagaccgactgtcagcattcttgcggccgcctcgcctccattttccaatcctcccttctgtgctctctgctcac

SEQ ID NO: 4274 - DNA, 600 bp, Chicken  19866894101686_1
aagaaaaaataacaataaaaaaagaaacccaattatgtccaaacaagagcatatttttctttggagttcaaacaccacctttaaccatctccccacccaggatctgattacttttaatgggactctgcttgcgatttaagttgttgttcatttgtacagtaattaagctgagttgagttggtgtctattacatcatggtttatattatgaattcacactgcaattatgtgcgtgtgtgcaaggataagtgagcagaaaaaggaccttctagttaagctcacaaccaataactctggcaarctgcattcagctcaggcctgccacayrcttctcccacctcagccatgtcacctccagctgtctaggtgacacacataggagtgatgacactgccaccagacatccttgcaacacacacagaggagtgaaatgcccttgaggtagtaggatcctgagaacaggctgtgaggctgatccttcaccccctcaggctaagtggctgctgacacctgggcactactagtcatcaagcagcaaagcacccagcccagcaggactgtgttttaaaaagggtctccattgccatagggatcagttagg

SEQ ID NO: 4275 - DNA, 600 bp, Chicken  19866894101686_2
acccaattatgtccaaacaagagcatatttttctttggagttcaaacaccacctttaaccatctccccacccaggatctgattacttttaatgggactctgcttgcgatttaagttgttgttcatttgtacagtaattaagctgagttgagttggtgtctattacatcatggtttatattatgaattcacactgcaattatgtgcgtgtgtgcaaggataagtgagcagaaaaaggaccttctagttaagctcacaaccaataactctggcaarctgcattcagctcaggcctgccacayrcttctcccacctcagccatgtcacctccagctgtctaggtgacacacataggagtgatgacactgccaccagacatccttgcaacacacacagaggagtgaaatgcccttgaggtagtaggatcctgagaacaggctgtgaggctgatccttcaccccctcaggctaagtggctgctgacacctgggcactactagtcatcaagcagcaaagcacccagcccagcaggactgtgttttaaaaagggtctccattgccatagggatcagttaggagtaataacaagaagcatccatccaa

SEQ ID NO: 4276 - DNA, 600 bp, Chicken  19866894101686_3
cccaattatgtccaaacaagagcatatttttctttggagttcaaacaccacctttaaccatctccccacccaggatctgattacttttaatgggactctgcttgcgatttaagttgttgttcatttgtacagtaattaagctgagttgagttggtgtctattacatcatggtttatattatgaattcacactgcaattatgtgcgtgtgtgcaaggataagtgagcagaaaaaggaccttctagttaagctcacaaccaataactctggcaarctgcattcagctcaggcctgccacayrcttctcccacctcagccatgtcacctccagctgtctaggtgacacacataggagtgatgacactgccaccagacatccttgcaacacacacagaggagtgaaatgcccttgaggtagtaggatcctgagaacaggctgtgaggctgatccttcaccccctcaggctaagtggctgctgacacctgggcactactagtcatcaagcagcaaagcacccagcccagcaggactgtgttttaaaaagggtctccattgccatagggatcagttaggagtaataacaagaagcatccatccaag

SEQ ID NO: 4277 - DNA, 533 bp, Chicken  19866894101692_1
atagaatattctcacctcaggagatccccagcatatcaggagctgcggctgagtgtggctgcatgccctcaacttggctttctattatagctgagtgtcaaaaaagcctattcaacaatcatatttgcgatcaaaacagaactaaatataacgtattgattgttgtgggaagtgcagattgtctctgataacagaaagggagtgagagaaccattattattctgtgcagtcccacacatcttagaggaggctcttctgtacattctttcttattttgtaaagacaatgtcaggacagatyggagcagtatgatctagataggagacaggacatattagagacagataaactgtcgcacctaggatcatattagaatgtaatcctgctacagaatcacaagttcttatgtgaataaaaagaaaacactcttcaccaaaatatagctgtgagagataaatctttgaacagtggtgtagataattttaccatttgaaggaaaggacagcatgcattatggtacatttactatttga

SEQ ID NO: 4278 - DNA, 600 bp, Chicken  19866894101698_1
agaggtgaagtaagaagacaggtcaaatgtggctcttcctgttgtctattctgaaattatcagagcctcaatagtttgcagttgggtccctccctaaacacttgtttcagaactcattttgctatttacacttgccactgtgcatttgcttatcctcatctgcccccagcacttcttacagatactcaattcagaagaacacaaagtacacagggcaagctgacagctgtaaccagctcaatttgtttctgtttgtgaacacttgttattaggtatctcaatgagcattgataacagttygggttgaatgcagttggagttggcctgccaccttaaacaaaaacctgacaacagaaagtcactgtgtcttctctaaactatgaagagatcttcctctatttatgcagaaaaataactctccttatattgaragtctccaaaggcagaacaggatagagatatctcttaatttcccacctcggtttcaagttttggaaagcaagatcttttctttccatagaaggaactaaattaaacaaattgaaaaaaaaamcacaaaaaamcaggcctttctttcagaggacataaatgaacctgtac

SEQ ID NO: 4279 - DNA, 600 bp, Chicken  19866894101698_2
ttgccactgtgcatttgcttatcctcatctgcccccagcacttcttacagatactcaattcagaagaacacaaagtacacagggcaagctgacagctgtaaccagctcaatttgtttctgtttgtgaacacttgttattaggtatctcaatgagcattgataacagttygggttgaatgcagttggagttggcctgccaccttaaacaaaaacctgacaacagaaagtcactgtgtcttctctaaactatgaagagatcttcctctatttatgcagaaaaataactctccttatattgaragtctccaaaggcagaacaggatagagatatctcttaatttcccacctcggtttcaagttttggaaagcaagatcttttctttccatagaaggaactaaattaaacaaattgaaaaaaaaamcacaaaaaamcaggcctttctttcagaggacataaatgaacctgtacattgatattattcccaccaaatgtagatggctagccaaaaagcttactggaggcaggatgcaattagcctatgctcttaggtaacctgtaacagtgcagatgggcttcttcctcctgccagccagctcccc

SEQ ID NO: 4280 - DNA, 600 bp, Chicken  19866894101698_3
tgtgaacacttgttattaggtatctcaatgagcattgataacagttygggttgaatgcagttggagttggcctgccaccttaaacaaaaacctgacaacagaaagtcactgtgtcttctctaaactatgaagagatcttcctctatttatgcagaaaaataactctccttatattgaragtctccaaaggcagaacaggatagagatatctcttaatttcccacctcggtttcaagttttggaaagcaagatcttttctttccatagaaggaactaaattaaacaaattgaaaaaaaaamcacaaaaaamcaggcctttctttcagaggacataaatgaacctgtacattgatattattcccaccaaatgtagatggctagccaaaaagcttactggaggcaggatgcaattagcctatgctcttaggtaacctgtaacagtgcagatgggcttcttcctcctgccagccagctcccctggctgctggcacacctgcagaccttaccagcctcaagcctattcccagctccatacctgtgcccttggtacttccttcacatgagctcctaaagaatgccctagactccagggggttacat

SEQ ID NO: 4281 - DNA, 600 bp, Chicken  19866894101698_4
tgttattaggtatctcaatgagcattgataacagttygggttgaatgcagttggagttggcctgccaccttaaacaaaaacctgacaacagaaagtcactgtgtcttctctaaactatgaagagatcttcctctatttatgcagaaaaataactctccttatattgaragtctccaaaggcagaacaggatagagatatctcttaatttcccacctcggtttcaagttttggaaagcaagatcttttctttccatagaaggaactaaattaaacaaattgaaaaaaaaamcacaaaaaamcaggcctttctttcagaggacataaatgaacctgtacattgatattattcccaccaaatgtagatggctagccaaaaagcttactggaggcaggatgcaattagcctatgctcttaggtaacctgtaacagtgcagatgggcttcttcctcctgccagccagctcccctggctgctggcacacctgcagaccttaccagcctcaagcctattcccagctccatacctgtgcccttggtacttccttcacatgagctcctaaagaatgccctagactccagggggttacatctatgttata

SEQ ID NO: 4282 - DNA, 600 bp, Chicken  19866894101700_1
gcctagccactctgtagtaaataccagatcactgggtttagtaccagcattcctgtggggagtatgttaaaagacctgcagtgatccctcctttgcctccagcctttagacatgggctgtctcagtgagacactggtctgaaactgggcttctccacacttgtaagtataccactcatgggacaagcatgtcttggtagaaaataaaggccgtgactttattaaaaggacacagataggaatctaatcttccacttttttgctatgtgtcttaaaatgattgtgtgtgcttttaaatctrtgtaagcatactgctgaagttcttgttaaattctattttgctaagtttaaagactaaaactttacaaactgtgtacgcaagtggacttttcgttttgagaatctaggaaatttcaacctattacgttaattcagtatttttttttttcatgttgagttaattgcatgaactgcttagactaaatctaagctatatttagagcaattagtctttcagatctgaacccggtgctcagatccatcttcccacttccacctccacatgaatattgatacttcgtctcctggccttgcctgtggc

SEQ ID NO: 4283 - DNA, 600 bp, Chicken  19866894101703_1
atgtggctgtgcaaaaactggtggcaaatttctctgtcaaatacgtagcttattttagaagactttgtgtttcatttctgagggtttgacaacgctgtaaaatatgaggtagaaatatttgtctgaattatgcagttcttaaatggggactgaggaaaactgtattttaagaaagataccatagctacagcagaccttagtatgtctgtacagaaatgagatgaggaaacatcaataagcaaaagcaagctggctgcagagatcagcctaggatcaaaacacttctgtggacaacactaytatcatcggaagttgcaagaagtcagtgctgcagcttcctgtagacaatgaatggaacaacggatgaaatcaacagaacagctgtttttaaacaagagtcttggcaaaccttccaagcaggaaaaaaagtagtatgaaactgaacacctggttgcaaaaatgcacagaacacygacactgcttaagataagcaagaaacaagcctagaagatcttcttctggaaacgaaacacgaaaagattaacaaactgtggaataactaaatgaaagctccagatccatattccatactacagagag

SEQ ID NO: 4284 - DNA, 600 bp, Chicken  19866894101703_2
agataccatagctacagcagaccttagtatgtctgtacagaaatgagatgaggaaacatcaataagcaaaagcaagctggctgcagagatcagcctaggatcaaaacacttctgtggacaacactaytatcatcggaagttgcaagaagtcagtgctgcagcttcctgtagacaatgaatggaacaacggatgaaatcaacagaacagctgtttttaaacaagagtcttggcaaaccttccaagcaggaaaaaaagtagtatgaaactgaacacctggttgcaaaaatgcacagaacacygacactgcttaagataagcaagaaacaagcctagaagatcttcttctggaaacgaaacacgaaaagattaacaaactgtggaataactaaatgaaagctccagatccatattccatactacagagagaaaaaacatcccaatacttttgcagtgtcagtgggataaatggaaattttgggatggtaaatgccctctaatttcttcaatttaatttgaggaaaatgtgatgtcattatcttatgaaatattttgcaagctcttattgtaagagcacagttaaagcactccacatcactttt

SEQ ID NO: 4285 - DNA, 600 bp, Chicken  19866894101707_1
agctcttcttcatcatacatagctatgcttcatgattcctctgtatttacatttcttattttactccaatgaaaagactattctacttcaggcaccttccaaataatgtcagtattagctttagaaaatcaaaccattttgttaactattctttcttctccctggctcctgcttatttaccaaagcaaaatgaaggtgctgaactgtggttcccaacagctttacttcttggctgctgctcacttaagtcttttgttttcaggtgtgtgtacttaagcaatagtccttttactgctccarccccacagcacacctataacaactgttcactgagttgttcggtatttaggtgataagttgtgaatcttaacttttaaaaytttaagtatttccaaacactttgtattcagaacatcacagctacttttgtttaacaactaggttgggccaagttactttctgtattgctgctctaataaccactagctactcaccyaagaagttggaaaacacctaataaatctcctcctttctggagttactgtaccctaattagttagccagctgtagccaaagctttaaagaatagtcctttacttc

SEQ ID NO: 4286 - DNA, 600 bp, Chicken  19866894101707_2
ttctacttcaggcaccttccaaataatgtcagtattagctttagaaaatcaaaccattttgttaactattctttcttctccctggctcctgcttatttaccaaagcaaaatgaaggtgctgaactgtggttcccaacagctttacttcttggctgctgctcacttaagtcttttgttttcaggtgtgtgtacttaagcaatagtccttttactgctccarccccacagcacacctataacaactgttcactgagttgttcggtatttaggtgataagttgtgaatcttaacttttaaaaytttaagtatttccaaacactttgtattcagaacatcacagctacttttgtttaacaactaggttgggccaagttactttctgtattgctgctctaataaccactagctactcaccyaagaagttggaaaacacctaataaatctcctcctttctggagttactgtaccctaattagttagccagctgtagccaaagctttaaagaatagtcctttacttctcttgtcaccactgtatcagctaaggccagagataggagaaactggatagccagggtttgaatagctgcttacaagctat

SEQ ID NO: 4287 - DNA, 600 bp, Chicken  19866894101707_3
tgctgaactgtggttcccaacagctttacttcttggctgctgctcacttaagtcttttgttttcaggtgtgtgtacttaagcaatagtccttttactgctccarccccacagcacacctataacaactgttcactgagttgttcggtatttaggtgataagttgtgaatcttaacttttaaaaytttaagtatttccaaacactttgtattcagaacatcacagctacttttgtttaacaactaggttgggccaagttactttctgtattgctgctctaataaccactagctactcaccyaagaagttggaaaacacctaataaatctcctcctttctggagttactgtaccctaattagttagccagctgtagccaaagctttaaagaatagtcctttacttctcttgtcaccactgtatcagctaaggccagagataggagaaactggatagccagggtttgaatagctgcttacaagctatttatgtttcttatatggaagggttactgcacctrtggtacacatgaaattctttcctctctaaagagcactgcttctacaggactacagaaccaagtagagcttgaaacactgaag

SEQ ID NO: 4288 - DNA, 520 bp, Chicken  19866894101707_4
tcacagctacttttgtttaacaactaggttgggccaagttactttctgtattgctgctctaataaccactagctactcaccyaagaagttggaaaacacctaataaatctcctcctttctggagttactgtaccctaattagttagccagctgtagccaaagctttaaagaatagtcctttacttctcttgtcaccactgtatcagctaaggccagagataggagaaactggatagccagggtttgaatagctgcttacaagctatttatgtttcttatatggaagggttactgcacctrtggtacacatgaaattctttcctctctaaagagcactgcttctacaggactacagaaccaagtagagcttgaaacactgaagctggattcaagcccttttgtccataaagagttcactttccttctcgtcattcccctatcttgtccataaagtaattggcaaaagatcatgtttgtctcaggatgctgaatttttcagtcattactacatccacatttc

SEQ ID NO: 4289 - DNA, 600 bp, Chicken  19866894101711_1
agttcaacttctcttgttttttttcacaattacattttctgttacagttccttctcagaggtaatgagaggtgcaggaggttgagatggtgggcagataatttgcattcactacttctgacttctcagctggttttctgtgcttctttcctaaagccagtagtctcacactactagtgagaagttatcgctcagacccctacaagagagaagtgctgaggaaagcagcaaatcgctcatgtttgcagagctctgctggtgtgctgctgaagaacctatgtgataaatcttaaagatctcktcaataggaatgctgttctgtgaagatgrgtaaaaagaggggcttagctctcagaagcagtctttgaagtgcatgcacaaaatccatttaatatccccttcctttgatttcttaactttcatctgaacttagtgctgttttattttgctagtgcaactattgacatccagtcctacagtttgctcaccgttttgcatttgtgtggaacaggatacataacctatgcaaatgcatggagccacctactaaaattgtctatttagtattctaggtgagacttaaaggctacctagaaaaaag

SEQ ID NO: 4290 - DNA, 600 bp, Chicken  19866894101711_2
ttacattttctgttacagttccttctcagaggtaatgagaggtgcaggaggttgagatggtgggcagataatttgcattcactacttctgacttctcagctggttttctgtgcttctttcctaaagccagtagtctcacactactagtgagaagttatcgctcagacccctacaagagagaagtgctgaggaaagcagcaaatcgctcatgtttgcagagctctgctggtgtgctgctgaagaacctatgtgataaatcttaaagatctcktcaataggaatgctgttctgtgaagatgrgtaaaaagaggggcttagctctcagaagcagtctttgaagtgcatgcacaaaatccatttaatatccccttcctttgatttcttaactttcatctgaacttagtgctgttttattttgctagtgcaactattgacatccagtcctacagtttgctcaccgttttgcatttgtgtggaacaggatacataacctatgcaaatgcatggagccacctactaaaattgtctatttagtattctaggtgagacttaaaggctacctagaaaaaagtcagatttgtagcatcttcactgtctata

SEQ ID NO: 4291 - DNA, 599 bp, Chicken  19866894101720_1
  misc_feature (1)..(104): n is any nucleotide
nnnnnnnnnnnnnnnnnnnnnnnnnnnnnnnnnnnnnnnnnnnnnnnnnnnnnnnnnnnnnnnnnnnnnnnnnnnnnnnnnnnnnnnnnnnnnnnnnnnnnnnnggattcccagcgtgtcctgatggacaccctggtggatttctcagattcgccccttgtcaaggcagaggggcgaagctcagagaattcctccctgtgccactatgacaaagcaggaaaccgacagggcagtagacggaaggttttggaagcctctttggacgcgagtttcatgaaagaccctgaataatagccaccrgatacactgtgcttttcttctaacttcagcttcagctccattttaatttcccatcggcagcactttcagcctagcagccttaaatacagaagcacgatctgctattccgcttgatcgccgaggttcgcggcatcggagcgttcccagccagaacgtcaccgactgaccgcgaggtacgggcgggcctcggcccgttccttcatccggggaaccgcgagatcacggagcggcccggcagctttcgcgagagcggctgacgcgaagcgggcattgccagggaacggctctgcacccgcggc

SEQ ID NO: 4292 - DNA, 426 bp, Chicken  19866894101723_1
ccggcagctttcgcgagagcggctgacgcgaagcgggcattgccgggaacggctctgcacccgcggccccctgcctagaaacagcctcggggcggagaggaggagtcagggttagcgaatcacgtcggtcgttcagaagatgtgaaacggtaagccgcccattcgcgctcctgcgcagggaggcggggttgttatcttgctgtgaagagagtgattttcagggccaacctcgagcgactcagcgagcaggcagggcggggcaccttgccaaataggagggagctcagcgcttagcccttrgcactgaacwggtcatgtaacaggtcgttggtctccgggcacacccgaggtgcaacccatggtcaccacacggaggcgagctgctgttacaaagaacgtggaggctcagactgaaagcatgaatgt

SEQ ID NO: 4293 - DNA, 416 bp, Chicken  19866894101723_2
tcgcgagagcggctgacgcgaagcgggcattgccgggaacggctctgcacccgcggccccctgcctagaaacagcctcggggcggagaggaggagtcagggttagcgaatcacgtcggtcgttcagaagatgtgaaacggtaagccgcccattcgcgctcctgcgcagggaggcggggttgttatcttgctgtgaagagagtgattttcagggccaacctcgagcgactcagcgagcaggcagggcggggcaccttgccaaataggagggagctcagcgcttagcccttrgcactgaacwggtcatgtaacaggtcgttggtctccgggcacacccgaggtgcaacccatggtcaccacacggaggcgagctgctgttacaaagaacgtggaggctcagactgaaagcatgaatgt

SEQ ID NO: 4294 - DNA, 600 bp, Chicken  19866894101727_1
catagagcatttgaagtacgcttttatatccccactaagctgtctgggactcaagcgtttactgtacttcaagagatgttcatgagacgtcttctgaatgtgagaatagcatgcaattatgaggcttgcaaaaattattgtttgaatacatatttgacatgggattcaaagtttccctttgcagctactaaatagacaatggactttcactactactgctgtactttccattcccgaacaggtgaagtgtaccaaaatatggccaaaggaaataaaagcaaaactagaattggtgcttcygaagccttgctcaatttgtctggtgcttgcagtacaaatcagagaagtagctttctaataaaattaacgctgttcaatctaatatatctgactcatcatggctaccacttccctgaagaatttgagcacaaaaatagctgcaaagccaacactttaaataataaacactaattgcttaactaattgcccaataacttatttgtaataaaaaaaatctgatactttttcagcttaaaggacaacttacactcaccttcagtattgactcagagcagacagtgaggatttgatgaaaagccc

SEQ ID NO: 4295 - DNA, 600 bp, Chicken  19866894101728_1
aaaatcttttagcctactaaactattacttcatttagatattgttaaaatttaaatatgaagtcatatttaaaatatcatttcctactagattgcatgttgtaattttgttaggtgctataatctttgactattcatgagattcatttgttatgtttttgttaatttgtcttaaatgttaactcaaatactaaattactttgtacaaaaaggtgatctttttttccaccctcatggaagaagagaactgtatttcatggaaagttttgttttatgccgaggcaaagggagtgttcacttytctcaactaattagaagctcattctgggatatgtaacacgagtgacttgagtgttggactcattctgccatgctgattatgtagagaattgttgagtaagatgtcaggtgacagggctgctgtgcctttttggaagggttaatagagtaaaaacttgtattataagctagttattatgcagaacaactttaagatactgtgattctccaatgcrttttataaatataggttttttgtattgaaatacctggatttaacacttaatatttattaatggttaatttttaatatttgctacat

SEQ ID NO: 4296 - DNA, 600 bp, Chicken  19866894101728_2
atctttttttccaccctcatggaagaagagaactgtatttcatggaaagttttgttttatgccgaggcaaagggagtgttcacttytctcaactaattagaagctcattctgggatatgtaacacgagtgacttgagtgttggactcattctgccatgctgattatgtagagaattgttgagtaagatgtcaggtgacagggctgctgtgcctttttggaagggttaatagagtaaaaacttgtattataagctagttattatgcagaacaactttaagatactgtgattctccaatgcrttttataaatataggttttttgtattgaaatacctggatttaacacttaatatttattaatggttaatttttaatatttgctacataatgaatatttcagtaagacaataacaggtggaaacatcattcacaaagcatatattgaggatatgaaggtatggaaaattttcattccttatagaaaatatgaatgttgttatttggttggaaagcaaagaggagcagtttctgggttgcccagggtttctacactgtttcttctacataaccatcttgaaaatcttgtatttgtgcagaagt

SEQ ID NO: 4297 - DNA, 600 bp, Chicken  19866894101730_1
gttctatacttaatgggctaaatcagtcaaactgtttaactttgcatgaaattttgtttggaggaagatctaactcaacatctttagtggctacttaagaaaaatctgctagaagttattgctttgcagttttatagtacatgctactgaagggtttcaaagcaccttatacctactggactggctccttagctagcacaatccaccattatgaacagatttcatgaaattattttaatggatttatgatattatgccataagaaaccattttgatctcagtgtccctgatatcactatkttagttttacagaagagtggaatgagggagaaagcagtaaaaaaccaatactaatctcaacaattttttaaggacagaattcaatttaagattaaaacacctaaatttattaatcatccagattggtatttgattaccagtatgtgagagagcttattatgccctaacatactasatattcacaagaagatggcacaggtataacaaatttcttctcagaaagagtgatgagttactggcacaggctgcccaggtggaggcactatccccagaggcgtgccagaaaaaggtagatgtggc

SEQ ID NO: 4298 - DNA, 600 bp, Chicken  19866894101730_2
ctggactggctccttagctagcacaatccaccattatgaacagatttcatgaaattattttaatggatttatgatattatgccataagaaaccattttgatctcagtgtccctgatatcactatkttagttttacagaagagtggaatgagggagaaagcagtaaaaaaccaatactaatctcaacaattttttaaggacagaattcaatttaagattaaaacacctaaatttattaatcatccagattggtatttgattaccagtatgtgagagagcttattatgccctaacatactasatattcacaagaagatggcacaggtataacaaatttcttctcagaaagagtgatgagttactggcacaggctgcccaggtggaggcactatccccagaggcgtgccagaaaaaggtagatgtggcactgagggacacgatttagtggtatggtggtgacgggttaatggttgactagatgatctcagtgatctttccactcttaatgattatatgattctatgatactaaacttgaaggacttgtctgtaaacttttttctttttttttcctggctatgatctagtaaaaaacacttagt

SEQ ID NO: 4299 - DNA, 600 bp, Chicken  19866894101730_3
taacttttcattttaaggataatcatttaaagatttttctcagcatctccagaattttctttttctacttcaaaagtagaaatttcactggatatacagatttacaaattcttggtgtttcagaaggaaaaagtgaacagttttgaaccatgttaaagaacattaaaattaaattgagaacacacaggaagataaaattttatcattatcactctaggttgcttaggatttatattaataggaaaggtatagatagcaatctcaaaattgatatatgtaaatactcagatatatctattsttagggcattttcttatggatgtggtttccacaaattttataaatcatttccctaccacagaaaggcagtctggagtttatttcatctagttttaagcatcacaatattatatgtatttgcatatgtaacagtcgcatgctgagagtgattgaatttctgttgacatgtccatgtattgctctcttcatacattacatgtgtctagattttatcacatgaatctcaccccaaataattacaaggacaatcactgtggtagatatataacacccagcttacaaaaaggatcaaaatagctg

SEQ ID NO: 4300 - DNA, 600 bp, Chicken  19866894101735_1
aaggaaggaaacacaaagcaaaacttaatccttgtcattctttctgcacaaatgtctttgttccgtgtgcctggagcgactattgctggaagatgctgcaggtaagagagcaaggagccgtgcactgagcaccatgggggtcagctcgtggtgtgggggaagcaggaggctgtttggctctctgtcccattggccctgaaagccccacactggggagtcccatgggctgggaaggagcccctcggtcagtcatggtgctgcggtcatggattcacccaaaatgttgactttgggcccatkggatgctttgtagggcaggacagacctgctgtgctggggagcgtttcccacatcagaggctgcctgtgctcggtgcagctccacggtagatattcaccatgagagtctgcttacgttttctgttatttattttaatattattattcctgctgtactctaaacaactcttcttccctgctgtttcatgtcctcattgcgtctgctttctggaagagcaactcgaggccaaaatatttactttcaaatcaactcagaggtggaaactgtattcttggtttgcatctgcagggtgggtgatgg

SEQ ID NO: 4301 - DNA, 600 bp, Chicken  19866894101736_1
atagatgtggaatagatgtggatggaatagatgtatttctttaaaattgttaaaaaaagaaaagggaagcagttattcaaaccttgctgaactgcttgaggaagataaagggaagcaagatatacaaaacagggttgtaaagcgagggaagataaagctgagaggactgcatccggccaggatacgctgttcctgaaaagaatgtaacagataaaccacaaagacagagtcagcaattgggcttaactcagaccaaaggtgaaaaaggacaacaagaggaagactccaagccttcatcckatgacccccccgaagaccaccaccataactcagtacacgtgctaaaaggggctgggctaggggtggagagtatgataataatctcttgggagtaattgtaatgtccatcctatgcgtggcatatgtgtgacttgtctctatgactgttcttaacctcacggtgtgcaaactaggaggggttaccccctggtgtgcaaactaggaggggttaccccctttgcacccactgtatgtgtgcagcactgataaaacatgcctgcttttataactgctttgtggttatggagtttgattctgcac

SEQ ID NO: 4302 - DNA, 600 bp, Chicken  19866894101736_2
ggagtttgattctgcacgtcccaggttcctgggtaaagcagaattgctgtaggttggcttgcttggcaatagggattgatacattactttgagaagcaatatattagttcaacaaaaggaatccacgagtgatagttctaaaactttccatttcagctttagtgggtgaacagccttgtttttcctcgatatttgtgcactggcgacataacagaacacttttatcttctgcctcaatgatttcgccttgcgagaagtactggagtcacaatagaatacttttatctttggcctcaaaaygtgcaaggacattttccttgggttccacacacgttgtttttaagaagtggctgaccatggcctaataaacaatggaaatcttccaagctggggaaaagtgaacgaaagtgagtcaaaggtttcagtgacgaagctgatggtgaaaaaaggggaagaagtaggtgggcactcgaccaccctaaataccactgagcgtgcccaaagggacatcagcacctatctatctgtgagaccttgaaaaagagagcatatgtatgccagtgtagtgtgtatgtgtgtctacctccaggggtactgcca

SEQ ID NO: 4303 - DNA, 599 bp, Chicken  19866894101742_1
  misc_feature (1)..(28): n is any nucleotide
nnnnnnnnnnnnnnnnnnnnnnnnnnnnaataatctttaatcatttctctggagcctccatagcttgaaaactcccgtgcacgacagatgctgggcaggattcttatttctactgtgggcagtgatggagaaaaatcaaatccaggtaaaaattagagacattcttggcatcggtgtaaatctacattcttgaaaagccggatgctcttccaaatcaggattttggttcagtccgttacagccctgctggctcaccttgtaaaattgtgacctacacctgcaatttactggagtgtgatsgcactttagatgaacttttaatccagaactctgcatctgcagtgccataggagcaccccaccccaaattccaccacgggttggccccagcctatctcagtgcctcagccccaggagaagggagccgaccrgcaccagcagagcagttctgcagctctcctgtctccactggagccccttccttcccactttggagctccctatctgttatgaaacatgcaaacagtgctctgctcagctgaagatttcacaatgggactttacttcttcatctttctttttccaaacccacattttcag

SEQ ID NO: 4304 - DNA, 600 bp, Chicken  19866894101742_2
aaaaatcaaatccaggtaaaaattagagacattcttggcatcggtgtaaatctacattcttgaaaagccggatgctcttccaaatcaggattttggttcagtccgttacagccctgctggctcaccttgtaaaattgtgacctacacctgcaatttactggagtgtgatsgcactttagatgaacttttaatccagaactctgcatctgcagtgccataggagcaccccaccccaaattccaccacgggttggccccagcctatctcagtgcctcagccccaggagaagggagccgaccrgcaccagcagagcagttctgcagctctcctgtctccactggagccccttccttcccactttggagctccctatctgttatgaaacatgcaaacagtgctctgctcagctgaagatttcacaatgggactttacttcttcatctttctttttccaaacccacattttcagaggctctcatttcagcgtgtttattggattgagatgtctcctaattatttataacaaaagagctcatccttccagctcattgtaaatgggcagcacactaaatgctaagttagcagcagcgggctgcaaga

SEQ ID NO: 4305 - DNA, 600 bp, Chicken  19866894101747_1
tccttcttttcctccccctaccccatatggccaacatatggccagtttctttatttcagcccgtgtagtgtttcagcggcctctattaaaatgcatttgatattgcgtgggcctagttgatcaagcaaattcagtctccctgcctttatcacttaatgcttttatatcattttctctatttcagtatttctcaggaaatagaattaaatgtgtacttcaatttattgatcaaaattaaatagcaggcaaagtactgatacctgtaacttatagcaacaaggttttatttactgggttttyttcatcatcaaataytgataatttttatcatcttctgttggaaatgtatggagctggtttttgtcagcaattaattaaatgcttttcaaatatctcattaaattacatctgaacacttgcctttagctaccaaatttaatcatatcaaggagagaaatcaggattttggaatgcgagttttcatttcttcctgaaggctgagactggataagtgcatttggaaaacttcttcttctgtctgccagtaaaaaaaaaataaagattatttaaatgtatttatttttctctgcagaagtgcag

SEQ ID NO: 4306 - DNA, 600 bp, Chicken  19866894101747_2
ccctaccccatatggccaacatatggccagtttctttatttcagcccgtgtagtgtttcagcggcctctattaaaatgcatttgatattgcgtgggcctagttgatcaagcaaattcagtctccctgcctttatcacttaatgcttttatatcattttctctatttcagtatttctcaggaaatagaattaaatgtgtacttcaatttattgatcaaaattaaatagcaggcaaagtactgatacctgtaacttatagcaacaaggttttatttactgggttttyttcatcatcaaataytgataatttttatcatcttctgttggaaatgtatggagctggtttttgtcagcaattaattaaatgcttttcaaatatctcattaaattacatctgaacacttgcctttagctaccaaatttaatcatatcaaggagagaaatcaggattttggaatgcgagttttcatttcttcctgaaggctgagactggataagtgcatttggaaaacttcttcttctgtctgccagtaaaaaaaaaataaagattatttaaatgtatttatttttctctgcagaagtgcagcattgatgcatagat

SEQ ID NO: 4307 - DNA, 600 bp, Chicken  19866894101750_1
agattgtattcccttcatctttctttggggcagattagaatgaggcaggctaacagtccctgaatgcttgagattgatagctggtgtccgtttgcagtatacagacgtggaataacaaataaaacataattggtatggttagtaaacagataacctgtagaagtagataagaaaccaacacgttgtgtcaggtaaaactatatccagcagcactgcctgtttctcccagaactggggagatagtagtggtgattcatctgaatagttgggtgaagaggaagtgttttcacaatgaatttwaaactcagtgattcctttctcagtctccatttatcatgatatgctcactaacaccgattactgcatgtttcctttacagagtcgtttttttttctagcagcagaacaaagaaatatgtgtttgtagttctcacagcaagtccaatggtacagtgtattttggttattctsggtttatgatgtctgttgctttcttagaggttttgacaagagacttgaaggaagataggacaagtatgttatcgcacatggctcctggaacagaggaaactccattggcaaatggagagtcactgatctg

SEQ ID NO: 4308 - DNA, 600 bp, Chicken  19866894101750_2
gaaaccaacacgttgtgtcaggtaaaactatatccagcagcactgcctgtttctcccagaactggggagatagtagtggtgattcatctgaatagttgggtgaagaggaagtgttttcacaatgaatttwaaactcagtgattcctttctcagtctccatttatcatgatatgctcactaacaccgattactgcatgtttcctttacagagtcgtttttttttctagcagcagaacaaagaaatatgtgtttgtagttctcacagcaagtccaatggtacagtgtattttggttattctsggtttatgatgtctgttgctttcttagaggttttgacaagagacttgaaggaagataggacaagtatgttatcgcacatggctcctggaacagaggaaactccattggcaaatggagagtcactgatctgtagggtcaaaaaataaaattaagaaatggagatacatatttctgccatggcaacttgaaaaaggggaagaggacagagtgaagagctggttggtgctgagtgtcagcaacgttgacagaatgaaatagaaaactgcaaaattaaatgacagaaataaataaggaagttga

SEQ ID NO: 4309 - DNA, 600 bp, Chicken  19866894101751_1
cccagctcctaagattgtgtcactcagcagtatttttaactgaaaattagatgtgaaaagttccttctacagtgcaaaggagaaataagcatctaggagcaagatacagtgtagagcctgctgagtggagtttcctgtggagataagtgggaaatgctgaggagctcccagaaaagggcatttcattcacatgtgagaagccgcagtgagaagctgcagcatctggtaggcaagtggttatagcattcacctagagtgcacagatcaaattcacaacctttcagtgctcaaaaccctgargaaattgtgcagccaccatgaaattctccgtgstggggccaactcagtccstgcatgtgtttgggacacagagatagagaatgaattaatgttctagaggttaagatttrtatctgggaagagaaagctctgtttccagtccctaaacttatgtatttccatgtgcttttatacaaagtgtagcagcttcagtgggggcgtctgggagaagcccacttcagaacagtctgtggtctggtggctgtggctctttccagatgagaggaagacaggtgacattcagctagagcagagagagac

SEQ ID NO: 4310 - DNA, 600 bp, Chicken  19866894101751_2
ttttaactgaaaattagatgtgaaaagttccttctacagtgcaaaggagaaataagcatctaggagcaagatacagtgtagagcctgctgagtggagtttcctgtggagataagtgggaaatgctgaggagctcccagaaaagggcatttcattcacatgtgagaagccgcagtgagaagctgcagcatctggtaggcaagtggttatagcattcacctagagtgcacagatcaaattcacaacctttcagtgctcaaaaccctgargaaattgtgcagccaccatgaaattctccgtgstggggccaactcagtccstgcatgtgtttgggacacagagatagagaatgaattaatgttctagaggttaagatttrtatctgggaagagaaagctctgtttccagtccctaaacttatgtatttccatgtgcttttatacaaagtgtagcagcttcagtgggggcgtctgggagaagcccacttcagaacagtctgtggtctggtggctgtggctctttccagatgagaggaagacaggtgacattcagctagagcagagagagaccctgaagcctacagattttttactttgtgcata

SEQ ID NO: 4311 - DNA, 600 bp, Chicken  19866894101751_3
tgtgaaaagttccttctacagtgcaaaggagaaataagcatctaggagcaagatacagtgtagagcctgctgagtggagtttcctgtggagataagtgggaaatgctgaggagctcccagaaaagggcatttcattcacatgtgagaagccgcagtgagaagctgcagcatctggtaggcaagtggttatagcattcacctagagtgcacagatcaaattcacaacctttcagtgctcaaaaccctgargaaattgtgcagccaccatgaaattctccgtgstggggccaactcagtccstgcatgtgtttgggacacagagatagagaatgaattaatgttctagaggttaagatttrtatctgggaagagaaagctctgtttccagtccctaaacttatgtatttccatgtgcttttatacaaagtgtagcagcttcagtgggggcgtctgggagaagcccacttcagaacagtctgtggtctggtggctgtggctctttccagatgagaggaagacaggtgacattcagctagagcagagagagaccctgaagcctacagattttttactttgtgcatattctagataccaaagtgc

SEQ ID NO: 4312 - DNA, 600 bp, Chicken  19866894101751_4
gtagagcctgctgagtggagtttcctgtggagataagtgggaaatgctgaggagctcccagaaaagggcatttcattcacatgtgagaagccgcagtgagaagctgcagcatctggtaggcaagtggttatagcattcacctagagtgcacagatcaaattcacaacctttcagtgctcaaaaccctgargaaattgtgcagccaccatgaaattctccgtgstggggccaactcagtccstgcatgtgtttgggacacagagatagagaatgaattaatgttctagaggttaagatttrtatctgggaagagaaagctctgtttccagtccctaaacttatgtatttccatgtgcttttatacaaagtgtagcagcttcagtgggggcgtctgggagaagcccacttcagaacagtctgtggtctggtggctgtggctctttccagatgagaggaagacaggtgacattcagctagagcagagagagaccctgaagcctacagattttttactttgtgcatattctagataccaaagtgctcattctaaatctggtcacccactttaatgcttccctggaaatgtgcaccagcrgagga

SEQ ID NO: 4313 - DNA, 600 bp, Chicken  19866894101751_5
atttrtatctgggaagagaaagctctgtttccagtccctaaacttatgtatttccatgtgcttttatacaaagtgtagcagcttcagtgggggcgtctgggagaagcccacttcagaacagtctgtggtctggtggctgtggctctttccagatgagaggaagacaggtgacattcagctagagcagagagagaccctgaagcctacagattttttactttgtgcatattctagataccaaagtgctcattctaaatctggtcacccactttaatgcttccctggaaatgtgcaccagcrgaggacttccttgatgtgaaagatccacatagttttccaggcacaggaatggctagaaataagtcctgcttcagaatgttgtatagacttctaggcttttagcagcagaattttggatgtagcaaggacatacagatgaaattataaaaaaagaatttgaattgagggagttagatttcacttattatagaattttatgtatctttatttttatagtgttgttgaaaataatttcattgtttgcttgcttaaagctgttctgtggtgcggcaatgactaaacaataaaacaatttgcatg

SEQ ID NO: 4314 - DNA, 600 bp, Chicken  19866894101751_6
cacatagttttccaggcacaggaatggctagaaataagtcctgcttcagaatgttgtatagacttctaggcttttagcagcagaattttggatgtagcaaggacatacagatgaaattataaaaaaagaatttgaattgagggagttagatttcacttattatagaattttatgtatctttatttttatagtgttgttgaaaataatttcattgtttgcttgcttaaagctgttctgtggtgcggcaatgactaaacaataaaacaatttgcatgcctgccaagtatatcgtgatcccakcccagcagcctggagttaatataatccatctagctcagcaatgtagatgccatttatggcagtgttgtgtcagtggctgaaagtctaactcagggtttcctttattattttgccatcactgctatgagaccactaggacgggatttgcacagtcacaaatgctgattctcatggtttcagctccccgcattgtgctgtctctgacagcacagtccagctgtttatgcatgtctattatgtctcctcaaggcattcataaaggaaaacaagctgccccttcaaggaaggtaacaaacagcc

SEQ ID NO: 4315 - DNA, 600 bp, Chicken  19866894101765_1
aactcctggtcaggagggtctcaccttttgagatttagccacttagagaagcatcagagtctgtatctgtagtgtagtgatttgataaatgtgcttttgaaaatatatttttttcaacattccaaagagaacactgagtctggttcagaattatttctggtacaatctggtcctctttcagctctgagatagaaggcatttcgaggtgaaagtaaattttcattgttctctttaattttagccatggtgactgcgttgggtaaggtgttgtccaaacagataagctttactaggagatcrtttgtttatcttttcattcagtaagctttaaagctctgatctcatgggcatcagagaatatttttgcttttgttgcagtaacatttacttgagtagttaatgaatagataccatgttattgtgacggggttatttggctaatgtttctgtatgtatatttcttgtacagtgggagctagaaaaggctaaaaactatcaaagcagctaaagaagctgatttcctgagtatgttcacttaaaactggaaatgtattaaaaagcaggtgcacttccattcctgggaagagttcttaaacgtgt

SEQ ID NO: 4316 - DNA, 600 bp, Chicken  19866894101773_1
ttacatttgttctcttctctataggatgattttgtgtaccttgtacaaccttatgaagaagaatcagaactttttacttagaatctctttgataagttgatgtagaataaataatttttgttttctgcctcctccagaacataagagaaaaatgtatgatatgaaaagaccttaagaggtatttctttcctctcccatagaagacatctggacttagactctatatatttgtctattaaagcaactaaacagataaatattaaatgttttttttttctgcgtaaagcaattttacttatwaaacttggaaaagatctatgagcactgtcctctagtccagttggttttctttcagatgcttcagtaaggtagtagaccttgacgccagcagtgtttttcaattacttatgctattggagtcctctggcggctatttgaacacagccatttttttaacttattttttttaaacagaaaaatgtatcttaagtcttgatctgaaatcatatatgcaaacagtaagacagacctgcaaaagaaatggctattgttatttagtattgcagtagcattaatgtattgaagtggtaaaaaaaaatc

SEQ ID NO: 4317 - DNA, 600 bp, Chicken  19866894101778_1
tactgagttaggtcttgttcttcagctctggtgcttttttgccagacatctgcaaaagaattggccgttgaaagcttttggagtgtgccagacaccattgcctgtaagcagtaaaagtgttgggcaaggaaggttttcatcaaggacatgtttccagtaaaaatccagatctaacacagaatgccagagtgttttgttgcacaaagtgctgctggactcctcacagcactcagtctgtaagttgaaagggttgtggcacagtgccctcccttacagcaccactgcagaggccttggctcyaacagagaggcagtcaaggatactatttttcyttcaacctggaaagatgataaaagccatcactgcaacaacctggtgtgctgagagctggggcaccagatcgttagagacactgactgactctaaggtcacttctgtttctttcaacaaaaactcaagtgattccctcacacttccccaaaccagatgcagagttgaatgcactgggttatattgtcaccagtccatgcttcagctgaatgggccacattactacacaaactgctgaatctagtaatggacagggtgatttacgccact

SEQ ID NO: 4318 - DNA, 577 bp, Chicken  19866894101778_2
gcttttttgccagacatctgcaaaagaattggccgttgaaagcttttggagtgtgccagacaccattgcctgtaagcagtaaaagtgttgggcaaggaaggttttcatcaaggacatgtttccagtaaaaatccagatctaacacagaatgccagagtgttttgttgcacaaagtgctgctggactcctcacagcactcagtctgtaagttgaaagggttgtggcacagtgccctcccttacagcaccactgcagaggccttggctcyaacagagaggcagtcaaggatactatttttcyttcaacctggaaagatgataaaagccatcactgcaacaacctggtgtgctgagagctggggcaccagatcgttagagacactgactgactctaaggtcacttctgtttctttcaacaaaaactcaagtgattccctcacacttccccaaaccagatgcagagttgaatgcactgggttatattgtcaccagtccatgcttcagctgaatgggccacattactacacaaactgctgaatctagtaatggacagggtgatttacgccactgcaggcaag

SEQ ID NO: 4319 - DNA, 600 bp, Chicken  19866894101779_1
ctcagcacccagagcttcaaaatctctcatgaccagggaagacacaaagccccctccatgcagtgccacggataccacagcccccctggctcaaacagccttcagagcacaggaatccaagcatgcacgtacaaacacggcctgaggtcaggctctattaagaattgatgccgtttttcaccgttcatgaaataaaggagtcttctccatataagcaagcttcctccatctcctcagcctctggtggaccgtgtgagctccaacacctccagaatctcccatccgtccccatcctccctkcagactgtcccaccttcccaaccwccacagctgttcagtattcatcagcatccataaatgccctctcccccttctgaatacacggagcttcaaaacaacctctgctctccccagaacaccccagaacaccaagattggccgcttgctgtcccacaacgtcccaggacatctaaactccttccacaaaaytcattccccacattcacgtcattttccccccttttttccacctccagagaaactttcaagtagtgtgtgctgctgtaaacaaactgccaacagcacagacccaggacaagg

SEQ ID NO: 4320 - DNA, 600 bp, Chicken  19866894101779_2
tctcatgaccagggaagacacaaagccccctccatgcagtgccacggataccacagcccccctggctcaaacagccttcagagcacaggaatccaagcatgcacgtacaaacacggcctgaggtcaggctctattaagaattgatgccgtttttcaccgttcatgaaataaaggagtcttctccatataagcaagcttcctccatctcctcagcctctggtggaccgtgtgagctccaacacctccagaatctcccatccgtccccatcctccctkcagactgtcccaccttcccaaccwccacagctgttcagtattcatcagcatccataaatgccctctcccccttctgaatacacggagcttcaaaacaacctctgctctccccagaacaccccagaacaccaagattggccgcttgctgtcccacaacgtcccaggacatctaaactccttccacaaaaytcattccccacattcacgtcattttccccccttttttccacctccagagaaactttcaagtagtgtgtgctgctgtaaacaaactgccaacagcacagacccaggacaaggcccattgctaacagcaaacataaa

SEQ ID NO: 4321 - DNA, 600 bp, Chicken  19866894101779_3
aaataaaggagtcttctccatataagcaagcttcctccatctcctcagcctctggtggaccgtgtgagctccaacacctccagaatctcccatccgtccccatcctccctkcagactgtcccaccttcccaaccwccacagctgttcagtattcatcagcatccataaatgccctctcccccttctgaatacacggagcttcaaaacaacctctgctctccccagaacaccccagaacaccaagattggccgcttgctgtcccacaacgtcccaggacatctaaactccttccacaaaaytcattccccacattcacgtcattttccccccttttttccacctccagagaaactttcaagtagtgtgtgctgctgtaaacaaactgccaacagcacagacccaggacaaggcccattgctaacagcaaacataaatgctgcacaggtccaggtaacgcatacaaaccccgaccactttgaaggaaccaccgagcatctacgtccatttgcttttgtgccaaggcagcctcagcgcagtaaacactggaaagcagtttcactgggctcagccatcaatggcttttgggaatcattacacgg

SEQ ID NO: 4322 - DNA, 600 bp, Chicken  19866894101779_4
tgctgctgtaaacaaactgccaacagcacagacccaggacaaggcccattgctaacagcaaacataaatgctgcacaggtccaggtaacgcatacaaaccccgaccactttgaaggaaccaccgagcatctacgtccatttgcttttgtgccaaggcagcctcagcgcagtaaacactggaaagcagtttcactgggctcagccatcaatggcttttgggaatcattacacggctgtgccattctcagcagggatccctggaaatgccaggtagcgctcagcagatgctggctgccccargccacgctgatcaaggacaggagttgtcccagtgtggctcctgtgcgccagctatgcaaacgcaacgtgcccatgccaaccctcctacagacagcaggaatcttcacagcctgttagggaaggtgcacgatggggcctggccattaaacctaaacaaataacacgacagaacaatcgctgtgtgtccacgcagcctgaagctgtataacaacgtccctgccatgacgactacaaacccctttatgcaaagctcttctgacacatttccagcaccgtagagatgtaaaattacaagtgaat

SEQ ID NO: 4323 - DNA, 537 bp, Chicken  19866894101780_1
cgctctgatctccctggcacaaaaatccatgagcagattatcttgggagcaccggcgctgataagcagagggacttaaggcctttggacttctttttaattagtcctgtagtgggtttttgcacttttttcgctgggcttcctaatggcagcggcgatgcggagggttcctcggttttggaagggaaaatgtcattgctgcctccctctgtgagctgtgcccatgtttctgtgctgctctgcggccacccgtgcccaaaggtccgtgatggaagatgccacgttccatgcaagccagatktggttctctttctagcgccattggtggcaccttcccatccagctctcccacttcatggccaggaaggagggtcggaacctgctaatgagttcacagctcctaatggttattttatcactggagcagaataatcgtaataataaccgtacctcctgcctgctgtctggtgagtgctgagctgcctttgtaatgcctgacaaaggcatttatttacattatttttttatttgcggtccg

SEQ ID NO: 4324 - DNA, 600 bp, Chicken  19866894101786_1
agcagcacttccagagagcagtggaagaaagaaataatcagttcctcctcctgcactgttcattttgcctgaagcaaagagtagcttaacacggtctgcttagatcagctttcatcagcttccattaactgaagacaaactcgtgatgacttcggcttgttcacattcaacgcaatatggtagtcaaccaacctgctaaatggtcatgccaaataaattactctggtactgatttaaaccctctgccactgcagtgaaaaaaccctcagtgtaaatcagaagtggatcctaatgactccygaaggyctatggtgtgccctctcatattcaggcctgttctgtgtcaaggagtcatcaatttgtggttaccaacaagccactgcagttggctgggctgttatggcaactgaactaatttccatcagtttagagctctcactttaacactctaaattcattaaagaaaaaagatgggactttttcttttatgacagatttgcatgttttcctgggggctaaggcaggaattcagcacaggacatcctttgtggttttacagagtcaatccttctgctggaatcagcaatacctgattttaga

SEQ ID NO: 4325 - DNA, 600 bp, Chicken  19866894101786_2
acttccagagagcagtggaagaaagaaataatcagttcctcctcctgcactgttcattttgcctgaagcaaagagtagcttaacacggtctgcttagatcagctttcatcagcttccattaactgaagacaaactcgtgatgacttcggcttgttcacattcaacgcaatatggtagtcaaccaacctgctaaatggtcatgccaaataaattactctggtactgatttaaaccctctgccactgcagtgaaaaaaccctcagtgtaaatcagaagtggatcctaatgactccygaaggyctatggtgtgccctctcatattcaggcctgttctgtgtcaaggagtcatcaatttgtggttaccaacaagccactgcagttggctgggctgttatggcaactgaactaatttccatcagtttagagctctcactttaacactctaaattcattaaagaaaaaagatgggactttttcttttatgacagatttgcatgttttcctgggggctaaggcaggaattcagcacaggacatcctttgtggttttacagagtcaatccttctgctggaatcagcaatacctgattttagagtgtaa

SEQ ID NO: 4326 - DNA, 599 bp, Chicken  19866894101790_1
  misc_feature (1)..(254): n is any nucleotide
nnnnnnnnnnnnnnnnnnnnnnnnnnnnnnnnnnnnnnnnnnnnnnnnnnnnnnnnnnnnnnnnnnnnnnnnnnnnnnnnnnnnnnnnnnnnnnnnnnnnnnnnnnnnnnnnnnnnnnnnnnnnnnnnnnnnnnnnnnnnnnnnnnnnnnnnnnnnnnnnnnnnnnnnnnnnnnnnnnnnnnnnnnnnnnnnnnnnnnnnnnnnnnnnnnnnnnnnnnnnnnnnnnnnnnnnnnnnnnnnnnnnnnnnnnnnnnatctggagagctgcagagcagcagtgcatgacacaggacttggacraacctcatcagtaacaatgttcaacacaaaggtagagctcctgaaaacatcagactgtgagcaccaggctctgaagttctccgtcttcaaaaccccaacagaaaagcagagcatcttcagtagggttggtctcaggatcttgctgaacccttgcttggcagagcttcacctatcctgttacccctgcggagacctcctggggtggtgccaagaagccaggcagctccagctwaggtgacaaacatgggaccctttgtgtgaatggctccaagaggtgacatcatccctggggaggagca

SEQ ID NO: 4327 - DNA, 599 bp, Chicken  19866894101790_2
  misc_feature (1)..(22): n is any nucleotide
nnnnnnnnnnnnnnnnnnnnnnatctggagagctgcagagcagcagtgcatgacacaggacttggacraacctcatcagtaacaatgttcaacacaaaggtagagctcctgaaaacatcagactgtgagcaccaggctctgaagttctccgtcttcaaaaccccaacagaaaagcagagcatcttcagtagggttggtctcaggatcttgctgaacccttgcttggcagagcttcacctatcctgttacccctgcggagacctcctggggtggtgccaagaagccaggcagctccagctwaggtgacaaacatgggaccctttgtgtgaatggctccaagaggtgacatcatccctggggaggagcaaaaactcttggctggaggatggcctgcaagctcacagaaagctctgagcctgccgtgctgtacaaacctgaggagcgtagggccagagggtgagtggcgagcaggagacccaaatcagcagagcgtgggtgccatcccaccacctctggcctcccatccacctggcgggcacatcagacctcaggcaccccgaaggccaggttgtcccgaatcatcagcgtcttccgaaggt

SEQ ID NO: 4328 - DNA, 600 bp, Chicken  19866894101790_3
actcttggctggaggatggcctgcaagctcacagaaagctctgagcctgccgtgctgtacaaacctgaggagcgtagggccagagggtgagtggcgagcaggagacccaaatcagcagagcgtgggtgccatcccaccacctctggcctcccatccacctggcgggcacatcagacctcaggcaccccgaaggccaggttgtcccgaatcatcagcgtcttccgaaggtctcgttccatgatcggcctctgcgttcgccacttgtgggcttcctggaggccgggctcaaagtagtaaatrcaggctccaaagcccaccaggatgaggatggagatcatcaggtacacaggcacaaaccagtccaagaagtgcggcatggctgctggaggaaagggaacacagcttgtggagcacccagaaagcagctccgccacgagcaatgggtcccaccacacctcctacctcccacatcatgctgcatgagatgctgcaacagattgccatgagaagctgtgaatgaaggggcttggaacaggatgggcttccaggtcccttccaacccaaacctttctacggttctgtgattctatgattccatcg

SEQ ID NO: 4329 - DNA, 599 bp, Chicken  19866894101796_1
  misc_feature (1)..(114): n is any nucleotide
nnnnnnnnnnnnnnnnnnnnnnnnnnnnnnnnnnnnnnnnnnnnnnnnnnnnnnnnnnnnnnnnnnnnnnnnnnnnnnnnnnnnnnnnnnnnnnnnnnnnnnnnnnnnnnnnnnccgtcctcttttccctctggagtccttccactttggctcccagccagctctctacaataaagtcacatgctaatcaataacagttttattgagagtgacagacaggagctaactgcaccaaaacagtaacaagctcggccagtagtaaatgcgctctcctcgaatctaagccctcatccttttctygctgcctcttcggcttcccttcaatatccgtctcgggctcatgttccttccttcagaccttgggacgcagttgttttctgatgaccctgccgaaagtgacggtcgcctccaggcctgctgacaggaagcatttggtccctgggattttaagatcctttggccttgactgtgctgctttggtaaagcatcacatagggctgtgtagctgttcttacttagctgcgyttcccaggtggtgagaagacagaagygaaacaaaaacacagttggccgttgctgtggctgctcttctgatccag

SEQ ID NO: 4330 - DNA, 600 bp, Chicken  19866894101796_2
actgcaccaaaacagtaacaagctcggccagtagtaaatgcgctctcctcgaatctaagccctcatccttttctygctgcctcttcggcttcccttcaatatccgtctcgggctcatgttccttccttcagaccttgggacgcagttgttttctgatgaccctgccgaaagtgacggtcgcctccaggcctgctgacaggaagcatttggtccctgggattttaagatcctttggccttgactgtgctgctttggtaaagcatcacatagggctgtgtagctgttcttacttagctgcgyttcccaggtggtgagaagacagaagygaaacaaaaacacagttggccgttgctgtggctgctcttctgatccaggcaaaacttggtcagagcagagtattggtgtggcaggacagaggggcaggtgtcaaactttccagtgcgtccacaagaccgacacgtcatcctccttcatgccgtaagaggcctttctgcctctaggggcctacacmgcccgtgctctgtccccatcactctttctgctgggaagagaagttgcgcttgtgttgctgccctgatctgcttaggcctctgtagatgc

SEQ ID NO: 4331 - DNA, 600 bp, Chicken  19866894101796_3
gccagtagtaaatgcgctctcctcgaatctaagccctcatccttttctygctgcctcttcggcttcccttcaatatccgtctcgggctcatgttccttccttcagaccttgggacgcagttgttttctgatgaccctgccgaaagtgacggtcgcctccaggcctgctgacaggaagcatttggtccctgggattttaagatcctttggccttgactgtgctgctttggtaaagcatcacatagggctgtgtagctgttcttacttagctgcgyttcccaggtggtgagaagacagaagygaaacaaaaacacagttggccgttgctgtggctgctcttctgatccaggcaaaacttggtcagagcagagtattggtgtggcaggacagaggggcaggtgtcaaactttccagtgcgtccacaagaccgacacgtcatcctccttcatgccgtaagaggcctttctgcctctaggggcctacacmgcccgtgctctgtccccatcactctttctgctgggaagagaagttgcgcttgtgttgctgccctgatctgcttaggcctctgtagatgcccccagcttcttgcctctctttttca

SEQ ID NO: 4332 - DNA, 421 bp, Chicken  19866894101796_4
ccctgggattttaagatcctttggccttgactgtgctgctttggtaaagcatcacatagggctgtgtagctgttcttacttagctgcgyttcccaggtggtgagaagacagaagygaaacaaaaacacagttggccgttgctgtggctgctcttctgatccaggcaaaacttggtcagagcagagtattggtgtggcaggacagaggggcaggtgtcaaactttccagtgcgtccacaagaccgacacgtcatcctccttcatgccgtaagaggcctttctgcctctaggggcctacacmgcccgtgctctgtccccatcactctttctgctgggaagagaagttgcgcttgtgttgctgccctgatctgcttaggcctctgtagatgcccccagcttcttgcctctctttttcattttgc

SEQ ID NO: 4333 - DNA, 600 bp, Chicken  19866894101801_1
gacaccattctaatgcagcaatgcacgtggtcactttgaccttagactctcagttcatccaaaaccaatagtttggaatgtagaggaacacactgaatgacctaacagaaatttcagctttgacactgctctgaaatactccagaaatatttaataactaagttatactagccttatagttctaaagctgtgaaaacttctgaagaaaaaaaatccaaggtctgaaaacaaggacaaacagccaaatttgggccattgctgctcttggaataccagctccaacttttcttgagaaacacmgatatctcacccagaaatcaggctgtatttgttttgcaatttgagtgagtcagacacataaatatttaagttttaattcaattgcctctcctgcggtcgatgagtcactacgactctgatatctgaggagtctcgctaggggaggtcctggaaatgtgttatggctcccaagtgggttccagccggaaagtctgtgagctgcatgtttaaaatgtataaacttattttcctttcatatactcaaaatatatgtaatgaagtagaatgtgtttgcttcctggacagcaaacagtctttcag

SEQ ID NO: 4334 - DNA, 600 bp, Chicken  19866894101803_1
actgaagtgcgtgtgccctgaaatgaagccccgtggcccctgacgagtgctggtctgctggcctcttgcactctcatttattctaacaaatgctttgagccccttttgcagggggctgagtcacagcttagctttttgtttaaggttttaggaggaaggggtgtttcatggtgtgagatttagtcctcaggcctgctttcctgacaaggattttctttacctactcccctgcgtgatacatgctttgaaccaggccagaggacagatttcttgctttggtaacctgggcttcctcttccrcagtgggatgttgtagaaacacacaggcacagwttgataaaacagaaaatagagcagttactgaatctgtgtctgaactagaagttgatggcrtattcctctggtagaagaatgtgaaaagatggggcctgaagcaggagtaagtttatagctaaagcgtaaagatcttgctctcgcccaaagttgggaatatttaactgctccaagcccagtcatttcactgtacgcattttctgcctagtaccagtatgcgtctcctctcccagttcctccatctgtgatgagaagaaaagatttcct

SEQ ID NO: 4335 - DNA, 600 bp, Chicken  19866894101803_2
tggcccctgacgagtgctggtctgctggcctcttgcactctcatttattctaacaaatgctttgagccccttttgcagggggctgagtcacagcttagctttttgtttaaggttttaggaggaaggggtgtttcatggtgtgagatttagtcctcaggcctgctttcctgacaaggattttctttacctactcccctgcgtgatacatgctttgaaccaggccagaggacagatttcttgctttggtaacctgggcttcctcttccrcagtgggatgttgtagaaacacacaggcacagwttgataaaacagaaaatagagcagttactgaatctgtgtctgaactagaagttgatggcrtattcctctggtagaagaatgtgaaaagatggggcctgaagcaggagtaagtttatagctaaagcgtaaagatcttgctctcgcccaaagttgggaatatttaactgctccaagcccagtcatttcactgtacgcattttctgcctagtaccagtatgcgtctcctctcccagttcctccatctgtgatgagaagaaaagatttccttttgtttattttgttttcaagacaaatgataaa

SEQ ID NO: 4336 - DNA, 600 bp, Chicken  19866894101803_3
tttgagccccttttgcagggggctgagtcacagcttagctttttgtttaaggttttaggaggaaggggtgtttcatggtgtgagatttagtcctcaggcctgctttcctgacaaggattttctttacctactcccctgcgtgatacatgctttgaaccaggccagaggacagatttcttgctttggtaacctgggcttcctcttccrcagtgggatgttgtagaaacacacaggcacagwttgataaaacagaaaatagagcagttactgaatctgtgtctgaactagaagttgatggcrtattcctctggtagaagaatgtgaaaagatggggcctgaagcaggagtaagtttatagctaaagcgtaaagatcttgctctcgcccaaagttgggaatatttaactgctccaagcccagtcatttcactgtacgcattttctgcctagtaccagtatgcgtctcctctcccagttcctccatctgtgatgagaagaaaagatttccttttgtttattttgttttcaagacaaatgataaataaaaaccctcatccttaactcacaggagcttggcaacagcctttgactctgactggttc

SEQ ID NO: 4337 - DNA, 600 bp, Chicken  19866894101803_4
gggaatatttaactgctccaagcccagtcatttcactgtacgcattttctgcctagtaccagtatgcgtctcctctcccagttcctccatctgtgatgagaagaaaagatttccttttgtttattttgttttcaagacaaatgataaataaaaaccctcatccttaactcacaggagcttggcaacagcctttgactctgactggttccaaaaatctgacgtttgttctcttgtcattcatattgaacaccgatccctagttgtacagcatacaaggaagctctagccttctccaatttstacactcacttgaagtaattacagccatagttatttcccgtcagcctctgttaccgtgctgagaagataagtcccttcccccaaacctacatgttgcatgacaagccatggggactctttgtcaaaagccaaatctgaggttttacttagcaaagctgcaggaagaactcgctcggttccaagacagggcaattctctctcttaaaagaaattttattgctgttctcaagaacgaactggtttccaacctattcactttctggatgtaagttcacaatggcgatttttttcccctccaac

SEQ ID NO: 4338 - DNA, 600 bp, Chicken  19866894101803_5
agtaattacagccatagttatttcccgtcagcctctgttaccgtgctgagaagataagtcccttcccccaaacctacatgttgcatgacaagccatggggactctttgtcaaaagccaaatctgaggttttacttagcaaagctgcaggaagaactcgctcggttccaagacagggcaattctctctcttaaaagaaattttattgctgttctcaagaacgaactggtttccaacctattcactttctggatgtaagttcacaatggcgatttttttcccctccaactcagagtactttwctttttttcctctaaatgataattacctaggcaatatcctttctggcagcccaaattgtaaactgcacagaacattctctgctcacagaagccttagtcctatttatcccacggaaggttcccattgttaagaagtcccacacgaagaaatggtcmagaatttcagtaattttgagaaaggtggattttcatttaagatttttcagagatcgcaaggctaaacttgtactccctttccacgggacttgcttagagtcagtctgacctcctcccatgacactgtgaataactctgtgctca

SEQ ID NO: 4339 - DNA, 600 bp, Chicken  19866894101803_6
cgctcggttccaagacagggcaattctctctcttaaaagaaattttattgctgttctcaagaacgaactggtttccaacctattcactttctggatgtaagttcacaatggcgatttttttcccctccaactcagagtactttwctttttttcctctaaatgataattacctaggcaatatcctttctggcagcccaaattgtaaactgcacagaacattctctgctcacagaagccttagtcctatttatcccacggaaggttcccattgttaagaagtcccacacgaagaaatggtcmagaatttcagtaattttgagaaaggtggattttcatttaagatttttcagagatcgcaaggctaaacttgtactccctttccacgggacttgcttagagtcagtctgacctcctcccatgacactgtgaataactctgtgctcagatcagcatttaacaacctcgctgtgctattccaccccgaactctttactctgggaaccaattgctgcattcattgggcagcgtttattgccttatgggaacaaaggatgcagagtccctgtaaagtgcggagcactcttggaagtggctatctcc

SEQ ID NO: 4340 - DNA, 599 bp, Chicken  19866894101815_1
  misc_feature (1)..(151): n is any nucleotide
nnnnnnnnnnnnnnnnnnnnnnnnnnnnnnnnnnnnnnnnnnnnnnnnnnnnnnnnnnnnnnnnnnnnnnnnnnnnnnnnnnnnnnnnnnnnnnnnnnnnnnnnnnnnnnnnnnnnnnnnnnnnnnnnnnnnnnnnnnnnnnnnnnnnnnnaaatgtcatgatgcaagcaattcatcccctcgtaggtatcatgtgtatgtctgcatttgaacgtgcacccacttgttcatattgtttacataaatatgcactaaaactgcctaactaatgggatcaaacctacaaaagttagaaaatgrctgagttatggttgcctgctaggaaacagatgagatcatgccatgaagcaatcccttttgtcatctggctttctgctcatccttagcaccacagtgatttattgccaaaggccccacccaacatttcaaagctcctgaaaaatcgcttctttgggaatgtatttaagattacaaaggttcttgcactggtattatctgcatccctgctcttctctgtactctacactaatctgagggcagaaatagtttyatttgattcaaataactggatgagcagagggctgtctgggtgtgatgta

SEQ ID NO: 4341 - DNA, 600 bp, Chicken  19866894101815_2
actaaaactgcctaactaatgggatcaaacctacaaaagttagaaaatgrctgagttatggttgcctgctaggaaacagatgagatcatgccatgaagcaatcccttttgtcatctggctttctgctcatccttagcaccacagtgatttattgccaaaggccccacccaacatttcaaagctcctgaaaaatcgcttctttgggaatgtatttaagattacaaaggttcttgcactggtattatctgcatccctgctcttctctgtactctacactaatctgagggcagaaatagtttyatttgattcaaataactggatgagcagagggctgtctgggtgtgatgtattggattatgatagctcggatagtagacttcataatctcttctgctgtaaaactctgtgcaagaaataaacatttttgtgcaaagccacacatttgtttattccctcaccttattcataagtaagctttaattgatccaacacaaccagacgaatgtggtttggatcccacaataagtatcaggtagatagttctgcccatgctgaaaagcagttcttggggaaatgagggttacttctcctagtaccttt

SEQ ID NO: 4342 - DNA, 600 bp, Chicken  19866894101821_1
gtatctgcatttgcttgatatgagttattgttgaagacttttttttccccataactcccatttctgaatcaggtattactttggttttatacatttttgccattcaatctgcctgacctttttttgtgctatcaggagctaaaatcttcagcctctggcaattgcactgatcgtcagtcaggtttccttagataaataaaaaaagaaatcctcccaaacactgtgaggttgtaccatcatcggtgtgaaggataaatggaatagtctgttgttgactaacttgctgacccggaatggaaktctgaacagagggacattacaccttgtttcagaactcctgggaaaatgtagccattgaacaaagtgctcccagacagcgcgtgccaagggatcttctaaatctggaaagctgttgtttcagccttgttatttcagtgttccctttgcttcgtggtctctgtaatgaaaagtgacagttgttttacatactggaaaatcttgcatgattggtctcagctcaatatctgcaggagaaaattaagattacgctacccacacattaatgatgaagttcctgtggctttttaatgacataattgt

SEQ ID NO: 4343 - DNA, 600 bp, Chicken  19866894101823_1
aaatgctgctattgattttcccctttataagttactttggctgtagaagtaaagctgtctatttgctacagctgttacgggaacataactgctgctgatttcctatcgaaacctgttacaaactggaagaaagagaagtaaaaaaaataaatcccagagctctctgctgagaacagggatggtgttttagaggcaccagaggatgtcgatatctctgaagtgtgtctgtgatgctgaccctggggtcggtgctcctcaccacctctgctcagcagcagccgagctttatttgaagtgatstacaaagggaactagctatgccatttgcagctctgtgtgtttgaatgaagtctcagggatttttttttkttgttactgtgtwctgttgctttgtgttccattcrgtctgcctggattggaaggctgggggactttgagcaggttgatggaggtggcaagcaatcctagctgtgggtctctgctccccactgcttggtggggggtgggggagggggtctgggtgtctcagcacgggcttcactgtcagcatgggtcctcttgtcccacccatggaatgggaagagcagcgtggagggctgt

SEQ ID NO: 4344 - DNA, 600 bp, Chicken  19866894101823_2
agctgttacgggaacataactgctgctgatttcctatcgaaacctgttacaaactggaagaaagagaagtaaaaaaaataaatcccagagctctctgctgagaacagggatggtgttttagaggcaccagaggatgtcgatatctctgaagtgtgtctgtgatgctgaccctggggtcggtgctcctcaccacctctgctcagcagcagccgagctttatttgaagtgatstacaaagggaactagctatgccatttgcagctctgtgtgtttgaatgaagtctcagggatttttttttkttgttactgtgtwctgttgctttgtgttccattcrgtctgcctggattggaaggctgggggactttgagcaggttgatggaggtggcaagcaatcctagctgtgggtctctgctccccactgcttggtggggggtgggggagggggtctgggtgtctcagcacgggcttcactgtcagcatgggtcctcttgtcccacccatggaatgggaagagcagcgtggagggctgtggctgaggagggctgaggcagagctgttctttatgccaacccttcagtttcacctgcgttgcagagccg

SEQ ID NO: 4345 - DNA, 600 bp, Chicken  19866894101823_3
acataactgctgctgatttcctatcgaaacctgttacaaactggaagaaagagaagtaaaaaaaataaatcccagagctctctgctgagaacagggatggtgttttagaggcaccagaggatgtcgatatctctgaagtgtgtctgtgatgctgaccctggggtcggtgctcctcaccacctctgctcagcagcagccgagctttatttgaagtgatstacaaagggaactagctatgccatttgcagctctgtgtgtttgaatgaagtctcagggatttttttttkttgttactgtgtwctgttgctttgtgttccattcrgtctgcctggattggaaggctgggggactttgagcaggttgatggaggtggcaagcaatcctagctgtgggtctctgctccccactgcttggtggggggtgggggagggggtctgggtgtctcagcacgggcttcactgtcagcatgggtcctcttgtcccacccatggaatgggaagagcagcgtggagggctgtggctgaggagggctgaggcagagctgttctttatgccaacccttcagtttcacctgcgttgcagagccgtgataaacctttg

SEQ ID NO: 4346 - DNA, 590 bp, Chicken  19866894101823_4
atcgaaacctgttacaaactggaagaaagagaagtaaaaaaaataaatcccagagctctctgctgagaacagggatggtgttttagaggcaccagaggatgtcgatatctctgaagtgtgtctgtgatgctgaccctggggtcggtgctcctcaccacctctgctcagcagcagccgagctttatttgaagtgatstacaaagggaactagctatgccatttgcagctctgtgtgtttgaatgaagtctcagggatttttttttkttgttactgtgtwctgttgctttgtgttccattcrgtctgcctggattggaaggctgggggactttgagcaggttgatggaggtggcaagcaatcctagctgtgggtctctgctccccactgcttggtggggggtgggggagggggtctgggtgtctcagcacgggcttcactgtcagcatgggtcctcttgtcccacccatggaatgggaagagcagcgtggagggctgtggctgaggagggctgaggcagagctgttctttatgccaacccttcagtttcacctgcgttgcagagccgtgataaacctttgccttgttttgtg

SEQ ID NO: 4347 - DNA, 599 bp, Chicken  19866894101827_1
  misc_feature (1)..(172): n is any nucleotide
nnnnnnnnnnnnnnnnnnnnnnnnnnnnnnnnnnnnnnnnnnnnnnnnnnnnnnnnnnnnnnnnnnnnnnnnnnnnnnnnnnnnnnnnnnnnnnnnnnnnnnnnnnnnnnnnnnnnnnnnnnnnnnnnnnnnnnnnnnnnnnnnnnnnnnnnnnnnnnnnnnnnnnnnnnnnaattatcacatactttaaatgtcatctctgctgaatgagtgcaattagattgcgactgatgtggctttcgaaaaaccaagcctaaaaaaccaaggctaaaggagtctttgtccaagaaatacaactcwctccttccatgttaatgaagaactctatgccaggacaaatcatttactgtgtaatgcacagatccgtgaacattacaaaactaactttaaaggaacacacaaaatgcagttagagctgcagaaagttctttgttcagaattacactgtatgggctgatcctttgttaagcaaacaaaaatgtctccaggcagagaattcaagttcaagtccttgatatttcttaacaacagagagatgaagcaaacattcagggcagatctgcaaatcttcctgtgaaatccacaggaattacaaagtc

SEQ ID NO: 4348 - DNA, 600 bp, Chicken  19866894101827_2
cacgcatcatgtcacaccgctggttttgctgtaaagtctaccactacacaggacacctcagcactgttagtcataaccattggttttgctctgccaccagccctgagcttgccctttgcatactggttctgcccatcacagtgcagtttggagtcctgtggagctgttggcacttgcagatttctagagaagaagccgctatagcaatgcacagtggtggaaacccaccagcccatgtgggtgagcatgcatgtagaacagagcaaggcaatgactcgagcgaaccaagaacagtttcawcattcctcgttgtgacatcttggactgactcctagagggacaaagactaattataatttcaataattttctatagtcccaaaggtgttacttgcagatcatcttggcttcctctctgctccaggatgttttgcctccactaggagtgaaggagtgtccaggagcgattaccgtcgcactacaggagaacagacacccacagagaagtggcatttcagttcaaaacttttccacttcagaggcacatccaagatgattccacaagcaagaaacaaatcagtctggcaacaatcctgctaag

SEQ ID NO: 4349 - DNA, 600 bp, Chicken  19866894101829_1
cctggctgtttaatatatcctattctaaatgaccatttgcggatggctgcatcccttgaaggattagtgtcttaaattgattttctcttaaataaattgcttcttcagacgattggtttcatgcacatattttgaaaattagctctattatttcattatataccatgaaaaaaattgtatttcttacttgtgagttttatgggttcctgagaacttgtttaacgtttcagtttcttcagttcatgcaatgcattttcaatgttcacttttataagcttcaatcaccttttattcttactytttccttccacagcatcctaatctattcttcagaatgtgctttttagactaccatgactactacaaacagaataacctggaggctaactcatgttaacctttcttaaaaggacttccattcttctaatagtcaagaaggaatacaagtatattgacatgtgactgcatattattttcatgctttctctttctctcagttctccagagatcttggagactaagaaagcaaagtcaactctagcagtcataatcaagcacctcactatttggcaggcaggaagtaagtgaatcttgatggtt

SEQ ID NO: 4350 - DNA, 600 bp, Chicken  19866894101832_1
tgcctccagggatggggcatccacaacctcctttggcaacctgttccagtgtgtcaccaccctctgtgtgaaaaacttcctcctaatatctgtaggatcatagaatggcctgggttgaaaagaaccacattttttctctaaaaagaatattttttagcacaacttcttgtctttgtaacctatttccatgcttcaagaactcaaatagccaccagaagccaggtactgtaatatctgccctacaccaacagctctctgagcgttgttacattgactgtactgcatggtactgactgtccyttccgccagcaggatgatgggaggccacagcctgggacaaggcagagtagggagggaaaggttcacttgagagcctcagcccttgggtgctaaaaacaagcagcgtttcagatattatttaattcttagctattagatatgacattacaggacgaaatgcagtcagtggatttcaggggtgcccggcctgtcagggccctgcctgtccctgggaggacaccatgccctgcacaaagatggccgccgggggagggaactgcgctcatcgctccaagatggtcgccccgccggcatccgcct

SEQ ID NO: 4351 - DNA, 600 bp, Chicken  19866894101834_1
aggttgcccaaggaggttgtggatgccccatccctggaggcattcaaggccaggctggatgtggctctgggcagcctggtctggtggttggcaaccctgcccatagcagggggtgttaaaactaggtgatcattgtggtccttttcaacccaggctattctatgattctataatatatattatacctacacatccaggcagataaatgcactgcagttgtaagctctgtatctatacactttcacagtacagagagcatttcttaaaacatctatggctaatgtgtcatttccacacagycatgtttgatgttggtgactaacgctaggctgtgtgcctcaccacaggtgaacacacagtgtacagactgctctggaggtggaaacatcacgtatgtatgtgagagctgtgttattgcagctgaacttcactgtgtgccgtgcttaaagattgttctcttcctgggacaccatccactaccacacagttggcaggacagggatgtcactttcctgccagatgctcaccttaaccaggaacacggcatccatgttccaccargaacatgggatccacctgtgagcacctgcaggtgtgctg

SEQ ID NO: 4352 - DNA, 600 bp, Chicken  19866894101834_2
cttaaaacatctatggctaatgtgtcatttccacacagycatgtttgatgttggtgactaacgctaggctgtgtgcctcaccacaggtgaacacacagtgtacagactgctctggaggtggaaacatcacgtatgtatgtgagagctgtgttattgcagctgaacttcactgtgtgccgtgcttaaagattgttctcttcctgggacaccatccactaccacacagttggcaggacagggatgtcactttcctgccagatgctcaccttaaccaggaacacggcatccatgttccaccargaacatgggatccacctgtgagcacctgcaggtgtgctgtgcattttgatgccgagtgttggaattcaagcacttgaatcacagaactgcaggggttgggaggggcctatgcctggggaaccggggatgtcttcctggctaactggggatgtcctgstgcactggaaactggcaaatgtgatgcccaccttcaaaaagggccggaaagatgatcctggtagctacaggcctatcagtctcacctcggtgtccgagaaggttatagaacgaataatctcaggaaccatcatggatcagggg

SEQ ID NO: 4353 - DNA, 600 bp, Chicken  19866894101834_3
agctgaacttcactgtgtgccgtgcttaaagattgttctcttcctgggacaccatccactaccacacagttggcaggacagggatgtcactttcctgccagatgctcaccttaaccaggaacacggcatccatgttccaccargaacatgggatccacctgtgagcacctgcaggtgtgctgtgcattttgatgccgagtgttggaattcaagcacttgaatcacagaactgcaggggttgggaggggcctatgcctggggaaccggggatgtcttcctggctaactggggatgtcctgstgcactggaaactggcaaatgtgatgcccaccttcaaaaagggccggaaagatgatcctggtagctacaggcctatcagtctcacctcggtgtccgagaaggttatagaacgaataatctcaggaaccatcatggatcaggggatcaggcccagtcagcatgggtttacaaacggtagatcccctctgacaaacctgatttcattctatgacaaggtgacccgcttagtgattgagggtcaggctgttgatgtggtctacctggacttcagtaaggcctttgacactgtcccccacaaca

SEQ ID NO: 4354 - DNA, 599 bp, Chicken  19866894101842_1
  misc_feature (1)..(114): n is any nucleotide
nnnnnnnnnnnnnnnnnnnnnnnnnnnnnnnnnnnnnnnnnnnnnnnnnnnnnnnnnnnnnnnnnnnnnnnnnnnnnnnnnnnnnnnnnnnnnnnnnnnnnnnnnnnnnnnnnnaactggagcagtgcaggtgccatcctgatttgcagcagggcagcagcagaaggctgcgtgtccttcagctcctgctgcccgtgctctaatcaggtttaagctttggaagctgctaccagcccagctttttggttccatacataacacacatcatacgccggcagtacaaaaccacgatccaattayctgcactcagcccaagccagaatctctgccatttatttcgttttctttcaaattggaaaaaaaaaaatattgaactttgaaccttcttccmatttctccagaaaaataacgygtttttcaaaggctgcagctgagttacatggggaaataaacgtaacacacagacctgggtggagagaacatggtttaattaaaggcaaagctgatttcagcagctgcagttcttgcacagacagacaaaaaacacaaaaaaagcttacgacacaaaccagtttctgtcggggtcccttccctcgctc

SEQ ID NO: 4355 - DNA, 599 bp, Chicken  19866894101842_2
  misc_feature (1)..(23): n is any nucleotide
nnnnnnnnnnnnnnnnnnnnnnnaactggagcagtgcaggtgccatcctgatttgcagcagggcagcagcagaaggctgcgtgtccttcagctcctgctgcccgtgctctaatcaggtttaagctttggaagctgctaccagcccagctttttggttccatacataacacacatcatacgccggcagtacaaaaccacgatccaattayctgcactcagcccaagccagaatctctgccatttatttcgttttctttcaaattggaaaaaaaaaaatattgaactttgaaccttcttccmatttctccagaaaaataacgygtttttcaaaggctgcagctgagttacatggggaaataaacgtaacacacagacctgggtggagagaacatggtttaattaaaggcaaagctgatttcagcagctgcagttcttgcacagacagacaaaaaacacaaaaaaagcttacgacacaaaccagtttctgtcggggtcccttccctcgctcccccgggtgccggagggcgggatgggrgtcccagccgagagccggccgtgttcctgacaccgggttctcatgcacaagtggagcggtgcgc

SEQ ID NO: 4356 - DNA, 599 bp, Chicken  19866894101842_3
  misc_feature (1)..(2): n is any nucleotide
nnaactggagcagtgcaggtgccatcctgatttgcagcagggcagcagcagaaggctgcgtgtccttcagctcctgctgcccgtgctctaatcaggtttaagctttggaagctgctaccagcccagctttttggttccatacataacacacatcatacgccggcagtacaaaaccacgatccaattayctgcactcagcccaagccagaatctctgccatttatttcgttttctttcaaattggaaaaaaaaaaatattgaactttgaaccttcttccmatttctccagaaaaataacgygtttttcaaaggctgcagctgagttacatggggaaataaacgtaacacacagacctgggtggagagaacatggtttaattaaaggcaaagctgatttcagcagctgcagttcttgcacagacagacaaaaaacacaaaaaaagcttacgacacaaaccagtttctgtcggggtcccttccctcgctcccccgggtgccggagggcgggatgggrgtcccagccgagagccggccgtgttcctgacaccgggttctcatgcacaagtggagcggtgcgctgggacctggcactgccagga

SEQ ID NO: 4357 - DNA, 600 bp, Chicken  19866894101842_4
tgccatttatttcgttttctttcaaattggaaaaaaaaaaatattgaactttgaaccttcttccmatttctccagaaaaataacgygtttttcaaaggctgcagctgagttacatggggaaataaacgtaacacacagacctgggtggagagaacatggtttaattaaaggcaaagctgatttcagcagctgcagttcttgcacagacagacaaaaaacacaaaaaaagcttacgacacaaaccagtttctgtcggggtcccttccctcgctcccccgggtgccggagggcgggatgggrgtcccagccgagagccggccgtgttcctgacaccgggttctcatgcacaagtggagcggtgcgctgggacctggcactgccaggactgaggtggtgaacctggtcagcccgctgagggtgcaagagtcagcggcacttctaacactggaatgtcgcagctgccggggcgcacggctcaatacacaaactgagggggctgggataggtagggggtgggggaggcttagtcaatattagcattgggtggaaacttcactttttggacttttwaaaaggaaatacatcttcaaaatgcaacaa

SEQ ID NO: 4358 - DNA, 600 bp, Chicken  19866894101842_5
ctcccccgggtgccggagggcgggatgggrgtcccagccgagagccggccgtgttcctgacaccgggttctcatgcacaagtggagcggtgcgctgggacctggcactgccaggactgaggtggtgaacctggtcagcccgctgagggtgcaagagtcagcggcacttctaacactggaatgtcgcagctgccggggcgcacggctcaatacacaaactgagggggctgggataggtagggggtgggggaggcttagtcaatattagcattgggtggaaacttcactttttggacttttwaaaaggaaatacatcttcaaaatgcaacaaagaacggtgatgttgctaaggtggagaacgtaggggagctgctcacaccctcagaagggtactgggcctcagttttccctttttatgttctttggggctgcccagactccagtgtcactgaggctcctgcgtgtgctttgctttgcagcagactaacagcccagagatcctgaatcatcacacaaacccctactgctaaacacagcaaacggacattgcgattgtttccgtagcttccctgggaaacctaacaaaaatgctgtccttttc

SEQ ID NO: 4359 - DNA, 600 bp, Chicken  19866894101844_1
attaaagttccagtgtagcaattacacgttccatctgtttgtattccctttgtatcacaccagactgccctgtgggatttgatcctgccggtgctaatgaatccgactgggtatgttagcaggattagtaagaccctgagagctgttgtcacctctgtttctgatccacgcttctcttcagatttcattcctctgtcagagtacccttagtcctctggtttctaaacaggcagcgtggatttggggcgtgtttctgtgttcagcatgtgtgtatacatacatacacgtgcacacttcatktgaattgatcggtcagctcttcaaaattgttacaaggggtgagaatgctgacatacctaaggcagatggaggtgtgattctgtactcccttggagattaacgcttttagtgaacctacrtttctgagattttgggctcatgtgctattgctttatcaaaaagcaattatctgttgctgaacctggggatttttttaaaggtagttgatacagttagatgtcagtgcattgtcactgtgtgtgtgtatatatgcatttaggaaaaagaagtacatcttcatgcttttatgcatagtagaag

SEQ ID NO: 4360 - DNA, 600 bp, Chicken  19866894101844_2
caggattagtaagaccctgagagctgttgtcacctctgtttctgatccacgcttctcttcagatttcattcctctgtcagagtacccttagtcctctggtttctaaacaggcagcgtggatttggggcgtgtttctgtgttcagcatgtgtgtatacatacatacacgtgcacacttcatktgaattgatcggtcagctcttcaaaattgttacaaggggtgagaatgctgacatacctaaggcagatggaggtgtgattctgtactcccttggagattaacgcttttagtgaacctacrtttctgagattttgggctcatgtgctattgctttatcaaaaagcaattatctgttgctgaacctggggatttttttaaaggtagttgatacagttagatgtcagtgcattgtcactgtgtgtgtgtatatatgcatttaggaaaaagaagtacatcttcatgcttttatgcatagtagaaggcatttttcctcaagtgattgaggaagaagtctgttaaagtgacattcagcagagccagttgctgttcatccttaatggtacccccaaacctcacgtgtggtgctcagtgagctttcct

SEQ ID NO: 4361 - DNA, 600 bp, Chicken  19866894101848_1
tagctggcaaagtaaagtgtgtaggcacagatgtctagagccttgtctgagagggggggcagttggaaatagactaatgctatttttcatggaacactaatgaatttagccacacgccctccaattaaacaatatcgtgttccttgtttgcataggcagatggagtgtgagttccttgagtgctgagggctgggaaattttggctccttccccatcagctactgcagcccctgacaagagcagcagcaaagccatgcaaagatatctgctttgttctacactcttttgtttcacctgcawccccaaagcgtgcatatgctgcattcagagtttaactttttaaagcttttatgattacccttcacaaagcactgcatttccctgaggyagctgtgggctgtggcttgggagctgtaggctgagagttctgcagaagaaatgagagctgagtttgagaacacattgcttgatgtcacctgtaggtttgtgctgtgaaaacatcrctgctaagaatgagaattgctgtacgtactattattgcacccactgatcaaaatacccactgctttgaatagattgatgagctgtcactaagcacag

SEQ ID NO: 4362 - DNA, 600 bp, Chicken  19866894101848_2
atggaacactaatgaatttagccacacgccctccaattaaacaatatcgtgttccttgtttgcataggcagatggagtgtgagttccttgagtgctgagggctgggaaattttggctccttccccatcagctactgcagcccctgacaagagcagcagcaaagccatgcaaagatatctgctttgttctacactcttttgtttcacctgcawccccaaagcgtgcatatgctgcattcagagtttaactttttaaagcttttatgattacccttcacaaagcactgcatttccctgaggyagctgtgggctgtggcttgggagctgtaggctgagagttctgcagaagaaatgagagctgagtttgagaacacattgcttgatgtcacctgtaggtttgtgctgtgaaaacatcrctgctaagaatgagaattgctgtacgtactattattgcacccactgatcaaaatacccactgctttgaatagattgatgagctgtcactaagcacagcaagcaaaactggaatagtaaatcatctttgaagtgaagggaaataataacattctaaatttcccgttgcattgatgaaattagactc

SEQ ID NO: 4363 - DNA, 600 bp, Chicken  19866894101848_3
ctccttccccatcagctactgcagcccctgacaagagcagcagcaaagccatgcaaagatatctgctttgttctacactcttttgtttcacctgcawccccaaagcgtgcatatgctgcattcagagtttaactttttaaagcttttatgattacccttcacaaagcactgcatttccctgaggyagctgtgggctgtggcttgggagctgtaggctgagagttctgcagaagaaatgagagctgagtttgagaacacattgcttgatgtcacctgtaggtttgtgctgtgaaaacatcrctgctaagaatgagaattgctgtacgtactattattgcacccactgatcaaaatacccactgctttgaatagattgatgagctgtcactaagcacagcaagcaaaactggaatagtaaatcatctttgaagtgaagggaaataataacattctaaatttcccgttgcattgatgaaattagactcatgggagtgactgtgtccccttgggggtcaggacagacaacttccagtaattccttctgtttctgtagattccagggaccttcatgaaggaattatggaattccaggatggtttg

SEQ ID NO: 4364 - DNA, 600 bp, Chicken  19866894101853_1
atttcactgttccagtttgtagccttcctgactgctgttgcaacaagtattttctttgaaaaattaagtgatgtggtagctatgtgtctgtcattcattttatctttcaaaacatccgcaggaaaatatttacaacatgcagtaggaagtgttcaatgaaggtggctgaattacactgttcctattaagtaacttgattggcagctatttggagactgatctggtatgggtcatacaggtcagcattttcctttttttaactttcttcagtgcctagttgtcataatttccttgatttaygtagttggaccagactatcacctgataccttgtcttaccattacctgtaggagtccatggaytgtacaactgtcaccttgtttgctagaaccttgggaatcctagggaaatattttcccatgcattttgggggctgccttctcaaatccacttcaacttttctatatctgagcggctgttgcaagacagaaattgtgctttcatttggcacagccaaactccgtcagcatggacacaagcaggttcaagaggttatagggtgttaatacatttgaaatgagttctggaagtgaagagcag

SEQ ID NO: 4365 - DNA, 600 bp, Chicken  19866894101853_2
attaagtgatgtggtagctatgtgtctgtcattcattttatctttcaaaacatccgcaggaaaatatttacaacatgcagtaggaagtgttcaatgaaggtggctgaattacactgttcctattaagtaacttgattggcagctatttggagactgatctggtatgggtcatacaggtcagcattttcctttttttaactttcttcagtgcctagttgtcataatttccttgatttaygtagttggaccagactatcacctgataccttgtcttaccattacctgtaggagtccatggaytgtacaactgtcaccttgtttgctagaaccttgggaatcctagggaaatattttcccatgcattttgggggctgccttctcaaatccacttcaacttttctatatctgagcggctgttgcaagacagaaattgtgctttcatttggcacagccaaactccgtcagcatggacacaagcaggttcaagaggttatagggtgttaatacatttgaaatgagttctggaagtgaagagcagtcagatgctctgcttgctagtaaaggtgattccttttatacttcttattattccaggcacta

SEQ ID NO: 4366 - DNA, 600 bp, Chicken  19866894101854_1
tctgtgccccaaaggcagcctctgaagaggatgtggcagtgagatgtggggtggatggtgcctgaacatggggtatcctgtacagtcggctgctcccagcacaacccccatcgcaatagggaagagaattggtcaggaatcagtgatgggccacaacagtacagattcttacatgacagctcagatagtacattccccccatgcacatccctggcccagcaggacacaagtgtcagctctgatggagtcaagatgagggagagcctggcaggaggcctggtattgcccagtccatggctkcagctgcagtcacctcctgctgcagaagataagcagagcgaggagccttatacacacaagtctggaaagctctccaaggcccatctcaaaatccagttttcaaataaaaagcagcttttgttgcagcttttaactcaagaggtctacaatctaataacaacttaataagaaaatcttagaagaaagtttgtgggaagaacgcagtgctgctttatgaatcagggcttacatttaataagcaggccctagacttgccgtactctctgttgcacagctctgaagccaccaagttttagcaat

SEQ ID NO: 4367 - DNA, 600 bp, Chicken  19866894101855_1
atgggaaacatggcagattgattacattggccccttccgtaaatctgaaggtaaacagtatgtgctagtaggtgtagaaataatctctggcctacttcaggctgaatcttgccctcgagcaacaggggaaaacactgtaaaggcactaaagaaatggtttagcattcttccaaaacccacttccatccaatcagataacggctctcatttcacctcaggggtagttcaagaatgggccagggaggaaggcattcattggatctttcacaccccctactacccgcaggctaatggcattgyggaacgatccaatggcctccttaagaaatttctgaaaacggaaaaaaccaattggtccacccgcacctctgatgcggtcagaagggtaaatgatcgctggggaattaatggctgtcctcgattcaacgctttctaccccaaggccccgccacttctcccaattactcttaatccagataagttagaagaaccatcttattcccctggccaaccctgtgttggtcgacttgcctcatgtagggccagtacccctgactctaatggaatctcttaacaaatatacttggagggccaaggacg

SEQ ID NO: 4368 - DNA, 599 bp, Chicken  19866894101859_1
  misc_feature (1)..(36): n is any nucleotide
nnnnnnnnnnnnnnnnnnnnnnnnnnnnnnnnnnnnctcatcaaaatggatcaattccattctttcccaaaaaaaaagcagaatttgttttgaaaggagaaacattcactgaataggatttcaagctgtctttaaaaaatcagaaagcctacggaggtgatcatcactgcattgttgctaggggtgaaatgctaggggtgaaaagagtggaggtgaaaggcattaaatactctgtctggtctatcacaactagttacgctgacaagtgctgtgaatttatctttagaagaatgttgataygtgcactactggcagcatcctgagctcctgggctgcagctccagctgtccagactttgcagggctcacgttcacttccatcaagccacttctgaattcttcacaattacaccttgattaacttggcatgaagaaaagtctctgaagagcaatgcatgtaatatgctatttctttcctggctactccataaccagctgaaactaatgagaggcttcctactgatttcaatgggctctgtaactggcctatagaggtgtggcatacttaactaatggtggtgttagaaggactggcagaag

SEQ ID NO: 4369 - DNA, 590 bp, Chicken  19866894101860_1
ttgataaaaagttctcaatccgcaaggcgcccctgcctccatctaaccctgagcacagcaggcagaaaataaaccatagacagtaagctgtcattttaggcttttttagtattaagatacttattaatatgagaagtggaatggagaaacttggaagaaaattattttgaaattgaatcttcaaagtcttttcccattcagcgttcaatacatgtgtgatgtgatggtcagtgcagactccagaatttcaatttgatatttttctcagtggcatagtctgagctgctaatgtatttgaaygctcagataggctatttgcaagccagaaaagactgattttctagcccaacacagtgaaaaaattcaaacatgaattaaatttgagacacgtggctccaccaaattttgagaacatataccttctgggtaattaatttctttccacagcagtgctcccagaaacatcacccctggaacctgaaagaatctgaagagttacaaaacgcagctgtaatacatacttctgaaaaatccatgagaacagcaaatacctttggagaatcaggtgagcaaccacgtgacacttctaa

SEQ ID NO: 4370 - DNA, 600 bp, Chicken  19866894101861_1
atgtttaaacaagaataatgcaaggatattagcgaagagttactgaagtagaaatccatgtggtataactaattatatacacgcagttgacatttgtgatagggaagtttacatacgtgtagcaaatgcaactttgcaaatgcttaaggttcgtgtggcggttctgatgacaaagcctgggtttgtggcttttctaatgcaaagaaaataactccaatagatacccaaaaatggaggtgcatcaccatgtgtaccttttactgacactcagccctattaacagcctgacatcaccctgcrttgctttgggtctgctcctagaaaatacatgtctttctctaagatagagtgtactgtgactgcagacaaataaggatgcytactacaactttgatttgctctcttttaaatgctagtcatgagttagcaagtcaacatatcactgatgttcatttctattccttcagtgtttttattatttgagaactgcatcctcaagagtggatattttattatgtcatcctaatttctcctggccttgaaaatcaatactagcataaggtcttgtcagaaagtattaatgttcctgtttcattggaa

SEQ ID NO: 4371 - DNA, 600 bp, Chicken  19866894101861_2
acgcagttgacatttgtgatagggaagtttacatacgtgtagcaaatgcaactttgcaaatgcttaaggttcgtgtggcggttctgatgacaaagcctgggtttgtggcttttctaatgcaaagaaaataactccaatagatacccaaaaatggaggtgcatcaccatgtgtaccttttactgacactcagccctattaacagcctgacatcaccctgcrttgctttgggtctgctcctagaaaatacatgtctttctctaagatagagtgtactgtgactgcagacaaataaggatgcytactacaactttgatttgctctcttttaaatgctagtcatgagttagcaagtcaacatatcactgatgttcatttctattccttcagtgtttttattatttgagaactgcatcctcaagagtggatattttattatgtcatcctaatttctcctggccttgaaaatcaatactagcataaggtcttgtcagaaagtattaatgttcctgtttcattggaaatctcctcactacatagttatctggaatgataaaagctaaagaaggatcaagttaccttggaaatttactataacattat

SEQ ID NO: 4372 - DNA, 600 bp, Chicken  19866894101861_3
actgatgttcatttctattccttcagtgtttttattatttgagaactgcatcctcaagagtggatattttattatgtcatcctaatttctcctggccttgaaaatcaatactagcataaggtcttgtcagaaagtattaatgttcctgtttcattggaaatctcctcactacatagttatctggaatgataaaagctaaagaaggatcaagttaccttggaaatttactataacattatttactatggaatactgtaaaaagagaattgtcttggaattcagaaggacaccaaaatccawtttttttaatctgtagggctggaccattacaaaggtaaagaaaaaaactaggtttccatatgtaaataggaggcattacttttggagtgacctatgtaacatgacatactttggccaggagctgatgaggacctgcttctgcaatctcagaagaagagacccagtctcatcataaaggcagatgtagcaactggaaggcttttaggagttgagaacagcaaactccaaactacctggaagcacaagtggaggtccattgatgttggtgatgttctatrgcagagttccttctggcaagat

SEQ ID NO: 4373 - DNA, 584 bp, Chicken  19866894101861_4
tcagaaggacaccaaaatccawtttttttaatctgtagggctggaccattacaaaggtaaagaaaaaaactaggtttccatatgtaaataggaggcattacttttggagtgacctatgtaacatgacatactttggccaggagctgatgaggacctgcttctgcaatctcagaagaagagacccagtctcatcataaaggcagatgtagcaactggaaggcttttaggagttgagaacagcaaactccaaactacctggaagcacaagtggaggtccattgatgttggtgatgttctatrgcagagttccttctggcaagatctccctgaacttttgactcaatttacgcagattctcttctactgaaagcaactgcagaactccgtcatacctaggaaaaacatcctctgatcttcatcactacaaactgatgtatgccaaattggttataaaaatgaaacagcttttgaatggaatgtcatttttctttcatcagatgaggctggctagtaatgtatagctgctttggacagttaaagtgtaagggaacaacagaggcaacaatttgcctcttttaggcaaa

SEQ ID NO: 4374 - DNA, 600 bp, Chicken  19866894101862_1
atagtctggggggagggaggggaatcagtcacgaccacaatcacagccatcccctcctatttatttttcctcatattccaaagaaataggaaaacactgaagtttcaactaccttttttggttttcttttgttttttttttttaaataccagaattttacttagcctacacaggtagtattcttgccaaaacagtggtatactttgtatgtttggctgtaacttaaaaataaaagttctgaaactataacatacttctgagtatgatatgcccattgtttccacgtaggctaaaattaayagtggtagagagaacgttgaataatcatgggattttatgcctcttttgcttacacatgcttataggggctgcagtgcatcattccacgttgccctgcacctcaaatctacccagatggacatgttccatttactttaataaaataataagtactgtaatgccatccaaaacacctacagctcaacctagactcaaatgtaacagcgtcacacaagtttctctgggtagttggtacaggaaactcagttctttaagagccaagaatgagatagctctgagacctgaggaggatcactgcaa

SEQ ID NO: 4375 - DNA, 600 bp, Chicken  19866894101864_1
gcaacaaggaaatatgagctgaatgctttctctaacccttgcttaaaaacatcattaaagtcagctgactcagccatatgactttgcaaaattgccattcattaagacagtttgggataaattcagtccaatttcacatttgcaccacacacacacaatccagtattttgtattctgtgcttttaaagctcatctccgagaagaaaggagtgaattaattgaacactggggtttcaaaacttgtcctgggcagagcattccacctcccctgccctccggcactgcacagccccagcatcyrcgtgggatgagcctgggagcagcagcagcacccagacgcagctccatcccccttttctgcagggagcatatgaatttttctccagccaagtcttaactactgtttgtctgcagacttgtaaaatatgctaagaaaagcctaatgagacaccgatccrgcacccaaatgctatcccctgtccatcccccccagcaggccattgcctgcacagcacaggcgctgaggctgtctggttgccaggtctccacggaaggaaggaaggaaagtgggtgggtgggcgagagctggaaccggcgcta

SEQ ID NO: 4376 - DNA, 600 bp, Chicken  19866894101864_2
caacaaggaaatatgagctgaatgctttctctaacccttgcttaaaaacatcattaaagtcagctgactcagccatatgactttgcaaaattgccattcattaagacagtttgggataaattcagtccaatttcacatttgcaccacacacacacaatccagtattttgtattctgtgcttttaaagctcatctccgagaagaaaggagtgaattaattgaacactggggtttcaaaacttgtcctgggcagagcattccacctcccctgccctccggcactgcacagccccagcatcyrcgtgggatgagcctgggagcagcagcagcacccagacgcagctccatcccccttttctgcagggagcatatgaatttttctccagccaagtcttaactactgtttgtctgcagacttgtaaaatatgctaagaaaagcctaatgagacaccgatccrgcacccaaatgctatcccctgtccatcccccccagcaggccattgcctgcacagcacaggcgctgaggctgtctggttgccaggtctccacggaaggaaggaaggaaagtgggtgggtgggcgagagctggaaccggcgctac

SEQ ID NO: 4377 - DNA, 600 bp, Chicken  19866894101864_3
tccagtattttgtattctgtgcttttaaagctcatctccgagaagaaaggagtgaattaattgaacactggggtttcaaaacttgtcctgggcagagcattccacctcccctgccctccggcactgcacagccccagcatcyrcgtgggatgagcctgggagcagcagcagcacccagacgcagctccatcccccttttctgcagggagcatatgaatttttctccagccaagtcttaactactgtttgtctgcagacttgtaaaatatgctaagaaaagcctaatgagacaccgatccrgcacccaaatgctatcccctgtccatcccccccagcaggccattgcctgcacagcacaggcgctgaggctgtctggttgccaggtctccacggaaggaaggaaggaaagtgggtgggtgggcgagagctggaaccggcgctacatcggcacagggctggcttgcacatgtctgcagctgctcactactaaaaagtatgtctgtacacacatatacaaaatgcacagagcaccaatgaagacagcaggttgctaggatagtgctgcttccttcataacaaaagctaataagtgattaaaga

SEQ ID NO: 4378 - DNA, 600 bp, Chicken  19866894101868_1
atcgtttcaaaaaacgccccggcgttcccatgtatatttggaactattcgttcctcactgtggcagcagcattcatttcctaaacttctgaaatcctctttatcggtgagattctcatacactcttaagagaaagtaatggtaacctatcacttttaagactacagcttttgaaaaccagactgtcagcgtagtgcaggatgtacaataaagcgcaaacgaatggcacagagactggctggatgttttaatacgttcctagcatccgtgattgtatgattaatttgttctctctcatacwcttttcaaaatggtaggaaagcctctaccagtctaacattactgcaaattgagatccttggctcaatttagggactttattgccatggaaagcagattgataatgattattattatgaatatttgtaaggcaacagctactgcaatatttggcttatattaaaatgawttttttcttaagtatcttgagcaaatgtccaataatctgtgtataggctcacttctccaaaatgccgaaagagatttcctttcccaggagagtgcatgaagttgttggaagactcaaacaaaatacaaacct

SEQ ID NO: 4379 - DNA, 600 bp, Chicken  19866894101868_2
tttgaaaaccagactgtcagcgtagtgcaggatgtacaataaagcgcaaacgaatggcacagagactggctggatgttttaatacgttcctagcatccgtgattgtatgattaatttgttctctctcatacwcttttcaaaatggtaggaaagcctctaccagtctaacattactgcaaattgagatccttggctcaatttagggactttattgccatggaaagcagattgataatgattattattatgaatatttgtaaggcaacagctactgcaatatttggcttatattaaaatgawttttttcttaagtatcttgagcaaatgtccaataatctgtgtataggctcacttctccaaaatgccgaaagagatttcctttcccaggagagtgcatgaagttgttggaagactcaaacaaaatacaaacctgtgtaaaagcacatcttacgcagttcctgaatgtaatcacgaatagtaagagctgaacattaacaaggctgtcaaaatatacagaggctcatctggcaacaatacctgctgcttaaattactggtgattttctattgcttcttggtctgaaattttactgtctgacct

SEQ ID NO: 4380 - DNA, 599 bp, Chicken  19866894101869_1
  misc_feature (1)..(85): n is any nucleotide
nnnnnnnnnnnnnnnnnnnnnnnnnnnnnnnnnnnnnnnnnnnnnnnnnnnnnnnnnnnnnnnnnnnnnnnnnnnnnnnnnnnnncatagaaagactaagcttcgcaaaatcatttatctcttcaggcagagggactgaaatttcaggatacttaagttcagaacctttttttcacttaagaaaaaaattcagacctgcaattttatgtctgtaccttatatgtgatgcttgaaataagaaatgaagatttagaatatgcagatgccctatggtgatcagcggatgtacacaatttattrttttcttttaattactgatttgattaataaaattaggtaaagtctttctcagatgtgtgtttgtttgtttgtttgtttgttgtttgtttgtttctttgtttctctgttttaattatcctgattttttttttttttttttttgaccagaataattagcatttcataatagttattgacatacagctatcactgtcttccacgtgcactggtcaacagattatcttagctgtttcaacaatttcttataatctaggatattaaaaacagacaaacaaacgaacaaaaaacctaagtaagct

SEQ ID NO: 4381 - DNA, 600 bp, Chicken  19866894101870_1
tgtctgtcacaggtagcagtgggttctgttgtagctagcagctttgcaggagctcgtacatgcacagcacacttaagcattgcagtgtcacaaaccaaccaagttggtgcatgaaactcaagagcctggattgctgaccgtgacaaagggtttggtgagggagatcctgtgaaggctttcctttcctttcctggatttgttgtgcagcacagatcacctgaggttctgagcacctaaacagtatttttccccccatgctctcttaaccacagtgagcaaggaaattcacaacaggaggaragatctgggcaggagagtgactggctgtggctggaaactgctgaactgttacgtctgggcttcccacattcctagtgtggtcccatcttgatgacatactgtccaagtctgtatgtgacaggaaaactgatgtaaattcattaatgcgattaatggaagctcagctgaagtcctgacccatttttacagacctagcaatatgtcatgttaaatccaagggactttctctttctctttgagtctgtggatattacttggcacccttttttggagttgtgcaataactcagattgggaggga

SEQ ID NO: 4382 - DNA, 600 bp, Chicken  19866894101872_1
tttttcaggtgagaagtgatataaaaggttacagctttaggtagcaccaggggaagtttagattggatattaggaagaatttcttcatggagacagtgatcaagcactggaaggggctcagttttgttcagaacattgatgatgtttgcatccactcatccttgctcagagccccatgcacgtgtgcgtagtgccaacagctacaataaggcactatgggaccactcatatcactgattaattaactaccgtggctaacaccagcaaatgagtcaactattttgggtccttctccctccraatggttttagttcctctgttaactcacatcacctagaaccataaaatataataaattaaaatgaaacaccaatgctgacatatgtgggagtgaacaacttggtccaacctccactcccagtttgggttagcctgcctctacagaagcacgccaacttgatacatacatagcatacacacagaggtatatacatttgtgtagtacctttacatctagatgtcatctgaatggcccgacagccaagaccttttggagcacagctactgattgccaggagatctgaccaggccataaggaac

SEQ ID NO: 4383 - DNA, 534 bp, Chicken  19866894101874_1
actacgtacatatagctactggccctgaagtcccttgggccaagctaagtgccagatctgtactgggaactttgaaacaaagtcactgttgaactgtgaatacattataaacaggagggagagcaacttttgacttgggcagacagtgataggcagtgggaaacagttttaaactaaaagaggggaggaattaggtgagaagttaggcagaaactcttcactcagagggtgatgaggccctggcacagctgctcagagaagctgtaggtgcccaatacccggaggggtgcaaggccaggytggatggggccctaggcagccgatctatgtgatggggggcggccctgcacacagcaggggttggggctgggtgggctttaagatccccaccaacccaaaccattctgtgattctaaacattaaaatacagtaagttacattcaacaatgaaggcagaatactgcagaagatggaggcaccaaagtgaaataggcaggtttctgccaagcagctctcacactcccgtgccgccaa

SEQ ID NO: 4384 - DNA, 600 bp, Chicken  19866894101877_1
ggtgggtctctctgctgcggggacctctctttgcttccaggtcactttcatcctcttcatcagaggaggaggaggaggaggacgttgaggaagaggagctgctcgacttacttttcgaaggcatctctggttcctaagaagcaatggagagggacatggaaaaagtcaccacaaatgctggaatcgccgctatgggcactgcaaaccactcagcaccgcccggccaggcactgaggacaagcaggttctccccctgtgccatggaaccaggcaggtgggctggtgggacaccggggccgrggaactcttccatatcctacacccctccagatcagcgatgaagaggagtcctcctgcaggcacccccgtcccgcaatgcaggcagacccctgccgtgcccccccgcagcccccagcactcaccacgtgcttcctgggcctgccccgcggccgcttgcctctcttgcggttctgcacttctttctcgtgttccctgaaagaaggcactgcttaaagacagagcttgcatcacaaaacaaygcaccacaagcccagcccgactctgcccatttttttttccccattaaaaagcagcttttca

SEQ ID NO: 4385 - DNA, 600 bp, Chicken  19866894101877_2
agcaggttctccccctgtgccatggaaccaggcaggtgggctggtgggacaccggggccgrggaactcttccatatcctacacccctccagatcagcgatgaagaggagtcctcctgcaggcacccccgtcccgcaatgcaggcagacccctgccgtgcccccccgcagcccccagcactcaccacgtgcttcctgggcctgccccgcggccgcttgcctctcttgcggttctgcacttctttctcgtgttccctgaaagaaggcactgcttaaagacagagcttgcatcacaaaacaaygcaccacaagcccagcccgactctgcccatttttttttccccattaaaaagcagcttttcaatgaaacacaaacccgtcggtgtgcaccgagctgctgcacgtgatgcggtatgagaaaaagagaattagaaatgaagagaagggctctccaaatggtgatctcccagcagaggtggctgtcaggacaacgggacgcyccgctgcccagcggagccctgcgacacgggcggaggggtggaaagtctctgcgtaaaacacggagcgaagccgcatggactgctgcagtgcatttcccaaag

SEQ ID NO: 4386 - DNA, 600 bp, Chicken  19866894101877_3
cctgccccgcggccgcttgcctctcttgcggttctgcacttctttctcgtgttccctgaaagaaggcactgcttaaagacagagcttgcatcacaaaacaaygcaccacaagcccagcccgactctgcccatttttttttccccattaaaaagcagcttttcaatgaaacacaaacccgtcggtgtgcaccgagctgctgcacgtgatgcggtatgagaaaaagagaattagaaatgaagagaagggctctccaaatggtgatctcccagcagaggtggctgtcaggacaacgggacgcyccgctgcccagcggagccctgcgacacgggcggaggggtggaaagtctctgcgtaaaacacggagcgaagccgcatggactgctgcagtgcatttcccaaagtgctcacagagccacgtgtgtgcacgcatcaccttcccaagggctgcccaggcattttggttctgcaggagcctcttaaaacccgtgctgccttttgtggtgctttccaagaactctgtgcccaacgtggctctgcagtgggaccccaggatgttctgcacccagagctgtttatttgcatccctgttccctacaaca

SEQ ID NO: 4387 - DNA, 600 bp, Chicken  19866894101880_1
aaactcattaataacaacagaaggcctccactgcttccagcgggttttggatctgattcatgcttaccttggatgctttgtgcagtgctgccagagcactgagcgattcatgatatagggtaaatacagagtgcctcctacttattctgtcctggtaatttaaatgggttcacaactgttctctggccctgaggcaaatggtaagggacccatgtctatgctattaaacatacttctcctccacagcagacagaccacatccaagctgtctgctgggaatagtccctggcctgtgccatytcctgaaccatgcccagatctgcctggaagggggccagtctgccagctccaaaaccatgccagggactgcttgaacactttggctgttcagatgattgagttgccataccctgacattggctcatctacaaaaataaacacagtcctttgccttgactagctactgtaatcagaaataaatggtcaatattaagtccatctcaggaaaaataaaataaataaataaataaataaaatagtcaaaaaaaaaaaaaaaaaaaaaccaaaaaaacaacctcaaacaggatgaggctagtggac

SEQ ID NO: 4388 - DNA, 528 bp, Chicken  19866894101883_1
gtgtacccaaacacttgttatatttgcaaggacctctacttacctcattttctgttagctgatctggaagttctttcatttctgcatcaacattgtctttattatcagacagtgaatccagaatgttatcaggactatagtcttctccacagtctacagcactgctgttgtctatttcagcttcatctaacacactaatatccatcatgtcgatgtcttgtaaggtatccaggcttgcttcaatatcctcctaaacaaagaaaaaggtcagatgtgtacttcctgtgattttaatgatamgctgtgattaatgatacaaactgcaagcatgttttcacctacctgcccgtctctggagttttcttctagcccattgtcttccactccttcctcttctgattttcttcctaaaaataatataactgaagtgagaaacagcactgtattccataacatagctactctttgccaagttatctattcaatgctgtttcaattaataatcatgaagatcctgatccagaagcc

SEQ ID NO: 4389 - DNA, 600 bp, Chicken  19866894101898_1
agcagaacagtggtggggtttgggtctcatttcaggcatacagccatggcagcccagaaacactactattctatttattccaaaacaaatctggagaatgaagttgctgaaatctaagtctctgctgagcatgtgcaacatatatctgcaacgcttgtaggtcctatttttggctaattttccaagagaaatgcttcatgctaaaaataatcaccttccaggttacaactcccagctacagggcaagcaaacaattgaaaggaaaagtaaaattactttgtagtttaatggaacaattgrtttctgtaattggaaaatactggattttgttttcatgggtagggggaaggaacttcacagattaattttgaatttaattctgtcaatccgtactatgggaaaatatttaagccaaattaatttgaacctggcaaaagttcctgtgccattcttctgtgtagaaaacaaaatgcacagagatctgcaggacctgtgaatatcctataaattttcacatgaattattatagtttaatatctcgttttaaaacagagaaataatgaaaagttcttaagtaattctaaaatgcttaaaaccctt

SEQ ID NO: 4390 - DNA, 599 bp, Chicken  19866894101901_1
  misc_feature (1)..(74): n is any nucleotide
nnnnnnnnnnnnnnnnnnnnnnnnnnnnnnnnnnnnnnnnnnnnnnnnnnnnnnnnnnnnnnnnnnnnnnnnnnccctccctttcccaccatcacaaacatccacaaccctcatcagtccaccctccgggagacaagccttcctaggtaaagcagaaaacgatctcaacctggacacggtaggcagacgagcagaggggagagcacagtcaggatgaggcagacgtgaatcctgcgagagagaaagccccccgccccgctgggcggcccgtaggcagctctgccctccccaggagggctytttggccacgcctcctctggggcagcccttggaagagctcgggggcacttgcacagctccggacaagaagggggcgtgctgaaaaacatcaaatccacacctacaggaggaggacggcgtgggaagggaggraaggaagacggggaggacaacgcaacttacatgccaagctcgcaraaggcttttccttaggaagcaaatcgccggcgctcccggggagctctgccccagccgtgaggaggagataaggatgaggagccgcctcggccgcgccgcgcacagctcccgccccgtccggc

SEQ ID NO: 4391 - DNA, 600 bp, Chicken  19866894101901_2
acaagccttcctaggtaaagcagaaaacgatctcaacctggacacggtaggcagacgagcagaggggagagcacagtcaggatgaggcagacgtgaatcctgcgagagagaaagccccccgccccgctgggcggcccgtaggcagctctgccctccccaggagggctytttggccacgcctcctctggggcagcccttggaagagctcgggggcacttgcacagctccggacaagaagggggcgtgctgaaaaacatcaaatccacacctacaggaggaggacggcgtgggaagggaggraaggaagacggggaggacaacgcaacttacatgccaagctcgcaraaggcttttccttaggaagcaaatcgccggcgctcccggggagctctgccccagccgtgaggaggagataaggatgaggagccgcctcggccgcgccgcgcacagctcccgccccgtccggcacggctgagtgccgcttcagcaccacggacagcgccagcagcgccgccatggggggccgcgtccgcgcagcaccgcgcagcgccccgcgcctctagagtgaagccgagcyggccccgacgcgcacatgtaagc

SEQ ID NO: 4392 - DNA, 600 bp, Chicken  19866894101901_3
ggtaggcagacgagcagaggggagagcacagtcaggatgaggcagacgtgaatcctgcgagagagaaagccccccgccccgctgggcggcccgtaggcagctctgccctccccaggagggctytttggccacgcctcctctggggcagcccttggaagagctcgggggcacttgcacagctccggacaagaagggggcgtgctgaaaaacatcaaatccacacctacaggaggaggacggcgtgggaagggaggraaggaagacggggaggacaacgcaacttacatgccaagctcgcaraaggcttttccttaggaagcaaatcgccggcgctcccggggagctctgccccagccgtgaggaggagataaggatgaggagccgcctcggccgcgccgcgcacagctcccgccccgtccggcacggctgagtgccgcttcagcaccacggacagcgccagcagcgccgccatggggggccgcgtccgcgcagcaccgcgcagcgccccgcgcctctagagtgaagccgagcyggccccgacgcgcacatgtaagctgctgcccctgcgcggagcggcgagcagcgggttctgcttcttcc

SEQ ID NO: 4393 - DNA, 600 bp, Chicken  19866894101901_4
gaggacggcgtgggaagggaggraaggaagacggggaggacaacgcaacttacatgccaagctcgcaraaggcttttccttaggaagcaaatcgccggcgctcccggggagctctgccccagccgtgaggaggagataaggatgaggagccgcctcggccgcgccgcgcacagctcccgccccgtccggcacggctgagtgccgcttcagcaccacggacagcgccagcagcgccgccatggggggccgcgtccgcgcagcaccgcgcagcgccccgcgcctctagagtgaagccgagcyggccccgacgcgcacatgtaagctgctgcccctgcgcggagcggcgagcagcgggttctgcttcttccagagctgattctcttttagtctggctccaataccgatctttagttgtgctctaggaagttttgtaggggatggagatgtctcggtgtagcgcagcctcccacgaacctgggtctgggctggcattgagatgggtgggtggctgtaagtgcaatcggtttgactttctacccttggaatttgtgaaaactgcttggttttagtgtacctgtaggggtctgctgtttgctgttg

SEQ ID NO: 4394 - DNA, 600 bp, Chicken  19866894101903_1
ggcactgcaaaacaatttgaagggtgaaggtactaatttaggatccaatctagctctcattaaagtcaatggaaagattcttattgactccaatggaagctggttcaagcccataaagaccgaatgagctcatgtgaaccttctcatccaacttctcactacagaaaagaaatgatgcatcagcacctgaaccactattcatgcagagtgcctaattttgtcaccttgagtcacatacagcagctccttactgcagctcccttgggatcaagacacctgcggataatatgtagtgattcrggccgactcgaaatgctgccatctgaagaatctttcrgtttgagatgttcttttttcatttgcagtaaggtatagaatggtacragaagggcagcaaaagagaagcaaggcaaggaaaggcaagaaaaagaaaggcaggacaaggcaaggatattttcatcatgaaactaaaaagggtctccgttgacattttcaaggctgaaggtgggatgcaaggagcaaarccctcacagttttcctaaggcatcacattcctaaggaatcacatctattcctccccagccttgctgcagagagtca

SEQ ID NO: 4395 - DNA, 565 bp, Chicken  19866894101903_2
ttaggatccaatctagctctcattaaagtcaatggaaagattcttattgactccaatggaagctggttcaagcccataaagaccgaatgagctcatgtgaaccttctcatccaacttctcactacagaaaagaaatgatgcatcagcacctgaaccactattcatgcagagtgcctaattttgtcaccttgagtcacatacagcagctccttactgcagctcccttgggatcaagacacctgcggataatatgtagtgattcrggccgactcgaaatgctgccatctgaagaatctttcrgtttgagatgttcttttttcatttgcagtaaggtatagaatggtacragaagggcagcaaaagagaagcaaggcaaggaaaggcaagaaaaagaaaggcaggacaaggcaaggatattttcatcatgaaactaaaaagggtctccgttgacattttcaaggctgaaggtgggatgcaaggagcaaarccctcacagttttcctaaggcatcacattcctaaggaatcacatctattcctccccagccttgctgcagagagtcaac

SEQ ID NO: 4396 - DNA, 518 bp, Chicken  19866894101903_3
tgactccaatggaagctggttcaagcccataaagaccgaatgagctcatgtgaaccttctcatccaacttctcactacagaaaagaaatgatgcatcagcacctgaaccactattcatgcagagtgcctaattttgtcaccttgagtcacatacagcagctccttactgcagctcccttgggatcaagacacctgcggataatatgtagtgattcrggccgactcgaaatgctgccatctgaagaatctttcrgtttgagatgttcttttttcatttgcagtaaggtatagaatggtacragaagggcagcaaaagagaagcaaggcaaggaaaggcaagaaaaagaaaggcaggacaaggcaaggatattttcatcatgaaactaaaaagggtctccgttgacattttcaaggctgaaggtgggatgcaaggagcaaarccctcacagttttcctaaggcatcacattcctaaggaatcacatctattcctccccagccttgctgcagagagtcaac

SEQ ID NO: 4397 - DNA, 378 bp, Chicken  19866894101903_4
cttgagtcacatacagcagctccttactgcagctcccttgggatcaagacacctgcggataatatgtagtgattcrggccgactcgaaatgctgccatctgaagaatctttcrgtttgagatgttcttttttcatttgcagtaaggtatagaatggtacragaagggcagcaaaagagaagcaaggcaaggaaaggcaagaaaaagaaaggcaggacaaggcaaggatattttcatcatgaaactaaaaagggtctccgttgacattttcaaggctgaaggtgggatgcaaggagcaaarccctcacagttttcctaaggcatcacattcctaaggaatcacatctattcctccccagccttgctgcagagagtcaac

SEQ ID NO: 4398 - DNA, 599 bp, Chicken  19866894101907_1
  misc_feature (1)..(54): n is any nucleotide
nnnnnnnnnnnnnnnnnnnnnnnnnnnnnnnnnnnnnnnnnnnnnnnnnnnnnngattttttttaagtgccttaagatagttatctaacatataggctttttttttccccccaaaatcatccattctcttgatctactcatagctcatgaaagaaatgtaaagttcaatggttcttgattccacccattgctccaaattatattttttgaggaatgtttctgaatctgaaggaacaccctgtgacagtaaaaggcagctcataataagttcatttacttagactaaataaaaaaaatacygtagggatcacttgatacaactaccctataacatgatgctataacatgatgttcctgatcagcatktattgttatttttctccytcaattgtataaatatagccttcataaattttgacagraaatggaaatagaaatttccttttttgaactttgtctgatttctcttaacagacaagtatggtgaaaacaacagctttgtttcagtttaatcttaagttaatggactaaacttacaaacttttacctaactgtgttttgccaaaatcgattggaggtacatgtcaaatgatctattt

SEQ ID NO: 4399 - DNA, 600 bp, Chicken  19866894101907_2
gtgccttaagatagttatctaacatataggctttttttttccccccaaaatcatccattctcttgatctactcatagctcatgaaagaaatgtaaagttcaatggttcttgattccacccattgctccaaattatattttttgaggaatgtttctgaatctgaaggaacaccctgtgacagtaaaaggcagctcataataagttcatttacttagactaaataaaaaaaatacygtagggatcacttgatacaactaccctataacatgatgctataacatgatgttcctgatcagcatktattgttatttttctccytcaattgtataaatatagccttcataaattttgacagraaatggaaatagaaatttccttttttgaactttgtctgatttctcttaacagacaagtatggtgaaaacaacagctttgtttcagtttaatcttaagttaatggactaaacttacaaacttttacctaactgtgttttgccaaaatcgattggaggtacatgtcaaatgatctattttactgatccgaaatatttctaytgagtattatattctccagtctagttgattacactaaaccttact

SEQ ID NO: 4400 - DNA, 600 bp, Chicken  19866894101907_3
ctaacatataggctttttttttccccccaaaatcatccattctcttgatctactcatagctcatgaaagaaatgtaaagttcaatggttcttgattccacccattgctccaaattatattttttgaggaatgtttctgaatctgaaggaacaccctgtgacagtaaaaggcagctcataataagttcatttacttagactaaataaaaaaaatacygtagggatcacttgatacaactaccctataacatgatgctataacatgatgttcctgatcagcatktattgttatttttctccytcaattgtataaatatagccttcataaattttgacagraaatggaaatagaaatttccttttttgaactttgtctgatttctcttaacagacaagtatggtgaaaacaacagctttgtttcagtttaatcttaagttaatggactaaacttacaaacttttacctaactgtgttttgccaaaatcgattggaggtacatgtcaaatgatctattttactgatccgaaatatttctaytgagtattatattctccagtctagttgattacactaaaccttactctcgttctttattttgtt

SEQ ID NO: 4401 - DNA, 600 bp, Chicken  19866894101907_4
attctcttgatctactcatagctcatgaaagaaatgtaaagttcaatggttcttgattccacccattgctccaaattatattttttgaggaatgtttctgaatctgaaggaacaccctgtgacagtaaaaggcagctcataataagttcatttacttagactaaataaaaaaaatacygtagggatcacttgatacaactaccctataacatgatgctataacatgatgttcctgatcagcatktattgttatttttctccytcaattgtataaatatagccttcataaattttgacagraaatggaaatagaaatttccttttttgaactttgtctgatttctcttaacagacaagtatggtgaaaacaacagctttgtttcagtttaatcttaagttaatggactaaacttacaaacttttacctaactgtgttttgccaaaatcgattggaggtacatgtcaaatgatctattttactgatccgaaatatttctaytgagtattatattctccagtctagttgattacactaaaccttactctcgttctttattttgtttttctttsatgcaaagtctcacaaaaagcaaccattct

SEQ ID NO: 4402 - DNA, 600 bp, Chicken  19866894101907_5
taccctataacatgatgctataacatgatgttcctgatcagcatktattgttatttttctccytcaattgtataaatatagccttcataaattttgacagraaatggaaatagaaatttccttttttgaactttgtctgatttctcttaacagacaagtatggtgaaaacaacagctttgtttcagtttaatcttaagttaatggactaaacttacaaacttttacctaactgtgttttgccaaaatcgattggaggtacatgtcaaatgatctattttactgatccgaaatatttctaytgagtattatattctccagtctagttgattacactaaaccttactctcgttctttattttgtttttctttsatgcaaagtctcacaaaaagcaaccattctgtcaagtttatattgaaaagatactgagctgctaagccttattgaaaatcatattgtactgaaacaccattgtagatttttaagactaatatattccaatgcaagataatatactatgacattttgaaatgctgataaaactcatgtctaatctatactgcatcaattttaccaattgtcctatgtcactttcctgtac

SEQ ID NO: 4403 - DNA, 600 bp, Chicken  19866894101907_6
ataaatatagccttcataaattttgacagraaatggaaatagaaatttccttttttgaactttgtctgatttctcttaacagacaagtatggtgaaaacaacagctttgtttcagtttaatcttaagttaatggactaaacttacaaacttttacctaactgtgttttgccaaaatcgattggaggtacatgtcaaatgatctattttactgatccgaaatatttctaytgagtattatattctccagtctagttgattacactaaaccttactctcgttctttattttgtttttctttsatgcaaagtctcacaaaaagcaaccattctgtcaagtttatattgaaaagatactgagctgctaagccttattgaaaatcatattgtactgaaacaccattgtagatttttaagactaatatattccaatgcaagataatatactatgacattttgaaatgctgataaaactcatgtctaatctatactgcatcaattttaccaattgtcctatgtcactttcctgtactttcagattactcacactgattatcttcacttgcttttctggcaatttagttatgttatagatgcaattgt

SEQ ID NO: 4404 - DNA, 600 bp, Chicken  19866894101924_1
gtgagctgtgctgcctgcccatgagcatccagaagtgcataaacaaaaacacacagcatttatgtcaccaccgtcaccgtaaactgtgacatcaacctccactgaagaggttcatcaagttgtccacaattaatcatagaatcatagaatggcctgggttgaaaaggaccacaatgaccatcgagtttcaacccccccctgctatgtgcagggtcaccaaccaccagaccaggctgcccagagccacatccagcctggccttgaatgcctccagggatggggcatccacaacctccctgrgcaacctgttccmgtgtgtcaccaccctgtgtgaaaaacttcttcctaacatccaacctaaacctcccctgtcccagtttaaaaccattcccccttgtcctatcactatccacccttgtaaacagggttaatgatcaagataaactataatgatcaatataaaaatgataacgcctattgccactagaaaatttgctatatatcactgcaaaccgattgtgcaaattcacagtgttctatttccccatcgtgctctaaaccagtcgattacggggcataagctgcgaaataagagcagct

SEQ ID NO: 4405 - DNA, 600 bp, Chicken  19866894101924_2
cctgcccatgagcatccagaagtgcataaacaaaaacacacagcatttatgtcaccaccgtcaccgtaaactgtgacatcaacctccactgaagaggttcatcaagttgtccacaattaatcatagaatcatagaatggcctgggttgaaaaggaccacaatgaccatcgagtttcaacccccccctgctatgtgcagggtcaccaaccaccagaccaggctgcccagagccacatccagcctggccttgaatgcctccagggatggggcatccacaacctccctgrgcaacctgttccmgtgtgtcaccaccctgtgtgaaaaacttcttcctaacatccaacctaaacctcccctgtcccagtttaaaaccattcccccttgtcctatcactatccacccttgtaaacagggttaatgatcaagataaactataatgatcaatataaaaatgataacgcctattgccactagaaaatttgctatatatcactgcaaaccgattgtgcaaattcacagtgttctatttccccatcgtgctctaaaccagtcgattacggggcataagctgcgaaataagagcagctactttgcacagac

SEQ ID NO: 4406 - DNA, 600 bp, Chicken  19866894101931_1
atcggaatggttttctggttttgtcagctgctctccatggaccgcaggaatggaatgtaatgtttaggattcagagaaggtattattttaacatcaagctttctattgctaggaagaaatgaagtttaactgtttactcagcagtcttggattcagttgaattttattttgctcatacactggaaaattagccaaagaatatgtttattaatggaaaatgaaagggatgttaagtgactcaatctgatatgatagttaacaaaagaagatgtgtcctcccaaaccccagaaaaaaagaamaagaaaaaaaaaagccagaaataaagacataaccttcccttccctcccatcacttcaggcctttgtaaattttttcmagcttttctctcacgctggaaaatgaggtgattttctttaactttttgtcctagttctggcagcattttttcatggtaaattcaaaatagaacaagtaagttttattcatatgaaaaggcttcgttgtaaacaatagattatttaccaggttttaaaatctcttcactcggaatagcctgttatactgagctagaacaatggaaagaaagcctgaaaatttgc

SEQ ID NO: 4407 - DNA, 600 bp, Chicken  19866894101931_2
tcggaatggttttctggttttgtcagctgctctccatggaccgcaggaatggaatgtaatgtttaggattcagagaaggtattattttaacatcaagctttctattgctaggaagaaatgaagtttaactgtttactcagcagtcttggattcagttgaattttattttgctcatacactggaaaattagccaaagaatatgtttattaatggaaaatgaaagggatgttaagtgactcaatctgatatgatagttaacaaaagaagatgtgtcctcccaaaccccagaaaaaaagaaamagaaaaaaaaaagccagaaataaagacataaccttcccttccctcccatcacttcaggcctttgtaaattttttcmagcttttctctcacgctggaaaatgaggtgattttctttaactttttgtcctagttctggcagcattttttcatggtaaattcaaaatagaacaagtaagttttattcatatgaaaaggcttcgttgtaaacaatagattatttaccaggttttaaaatctcttcactcggaatagcctgttatactgagctagaacaatggaaagaaagcctgaaaatttgca

SEQ ID NO: 4408 - DNA, 600 bp, Chicken  19866894101931_3
cggaatggttttctggttttgtcagctgctctccatggaccgcaggaatggaatgtaatgtttaggattcagagaaggtattattttaacatcaagctttctattgctaggaagaaatgaagtttaactgtttactcagcagtcttggattcagttgaattttattttgctcatacactggaaaattagccaaagaatatgtttattaatggaaaatgaaagggatgttaagtgactcaatctgatatgatagttaacaaaagaagatgtgtcctcccaaaccccagaaaaaaagaaaamgaaaaaaaaaagccagaaataaagacataaccttcccttccctcccatcacttcaggcctttgtaaattttttcmagcttttctctcacgctggaaaatgaggtgattttctttaactttttgtcctagttctggcagcattttttcatggtaaattcaaaatagaacaagtaagttttattcatatgaaaaggcttcgttgtaaacaatagattatttaccaggttttaaaatctcttcactcggaatagcctgttatactgagctagaacaatggaaagaaagcctgaaaatttgcac

SEQ ID NO: 4409 - DNA, 600 bp, Chicken  19866894101931_4
ggaatggttttctggttttgtcagctgctctccatggaccgcaggaatggaatgtaatgtttaggattcagagaaggtattattttaacatcaagctttctattgctaggaagaaatgaagtttaactgtttactcagcagtcttggattcagttgaattttattttgctcatacactggaaaattagccaaagaatatgtttattaatggaaaatgaaagggatgttaagtgactcaatctgatatgatagttaacaaaagaagatgtgtcctcccaaaccccagaaaaaaagaaaaamaaaaaaaaaagccagaaataaagacataaccttcccttccctcccatcacttcaggcctttgtaaattttttcmagcttttctctcacgctggaaaatgaggtgattttctttaactttttgtcctagttctggcagcattttttcatggtaaattcaaaatagaacaagtaagttttattcatatgaaaaggcttcgttgtaaacaatagattatttaccaggttttaaaatctcttcactcggaatagcctgttatactgagctagaacaatggaaagaaagcctgaaaatttgcact

SEQ ID NO: 4410 - DNA, 600 bp, Chicken  19866894101931_5
aggtattattttaacatcaagctttctattgctaggaagaaatgaagtttaactgtttactcagcagtcttggattcagttgaattttattttgctcatacactggaaaattagccaaagaatatgtttattaatggaaaatgaaagggatgttaagtgactcaatctgatatgatagttaacaaaagaagatgtgtcctcccaaaccccagaaaaaaagaaaaagaaaaaaaaaagccagaaataaagacataaccttcccttccctcccatcacttcaggcctttgtaaattttttcmagcttttctctcacgctggaaaatgaggtgattttctttaactttttgtcctagttctggcagcattttttcatggtaaattcaaaatagaacaagtaagttttattcatatgaaaaggcttcgttgtaaacaatagattatttaccaggttttaaaatctcttcactcggaatagcctgttatactgagctagaacaatggaaagaaagcctgaaaatttgcacttttcagtatattcctactcctaatgggtatcagattctgttctatgcttctattcaaacccattttctggtagg

SEQ ID NO: 4411 - DNA, 600 bp, Chicken  19866894101933_1
attggaaggctgcaatgaggtccccccagagccaagggcagacaagctaaacaaggccagttccctcaacttttcctcatagcagagatgctccagccctctgatcatcttagtggccctcctctggacccactccaagagctccacgtcattcttgtactgggggcaccaggcctggatgcagtactccagatgaggcctcacaagagctgagtagaagggcacaatcacctccctctccctgctggccaacccttttttaatgcagcccagaacacagttggccttccgggctgcaakygcacactgctggctcatgcccagcttctcgtccaccaggaccaccaagtccttctccgcgggactgctctcaaggagatcttctcccagtttgtataaatagtcggggcaatcccaacccaagtgcagcaccctgcacttggccctattgaacctcattaggttttcatgggcccacttctccagcctatccaggtccctctggatggcttcccttccctccagtgtactgactgcactgctcagcttggtgtcatctgcaaacttgcwgagagtgcacttgatgccatcatgtcactg

SEQ ID NO: 4412 - DNA, 600 bp, Chicken  19866894101933_2
ttggaaggctgcaatgaggtccccccagagccaagggcagacaagctaaacaaggccagttccctcaacttttcctcatagcagagatgctccagccctctgatcatcttagtggccctcctctggacccactccaagagctccacgtcattcttgtactgggggcaccaggcctggatgcagtactccagatgaggcctcacaagagctgagtagaagggcacaatcacctccctctccctgctggccaacccttttttaatgcagcccagaacacagttggccttccgggctgcaakygcacactgctggctcatgcccagcttctcgtccaccaggaccaccaagtccttctccgcgggactgctctcaaggagatcttctcccagtttgtataaatagtcggggcaatcccaacccaagtgcagcaccctgcacttggccctattgaacctcattaggttttcatgggcccacttctccagcctatccaggtccctctggatggcttcccttccctccagtgtactgactgcactgctcagcttggtgtcatctgcaaacttgcwgagagtgcacttgatgccatcatgtcactga

SEQ ID NO: 4413 - DNA, 600 bp, Chicken  19866894101933_3
cagaacacagttggccttccgggctgcaakygcacactgctggctcatgcccagcttctcgtccaccaggaccaccaagtccttctccgcgggactgctctcaaggagatcttctcccagtttgtataaatagtcggggcaatcccaacccaagtgcagcaccctgcacttggccctattgaacctcattaggttttcatgggcccacttctccagcctatccaggtccctctggatggcttcccttccctccagtgtactgactgcactgctcagcttggtgtcatctgcaaacttgcwgagagtgcacttgatgccatcatgtcactgatgaagatgttgaagagcacatatcatcagaactttctttatttcgttaaattaaccaccctttaatccaatttctccaggccagtacaagctacacaggtatggctagcaatcggttgatttccggatgaaaaaaagaactaaaagattggactgcacacatttaagatgacagttccgataaaagaatcttagaagtgaggatggaaaagaccactaaaatcatccagcacaagcaaagtactatacaggtgagcacatgtcatacat

SEQ ID NO: 4414 - DNA, 600 bp, Chicken  19866894101938_1
tgtctagtgaagtccctgatgactggaaaaagggaaacactgctccccgtttttaagaaagggagaaaggaagacctggggaactacaggccggtgagcctcacctctgtgcctgggaagatcatggagcagatcctcctagaagctctgttaaggcacatacgagataaagcggtgattcaaggcagccagcatggcttcaccaagggcagatcgtgcctgaccaatctggtggccgtctatgatggagtgacggctttggtggatgggagaaggacggtggatgtcatctacctggayttctgcaaggcctttgacatggtccctcaccacatccttctctctaaattgcagaagtgtggatttgaaggatggactgttcaatggattaggaatcggctggctggacgcagccaaagagttgtgatcaatgggtctgtgtcagggtggaggccggtcacaagtggtgtctctcagggttggtcttgggactggtgytcttcaacatctttatcagtgacagacgatggcatcgagtgcaccctcagcaagtttgcggatgacactaagctgagtggtgcagtcggtacactggaagga

SEQ ID NO: 4415 - DNA, 600 bp, Chicken  19866894101938_2
ttcaccaagggcagatcgtgcctgaccaatctggtggccgtctatgatggagtgacggctttggtggatgggagaaggacggtggatgtcatctacctggayttctgcaaggcctttgacatggtccctcaccacatccttctctctaaattgcagaagtgtggatttgaaggatggactgttcaatggattaggaatcggctggctggacgcagccaaagagttgtgatcaatgggtctgtgtcagggtggaggccggtcacaagtggtgtctctcagggttggtcttgggactggtgytcttcaacatctttatcagtgacagacgatggcatcgagtgcaccctcagcaagtttgcggatgacactaagctgagtggtgcagtcggtacactggaaggaagggaagccatccagagggacgtggagaggctggagaagtgggcccatgaaaacctaatgaggttcagtaaggccaagtgcagggtgctgcatttgggtcggggcaatcccaggtatttatacaaactgggggatgatctccttgagagcagccctgcggagaaggacttggaagtcctggtagacgagaagctgggc

SEQ ID NO: 4416 - DNA, 600 bp, Chicken  19866894101947_1
ggtgacacgggaggcggccagactctgtcctcctctgcaggcacagggctggaagtcaggcacgctgtcatgttatttgaacaaatctgatctcaaacaaaacccggccctggtgtaaacatcgagcgtctgttgtgacagctgggccaagggctctgatcacacacacacacacacaaaagtggctgtaaaatatctgaagaccgaacgggctcgtcagacacaattgcacagctcagtctgggagtggtgagtgatgaggaaccagcagcactgaggtgctggcataggctgcccagrgagctggtggagtcactgctctggaggtgtacgagagccatggaggtgtggcactgagtggcgtggtcagtgggcatggtggggatgggttgggagttggactgcatgatcttagaggtcttctccaacctttaagattctctgactctccragcactccccacrgatgattccctttgcaagtttttccatgtttcctcttccaaaatgaagttatgtagcagggcagtctcccatctgaccacagcttattgttttctatctccctacgagtattccaatatagcatgactcggctga

SEQ ID NO: 4417 - DNA, 600 bp, Chicken  19866894101947_2
gctctgatcacacacacacacacacaaaagtggctgtaaaatatctgaagaccgaacgggctcgtcagacacaattgcacagctcagtctgggagtggtgagtgatgaggaaccagcagcactgaggtgctggcataggctgcccagrgagctggtggagtcactgctctggaggtgtacgagagccatggaggtgtggcactgagtggcgtggtcagtgggcatggtggggatgggttgggagttggactgcatgatcttagaggtcttctccaacctttaagattctctgactctccragcactccccacrgatgattccctttgcaagtttttccatgtttcctcttccaaaatgaagttatgtagcagggcagtctcccatctgaccacagcttattgttttctatctccctacgagtattccaatatagcatgactcggctgaaacctcttcaaaattaaattgttcacaaaagtttactgaattcaagcttaggggaataaagaagagtaactttcgcttagaaggtatgggttttcaaaaaaagaaggaaacaaaaaaaagaaggaaagaagccccaaaacctccacatactg

SEQ ID NO: 4418 - DNA, 600 bp, Chicken  19866894101947_3
acacacacacacaaaagtggctgtaaaatatctgaagaccgaacgggctcgtcagacacaattgcacagctcagtctgggagtggtgagtgatgaggaaccagcagcactgaggtgctggcataggctgcccagrgagctggtggagtcactgctctggaggtgtacgagagccatggaggtgtggcactgagtggcgtggtcagtgggcatggtggggatgggttgggagttggactgcatgatcttagaggtcttctccaacctttaagattctctgactctccragcactccccacrgatgattccctttgcaagtttttccatgtttcctcttccaaaatgaagttatgtagcagggcagtctcccatctgaccacagcttattgttttctatctccctacgagtattccaatatagcatgactcggctgaaacctcttcaaaattaaattgttcacaaaagtttactgaattcaagcttaggggaataaagaagagtaactttcgcttagaaggtatgggttttcaaaaaaagaaggaaacaaaaaaaagaaggaaagaagccccaaaacctccacatactgcaagaaaggaaaa

SEQ ID NO: 4419 - DNA, 600 bp, Chicken  19866894101952_1
gaaatcatttacatacccacccaaaatcatttaatggcttatgggagggctggacacaaagtttttctgctcccggtagtaaacaagcagagccttggaattcaagcttattacagagaaggaaaaaacaggaactgacaccattcctctttcccatccactaataaaggcaagcacacaaatgattgattgctgctctgaacataaggtctatcagccttaggaggcctacaaacatcagttttaggcactcccccttctacttcctttgcaaaagcgctcgggtaccatgctgaaaayacacattttcctattaattcacctccaattaacacaaactcatggataacataccagtatttggatggtttcccctttagcacccctgtarcatactcattttgtttttttaaaaaattwaaacattagaagttctcaaatagaccataataagctgtagttaaggttgaaaaagcacacataccctgtctgccttactgarggcagcaaaggtgctgatgtaagaacgtatgcttctcattaaggcagatgtatccttgtaagcaaaaggcttacaagaaaccattaacttcagcctta

SEQ ID NO: 4420 - DNA, 600 bp, Chicken  19866894101952_2
gccttggaattcaagcttattacagagaaggaaaaaacaggaactgacaccattcctctttcccatccactaataaaggcaagcacacaaatgattgattgctgctctgaacataaggtctatcagccttaggaggcctacaaacatcagttttaggcactcccccttctacttcctttgcaaaagcgctcgggtaccatgctgaaaayacacattttcctattaattcacctccaattaacacaaactcatggataacataccagtatttggatggtttcccctttagcacccctgtarcatactcattttgtttttttaaaaaattwaaacattagaagttctcaaatagaccataataagctgtagttaaggttgaaaaagcacacataccctgtctgccttactgarggcagcaaaggtgctgatgtaagaacgtatgcttctcattaaggcagatgtatccttgtaagcaaaaggcttacaagaaaccattaacttcagccttaaggagaaaatcacaatcctgttatttgtacaagctggctgtttttcaagagtagctcaggatcagaacaagataaaaagggttccccacca

SEQ ID NO: 4421 - DNA, 600 bp, Chicken  19866894101952_3
ggaaaaaacaggaactgacaccattcctctttcccatccactaataaaggcaagcacacaaatgattgattgctgctctgaacataaggtctatcagccttaggaggcctacaaacatcagttttaggcactcccccttctacttcctttgcaaaagcgctcgggtaccatgctgaaaayacacattttcctattaattcacctccaattaacacaaactcatggataacataccagtatttggatggtttcccctttagcacccctgtarcatactcattttgtttttttaaaaaattwaaacattagaagttctcaaatagaccataataagctgtagttaaggttgaaaaagcacacataccctgtctgccttactgarggcagcaaaggtgctgatgtaagaacgtatgcttctcattaaggcagatgtatccttgtaagcaaaaggcttacaagaaaccattaacttcagccttaaggagaaaatcacaatcctgttatttgtacaagctggctgtttttcaagagtagctcaggatcagaacaagataaaaagggttccccaccaccaccacaaacccacatgagaatacacgt

SEQ ID NO: 4422 - DNA, 600 bp, Chicken  19866894101952_4
cataaggtctatcagccttaggaggcctacaaacatcagttttaggcactcccccttctacttcctttgcaaaagcgctcgggtaccatgctgaaaayacacattttcctattaattcacctccaattaacacaaactcatggataacataccagtatttggatggtttcccctttagcacccctgtarcatactcattttgtttttttaaaaaattwaaacattagaagttctcaaatagaccataataagctgtagttaaggttgaaaaagcacacataccctgtctgccttactgarggcagcaaaggtgctgatgtaagaacgtatgcttctcattaaggcagatgtatccttgtaagcaaaaggcttacaagaaaccattaacttcagccttaaggagaaaatcacaatcctgttatttgtacaagctggctgtttttcaagagtagctcaggatcagaacaagataaaaagggttccccaccaccaccacaaacccacatgagaatacacgtattcattctgcgggagctatagtcaataatgaaagactacagagacgtggcacaaaatggactgattacagtactgtgctaa

SEQ ID NO: 4423 - DNA, 599 bp, Chicken  19866894101953_1
  misc_feature (1)..(86): n is any nucleotide
nnnnnnnnnnnnnnnnnnnnnnnnnnnnnnnnnnnnnnnnnnnnnnnnnnnnnnnnnnnnnnnnnnnnnnnnnnnnnnnnnnnnnnagaacaaacacgagcgttggttatcagtgcacagtgtgacatacagggatgcagaggcacccttacacagtaccgatgcaatactgcaagcatctcgtcccgtggaactatctctatgtggtaccaacacagcccggacacccaagccagtctctgcccgcaggagcagggaaagtctcccaagacctcctgctcccttctcccccagccaccrcttctttcacttcctcctccgggtgtgactcttcagctcctccagctccttctccatcaggtgggactcrgcggtggtctcagagagctgcaaggcacagcgagcaactgtaatgtgctccttcaagcawcgccctaccagaagctttgctgattacactccgtgttttgtggcacaatcttcgcagagacgtcacyaagatttacagccacagscagctccaaggtgagaaaccatctgggttttggtgagagggaagccgaggcttcacacttcaccaagacagcccagagaacctg

SEQ ID NO: 4424 - DNA, 599 bp, Chicken  19866894101953_2
  misc_feature (1)..(16): n is any nucleotide
nnnnnnnnnnnnnnnnagaacaaacacgagcgttggttatcagtgcacagtgtgacatacagggatgcagaggcacccttacacagtaccgatgcaatactgcaagcatctcgtcccgtggaactatctctatgtggtaccaacacagcccggacacccaagccagtctctgcccgcaggagcagggaaagtctcccaagacctcctgctcccttctcccccagccaccrcttctttcacttcctcctccgggtgtgactcttcagctcctccagctccttctccatcaggtgggactcrgcggtggtctcagagagctgcaaggcacagcgagcaactgtaatgtgctccttcaagcawcgccctaccagaagctttgctgattacactccgtgttttgtggcacaatcttcgcagagacgtcacyaagatttacagccacagscagctccaaggtgagaaaccatctgggttttggtgagagggaagccgaggcttcacacttcaccaagacagcccagagaacctggagggcagctgtacttcctgctaagtgcagtgccacagtcacaaaagcaactttccaggtttaaarcatg

SEQ ID NO: 4425 - DNA, 600 bp, Chicken  19866894101953_3
agggatgcagaggcacccttacacagtaccgatgcaatactgcaagcatctcgtcccgtggaactatctctatgtggtaccaacacagcccggacacccaagccagtctctgcccgcaggagcagggaaagtctcccaagacctcctgctcccttctcccccagccaccrcttctttcacttcctcctccgggtgtgactcttcagctcctccagctccttctccatcaggtgggactcrgcggtggtctcagagagctgcaaggcacagcgagcaactgtaatgtgctccttcaagcawcgccctaccagaagctttgctgattacactccgtgttttgtggcacaatcttcgcagagacgtcacyaagatttacagccacagscagctccaaggtgagaaaccatctgggttttggtgagagggaagccgaggcttcacacttcaccaagacagcccagagaacctggagggcagctgtacttcctgctaagtgcagtgccacagtcacaaaagcaactttccaggtttaaarcatggagagaacataaagcaggaaaacgctgaaggaacagctatttcttcaggctgacataaagg

SEQ ID NO: 4426 - DNA, 600 bp, Chicken  19866894101953_4
ctctatgtggtaccaacacagcccggacacccaagccagtctctgcccgcaggagcagggaaagtctcccaagacctcctgctcccttctcccccagccaccrcttctttcacttcctcctccgggtgtgactcttcagctcctccagctccttctccatcaggtgggactcrgcggtggtctcagagagctgcaaggcacagcgagcaactgtaatgtgctccttcaagcawcgccctaccagaagctttgctgattacactccgtgttttgtggcacaatcttcgcagagacgtcacyaagatttacagccacagscagctccaaggtgagaaaccatctgggttttggtgagagggaagccgaggcttcacacttcaccaagacagcccagagaacctggagggcagctgtacttcctgctaagtgcagtgccacagtcacaaaagcaactttccaggtttaaarcatggagagaacataaagcaggaaaacgctgaaggaacagctatttcttcaggctgacataaaggccaaatcatttagtacgctcagagtatacacatattgtatttcggcagagaaattctccagattttg

SEQ ID NO: 4427 - DNA, 600 bp, Chicken  19866894101953_5
cagcccggacacccaagccagtctctgcccgcaggagcagggaaagtctcccaagacctcctgctcccttctcccccagccaccrcttctttcacttcctcctccgggtgtgactcttcagctcctccagctccttctccatcaggtgggactcrgcggtggtctcagagagctgcaaggcacagcgagcaactgtaatgtgctccttcaagcawcgccctaccagaagctttgctgattacactccgtgttttgtggcacaatcttcgcagagacgtcacyaagatttacagccacagscagctccaaggtgagaaaccatctgggttttggtgagagggaagccgaggcttcacacttcaccaagacagcccagagaacctggagggcagctgtacttcctgctaagtgcagtgccacagtcacaaaagcaactttccaggtttaaarcatggagagaacataaagcaggaaaacgctgaaggaacagctatttcttcaggctgacataaaggccaaatcatttagtacgctcagagtatacacatattgtatttcggcagagaaattctccagattttgaacgtgcaaggctgcatt

SEQ ID NO: 4428 - DNA, 600 bp, Chicken  19866894101953_6
actcrgcggtggtctcagagagctgcaaggcacagcgagcaactgtaatgtgctccttcaagcawcgccctaccagaagctttgctgattacactccgtgttttgtggcacaatcttcgcagagacgtcacyaagatttacagccacagscagctccaaggtgagaaaccatctgggttttggtgagagggaagccgaggcttcacacttcaccaagacagcccagagaacctggagggcagctgtacttcctgctaagtgcagtgccacagtcacaaaagcaactttccaggtttaaarcatggagagaacataaagcaggaaaacgctgaaggaacagctatttcttcaggctgacataaaggccaaatcatttagtacgctcagagtatacacatattgtatttcggcagagaaattctccagattttgaacgtgcaaggctgcattttggttagttttgtgctggggaattctgtcacccataggcttacacacggaacagatgtaagagccctcgtcaggccacaaggaagatcctagagccttaatcctccgtgacccgacacagcactcgcaggggctcccgtccaactcagc

SEQ ID NO: 4429 - DNA, 600 bp, Chicken  19866894101967_1
gtttggcttttcaaaagctagggggagggaaaaggaaggatctcaaaatttttctctggtgggaggtaagagctttctttcataatcatgaatatttctaagaagcagtgaaatgaaaattaacacaattcttttcttattccatatgaaataactatttctagggcagaaaatatttgggcctatttaacagcatgtggttgaactacaataaatcattgtatgaagaaagtaaggaagaaatctctctgcggctgcagggcaaatttggtcagagaatgcaattagccaagataaaawaaaaaaaaaaaaatgtctgaaagaacagaaaatgcagcattgtttctgaactgtgttgtggtaacttgagtgaatgcaagcggtcagcatagtagattcaagtgttgtctggtggcctgcaataaaaaaaaaaaagaacaataacaatgacaggactaaataggaggagaggtactttttgaggacaaatgctaaaataaatatgtaagccataaccaggagatctggggaagataaatatatttttcagtcattcaaagagaagtttctttatgcttcagtgttgagttaataaagcca

SEQ ID NO: 4430 - DNA, 600 bp, Chicken  19866894101971_1
aagttagaagtcggggaggtttttcactgagggtggtaaagcactggcgtaggctactcaaagaggttgtggatgccccatccctggaggaattcaagaccaggttggatgggtccctgtgcaacctgatctaatgcctgatctagtgggtggcagccctgcccacagtaggttttggaattggatgatcttagaggtcccttccaacccaagtcattctatgatactatggttctatggagtctgcaagcctgtgctgactgcagacatctgaaggggtcagtttgaaaatctaggtamctgtcaaacttagtatcattactactacataaactagtcattattattattgtctacataatttaaacagaatgttcctagtatttatcattccrattatcccaattcatggcttattttgctaataagtgcttaccagggtgataaatgaaggatgctgtcaattcaaaaaatagcttttttttttcctggcttgtgtctaaatgtgctrtgtgtgctgcaygtggcagtgttagattgtggggacactgcaatcatgaggtcactctgttaaatggtgctttggaagtgcatggtact

SEQ ID NO: 4431 - DNA, 600 bp, Chicken  19866894101971_2
aagaccaggttggatgggtccctgtgcaacctgatctaatgcctgatctagtgggtggcagccctgcccacagtaggttttggaattggatgatcttagaggtcccttccaacccaagtcattctatgatactatggttctatggagtctgcaagcctgtgctgactgcagacatctgaaggggtcagtttgaaaatctaggtamctgtcaaacttagtatcattactactacataaactagtcattattattattgtctacataatttaaacagaatgttcctagtatttatcattccrattatcccaattcatggcttattttgctaataagtgcttaccagggtgataaatgaaggatgctgtcaattcaaaaaatagcttttttttttcctggcttgtgtctaaatgtgctrtgtgtgctgcaygtggcagtgttagattgtggggacactgcaatcatgaggtcactctgttaaatggtgctttggaagtgcatggtactgataatttcattttttgatagcatctttctctacaggcatrattacctagcagtagggcttgaagcaggaggaggcttaggtaastgtttttgtg

SEQ ID NO: 4432 - DNA, 600 bp, Chicken  19866894101971_3
aattggatgatcttagaggtcccttccaacccaagtcattctatgatactatggttctatggagtctgcaagcctgtgctgactgcagacatctgaaggggtcagtttgaaaatctaggtamctgtcaaacttagtatcattactactacataaactagtcattattattattgtctacataatttaaacagaatgttcctagtatttatcattccrattatcccaattcatggcttattttgctaataagtgcttaccagggtgataaatgaaggatgctgtcaattcaaaaaatagcrtttttttttcctggcttgtgtctaaatgtgctrtgtgtgctgcaygtggcagtgttagattgtggggacactgcaatcatgaggtcactctgttaaatggtgctttggaagtgcatggtactgataatttcattttttgatagcatctttctctacaggcatrattacctagcagtagggcttgaagcaggaggaggcttaggtaastgtttttgtggccccaattaagcaaaactcaagtcagtaaagcagaaataatgtttaactctagcagcagagagcgctgccaaactmcctgcc

SEQ ID NO: 4433 - DNA, 600 bp, Chicken  19866894101971_4
agtcattctatgatactatggttctatggagtctgcaagcctgtgctgactgcagacatctgaaggggtcagtttgaaaatctaggtamctgtcaaacttagtatcattactactacataaactagtcattattattattgtctacataatttaaacagaatgttcctagtatttatcattccrattatcccaattcatggcttattttgctaataagtgcttaccagggtgataaatgaaggatgctgtcaattcaaaaaatagcttttttttttcctggcttgtgtctaaatgtgctrtgtgtgctgcaygtggcagtgttagattgtggggacactgcaatcatgaggtcactctgttaaatggtgctttggaagtgcatggtactgataatttcattttttgatagcatctttctctacaggcatrattacctagcagtagggcttgaagcaggaggaggcttaggtaastgtttttgtggccccaattaagcaaaactcaagtcagtaaagcagaaataatgtttaactctagcagcagagagcgctgccaaactmcctgcccccacttttggaagtgatacaggctagtaagag

SEQ ID NO: 4434 - DNA, 600 bp, Chicken  19866894101971_5
atactatggttctatggagtctgcaagcctgtgctgactgcagacatctgaaggggtcagtttgaaaatctaggtamctgtcaaacttagtatcattactactacataaactagtcattattattattgtctacataatttaaacagaatgttcctagtatttatcattccrattatcccaattcatggcttattttgctaataagtgcttaccagggtgataaatgaaggatgctgtcaattcaaaaaatagcttttttttttcctggcttgtgtctaaatgtgctrtgtgtgctgcaygtggcagtgttagattgtggggacactgcaatcatgaggtcactctgttaaatggtgctttggaagtgcatggtactgataatttcattttttgatagcatctttctctacaggcatrattacctagcagtagggcttgaagcaggaggaggcttaggtaastgtttttgtggccccaattaagcaaaactcaagtcagtaaagcagaaataatgtttaactctagcagcagagagcgctgccaaactmcctgcccccacttttggaagtgatacaggctagtaagaggtcatgaatctg

SEQ ID NO: 4435 - DNA, 600 bp, Chicken  19866894101971_6
tattattattgtctacataatttaaacagaatgttcctagtatttatcattccrattatcccaattcatggcttattttgctaataagtgcttaccagggtgataaatgaaggatgctgtcaattcaaaaaatagcttttttttttcctggcttgtgtctaaatgtgctrtgtgtgctgcaygtggcagtgttagattgtggggacactgcaatcatgaggtcactctgttaaatggtgctttggaagtgcatggtactgataatttcattttttgatagcatctttctctacaggcatrattacctagcagtagggcttgaagcaggaggaggcttaggtaastgtttttgtggccccaattaagcaaaactcaagtcagtaaagcagaaataatgtttaactctagcagcagagagcgctgccaaactmcctgcccccacttttggaagtgatacaggctagtaagaggtcatgaatctggcctgattggactagctcactactgaagagggttttgaagttgcttcaacaccgggattcattgtgaccttggacaacaaacacaccctgcctggcctcctgttacagctcaacaagg

SEQ ID NO: 4436 - DNA, 600 bp, Chicken  19866894101971_7
tatcattccrattatcccaattcatggcttattttgctaataagtgcttaccagggtgataaatgaaggatgctgtcaattcaaaaaatagcttttttttttcctggcttgtgtctaaatgtgctrtgtgtgctgcaygtggcagtgttagattgtggggacactgcaatcatgaggtcactctgttaaatggtgctttggaagtgcatggtactgataatttcattttttgatagcatctttctctacaggcatrattacctagcagtagggcttgaagcaggaggaggcttaggtaastgtttttgtggccccaattaagcaaaactcaagtcagtaaagcagaaataatgtttaactctagcagcagagagcgctgccaaactmcctgcccccacttttggaagtgatacaggctagtaagaggtcatgaatctggcctgattggactagctcactactgaagagggttttgaagttgcttcaacaccgggattcattgtgaccttggacaacaaacacaccctgcctggcctcctgttacagctcaacaagggtcccctaagaatgtgagcctaaatttttcttttcctgaaaccc

SEQ ID NO: 4437 - DNA, 600 bp, Chicken  19866894101971_8
atagcttttttttttcctggcttgtgtctaaatgtgctrtgtgtgctgcaygtggcagtgttagattgtggggacactgcaatcatgaggtcactctgttaaatggtgctttggaagtgcatggtactgataatttcattttttgatagcatctttctctacaggcatrattacctagcagtagggcttgaagcaggaggaggcttaggtaastgtttttgtggccccaattaagcaaaactcaagtcagtaaagcagaaataatgtttaactctagcagcagagagcgctgccaaactmcctgcccccacttttggaagtgatacaggctagtaagaggtcatgaatctggcctgattggactagctcactactgaagagggttttgaagttgcttcaacaccgggattcattgtgaccttggacaacaaacacaccctgcctggcctcctgttacagctcaacaagggtcccctaagaatgtgagcctaaatttttcttttcctgaaacccataactatgtgtaggaggacagtgggagagcttccctggaccatccttcccaggggcagcaatggtcatctggggactgatgccact

SEQ ID NO: 4438 - DNA, 600 bp, Chicken  19866894101974_1
ctattaaaaatcctcaacagaccacagtaacttagcagctctttttgcatttctatgccacagcaggcctccagtgaaatgggagaggatgtagctaacagcacttttccccttttctaggtggctaatcatcaagttttgctttgaaaacatgtgaaatgactcagtttgtatgagctttatgatgtcaagccctatcttcatccactcagaagaagaaatagataatggttgttaagctttttacataaaatttataacagtcactgactcaggctcttcaataacataattttatcrtagctgattatctttgtggatttcaactgttgcaaggcagtaaaactaggcactataaatacgttttccaccaacattcaacatgactgaagtattactttgaataatacatgacttagaaataattcatttcaagctaaactttgctttataaacaatcaattgaaagaaaatcacaaaactgaaaacataagaaaatgctttaatgaaaccctgtcctacatgggttttatttattacaactcctgaagataatctgcattcaggaatactgagccacagcagttgatagatttggaa

SEQ ID NO: 4439 - DNA, 600 bp, Chicken  19866894101975_1
actaagacacaggactggcaactctgaaacttttcttgaagcataatgctccaacaataatgatgcatgttaacatctgagactttgacatttaaattctcgggttgtctttgaaaggcatggcaggaggtatcctccagaagaaccaaggagaaagtaaatactgcaacaatctattttactgcttccctgtgtgtttgcccttcaataatacttttacgtctttttcagtatttcccacaattcttttaattgggaaaaacttttcccttataaattgctttgaaattggcgaaagaygaaagggccactcccaaatgacactgcctcattaacaccacgagaacagagccagcagcctgcagtaggattgcacatccacaacagggcaccactgtggctctcaaacctacctgaataattacyagacaagtacaggcaaccatctaaagtcataacagcggacatcttaatgatacaaatacctacagttacttggggtattaattaccctcctttctgagggaaaggatgaaatcttatctgacactgttcagcggctgcttccaaaggatcacaacttggttgtcctacagcctg

SEQ ID NO: 4440 - DNA, 600 bp, Chicken  19866894101975_2
gaggtatcctccagaagaaccaaggagaaagtaaatactgcaacaatctattttactgcttccctgtgtgtttgcccttcaataatacttttacgtctttttcagtatttcccacaattcttttaattgggaaaaacttttcccttataaattgctttgaaattggcgaaagaygaaagggccactcccaaatgacactgcctcattaacaccacgagaacagagccagcagcctgcagtaggattgcacatccacaacagggcaccactgtggctctcaaacctacctgaataattacyagacaagtacaggcaaccatctaaagtcataacagcggacatcttaatgatacaaatacctacagttacttggggtattaattaccctcctttctgagggaaaggatgaaatcttatctgacactgttcagcggctgcttccaaaggatcacaacttggttgtcctacagcctgaacccaggcatctcacatctgagcttctcagtgtactaaaggtatttctaaggtcctgataaagaaaacaggagtctgtttaaaatagagtgtctgagtgaaaaaaaatagaataatatgaaactt

SEQ ID NO: 4441 - DNA, 600 bp, Chicken  19866894101976_1
atcatgtttgtaatttcgtggtgattttattgctgcttgcagcaccttcgtaacactctcgcttcaaaatgttttattaacattaatttaaacacctattttgtttcagttacagcaaagcaaacgaagaaacaaagcagaatttattctccatgattcctgggtttgttacccacgttgtgaataagccatgctatgcatgtagcggtgcctacaccggttctgcacctcccagcctgactgaggggactctcctgccagagcacagagcacatcgcttctggaaaggactgggattcytccagggccatcttgggcccagaaccacttccatcagccaggttttccttctttcaattttgcagctccccacttcccctaataacggagagctgattatgttttaatttcacagatgattacgtttagggtattacattcgcagaagattaaattgcaggttgcagagaaacagccaggttcaggcacgaaccaaagaaaggtcttacttagactaatgggcacattaagggaatgaagttatagctatttttgttatttgacgccraactatttggggacacggtatcccgtgtgcgc

SEQ ID NO: 4442 - DNA, 600 bp, Chicken  19866894101976_2
agcacatcgcttctggaaaggactgggattcytccagggccatcttgggcccagaaccacttccatcagccaggttttccttctttcaattttgcagctccccacttcccctaataacggagagctgattatgttttaatttcacagatgattacgtttagggtattacattcgcagaagattaaattgcaggttgcagagaaacagccaggttcaggcacgaaccaaagaaaggtcttacttagactaatgggcacattaagggaatgaagttatagctatttttgttatttgacgccraactatttggggacacggtatcccgtgtgcgcctggctccatcacttttctgctttatggcccctttctctttcctgggttctgcccacgcctttgttaatccaccctcctaacaaataaatgctctgactgtgagttcatgtgcaccagagagctgcttctgatttatagtaaggcgagctagaacagcacttaggtcaggatatcagttttagtgtacaaactcctgagtgtgaaaatccccccccgggaggcatcgtaaaggagtggggtttgattttcatcacgtttggagatgca

SEQ ID NO: 4443 - DNA, 599 bp, Chicken  19866894101980_1
  misc_feature (1)..(79): n is any nucleotide
nnnnnnnnnnnnnnnnnnnnnnnnnnnnnnnnnnnnnnnnnnnnnnnnnnnnnnnnnnnnnnnnnnnnnnnnnnnnnnnaactacacaaactgcagaacaacctaccattaaaactgtacctttcttgattgtaacaatttaggtgagctttctgttaagtcaggcaataacgaacaactgtagaaagcattcaagtatcaaacttaattcagttttataatacgtatgctaacaaatagcttgtgaagcaaaatttcaaacagacgtttgtaagtacaacagctcatttgggaagagcrctcctttttaccttggtattcagtaactcgtaccttcaaagttcattgattcatgtgcaaacaactatacagatgtgtaaaatgcaggtgattactctgagccagccttaaaccacctgacactcacaaaaccttgcacggtacttacacttgtaagttggagtttttaaaaattctatatttatgcacactgtaagatttagaagcttcatatattggaacacattccagccaagcctgcatcacaacattgtgttcacttcagaagctagtgcattccgaaggaaggcacggctaca

SEQ ID NO: 4444 - DNA, 600 bp, Chicken  19866894101980_2
tggttctcttataatccaaagattgagtttctccttatttcaagcacctgttcaaataaagaactttgataacagaaatattcaataacaagaattctctgaaatgcaaaagagtacagaagtttaagtggtaggttactgactacatagtaggtaaggaaaatgtttgcactgttgctgtgtggataaagagccttcagaaaagaatgtaccactaaagaaatttcaaactattatttctaatagaaggcacagatttggcacattagtccatcagaatcatgctgtgtcagaatagcraccgatccacagtgagtaaagacaaggggttatcagtgactcagtttaagaacatacattacaggcaatattagaggaaagattaggacaaggcctgtaatccagatagcattaatcattaataagtcagttcttcatctaatgtgggcaagggggagaaaggcttaagttataggtaaagcatacttcaaaataatttaatgactttcaacaaaaagactgttatcagtaaagaccagcatgacaactgagaacaccacagattctatagaacttccaagagtgcctatgatcagtaca

SEQ ID NO: 4445 - DNA, 600 bp, Chicken  19866894101983_1
aggatacctctaaaaaacataaataccataattctcgagttagagattgtgttagtatcaagcaggtactgtgtgagaggagttttggctttatttgaggaattaatgttgttcatcacattacacttaatgcttttacaagtaaatatatctactaacatttttaaatacagcaagaagtccaataaccactgatgtcctataatgataaaatcatgggtgttgtgaaataacactagatgtaatgtgtttgtagtacatctgaggagacctgatgatggcctttaggtatctataggrgggatataagacagaaggaatagactgtttagcaggatctgatagaagaaggggaaatgttttcaaactaaagtagaggagatttatattgaatataaagaaaacatttttttttaagatgagagtagtgaagcactggaatgtgttgcccttggaggtggtagctaccttgtccctgcagacattcatagtcaaactttgagcaccttaatctagctgtaggtgtccctgttcattgtagaggagttgaactaggtgaccattaatggtcccttaccaattcaaatgattctatgattc

SEQ ID NO: 4446 - DNA, 599 bp, Chicken  19866894101984_1
  misc_feature (1)..(57): n is any nucleotide
nnnnnnnnnnnnnnnnnnnnnnnnnnnnnnnnnnnnnnnnnnnnnnnnnnnnnnnnntcaggggaggggcagctgggggtgagggacaggtcctgcaccagagggcggtgggtatggaacaggctgcccagggagctgggcacaaccctaagatgccagagttcaaggagcaattggacaccactctccagacatagggtttgcatttggatggagcagtatggatccagtcagactcagtgatccttgagggtctcttccaactatggatattctatgagttatgcccctatttcacakgcaaatacactgaacagatagaaaataattaataaaacaaagacaaaagaataatgggatccaactccaaccttcatctaaatcacaaacaaaacttaaacattagccttgctggcagcaaataaagcttcacttgtgctcctttcattccctgcctgcagccttctgtgcttctcaatttcttcttggaccagaactacacgccaccactcacagcagcatctctgacctcctgtgaagtattccacagtacgtgagaaagcccctccctgcaccgcagtcttgcagtcaggcccaca

SEQ ID NO: 4447 - DNA, 600 bp, Chicken  19866894101987_1
ctacactcttatgtgggaaacagatctatacacagtaatgcagcagacagagtttgggcacactgagctccaccaggccctgtctgccccactcttacactaatattcactgttctcctatgagcaggcttgtcagtaataagaagtgaaagcacagccaagaaaccttttaaagattcctgtgacttgtaatcaataacaccatgagttatggatcaattccatgacaggatttatttgaaagcctttccctgtgggcaatgtaagtaaatgcacagccctgacttgccagtctgcacrgggtctggggaacaccaaaygagagggttttcctattgtcttcagtcacttcttctgaagcaagctggatgtttcatcacctgaaccatttggacaatggctgtcctgagcagcatraacactgctgagtcctcatctgcactgctcagcacctcctgctcagggcaaagcaaattggggtgttggggttatggcatctggggaatgagaggtcattgctttctcagaacagcctctctgaactcccaaattccaagcgactgtgggtatttcactgacacctctaagcatcagtttatg

SEQ ID NO: 4448 - DNA, 600 bp, Chicken  19866894101987_2
cagatctatacacagtaatgcagcagacagagtttgggcacactgagctccaccaggccctgtctgccccactcttacactaatattcactgttctcctatgagcaggcttgtcagtaataagaagtgaaagcacagccaagaaaccttttaaagattcctgtgacttgtaatcaataacaccatgagttatggatcaattccatgacaggatttatttgaaagcctttccctgtgggcaatgtaagtaaatgcacagccctgacttgccagtctgcacrgggtctggggaacaccaaaygagagggttttcctattgtcttcagtcacttcttctgaagcaagctggatgtttcatcacctgaaccatttggacaatggctgtcctgagcagcatraacactgctgagtcctcatctgcactgctcagcacctcctgctcagggcaaagcaaattggggtgttggggttatggcatctggggaatgagaggtcattgctttctcagaacagcctctctgaactcccaaattccaagcgactgtgggtatttcactgacacctctaagcatcagtttatgcataacgttaagccccatgt

SEQ ID NO: 4449 - DNA, 600 bp, Chicken  19866894101987_3
ctatgagcaggcttgtcagtaataagaagtgaaagcacagccaagaaaccttttaaagattcctgtgacttgtaatcaataacaccatgagttatggatcaattccatgacaggatttatttgaaagcctttccctgtgggcaatgtaagtaaatgcacagccctgacttgccagtctgcacrgggtctggggaacaccaaaygagagggttttcctattgtcttcagtcacttcttctgaagcaagctggatgtttcatcacctgaaccatttggacaatggctgtcctgagcagcatraacactgctgagtcctcatctgcactgctcagcacctcctgctcagggcaaagcaaattggggtgttggggttatggcatctggggaatgagaggtcattgctttctcagaacagcctctctgaactcccaaattccaagcgactgtgggtatttcactgacacctctaagcatcagtttatgcataacgttaagccccatgtagtacaaaagccttctgtagttaaatcccaagtgaaagccaaacctgctctgagggggtaagtgatacataaccttagagtggatgacaaaggagtg

SEQ ID NO: 4450 - DNA, 600 bp, Chicken  19866894102005_1
caattctacctaggtcggaacgccccggtctcaactttactctgttcagcagctttctttgtgaaaaacaacttatcctacgctacataaatactggaaatttccaccacaaaaacacaatctacctctcccaaccagaaggggtggaacctggctccacctctcttaggccctatttagggtctggctgccactgggaaaggatctctttcgggagatctctcccagatggagctttcccctgcgaacttgatatcttcagatccaggtaagcaatccttttcccatccttaaagcacmtttttatcatgctagtcctcccataatattgatctgcccaatttggtgagccaggcagggacttacgtatgattgattatcttaaaaacattatacatcaggtggtcataggaaagtaaatgygttcacccatctccaaagatctaggctctcagaaggactccacaatggagggatctccaaccagagaaactatttagcgcagcagctgtgaagcaagataaacagcatgagaaccaaggacgcctctagaagaaaaaaaaaagtaaaagaaacggctcgtggctctgattggataag

SEQ ID NO: 4451 - DNA, 600 bp, Chicken  19866894102005_2
acctctcccaaccagaaggggtggaacctggctccacctctcttaggccctatttagggtctggctgccactgggaaaggatctctttcgggagatctctcccagatggagctttcccctgcgaacttgatatcttcagatccaggtaagcaatccttttcccatccttaaagcacmtttttatcatgctagtcctcccataatattgatctgcccaatttggtgagccaggcagggacttacgtatgattgattatcttaaaaacattatacatcaggtggtcataggaaagtaaatgygttcacccatctccaaagatctaggctctcagaaggactccacaatggagggatctccaaccagagaaactatttagcgcagcagctgtgaagcaagataaacagcatgagaaccaaggacgcctctagaagaaaaaaaaaagtaaaagaaacggctcgtggctctgattggataagcacccgcatgcatggttaaggagtgtttgtagaatattctattgacatgtgaaagtagatgggaaagttgtaagggtggatgggaaagataaaaaaggaaacttgtgaatgtatataagaaat

SEQ ID NO: 4452 - DNA, 600 bp, Chicken  19866894102008_1
aatttattacaaagtattgaaattgcacttcaagccctaaggcttgcagtgttggagcctgcctgattaatgtaattaaaggaacagcataactcaaaatttattaaaaattaaatatatgtggccttattgtttacctccaactgatagcatgatttctagttaaaaattttcactgcttactatttgacaagctgttaaagcacatcctcttttctcctgctgtgcatttggctaaaagaacagaggttaaatgcagcaatacaaaaaatctgggaattgtatttttggttacggtgscactaagttccccattctcagttttaccataagcargtaatgctaaagaggtggaaagctcatggctggagggcatcaagctggagaagggtaggaaaatgcttccatggacagaatcttctsttccatgatcacttcatgccatatattgtagttttccatgaggcaagacccagcttgcaggaggtactgagctacatgtatcaaactaaataatgcttggcttgtaaggcctgatccagaattacgttcaatgtttgccaagctggtttacactgcgtaaraagtttacactcataa

SEQ ID NO: 4453 - DNA, 600 bp, Chicken  19866894102008_2
ctaaggcttgcagtgttggagcctgcctgattaatgtaattaaaggaacagcataactcaaaatttattaaaaattaaatatatgtggccttattgtttacctccaactgatagcatgatttctagttaaaaattttcactgcttactatttgacaagctgttaaagcacatcctcttttctcctgctgtgcatttggctaaaagaacagaggttaaatgcagcaatacaaaaaatctgggaattgtatttttggttacggtgscactaagttccccattctcagttttaccataagcargtaatgctaaagaggtggaaagctcatggctggagggcatcaagctggagaagggtaggaaaatgcttccatggacagaatcttctsttccatgatcacttcatgccatatattgtagttttccatgaggcaagacccagcttgcaggaggtactgagctacatgtatcaaactaaataatgcttggcttgtaaggcctgatccagaattacgttcaatgtttgccaagctggtttacactgcgtaaraagtttacactcataaaaatactctcttacacagtgcttgtgagatgcttga

SEQ ID NO: 4454 - DNA, 600 bp, Chicken  19866894102008_3
gccttattgtttacctccaactgatagcatgatttctagttaaaaattttcactgcttactatttgacaagctgttaaagcacatcctcttttctcctgctgtgcatttggctaaaagaacagaggttaaatgcagcaatacaaaaaatctgggaattgtatttttggttacggtgscactaagttccccattctcagttttaccataagcargtaatgctaaagaggtggaaagctcatggctggagggcatcaagctggagaagggtaggaaaatgcttccatggacagaatcttctsttccatgatcacttcatgccatatattgtagttttccatgaggcaagacccagcttgcaggaggtactgagctacatgtatcaaactaaataatgcttggcttgtaaggcctgatccagaattacgttcaatgtttgccaagctggtttacactgcgtaaraagtttacactcataaaaatactctcttacacagtgcttgtgagatgcttgagagcacatggctaacaaatgctggctagcatatgaagggatctcagaagtccaggagctaggctttaggagatggaaatctaatttt

SEQ ID NO: 4455 - DNA, 600 bp, Chicken  19866894102008_4
tttttggttacggtgscactaagttccccattctcagttttaccataagcargtaatgctaaagaggtggaaagctcatggctggagggcatcaagctggagaagggtaggaaaatgcttccatggacagaatcttctsttccatgatcacttcatgccatatattgtagttttccatgaggcaagacccagcttgcaggaggtactgagctacatgtatcaaactaaataatgcttggcttgtaaggcctgatccagaattacgttcaatgtttgccaagctggtttacactgcgtaaraagtttacactcataaaaatactctcttacacagtgcttgtgagatgcttgagagcacatggctaacaaatgctggctagcatatgaagggatctcagaagtccaggagctaggctttaggagatggaaatctaattttttgcactctggaataaaaaagtttacattttttttctgcaagtttcctgcatgattccattctctcctacaatgatgctgcattttatttcagccagtgtactgatcaacagcctctcccagaacaaaagtagaaaggaaatgaaaaaaatcaaaagaagt

SEQ ID NO: 4456 - DNA, 600 bp, Chicken  19866894102012_1
aatggcttcttccaaaggtgcttcaacctacagattccaggaagaacatacaattaagacaataactaactctctaacaagtcaagttgtatcaaagggctaccctcaaaccatattgcaggtgatacttagcacctgttacaaattttgcttattttattccatgtctaaacacagactgtcaacactgattgcttcacgacatttacaaatcgtattttcctattaagatacatctttgccttctatcgtacatcagtagtagcaacaattgtggctgaacctgcactgtaatgttcrgaaaactacacatgaaggtctaaaatgtcaacaaataactgttttgtgttcattcatgatagaatctgttcaagtgagctgcaggcaggttctggacagctgccaggtcatggcaacattcccaacaaagacattaatgacgagttaggagtagctagatactgacagcggtcagtgggtcttcgctagcacaacccagcaagtggatggggctttaacacaaatgaattcagtacctggactctttacaaagagacttcttgtattaaaagattggggataattagaacaagaaacttc

SEQ ID NO: 4457 - DNA, 600 bp, Chicken  19866894102040_1
tatgatctgaaattctaggaacaaattatttgaatgtgtctgttaagagcaaatacttgaaaaggttatagcagttgaatgaaagattttttagatttttagtttgtacaaaacaataagcagtttatgaaaatgtataaatcatgagataaccagcagagccacaaaggtcagaatcacagctgttgataaagggaatgtcattaatcataatgtacaaatcgccatatcagattagacctgagtccagctgatataatatcctgtttctgtgaagttcacagaacttttatgttttayagatgttctatggaaatgggtgttctatagaaaaagagttatcataaaatgcagatgtgaaaaaaaaagtttctgatcacctcatggcaagagattgtctaaagttctgaaatgtgaaattacacactccttccaaaatattttttagaattatatccaaattttaacaatttgaactctgtacattctttaactccacagagatgatcagttaacctttgatctgtagtaatataattccagtccaagcagcccttgctgacaatgagttttatcatcttacacattatgttaagggat

SEQ ID NO: 4458 - DNA, 600 bp, Chicken  19866894107420_1
gcccattacagatgtccctgtttaggaatatctggcactgatttgtacttctaactgtaggggagaaaaacagtagcagaaaactggtgacttggcaggcacacgctgcagactatgactgatgtctttctcttcatcatcaaacaaaatgcagaacagtcttgtgttttattgatcacatcataaacaaattagaagcaataatgtaataactgacagtttgtcccacagtaggacatatgcttacaattattagtttatttttattaccatataacctaggaatgttagtcacagagygggatttcattgcgacggaggttacacaaacacggaagaaaaagatgttccctgattgaatgcccttcaatctaaggactaaataaaaggcaatggaaggatacagtcctgaggagaattgtgacatgacagtatttatcagcaccagtatcagttgatttaatgacccgcagatctactttttgcaggtttctttgcaaaggaaggtttcaaagtgcaattttaaagttttaaaggcagctttgcaaatatatgtgggatttccttctcagagcaagagagtgtataaaaacgatgtat

SEQ ID NO: 4459 - DNA, 600 bp, Chicken  19866894107424_1
gaaaaatcaaatactccttcatttgaaatgcagaatcctaagaaatactgacacactggtttgtcactttcaaacagaaatatcatttcaacctgccctgttctgatgcttttcttcaaagaaattataatgatttcagtaggcgaaaaaatatatataatctgaaaacattgtacattggccagatctaaaaactcacagccaaaatgcaacagagatattttgactgcaaaaacctattatacttatacctatacttagtatttgctaagaaagaaatctaaaagcctttctttgcaytcctcagaaacacctgatctcctacatcatcatttggcacgctgctcctaaaggctgcagtaacagccttttctgatttttggaactacagaaggtctagtgccagatctaaatgcaagtatcaatgcatattaattatagtcagccttggaagaatacaggctgaatgagtgttctcaattccctttcctctcttctaatgtccttaggatatgaatgtgggaatacagatatatatccctagtttcaggttgacccccctgtgtccagactggattctgattgtttctatttggagga

SEQ ID NO: 4460 - DNA, 600 bp, Chicken  19866894107424_2
tttactgaatatgcaagaatcttacaaacttgtatggctacatggtcatcagtgaagttctactgatatgccattttagatccactttggatggctcttaatgaatacattatgatttttaaaaatactgagtatacactgccatccagtatatacaatttaattaccgtatctggtgtgaaaatatgtaggcaacgtaaggaaaatcaaaagagcatatgacatctgaattaaagtaaactcatatggaataatgtgtgtcatttcttattaatgtgatgggaaaaagtaaggacttamacatgatcaacacttaaaattagaaccattcactgaattataaatggtcctatctttcttcttattttatattcacagtcttaagaatctgtgattttttatctcaagatatccttaagtatgcttaagatctagattaaatactaactcagaggtcttcttaaaccttcagacaaaggtcactgagaattcactaggaaatttcattaaattcctcatacacattctctgatgttatttcagtatgtttacaataaggatgcagaactacctcttcaaacactccttctgcttgctatc

SEQ ID NO: 4461 - DNA, 600 bp, Chicken  19866894107424_3
aaattcctcatacacattctctgatgttatttcagtatgtttacaataaggatgcagaactacctcttcaaacactccttctgcttgctatctactggcttgtctgtctatattaacagtatatcacattttagaggataacagtctgaaacccctcactgtcaatacaaactgggggacaaaaggatagagcacagcctctcaaaaacagacttgggggtaacggtggatggtaagctggacatgagccagcaacgtgccctggtccaagaagccagtacaggtattagttctttgatyctagacactaaggtgtatttttttttaaggatgaactaaacaaaaatcttcaagatagaggaacataacagttcagggttattcaaataacatgcaaaatatgcactcagaaatctagtttaacatttaaaataagtcagtgaacaatcagtttacagaattgcagaggttggaaaggacttctagagaccatcaagtccaacccctcctgctaaagcaggtaccctacaataggtcacacaggtaggtgtcctgacaggtcttggatatctccatagaaggagactccacaacctctct

SEQ ID NO: 4462 - DNA, 600 bp, Chicken  19866894107430_1
tttgtttggttgacttgttttgatgtttcaagatgaagaaataattgtctccacaaacactttatgaactttggagttgagaaactgctccctcccaactcacattctagaaaacaactttaaatacagcatgtcatgtacaggcaggtatgctagcctggagtatattaaaccttataccttcaggtacttcttttcccaaagatctggagtagccacaggcgatacagcacattgcagtccagctttcacttctgcatgccatgtgcacaaacatacatggactgaggctatgacttstaattgttttcaaactaggttgtctctccaagcacacagtgctttgctcaaagttattcattctttcctgctagttggtaatccttccatcagaccttctttagacaaatgttattcttctcccacataaataggatcagtcaatcacatagttatgttgcacagaataattacaggacaaggacatatatgaggataactgggaaattaacgtttctttttttttcctatacctcttctgaagctcaaattgcaataggcagagcaacttcttatgcagcagcagcaatgataagaaac

SEQ ID NO: 4463 - DNA, 600 bp, Chicken  19866894107432_1
actgcgtggcatatgggggaaggccgggctctgtctccccctgctgagtcctaccctgagaagagaggtcaccaggtttagtttccactcagttaattaacttctgtcactaatcaactagcaattagtaggtggaatatttaatgaattggcattttatcattaagaaacgcaattcacggaatgaaatacactgtgttgaaaaggtatttttaattgtcctcatcgagtatctggctgccagtttcttctaatataattaatgatgggagtgggagctgatacattaaacttcataaytgataagcagttttagggcaaaaatgttcccatgttagttttaagagtgaattattaacttacttttacactgtatcaatattatatgatagttgctgtatcaatctcatatcagtawgctcactacatacatagagttcactgctgttcaggtcttgcacggtactttcagcacagctctttgcttttctacatttaagctttgtgcttttttctgtatttttttctttttttcttttctttttttttttttttttacttctgctgtgattttagaactgagttccaaagcaaagagat

SEQ ID NO: 4464 - DNA, 600 bp, Chicken  19866894107432_2
tagcaattagtaggtggaatatttaatgaattggcattttatcattaagaaacgcaattcacggaatgaaatacactgtgttgaaaaggtatttttaattgtcctcatcgagtatctggctgccagtttcttctaatataattaatgatgggagtgggagctgatacattaaacttcataaytgataagcagttttagggcaaaaatgttcccatgttagttttaagagtgaattattaacttacttttacactgtatcaatattatatgatagttgctgtatcaatctcatatcagtawgctcactacatacatagagttcactgctgttcaggtcttgcacggtactttcagcacagctctttgcttttctacatttaagctttgtgcttttttctgtatttttttctttttttcttttctttttttttttttttttacttctgctgtgattttagaactgagttccaaagcaaagagattgctttctctttttggtataaccactgcttttctcctcactcagagctttgttgctctttggagatattaattaatttcagctcggagtttttgtgtgggaactgcttctgatgaata

SEQ ID NO: 4465 - DNA, 599 bp, Chicken  19866894107445_1
  misc_feature (1)..(102): n is any nucleotide
nnnnnnnnnnnnnnnnnnnnnnnnnnnnnnnnnnnnnnnnnnnnnnnnnnnnnnnnnnnnnnnnnnnnnnnnnnnnnnnnnnnnnnnnnnnnnnnnnnnnnnaatactaatatatactagttgtttactgaatctaatattatcactgctctaatctcttcaaacaagtgcccaaatgcacgctgctgtgatgatttgagtaagaaaaatggctcatttattcaacatatgcattggctgctagtctgtttttttgtaagtgcttaaagatttatgttcaaattatttttctccagtttyccagttcttttacctattcttctgtaaactcctcaatcttgctgttctctatggctgctctgcacagtagatgttcactgagaacttaccacagtgtttggttctgagcttgaggctgtaactgaaaacttgctgagaacttgaactctcattaaatttagtcagaatttatgactcatcaccttgcaagatcaatcttgcggggcgtactctctagcggtccagtcattcctgcaacaatttatttcagaggtaggatcaggaaagatctttcagaagtgaaatttggaggaaaaaaa

SEQ ID NO: 4466 - DNA, 600 bp, Chicken  19866894107445_2
tctgcacagtagatgttcactgagaacttaccacagtgtttggttctgagcttgaggctgtaactgaaaacttgctgagaacttgaactctcattaaatttagtcagaatttatgactcatcaccttgcaagatcaatcttgcggggcgtactctctagcggtccagtcattcctgcaacaatttatttcagaggtaggatcaggaaagatctttcagaagtgaaatttggaggaaaaaaaaaatcaactctgatatccagaaggtcatttgggctggttatttgaccagagtgcataasaggcatttcatgtcagttaaatgaattcagtaattttaggagaagtatagattttagccacttaacttgcacagccttctttgtctggccctgaaatagcttatggttctctgtaactaattatgagaragtaaaacagcaacacatgaaagtgagggggaaataaataatctaaaatcagcattatggctttgacggatccaagtggttttgtacattgattaaaaacgactgaccaagggaatatgttatttcattttgagcagtggtaaaatacttcttagagtattctttagatgt

SEQ ID NO: 4467 - DNA, 600 bp, Chicken  19866894107445_3
aagatcaatcttgcggggcgtactctctagcggtccagtcattcctgcaacaatttatttcagaggtaggatcaggaaagatctttcagaagtgaaatttggaggaaaaaaaaaatcaactctgatatccagaaggtcatttgggctggttatttgaccagagtgcataasaggcatttcatgtcagttaaatgaattcagtaattttaggagaagtatagattttagccacttaacttgcacagccttctttgtctggccctgaaatagcttatggttctctgtaactaattatgagaragtaaaacagcaacacatgaaagtgagggggaaataaataatctaaaatcagcattatggctttgacggatccaagtggttttgtacattgattaaaaacgactgaccaagggaatatgttatttcattttgagcagtggtaaaatacttcttagagtattctttagatgtacattgaacaagaatgcaatggcgaatcacaaatacgtgaggactggaaatgtcacatgtatttaattcaatgccaaggaagaaaaatggataaaccataaatgctaggacttaaatagaaatagacta

SEQ ID NO: 4468 - DNA, 600 bp, Chicken  19866894107446_1
ttaaaaaacagaaacaaaaaatcctaaaaataaagttataaacaaagggctgttcctacaaatgtttctaagaagaaacacaaacactttagctggaactgcattttctctgccccaaacccccctttttcacttctgaaaaggcaccttttaacacacagcctggtatttccattagtaggacacgctgaacttttggaaagaaataatcttaaacaccccaatcagaacagaggaggcatccaaggaagtttcacgtggaaacaaacaattaacttcagattaaatacctcaagacaygaaaggagtcttctaaccrtgcaggctggaaagccatctacagaacctctaccaagaggataccagagacatccatgagatgtgcctgtgcatgtaagatccaaactatgtcatcagaactgtgccaggaaggctttaaaacggaactacgaagttcatgaacagaaatgctgaagaaaaaaatctggctgaacaacacgcgactgcagtcgcaaacactgcctcattgttaagctaagcagccacagcacagcttgcctgagtggaaaacagtgcagagccagaaggaataatccactt

SEQ ID NO: 4469 - DNA, 600 bp, Chicken  19866894107446_2
aatcctaaaaataaagttataaacaaagggctgttcctacaaatgtttctaagaagaaacacaaacactttagctggaactgcattttctctgccccaaacccccctttttcacttctgaaaaggcaccttttaacacacagcctggtatttccattagtaggacacgctgaacttttggaaagaaataatcttaaacaccccaatcagaacagaggaggcatccaaggaagtttcacgtggaaacaaacaattaacttcagattaaatacctcaagacaygaaaggagtcttctaaccrtgcaggctggaaagccatctacagaacctctaccaagaggataccagagacatccatgagatgtgcctgtgcatgtaagatccaaactatgtcatcagaactgtgccaggaaggctttaaaacggaactacgaagttcatgaacagaaatgctgaagaaaaaaatctggctgaacaacacgcgactgcagtcgcaaacactgcctcattgttaagctaagcagccacagcacagcttgcctgagtggaaaacagtgcagagccagaaggaataatccacttcttcatctcctggtgcttg

SEQ ID NO: 4470 - DNA, 600 bp, Chicken  19866894107452_1
tgagtgagcaatgccctggagaaaagaggacaagaccagatctttccaagagaattgcccagcaattactttctgttgagttttcaactctttcaattctagaagtcattgtttggcttcattggaatagttctcagacaatgcagaagaggaagatctaaaactaagatttttcacctctatgttacttcaactaccaagcaaaaattttgctaatacagaaaatccatcaggcaattcaaagaagacagtgaaattcagatacaggaagtaagcaacatgtcttcaaataacactttyggtgggaagtgagttgcctctcagtgtcagtgacggtaactctgaggtagcatcctcttcttcttaagggaactaggaagcttcatgtggctttgaaaagaccagctgaaatgattctggaaatgtttgtttagagcaacgtgtaccaaaggarccagtgaaagacagtccttcctgaagcaaatcwasattatgtgtctggatggcataatcaaagctgcacagcagccaagaatgctttctattcagatgaagggccaatttctcagccagtgtcacaaatctaccaaagctgacaat

SEQ ID NO: 4471 - DNA, 600 bp, Chicken  19866894107452_2
gatctaaaactaagatttttcacctctatgttacttcaactaccaagcaaaaattttgctaatacagaaaatccatcaggcaattcaaagaagacagtgaaattcagatacaggaagtaagcaacatgtcttcaaataacactttyggtgggaagtgagttgcctctcagtgtcagtgacggtaactctgaggtagcatcctcttcttcttaagggaactaggaagcttcatgtggctttgaaaagaccagctgaaatgattctggaaatgtttgtttagagcaacgtgtaccaaaggarccagtgaaagacagtccttcctgaagcaaatcwasattatgtgtctggatggcataatcaaagctgcacagcagccaagaatgctttctattcagatgaagggccaatttctcagccagtgtcacaaatctaccaaagctgacaatttggaccatacattaagggaaaagtatttttttaactactgagtcataaaacaagaataaaacctaatttactaacttgatcttactcgttctgtacgtccatctgaaaatgaaaacaaacatgccattgtgttcctggacagttttctctcct

SEQ ID NO: 4472 - DNA, 600 bp, Chicken  19866894107452_3
cttcaactaccaagcaaaaattttgctaatacagaaaatccatcaggcaattcaaagaagacagtgaaattcagatacaggaagtaagcaacatgtcttcaaataacactttyggtgggaagtgagttgcctctcagtgtcagtgacggtaactctgaggtagcatcctcttcttcttaagggaactaggaagcttcatgtggctttgaaaagaccagctgaaatgattctggaaatgtttgtttagagcaacgtgtaccaaaggarccagtgaaagacagtccttcctgaagcaaatcwasattatgtgtctggatggcataatcaaagctgcacagcagccaagaatgctttctattcagatgaagggccaatttctcagccagtgtcacaaatctaccaaagctgacaatttggaccatacattaagggaaaagtatttttttaactactgagtcataaaacaagaataaaacctaatttactaacttgatcttactcgttctgtacgtccatctgaaaatgaaaacaaacatgccattgtgttcctggacagttttctctcctggatctccaccagcgaggtggggattcctgtac

SEQ ID NO: 4473 - DNA, 600 bp, Chicken  19866894107452_4
tcaactaccaagcaaaaattttgctaatacagaaaatccatcaggcaattcaaagaagacagtgaaattcagatacaggaagtaagcaacatgtcttcaaataacactttyggtgggaagtgagttgcctctcagtgtcagtgacggtaactctgaggtagcatcctcttcttcttaagggaactaggaagcttcatgtggctttgaaaagaccagctgaaatgattctggaaatgtttgtttagagcaacgtgtaccaaaggarccagtgaaagacagtccttcctgaagcaaatcwasattatgtgtctggatggcataatcaaagctgcacagcagccaagaatgctttctattcagatgaagggccaatttctcagccagtgtcacaaatctaccaaagctgacaatttggaccatacattaagggaaaagtatttttttaactactgagtcataaaacaagaataaaacctaatttactaacttgatcttactcgttctgtacgtccatctgaaaatgaaaacaaacatgccattgtgttcctggacagttttctctcctggatctccaccagcgaggtggggattcctgtactg

SEQ ID NO: 4474 - DNA, 600 bp, Chicken  19866894107455_1
atctggaggtcgatggccctgcctgaggcaggggattggaacttgatgatccctgggggtcccttccaacccaagccatgctgtgatgctatgatgctatctcctagatgcatatggggaacatggttagcagtgggaggacagagtatttttagagcaggctcagagatctggttcaggcaagggatgttgtagttaggtgtcataatgcctagaaagtatgtgtgaaagtaagaaagagatgctcaaagcacctgctgttgctgggaaaaagcaaccattgcacagctcccactcccrcggtggtgagcagccttgagctgggccaagttttgccacagagcatgttaatttttcctgcactctttcctagataaatatgaatacagatgtgcgactggcagctgtcaatgaattctttatcaaacacagcttaattctggggattactgacgtcctggatgggccacacagcatcctacaagtatcctttctgtgcagaatctttcctagcccctgggcagcctgatctggtgaggggcgagcagcccatggcggtggggttggaactgggtggtctttaaggtcccttccaaccca

SEQ ID NO: 4475 - DNA, 545 bp, Chicken  19866894107457_1
agagcagccaagtgttattttgaccgtgagttacaccaaaaagcaaacgtccttccacagccaatcctcctcagtgaataggagggatgtgcctggttaacgatgctcagagaaaaaacaaaggcttattttagctgagcaaaagaaaggatggcaagaacaaccttcttctattggaagctgccagcaagaagtaatgatttatgatccaccccaacctggagtaaagattacagccatcaaacgtgaggtgcaacgctccacagcccattagcagtccttcagcaactgttctctccrtaccaccttatacctctttaacaacaacaaaaaagaagtattatgctgtttgccttattaaactcagccatgtttctcggcagaggtgtcacatgccaagcctcaggctggaacagtgtttaccctaagtcacagcacccttgaattgaggtgtataatgggagcattaagcacggtgagggaataacactgccgtgacaaaagctattatggaatcctattattggtaactaaaacccatttaa

SEQ ID NO: 4476 - DNA, 599 bp, Chicken  19866894107471_1
  misc_feature (1)..(87): n is any nucleotide
nnnnnnnnnnnnnnnnnnnnnnnnnnnnnnnnnnnnnnnnnnnnnnnnnnnnnnnnnnnnnnnnnnnnnnnnnnnnnnnnnnnnnnnacaacaacaaaaaaagtgcaaaatgaagacagctgcataccacccagtgctcaaataagaggaaggacctgaactggcagtcaagtttcctttcttctgctcttttctctcctctttctgctgagagggcagctgctttgtaactcacacgaggtgctaggtcatgatccatcccatgtggctgacagtggcggctttcatcccttctaactmcagatgtctgtggaccaaatttccacatgtgaatcagtcacctggagcctcatacagagctggtgtgggggtgaacacctaccagaagaatattctgagcaacataggcaggttcgagttyaacatttgtagccatggcccagaagagagagtagaataaatgagattctatactatactgactggcatagaaagaagaygtatctrataactaacaccatgaaaggcacctgtttgcatactcctctcaagcttcaaatcttagaccatggtatttttgctaaaagtgcaatctcccc

SEQ ID NO: 4477 - DNA, 600 bp, Chicken  19866894107471_2
gcataccacccagtgctcaaataagaggaaggacctgaactggcagtcaagtttcctttcttctgctcttttctctcctctttctgctgagagggcagctgctttgtaactcacacgaggtgctaggtcatgatccatcccatgtggctgacagtggcggctttcatcccttctaactmcagatgtctgtggaccaaatttccacatgtgaatcagtcacctggagcctcatacagagctggtgtgggggtgaacacctaccagaagaatattctgagcaacataggcaggttcgagttyaacatttgtagccatggcccagaagagagagtagaataaatgagattctatactatactgactggcatagaaagaagaygtatctrataactaacaccatgaaaggcacctgtttgcatactcctctcaagcttcaaatcttagaccatggtatttttgctaaaagtgcaatctccccataccaaccrtctgatactaccaagagctctacagtgtttgatgtggcaaatggaaaagacaccatgtaagtatataccaggctgatctgcccttccatgtgacagtcatatccacaggcaa

SEQ ID NO: 4478 - DNA, 571 bp, Chicken  19866894107471_3
ctttctgctgagagggcagctgctttgtaactcacacgaggtgctaggtcatgatccatcccatgtggctgacagtggcggctttcatcccttctaactmcagatgtctgtggaccaaatttccacatgtgaatcagtcacctggagcctcatacagagctggtgtgggggtgaacacctaccagaagaatattctgagcaacataggcaggttcgagttyaacatttgtagccatggcccagaagagagagtagaataaatgagattctatactatactgactggcatagaaagaagaygtatctrataactaacaccatgaaaggcacctgtttgcatactcctctcaagcttcaaatcttagaccatggtatttttgctaaaagtgcaatctccccataccaaccrtctgatactaccaagagctctacagtgtttgatgtggcaaatggaaaagacaccatgtaagtatataccaggctgatctgcccttccatgtgacagtcatatccacaggcaacatttaaaccatatttttcatctgcttttacttaacaaaatcaatggtag

SEQ ID NO: 4479 - DNA, 564 bp, Chicken  19866894107471_4
ctgagagggcagctgctttgtaactcacacgaggtgctaggtcatgatccatcccatgtggctgacagtggcggctttcatcccttctaactmcagatgtctgtggaccaaatttccacatgtgaatcagtcacctggagcctcatacagagctggtgtgggggtgaacacctaccagaagaatattctgagcaacataggcaggttcgagttyaacatttgtagccatggcccagaagagagagtagaataaatgagattctatactatactgactggcatagaaagaagaygtatctrataactaacaccatgaaaggcacctgtttgcatactcctctcaagcttcaaatcttagaccatggtatttttgctaaaagtgcaatctccccataccaaccrtctgatactaccaagagctctacagtgtttgatgtggcaaatggaaaagacaccatgtaagtatataccaggctgatctgcccttccatgtgacagtcatatccacaggcaacatttaaaccatatttttcatctgcttttacttaacaaaatcaatggtag

SEQ ID NO: 4480 - DNA, 462 bp, Chicken  19866894107471_5
gtggaccaaatttccacatgtgaatcagtcacctggagcctcatacagagctggtgtgggggtgaacacctaccagaagaatattctgagcaacataggcaggttcgagttyaacatttgtagccatggcccagaagagagagtagaataaatgagattctatactatactgactggcatagaaagaagaygtatctrataactaacaccatgaaaggcacctgtttgcatactcctctcaagcttcaaatcttagaccatggtatttttgctaaaagtgcaatctccccataccaaccrtctgatactaccaagagctctacagtgtttgatgtggcaaatggaaaagacaccatgtaagtatataccaggctgatctgcccttccatgtgacagtcatatccacaggcaacatttaaaccatatttttcatctgcttttacttaacaaaatcaatggtag

SEQ ID NO: 4481 - DNA, 600 bp, Chicken  19866894107481_1
ggagcattctaccatgggagtgaagaatggtcctgtacgtcaagaaggtagaaaatgtaatgactgaggtaacagtgctgcacagccaaatgtggagaccggaactgaggccacctcgactgccctgcacatgagccaaatggtagggtgggaaatagaatatataccttgcactttgcagtatactgaatgttgtgtttgcccaccaggtggataggcccttgtacttagggcagcttctggctctatcaccttctcttgcagtgatgtttcctgatagacaccagttttggcacctgwggtgactttctgcaaagctgagtgggttgtccacgccagctgaagtcactcagattgtgaaggtgatccagttctgctgtgacatgccagcacaggcgcagaaatgacatgatggrtgccaggtttcctggggagcagggacacagggattgcrgcccacatttgtcagtcagctccagtggctgggacagaagggactggggagtgagtatcccaagttatatgggcacaaatctctcaagttggtctaacttcaggtaccatcaaaaacaggtagcatgttgtcccaactgttcttag

SEQ ID NO: 4482 - DNA, 572 bp, Chicken  19866894107481_2
cgactgccctgcacatgagccaaatggtagggtgggaaatagaatatataccttgcactttgcagtatactgaatgttgtgtttgcccaccaggtggataggcccttgtacttagggcagcttctggctctatcaccttctcttgcagtgatgtttcctgatagacaccagttttggcacctgwggtgactttctgcaaagctgagtgggttgtccacgccagctgaagtcactcagattgtgaaggtgatccagttctgctgtgacatgccagcacaggcgcagaaatgacatgatggrtgccaggtttcctggggagcagggacacagggattgcrgcccacatttgtcagtcagctccagtggctgggacagaagggactggggagtgagtatcccaagttatatgggcacaaatctctcaagttggtctaacttcaggtaccatcaaaaacaggtagcatgttgtcccaactgttcttagctgctctcagcaatgtgctgcctcttgtgtaagagcatccagaagctctgtaaagggtctggctttttgatttcctcctttccttcca

SEQ ID NO: 4483 - DNA, 534 bp, Chicken  19866894107481_3
atagaatatataccttgcactttgcagtatactgaatgttgtgtttgcccaccaggtggataggcccttgtacttagggcagcttctggctctatcaccttctcttgcagtgatgtttcctgatagacaccagttttggcacctgwggtgactttctgcaaagctgagtgggttgtccacgccagctgaagtcactcagattgtgaaggtgatccagttctgctgtgacatgccagcacaggcgcagaaatgacatgatggrtgccaggtttcctggggagcagggacacagggattgcrgcccacatttgtcagtcagctccagtggctgggacagaagggactggggagtgagtatcccaagttatatgggcacaaatctctcaagttggtctaacttcaggtaccatcaaaaacaggtagcatgttgtcccaactgttcttagctgctctcagcaatgtgctgcctcttgtgtaagagcatccagaagctctgtaaagggtctggctttttgatttcctcctttccttcca

SEQ ID NO: 4484 - DNA, 599 bp, Chicken  19866894107491_1
  misc_feature (1)..(102): n is any nucleotide
nnnnnnnnnnnnnnnnnnnnnnnnnnnnnnnnnnnnnnnnnnnnnnnnnnnnnnnnnnnnnnnnnnnnnnnnnnnnnnnnnnnnnnnnnnnnnnnnnnnnnntgtgtgggttctgatatacagcgagatgcacacagacacacacagatacctttgtcacaagtgctgcccatctccggctcgatcaccagacttaaaggaacacagctccacaaaccatcctagccaggggagggagagaattacttcctagctgaaagtccattgttaaacgccgagtcttaaccaagaggaataaascgtgactccaagcagcggcgttccttctcctgccgtttcccttccaggagacagatgckgtttaaacttccatttctggctgcccggccctggggatccgtgctacttccaccgagcagaacgccggggctccgctccccctccctgccacggcaagcagggagagagcgagtgaaaagggagcacaggactgcagctattcaatcaatcgctccgactgcacatcctcattagttactttcaggctattaacagacgcccaactgccggcttccctccgttacagaaaatttccctgc

SEQ ID NO: 4485 - DNA, 599 bp, Chicken  19866894107491_2
  misc_feature (1)..(43): n is any nucleotide
nnnnnnnnnnnnnnnnnnnnnnnnnnnnnnnnnnnnnnnnnnntgtgtgggttctgatatacagcgagatgcacacagacacacacagatacctttgtcacaagtgctgcccatctccggctcgatcaccagacttaaaggaacacagctccacaaaccatcctagccaggggagggagagaattacttcctagctgaaagtccattgttaaacgccgagtcttaaccaagaggaataaascgtgactccaagcagcggcgttccttctcctgccgtttcccttccaggagacagatgckgtttaaacttccatttctggctgcccggccctggggatccgtgctacttccaccgagcagaacgccggggctccgctccccctccctgccacggcaagcagggagagagcgagtgaaaagggagcacaggactgcagctattcaatcaatcgctccgactgcacatcctcattagttactttcaggctattaacagacgcccaactgccggcttccctccgttacagaaaatttccctgcgtctcccgattgagagcagcaaggaagctgcgcggagacgggcagccagccggagccac

SEQ ID NO: 4486 - DNA, 595 bp, Chicken  19866894107495_1
gaaggagtgttgcgttaaatgcaacatgcctgtgtattggagtgagaggagtgcagggaatagtgggggcagagtgcaccaagaggggtaagcttagctacagtccttgtaatcattctgtgtaggaattattctacaagaaaaatcagatgaattaacacactgattggcaagtctgatttctgatgaaagttcatttccaggagaaaatttgttggaactgcaaaataagtcttgaagtagaagatctgatattataatatagccagcaaaacatatagtccctaatgttttctattracactgaagcaattcattctgataacctcaaataacaatgtagatcatggtccacagtattcaatgtactgaatgctgaaataaaacagcaaattcctggggaaattgtggatgaggatgagtagctgtagtgctcttttcttatcaagaagcaatgggagaggtccccaaagagctcagccctgtctctcctctggcagtgaggagaataccaccacacccctaatgtgtagtctactggatgtaaccattataatacaccaaaatagtcaaacactaatctgatatcatcaaa

SEQ ID NO: 4487 - DNA, 600 bp, Chicken  19866894107507_1
gtgtatatttatatatgttatcatgcctctttactgttttgtttataaaaacaaataagagtctcttaatttgaaaaagcacgagaaagtaatacagtatgaatatatcagcaagatattgaatacaatattgcctgtgtgacctgactttgaagttcaagattatgatttttaatagcaagaaggtgttcttacaattcactaaaatcctcaatcaaaataaataagactgtacagtaatcagcaaattccgtacaggaaatagaaacagtgtcatgcttccaatatgattatttttgsaacttgactgtagttttctaatgtcaatttgtctttgatttgttctagtacatgactgctgctgcacctatgcaagggacctacattccccagtacactcctgtgcctccaacagctgtccctattgaagtaagtttacctccatccatgaaagtagagtaaaggggtaacagaattcttacacctatgatgcctcattgtacctgctgtttgagaggggcctaaaatcatcttaaggaatggtacatcttccagcttttttaaaattaagatttcacattccttttctttacttatttt

SEQ ID NO: 4488 - DNA, 600 bp, Chicken  19866894107511_1
acagaatctaccggagagcagagtgttttacgggcttcacatggccaagaggatctgggtctttgctggtagtattttttaataagcaaattgaaatagtatccaagaagtcattgaggcggtttaccgcctgggcttcttctacagagagcgcagaacctccatgtgtggttcctcccactcagagaaatttcctacacaggtgacatgagtttgtctttctcattttcctccatggactggaatgggacctggagaactcatcagctcctgagtttgggtggtgaaagtggtgcaaaytgagccctcctccagcagatccatgttactgagggactacaccaaatattagcattttcaaaccattgctacaattcacaaacagagccacatgttggttttcttgggaacractgatggaggaaccctccagctccctccctcattccacctccagtcaaccaagtaacaaatgggaaatatctctcattccaccaccaatcagcctaagtagatgtcatggttttgtaattttgctattgggaaaaatcagtactggtacttaggctcatctcaaggaaacgtctctacattttggaa

SEQ ID NO: 4489 - DNA, 575 bp, Chicken  19866894107511_2
attgaggcggtttaccgcctgggcttcttctacagagagcgcagaacctccatgtgtggttcctcccactcagagaaatttcctacacaggtgacatgagtttgtctttctcattttcctccatggactggaatgggacctggagaactcatcagctcctgagtttgggtggtgaaagtggtgcaaaytgagccctcctccagcagatccatgttactgagggactacaccaaatattagcattttcaaaccattgctacaattcacaaacagagccacatgttggttttcttgggaacractgatggaggaaccctccagctccctccctcattccacctccagtcaaccaagtaacaaatgggaaatatctctcattccaccaccaatcagcctaagtagatgtcatggttttgtaattttgctattgggaaaaatcagtactggtacttaggctcatctcaaggaaacgtctctacattttggaaggaccgtcttaagccattcataatagaaagccaaaagattactaaaatagggcagatttgagaaaaggtctacttctattcaacttg

SEQ ID NO: 4490 - DNA, 599 bp, Chicken  19866894107523_1
  misc_feature (1)..(36): n is any nucleotide
nnnnnnnnnnnnnnnnnnnnnnnnnnnnnnnnnnnnctcctgcctcctgtccccctcatgtgcaatgacccttgagcgctgaaggcagatgagcatgttcttaatgacattcccggcagtgcatcctcgctccagagaggactaatccctgtagccattcataatgtggctgaaagcaagcaggctgggattcgctcccccatctttatgtgtcaggccctgcttgtgctgaaggagcatcgagctcagcaaggaaggaaaactggatggaaataccctgggtgagcctcaaggcatggscctctccrtcatagtgcagaataatgagtaccagaaaatcacttccccatgtcaggctttgtccccacagaaactgtgatccttgttgtcccygtctgccctgtcttccttgcttctgtggtaggattgccccacgcttccttgaggtttgtcctccaacagrctgagttcattaccgtgctcccaatctcctcatctcttctcatctggatccctggaggcatctggctcgacaggagatcttgtgcaggcctgggaagtcctttctaattataaaaagttattttcctgaccaacat

SEQ ID NO: 4491 - DNA, 599 bp, Chicken  19866894107523_2
  misc_feature (1)..(28): n is any nucleotide
nnnnnnnnnnnnnnnnnnnnnnnnnnnnctcctgcctcctgtccccctcatgtgcaatgacccttgagcgctgaaggcagatgagcatgttcttaatgacattcccggcagtgcatcctcgctccagagaggactaatccctgtagccattcataatgtggctgaaagcaagcaggctgggattcgctcccccatctttatgtgtcaggccctgcttgtgctgaaggagcatcgagctcagcaaggaaggaaaactggatggaaataccctgggtgagcctcaaggcatggscctctccrtcatagtgcagaataatgagtaccagaaaatcacttccccatgtcaggctttgtccccacagaaactgtgatccttgttgtcccygtctgccctgtcttccttgcttctgtggtaggattgccccacgcttccttgaggtttgtcctccaacagrctgagttcattaccgtgctcccaatctcctcatctcttctcatctggatccctggaggcatctggctcgacaggagatcttgtgcaggcctgggaagtcctttctaattataaaaagttattttcctgaccaacatccgctgtt

SEQ ID NO: 4492 - DNA, 600 bp, Chicken  19866894107523_3
catgttcttaatgacattcccggcagtgcatcctcgctccagagaggactaatccctgtagccattcataatgtggctgaaagcaagcaggctgggattcgctcccccatctttatgtgtcaggccctgcttgtgctgaaggagcatcgagctcagcaaggaaggaaaactggatggaaataccctgggtgagcctcaaggcatggscctctccrtcatagtgcagaataatgagtaccagaaaatcacttccccatgtcaggctttgtccccacagaaactgtgatccttgttgtcccygtctgccctgtcttccttgcttctgtggtaggattgccccacgcttccttgaggtttgtcctccaacagrctgagttcattaccgtgctcccaatctcctcatctcttctcatctggatccctggaggcatctggctcgacaggagatcttgtgcaggcctgggaagtcctttctaattataaaaagttattttcctgaccaacatccgctgttgttccctcaaggttggccgtgagttgtggtcagctgaagggacatttgagatttggcatttgatgtgctcatccaacatggcaccc

SEQ ID NO: 4493 - DNA, 600 bp, Chicken  19866894107523_4
atgtggctgaaagcaagcaggctgggattcgctcccccatctttatgtgtcaggccctgcttgtgctgaaggagcatcgagctcagcaaggaaggaaaactggatggaaataccctgggtgagcctcaaggcatggscctctccrtcatagtgcagaataatgagtaccagaaaatcacttccccatgtcaggctttgtccccacagaaactgtgatccttgttgtcccygtctgccctgtcttccttgcttctgtggtaggattgccccacgcttccttgaggtttgtcctccaacagrctgagttcattaccgtgctcccaatctcctcatctcttctcatctggatccctggaggcatctggctcgacaggagatcttgtgcaggcctgggaagtcctttctaattataaaaagttattttcctgaccaacatccgctgttgttccctcaaggttggccgtgagttgtggtcagctgaagggacatttgagatttggcatttgatgtgctcatccaacatggcaccccgtggttgtaggctgattgctcctggttcttttactgccaggaaagcttttaccgaaaggctgcagatac

SEQ ID NO: 4494 - DNA, 600 bp, Chicken  19866894107527_1
caacctgcagagaatggatgcctgttaatgaaccgcagtttaactgctatcagccacgactagagatcattgccatgcgaaacaacaagcactgcttgtaccgctccctccctacgggacactatctgagggagaataaacctctcctcttctcctccactgccagcttgttactgccagtgctggctataattgaataagctttattcagatgatagctaaatttagcagacattagcaggaagtctctggagaggcaaaaacgggggaggaaagctttaaataaatacgctaaagtartattgaataatagatgcaattaatggtggagcaaaactctgtgcctcaggagccaggcacagagttaaacccgttttggggggcaaagagacaaaatgtgacagcgctgctggatgctccctttcttctcagcctgtaattactgcttcccctgtgatcaccaccacaacggcagggccccttagagcccgttcccaatgcagaagctccgtgagggtgcaccacagagagcctgcagacccgctgctgggccacacactgcacaggcaggagagaggaaagggccaccagcgaggctgc

SEQ ID NO: 4495 - DNA, 600 bp, Chicken  19866894107531_1
ctcaggcttctttacatgaaacagcactcttacactggagctaatataaagcatgtgcacatgcattcaagcacatctaaatcatcaggatgctgacatgacagtatttagttttccagactaaattatattccatttccattgcatagtgacttaaaaacaggtaatgaatatgttctcaggcaatgtatttacttttggtgatgtagggactgaacatattcccaaaaattgtctgtcaccaaggcaagtaaatcccaatactgttgcttgtcctgacttattagtgtattgttcaaytcaatgctcattattcatgagcatgtcagaattcaatgtcttaggctacatcttgcataatatttctttgacattacatgtataarcagataaaaaaaaatctagtgttgtaacttggctcttcattttaactagcaatgttcaaaagcagagggatagagaatgaaaatcttgctagacggaagtgcttagaaatgaatagttaataaagaagcaaatggtggaccagctgaaggcaagtttcattacagacaagtagaaagaggattattttctgaagaataraataatttgaataat

SEQ ID NO: 4496 - DNA, 600 bp, Chicken  19866894107531_2
aggatgctgacatgacagtatttagttttccagactaaattatattccatttccattgcatagtgacttaaaaacaggtaatgaatatgttctcaggcaatgtatttacttttggtgatgtagggactgaacatattcccaaaaattgtctgtcaccaaggcaagtaaatcccaatactgttgcttgtcctgacttattagtgtattgttcaaytcaatgctcattattcatgagcatgtcagaattcaatgtcttaggctacatcttgcataatatttctttgacattacatgtataarcagataaaaaaaaatctagtgttgtaacttggctcttcattttaactagcaatgttcaaaagcagagggatagagaatgaaaatcttgctagacggaagtgcttagaaatgaatagttaataaagaagcaaatggtggaccagctgaaggcaagtttcattacagacaagtagaaagaggattattttctgaagaataraataatttgaataataaatataacttatgaataatgtggtactatggtaataagctctgaagatttcccagtaaaggaacagacctgctttgtatttactg

SEQ ID NO: 4497 - DNA, 600 bp, Chicken  19866894107531_3
agtgtattgttcaaytcaatgctcattattcatgagcatgtcagaattcaatgtcttaggctacatcttgcataatatttctttgacattacatgtataarcagataaaaaaaaatctagtgttgtaacttggctcttcattttaactagcaatgttcaaaagcagagggatagagaatgaaaatcttgctagacggaagtgcttagaaatgaatagttaataaagaagcaaatggtggaccagctgaaggcaagtttcattacagacaagtagaaagaggattattttctgaagaataraataatttgaataataaatataacttatgaataatgtggtactatggtaataagctctgaagatttcccagtaaaggaacagacctgctttgtatttactgggccccaaagctttgtacttaagagctttgtatttcagtattagtgactgttgagctagttaaaagaaagtttgaaaaaaacatattcaaagagcacttaaaaaytgagagcttgtacatgccaaacattattccacagagacttgaaaaggccaagaaatagactctgcagaggccaccttgcgcagtggatgttatg

SEQ ID NO: 4498 - DNA, 600 bp, Chicken  19866894107531_4
gaaatgaatagttaataaagaagcaaatggtggaccagctgaaggcaagtttcattacagacaagtagaaagaggattattttctgaagaataraataatttgaataataaatataacttatgaataatgtggtactatggtaataagctctgaagatttcccagtaaaggaacagacctgctttgtatttactgggccccaaagctttgtacttaagagctttgtatttcagtattagtgactgttgagctagttaaaagaaagtttgaaaaaaacatattcaaagagcacttaaaaaytgagagcttgtacatgccaaacattattccacagagacttgaaaaggccaagaaatagactctgcagaggccaccttgcgcagtggatgttatgcactgcccgcaggctctgtacacaatccaggcactgtcactgacagctctgccagttctgatgaaagagtaatgtgaactttttctggctgaggttgtaatatttcattgtttccatggtttctcttgtttgagatayagtaaaaaaaatcaggagatgtgaactgtatttcacttgactgtgtgccctgaaggagttcaaggagg

SEQ ID NO: 4499 - DNA, 600 bp, Chicken  19866894107531_5
gtattagtgactgttgagctagttaaaagaaagtttgaaaaaaacatattcaaagagcacttaaaaaytgagagcttgtacatgccaaacattattccacagagacttgaaaaggccaagaaatagactctgcagaggccaccttgcgcagtggatgttatgcactgcccgcaggctctgtacacaatccaggcactgtcactgacagctctgccagttctgatgaaagagtaatgtgaactttttctggctgaggttgtaatatttcattgtttccatggtttctcttgtttgagatayagtaaaaaaaatcaggagatgtgaactgtatttcacttgactgtgtgccctgaaggagttcaaggaggataaacagaggatccctgggttctcatataccttctatattacaaggctgtcactgtagtggcagtaattctgcttaaggtaacttaagatacacctacattgtctttaaatttggctggtttacactcaaggtttgatttgagattttagagctgagtgacttaaatgtccatacattctgtagggctgagatttgacagagagcatatttggcttttccagagtacagtt

SEQ ID NO: 4500 - DNA, 599 bp, Chicken  19866894107534_1
  misc_feature (1)..(108): n is any nucleotide
nnnnnnnnnnnnnnnnnnnnnnnnnnnnnnnnnnnnnnnnnnnnnnnnnnnnnnnnnnnnnnnnnnnnnnnnnnnnnnnnnnnnnnnnnnnnnnnnnnnnnnnnnnnnctttattgtattcctttacaaataatttggtctgccgtttttaaggctggcattgtacgaagaaactgggtagaaaaccttcttgctttgttgcaggctcggacacacagtacttaatcatttcagtaagttacctgtgttcactgtgacaagtgtttacacagaaatttatatgaacagcaaaaccctaaygagctaatattttacaggaaaaaagcactcaacaacaacaaaaccctaactctataacwtaaaaagaatagcaaaagcatgtacaaaatgcttgtctaataaatcaatgctggtgtcttaccataagtaactaagagtcaatgaaaacaggtcactgagaaaaatcttaggcacaagaacttggagtgggcattagatcacaagtgctctatatctagcctcacttttgggggacattgatattgagtacacaagaactgaactacaaaatcctgtgcagtagttggagtaactttgag

SEQ ID NO: 4501 - DNA, 599 bp, Chicken  19866894107534_2
  misc_feature (1)..(49): n is any nucleotide
nnnnnnnnnnnnnnnnnnnnnnnnnnnnnnnnnnnnnnnnnnnnnnnnnctttattgtattcctttacaaataatttggtctgccgtttttaaggctggcattgtacgaagaaactgggtagaaaaccttcttgctttgttgcaggctcggacacacagtacttaatcatttcagtaagttacctgtgttcactgtgacaagtgtttacacagaaatttatatgaacagcaaaaccctaaygagctaatattttacaggaaaaaagcactcaacaacaacaaaaccctaactctataacwtaaaaagaatagcaaaagcatgtacaaaatgcttgtctaataaatcaatgctggtgtcttaccataagtaactaagagtcaatgaaaacaggtcactgagaaaaatcttaggcacaagaacttggagtgggcattagatcacaagtgctctatatctagcctcacttttgggggacattgatattgagtacacaagaactgaactacaaaatcctgtgcagtagttggagtaactttgagacctattaattaaaatcctgtcatactggtgtgagttaattggttgccaaatggcataa

SEQ ID NO: 4502 - DNA, 600 bp, Chicken  19866894107540_1
taagacaggcggcaaaggaaacagcctcaatataagccaaacaaaaagcctggctgtgatatccagtacagactttgtgctgcctcctctctgttcaaaacctgagatctgaacaaaacacccttaaagagcaactctgaagagcgcttgttccactcacttgttttaactacatcaaacattcatctacacatcacagaagtgaatttggcgtaagaggattcatcacaccttaagtcaaacgttcagtaatgcccggagacgattccttgtgcttggaaaccaaggtgcttaaaggaytgctcttttgttgcacaacagaagagaggttaggagtggggaaagctttcagtcatttgcaaagtctaagcaagaagaaaaacacgctcaagtcctcgagtactcctccaaaacgttcacatactgcyaccatacaggagtgctatacagggtcatcaggtggacaagaatgctggtttttycaaccaaaagtttactttgaaacaagaataaagaaagcacggacatacgcatacgattttgctatcaatttaaaaatgaacatggctctcttttgtaatataaacagaattactatat

SEQ ID NO: 4503 - DNA, 600 bp, Chicken  19866894107540_2
gagcaactctgaagagcgcttgttccactcacttgttttaactacatcaaacattcatctacacatcacagaagtgaatttggcgtaagaggattcatcacaccttaagtcaaacgttcagtaatgcccggagacgattccttgtgcttggaaaccaaggtgcttaaaggaytgctcttttgttgcacaacagaagagaggttaggagtggggaaagctttcagtcatttgcaaagtctaagcaagaagaaaaacacgctcaagtcctcgagtactcctccaaaacgttcacatactgcyaccatacaggagtgctatacagggtcatcaggtggacaagaatgctggtttttycaaccaaaagtttactttgaaacaagaataaagaaagcacggacatacgcatacgattttgctatcaatttaaaaatgaacatggctctcttttgtaatataaacagaattactatataaaccgtgaatgaaaaaaaggaattgcttcatagagaacaaagaattgccttgccattctacagggggggaaaaaaagataaaagaaagaagtatcagctggcaatgctgtgctaattaaaaatggtg

SEQ ID NO: 4504 - DNA, 600 bp, Chicken  19866894107540_3
tcatctacacatcacagaagtgaatttggcgtaagaggattcatcacaccttaagtcaaacgttcagtaatgcccggagacgattccttgtgcttggaaaccaaggtgcttaaaggaytgctcttttgttgcacaacagaagagaggttaggagtggggaaagctttcagtcatttgcaaagtctaagcaagaagaaaaacacgctcaagtcctcgagtactcctccaaaacgttcacatactgcyaccatacaggagtgctatacagggtcatcaggtggacaagaatgctggtttttycaaccaaaagtttactttgaaacaagaataaagaaagcacggacatacgcatacgattttgctatcaatttaaaaatgaacatggctctcttttgtaatataaacagaattactatataaaccgtgaatgaaaaaaaggaattgcttcatagagaacaaagaattgccttgccattctacagggggggaaaaaaagataaaagaaagaagtatcagctggcaatgctgtgctaattaaaaatggtgcagttcccttgcagtacaccacacagtgctcaaagggctcttcagcatctttca

SEQ ID NO: 4505 - DNA, 600 bp, Chicken  19866894107545_1
tcatgaagtgtttggaagattattcctgctgagttcatctctcagacctgcagatttgcctttccagtgcatccagatccatgcagctttatgcagttgtgcattcttgctgaagttacaaagcaaccagagaatcgactggaatagattgtctgtgctgtgttcaagccttctcatgtgaactgttactgcatgtcttcctttggcttgtgtgtgaggtgggacgtgatatatctttttcccttcttttgggggtaggagatggaaaaatggaaggttttgacttttttctttttttaraggaggtctaggwtgggcagctggtagcactgcaagccttcttttctctgcacattgctctgcagaatggctgtcttctcttagctgctgcagttgcatagcttcagggctgctggcaagagaaagctggaggaatacccagagcctgggatgggcttgttgatcttcctagcagagaagatgccacagcattgacctcaccagctgcctggggctgaggcacagtgttctggagctgggaatgttttggtggcctcatggctgcagcagtgacactgtgttcctcagtgtggtcttgac

SEQ ID NO: 4506 - DNA, 600 bp, Chicken  19866894107545_2
ggaagattattcctgctgagttcatctctcagacctgcagatttgcctttccagtgcatccagatccatgcagctttatgcagttgtgcattcttgctgaagttacaaagcaaccagagaatcgactggaatagattgtctgtgctgtgttcaagccttctcatgtgaactgttactgcatgtcttcctttggcttgtgtgtgaggtgggacgtgatatatctttttcccttcttttgggggtaggagatggaaaaatggaaggttttgacttttttctttttttaraggaggtctaggwtgggcagctggtagcactgcaagccttcttttctctgcacattgctctgcagaatggctgtcttctcttagctgctgcagttgcatagcttcagggctgctggcaagagaaagctggaggaatacccagagcctgggatgggcttgttgatcttcctagcagagaagatgccacagcattgacctcaccagctgcctggggctgaggcacagtgttctggagctgggaatgttttggtggcctcatggctgcagcagtgacactgtgttcctcagtgtggtcttgacaaactgtttccca

SEQ ID NO: 4507 - DNA, 600 bp, Chicken  19866894107545_3
catcagttgacttgagggactgtgcttagctgggtcattgaggatggaaggggagggctgcgagagaggaggatctggataaaatgcagatcccagaaccttgaaaatggtggttaatagccagtgactgtattcttctgaattttttttttttgctgttcatccccaaaacttaactgtgtgaataagacataaagctgtgacttagtcactattcatcctgagtatggtggagctgctgttgtgcgttattgatctaacctaaatctgaggcagctaccgcataaatctgacttgctwtgttagatgtgttggttttctatttttttctttcttaacccctagggtttttgctgygactcagacctatratatggccccataaggctgacaaatcctgaaaacagaaggatgcttgtagaaattatttggttctgtttggatttcctgtcctttaggagaagcagagcatcttaaacagtttttgtactgaggcctgcttgttacctgcacgctggtttgttgcatcgctcaccatcttgtctgtcctggccagaaaagctttgctggctctttgctttaattatcaatgaaatgctc

SEQ ID NO: 4508 - DNA, 600 bp, Chicken  19866894107545_4
ctgcgagagaggaggatctggataaaatgcagatcccagaaccttgaaaatggtggttaatagccagtgactgtattcttctgaattttttttttttgctgttcatccccaaaacttaactgtgtgaataagacataaagctgtgacttagtcactattcatcctgagtatggtggagctgctgttgtgcgttattgatctaacctaaatctgaggcagctaccgcataaatctgacttgctwtgttagatgtgttggttttctatttttttctttcttaacccctagggtttttgctgygactcagacctatratatggccccataaggctgacaaatcctgaaaacagaaggatgcttgtagaaattatttggttctgtttggatttcctgtcctttaggagaagcagagcatcttaaacagtttttgtactgaggcctgcttgttacctgcacgctggtttgttgcatcgctcaccatcttgtctgtcctggccagaaaagctttgctggctctttgctttaattatcaatgaaatgctccgcaagcaggagaacaatatttgcatagatgtaattctggaaattgagcgtaatgtg

SEQ ID NO: 4509 - DNA, 600 bp, Chicken  19866894107545_5
gatctggataaaatgcagatcccagaaccttgaaaatggtggttaatagccagtgactgtattcttctgaattttttttttttgctgttcatccccaaaacttaactgtgtgaataagacataaagctgtgacttagtcactattcatcctgagtatggtggagctgctgttgtgcgttattgatctaacctaaatctgaggcagctaccgcataaatctgacttgctwtgttagatgtgttggttttctatttttttctttcttaacccctagggtttttgctgygactcagacctatratatggccccataaggctgacaaatcctgaaaacagaaggatgcttgtagaaattatttggttctgtttggatttcctgtcctttaggagaagcagagcatcttaaacagtttttgtactgaggcctgcttgttacctgcacgctggtttgttgcatcgctcaccatcttgtctgtcctggccagaaaagctttgctggctctttgctttaattatcaatgaaatgctccgcaagcaggagaacaatatttgcatagatgtaattctggaaattgagcgtaatgtgatcaggaaatggga

SEQ ID NO: 4510 - DNA, 600 bp, Chicken  19866894107548_1
tagacagcagagaactcagggagcttcaaaagaacccatccccatccaagctgcagccaaacgtagttcaggaaacgctgagcatcagacacgatccaagtcctaggattggaagctgtatgcttttagctagttctttaaacttcaaaagaagggaagaagtgctgctggtcccagtaccagctaaagaagggaaatattactggataatcagaatgttagttgcagaagcagacatcatttgaagacttatttatgcatagagagcaagtagagcactccacaggcaagtaaaaggargaaagaagtggcacatttagaccaatagcagaataattgatacagagcttttgtttgaaagctactgaaatctatggaaagaatggcattacatgtaaaagatgcaaatccattttcaaygatgctaaatttctaaagaaacatcatggacagatttttagctacttttaaaatgttaaaaaaawtaagctgtctgtgaccttttggaagataaatcatactatcacaatgctgaaataaccaaatcaaccttgaagaccagttgctgctgctgattacaatgggagttctgccatagac

SEQ ID NO: 4511 - DNA, 600 bp, Chicken  19866894107548_2
tgcttttagctagttctttaaacttcaaaagaagggaagaagtgctgctggtcccagtaccagctaaagaagggaaatattactggataatcagaatgttagttgcagaagcagacatcatttgaagacttatttatgcatagagagcaagtagagcactccacaggcaagtaaaaggargaaagaagtggcacatttagaccaatagcagaataattgatacagagcttttgtttgaaagctactgaaatctatggaaagaatggcattacatgtaaaagatgcaaatccattttcaaygatgctaaatttctaaagaaacatcatggacagatttttagctacttttaaaatgttaaaaaaawtaagctgtctgtgaccttttggaagataaatcatactatcacaatgctgaaataaccaaatcaaccttgaagaccagttgctgctgctgattacaatgggagttctgccatagactgtgagagaccatggactctccctcagcataagckagagagaagaatataaatctgctggagcaatgtttgtggaacatggtgctgattttagtgatggctttttccatacaccaagcat

SEQ ID NO: 4512 - DNA, 600 bp, Chicken  19866894107548_3
aaagaagggaaatattactggataatcagaatgttagttgcagaagcagacatcatttgaagacttatttatgcatagagagcaagtagagcactccacaggcaagtaaaaggargaaagaagtggcacatttagaccaatagcagaataattgatacagagcttttgtttgaaagctactgaaatctatggaaagaatggcattacatgtaaaagatgcaaatccattttcaaygatgctaaatttctaaagaaacatcatggacagatttttagctacttttaaaatgttaaaaaaawtaagctgtctgtgaccttttggaagataaatcatactatcacaatgctgaaataaccaaatcaaccttgaagaccagttgctgctgctgattacaatgggagttctgccatagactgtgagagaccatggactctccctcagcataagckagagagaagaatataaatctgctggagcaatgtttgtggaacatggtgctgattttagtgatggctttttccatacaccaagcatgagatcatgtacagggctctgtttacatggtgatgtaattttacagcagaagctggaaaaacaag

SEQ ID NO: 4513 - DNA, 600 bp, Chicken  19866894107548_4
attgatacagagcttttgtttgaaagctactgaaatctatggaaagaatggcattacatgtaaaagatgcaaatccattttcaaygatgctaaatttctaaagaaacatcatggacagatttttagctacttttaaaatgttaaaaaaawtaagctgtctgtgaccttttggaagataaatcatactatcacaatgctgaaataaccaaatcaaccttgaagaccagttgctgctgctgattacaatgggagttctgccatagactgtgagagaccatggactctccctcagcataagckagagagaagaatataaatctgctggagcaatgtttgtggaacatggtgctgattttagtgatggctttttccatacaccaagcatgagatcatgtacagggctctgtttacatggtgatgtaattttacagcagaagctggaaaaacaaggagggtatatcatgtccagcatgatttatgccaaacttcccacaactatgcagcctccctcccatgtcatacatattttggcaggatgaaattaagaaatggaacagccctgcccccagtttctagacaaccttatgctttggctrcaaa

SEQ ID NO: 4514 - DNA, 600 bp, Chicken  19866894107548_5
agckagagagaagaatataaatctgctggagcaatgtttgtggaacatggtgctgattttagtgatggctttttccatacaccaagcatgagatcatgtacagggctctgtttacatggtgatgtaattttacagcagaagctggaaaaacaaggagggtatatcatgtccagcatgatttatgccaaacttcccacaactatgcagcctccctcccatgtcatacatattttggcaggatgaaattaagaaatggaacagccctgcccccagtttctagacaaccttatgctttggctrcaaaagtaactcataactcaaaagcaatctccattgggcagacagtctttaagtcaaacagcacatgtgtttaatgacaaaattaccttttgttttatacaaatgtcctcccagcataaggacaatccagggctgtctaattgatttagcaggatggcactatctgcatttgtgatcacaaaagacactcaaatacatttaattaccaactaacgttttatggcattgtggtttacaaactgttacacccactcatcatttgaggtagaatcttgcattttttttccttaaaaggaatgc

SEQ ID NO: 4515 - DNA, 600 bp, Chicken  19866894107549_1
aggttaacaccctacttctgtgaaaagtgctatagtcacaagggtaaaaaaaaaaaaaagaaggttaagtcttcatgtttcattcaaaggaacgtattcagagcagccaggtcctttctaggcacactaaaatgcaaccagtaggataccttttttggttaagtctttatgaaaatgtgtgtgtcagaatccagtgaggaaatcaatgaataattcgtagcctatggcttaattgtgaatcatttgtttgcatacttcactctccattactcatgtcgtgtggttgattgcttgggactytgttttcactgcagaaagggtctagtcttgacttgggattttcctccccagctttmttatatattgaatttacagagataggaaccrtcatgccctgtctccattaggatttataytgggatagccagctggagaaagatagctactttaatggaaaaaaacactgggcttgggtttgttttttgtttgctttgcagcaaacatgtcatttttgtccaagacattgtttcagctccctaattgaatgacggaaatttttaaaagagaacaatgaaacgccgttcttctgaaaaaaaatct

SEQ ID NO: 4516 - DNA, 600 bp, Chicken  19866894107549_2
aaagaaggttaagtcttcatgtttcattcaaaggaacgtattcagagcagccaggtcctttctaggcacactaaaatgcaaccagtaggataccttttttggttaagtctttatgaaaatgtgtgtgtcagaatccagtgaggaaatcaatgaataattcgtagcctatggcttaattgtgaatcatttgtttgcatacttcactctccattactcatgtcgtgtggttgattgcttgggactytgttttcactgcagaaagggtctagtcttgacttgggattttcctccccagctttmttatatattgaatttacagagataggaaccrtcatgccctgtctccattaggatttataytgggatagccagctggagaaagatagctactttaatggaaaaaaacactgggcttgggtttgttttttgtttgctttgcagcaaacatgtcatttttgtccaagacattgtttcagctccctaattgaatgacggaaatttttaaaagagaacaatgaaacgccgttcttctgaaaaaaaatctggttgtcatccaactatttgcaaataattctgattgcaggaggcagagtaaagcaa

SEQ ID NO: 4517 - DNA, 600 bp, Chicken  19866894107549_3
aggaacgtattcagagcagccaggtcctttctaggcacactaaaatgcaaccagtaggataccttttttggttaagtctttatgaaaatgtgtgtgtcagaatccagtgaggaaatcaatgaataattcgtagcctatggcttaattgtgaatcatttgtttgcatacttcactctccattactcatgtcgtgtggttgattgcttgggactytgttttcactgcagaaagggtctagtcttgacttgggattttcctccccagctttmttatatattgaatttacagagataggaaccrtcatgccctgtctccattaggatttataytgggatagccagctggagaaagatagctactttaatggaaaaaaacactgggcttgggtttgttttttgtttgctttgcagcaaacatgtcatttttgtccaagacattgtttcagctccctaattgaatgacggaaatttttaaaagagaacaatgaaacgccgttcttctgaaaaaaaatctggttgtcatccaactatttgcaaataattctgattgcaggaggcagagtaaagcaaactcattgaagcacttgtgagtacaatcggt

SEQ ID NO: 4518 - DNA, 600 bp, Chicken  19866894107549_4
tctaggcacactaaaatgcaaccagtaggataccttttttggttaagtctttatgaaaatgtgtgtgtcagaatccagtgaggaaatcaatgaataattcgtagcctatggcttaattgtgaatcatttgtttgcatacttcactctccattactcatgtcgtgtggttgattgcttgggactytgttttcactgcagaaagggtctagtcttgacttgggattttcctccccagctttmttatatattgaatttacagagataggaaccrtcatgccctgtctccattaggatttataytgggatagccagctggagaaagatagctactttaatggaaaaaaacactgggcttgggtttgttttttgtttgctttgcagcaaacatgtcatttttgtccaagacattgtttcagctccctaattgaatgacggaaatttttaaaagagaacaatgaaacgccgttcttctgaaaaaaaatctggttgtcatccaactatttgcaaataattctgattgcaggaggcagagtaaagcaaactcattgaagcacttgtgagtacaatcggtgtttggttttttttgatagattgcgtctg

SEQ ID NO: 4519 - DNA, 485 bp, Chicken  19866894107550_1
cagtgggatgaaggagagaatagaaaatgggctcagacaaaattatttactaaaaggaaaagggtaatacatatgtgagtgaatataacaagtgatgcacaagcaatttttcaccactcctgaccaatgcccagctagctcccttcttagtgagtggaatagatgaaatgaactcctattcccttcaaaaactccgtctgcataatgtcatatggtatggaatatccctgtggccagctccttgggcccttcgctgtaaatggccttggctttgtacaacactgcttagcagcaactatraacattggtgtgttatcaacactgttcttctagaaccgaaaggtagcatcataccggacactctgaagaaagcagttctgtcgcagcttgaaactaaaacagcctggtagagataagtagtttgtaatttgagtttctctgctactgaaatggattaaatctgttctagcccaatatgagcccta

SEQ ID NO: 4520 - DNA, 600 bp, Chicken  19866894107556_1
ttcacaatcctgccttattcgtgtcactgcttttttgccaatacatgcatttgtgaacaactgttttcaaggatgaagcgtaaaggaagagtaaaacttcatcaaaaatctctggtgaacacattaagaactcattaagaattgtagccacttccatcaaaccagactgttagtttcagaaaaataaggtcaaatatcccactagttttatgtttttgatgctctcttttttatattttcataataaatatatattttaaaagaaattttgttagtcacatacattaattaaatattttmcatgaggcccaasacaattccttctcactctgttcagaccaggcaagctggcatgctgaacacccatgcactaaaccaagttcctaagagccacatcagtacgtcttttaagtatgtccaaggagcatcagtgcgcatatggcagcaccacctttgttttcagtaagaataatattttgtctgtggaatagtcatttttaatatttattaattttattaaacatgagtgtaggccctgctagaggcactggggccgtgggggggagggggggcttcttgcagggctggggagcatcgtgg

SEQ ID NO: 4521 - DNA, 600 bp, Chicken  19866894107556_2
cttattcgtgtcactgcttttttgccaatacatgcatttgtgaacaactgttttcaaggatgaagcgtaaaggaagagtaaaacttcatcaaaaatctctggtgaacacattaagaactcattaagaattgtagccacttccatcaaaccagactgttagtttcagaaaaataaggtcaaatatcccactagttttatgtttttgatgctctcttttttatattttcataataaatatatattttaaaagaaattttgttagtcacatacattaattaaatattttmcatgaggcccaasacaattccttctcactctgttcagaccaggcaagctggcatgctgaacacccatgcactaaaccaagttcctaagagccacatcagtacgtcttttaagtatgtccaaggagcatcagtgcgcatatggcagcaccacctttgttttcagtaagaataatattttgtctgtggaatagtcatttttaatatttattaattttattaaacatgagtgtaggccctgctagaggcactggggccgtgggggggagggggggcttcttgcagggctggggagcatcgtgggcactgctagccc

SEQ ID NO: 4522 - DNA, 600 bp, Chicken  19866894107559_1
tcatcaggctctactctacttctagatacatggttcctgctcactttcataaacagtctgaaacatgatgaagctctagtctgagaaatctgcagatctgcttcatgcatttacaatgttacactccagcttcacggcacaaggtctgtcaggcagcattctgaaccatactgctggctcagagcaagccactgagctagcacagactctgcatcaatctgtgagcagcccagggtgaagttgtgccatccttgctttggggatgagtcatcctaacaggttatgtcaccctgtctcctygcacaaccccaaaacacagctgcccagaatgctgcrcagccaaatttgtgcagcccgagctcttcctgtccttctctctggtccactctactcatacatggcaaataccaaactgcccttggaaactcctaaacctgccatacggcttcactgtagcttacagggtgcaggtctggcacacagtgggattctttcccaaataaatcacagccatgattcttctggttactttgcaattcgcaaggctctgctgctttccataccaggatctgtgctttctcccatcctcggactttctct

SEQ ID NO: 4523 - DNA, 534 bp, Chicken  19866894107559_10
ctctgccaggggcttccagaaaggagtgtctagggctgagaaatacaagytagaagtcaggggtggacagtgaacgtgtccatcagcatggacagatggcaagagtgggaagtgattgctttggtttgcagtggtgacgttgatcttgtaaattctgagaragtcgggcagtaaaaggatagtttgtattctgaggaatyctgcttgaataggggagtactagaaaagcttcagtcatcaagatgcatacagctgcagggatcactggcacagaaatctttcagagtaagcaaagagagmagtttctaggtctgcatgaggagggatttgaatacctgatcagctcaattatacaagacatggtttttgaagctgagtaaccaatgctgtgcccaaaatctacagcttggtagagaatactagcagtcctgccagcattactgctgggcagctggacggcaacgtgctgcacatggagcctgcatgacccagacatgtcacagcaacctgtgctcgtgctcaccatgagctctg

SEQ ID NO: 4524 - DNA, 600 bp, Chicken  19866894107559_2
ctgctcactttcataaacagtctgaaacatgatgaagctctagtctgagaaatctgcagatctgcttcatgcatttacaatgttacactccagcttcacggcacaaggtctgtcaggcagcattctgaaccatactgctggctcagagcaagccactgagctagcacagactctgcatcaatctgtgagcagcccagggtgaagttgtgccatccttgctttggggatgagtcatcctaacaggttatgtcaccctgtctcctygcacaaccccaaaacacagctgcccagaatgctgcrcagccaaatttgtgcagcccgagctcttcctgtccttctctctggtccactctactcatacatggcaaataccaaactgcccttggaaactcctaaacctgccatacggcttcactgtagcttacagggtgcaggtctggcacacagtgggattctttcccaaataaatcacagccatgattcttctggttactttgcaattcgcaaggctctgctgctttccataccaggatctgtgctttctcccatcctcggactttctctaaaacacagtgttgggaaccactgccaatcagagca

SEQ ID NO: 4525 - DNA, 600 bp, Chicken  19866894107559_3
gcagcattctgaaccatactgctggctcagagcaagccactgagctagcacagactctgcatcaatctgtgagcagcccagggtgaagttgtgccatccttgctttggggatgagtcatcctaacaggttatgtcaccctgtctcctygcacaaccccaaaacacagctgcccagaatgctgcrcagccaaatttgtgcagcccgagctcttcctgtccttctctctggtccactctactcatacatggcaaataccaaactgcccttggaaactcctaaacctgccatacggcttcacrgtagcttacagggtgcaggtctggcacacagtgggattctttcccaaataaatcacagccatgattcttctggttactttgcaattcgcaaggctctgctgctttccataccaggatctgtgctttctcccatcctcggactttctctaaaacacagtgttgggaaccactgccaatcagagcagaacgtccactktgctctatgcacaagctgctcgtttctgacaaggaacatcactgctctgagtctcacatggktctcaacagaaattcttcagcaaagctgtctccttcttgtca

SEQ ID NO: 4526 - DNA, 600 bp, Chicken  19866894107559_4
cagcattctgaaccatactgctggctcagagcaagccactgagctagcacagactctgcatcaatctgtgagcagcccagggtgaagttgtgccatccttgctttggggatgagtcatcctaacaggttatgtcaccctgtctcctygcacaaccccaaaacacagctgcccagaatgctgcrcagccaaatttgtgcagcccgagctcttcctgtccttctctctggtccactctactcatacatggcaaataccaaactgcccttggaaactcctaaacctgccatacggcttcactrtagcttacagggtgcaggtctggcacacagtgggattctttcccaaataaatcacagccatgattcttctggttactttgcaattcgcaaggctctgctgctttccataccaggatctgtgctttctcccatcctcggactttctctaaaacacagtgttgggaaccactgccaatcagagcagaacgtccactktgctctatgcacaagctgctcgtttctgacaaggaacatcactgctctgagtctcacatggktctcaacagaaattcttcagcaaagctgtctccttcttgtcag

SEQ ID NO: 4527 - DNA, 600 bp, Chicken  19866894107559_5
tgcagcccgagctcttcctgtccttctctctggtccactctactcatacatggcaaataccaaactgcccttggaaactcctaaacctgccatacggcttcactgtagcttacagggtgcaggtctggcacacagtgggattctttcccaaataaatcacagccatgattcttctggttactttgcaattcgcaaggctctgctgctttccataccaggatctgtgctttctcccatcctcggactttctctaaaacacagtgttgggaaccactgccaatcagagcagaacgtccactktgctctatgcacaagctgctcgtttctgacaaggaacatcactgctctgagtctcacatggktctcaacagaaattcttcagcaaagctgtctccttcttgtcagtactccgttagtcattacactcccatcggccaggatctgaaggaactcatgtctctgtctgcagctctattgtggcacagctgtcagcagcctgcctttctgaaggacgtgagaaacgtgcgaagcagagttaccctgaaaacactgagggaacttcccccagtatttctccctattgtgagcacaaaacaaacc

SEQ ID NO: 4528 - DNA, 600 bp, Chicken  19866894107559_6
aactgcccttggaaactcctaaacctgccatacggcttcactgtagcttacagggtgcaggtctggcacacagtgggattctttcccaaataaatcacagccatgattcttctggttactttgcaattcgcaaggctctgctgctttccataccaggatctgtgctttctcccatcctcggactttctctaaaacacagtgttgggaaccactgccaatcagagcagaacgtccactktgctctatgcacaagctgctcgtttctgacaaggaacatcactgctctgagtctcacatggktctcaacagaaattcttcagcaaagctgtctccttcttgtcagtactccgttagtcattacactcccatcggccaggatctgaaggaactcatgtctctgtctgcagctctattgtggcacagctgtcagcagcctgcctttctgaaggacgtgagaaacgtgcgaagcagagttaccctgaaaacactgagggaacttcccccagtatttctccctattgtgagcacaaaacaaaccaggtgtagctgtgcttacagcaatgggaggtaagggctgcctgtcaagtagcagaggcagct

SEQ ID NO: 4529 - DNA, 600 bp, Chicken  19866894107559_7
tgcagggactattttaagaacagtaacttttcaccaaacgtgattatgaggcagactgagctcagcgtacaaaaatactgcatccgttccgcagcatctctgggccaaaatctgatacccttacccgaaagggcaataaattactctgcagattgtccaaattgtattaaaaagggatagctgtgagtgctagctggttttaaatcagtgttgaagaaacttgtcatgatatcattgcaagaaaacatagctctgccaggggcttccagaaaggagtgtctagggctgagaaatacaagytagaagtcaggggtggacagtgaacgtgtccatcagcatggacagatggcaagagtgggaagtgattgctttggtttgcagtggtgacgttgatcttgtaaattctgagaragtcgggcagtaaaaggatagtttgtattctgaggaatyctgcttgaataggggagtactagaaaagcttcagtcatcaagatgcatacagctgcagggatcactggcacagaaatctttcagagtaagcaaagagagmagtttctaggtctgcatgaggagggatttgaatacctgatcagctcaatt

SEQ ID NO: 4530 - DNA, 600 bp, Chicken  19866894107559_8
ctgatacccttacccgaaagggcaataaattactctgcagattgtccaaattgtattaaaaagggatagctgtgagtgctagctggttttaaatcagtgttgaagaaacttgtcatgatatcattgcaagaaaacatagctctgccaggggcttccagaaaggagtgtctagggctgagaaatacaagytagaagtcaggggtggacagtgaacgtgtccatcagcatggacagatggcaagagtgggaagtgattgctttggtttgcagtggtgacgttgatcttgtaaattctgagaragtcgggcagtaaaaggatagtttgtattctgaggaatyctgcttgaataggggagtactagaaaagcttcagtcatcaagatgcatacagctgcagggatcactggcacagaaatctttcagagtaagcaaagagagmagtttctaggtctgcatgaggagggatttgaatacctgatcagctcaattatacaagacatggtttttgaagctgagtaaccaatgctgtgcccaaaatctacagcttggtagagaatactagcagtcctgccagcattactgctgggcagctggacggca

SEQ ID NO: 4531 - DNA, 600 bp, Chicken  19866894107559_9
gattgtccaaattgtattaaaaagggatagctgtgagtgctagctggttttaaatcagtgttgaagaaacttgtcatgatatcattgcaagaaaacatagctctgccaggggcttccagaaaggagtgtctagggctgagaaatacaagytagaagtcaggggtggacagtgaacgtgtccatcagcatggacagatggcaagagtgggaagtgattgctttggtttgcagtggtgacgttgatcttgtaaattctgagaragtcgggcagtaaaaggatagtttgtattctgaggaatyctgcttgaataggggagtactagaaaagcttcagtcatcaagatgcatacagctgcagggatcactggcacagaaatctttcagagtaagcaaagagagmagtttctaggtctgcatgaggagggatttgaatacctgatcagctcaattatacaagacatggtttttgaagctgagtaaccaatgctgtgcccaaaatctacagcttggtagagaatactagcagtcctgccagcattactgctgggcagctggacggcaacgtgctgcacatggagcctgcatgacccagacatgtca

SEQ ID NO: 4532 - DNA, 600 bp, Chicken  19866894107566_1
cggctgttcagagcaaactgctgtttggagtcactcccaaacatctgttagaaaagaactcgttaaccttaggagctttaattaaagcttggtgtcaagtctgataaggttattttcgggtttgttctttgttgttttttttcattggggttagatgctgctctgagacagctgctgtcacactgagcagtacacgatgtatctcatctgtatggacgctgcctcttccaggcctcactgtaagcagggtgggctgaggagcttttcacttggttctttatattcatcctgctctgcagsaattccaacagcaacgtgacatctcccaccactaaatatgcttacgtctatggctctggcgtcctcctgctggaaaacaaagtgaagttttgtgaggtatcaatgttaattctctaggttatcacttttattgctattatttcaatatgttttatatttatcgtacgtagtattacatggatactatattaaatatattattactttatattatattacttttaaaaacgtaacataaaagttaaggtgtcgtgtcataaagaatgtgtgtatatagcagctgtacaaatcaagctccat

SEQ ID NO: 4533 - DNA, 600 bp, Chicken  19866894107570_1
tgtgtcatatctaccaaacaatactgtcatgttttaacactgcagcagcacatacatggtagaacagagtacacaatgccagttaatgagtcacaaaaacacaaatgactaactcactgcagctgtgtttaccttttactcttccattacaattcataagtaataatatattttgcatttttaaagtcatggaaatctaccagagtaaactaaatggtttatctcatgcttttgcttccctataaagaaggatttactttaatttttagtgcctgctttgtgttagcatctatctactgrtattttggaaagttaagtttattaagtttaggttgaattattgagaaatacatattttatcacaaaaatgccatccatttgcyacttgtgcatatgttcaaaataaacttgttatggcttgatgctaatgacttataccccaaacaagggctaacatggcagctctyaaaggctcccttagcaatactattgccttactgctaaaaaaaacagccctccatttgtaataaatagtccatgaaatacatcgaattataacacaggttcccaggaacttacttaaatcaccagtgacaacta

SEQ ID NO: 4534 - DNA, 600 bp, Chicken  19866894107570_2
taatgagtcacaaaaacacaaatgactaactcactgcagctgtgtttaccttttactcttccattacaattcataagtaataatatattttgcatttttaaagtcatggaaatctaccagagtaaactaaatggtttatctcatgcttttgcttccctataaagaaggatttactttaatttttagtgcctgctttgtgttagcatctatctactgrtattttggaaagttaagtttattaagtttaggttgaattattgagaaatacatattttatcacaaaaatgccatccatttgcyacttgtgcatatgttcaaaataaacttgttatggcttgatgctaatgacttataccccaaacaagggctaacatggcagctctyaaaggctcccttagcaatactattgccttactgctaaaaaaaacagccctccatttgtaataaatagtccatgaaatacatcgaattataacacaggttcccaggaacttacttaaatcaccagtgacaactacaagcaaaatgcagttaagtctagctgtgtttacacagcatttaccaaaacacatagttaacagttaacaactttcattttca

SEQ ID NO: 4535 - DNA, 600 bp, Chicken  19866894107570_3
atattttgcatttttaaagtcatggaaatctaccagagtaaactaaatggtttatctcatgcttttgcttccctataaagaaggatttactttaatttttagtgcctgctttgtgttagcatctatctactgrtattttggaaagttaagtttattaagtttaggttgaattattgagaaatacatattttatcacaaaaatgccatccatttgcyacttgtgcatatgttcaaaataaacttgttatggcttgatgctaatgacttataccccaaacaagggctaacatggcagctctyaaaggctcccttagcaatactattgccttactgctaaaaaaaacagccctccatttgtaataaatagtccatgaaatacatcgaattataacacaggttcccaggaacttacttaaatcaccagtgacaactacaagcaaaatgcagttaagtctagctgtgtttacacagcatttaccaaaacacatagttaacagttaacaactttcattttcactgttttccaaacacacacacacacacacacacacacacagggtattttattctttctgttgttactttacacttcactgcatt

SEQ ID NO: 4536 - DNA, 600 bp, Chicken  19866894107570_4
gaaggcttcaaatgtagaaaaaaacagaatttgtcagtgtacacaatgtgccctaatttagacacagttaatgtgggagggaagggttgttttgcttcctttcttatctcaaagtatagacagcataatagttgtgataaatctatgagatgctttcaatagaaggagtatttaggaatcattttccctggacagggatgttttcaacacaattagatgagacaattcctctccattttctcacgctcatattatgactacaatgagcatgatgatactgatattatgaaaacaagtaartatttttctggttccaacactgttgatcaagctcctcaccagtgcccacagcagtatccagccctagctggagtatccacttgcatgttgtgctactcastctgtgctatgagatgtgcagtgccaaacaaagcctgcattctgtttgtcagttgttcaccaagaatatgtaaagactgcaattaaaaaacatcaagatgatagttttgactacatcggatccttctgaagcataaggagttacagttccaatactrgaacagattttgtctttcctactcatgcgccttatagtaccaa

SEQ ID NO: 4537 - DNA, 600 bp, Chicken  19866894107570_5
ttcttatctcaaagtatagacagcataatagttgtgataaatctatgagatgctttcaatagaaggagtatttaggaatcattttccctggacagggatgttttcaacacaattagatgagacaattcctctccattttctcacgctcatattatgactacaatgagcatgatgatactgatattatgaaaacaagtaartatttttctggttccaacactgttgatcaagctcctcaccagtgcccacagcagtatccagccctagctggagtatccacttgcatgttgtgctactcastctgtgctatgagatgtgcagtgccaaacaaagcctgcattctgtttgtcagttgttcaccaagaatatgtaaagactgcaattaaaaaacatcaagatgatagttttgactacatcggatccttctgaagcataaggagttacagttccaatactrgaacagattttgtctttcctactcatgcgccttatagtaccaaacaatcatccctgtgatttcacatggattacttgtttacattaagttmgaaacacagcttcactagttacccttgcaaagcttctgagcacagtgtgagt

SEQ ID NO: 4538 - DNA, 600 bp, Chicken  19866894107570_6
ctacaatgagcatgatgatactgatattatgaaaacaagtaartatttttctggttccaacactgttgatcaagctcctcaccagtgcccacagcagtatccagccctagctggagtatccacttgcatgttgtgctactcastctgtgctatgagatgtgcagtgccaaacaaagcctgcattctgtttgtcagttgttcaccaagaatatgtaaagactgcaattaaaaaacatcaagatgatagttttgactacatcggatccttctgaagcataaggagttacagttccaatactrgaacagattttgtctttcctactcatgcgccttatagtaccaaacaatcatccctgtgatttcacatggattacttgtttacattaagttmgaaacacagcttcactagttacccttgcaaagcttctgagcacagtgtgagttatttttactgaggcccagctaagctatgtgtgcataaagcttcacatatgatgttttgcagccttggaaattgaagcctytctatattcttccctgtacattttattgtatttcaacacaaaatactttaacattctgataacacgtataaaatac

SEQ ID NO: 4539 - DNA, 600 bp, Chicken  19866894107570_7
cagcagtatccagccctagctggagtatccacttgcatgttgtgctactcastctgtgctatgagatgtgcagtgccaaacaaagcctgcattctgtttgtcagttgttcaccaagaatatgtaaagactgcaattaaaaaacatcaagatgatagttttgactacatcggatccttctgaagcataaggagttacagttccaatactrgaacagattttgtctttcctactcatgcgccttatagtaccaaacaatcatccctgtgatttcacatggattacttgtttacattaagttmgaaacacagcttcactagttacccttgcaaagcttctgagcacagtgtgagttatttttactgaggcccagctaagctatgtgtgcataaagcttcacatatgatgttttgcagccttggaaattgaagcctytctatattcttccctgtacattttattgtatttcaacacaaaatactttaacattctgataacacgtataaaatacgtataagtgtctttatgacattccagtcaccaatgtgcaaaaaagtcttttccttccttaactataattgatcatcattatcagtatcccc

SEQ ID NO: 4540 - DNA, 600 bp, Chicken  19866894107570_8
attaaaaaacatcaagatgatagttttgactacatcggatccttctgaagcataaggagttacagttccaatactrgaacagattttgtctttcctactcatgcgccttatagtaccaaacaatcatccctgtgatttcacatggattacttgtttacattaagttmgaaacacagcttcactagttacccttgcaaagcttctgagcacagtgtgagttatttttactgaggcccagctaagctatgtgtgcataaagcttcacatatgatgttttgcagccttggaaattgaagcctytctatattcttccctgtacattttattgtatttcaacacaaaatactttaacattctgataacacgtataaaatacgtataagtgtctttatgacattccagtcaccaatgtgcaaaaaagtcttttccttccttaactataattgatcatcattatcagtatccccccaggacacagacattttatcattaaaaatttagtattttaagacattaaaaaaagacaaattggttgatgaaaatacaggaactggtgtgaatgaagcaggtttataacaggaacactggattaagttcttg

SEQ ID NO: 4541 - DNA, 600 bp, Chicken  19866894107573_1
gatttttaaagtttgccctggagtcctagagactgtttaaacgcttaatatcctgtctgtgcatttaaaaagccttataatgaggatggagtgtctgcttccccagcacctcttgcctcgcgctcccacaccggcccacctcacccgtcgcgtcccagtgcagtgcagcacccccccgctccccccattgctggggctgctctgtgccccacagcctgcagtgcccctcctgccctatgctgcagccccacagtgcgggtgtcagcccagcacacagccctgctgtgggccggaggtgtrcattctcctgggtacccacagggatttgttccagggaaggggaagctctgggaaggcgctgtgttaaggctctgcaggctctggttcctcacagtgctttgctgagctgggagtgaatgtgaccaccctcatccagcagcactgctcccacctccggagggcacgacactgagcgcctgcaccccwggaaagcaaatgtcctgtcctggcatgtgtccctgtgtcatggaaagaggtcccagatctgtccaggccctgaagggttctttgccccttggagtgatgagatgagagggctga

SEQ ID NO: 4542 - DNA, 600 bp, Chicken  19866894107573_2
attgctggggctgctctgtgccccacagcctgcagtgcccctcctgccctatgctgcagccccacagtgcgggtgtcagcccagcacacagccctgctgtgggccggaggtgtrcattctcctgggtacccacagggatttgttccagggaaggggaagctctgggaaggcgctgtgttaaggctctgcaggctctggttcctcacagtgctttgctgagctgggagtgaatgtgaccaccctcatccagcagcactgctcccacctccggagggcacgacactgagcgcctgcaccccwggaaagcaaatgtcctgtcctggcatgtgtccctgtgtcatggaaagaggtcccagatctgtccaggccctgaagggttctttgccccttggagtgatgagatgagagggctgagattggagggagctgtggggaggtcccgcatcccttctgtctgctgctggccatgggctggcrcagggctccctgctgtgtgccactgctggggccacccggctgtgagcccagggtgctccgcagcatctgctctgccacggttctgctgcctgcacgttaattctcattaaatccagggagccc

SEQ ID NO: 4543 - DNA, 600 bp, Chicken  19866894107573_3
ttaaggctctgcaggctctggttcctcacagtgctttgctgagctgggagtgaatgtgaccaccctcatccagcagcactgctcccacctccggagggcacgacactgagcgcctgcaccccwggaaagcaaatgtcctgtcctggcatgtgtccctgtgtcatggaaagaggtcccagatctgtccaggccctgaagggttctttgccccttggagtgatgagatgagagggctgagattggagggagctgtggggaggtcccgcatcccttctgtctgctgctggccatgggctggcrcagggctccctgctgtgtgccactgctggggccacccggctgtgagcccagggtgctccgcagcatctgctctgccacggttctgctgcctgcacgttaattctcattaaatccagggagcccgattgcctcttcatgtaaatattttgtcaagtgaaagggctttaggaagggctgtgctgatggaaggagaaaggccaggctttctcgcgggtgcggtgcctgccctctctcattaaagcatgacctgtgccccggtgtgggcagctgctccgtgcgcagtcagcctggagctgtgtg

SEQ ID NO: 4544 - DNA, 600 bp, Chicken  19866894107573_4
ccgcagcatctgctctgccacggttctgctgcctgcacgttaattctcattaaatccagggagcccgattgcctcttcatgtaaatattttgtcaagtgaaagggctttaggaagggctgtgctgatggaaggagaaaggccaggctttctcgcgggtgcggtgcctgccctctctcattaaagcatgacctgtgccccggtgtgggcagctgctccgtgcgcagtcagcctggagctgtgtgaccacccgggtgctgctgggcagtgcagtgcccaccgccccactgccctcatgtgcyccactgcactcacctgcagcagcaccaggagggtggaggagcatctcagggccccatcccttctcctcccttctcctcgctgtgggtgagcaaagtttcagcgagctgatatttctccctgcttcccattaaactttcatgtgctttctctgcatttctgctcccttcccggctgttccagctgctgtcccagatagctgctgtcggttgtgatcctctccttatctgatgaggtcatgtttggtgccggtgacatcaccgccactgcctggggaccgtgagcgcagtgctgtgaccggg

SEQ ID NO: 4545 - DNA, 600 bp, Chicken  19866894107593_1
acaaaataactagcatcttcaccagtcattttcccattattaggaacatcccaaacatttacggatgattaagaaggtagattgagttgtttaaaactgttgtaatggtttattaattatttggcaattaatatgtcattagatctagtcataaattacagaattctagcagctctgtgaggattatgaggattctagcattactctgttccgtttaccagtggggaaaataaagtatgtactgcttaaagatactgtaatcttaacataacaaatctctagcagtccaaattggagatygataaaattgtctttcaaaatgtagtgttaagtgcctggcttcttacatggctttttagaggataaaatcagtctgataactgtcacagttcatagcgagctgatatcagctaacgaagaaggagttttcctgccccattagcagactatcatcttcatttaggattctataaaatattcagtaggtctgatttctcaaatamattttattcataaatataattctttttcatgatgaggttgtgtcttccattcacctgtctgttcagtctgtcaaatttcacttccttatcttttaga

SEQ ID NO: 4546 - DNA, 600 bp, Chicken  19866894107593_2
ctctgttccgtttaccagtggggaaaataaagtatgtactgcttaaagatactgtaatcttaacataacaaatctctagcagtccaaattggagatygataaaattgtctttcaaaatgtagtgttaagtgcctggcttcttacatggctttttagaggataaaatcagtctgataactgtcacagttcatagcgagctgatatcagctaacgaagaaggagttttcctgccccattagcagactatcatcttcatttaggattctataaaatattcagtaggtctgatttctcaaatamattttattcataaatataattctttttcatgatgaggttgtgtcttccattcacctgtctgttcagtctgtcaaatttcacttccttatcttttagaaagaaatactggcaaatactttggtctcaaaagtaccaccatgtattcatgtgttatagtttgtcatcctcagaaacttccagttattcactgartttgtccgtttcawtgtagtaattgccacagatacttactttacataggttagcttagttcagggactgtatygcttgtaatgattgctttccagacctggagtaacc

SEQ ID NO: 4547 - DNA, 600 bp, Chicken  19866894107593_3
gcgagctgatatcagctaacgaagaaggagttttcctgccccattagcagactatcatcttcatttaggattctataaaatattcagtaggtctgatttctcaaatamattttattcataaatataattctttttcatgatgaggttgtgtcttccattcacctgtctgttcagtctgtcaaatttcacttccttatcttttagaaagaaatactggcaaatactttggtctcaaaagtaccaccatgtattcatgtgttatagtttgtcatcctcagaaacttccagttattcactgartttgtccgtttcawtgtagtaattgccacagatacttactttacataggttagcttagttcagggactgtatygcttgtaatgattgctttccagacctggagtaacctttgttgcacttacctgattctttagcattttactcaacatctcttaaattttaggtgctgggattagcagtgatgtagaagctgtcattagtataattagtagcagtggcctctgcaacaccatggcgtggtacatccattgtcacacctgcctgcatgtagacccagctcttctggggtttaagtcacca

SEQ ID NO: 4548 - DNA, 600 bp, Chicken  19866894107593_4
gctaacgaagaaggagttttcctgccccattagcagactatcatcttcatttaggattctataaaatattcagtaggtctgatttctcaaatamattttattcataaatataattctttttcatgatgaggttgtgtcttccattcacctgtctgttcagtctgtcaaatttcacttccttatcttttagaaagaaatactggcaaatactttggtctcaaaagtaccaccatgtattcatgtgttatagtttgtcatcctcagaaacttccagttattcactgartttgtccgtttcawtgtagtaattgccacagatacttactttacataggttagcttagttcagggactgtatygcttgtaatgattgctttccagacctggagtaacctttgttgcacttacctgattctttagcattttactcaacatctcttaaattttaggtgctgggattagcagtgatgtagaagctgtcattagtataattagtagcagtggcctctgcaacaccatggcgtggtacatccattgtcacacctgcctgcatgtagacccagctcttctggggtttaagtcaccaatgatttgcttgac

SEQ ID NO: 4549 - DNA, 600 bp, Chicken  19866894107593_5
tataaaatattcagtaggtctgatttctcaaatamattttattcataaatataattctttttcatgatgaggttgtgtcttccattcacctgtctgttcagtctgtcaaatttcacttccttatcttttagaaagaaatactggcaaatactttggtctcaaaagtaccaccatgtattcatgtgttatagtttgtcatcctcagaaacttccagttattcactgartttgtccgtttcawtgtagtaattgccacagatacttactttacataggttagcttagttcagggactgtatygcttgtaatgattgctttccagacctggagtaacctttgttgcacttacctgattctttagcattttactcaacatctcttaaattttaggtgctgggattagcagtgatgtagaagctgtcattagtataattagtagcagtggcctctgcaacaccatggcgtggtacatccattgtcacacctgcctgcatgtagacccagctcttctggggtttaagtcaccaatgatttgcttgactcatcatcataaaccttgccccagcagcttgttctcttctttgcatccttcttgtcctg

SEQ ID NO: 4550 - DNA, 599 bp, Chicken  19866894107594_1
  misc_feature (1)..(185): n is any nucleotide
nnnnnnnnnnnnnnnnnnnnnnnnnnnnnnnnnnnnnnnnnnnnnnnnnnnnnnnnnnnnnnnnnnnnnnnnnnnnnnnnnnnnnnnnnnnnnnnnnnnnnnnnnnnnnnnnnnnnnnnnnnnnnnnnnnnnnnnnnnnnnnnnnnnnnnnnnnnnnnnnnnnnnnnnnnnnnnnnnnnnnnnnnctggctttccttttcccagggatttgattggaaaattgatgcatttatcagaggccagtgcttaccttgttttgacttgtcagagtagtttgttccttcaggcatttggatttgytctactaaatctttataccagctgacagaagctatagacatgtttcatccatccatcagaggcttggacttgctctgacgtcttcagtcttttttcccccctcaaatccctcatccccagaactacagccaagccttcagaacctgtttaaaaactgcccrtcattatctgtgaaggactgtgttcagtttctggctgcttatggcagaactctgtgcctgcaatgcctgttaagtctcacactccctgctcaggaggcactgtaggagaagggaccttaccctgttcagtgcaaggca

SEQ ID NO: 4551 - DNA, 599 bp, Chicken  19866894107594_2
  misc_feature (1)..(24): n is any nucleotide
nnnnnnnnnnnnnnnnnnnnnnnnctggctttccttttcccagggatttgattggaaaattgatgcatttatcagaggccagtgcttaccttgttttgacttgtcagagtagtttgttccttcaggcatttggatttgytctactaaatctttataccagctgacagaagctatagacatgtttcatccatccatcagaggcttggacttgctctgacgtcttcagtcttttttcccccctcaaatccctcatccccagaactacagccaagccttcagaacctgtttaaaaactgcccrtcattatctgtgaaggactgtgttcagtttctggctgcttatggcagaactctgtgcctgcaatgcctgttaagtctcacactccctgctcaggaggcactgtaggagaagggaccttaccctgttcagtgcaaggcaaccatttttgcctttgggacaggcagcatccatggactaggggcagagattgagtttgcaggtgtagataaagctgagttatttctgcaaagatttcaggaggttttttcgccagcaagaaagagacctgatcccaagagcagagcactaggatgtgggag

SEQ ID NO: 4552 - DNA, 600 bp, Chicken  19866894107594_3
tacccttgctatgtttttttctgaaaaccctcgcctaatgcctgaaagactcaggcctggggcttttgtggtagagtgcaaagtggtctgtatgtttctccaggtgggattttggagacggtatccaggagacataccagttcacacctccctacaacaagtctttccttgttcctgatcccagtgtccacgaggttataattgagcacaatgtgtcacacgtctatgaatacccaggtatgctcaggctggttctttagggaagaaagaactcagatgtttttgtttcgtggatgtcayaaggcaccttctaataaaacaatagctttgaaatcattccgttgttcctgagcaatctggtcataattcctgcttgtcctggagcagaggagggaagcacagggtgtgtgcagtgcaggaacagagcatcttcctggaactgcccatcacattcccattctgctgcagcactgaaaacgctgttgcacaagcactgctctcaccactgttgtttttctgctcttttcctgtgcaggtgattacatcctggtggttcaagtgtcaaaccagtttgagaacctcacctgcttgaccccagtt

SEQ ID NO: 4553 - DNA, 600 bp, Chicken  19866894107597_1
attcccatccattcaacatatgttaaaatgattcattaaaaccatttatttggaagaacagaagttcatctctcaaaaaaggaaaaagctcctccatctattctatagcagtcctgtttaaatatttaatctgcatttgggcatgctttatttttgttctctccatccttgtgcctggaaagagttggttttcatcttgctttcatttatggtgacaatcaagaaataccagtttggaggaagaaaagcactgctcttctcataagtgccttctcataaggcacgtgccctgtgcctgtyaaaaaaaaaaaaaaaaaaaagtgttcctccaggaatgaatcataacagttttttaaacaaagtagtaaaattatcaacaaatccatagacctacagttatttccttctgatactgcttttcccagagctgtaacccattctttctgtataagaaattaaaacacattttaatagggaaattttcccaccaataaaggaagtaaaggaaatcagcagaactcacaagtcacattaatttacaaggaggatatgaaccaaaataccctgcagaaagcctcactgtataaagtaaaggtcaat

SEQ ID NO: 4554 - DNA, 599 bp, Chicken  19866894107601_1
  misc_feature (1)..(41): n is any nucleotide
nnnnnnnnnnnnnnnnnnnnnnnnnnnnnnnnnnnnnnnnnaatattggttttagaaaaatgttctgatatgactattttattcaagatttaaaacccataaaaaaaaaaagaacttaggcctttattcaggaacaccagatgaaagctctaagtaaggctggacttagccaaaacactttcatgcctttagaaatggagagtgggagtactgtttggattgcctttggaagatagatcataagcacaaatgtcaaaaaaggcagctaggcaagcaacaacaactgcattccatcagaayacatcagagacgggtcctccataattggagaatattcaaggaattatggggaataaaataagaccatgtgagtagaaagactttgctgctttagttaagtgctctctatattatctcctgtctagagggactgaacgctggctcccattactgtggcaactaaaatacagataggccttcaactcttcacaagcttgatcttgatcttgccaaacaagaaacatgacagatttccatcaaggatctctggctttgatgttatactacgactctaccaagctcagtttatggtctttctk

SEQ ID NO: 4555 - DNA, 585 bp, Chicken  19866894107601_2
yacatcagagacgggtcctccataattggagaatattcaaggaattatggggaataaaataagaccatgtgagtagaaagactttgctgctttagttaagtgctctctatattatctcctgtctagagggactgaacgctggctcccattactgtggcaactaaaatacagataggccttcaactcttcacaagcttgatcttgatcttgccaaacaagaaacatgacagatttccatcaaggatctctggctttgatgttatactacgactctaccaagctcagtttatggtctttctktgtctgatgcaaattagtttttttttttttcccatgtttgacatgcataattcctatcctatttgtattctttttcattaaatttactcgttacctcttcagaaaacacaacagctggactgtgattccttactgttcaagtcatgctgtccttaaaacatttactaagaatctagagctggcagcaataaacaccgaataatcaaagtacaggattatctctgaagcagtgaaataagtttaaccctatgtaaaaagtaaggatatataaaagactagcattat

SEQ ID NO: 4556 - DNA, 599 bp, Chicken  19866894107603_1
  misc_feature (1)..(89): n is any nucleotide
nnnnnnnnnnnnnnnnnnnnnnnnnnnnnnnnnnnnnnnnnnnnnnnnnnnnnnnnnnnnnnnnnnnnnnnnnnnnnnnnnnnnnnnnnttagtttatttttatgaataataataataataaaaaggcctaatttctatggcttcagtgtggcacagatgacaaaatgaaaataatcttcctgtgtatcagcagctgggcaagaacacaatttttttcatctatcaaccaaaactgagaccccatcataacctagtagcaatgttaaggccaacatagactcttctagtggaatctcatwactaattagcatacacttgagaaacatgaagccattagcagctgaaaaaattattaattgcattggatatcatgtccttataagcaacaacaataacaaaagagagtttttggagcttagtcctaacaaagtrcaataatttaaagctctttgacatgcttaatctcartctattctttcttcttgagtttctattcttactcttgccaggctttaaaaataattgccaggatgaatttatacaattgccaggtaagggaaataaggaagtgatttttaatgcttgtgggactgctggt

SEQ ID NO: 4557 - DNA, 600 bp, Chicken  19866894107603_2
ttctatggcttcagtgtggcacagatgacaaaatgaaaataatcttcctgtgtatcagcagctgggcaagaacacaatttttttcatctatcaaccaaaactgagaccccatcataacctagtagcaatgttaaggccaacatagactcttctagtggaatctcatwactaattagcatacacttgagaaacatgaagccattagcagctgaaaaaattattaattgcattggatatcatgtccttataagcaacaacaataacaaaagagagtttttggagcttagtcctaacaaagtrcaataatttaaagctctttgacatgcttaatctcartctattctttcttcttgagtttctattcttactcttgccaggctttaaaaataattgccaggatgaatttatacaattgccaggtaagggaaataaggaagtgatttttaatgcttgtgggactgctggttagttgttaagggttttcttgttctgtggttttgatggaataatgctataaagtacagcaagccagggtctgagaagtaaaaccacartgatggattcatcttttcttatagtacagtaacatgtcatttgaga

SEQ ID NO: 4558 - DNA, 600 bp, Chicken  19866894107603_3
aaataatcttcctgtgtatcagcagctgggcaagaacacaatttttttcatctatcaaccaaaactgagaccccatcataacctagtagcaatgttaaggccaacatagactcttctagtggaatctcatwactaattagcatacacttgagaaacatgaagccattagcagctgaaaaaattattaattgcattggatatcatgtccttataagcaacaacaataacaaaagagagtttttggagcttagtcctaacaaagtrcaataatttaaagctctttgacatgcttaatctcartctattctttcttcttgagtttctattcttactcttgccaggctttaaaaataattgccaggatgaatttatacaattgccaggtaagggaaataaggaagtgatttttaatgcttgtgggactgctggttagttgttaagggttttcttgttctgtggttttgatggaataatgctataaagtacagcaagccagggtctgagaagtaaaaccacartgatggattcatcttttcttatagtacagtaacatgtcatttgagatggaactgttaatgctgtgatttccctggagatgaa

SEQ ID NO: 4559 - DNA, 600 bp, Chicken  19866894107603_4
caacaataacaaaagagagtttttggagcttagtcctaacaaagtrcaataatttaaagctctttgacatgcttaatctcartctattctttcttcttgagtttctattcttactcttgccaggctttaaaaataattgccaggatgaatttatacaattgccaggtaagggaaataaggaagtgatttttaatgcttgtgggactgctggttagttgttaagggttttcttgttctgtggttttgatggaataatgctataaagtacagcaagccagggtctgagaagtaaaaccacartgatggattcatcttttcttatagtacagtaacatgtcatttgagatggaactgttaatgctgtgatttccctggagatgaatgacttggctgcattcttttcatttgccacaaaagagactcctttactgaaggaaccaagacaatttgataaatgggctataaaaatgcttttaagtttaaatggcacatatttggatagcacttcttgtgcacaagaggctttgccaaatagcaaaagacagatggaagtgaatgttcttaaagttcagttactccatayaaaagaaaaagaatgga

(The sequence listing continues in the following parts.)

1-208. (canceled)

209. A method for inferring a trait of a non-beef subject from a nucleic acid sample of the non-beef subject, the method comprising identifying in the nucleic acid sample at least one nucleotide occurrence of at least one single nucleotide polymorphism (SNP) corresponding to the nucleotide at position 600 of any one of SEQ ID NOs:1-96,631, or the complement thereof, thereby identifying a trait of the non-beef subject.

210. The method of claim 209, wherein the nucleotide occurrence of at least 2 SNPs is determined.

211. The method of claim 210, wherein the at least 2 SNPs comprise a haploytpe, wherein the method identifies a haplotype allele that is associated with the trait.

212. The method of claim 211, comprising identifying a diploid pair of haplotype alleles.

213. The method of claim 209, wherein the non-beef livestock subject is an avian species.

214. The method of claim 213, wherein the avian species is a chicken or a turkey.

215. The method of claim 213, wherein the trait is egg production, feed efficiency, livability, meat yield, white meat yield, dark meat yield, disease resistance, disease susceptibility, optimal diet time to maturity, time to a target weight, weight at a target timepoint, average daily weight gain, meat quality, muscle content, fat content, feed intake, protein content, bone content, maintenance energy requirement, mature size, amino acid profile, fatty acid profile, stress susceptibility and response, digestive capacity, production of calpain, calpastatin activity and myostatin activity, pattern of fat deposition, fertility, ovulation rate, or conception rate.

216. The method of claim 213, wherein the trait is resistance to Salmonella infection, ascites, and listeria infection.

217. The method of claim 213, wherein the avian species is a species that produces eggs for mammalian consumption.

218. The method of claim 214, wherein the avian species is a chicken.

219. The method of claim 218, wherein the trait is a characteristic of an egg of the avian species or a characteristic of a product of the egg.

220. The method of claim 219, wherein the egg characteristic is quality, size, shelf life, freshness, cholesterol content, color, biotin content, calcium content, shell quality, yolk color, lecithin content, number of yolks, yolk content, white content, vitamin content, vitamin D content, nutrient density, protein content, albumen content, protein quality, avidin content, fat content, saturated fat content, unsaturated fat content, interior egg quality, number of blood spots, air cell size, grade, a bloom characteristic, chalaza prevalence or appearance, ease of peeling, likelihood of being a restricted egg, Salmonella content.

221. The method of claim 209, wherein the sample is isolated from a tissue or a bodily fluid.

222. The method of claim 209, wherein the target nucleic acid molecule is a DNA molecule.

223. The method of claim 222, wherein the DNA molecule is genomic DNA.

224. The method of claim 222, wherein the DNA molecule is double-stranded DNA.

225. The method of claim 222, wherein the DNA molecule is single-stranded DNA.

226. The method of claim 209, wherein the nucleic acid molecule is an RNA molecule.

227. A method for identifying the parentage of a non-beef test subject, the method comprising:
a) obtaining a nucleic acid sample from the test subject by a method comprising identifying in the nucleic acid sample at least one single nucleotide polymorphism (SNP) corresponding to the nucleotide at position 600 of any one of SEQ ID NOs:1-96,631, or the complement thereof;
b) optionally repeating a) for additional subjects;
c) determining the alleles corresponding to each SNP identified; and
d) comparing the alleles to putative parents of the test subject
wherein parents not possessing at least one allele in common with the test subject is excluded.

228. A method for determining the identity of a non-beef test subject, the method comprising:
a) obtaining a nucleic acid sample from the test subject by a method comprising identifying in the nucleic acid sample at least one single nucleotide polymorphism (SNP) corresponding to the nucleotide at position 600 of any one of SEQ ID NOs:1-96,631, or the complement thereof;
b) optionally repeating a) for additional subjects;
c) determining the two alleles corresponding to each SNP identified; and
d) comparing the alleles to the alleles identified in a known sample previously obtained from the test subject.

229. A method to infer breed or line of a non-beef test subject from a nucleic acid sample obtained from the subject, comprising identifying in the nucleic acid sample, at least one nucleotide occurrence of at least one single nucleotide polymorphism (SNP) corresponding to the nucleotide at position 600 of any one of SEQ ID NOS:1-96,631, wherein the SNP is associated with a breed, thereby inferring the breed of the non-beef subject.

230. A method of generating a genome discovery map comprising:
a) selecting a plurality of single nucleotide polymorphism (SNP) markers selected from at least two of the SNP markers at position 600 of any of SEQ ID NOs:1-96,631, wherein each marker in the series will be separated by approximately 150,000 bp; and
b) generating the genome discovery map based upon the selected markers.

231. The method of claim 230, wherein the genome discovery map is a whole genome discovery map.

232. The method of claim 230, wherein the plurality of single nucleotide polymorphism (SNP) markers includes about 10 markers.

233. The method of claim 230, wherein the plurality of single nucleotide polymorphism (SNP) markers includes about 100 markers.

234. The method of claim 230, wherein the plurality of single nucleotide polymorphism (SNP) markers includes about 1000 markers.

235. The method of claim 230, wherein the plurality of single nucleotide polymorphism (SNP) markers includes about 8000 markers.

236. The method of claim 230, wherein the plurality of single nucleotide polymorphism (SNP) markers includes about 10000 markers.

237. The method of claim 228, wherein the non-beef livestock subject is a avian species.

238. The method of claim 237, wherein the avian species is a chicken or a turkey.

239. The method of claim 238, wherein the avian species is a chicken.

240. The method of claim 230, wherein the plurality of single nucleotide polymorphism (SNP) markers, or the number of markers indicated by the amount of linkage disequilibrium in each non-beef species, are further selected based upon dispersion across the entire genome.

241. (canceled)

242. (canceled)

243. A database comprising a plurality of single nucleotide polymorphisms (SNP) selected from at least two of the SNP markers at position 600 of any of SEQ ID NOs:1-96,631, or complement thereof.

244. A database comprising the alleles frequencies generated by analyzing the database of claim 243.

245. An isolated single nucleotide polymorphism (SNP) corresponding to a nucleotide at position 600 of any one of SEQ ID NOs:1-96,631, or the complement thereof.

246-249. (canceled)

250. A panel comprising at least one single nucleotide polymorphism (SNP) corresponding to a nucleotide at position 600 of any one of SEQ ID NOs:1-96,631, or the complement thereof.

251. (canceled)
